United States Patent Application Publication US 2018/0305689 A1 - sequence listing, part 34

SEQ ID NO: 463381 - RNA, 19 nt, Artificial Sequence
  Description of Artificial Sequence: Synthetic oligonucleotide
  Sense strand starting at position 3514 of SEQ ID NO: 317085
ccauuaagauuaggauacu

SEQ ID NO: 463382 - RNA, 19 nt, Artificial Sequence
  Description of Artificial Sequence: Synthetic oligonucleotide
  Antisense Strand to SEQ ID NO: 463381
aguauccuaaucuuaaugg

SEQ ID NO: 463383 - RNA, 19 nt, Artificial Sequence
  Description of Artificial Sequence: Synthetic oligonucleotide
  Sense strand starting at position 3727 of SEQ ID NO: 317085
cgcaaagucgccuaacgau

SEQ ID NO: 463384 - RNA, 19 nt, Artificial Sequence
  Description of Artificial Sequence: Synthetic oligonucleotide
  Antisense Strand to SEQ ID NO: 463383
aucguuaggcgacuuugcg

SEQ ID NO: 463385 - RNA, 19 nt, Artificial Sequence
  Description of Artificial Sequence: Synthetic oligonucleotide
  Sense strand starting at position 3742 of SEQ ID NO: 317085
cgaugcauuucugagaguu

SEQ ID NO: 463386 - RNA, 19 nt, Artificial Sequence
  Description of Artificial Sequence: Synthetic oligonucleotide
  Antisense Strand to SEQ ID NO: 463385
aacucucagaaaugcaucg

SEQ ID NO: 463387 - RNA, 19 nt, Artificial Sequence
  Description of Artificial Sequence: Synthetic oligonucleotide
  Sense strand starting at position 3764 of SEQ ID NO: 317085
ccauguaagugacacauga

SEQ ID NO: 463388 - RNA, 19 nt, Artificial Sequence
  Description of Artificial Sequence: Synthetic oligonucleotide
  Antisense Strand to SEQ ID NO: 463387
ucaugugucacuuacaugg

SEQ ID NO: 463389 - RNA, 19 nt, Artificial Sequence
  Description of Artificial Sequence: Synthetic oligonucleotide
  Sense strand starting at position 3782 of SEQ ID NO: 317085
accguaucugcacagguaa

SEQ ID NO: 463390 - RNA, 19 nt, Artificial Sequence
  Description of Artificial Sequence: Synthetic oligonucleotide
  Antisense Strand to SEQ ID NO: 463389
uuaccugugcagauacggu

SEQ ID NO: 463391 - RNA, 19 nt, Artificial Sequence
  Description of Artificial Sequence: Synthetic oligonucleotide
  Sense strand starting at position 3915 of SEQ ID NO: 317085
gaagauguccuccagguag

SEQ ID NO: 463392 - RNA, 19 nt, Artificial Sequence
  Description of Artificial Sequence: Synthetic oligonucleotide
  Antisense Strand to SEQ ID NO: 463391
cuaccuggaggacaucuuc

SEQ ID NO: 463393 - RNA, 19 nt, Artificial Sequence
  Description of Artificial Sequence: Synthetic oligonucleotide
  Sense strand starting at position 3968 of SEQ ID NO: 317085
acaagaaagucagaggaua

SEQ ID NO: 463394 - RNA, 19 nt, Artificial Sequence
  Description of Artificial Sequence: Synthetic oligonucleotide
  Antisense Strand to SEQ ID NO: 463393
uauccucugacuuucuugu

SEQ ID NO: 463395 - RNA, 19 nt, Artificial Sequence
  Description of Artificial Sequence: Synthetic oligonucleotide
  Sense strand starting at position 296 of SEQ ID NO: 317086
cugcgacagcaucaauauu

SEQ ID NO: 463396 - RNA, 19 nt, Artificial Sequence
  Description of Artificial Sequence: Synthetic oligonucleotide
  Antisense Strand to SEQ ID NO: 463395
aauauugaugcugucgcag

SEQ ID NO: 463397 - RNA, 19 nt, Artificial Sequence
  Description of Artificial Sequence: Synthetic oligonucleotide
  Sense strand starting at position 304 of SEQ ID NO: 317086
gcaucaauauuuccacgca

SEQ ID NO: 463398 - RNA, 19 nt, Artificial Sequence
  Description of Artificial Sequence: Synthetic oligonucleotide
  Antisense Strand to SEQ ID NO: 463397
ugcguggaaauauugaugc

SEQ ID NO: 463399 - RNA, 19 nt, Artificial Sequence
  Description of Artificial Sequence: Synthetic oligonucleotide
  Sense strand starting at position 450 of SEQ ID NO: 317086
ucaaaucgguaucuuaaga

SEQ ID NO: 463400 - RNA, 19 nt, Artificial Sequence
  Description of Artificial Sequence: Synthetic oligonucleotide
  Antisense Strand to SEQ ID NO: 463399
ucuuaagauaccgauuuga

SEQ ID NO: 463401 - RNA, 19 nt, Artificial Sequence
  Description of Artificial Sequence: Synthetic oligonucleotide
  Sense strand starting at position 580 of SEQ ID NO: 317086
ugacaacccugacagauua

SEQ ID NO: 463402 - RNA, 19 nt, Artificial Sequence
  Description of Artificial Sequence: Synthetic oligonucleotide
  Antisense Strand to SEQ ID NO: 463401
uaaucugucaggguuguca

SEQ ID NO: 463403 - RNA, 19 nt, Artificial Sequence
  Description of Artificial Sequence: Synthetic oligonucleotide
  Sense strand starting at position 639 of SEQ ID NO: 317086
gacguuaacccuuaggcuu

SEQ ID NO: 463404 - RNA, 19 nt, Artificial Sequence
  Description of Artificial Sequence: Synthetic oligonucleotide
  Antisense Strand to SEQ ID NO: 463403
aagccuaaggguuaacguc

SEQ ID NO: 463405 - RNA, 19 nt, Artificial Sequence
  Description of Artificial Sequence: Synthetic oligonucleotide
  Sense strand starting at position 1126 of SEQ ID NO: 317086
gggaguacuauugggagua

SEQ ID NO: 463406 - RNA, 19 nt, Artificial Sequence
  Description of Artificial Sequence: Synthetic oligonucleotide
  Antisense Strand to SEQ ID NO: 463405
uacucccaauaguacuccc

SEQ ID NO: 463407 - RNA, 19 nt, Artificial Sequence
  Description of Artificial Sequence: Synthetic oligonucleotide
  Sense strand starting at position 1475 of SEQ ID NO: 317086
gggaacguuaucggaauac

SEQ ID NO: 463408 - RNA, 19 nt, Artificial Sequence
  Description of Artificial Sequence: Synthetic oligonucleotide
  Antisense Strand to SEQ ID NO: 463407
guauuccgauaacguuccc

SEQ ID NO: 463409 - RNA, 19 nt, Artificial Sequence
  Description of Artificial Sequence: Synthetic oligonucleotide
  Sense strand starting at position 1479 of SEQ ID NO: 317086
acguuaucggaauaccauc

SEQ ID NO: 463410 - RNA, 19 nt, Artificial Sequence
  Description of Artificial Sequence: Synthetic oligonucleotide
  Antisense Strand to SEQ ID NO: 463409
gaugguauuccgauaacgu

SEQ ID NO: 463411 - RNA, 19 nt, Artificial Sequence
  Description of Artificial Sequence: Synthetic oligonucleotide
  Sense strand starting at position 1608 of SEQ ID NO: 317086
ucuaauaaauuccaggaga

SEQ ID NO: 463412 - RNA, 19 nt, Artificial Sequence
  Description of Artificial Sequence: Synthetic oligonucleotide
  Antisense Strand to SEQ ID NO: 463411
ucuccuggaauuuauuaga

SEQ ID NO: 463413 - RNA, 19 nt, Artificial Sequence
  Description of Artificial Sequence: Synthetic oligonucleotide
  Sense strand starting at position 1916 of SEQ ID NO: 317086
aaaguagaucggugaaguc

SEQ ID NO: 463414 - RNA, 19 nt, Artificial Sequence
  Description of Artificial Sequence: Synthetic oligonucleotide
  Antisense Strand to SEQ ID NO: 463413
gacuucaccgaucuacuuu

SEQ ID NO: 463415 - RNA, 19 nt, Artificial Sequence
  Description of Artificial Sequence: Synthetic oligonucleotide
  Sense strand starting at position 2455 of SEQ ID NO: 317086
cugguaggguuuccuuauu

SEQ ID NO: 463416 - RNA, 19 nt, Artificial Sequence
  Description of Artificial Sequence: Synthetic oligonucleotide
  Antisense Strand to SEQ ID NO: 463415
aauaaggaaacccuaccag

SEQ ID NO: 463417 - RNA, 19 nt, Artificial Sequence
  Description of Artificial Sequence: Synthetic oligonucleotide
  Sense strand starting at position 2466 of SEQ ID NO: 317086
uccuuauuccaaggaaagu

SEQ ID NO: 463418 - RNA, 19 nt, Artificial Sequence
  Description of Artificial Sequence: Synthetic oligonucleotide
  Antisense Strand to SEQ ID NO: 463417
acuuuccuuggaauaagga

SEQ ID NO: 463419 - RNA, 19 nt, Artificial Sequence
  Description of Artificial Sequence: Synthetic oligonucleotide
  Sense strand starting at position 2492 of SEQ ID NO: 317086
gaucccaaguuguuguuau

SEQ ID NO: 463420 - RNA, 19 nt, Artificial Sequence
  Description of Artificial Sequence: Synthetic oligonucleotide
  Antisense Strand to SEQ ID NO: 463419
auaacaacaacuugggauc

SEQ ID NO: 463421 - RNA, 19 nt, Artificial Sequence
  Description of Artificial Sequence: Synthetic oligonucleotide
  Sense strand starting at position 2577 of SEQ ID NO: 317086
gucugucaucccuauccau

SEQ ID NO: 463422 - RNA, 19 nt, Artificial Sequence
  Description of Artificial Sequence: Synthetic oligonucleotide
  Antisense Strand to SEQ ID NO: 463421
auggauagggaugacagac

SEQ ID NO: 463423 - RNA, 19 nt, Artificial Sequence
  Description of Artificial Sequence: Synthetic oligonucleotide
  Sense strand starting at position 2610 of SEQ ID NO: 317086
gcaaaugagugacuuguuu

SEQ ID NO: 463424 - RNA, 19 nt, Artificial Sequence
  Description of Artificial Sequence: Synthetic oligonucleotide
  Antisense Strand to SEQ ID NO: 463423
aaacaagucacucauuugc

SEQ ID NO: 463425 - RNA, 19 nt, Artificial Sequence
  Description of Artificial Sequence: Synthetic oligonucleotide
  Sense strand starting at position 2643 of SEQ ID NO: 317086
auaagucugcgcuaguaac

SEQ ID NO: 463426 - RNA, 19 nt, Artificial Sequence
  Description of Artificial Sequence: Synthetic oligonucleotide
  Antisense Strand to SEQ ID NO: 463425
guuacuagcgcagacuuau

SEQ ID NO: 463427 - RNA, 19 nt, Artificial Sequence
  Description of Artificial Sequence: Synthetic oligonucleotide
  Sense strand starting at position 2771 of SEQ ID NO: 317086
guacauaaugauuguuguu

SEQ ID NO: 463428 - RNA, 19 nt, Artificial Sequence
  Description of Artificial Sequence: Synthetic oligonucleotide
  Antisense Strand to SEQ ID NO: 463427
aacaacaaucauuauguac

SEQ ID NO: 463429 - RNA, 19 nt, Artificial Sequence
  Description of Artificial Sequence: Synthetic oligonucleotide
  Sense strand starting at position 2895 of SEQ ID NO: 317086
ugcuaaugacagcaguaau

SEQ ID NO: 463430 - RNA, 19 nt, Artificial Sequence
  Description of Artificial Sequence: Synthetic oligonucleotide
  Antisense Strand to SEQ ID NO: 463429
auuacugcugucauuagca

SEQ ID NO: 463431 - RNA, 19 nt, Artificial Sequence
  Description of Artificial Sequence: Synthetic oligonucleotide
  Sense strand starting at position 2910 of SEQ ID NO: 317086
uaauuaagguccuucguaa

SEQ ID NO: 463432 - RNA, 19 nt, Artificial Sequence
  Description of Artificial Sequence: Synthetic oligonucleotide
  Antisense Strand to SEQ ID NO: 463431
uuacgaaggaccuuaauua

SEQ ID NO: 463433 - RNA, 19 nt, Artificial Sequence
  Description of Artificial Sequence: Synthetic oligonucleotide
  Sense strand starting at position 2923 of SEQ ID NO: 317086
ucguaaaucaaguggaaag

SEQ ID NO: 463434 - RNA, 19 nt, Artificial Sequence
  Description of Artificial Sequence: Synthetic oligonucleotide
  Antisense Strand to SEQ ID NO: 463433
cuuuccacuugauuuacga

SEQ ID NO: 463435 - RNA, 19 nt, Artificial Sequence
  Description of Artificial Sequence: Synthetic oligonucleotide
  Sense strand starting at position 2924 of SEQ ID NO: 317086
cguaaaucaaguggaaaga

SEQ ID NO: 463436 - RNA, 19 nt, Artificial Sequence
  Description of Artificial Sequence: Synthetic oligonucleotide
  Antisense Strand to SEQ ID NO: 463435
ucuuuccacuugauuuacg

SEQ ID NO: 463437 - RNA, 19 nt, Artificial Sequence
  Description of Artificial Sequence: Synthetic oligonucleotide
  Sense strand starting at position 2934 of SEQ ID NO: 317086
guggaaagauugcagauuu

SEQ ID NO: 463438 - RNA, 19 nt, Artificial Sequence
  Description of Artificial Sequence: Synthetic oligonucleotide
  Antisense Strand to SEQ ID NO: 463437
aaaucugcaaucuuuccac

SEQ ID NO: 463439 - RNA, 19 nt, Artificial Sequence
  Description of Artificial Sequence: Synthetic oligonucleotide
  Sense strand starting at position 2988 of SEQ ID NO: 317086
acaguuugucaugaccaaa

SEQ ID NO: 463440 - RNA, 19 nt, Artificial Sequence
  Description of Artificial Sequence: Synthetic oligonucleotide
  Antisense Strand to SEQ ID NO: 463439
uuuggucaugacaaacugu

SEQ ID NO: 463441 - RNA, 19 nt, Artificial Sequence
  Description of Artificial Sequence: Synthetic oligonucleotide
  Sense strand starting at position 3031 of SEQ ID NO: 317086
ccuacuuuauugcuggaua

SEQ ID NO: 463442 - RNA, 19 nt, Artificial Sequence
  Description of Artificial Sequence: Synthetic oligonucleotide
  Antisense Strand to SEQ ID NO: 463441
uauccagcaauaaaguagg

SEQ ID NO: 463443 - RNA, 19 nt, Artificial Sequence
  Description of Artificial Sequence: Synthetic oligonucleotide
  Sense strand starting at position 3034 of SEQ ID NO: 317086
acuuuauugcuggauauau

SEQ ID NO: 463444 - RNA, 19 nt, Artificial Sequence
  Description of Artificial Sequence: Synthetic oligonucleotide
  Antisense Strand to SEQ ID NO: 463443
auauauccagcaauaaagu

SEQ ID NO: 463445 - RNA, 19 nt, Artificial Sequence
  Description of Artificial Sequence: Synthetic oligonucleotide
  Sense strand starting at position 3285 of SEQ ID NO: 317086
uauaaaucuugauugugag

SEQ ID NO: 463446 - RNA, 19 nt, Artificial Sequence
  Description of Artificial Sequence: Synthetic oligonucleotide
  Antisense Strand to SEQ ID NO: 463445
cucacaaucaagauuuaua

SEQ ID NO: 463447 - RNA, 19 nt, Artificial Sequence
  Description of Artificial Sequence: Synthetic oligonucleotide
  Sense strand starting at position 3286 of SEQ ID NO: 317086
auaaaucuugauugugaga

SEQ ID NO: 463448 - RNA, 19 nt, Artificial Sequence
  Description of Artificial Sequence: Synthetic oligonucleotide
  Antisense Strand to SEQ ID NO: 463447
ucucacaaucaagauuuau

SEQ ID NO: 463449 - RNA, 19 nt, Artificial Sequence
  Description of Artificial Sequence: Synthetic oligonucleotide
  Sense strand starting at position 3293 of SEQ ID NO: 317086
uugauugugagauguuaau

SEQ ID NO: 463450 - RNA, 19 nt, Artificial Sequence
  Description of Artificial Sequence: Synthetic oligonucleotide
  Antisense Strand to SEQ ID NO: 463449
auuaacaucucacaaucaa

SEQ ID NO: 463451 - RNA, 19 nt, Artificial Sequence
  Description of Artificial Sequence: Synthetic oligonucleotide
  Sense strand starting at position 3299 of SEQ ID NO: 317086
gugagauguuaauuauaag

SEQ ID NO: 463452 - RNA, 19 nt, Artificial Sequence
  Description of Artificial Sequence: Synthetic oligonucleotide
  Antisense Strand to SEQ ID NO: 463451
cuuauaauuaacaucucac

SEQ ID NO: 463453 - RNA, 19 nt, Artificial Sequence
  Description of Artificial Sequence: Synthetic oligonucleotide
  Sense strand starting at position 3419 of SEQ ID NO: 317086
ugcauuagucaugagaucu

SEQ ID NO: 463454 - RNA, 19 nt, Artificial Sequence
  Description of Artificial Sequence: Synthetic oligonucleotide
  Antisense Strand to SEQ ID NO: 463453
agaucucaugacuaaugca

SEQ ID NO: 463455 - RNA, 19 nt, Artificial Sequence
  Description of Artificial Sequence: Synthetic oligonucleotide
  Sense strand starting at position 3454 of SEQ ID NO: 317086
auuucuuggcauugcagau

SEQ ID NO: 463456 - RNA, 19 nt, Artificial Sequence
  Description of Artificial Sequence: Synthetic oligonucleotide
  Antisense Strand to SEQ ID NO: 463455
aucugcaaugccaagaaau

SEQ ID NO: 463457 - RNA, 19 nt, Artificial Sequence
  Description of Artificial Sequence: Synthetic oligonucleotide
  Sense strand starting at position 3496 of SEQ ID NO: 317086
cucauaaugucagcgauaa

SEQ ID NO: 463458 - RNA, 19 nt, Artificial Sequence
  Description of Artificial Sequence: Synthetic oligonucleotide
  Antisense Strand to SEQ ID NO: 463457
uuaucgcugacauuaugag

SEQ ID NO: 463459 - RNA, 19 nt, Artificial Sequence
  Description of Artificial Sequence: Synthetic oligonucleotide
  Sense strand starting at position 3497 of SEQ ID NO: 317086
ucauaaugucagcgauaag

SEQ ID NO: 463460 - RNA, 19 nt, Artificial Sequence
  Description of Artificial Sequence: Synthetic oligonucleotide
  Antisense Strand to SEQ ID NO: 463459
cuuaucgcugacauuauga

SEQ ID NO: 463461 - RNA, 19 nt, Artificial Sequence
  Description of Artificial Sequence: Synthetic oligonucleotide
  Sense strand starting at position 3500 of SEQ ID NO: 317086
uaaugucagcgauaagaag

SEQ ID NO: 463462 - RNA, 19 nt, Artificial Sequence
  Description of Artificial Sequence: Synthetic oligonucleotide
  Antisense Strand to SEQ ID NO: 463461
cuucuuaucgcugacauua

SEQ ID NO: 463463 - RNA, 19 nt, Artificial Sequence
  Description of Artificial Sequence: Synthetic oligonucleotide
  Sense strand starting at position 3542 of SEQ ID NO: 317086
guucuauauagugaacgau

SEQ ID NO: 463464 - RNA, 19 nt, Artificial Sequence
  Description of Artificial Sequence: Synthetic oligonucleotide
  Antisense Strand to SEQ ID NO: 463463
aucguucacuauauagaac

SEQ ID NO: 463465 - RNA, 19 nt, Artificial Sequence
  Description of Artificial Sequence: Synthetic oligonucleotide
  Sense strand starting at position 3545 of SEQ ID NO: 317086
cuauauagugaacgauauu

SEQ ID NO: 463466 - RNA, 19 nt, Artificial Sequence
  Description of Artificial Sequence: Synthetic oligonucleotide
  Antisense Strand to SEQ ID NO: 463465
aauaucguucacuauauag

SEQ ID NO: 463467 - RNA, 19 nt, Artificial Sequence
  Description of Artificial Sequence: Synthetic oligonucleotide
  Sense strand starting at position 3621 of SEQ ID NO: 317086
ggcuacuucuaagcaguaa

SEQ ID NO: 463468 - RNA, 19 nt, Artificial Sequence
  Description of Artificial Sequence: Synthetic oligonucleotide
  Antisense Strand to SEQ ID NO: 463467
uuacugcuuagaaguagcc

SEQ ID NO: 463469 - RNA, 19 nt, Artificial Sequence
  Description of Artificial Sequence: Synthetic oligonucleotide
  Sense strand starting at position 3644 of SEQ ID NO: 317086
aacuuaagagaguguauau

SEQ ID NO: 463470 - RNA, 19 nt, Artificial Sequence
  Description of Artificial Sequence: Synthetic oligonucleotide
  Antisense Strand to SEQ ID NO: 463469
auauacacucucuuaaguu

SEQ ID NO: 463471 - RNA, 19 nt, Artificial Sequence
  Description of Artificial Sequence: Synthetic oligonucleotide
  Sense strand starting at position 3762 of SEQ ID NO: 317086
uggacuacgucuguagcaa

SEQ ID NO: 463472 - RNA, 19 nt, Artificial Sequence
  Description of Artificial Sequence: Synthetic oligonucleotide
  Antisense Strand to SEQ ID NO: 463471
uugcuacagacguagucca

SEQ ID NO: 463473 - RNA, 19 nt, Artificial Sequence
  Description of Artificial Sequence: Synthetic oligonucleotide
  Sense strand starting at position 3763 of SEQ ID NO: 317086
ggacuacgucuguagcaaa

SEQ ID NO: 463474 - RNA, 19 nt, Artificial Sequence
  Description of Artificial Sequence: Synthetic oligonucleotide
  Antisense Strand to SEQ ID NO: 463473
uuugcuacagacguagucc

SEQ ID NO: 463475 - RNA, 19 nt, Artificial Sequence
  Description of Artificial Sequence: Synthetic oligonucleotide
  Sense strand starting at position 278 of SEQ ID NO: 317087
ggaacucaccgugaaccuu

SEQ ID NO: 463476 - RNA, 19 nt, Artificial Sequence
  Description of Artificial Sequence: Synthetic oligonucleotide
  Antisense Strand to SEQ ID NO: 463475
aagguucacggugaguucc

SEQ ID NO: 463477 - RNA, 19 nt, Artificial Sequence
  Description of Artificial Sequence: Synthetic oligonucleotide
  Sense strand starting at position 284 of SEQ ID NO: 317087
caccgugaaccuugaucua

SEQ ID NO: 463478 - RNA, 19 nt, Artificial Sequence
  Description of Artificial Sequence: Synthetic oligonucleotide
  Antisense Strand to SEQ ID NO: 463477
uagaucaagguucacggug

SEQ ID NO: 463479 - RNA, 19 nt, Artificial Sequence
  Description of Artificial Sequence: Synthetic oligonucleotide
  Sense strand starting at position 287 of SEQ ID NO: 317087
cgugaaccuugaucuaaac

SEQ ID NO: 463480 - RNA, 19 nt, Artificial Sequence
  Description of Artificial Sequence: Synthetic oligonucleotide
  Antisense Strand to SEQ ID NO: 463479
guuuagaucaagguucacg

SEQ ID NO: 463481 - RNA, 19 nt, Artificial Sequence
  Description of Artificial Sequence: Synthetic oligonucleotide
  Sense strand starting at position 398 of SEQ ID NO: 317087
cugggucuuugccaggaua

SEQ ID NO: 463482 - RNA, 19 nt, Artificial Sequence
  Description of Artificial Sequence: Synthetic oligonucleotide
  Antisense Strand to SEQ ID NO: 463481
uauccuggcaaagacccag

SEQ ID NO: 463483 - RNA, 19 nt, Artificial Sequence
  Description of Artificial Sequence: Synthetic oligonucleotide
  Sense strand starting at position 400 of SEQ ID NO: 317087
gggucuuugccaggauacu

SEQ ID NO: 463484 - RNA, 19 nt, Artificial Sequence
  Description of Artificial Sequence: Synthetic oligonucleotide
  Antisense Strand to SEQ ID NO: 463483
aguauccuggcaaagaccc

SEQ ID NO: 463485 - RNA, 19 nt, Artificial Sequence
  Description of Artificial Sequence: Synthetic oligonucleotide
  Sense strand starting at position 890 of SEQ ID NO: 317087
gggccuugagugugcaauu

SEQ ID NO: 463486 - RNA, 19 nt, Artificial Sequence
  Description of Artificial Sequence: Synthetic oligonucleotide
  Antisense Strand to SEQ ID NO: 463485
aauugcacacucaaggccc

SEQ ID NO: 463487 - RNA, 19 nt, Artificial Sequence
  Description of Artificial Sequence: Synthetic oligonucleotide
  Sense strand starting at position 891 of SEQ ID NO: 317087
ggccuugagugugcaauuu

SEQ ID NO: 463488 - RNA, 19 nt, Artificial Sequence
  Description of Artificial Sequence: Synthetic oligonucleotide
  Antisense Strand to SEQ ID NO: 463487
aaauugcacacucaaggcc

SEQ ID NO: 463489 - RNA, 19 nt, Artificial Sequence
  Description of Artificial Sequence: Synthetic oligonucleotide
  Sense strand starting at position 947 of SEQ ID NO: 317087
acaggaaagucuuaggccu

SEQ ID NO: 463490 - RNA, 19 nt, Artificial Sequence
  Description of Artificial Sequence: Synthetic oligonucleotide
  Antisense Strand to SEQ ID NO: 463489
aggccuaagacuuuccugu

SEQ ID NO: 463491 - RNA, 19 nt, Artificial Sequence
  Description of Artificial Sequence: Synthetic oligonucleotide
  Sense strand starting at position 1107 of SEQ ID NO: 317087
agcuguaguguguucccau

SEQ ID NO: 463492 - RNA, 19 nt, Artificial Sequence
  Description of Artificial Sequence: Synthetic oligonucleotide
  Antisense Strand to SEQ ID NO: 463491
augggaacacacuacagcu

SEQ ID NO: 463493 - RNA, 19 nt, Artificial Sequence
  Description of Artificial Sequence: Synthetic oligonucleotide
  Sense strand starting at position 1108 of SEQ ID NO: 317087
gcuguaguguguucccauc

SEQ ID NO: 463494 - RNA, 19 nt, Artificial Sequence
  Description of Artificial Sequence: Synthetic oligonucleotide
  Antisense Strand to SEQ ID NO: 463493
gaugggaacacacuacagc

SEQ ID NO: 463495 - RNA, 19 nt, Artificial Sequence
  Description of Artificial Sequence: Synthetic oligonucleotide
  Sense strand starting at position 1207 of SEQ ID NO: 317087
gcaugaggguuauucccga

SEQ ID NO: 463496 - RNA, 19 nt, Artificial Sequence
  Description of Artificial Sequence: Synthetic oligonucleotide
  Antisense Strand to SEQ ID NO: 463495
ucgggaauaacccucaugc

SEQ ID NO: 463497 - RNA, 19 nt, Artificial Sequence
  Description of Artificial Sequence: Synthetic oligonucleotide
  Sense strand starting at position 1212 of SEQ ID NO: 317087
aggguuauucccgagcgac

SEQ ID NO: 463498 - RNA, 19 nt, Artificial Sequence
  Description of Artificial Sequence: Synthetic oligonucleotide
  Antisense Strand to SEQ ID NO: 463497
gucgcucgggaauaacccu

SEQ ID NO: 463499 - RNA, 19 nt, Artificial Sequence
  Description of Artificial Sequence: Synthetic oligonucleotide
  Sense strand starting at position 1213 of SEQ ID NO: 317087
ggguuauucccgagcgacc

SEQ ID NO: 463500 - RNA, 19 nt, Artificial Sequence
  Description of Artificial Sequence: Synthetic oligonucleotide
  Antisense Strand to SEQ ID NO: 463499
ggucgcucgggaauaaccc

SEQ ID NO: 463501 - RNA, 19 nt, Artificial Sequence
  Description of Artificial Sequence: Synthetic oligonucleotide
  Sense strand starting at position 1548 of SEQ ID NO: 317087
auggguuaccacugucaac

SEQ ID NO: 463502 - RNA, 19 nt, Artificial Sequence
  Description of Artificial Sequence: Synthetic oligonucleotide
  Antisense Strand to SEQ ID NO: 463501
guugacagugguaacccau

SEQ ID NO: 463503 - RNA, 19 nt, Artificial Sequence
  Description of Artificial Sequence: Synthetic oligonucleotide
  Sense strand starting at position 1653 of SEQ ID NO: 317087
aagugacuggcccgaaguu

SEQ ID NO: 463504 - RNA, 19 nt, Artificial Sequence
  Description of Artificial Sequence: Synthetic oligonucleotide
  Antisense Strand to SEQ ID NO: 463503
aacuucgggccagucacuu

SEQ ID NO: 463505 - RNA, 19 nt, Artificial Sequence
  Description of Artificial Sequence: Synthetic oligonucleotide
  Sense strand starting at position 1654 of SEQ ID NO: 317087
agugacuggcccgaaguua

SEQ ID NO: 463506 - RNA, 19 nt, Artificial Sequence
  Description of Artificial Sequence: Synthetic oligonucleotide
  Antisense Strand to SEQ ID NO: 463505
uaacuucgggccagucacu

SEQ ID NO: 463507 - RNA, 19 nt, Artificial Sequence
  Description of Artificial Sequence: Synthetic oligonucleotide
  Sense strand starting at position 2422 of SEQ ID NO: 317087
ccaggaaccuucccugaua

SEQ ID NO: 463508 - RNA, 19 nt, Artificial Sequence
  Description of Artificial Sequence: Synthetic oligonucleotide
  Antisense Strand to SEQ ID NO: 463507
uaucagggaagguuccugg

SEQ ID NO: 463509 - RNA, 19 nt, Artificial Sequence
  Description of Artificial Sequence: Synthetic oligonucleotide
  Sense strand starting at position 2424 of SEQ ID NO: 317087
aggaaccuucccugauaac

SEQ ID NO: 463510 - RNA, 19 nt, Artificial Sequence
  Description of Artificial Sequence: Synthetic oligonucleotide
  Antisense Strand to SEQ ID NO: 463509
guuaucagggaagguuccu

SEQ ID NO: 463511 - RNA, 19 nt, Artificial Sequence
  Description of Artificial Sequence: Synthetic oligonucleotide
  Sense strand starting at position 2856 of SEQ ID NO: 317087
guaacugacuuguccaaga

SEQ ID NO: 463512 - RNA, 19 nt, Artificial Sequence
  Description of Artificial Sequence: Synthetic oligonucleotide
  Antisense Strand to SEQ ID NO: 463511
ucuuggacaagucaguuac

SEQ ID NO: 463513 - RNA, 19 nt, Artificial Sequence
  Description of Artificial Sequence: Synthetic oligonucleotide
  Sense strand starting at position 2897 of SEQ ID NO: 317087
aagagaagcuuucuggguu

SEQ ID NO: 463514 - RNA, 19 nt, Artificial Sequence
  Description of Artificial Sequence: Synthetic oligonucleotide
  Antisense Strand to SEQ ID NO: 463513
aacccagaaagcuucucuu

SEQ ID NO: 463515 - RNA, 19 nt, Artificial Sequence
  Description of Artificial Sequence: Synthetic oligonucleotide
  Sense strand starting at position 2900 of SEQ ID NO: 317087
agaagcuuucuggguuacu

SEQ ID NO: 463516 - RNA, 19 nt, Artificial Sequence
  Description of Artificial Sequence: Synthetic oligonucleotide
  Antisense Strand to SEQ ID NO: 463515
aguaacccagaaagcuucu

SEQ ID NO: 463517 - RNA, 19 nt, Artificial Sequence
  Description of Artificial Sequence: Synthetic oligonucleotide
  Sense strand starting at position 2950 of SEQ ID NO: 317087
cgcugagccucagugaaau

SEQ ID NO: 463518 - RNA, 19 nt, Artificial Sequence
  Description of Artificial Sequence: Synthetic oligonucleotide
  Antisense Strand to SEQ ID NO: 463517
auuucacugaggcucagcg

SEQ ID NO: 463519 - RNA, 19 nt, Artificial Sequence
  Description of Artificial Sequence: Synthetic oligonucleotide
  Sense strand starting at position 2962 of SEQ ID NO: 317087
gugaaauggguccgauaga

SEQ ID NO: 463520 - RNA, 19 nt, Artificial Sequence
  Description of Artificial Sequence: Synthetic oligonucleotide
  Antisense Strand to SEQ ID NO: 463519
ucuaucggacccauuucac

SEQ ID NO: 463521 - RNA, 19 nt, Artificial Sequence
  Description of Artificial Sequence: Synthetic oligonucleotide
  Sense strand starting at position 2963 of SEQ ID NO: 317087
ugaaauggguccgauagag

SEQ ID NO: 463522 - RNA, 19 nt, Artificial Sequence
  Description of Artificial Sequence: Synthetic oligonucleotide
  Antisense Strand to SEQ ID NO: 463521
cucuaucggacccauuuca

SEQ ID NO: 463523 - RNA, 19 nt, Artificial Sequence
  Description of Artificial Sequence: Synthetic oligonucleotide
  Sense strand starting at position 3150 of SEQ ID NO: 317087
ggguuuacugucugagaac

SEQ ID NO: 463524 - RNA, 19 nt, Artificial Sequence
  Description of Artificial Sequence: Synthetic oligonucleotide
  Antisense Strand to SEQ ID NO: 463523
guucucagacaguaaaccc

SEQ ID NO: 463525 - RNA, 19 nt, Artificial Sequence
  Description of Artificial Sequence: Synthetic oligonucleotide
  Sense strand starting at position 3151 of SEQ ID NO: 317087
gguuuacugucugagaacc

SEQ ID NO: 463526 - RNA, 19 nt, Artificial Sequence
  Description of Artificial Sequence: Synthetic oligonucleotide
  Antisense Strand to SEQ ID NO: 463525
gguucucagacaguaaacc

SEQ ID NO: 463527 - RNA, 19 nt, Artificial Sequence
  Description of Artificial Sequence: Synthetic oligonucleotide
  Sense strand starting at position 3239 of SEQ ID NO: 317087
ccucuuguccauuauguaa

SEQ ID NO: 463528 - RNA, 19 nt, Artificial Sequence
  Description of Artificial Sequence: Synthetic oligonucleotide
  Antisense Strand to SEQ ID NO: 463527
uuacauaauggacaagagg

SEQ ID NO: 463529 - RNA, 19 nt, Artificial Sequence
  Description of Artificial Sequence: Synthetic oligonucleotide
  Sense strand starting at position 3372 of SEQ ID NO: 317087
cguggacaguacucacuaa

SEQ ID NO: 463530 - RNA, 19 nt, Artificial Sequence
  Description of Artificial Sequence: Synthetic oligonucleotide
  Antisense Strand to SEQ ID NO: 463529
uuagugaguacuguccacg

SEQ ID NO: 463531 - RNA, 19 nt, Artificial Sequence
  Description of Artificial Sequence: Synthetic oligonucleotide
  Sense strand starting at position 3658 of SEQ ID NO: 317087
cccaaagagcugugacaag

SEQ ID NO: 463532 - RNA, 19 nt, Artificial Sequence
  Description of Artificial Sequence: Synthetic oligonucleotide
  Antisense Strand to SEQ ID NO: 463531
cuugucacagcucuuuggg

SEQ ID NO: 463533 - RNA, 19 nt, Artificial Sequence
  Description of Artificial Sequence: Synthetic oligonucleotide
  Sense strand starting at position 3704 of SEQ ID NO: 317087
agccacugaguuuaucgau

SEQ ID NO: 463534 - RNA, 19 nt, Artificial Sequence
  Description of Artificial Sequence: Synthetic oligonucleotide
  Antisense Strand to SEQ ID NO: 463533
aucgauaaacucaguggcu

SEQ ID NO: 463535 - RNA, 19 nt, Artificial Sequence
  Description of Artificial Sequence: Synthetic oligonucleotide
  Sense strand starting at position 3710 of SEQ ID NO: 317087
ugaguuuaucgauaaggca

SEQ ID NO: 463536 - RNA, 19 nt, Artificial Sequence
  Description of Artificial Sequence: Synthetic oligonucleotide
  Antisense Strand to SEQ ID NO: 463535
ugccuuaucgauaaacuca

SEQ ID NO: 463537 - RNA, 19 nt, Artificial Sequence
  Description of Artificial Sequence: Synthetic oligonucleotide
  Sense strand starting at position 3718 of SEQ ID NO: 317087
ucgauaaggcagugucaca

SEQ ID NO: 463538 - RNA, 19 nt, Artificial Sequence
  Description of Artificial Sequence: Synthetic oligonucleotide
  Antisense Strand to SEQ ID NO: 463537
ugugacacugccuuaucga

SEQ ID NO: 463539 - RNA, 19 nt, Artificial Sequence
  Description of Artificial Sequence: Synthetic oligonucleotide
  Sense strand starting at position 3730 of SEQ ID NO: 317087
ugucacaaucuuuggcaga

SEQ ID NO: 463540 - RNA, 19 nt, Artificial Sequence
  Description of Artificial Sequence: Synthetic oligonucleotide
  Antisense Strand to SEQ ID NO: 463539
ucugccaaagauugugaca

SEQ ID NO: 463541 - RNA, 19 nt, Artificial Sequence
  Description of Artificial Sequence: Synthetic oligonucleotide
  Sense strand starting at position 3732 of SEQ ID NO: 317087
ucacaaucuuuggcagacu

SEQ ID NO: 463542 - RNA, 19 nt, Artificial Sequence
  Description of Artificial Sequence: Synthetic oligonucleotide
  Antisense Strand to SEQ ID NO: 463541
agucugccaaagauuguga

SEQ ID NO: 463543 - RNA, 19 nt, Artificial Sequence
  Description of Artificial Sequence: Synthetic oligonucleotide
  Sense strand starting at position 3735 of SEQ ID NO: 317087
caaucuuuggcagacugua

SEQ ID NO: 463544 - RNA, 19 nt, Artificial Sequence
  Description of Artificial Sequence: Synthetic oligonucleotide
  Antisense Strand to SEQ ID NO: 463543
uacagucugccaaagauug

SEQ ID NO: 463545 - RNA, 19 nt, Artificial Sequence
  Description of Artificial Sequence: Synthetic oligonucleotide
  Sense strand starting at position 3747 of SEQ ID NO: 317087
gacuguaucugccaaagau

SEQ ID NO: 463546 - RNA, 19 nt, Artificial Sequence
  Description of Artificial Sequence: Synthetic oligonucleotide
  Antisense Strand to SEQ ID NO: 463545
aucuuuggcagauacaguc

SEQ ID NO: 463547 - RNA, 19 nt, Artificial Sequence
  Description of Artificial Sequence: Synthetic oligonucleotide
  Sense strand starting at position 3804 of SEQ ID NO: 317087
gaauuugguugacgagaaa

SEQ ID NO: 463548 - RNA, 19 nt, Artificial Sequence
  Description of Artificial Sequence: Synthetic oligonucleotide
  Antisense Strand to SEQ ID NO: 463547
uuucucgucaaccaaauuc

SEQ ID NO: 463549 - RNA, 19 nt, Artificial Sequence
  Description of Artificial Sequence: Synthetic oligonucleotide
  Sense strand starting at position 3842 of SEQ ID NO: 317087
ucagaacguuuauucuaag

SEQ ID NO: 463550 - RNA, 19 nt, Artificial Sequence
  Description of Artificial Sequence: Synthetic oligonucleotide
  Antisense Strand to SEQ ID NO: 463549
cuuagaauaaacguucuga

SEQ ID NO: 463551 - RNA, 19 nt, Artificial Sequence
  Description of Artificial Sequence: Synthetic oligonucleotide
  Sense strand starting at position 3848 of SEQ ID NO: 317087
cguuuauucuaagccaaau

SEQ ID NO: 463552 - RNA, 19 nt, Artificial Sequence
  Description of Artificial Sequence: Synthetic oligonucleotide
  Antisense Strand to SEQ ID NO: 463551
auuuggcuuagaauaaacg

SEQ ID NO: 463553 - RNA, 19 nt, Artificial Sequence
  Description of Artificial Sequence: Synthetic oligonucleotide
  Sense strand starting at position 3930 of SEQ ID NO: 317087
gggcuauagcuuuauacau

SEQ ID NO: 463554 - RNA, 19 nt, Artificial Sequence
  Description of Artificial Sequence: Synthetic oligonucleotide
  Antisense Strand to SEQ ID NO: 463553
auguauaaagcuauagccc

SEQ ID NO: 463555 - RNA, 19 nt, Artificial Sequence
  Description of Artificial Sequence: Synthetic oligonucleotide
  Sense strand starting at position 64 of SEQ ID NO: 317088
uucuuagcucuguaauaug

SEQ ID NO: 463556 - RNA, 19 nt, Artificial Sequence
  Description of Artificial Sequence: Synthetic oligonucleotide
  Antisense Strand to SEQ ID NO: 463555
cauauuacagagcuaagaa

SEQ ID NO: 463557 - RNA, 19 nt, Artificial Sequence
  Description of Artificial Sequence: Synthetic oligonucleotide
  Sense strand starting at position 74 of SEQ ID NO: 317088
uguaauauggcacaauaau

SEQ ID NO: 463558 - RNA, 19 nt, Artificial Sequence
  Description of Artificial Sequence: Synthetic oligonucleotide
  Antisense Strand to SEQ ID NO: 463557
auuauugugccauauuaca

SEQ ID NO: 463559 - RNA, 19 nt, Artificial Sequence
  Description of Artificial Sequence: Synthetic oligonucleotide
  Sense strand starting at position 451 of SEQ ID NO: 317088
acaaguaguuugucaacuu

SEQ ID NO: 463560 - RNA, 19 nt, Artificial Sequence
  Description of Artificial Sequence: Synthetic oligonucleotide
  Antisense Strand to SEQ ID NO: 463559
aaguugacaaacuacuugu

SEQ ID NO: 463561 - RNA, 19 nt, Artificial Sequence
  Description of Artificial Sequence: Synthetic oligonucleotide
  Sense strand starting at position 477 of SEQ ID NO: 317088
aguacuaaaguuugggaau

SEQ ID NO: 463562 - RNA, 19 nt, Artificial Sequence
  Description of Artificial Sequence: Synthetic oligonucleotide
  Antisense Strand to SEQ ID NO: 463561
auucccaaacuuuaguacu

SEQ ID NO: 463563 - RNA, 19 nt, Artificial Sequence
  Description of Artificial Sequence: Synthetic oligonucleotide
  Sense strand starting at position 518 of SEQ ID NO: 317088
gacaauggucaaugucauu

SEQ ID NO: 463564 - RNA, 19 nt, Artificial Sequence
  Description of Artificial Sequence: Synthetic oligonucleotide
  Antisense Strand to SEQ ID NO: 463563
aaugacauugaccauuguc

SEQ ID NO: 463565 - RNA, 19 nt, Artificial Sequence
  Description of Artificial Sequence: Synthetic oligonucleotide
  Sense strand starting at position 595 of SEQ ID NO: 317088
aguaccaggucagaaauuu

SEQ ID NO: 463566 - RNA, 19 nt, Artificial Sequence
  Description of Artificial Sequence: Synthetic oligonucleotide
  Antisense Strand to SEQ ID NO: 463565
aaauuucugaccugguacu

SEQ ID NO: 463567 - RNA, 19 nt, Artificial Sequence
  Description of Artificial Sequence: Synthetic oligonucleotide
  Sense strand starting at position 653 of SEQ ID NO: 317088
uuagaauggugcuccugaa

SEQ ID NO: 463568 - RNA, 19 nt, Artificial Sequence
  Description of Artificial Sequence: Synthetic oligonucleotide
  Antisense Strand to SEQ ID NO: 463567
uucaggagcaccauucuaa

SEQ ID NO: 463569 - RNA, 19 nt, Artificial Sequence
  Description of Artificial Sequence: Synthetic oligonucleotide
  Sense strand starting at position 809 of SEQ ID NO: 317088
uuccuaauuucucuguguu

SEQ ID NO: 463570 - RNA, 19 nt, Artificial Sequence
  Description of Artificial Sequence: Synthetic oligonucleotide
  Antisense Strand to SEQ ID NO: 463569
aacacagagaaauuaggaa

SEQ ID NO: 463571 - RNA, 19 nt, Artificial Sequence
  Description of Artificial Sequence: Synthetic oligonucleotide
  Sense strand starting at position 810 of SEQ ID NO: 317088
uccuaauuucucuguguuc

SEQ ID NO: 463572 - RNA, 19 nt, Artificial Sequence
  Description of Artificial Sequence: Synthetic oligonucleotide
  Antisense Strand to SEQ ID NO: 463571
gaacacagagaaauuagga

SEQ ID NO: 463573 - RNA, 19 nt, Artificial Sequence
  Description of Artificial Sequence: Synthetic oligonucleotide
  Sense strand starting at position 812 of SEQ ID NO: 317088
cuaauuucucuguguucca

SEQ ID NO: 463574 - RNA, 19 nt, Artificial Sequence
  Description of Artificial Sequence: Synthetic oligonucleotide
  Antisense Strand to SEQ ID NO: 463573
uggaacacagagaaauuag

SEQ ID NO: 463575 - RNA, 19 nt, Artificial Sequence
  Description of Artificial Sequence: Synthetic oligonucleotide
  Sense strand starting at position 822 of SEQ ID NO: 317088
uguguuccauaauuccaua

SEQ ID NO: 463576 - RNA, 19 nt, Artificial Sequence
  Description of Artificial Sequence: Synthetic oligonucleotide
  Antisense Strand to SEQ ID NO: 463575
uauggaauuauggaacaca

SEQ ID NO: 463577 - RNA, 19 nt, Artificial Sequence
  Description of Artificial Sequence: Synthetic oligonucleotide
  Sense strand starting at position 1059 of SEQ ID NO: 317088
ccacaaguagucuguaaau

SEQ ID NO: 463578 - RNA, 19 nt, Artificial Sequence
  Description of Artificial Sequence: Synthetic oligonucleotide
  Antisense Strand to SEQ ID NO: 463577
auuuacagacuacuugugg

SEQ ID NO: 463579 - RNA, 19 nt, Artificial Sequence
  Description of Artificial Sequence: Synthetic oligonucleotide
  Sense strand starting at position 1061 of SEQ ID NO: 317088
acaaguagucuguaaauug

SEQ ID NO: 463580 - RNA, 19 nt, Artificial Sequence
  Description of Artificial Sequence: Synthetic oligonucleotide
  Antisense Strand to SEQ ID NO: 463579
caauuuacagacuacuugu

SEQ ID NO: 463581 - RNA, 19 nt, Artificial Sequence
  Description of Artificial Sequence: Synthetic oligonucleotide
  Sense strand starting at position 1220 of SEQ ID NO: 317088
guaggucauucuccacaac

SEQ ID NO: 463582 - RNA, 19 nt, Artificial Sequence
  Description of Artificial Sequence: Synthetic oligonucleotide
  Antisense Strand to SEQ ID NO: 463581
guuguggagaaugaccuac

SEQ ID NO: 463583 - RNA, 19 nt, Artificial Sequence
  Description of Artificial Sequence: Synthetic oligonucleotide
  Sense strand starting at position 1298 of SEQ ID NO: 317088
ccgagacauuacucaauag

SEQ ID NO: 463584 - RNA, 19 nt, Artificial Sequence
  Description of Artificial Sequence: Synthetic oligonucleotide
  Antisense Strand to SEQ ID NO: 463583
cuauugaguaaugucucgg

SEQ ID NO: 463585 - RNA, 19 nt, Artificial Sequence
  Description of Artificial Sequence: Synthetic oligonucleotide
  Sense strand starting at position 1373 of SEQ ID NO: 317088
acaguaauucccgaccuua

SEQ ID NO: 463586 - RNA, 19 nt, Artificial Sequence
  Description of Artificial Sequence: Synthetic oligonucleotide
  Antisense Strand to SEQ ID NO: 463585
uaaggucgggaauuacugu

SEQ ID NO: 463587 - RNA, 19 nt, Artificial Sequence
  Description of Artificial Sequence: Synthetic oligonucleotide
  Sense strand starting at position 1437 of SEQ ID NO: 317088
gaacgacugcaguaaguaa

SEQ ID NO: 463588 - RNA, 19 nt, Artificial Sequence
  Description of Artificial Sequence: Synthetic oligonucleotide
  Antisense Strand to SEQ ID NO: 463587
uuacuuacugcagucguuc

SEQ ID NO: 463589 - RNA, 19 nt, Artificial Sequence
  Description of Artificial Sequence: Synthetic oligonucleotide
  Sense strand starting at position 1609 of SEQ ID NO: 317088
cuaccaaaccgacgagaau

SEQ ID NO: 463590 - RNA, 19 nt, Artificial Sequence
  Description of Artificial Sequence: Synthetic oligonucleotide
  Antisense Strand to SEQ ID NO: 463589
auucucgucgguuugguag

SEQ ID NO: 463591 - RNA, 19 nt, Artificial Sequence
  Description of Artificial Sequence: Synthetic oligonucleotide
  Sense strand starting at position 2221 of SEQ ID NO: 317088
aagaaucuugcacgguaau

SEQ ID NO: 463592 - RNA, 19 nt, Artificial Sequence
  Description of Artificial Sequence: Synthetic oligonucleotide
  Antisense Strand to SEQ ID NO: 463591
auuaccgugcaagauucuu

SEQ ID NO: 463593 - RNA, 19 nt, Artificial Sequence
  Description of Artificial Sequence: Synthetic oligonucleotide
  Sense strand starting at position 2270 of SEQ ID NO: 317088
gcacaaagccucgggagau

SEQ ID NO: 463594 - RNA, 19 nt, Artificial Sequence
  Description of Artificial Sequence: Synthetic oligonucleotide
  Antisense Strand to SEQ ID NO: 463593
aucucccgaggcuuugugc

SEQ ID NO: 463595 - RNA, 19 nt, Artificial Sequence
  Description of Artificial Sequence: Synthetic oligonucleotide
  Sense strand starting at position 2513 of SEQ ID NO: 317088
uguucugagggcuaaccaa

SEQ ID NO: 463596 - RNA, 19 nt, Artificial Sequence
  Description of Artificial Sequence: Synthetic oligonucleotide
  Antisense Strand to SEQ ID NO: 463595
uugguuagcccucagaaca

SEQ ID NO: 463597 - RNA, 19 nt, Artificial Sequence
  Description of Artificial Sequence: Synthetic oligonucleotide
  Sense strand starting at position 2790 of SEQ ID NO: 317088
ugugaucgucccuaacaau

SEQ ID NO: 463598 - RNA, 19 nt, Artificial Sequence
  Description of Artificial Sequence: Synthetic oligonucleotide
  Antisense Strand to SEQ ID NO: 463597
auuguuagggacgaucaca

SEQ ID NO: 463599 - RNA, 19 nt, Artificial Sequence
  Description of Artificial Sequence: Synthetic oligonucleotide
  Sense strand starting at position 2853 of SEQ ID NO: 317088
agucaaauggucuaccuga

SEQ ID NO: 463600 - RNA, 19 nt, Artificial Sequence
  Description of Artificial Sequence: Synthetic oligonucleotide
  Antisense Strand to SEQ ID NO: 463599
ucagguagaccauuugacu

SEQ ID NO: 463601 - RNA, 19 nt, Artificial Sequence
  Description of Artificial Sequence: Synthetic oligonucleotide
  Sense strand starting at position 2891 of SEQ ID NO: 317088
auguaacaguaauccuaga

SEQ ID NO: 463602 - RNA, 19 nt, Artificial Sequence
  Description of Artificial Sequence: Synthetic oligonucleotide
  Antisense Strand to SEQ ID NO: 463601
ucuaggauuacuguuacau

SEQ ID NO: 463603 - RNA, 19 nt, Artificial Sequence
  Description of Artificial Sequence: Synthetic oligonucleotide
  Sense strand starting at position 2961 of SEQ ID NO: 317088
ugacgcuaucugccguaua

SEQ ID NO: 463604 - RNA, 19 nt, Artificial Sequence
  Description of Artificial Sequence: Synthetic oligonucleotide
  Antisense Strand to SEQ ID NO: 463603
uauacggcagauagcguca

SEQ ID NO: 463605 - RNA, 19 nt, Artificial Sequence
  Description of Artificial Sequence: Synthetic oligonucleotide
  Sense strand starting at position 2963 of SEQ ID NO: 317088
acgcuaucugccguauauu

SEQ ID NO: 463606 - RNA, 19 nt, Artificial Sequence
  Description of Artificial Sequence: Synthetic oligonucleotide
  Antisense Strand to SEQ ID NO: 463605
aauauacggcagauagcgu

SEQ ID NO: 463607 - RNA, 19 nt, Artificial Sequence
  Description of Artificial Sequence: Synthetic oligonucleotide
  Sense strand starting at position 2964 of SEQ ID NO: 317088
cgcuaucugccguauauuu

SEQ ID NO: 463608 - RNA, 19 nt, Artificial Sequence
  Description of Artificial Sequence: Synthetic oligonucleotide
  Antisense Strand to SEQ ID NO: 463607
aaauauacggcagauagcg

SEQ ID NO: 463609 - RNA, 19 nt, Artificial Sequence
  Description of Artificial Sequence: Synthetic oligonucleotide
  Sense strand starting at position 2966 of SEQ ID NO: 317088
cuaucugccguauauuuau

SEQ ID NO: 463610 - RNA, 19 nt, Artificial Sequence
  Description of Artificial Sequence: Synthetic oligonucleotide
  Antisense Strand to SEQ ID NO: 463609
auaaauauacggcagauag

SEQ ID NO: 463611 - RNA, 19 nt, Artificial Sequence
  Description of Artificial Sequence: Synthetic oligonucleotide
  Sense strand starting at position 2975 of SEQ ID NO: 317088
guauauuuaugcuucggaa

SEQ ID NO: 463612 - RNA, 19 nt, Artificial Sequence
  Description of Artificial Sequence: Synthetic oligonucleotide
  Antisense Strand to SEQ ID NO: 463611
uuccgaagcauaaauauac

SEQ ID NO: 463613 - RNA, 19 nt, Artificial Sequence
  Description of Artificial Sequence: Synthetic oligonucleotide
  Sense strand starting at position 2979 of SEQ ID NO: 317088
auuuaugcuucggaagaag

SEQ ID NO: 463614 - RNA, 19 nt, Artificial Sequence
  Description of Artificial Sequence: Synthetic oligonucleotide
  Antisense Strand to SEQ ID NO: 463613
cuucuuccgaagcauaaau

SEQ ID NO: 463615 - RNA, 19 nt, Artificial Sequence
  Description of Artificial Sequence: Synthetic oligonucleotide
  Sense strand starting at position 3045 of SEQ ID NO: 317088
uuacaauggccuuggaauu

SEQ ID NO: 463616 - RNA, 19 nt, Artificial Sequence
  Description of Artificial Sequence: Synthetic oligonucleotide
  Antisense Strand to SEQ ID NO: 463615
aauuccaaggccauuguaa

SEQ ID NO: 463617 - RNA, 19 nt, Artificial Sequence
  Description of Artificial Sequence: Synthetic oligonucleotide
  Sense strand starting at position 3055 of SEQ ID NO: 317088
cuuggaauugccugauucu

SEQ ID NO: 463618 - RNA, 19 nt, Artificial Sequence
  Description of Artificial Sequence: Synthetic oligonucleotide
  Antisense Strand to SEQ ID NO: 463617
agaaucaggcaauuccaag

SEQ ID NO: 463619 - RNA, 19 nt, Artificial Sequence
  Description of Artificial Sequence: Synthetic oligonucleotide
  Sense strand starting at position 3056 of SEQ ID NO: 317088
uuggaauugccugauucug

SEQ ID NO: 463620 - RNA, 19 nt, Artificial Sequence
  Description of Artificial Sequence: Synthetic oligonucleotide
  Antisense Strand to SEQ ID NO: 463619
cagaaucaggcaauuccaa

SEQ ID NO: 463621 - RNA, 19 nt, Artificial Sequence
  Description of Artificial Sequence: Synthetic oligonucleotide
  Sense strand starting at position 3098 of SEQ ID NO: 317088
uugcaaagucagcauuauu

SEQ ID NO: 463622 - RNA, 19 nt, Artificial Sequence
  Description of Artificial Sequence: Synthetic oligonucleotide
  Antisense Strand to SEQ ID NO: 463621
aauaaugcugacuuugcaa

SEQ ID NO: 463623 - RNA, 19 nt, Artificial Sequence
  Description of Artificial Sequence: Synthetic oligonucleotide
  Sense strand starting at position 3124 of SEQ ID NO: 317088
ccugaauaucuuggcuuaa

SEQ ID NO: 463624 - RNA, 19 nt, Artificial Sequence
  Description of Artificial Sequence: Synthetic oligonucleotide
  Antisense Strand to SEQ ID NO: 463623
uuaagccaagauauucagg

SEQ ID NO: 463625 - RNA, 19 nt, Artificial Sequence
  Description of Artificial Sequence: Synthetic oligonucleotide
  Sense strand starting at position 3125 of SEQ ID NO: 317088
cugaauaucuuggcuuaaa

SEQ ID NO: 463626 - RNA, 19 nt, Artificial Sequence
  Description of Artificial Sequence: Synthetic oligonucleotide
  Antisense Strand to SEQ ID NO: 463625
uuuaagccaagauauucag

SEQ ID NO: 463627 - RNA, 19 nt, Artificial Sequence
  Description of Artificial Sequence: Synthetic oligonucleotide
  Sense strand starting at position 3126 of SEQ ID NO: 317088
ugaauaucuuggcuuaaag

SEQ ID NO: 463628 - RNA, 19 nt, Artificial Sequence
  Description of Artificial Sequence: Synthetic oligonucleotide
  Antisense Strand to SEQ ID NO: 463627
cuuuaagccaagauauuca

SEQ ID NO: 463629 - RNA, 19 nt, Artificial Sequence
  Description of Artificial Sequence: Synthetic oligonucleotide
  Sense strand starting at position 3174 of SEQ ID NO: 317088
uggcuuuacagaugaggga

SEQ ID NO: 463630 - RNA, 19 nt, Artificial Sequence
  Description of Artificial Sequence: Synthetic oligonucleotide
  Antisense Strand to SEQ ID NO: 463629
ucccucaucuguaaagcca

SEQ ID NO: 463631 - RNA, 19 nt, Artificial Sequence
  Description of Artificial Sequence: Synthetic oligonucleotide
  Sense strand starting at position 3576 of SEQ ID NO: 317088
acugucagagcccaaugau

SEQ ID NO: 463632 - RNA, 19 nt, Artificial Sequence
  Description of Artificial Sequence: Synthetic oligonucleotide
  Antisense Strand to SEQ ID NO: 463631
aucauugggcucugacagu

SEQ ID NO: 463633 - RNA, 19 nt, Artificial Sequence
  Description of Artificial Sequence: Synthetic oligonucleotide
  Sense strand starting at position 3707 of SEQ ID NO: 317088
gcauuaaauggcuagccau

SEQ ID NO: 463634 - RNA, 19 nt, Artificial Sequence
  Description of Artificial Sequence: Synthetic oligonucleotide
  Antisense Strand to SEQ ID NO: 463633
auggcuagccauuuaaugc

SEQ ID NO: 463635 - RNA, 19 nt, Artificial Sequence
  Description of Artificial Sequence: Synthetic oligonucleotide
  Sense strand starting at position 42 of SEQ ID NO: 317089
uuagcucauccugaaauga

SEQ ID NO: 463636 - RNA, 19 nt, Artificial Sequence
  Description of Artificial Sequence: Synthetic oligonucleotide
  Antisense Strand to SEQ ID NO: 463635
ucauuucaggaugagcuaa

SEQ ID NO: 463637 - RNA, 19 nt, Artificial Sequence
  Description of Artificial Sequence: Synthetic oligonucleotide
  Sense strand starting at position 315 of SEQ ID NO: 317089
gcagguuauaauuagagcu

SEQ ID NO: 463638 - RNA, 19 nt, Artificial Sequence
  Description of Artificial Sequence: Synthetic oligonucleotide
  Antisense Strand to SEQ ID NO: 463637
agcucuaauuauaaccugc

SEQ ID NO: 463639 - RNA, 19 nt, Artificial Sequence
  Description of Artificial Sequence: Synthetic oligonucleotide
  Sense strand starting at position 445 of SEQ ID NO: 317089
ggaugcaaucaauauugca

SEQ ID NO: 463640 - RNA, 19 nt, Artificial Sequence
  Description of Artificial Sequence: Synthetic oligonucleotide
  Antisense Strand to SEQ ID NO: 463639
ugcaauauugauugcaucc

SEQ ID NO: 463641 - RNA, 19 nt, Artificial Sequence
  Description of Artificial Sequence: Synthetic oligonucleotide
  Sense strand starting at position 559 of SEQ ID NO: 317089
gcaauuuaagguugcgauu

SEQ ID NO: 463642 - RNA, 19 nt, Artificial Sequence
  Description of Artificial Sequence: Synthetic oligonucleotide
  Antisense Strand to SEQ ID NO: 463641
aaucgcaaccuuaaauugc

SEQ ID NO: 463643 - RNA, 19 nt, Artificial Sequence
  Description of Artificial Sequence: Synthetic oligonucleotide
  Sense strand starting at position 612 of SEQ ID NO: 317089
cuacuuugguagucuuaaa

SEQ ID NO: 463644 - RNA, 19 nt, Artificial Sequence
  Description of Artificial Sequence: Synthetic oligonucleotide
  Antisense Strand to SEQ ID NO: 463643
uuuaagacuaccaaaguag

SEQ ID NO: 463645 - RNA, 19 nt, Artificial Sequence
  Description of Artificial Sequence: Synthetic oligonucleotide
  Sense strand starting at position 644 of SEQ ID NO: 317089
guuuguaauacuggaugga

SEQ ID NO: 463646 - RNA, 19 nt, Artificial Sequence
  Description of Artificial Sequence: Synthetic oligonucleotide
  Antisense Strand to SEQ ID NO: 463645
uccauccaguauuacaaac

SEQ ID NO: 463647 - RNA, 19 nt, Artificial Sequence
  Description of Artificial Sequence: Synthetic oligonucleotide
  Sense strand starting at position 717 of SEQ ID NO: 317089
uuuauauaggacuguucua

SEQ ID NO: 463648 - RNA, 19 nt, Artificial Sequence
  Description of Artificial Sequence: Synthetic oligonucleotide
  Antisense Strand to SEQ ID NO: 463647
uagaacaguccuauauaaa

SEQ ID NO: 463649 - RNA, 19 nt, Artificial Sequence
  Description of Artificial Sequence: Synthetic oligonucleotide
  Sense strand starting at position 757 of SEQ ID NO: 317089
cuaauacaguguuuacacu

SEQ ID NO: 463650 - RNA, 19 nt, Artificial Sequence
  Description of Artificial Sequence: Synthetic oligonucleotide
  Antisense Strand to SEQ ID NO: 463649
aguguaaacacuguauuag

SEQ ID NO: 463651 - RNA, 19 nt, Artificial Sequence
  Description of Artificial Sequence: Synthetic oligonucleotide
  Sense strand starting at position 831 of SEQ ID NO: 317089
uuuggacucuuuguauaug

SEQ ID NO: 463652 - RNA, 19 nt, Artificial Sequence
  Description of Artificial Sequence: Synthetic oligonucleotide
  Antisense Strand to SEQ ID NO: 463651
cauauacaaagaguccaaa

SEQ ID NO: 463653 - RNA, 19 nt, Artificial Sequence
  Description of Artificial Sequence: Synthetic oligonucleotide
  Sense strand starting at position 834 of SEQ ID NO: 317089
ggacucuuuguauaugcca

SEQ ID NO: 463654 - RNA, 19 nt, Artificial Sequence
  Description of Artificial Sequence: Synthetic oligonucleotide
  Antisense Strand to SEQ ID NO: 463653
uggcauauacaaagagucc

SEQ ID NO: 463655 - RNA, 19 nt, Artificial Sequence
  Description of Artificial Sequence: Synthetic oligonucleotide
  Sense strand starting at position 933 of SEQ ID NO: 317089
uucugauaguagcugaaau

SEQ ID NO: 463656 - RNA, 19 nt, Artificial Sequence
  Description of Artificial Sequence: Synthetic oligonucleotide
  Antisense Strand to SEQ ID NO: 463655
auuucagcuacuaucagaa

SEQ ID NO: 463657 - RNA, 19 nt, Artificial Sequence
  Description of Artificial Sequence: Synthetic oligonucleotide
  Sense strand starting at position 935 of SEQ ID NO: 317089
cugauaguagcugaaauau

SEQ ID NO: 463658 - RNA, 19 nt, Artificial Sequence
  Description of Artificial Sequence: Synthetic oligonucleotide
  Antisense Strand to SEQ ID NO: 463657
auauuucagcuacuaucag

SEQ ID NO: 463659 - RNA, 19 nt, Artificial Sequence
  Description of Artificial Sequence: Synthetic oligonucleotide
  Sense strand starting at position 1040 of SEQ ID NO: 317089
ugauaugaacauugggcua

SEQ ID NO: 463660 - RNA, 19 nt, Artificial Sequence
  Description of Artificial Sequence: Synthetic oligonucleotide
  Antisense Strand to SEQ ID NO: 463659
uagcccaauguucauauca

SEQ ID NO: 463661 - RNA, 19 nt, Artificial Sequence
  Description of Artificial Sequence: Synthetic oligonucleotide
  Sense strand starting at position 1491 of SEQ ID NO: 317089
ucgcgaugagccgcauuaa

SEQ ID NO: 463662 - RNA, 19 nt, Artificial Sequence
  Description of Artificial Sequence: Synthetic oligonucleotide
  Antisense Strand to SEQ ID NO: 463661
uuaaugcggcucaucgcga

SEQ ID NO: 463663 - RNA, 19 nt, Artificial Sequence
  Description of Artificial Sequence: Synthetic oligonucleotide
  Sense strand starting at position 1895 of SEQ ID NO: 317089
agcgucuucgggaggaagu

SEQ ID NO: 463664 - RNA, 19 nt, Artificial Sequence
  Description of Artificial Sequence: Synthetic oligonucleotide
  Antisense Strand to SEQ ID NO: 463663
acuuccucccgaagacgcu

SEQ ID NO: 463665 - RNA, 19 nt, Artificial Sequence
  Description of Artificial Sequence: Synthetic oligonucleotide
  Sense strand starting at position 2121 of SEQ ID NO: 317089
gaguaaggguccuuaucug

SEQ ID NO: 463666 - RNA, 19 nt, Artificial Sequence
  Description of Artificial Sequence: Synthetic oligonucleotide
  Antisense Strand to SEQ ID NO: 463665
cagauaaggacccuuacuc

SEQ ID NO: 463667 - RNA, 19 nt, Artificial Sequence
  Description of Artificial Sequence: Synthetic oligonucleotide
  Sense strand starting at position 2136 of SEQ ID NO: 317089
ucugcacguguugcaaaua

SEQ ID NO: 463668 - RNA, 19 nt, Artificial Sequence
  Description of Artificial Sequence: Synthetic oligonucleotide
  Antisense Strand to SEQ ID NO: 463667
uauuugcaacacgugcaga

SEQ ID NO: 463669 - RNA, 19 nt, Artificial Sequence
  Description of Artificial Sequence: Synthetic oligonucleotide
  Sense strand starting at position 2226 of SEQ ID NO: 317089
gacagaauaguacgguagu

SEQ ID NO: 463670 - RNA, 19 nt, Artificial Sequence
  Description of Artificial Sequence: Synthetic oligonucleotide
  Antisense Strand to SEQ ID NO: 463669
acuaccguacuauucuguc

SEQ ID NO: 463671 - RNA, 19 nt, Artificial Sequence
  Description of Artificial Sequence: Synthetic oligonucleotide
  Sense strand starting at position 2317 of SEQ ID NO: 317089
aaguuaaggucuuuaugac

SEQ ID NO: 463672 - RNA, 19 nt, Artificial Sequence
  Description of Artificial Sequence: Synthetic oligonucleotide
  Antisense Strand to SEQ ID NO: 463671
gucauaaagaccuuaacuu

SEQ ID NO: 463673 - RNA, 19 nt, Artificial Sequence
  Description of Artificial Sequence: Synthetic oligonucleotide
  Sense strand starting at position 2318 of SEQ ID NO: 317089
aguuaaggucuuuaugacu

SEQ ID NO: 463674 - RNA, 19 nt, Artificial Sequence
  Description of Artificial Sequence: Synthetic oligonucleotide
  Antisense Strand to SEQ ID NO: 463673
agucauaaagaccuuaacu

SEQ ID NO: 463675 - RNA, 19 nt, Artificial Sequence
  Description of Artificial Sequence: Synthetic oligonucleotide
  Sense strand starting at position 2323 of SEQ ID NO: 317089
aggucuuuaugacucaguu

SEQ ID NO: 463676 - RNA, 19 nt, Artificial Sequence
  Description of Artificial Sequence: Synthetic oligonucleotide
  Antisense Strand to SEQ ID NO: 463675
aacugagucauaaagaccu

SEQ ID NO: 463677 - RNA, 19 nt, Artificial Sequence
  Description of Artificial Sequence: Synthetic oligonucleotide
  Sense strand starting at position 2383 of SEQ ID NO: 317089
ccugaaagguugcuguaaa

SEQ ID NO: 463678 - RNA, 19 nt, Artificial Sequence
  Description of Artificial Sequence: Synthetic oligonucleotide
  Antisense Strand to SEQ ID NO: 463677
uuuacagcaaccuuucagg

SEQ ID NO: 463679 - RNA, 19 nt, Artificial Sequence
  Description of Artificial Sequence: Synthetic oligonucleotide
  Sense strand starting at position 2432 of SEQ ID NO: 317089
ggaagagugccuggaauug

SEQ ID NO: 463680 - RNA, 19 nt, Artificial Sequence
  Description of Artificial Sequence: Synthetic oligonucleotide
  Antisense Strand to SEQ ID NO: 463679
caauuccaggcacucuucc

SEQ ID NO: 463681 - RNA, 19 nt, Artificial Sequence
  Description of Artificial Sequence: Synthetic oligonucleotide
  Sense strand starting at position 2442 of SEQ ID NO: 317089
cuggaauuguauucgauau

SEQ ID NO: 463682 - RNA, 19 nt, Artificial Sequence
  Description of Artificial Sequence: Synthetic oligonucleotide
  Antisense Strand to SEQ ID NO: 463681
auaucgaauacaauuccag

SEQ ID NO: 463683 - RNA, 19 nt, Artificial Sequence
  Description of Artificial Sequence: Synthetic oligonucleotide
  Sense strand starting at position 2443 of SEQ ID NO: 317089
uggaauuguauucgauauu

SEQ ID NO: 463684 - RNA, 19 nt, Artificial Sequence
  Description of Artificial Sequence: Synthetic oligonucleotide
  Antisense Strand to SEQ ID NO: 463683
aauaucgaauacaauucca

SEQ ID NO: 463685 - RNA, 19 nt, Artificial Sequence
  Description of Artificial Sequence: Synthetic oligonucleotide
  Sense strand starting at position 2539 of SEQ ID NO: 317089
uugacaucuuacuugaaug

SEQ ID NO: 463686 - RNA, 19 nt, Artificial Sequence
  Description of Artificial Sequence: Synthetic oligonucleotide
  Antisense Strand to SEQ ID NO: 463685
cauucaaguaagaugucaa

SEQ ID NO: 463687 - RNA, 19 nt, Artificial Sequence
  Description of Artificial Sequence: Synthetic oligonucleotide
  Sense strand starting at position 2574 of SEQ ID NO: 317089
uguauacuuagugaguaau

SEQ ID NO: 463688 - RNA, 19 nt, Artificial Sequence
  Description of Artificial Sequence: Synthetic oligonucleotide
  Antisense Strand to SEQ ID NO: 463687
auuacucacuaaguauaca

SEQ ID NO: 463689 - RNA, 19 nt, Artificial Sequence
  Description of Artificial Sequence: Synthetic oligonucleotide
  Sense strand starting at position 2577 of SEQ ID NO: 317089
auacuuagugaguaaucuu

SEQ ID NO: 463690 - RNA, 19 nt, Artificial Sequence
  Description of Artificial Sequence: Synthetic oligonucleotide
  Antisense Strand to SEQ ID NO: 463689
aagauuacucacuaaguau

SEQ ID NO: 463691 - RNA, 19 nt, Artificial Sequence
  Description of Artificial Sequence: Synthetic oligonucleotide
  Sense strand starting at position 2580 of SEQ ID NO: 317089
cuuagugaguaaucuuauu

SEQ ID NO: 463692 - RNA, 19 nt, Artificial Sequence
  Description of Artificial Sequence: Synthetic oligonucleotide
  Antisense Strand to SEQ ID NO: 463691
aauaagauuacucacuaag

SEQ ID NO: 463693 - RNA, 19 nt, Artificial Sequence
  Description of Artificial Sequence: Synthetic oligonucleotide
  Sense strand starting at position 2781 of SEQ ID NO: 317089
cuaguugaauuaucugaau

SEQ ID NO: 463694 - RNA, 19 nt, Artificial Sequence
  Description of Artificial Sequence: Synthetic oligonucleotide
  Antisense Strand to SEQ ID NO: 463693
auucagauaauucaacuag

SEQ ID NO: 463695 - RNA, 19 nt, Artificial Sequence
  Description of Artificial Sequence: Synthetic oligonucleotide
  Sense strand starting at position 2988 of SEQ ID NO: 317089
uaaucaggguucucuagau

SEQ ID NO: 463696 - RNA, 19 nt, Artificial Sequence
  Description of Artificial Sequence: Synthetic oligonucleotide
  Antisense Strand to SEQ ID NO: 463695
aucuagagaacccugauua

SEQ ID NO: 463697 - RNA, 19 nt, Artificial Sequence
  Description of Artificial Sequence: Synthetic oligonucleotide
  Sense strand starting at position 3387 of SEQ ID NO: 317089
ucuccuagguccucacaua

SEQ ID NO: 463698 - RNA, 19 nt, Artificial Sequence
  Description of Artificial Sequence: Synthetic oligonucleotide
  Antisense Strand to SEQ ID NO: 463697
uaugugaggaccuaggaga

SEQ ID NO: 463699 - RNA, 19 nt, Artificial Sequence
  Description of Artificial Sequence: Synthetic oligonucleotide
  Sense strand starting at position 3462 of SEQ ID NO: 317089
auguucuauuucucaguuu

SEQ ID NO: 463700 - RNA, 19 nt, Artificial Sequence
  Description of Artificial Sequence: Synthetic oligonucleotide
  Antisense Strand to SEQ ID NO: 463699
aaacugagaaauagaacau

SEQ ID NO: 463701 - RNA, 19 nt, Artificial Sequence
  Description of Artificial Sequence: Synthetic oligonucleotide
  Sense strand starting at position 3476 of SEQ ID NO: 317089
aguuucugucaucaauaga

SEQ ID NO: 463702 - RNA, 19 nt, Artificial Sequence
  Description of Artificial Sequence: Synthetic oligonucleotide
  Antisense Strand to SEQ ID NO: 463701
ucuauugaugacagaaacu

SEQ ID NO: 463703 - RNA, 19 nt, Artificial Sequence
  Description of Artificial Sequence: Synthetic oligonucleotide
  Sense strand starting at position 3662 of SEQ ID NO: 317089
agucuuaaacuguaauacu

SEQ ID NO: 463704 - RNA, 19 nt, Artificial Sequence
  Description of Artificial Sequence: Synthetic oligonucleotide
  Antisense Strand to SEQ ID NO: 463703
aguauuacaguuuaagacu

SEQ ID NO: 463705 - RNA, 19 nt, Artificial Sequence
  Description of Artificial Sequence: Synthetic oligonucleotide
  Sense strand starting at position 3810 of SEQ ID NO: 317089
gcauguaucucaucuaaga

SEQ ID NO: 463706 - RNA, 19 nt, Artificial Sequence
  Description of Artificial Sequence: Synthetic oligonucleotide
  Antisense Strand to SEQ ID NO: 463705
ucuuagaugagauacaugc

SEQ ID NO: 463707 - RNA, 19 nt, Artificial Sequence
  Description of Artificial Sequence: Synthetic oligonucleotide
  Sense strand starting at position 3823 of SEQ ID NO: 317089
cuaagauguccagacucuu

SEQ ID NO: 463708 - RNA, 19 nt, Artificial Sequence
  Description of Artificial Sequence: Synthetic oligonucleotide
  Antisense Strand to SEQ ID NO: 463707
aagagucuggacaucuuag

SEQ ID NO: 463709 - RNA, 19 nt, Artificial Sequence
  Description of Artificial Sequence: Synthetic oligonucleotide
  Sense strand starting at position 3909 of SEQ ID NO: 317089
gcccaagucccacaaugua

SEQ ID NO: 463710 - RNA, 19 nt, Artificial Sequence
  Description of Artificial Sequence: Synthetic oligonucleotide
  Antisense Strand to SEQ ID NO: 463709
uacauugugggacuugggc

SEQ ID NO: 463711 - RNA, 19 nt, Artificial Sequence
  Description of Artificial Sequence: Synthetic oligonucleotide
  Sense strand starting at position 3969 of SEQ ID NO: 317089
ucaucauuccucugggaca

SEQ ID NO: 463712 - RNA, 19 nt, Artificial Sequence
  Description of Artificial Sequence: Synthetic oligonucleotide
  Antisense Strand to SEQ ID NO: 463711
ugucccagaggaaugauga

SEQ ID NO: 463713 - RNA, 19 nt, Artificial Sequence
  Description of Artificial Sequence: Synthetic oligonucleotide
  Sense strand starting at position 3971 of SEQ ID NO: 317089
aucauuccucugggacaca

SEQ ID NO: 463714 - RNA, 19 nt, Artificial Sequence
  Description of Artificial Sequence: Synthetic oligonucleotide
  Antisense Strand to SEQ ID NO: 463713
ugugucccagaggaaugau

SEQ ID NO: 463715 - RNA, 19 nt, Artificial Sequence
  Description of Artificial Sequence: Synthetic oligonucleotide
  Sense strand starting at position 24 of SEQ ID NO: 317090
ccagauucuguuuguagag

SEQ ID NO: 463716 - RNA, 19 nt, Artificial Sequence
  Description of Artificial Sequence: Synthetic oligonucleotide
  Antisense Strand to SEQ ID NO: 463715
cucuacaaacagaaucugg

SEQ ID NO: 463717 - RNA, 19 nt, Artificial Sequence
  Description of Artificial Sequence: Synthetic oligonucleotide
  Sense strand starting at position 25 of SEQ ID NO: 317090
cagauucuguuuguagagu

SEQ ID NO: 463718 - RNA, 19 nt, Artificial Sequence
  Description of Artificial Sequence: Synthetic oligonucleotide
  Antisense Strand to SEQ ID NO: 463717
acucuacaaacagaaucug

SEQ ID NO: 463719 - RNA, 19 nt, Artificial Sequence
  Description of Artificial Sequence: Synthetic oligonucleotide
  Sense strand starting at position 34 of SEQ ID NO: 317090
uuuguagaguccucuacaa

SEQ ID NO: 463720 - RNA, 19 nt, Artificial Sequence
  Description of Artificial Sequence: Synthetic oligonucleotide
  Antisense Strand to SEQ ID NO: 463719
uuguagaggacucuacaaa

SEQ ID NO: 463721 - RNA, 19 nt, Artificial Sequence
  Description of Artificial Sequence: Synthetic oligonucleotide
  Sense strand starting at position 36 of SEQ ID NO: 317090
uguagaguccucuacaaau

SEQ ID NO: 463722 - RNA, 19 nt, Artificial Sequence
  Description of Artificial Sequence: Synthetic oligonucleotide
  Antisense Strand to SEQ ID NO: 463721
auuuguagaggacucuaca

SEQ ID NO: 463723 - RNA, 19 nt, Artificial Sequence
  Description of Artificial Sequence: Synthetic oligonucleotide
  Sense strand starting at position 58 of SEQ ID NO: 317090
uaggguugucuugacucuu

SEQ ID NO: 463724 - RNA, 19 nt, Artificial Sequence
  Description of Artificial Sequence: Synthetic oligonucleotide
  Antisense Strand to SEQ ID NO: 463723
aagagucaagacaacccua

SEQ ID NO: 463725 - RNA, 19 nt, Artificial Sequence
  Description of Artificial Sequence: Synthetic oligonucleotide
  Sense strand starting at position 174 of SEQ ID NO: 317090
auuagcaguucugugauga

SEQ ID NO: 463726 - RNA, 19 nt, Artificial Sequence
  Description of Artificial Sequence: Synthetic oligonucleotide
  Antisense Strand to SEQ ID NO: 463725
ucaucacagaacugcuaau

SEQ ID NO: 463727 - RNA, 19 nt, Artificial Sequence
  Description of Artificial Sequence: Synthetic oligonucleotide
  Sense strand starting at position 175 of SEQ ID NO: 317090
uuagcaguucugugaugaa

SEQ ID NO: 463728 - RNA, 19 nt, Artificial Sequence
  Description of Artificial Sequence: Synthetic oligonucleotide
  Antisense Strand to SEQ ID NO: 463727
uucaucacagaacugcuaa

SEQ ID NO: 463729 - RNA, 19 nt, Artificial Sequence
  Description of Artificial Sequence: Synthetic oligonucleotide
  Sense strand starting at position 179 of SEQ ID NO: 317090
caguucugugaugaauuau

SEQ ID NO: 463730 - RNA, 19 nt, Artificial Sequence
  Description of Artificial Sequence: Synthetic oligonucleotide
  Antisense Strand to SEQ ID NO: 463729
auaauucaucacagaacug

SEQ ID NO: 463731 - RNA, 19 nt, Artificial Sequence
  Description of Artificial Sequence: Synthetic oligonucleotide
  Sense strand starting at position 269 of SEQ ID NO: 317090
uuuagacuagcaugguaau

SEQ ID NO: 463732 - RNA, 19 nt, Artificial Sequence
  Description of Artificial Sequence: Synthetic oligonucleotide
  Antisense Strand to SEQ ID NO: 463731
auuaccaugcuagucuaaa

SEQ ID NO: 463733 - RNA, 19 nt, Artificial Sequence
  Description of Artificial Sequence: Synthetic oligonucleotide
  Sense strand starting at position 270 of SEQ ID NO: 317090
uuagacuagcaugguaaua

SEQ ID NO: 463734 - RNA, 19 nt, Artificial Sequence
  Description of Artificial Sequence: Synthetic oligonucleotide
  Antisense Strand to SEQ ID NO: 463733
uauuaccaugcuagucuaa

SEQ ID NO: 463735 - RNA, 19 nt, Artificial Sequence
  Description of Artificial Sequence: Synthetic oligonucleotide
  Sense strand starting at position 303 of SEQ ID NO: 317090
ggccaauauuuauaugaca

SEQ ID NO: 463736 - RNA, 19 nt, Artificial Sequence
  Description of Artificial Sequence: Synthetic oligonucleotide
  Antisense Strand to SEQ ID NO: 463735
ugucauauaaauauuggcc

SEQ ID NO: 463737 - RNA, 19 nt, Artificial Sequence
  Description of Artificial Sequence: Synthetic oligonucleotide
  Sense strand starting at position 433 of SEQ ID NO: 317090
aaguguuuccaggaggagu

SEQ ID NO: 463738 - RNA, 19 nt, Artificial Sequence
  Description of Artificial Sequence: Synthetic oligonucleotide
  Antisense Strand to SEQ ID NO: 463737
acuccuccuggaaacacuu

SEQ ID NO: 463739 - RNA, 19 nt, Artificial Sequence
  Description of Artificial Sequence: Synthetic oligonucleotide
  Sense strand starting at position 550 of SEQ ID NO: 317090
aaacaagccugaguuaugu

SEQ ID NO: 463740 - RNA, 19 nt, Artificial Sequence
  Description of Artificial Sequence: Synthetic oligonucleotide
  Antisense Strand to SEQ ID NO: 463739
acauaacucaggcuuguuu

SEQ ID NO: 463741 - RNA, 19 nt, Artificial Sequence
  Description of Artificial Sequence: Synthetic oligonucleotide
  Sense strand starting at position 558 of SEQ ID NO: 317090
cugaguuaugugcaaccca

SEQ ID NO: 463742 - RNA, 19 nt, Artificial Sequence
  Description of Artificial Sequence: Synthetic oligonucleotide
  Antisense Strand to SEQ ID NO: 463741
uggguugcacauaacucag

SEQ ID NO: 463743 - RNA, 19 nt, Artificial Sequence
  Description of Artificial Sequence: Synthetic oligonucleotide
  Sense strand starting at position 932 of SEQ ID NO: 317090
gauccuauagcugauaagu

SEQ ID NO: 463744 - RNA, 19 nt, Artificial Sequence
  Description of Artificial Sequence: Synthetic oligonucleotide
  Antisense Strand to SEQ ID NO: 463743
acuuaucagcuauaggauc

SEQ ID NO: 463745 - RNA, 19 nt, Artificial Sequence
  Description of Artificial Sequence: Synthetic oligonucleotide
  Sense strand starting at position 938 of SEQ ID NO: 317090
auagcugauaagugucaga

SEQ ID NO: 463746 - RNA, 19 nt, Artificial Sequence
  Description of Artificial Sequence: Synthetic oligonucleotide
  Antisense Strand to SEQ ID NO: 463745
ucugacacuuaucagcuau

SEQ ID NO: 463747 - RNA, 19 nt, Artificial Sequence
  Description of Artificial Sequence: Synthetic oligonucleotide
  Sense strand starting at position 972 of SEQ ID NO: 317090
cagacuaucuggcuccaga

SEQ ID NO: 463748 - RNA, 19 nt, Artificial Sequence
  Description of Artificial Sequence: Synthetic oligonucleotide
  Antisense Strand to SEQ ID NO: 463747
ucuggagccagauagucug

SEQ ID NO: 463749 - RNA, 19 nt, Artificial Sequence
  Description of Artificial Sequence: Synthetic oligonucleotide
  Sense strand starting at position 1058 of SEQ ID NO: 317090
gaacuaaagccaugguuag

SEQ ID NO: 463750 - RNA, 19 nt, Artificial Sequence
  Description of Artificial Sequence: Synthetic oligonucleotide
  Antisense Strand to SEQ ID NO: 463749
cuaaccauggcuuuaguuc

SEQ ID NO: 463751 - RNA, 19 nt, Artificial Sequence
  Description of Artificial Sequence: Synthetic oligonucleotide
  Sense strand starting at position 1154 of SEQ ID NO: 317090
aggagagaguguguaauua

SEQ ID NO: 463752 - RNA, 19 nt, Artificial Sequence
  Description of Artificial Sequence: Synthetic oligonucleotide
  Antisense Strand to SEQ ID NO: 463751
uaauuacacacucucuccu

SEQ ID NO: 463753 - RNA, 19 nt, Artificial Sequence
  Description of Artificial Sequence: Synthetic oligonucleotide
  Sense strand starting at position 1158 of SEQ ID NO: 317090
gagaguguguaauuagauc

SEQ ID NO: 463754 - RNA, 19 nt, Artificial Sequence
  Description of Artificial Sequence: Synthetic oligonucleotide
  Antisense Strand to SEQ ID NO: 463753
gaucuaauuacacacucuc

SEQ ID NO: 463755 - RNA, 19 nt, Artificial Sequence
  Description of Artificial Sequence: Synthetic oligonucleotide
  Sense strand starting at position 1171 of SEQ ID NO: 317090
uagaucuauuaagugguua

SEQ ID NO: 463756 - RNA, 19 nt, Artificial Sequence
  Description of Artificial Sequence: Synthetic oligonucleotide
  Antisense Strand to SEQ ID NO: 463755
uaaccacuuaauagaucua

SEQ ID NO: 463757 - RNA, 19 nt, Artificial Sequence
  Description of Artificial Sequence: Synthetic oligonucleotide
  Sense strand starting at position 1189 of SEQ ID NO: 317090
agugccaauccagguauua

SEQ ID NO: 463758 - RNA, 19 nt, Artificial Sequence
  Description of Artificial Sequence: Synthetic oligonucleotide
  Antisense Strand to SEQ ID NO: 463757
uaauaccuggauuggcacu

SEQ ID NO: 463759 - RNA, 19 nt, Artificial Sequence
  Description of Artificial Sequence: Synthetic oligonucleotide
  Sense strand starting at position 1204 of SEQ ID NO: 317090
auuagacauuuggguuaca

SEQ ID NO: 463760 - RNA, 19 nt, Artificial Sequence
  Description of Artificial Sequence: Synthetic oligonucleotide
  Antisense Strand to SEQ ID NO: 463759
uguaacccaaaugucuaau

SEQ ID NO: 463761 - RNA, 19 nt, Artificial Sequence
  Description of Artificial Sequence: Synthetic oligonucleotide
  Sense strand starting at position 1209 of SEQ ID NO: 317090
acauuuggguuacacauaa

SEQ ID NO: 463762 - RNA, 19 nt, Artificial Sequence
  Description of Artificial Sequence: Synthetic oligonucleotide
  Antisense Strand to SEQ ID NO: 463761
uuauguguaacccaaaugu

SEQ ID NO: 463763 - RNA, 19 nt, Artificial Sequence
  Description of Artificial Sequence: Synthetic oligonucleotide
  Sense strand starting at position 1237 of SEQ ID NO: 317090
ucacucuaagcaugcaaga

SEQ ID NO: 463764 - RNA, 19 nt, Artificial Sequence
  Description of Artificial Sequence: Synthetic oligonucleotide
  Antisense Strand to SEQ ID NO: 463763
ucuugcaugcuuagaguga

SEQ ID NO: 463765 - RNA, 19 nt, Artificial Sequence
  Description of Artificial Sequence: Synthetic oligonucleotide
  Sense strand starting at position 1261 of SEQ ID NO: 317090
aaauuauuguaggcaugga

SEQ ID NO: 463766 - RNA, 19 nt, Artificial Sequence
  Description of Artificial Sequence: Synthetic oligonucleotide
  Antisense Strand to SEQ ID NO: 463765
uccaugccuacaauaauuu

SEQ ID NO: 463767 - RNA, 19 nt, Artificial Sequence
  Description of Artificial Sequence: Synthetic oligonucleotide
  Sense strand starting at position 1506 of SEQ ID NO: 317090
gggaccgagucagagauuu

SEQ ID NO: 463768 - RNA, 19 nt, Artificial Sequence
  Description of Artificial Sequence: Synthetic oligonucleotide
  Antisense Strand to SEQ ID NO: 463767
aaaucucugacucgguccc

SEQ ID NO: 463769 - RNA, 19 nt, Artificial Sequence
  Description of Artificial Sequence: Synthetic oligonucleotide
  Sense strand starting at position 1532 of SEQ ID NO: 317090
agcuaagcuugccuauaaa

SEQ ID NO: 463770 - RNA, 19 nt, Artificial Sequence
  Description of Artificial Sequence: Synthetic oligonucleotide
  Antisense Strand to SEQ ID NO: 463769
uuuauaggcaagcuuagcu

SEQ ID NO: 463771 - RNA, 19 nt, Artificial Sequence
  Description of Artificial Sequence: Synthetic oligonucleotide
  Sense strand starting at position 1592 of SEQ ID NO: 317090
gcuaguugcaaaggagaga

SEQ ID NO: 463772 - RNA, 19 nt, Artificial Sequence
  Description of Artificial Sequence: Synthetic oligonucleotide
  Antisense Strand to SEQ ID NO: 463771
ucucuccuuugcaacuagc

SEQ ID NO: 463773 - RNA, 19 nt, Artificial Sequence
  Description of Artificial Sequence: Synthetic oligonucleotide
  Sense strand starting at position 1721 of SEQ ID NO: 317090
uuaggaaugccgcaagaac

SEQ ID NO: 463774 - RNA, 19 nt, Artificial Sequence
  Description of Artificial Sequence: Synthetic oligonucleotide
  Antisense Strand to SEQ ID NO: 463773
guucuugcggcauuccuaa

SEQ ID NO: 463775 - RNA, 19 nt, Artificial Sequence
  Description of Artificial Sequence: Synthetic oligonucleotide
  Sense strand starting at position 1866 of SEQ ID NO: 317090
aggucuagauuauccgaga

SEQ ID NO: 463776 - RNA, 19 nt, Artificial Sequence
  Description of Artificial Sequence: Synthetic oligonucleotide
  Antisense Strand to SEQ ID NO: 463775
ucucggauaaucuagaccu

SEQ ID NO: 463777 - RNA, 19 nt, Artificial Sequence
  Description of Artificial Sequence: Synthetic oligonucleotide
  Sense strand starting at position 1867 of SEQ ID NO: 317090
ggucuagauuauccgagaa

SEQ ID NO: 463778 - RNA, 19 nt, Artificial Sequence
  Description of Artificial Sequence: Synthetic oligonucleotide
  Antisense Strand to SEQ ID NO: 463777
uucucggauaaucuagacc

SEQ ID NO: 463779 - RNA, 19 nt, Artificial Sequence
  Description of Artificial Sequence: Synthetic oligonucleotide
  Sense strand starting at position 1917 of SEQ ID NO: 317090
uagagagcugcgugaaaua

SEQ ID NO: 463780 - RNA, 19 nt, Artificial Sequence
  Description of Artificial Sequence: Synthetic oligonucleotide
  Antisense Strand to SEQ ID NO: 463779
uauuucacgcagcucucua

SEQ ID NO: 463781 - RNA, 19 nt, Artificial Sequence
  Description of Artificial Sequence: Synthetic oligonucleotide
  Sense strand starting at position 2109 of SEQ ID NO: 317090
gucucuuggccagaacuca

SEQ ID NO: 463782 - RNA, 19 nt, Artificial Sequence
  Description of Artificial Sequence: Synthetic oligonucleotide
  Antisense Strand to SEQ ID NO: 463781
ugaguucuggccaagagac

SEQ ID NO: 463783 - RNA, 19 nt, Artificial Sequence
  Description of Artificial Sequence: Synthetic oligonucleotide
  Sense strand starting at position 2173 of SEQ ID NO: 317090
gaaggagagcccuguuuau

SEQ ID NO: 463784 - RNA, 19 nt, Artificial Sequence
  Description of Artificial Sequence: Synthetic oligonucleotide
  Antisense Strand to SEQ ID NO: 463783
auaaacagggcucuccuuc

SEQ ID NO: 463785 - RNA, 19 nt, Artificial Sequence
  Description of Artificial Sequence: Synthetic oligonucleotide
  Sense strand starting at position 3164 of SEQ ID NO: 317090
gaaggauaguuauuaagcu

SEQ ID NO: 463786 - RNA, 19 nt, Artificial Sequence
  Description of Artificial Sequence: Synthetic oligonucleotide
  Antisense Strand to SEQ ID NO: 463785
agcuuaauaacuauccuuc

SEQ ID NO: 463787 - RNA, 19 nt, Artificial Sequence
  Description of Artificial Sequence: Synthetic oligonucleotide
  Sense strand starting at position 3482 of SEQ ID NO: 317090
cuccaagaagucuggaagu

SEQ ID NO: 463788 - RNA, 19 nt, Artificial Sequence
  Description of Artificial Sequence: Synthetic oligonucleotide
  Antisense Strand to SEQ ID NO: 463787
acuuccagacuucuuggag

SEQ ID NO: 463789 - RNA, 19 nt, Artificial Sequence
  Description of Artificial Sequence: Synthetic oligonucleotide
  Sense strand starting at position 3488 of SEQ ID NO: 317090
gaagucuggaaguauguua

SEQ ID NO: 463790 - RNA, 19 nt, Artificial Sequence
  Description of Artificial Sequence: Synthetic oligonucleotide
  Antisense Strand to SEQ ID NO: 463789
uaacauacuuccagacuuc

SEQ ID NO: 463791 - RNA, 19 nt, Artificial Sequence
  Description of Artificial Sequence: Synthetic oligonucleotide
  Sense strand starting at position 3522 of SEQ ID NO: 317090
gaauaaugguguuccugag

SEQ ID NO: 463792 - RNA, 19 nt, Artificial Sequence
  Description of Artificial Sequence: Synthetic oligonucleotide
  Antisense Strand to SEQ ID NO: 463791
cucaggaacaccauuauuc

SEQ ID NO: 463793 - RNA, 19 nt, Artificial Sequence
  Description of Artificial Sequence: Synthetic oligonucleotide
  Sense strand starting at position 3956 of SEQ ID NO: 317090
ggaauucgccacuaccaaa

SEQ ID NO: 463794 - RNA, 19 nt, Artificial Sequence
  Description of Artificial Sequence: Synthetic oligonucleotide
  Antisense Strand to SEQ ID NO: 463793
uuugguaguggcgaauucc

SEQ ID NO: 463795 - RNA, 19 nt, Artificial Sequence
  Description of Artificial Sequence: Synthetic oligonucleotide
  Sense strand starting at position 18 of SEQ ID NO: 317091
gagaaaugguccuuacugc

SEQ ID NO: 463796 - RNA, 19 nt, Artificial Sequence
  Description of Artificial Sequence: Synthetic oligonucleotide
  Antisense Strand to SEQ ID NO: 463795
gcaguaaggaccauuucuc

SEQ ID NO: 463797 - RNA, 19 nt, Artificial Sequence
  Description of Artificial Sequence: Synthetic oligonucleotide
  Sense strand starting at position 19 of SEQ ID NO: 317091
agaaaugguccuuacugca

SEQ ID NO: 463798 - RNA, 19 nt, Artificial Sequence
  Description of Artificial Sequence: Synthetic oligonucleotide
  Antisense Strand to SEQ ID NO: 463797
ugcaguaaggaccauuucu

SEQ ID NO: 463799 - RNA, 19 nt, Artificial Sequence
  Description of Artificial Sequence: Synthetic oligonucleotide
  Sense strand starting at position 111 of SEQ ID NO: 317091
ggagauauuggauguugug

SEQ ID NO: 463800 - RNA, 19 nt, Artificial Sequence
  Description of Artificial Sequence: Synthetic oligonucleotide
  Antisense Strand to SEQ ID NO: 463799
cacaacauccaauaucucc

SEQ ID NO: 463801 - RNA, 19 nt, Artificial Sequence
  Description of Artificial Sequence: Synthetic oligonucleotide
  Sense strand starting at position 174 of SEQ ID NO: 317091
acuguagucuaucccauau

SEQ ID NO: 463802 - RNA, 19 nt, Artificial Sequence
  Description of Artificial Sequence: Synthetic oligonucleotide
  Antisense Strand to SEQ ID NO: 463801
auaugggauagacuacagu

SEQ ID NO: 463803 - RNA, 19 nt, Artificial Sequence
  Description of Artificial Sequence: Synthetic oligonucleotide
  Sense strand starting at position 303 of SEQ ID NO: 317091
uguaaacaaccuugugauu

SEQ ID NO: 463804 - RNA, 19 nt, Artificial Sequence
  Description of Artificial Sequence: Synthetic oligonucleotide
  Antisense Strand to SEQ ID NO: 463803
aaucacaagguuguuuaca

SEQ ID NO: 463805 - RNA, 19 nt, Artificial Sequence
  Description of Artificial Sequence: Synthetic oligonucleotide
  Sense strand starting at position 382 of SEQ ID NO: 317091
cugggaaguuaucuguuua

SEQ ID NO: 463806 - RNA, 19 nt, Artificial Sequence
  Description of Artificial Sequence: Synthetic oligonucleotide
  Antisense Strand to SEQ ID NO: 463805
uaaacagauaacuucccag

SEQ ID NO: 463807 - RNA, 19 nt, Artificial Sequence
  Description of Artificial Sequence: Synthetic oligonucleotide
  Sense strand starting at position 383 of SEQ ID NO: 317091
ugggaaguuaucuguuuaa

SEQ ID NO: 463808 - RNA, 19 nt, Artificial Sequence
  Description of Artificial Sequence: Synthetic oligonucleotide
  Antisense Strand to SEQ ID NO: 463807
uuaaacagauaacuuccca

SEQ ID NO: 463809 - RNA, 19 nt, Artificial Sequence
  Description of Artificial Sequence: Synthetic oligonucleotide
  Sense strand starting at position 386 of SEQ ID NO: 317091
gaaguuaucuguuuaaggg

SEQ ID NO: 463810 - RNA, 19 nt, Artificial Sequence
  Description of Artificial Sequence: Synthetic oligonucleotide
  Antisense Strand to SEQ ID NO: 463809
cccuuaaacagauaacuuc

SEQ ID NO: 463811 - RNA, 19 nt, Artificial Sequence
  Description of Artificial Sequence: Synthetic oligonucleotide
  Sense strand starting at position 415 of SEQ ID NO: 317091
gagacuaggucucuagauu

SEQ ID NO: 463812 - RNA, 19 nt, Artificial Sequence
  Description of Artificial Sequence: Synthetic oligonucleotide
  Antisense Strand to SEQ ID NO: 463811
aaucuagagaccuagucuc

SEQ ID NO: 463813 - RNA, 19 nt, Artificial Sequence
  Description of Artificial Sequence: Synthetic oligonucleotide
  Sense strand starting at position 629 of SEQ ID NO: 317091
acaguaucccagcacagaa

SEQ ID NO: 463814 - RNA, 19 nt, Artificial Sequence
  Description of Artificial Sequence: Synthetic oligonucleotide
  Antisense Strand to SEQ ID NO: 463813
uucugugcugggauacugu

SEQ ID NO: 463815 - RNA, 19 nt, Artificial Sequence
  Description of Artificial Sequence: Synthetic oligonucleotide
  Sense strand starting at position 651 of SEQ ID NO: 317091
cugggaaucuugccaugaa

SEQ ID NO: 463816 - RNA, 19 nt, Artificial Sequence
  Description of Artificial Sequence: Synthetic oligonucleotide
  Antisense Strand to SEQ ID NO: 463815
uucauggcaagauucccag

SEQ ID NO: 463817 - RNA, 19 nt, Artificial Sequence
  Description of Artificial Sequence: Synthetic oligonucleotide
  Sense strand starting at position 682 of SEQ ID NO: 317091
gacugcugugacuaggaga

SEQ ID NO: 463818 - RNA, 19 nt, Artificial Sequence
  Description of Artificial Sequence: Synthetic oligonucleotide
  Antisense Strand to SEQ ID NO: 463817
ucuccuagucacagcaguc

SEQ ID NO: 463819 - RNA, 19 nt, Artificial Sequence
  Description of Artificial Sequence: Synthetic oligonucleotide
  Sense strand starting at position 809 of SEQ ID NO: 317091
uagaguugcucugcaagag

SEQ ID NO: 463820 - RNA, 19 nt, Artificial Sequence
  Description of Artificial Sequence: Synthetic oligonucleotide
  Antisense Strand to SEQ ID NO: 463819
cucuugcagagcaacucua

SEQ ID NO: 463821 - RNA, 19 nt, Artificial Sequence
  Description of Artificial Sequence: Synthetic oligonucleotide
  Sense strand starting at position 810 of SEQ ID NO: 317091
agaguugcucugcaagagu

SEQ ID NO: 463822 - RNA, 19 nt, Artificial Sequence
  Description of Artificial Sequence: Synthetic oligonucleotide
  Antisense Strand to SEQ ID NO: 463821
acucuugcagagcaacucu

SEQ ID NO: 463823 - RNA, 19 nt, Artificial Sequence
  Description of Artificial Sequence: Synthetic oligonucleotide
  Sense strand starting at position 1242 of SEQ ID NO: 317091
aagagauguucugcacaga

SEQ ID NO: 463824 - RNA, 19 nt, Artificial Sequence
  Description of Artificial Sequence: Synthetic oligonucleotide
  Antisense Strand to SEQ ID NO: 463823
ucugugcagaacaucucuu

SEQ ID NO: 463825 - RNA, 19 nt, Artificial Sequence
  Description of Artificial Sequence: Synthetic oligonucleotide
  Sense strand starting at position 1569 of SEQ ID NO: 317091
uaacgauggacaggugauu

SEQ ID NO: 463826 - RNA, 19 nt, Artificial Sequence
  Description of Artificial Sequence: Synthetic oligonucleotide
  Antisense Strand to SEQ ID NO: 463825
aaucaccuguccaucguua

SEQ ID NO: 463827 - RNA, 19 nt, Artificial Sequence
  Description of Artificial Sequence: Synthetic oligonucleotide
  Sense strand starting at position 1578 of SEQ ID NO: 317091
acaggugauuuccaagaaa

SEQ ID NO: 463828 - RNA, 19 nt, Artificial Sequence
  Description of Artificial Sequence: Synthetic oligonucleotide
  Antisense Strand to SEQ ID NO: 463827
uuucuuggaaaucaccugu

SEQ ID NO: 463829 - RNA, 19 nt, Artificial Sequence
  Description of Artificial Sequence: Synthetic oligonucleotide
  Sense strand starting at position 1755 of SEQ ID NO: 317091
agaagaguggcuugcugaa

SEQ ID NO: 463830 - RNA, 19 nt, Artificial Sequence
  Description of Artificial Sequence: Synthetic oligonucleotide
  Antisense Strand to SEQ ID NO: 463829
uucagcaagccacucuucu

SEQ ID NO: 463831 - RNA, 19 nt, Artificial Sequence
  Description of Artificial Sequence: Synthetic oligonucleotide
  Sense strand starting at position 2264 of SEQ ID NO: 317091
auuugagugucgccugaac

SEQ ID NO: 463832 - RNA, 19 nt, Artificial Sequence
  Description of Artificial Sequence: Synthetic oligonucleotide
  Antisense Strand to SEQ ID NO: 463831
guucaggcgacacucaaau

SEQ ID NO: 463833 - RNA, 19 nt, Artificial Sequence
  Description of Artificial Sequence: Synthetic oligonucleotide
  Sense strand starting at position 2388 of SEQ ID NO: 317091
uugcaaucugaguguacaa

SEQ ID NO: 463834 - RNA, 19 nt, Artificial Sequence
  Description of Artificial Sequence: Synthetic oligonucleotide
  Antisense Strand to SEQ ID NO: 463833
uuguacacucagauugcaa

SEQ ID NO: 463835 - RNA, 19 nt, Artificial Sequence
  Description of Artificial Sequence: Synthetic oligonucleotide
  Sense strand starting at position 2390 of SEQ ID NO: 317091
gcaaucugaguguacaaag

SEQ ID NO: 463836 - RNA, 19 nt, Artificial Sequence
  Description of Artificial Sequence: Synthetic oligonucleotide
  Antisense Strand to SEQ ID NO: 463835
cuuuguacacucagauugc

SEQ ID NO: 463837 - RNA, 19 nt, Artificial Sequence
  Description of Artificial Sequence: Synthetic oligonucleotide
  Sense strand starting at position 2530 of SEQ ID NO: 317091
ucaguaauuugcucugccu

SEQ ID NO: 463838 - RNA, 19 nt, Artificial Sequence
  Description of Artificial Sequence: Synthetic oligonucleotide
  Antisense Strand to SEQ ID NO: 463837
aggcagagcaaauuacuga

SEQ ID NO: 463839 - RNA, 19 nt, Artificial Sequence
  Description of Artificial Sequence: Synthetic oligonucleotide
  Sense strand starting at position 2532 of SEQ ID NO: 317091
aguaauuugcucugccuuu

SEQ ID NO: 463840 - RNA, 19 nt, Artificial Sequence
  Description of Artificial Sequence: Synthetic oligonucleotide
  Antisense Strand to SEQ ID NO: 463839
aaaggcagagcaaauuacu

SEQ ID NO: 463841 - RNA, 19 nt, Artificial Sequence
  Description of Artificial Sequence: Synthetic oligonucleotide
  Sense strand starting at position 2533 of SEQ ID NO: 317091
guaauuugcucugccuuua

SEQ ID NO: 463842 - RNA, 19 nt, Artificial Sequence
  Description of Artificial Sequence: Synthetic oligonucleotide
  Antisense Strand to SEQ ID NO: 463841
uaaaggcagagcaaauuac

SEQ ID NO: 463843 - RNA, 19 nt, Artificial Sequence
  Description of Artificial Sequence: Synthetic oligonucleotide
  Sense strand starting at position 2606 of SEQ ID NO: 317091
aguuucuuagaaugacaac

SEQ ID NO: 463844 - RNA, 19 nt, Artificial Sequence
  Description of Artificial Sequence: Synthetic oligonucleotide
  Antisense Strand to SEQ ID NO: 463843
guugucauucuaagaaacu

SEQ ID NO: 463845 - RNA, 19 nt, Artificial Sequence
  Description of Artificial Sequence: Synthetic oligonucleotide
  Sense strand starting at position 2826 of SEQ ID NO: 317091
aguuguaaaugauuccaca

SEQ ID NO: 463846 - RNA, 19 nt, Artificial Sequence
  Description of Artificial Sequence: Synthetic oligonucleotide
  Antisense Strand to SEQ ID NO: 463845
uguggaaucauuuacaacu

SEQ ID NO: 463847 - RNA, 19 nt, Artificial Sequence
  Description of Artificial Sequence: Synthetic oligonucleotide
  Sense strand starting at position 2834 of SEQ ID NO: 317091
augauuccacauuauguuu

SEQ ID NO: 463848 - RNA, 19 nt, Artificial Sequence
  Description of Artificial Sequence: Synthetic oligonucleotide
  Antisense Strand to SEQ ID NO: 463847
aaacauaauguggaaucau

SEQ ID NO: 463849 - RNA, 19 nt, Artificial Sequence
  Description of Artificial Sequence: Synthetic oligonucleotide
  Sense strand starting at position 2969 of SEQ ID NO: 317091
guaagaaacgcauacguuu

SEQ ID NO: 463850 - RNA, 19 nt, Artificial Sequence
  Description of Artificial Sequence: Synthetic oligonucleotide
  Antisense Strand to SEQ ID NO: 463849
aaacguaugcguuucuuac

SEQ ID NO: 463851 - RNA, 19 nt, Artificial Sequence
  Description of Artificial Sequence: Synthetic oligonucleotide
  Sense strand starting at position 3080 of SEQ ID NO: 317091
uggauaaguguuuggaugu

SEQ ID NO: 463852 - RNA, 19 nt, Artificial Sequence
  Description of Artificial Sequence: Synthetic oligonucleotide
  Antisense Strand to SEQ ID NO: 463851
acauccaaacacuuaucca

SEQ ID NO: 463853 - RNA, 19 nt, Artificial Sequence
  Description of Artificial Sequence: Synthetic oligonucleotide
  Sense strand starting at position 3160 of SEQ ID NO: 317091
ugggccuaccugcaagaua

SEQ ID NO: 463854 - RNA, 19 nt, Artificial Sequence
  Description of Artificial Sequence: Synthetic oligonucleotide
  Antisense Strand to SEQ ID NO: 463853
uaucuugcagguaggccca

SEQ ID NO: 463855 - RNA, 19 nt, Artificial Sequence
  Description of Artificial Sequence: Synthetic oligonucleotide
  Sense strand starting at position 3307 of SEQ ID NO: 317091
auuaaaucaguuugucgaa

SEQ ID NO: 463856 - RNA, 19 nt, Artificial Sequence
  Description of Artificial Sequence: Synthetic oligonucleotide
  Antisense Strand to SEQ ID NO: 463855
uucgacaaacugauuuaau

SEQ ID NO: 463857 - RNA, 19 nt, Artificial Sequence
  Description of Artificial Sequence: Synthetic oligonucleotide
  Sense strand starting at position 3309 of SEQ ID NO: 317091
uaaaucaguuugucgaaga

SEQ ID NO: 463858 - RNA, 19 nt, Artificial Sequence
  Description of Artificial Sequence: Synthetic oligonucleotide
  Antisense Strand to SEQ ID NO: 463857
ucuucgacaaacugauuua

SEQ ID NO: 463859 - RNA, 19 nt, Artificial Sequence
  Description of Artificial Sequence: Synthetic oligonucleotide
  Sense strand starting at position 3314 of SEQ ID NO: 317091
caguuugucgaagagaugu

SEQ ID NO: 463860 - RNA, 19 nt, Artificial Sequence
  Description of Artificial Sequence: Synthetic oligonucleotide
  Antisense Strand to SEQ ID NO: 463859
acaucucuucgacaaacug

SEQ ID NO: 463861 - RNA, 19 nt, Artificial Sequence
  Description of Artificial Sequence: Synthetic oligonucleotide
  Sense strand starting at position 3322 of SEQ ID NO: 317091
cgaagagaugucugcauuc

SEQ ID NO: 463862 - RNA, 19 nt, Artificial Sequence
  Description of Artificial Sequence: Synthetic oligonucleotide
  Antisense Strand to SEQ ID NO: 463861
gaaugcagacaucucuucg

SEQ ID NO: 463863 - RNA, 19 nt, Artificial Sequence
  Description of Artificial Sequence: Synthetic oligonucleotide
  Sense strand starting at position 3361 of SEQ ID NO: 317091
uucuaauagccauggaaac

SEQ ID NO: 463864 - RNA, 19 nt, Artificial Sequence
  Description of Artificial Sequence: Synthetic oligonucleotide
  Antisense Strand to SEQ ID NO: 463863
guuuccauggcuauuagaa

SEQ ID NO: 463865 - RNA, 19 nt, Artificial Sequence
  Description of Artificial Sequence: Synthetic oligonucleotide
  Sense strand starting at position 3362 of SEQ ID NO: 317091
ucuaauagccauggaaaca

SEQ ID NO: 463866 - RNA, 19 nt, Artificial Sequence
  Description of Artificial Sequence: Synthetic oligonucleotide
  Antisense Strand to SEQ ID NO: 463865
uguuuccauggcuauuaga

SEQ ID NO: 463867 - RNA, 19 nt, Artificial Sequence
  Description of Artificial Sequence: Synthetic oligonucleotide
  Sense strand starting at position 3726 of SEQ ID NO: 317091
agaaauaagcucuggugua

SEQ ID NO: 463868 - RNA, 19 nt, Artificial Sequence
  Description of Artificial Sequence: Synthetic oligonucleotide
  Antisense Strand to SEQ ID NO: 463867
uacaccagagcuuauuucu

SEQ ID NO: 463869 - RNA, 19 nt, Artificial Sequence
  Description of Artificial Sequence: Synthetic oligonucleotide
  Sense strand starting at position 3731 of SEQ ID NO: 317091
uaagcucugguguacuauu

SEQ ID NO: 463870 - RNA, 19 nt, Artificial Sequence
  Description of Artificial Sequence: Synthetic oligonucleotide
  Antisense Strand to SEQ ID NO: 463869
aauaguacaccagagcuua

SEQ ID NO: 463871 - RNA, 19 nt, Artificial Sequence
  Description of Artificial Sequence: Synthetic oligonucleotide
  Sense strand starting at position 3856 of SEQ ID NO: 317091
gacagauaaugagccugau

SEQ ID NO: 463872 - RNA, 19 nt, Artificial Sequence
  Description of Artificial Sequence: Synthetic oligonucleotide
  Antisense Strand to SEQ ID NO: 463871
aucaggcucauuaucuguc

SEQ ID NO: 463873 - RNA, 19 nt, Artificial Sequence
  Description of Artificial Sequence: Synthetic oligonucleotide
  Sense strand starting at position 3978 of SEQ ID NO: 317091
gugaauguccaguaacgua

SEQ ID NO: 463874 - RNA, 19 nt, Artificial Sequence
  Description of Artificial Sequence: Synthetic oligonucleotide
  Antisense Strand to SEQ ID NO: 463873
uacguuacuggacauucac

SEQ ID NO: 463875 - RNA, 19 nt, Artificial Sequence
  Description of Artificial Sequence: Synthetic oligonucleotide
  Sense strand starting at position 8 of SEQ ID NO: 317092
ugaucauguggcuaaucuu

SEQ ID NO: 463876 - RNA, 19 nt, Artificial Sequence
  Description of Artificial Sequence: Synthetic oligonucleotide
  Antisense Strand to SEQ ID NO: 463875
aagauuagccacaugauca

SEQ ID NO: 463877 - RNA, 19 nt, Artificial Sequence
  Description of Artificial Sequence: Synthetic oligonucleotide
  Sense strand starting at position 133 of SEQ ID NO: 317092
guugcauggccauauuaga

SEQ ID NO: 463878 - RNA, 19 nt, Artificial Sequence
  Description of Artificial Sequence: Synthetic oligonucleotide
  Antisense Strand to SEQ ID NO: 463877
ucuaauauggccaugcaac

SEQ ID NO: 463879 - RNA, 19 nt, Artificial Sequence
  Description of Artificial Sequence: Synthetic oligonucleotide
  Sense strand starting at position 140 of SEQ ID NO: 317092
ggccauauuagauaugagu

SEQ ID NO: 463880 - RNA, 19 nt, Artificial Sequence
  Description of Artificial Sequence: Synthetic oligonucleotide
  Antisense Strand to SEQ ID NO: 463879
acucauaucuaauauggcc

SEQ ID NO: 463881 - RNA, 19 nt, Artificial Sequence
  Description of Artificial Sequence: Synthetic oligonucleotide
  Sense strand starting at position 197 of SEQ ID NO: 317092
ugcugcuuggccuauuuaa

SEQ ID NO: 463882 - RNA, 19 nt, Artificial Sequence
  Description of Artificial Sequence: Synthetic oligonucleotide
  Antisense Strand to SEQ ID NO: 463881
uuaaauaggccaagcagca

SEQ ID NO: 463883 - RNA, 19 nt, Artificial Sequence
  Description of Artificial Sequence: Synthetic oligonucleotide
  Sense strand starting at position 339 of SEQ ID NO: 317092
cgccuugcucuugccaaua

SEQ ID NO: 463884 - RNA, 19 nt, Artificial Sequence
  Description of Artificial Sequence: Synthetic oligonucleotide
  Antisense Strand to SEQ ID NO: 463883
uauuggcaagagcaaggcg

SEQ ID NO: 463885 - RNA, 19 nt, Artificial Sequence
  Description of Artificial Sequence: Synthetic oligonucleotide
  Sense strand starting at position 375 of SEQ ID NO: 317092
ggcagcaauuugucuguuu

SEQ ID NO: 463886 - RNA, 19 nt, Artificial Sequence
  Description of Artificial Sequence: Synthetic oligonucleotide
  Antisense Strand to SEQ ID NO: 463885
aaacagacaaauugcugcc

SEQ ID NO: 463887 - RNA, 19 nt, Artificial Sequence
  Description of Artificial Sequence: Synthetic oligonucleotide
  Sense strand starting at position 564 of SEQ ID NO: 317092
acauuugugucuucucagu

SEQ ID NO: 463888 - RNA, 19 nt, Artificial Sequence
  Description of Artificial Sequence: Synthetic oligonucleotide
  Antisense Strand to SEQ ID NO: 463887
acugagaagacacaaaugu

SEQ ID NO: 463889 - RNA, 19 nt, Artificial Sequence
  Description of Artificial Sequence: Synthetic oligonucleotide
  Sense strand starting at position 606 of SEQ ID NO: 317092
aggacaagaucccugguuu

SEQ ID NO: 463890 - RNA, 19 nt, Artificial Sequence
  Description of Artificial Sequence: Synthetic oligonucleotide
  Antisense Strand to SEQ ID NO: 463889
aaaccagggaucuuguccu

SEQ ID NO: 463891 - RNA, 19 nt, Artificial Sequence
  Description of Artificial Sequence: Synthetic oligonucleotide
  Sense strand starting at position 607 of SEQ ID NO: 317092
ggacaagaucccugguuua

SEQ ID NO: 463892 - RNA, 19 nt, Artificial Sequence
  Description of Artificial Sequence: Synthetic oligonucleotide
  Antisense Strand to SEQ ID NO: 463891
uaaaccagggaucuugucc

SEQ ID NO: 463893 - RNA, 19 nt, Artificial Sequence
  Description of Artificial Sequence: Synthetic oligonucleotide
  Sense strand starting at position 924 of SEQ ID NO: 317092
cugugauugaaggagcuua

SEQ ID NO: 463894 - RNA, 19 nt, Artificial Sequence
  Description of Artificial Sequence: Synthetic oligonucleotide
  Antisense Strand to SEQ ID NO: 463893
uaagcuccuucaaucacag

SEQ ID NO: 463895 - RNA, 19 nt, Artificial Sequence
  Description of Artificial Sequence: Synthetic oligonucleotide
  Sense strand starting at position 953 of SEQ ID NO: 317092
ugaagaaaguccuuuacug

SEQ ID NO: 463896 - RNA, 19 nt, Artificial Sequence
  Description of Artificial Sequence: Synthetic oligonucleotide
  Antisense Strand to SEQ ID NO: 463895
caguaaaggacuuucuuca

SEQ ID NO: 463897 - RNA, 19 nt, Artificial Sequence
  Description of Artificial Sequence: Synthetic oligonucleotide
  Sense strand starting at position 955 of SEQ ID NO: 317092
aagaaaguccuuuacuggu

SEQ ID NO: 463898 - RNA, 19 nt, Artificial Sequence
  Description of Artificial Sequence: Synthetic oligonucleotide
  Antisense Strand to SEQ ID NO: 463897
accaguaaaggacuuucuu

SEQ ID NO: 463899 - RNA, 19 nt, Artificial Sequence
  Description of Artificial Sequence: Synthetic oligonucleotide
  Sense strand starting at position 1411 of SEQ ID NO: 317092
ggacaaugaaaucgaaugu

SEQ ID NO: 463900 - RNA, 19 nt, Artificial Sequence
  Description of Artificial Sequence: Synthetic oligonucleotide
  Antisense Strand to SEQ ID NO: 463899
acauucgauuucauugucc

SEQ ID NO: 463901 - RNA, 19 nt, Artificial Sequence
  Description of Artificial Sequence: Synthetic oligonucleotide
  Sense strand starting at position 1415 of SEQ ID NO: 317092
aaugaaaucgaauguagca

SEQ ID NO: 463902 - RNA, 19 nt, Artificial Sequence
  Description of Artificial Sequence: Synthetic oligonucleotide
  Antisense Strand to SEQ ID NO: 463901
ugcuacauucgauuucauu

SEQ ID NO: 463903 - RNA, 19 nt, Artificial Sequence
  Description of Artificial Sequence: Synthetic oligonucleotide
  Sense strand starting at position 1417 of SEQ ID NO: 317092
ugaaaucgaauguagcaua

SEQ ID NO: 463904 - RNA, 19 nt, Artificial Sequence
  Description of Artificial Sequence: Synthetic oligonucleotide
  Antisense Strand to SEQ ID NO: 463903
uaugcuacauucgauuuca

SEQ ID NO: 463905 - RNA, 19 nt, Artificial Sequence
  Description of Artificial Sequence: Synthetic oligonucleotide
  Sense strand starting at position 1430 of SEQ ID NO: 317092
agcauauuggcaggauaaa

SEQ ID NO: 463906 - RNA, 19 nt, Artificial Sequence
  Description of Artificial Sequence: Synthetic oligonucleotide
  Antisense Strand to SEQ ID NO: 463905
uuuauccugccaauaugcu

SEQ ID NO: 463907 - RNA, 19 nt, Artificial Sequence
  Description of Artificial Sequence: Synthetic oligonucleotide
  Sense strand starting at position 1431 of SEQ ID NO: 317092
gcauauuggcaggauaaac

SEQ ID NO: 463908 - RNA, 19 nt, Artificial Sequence
  Description of Artificial Sequence: Synthetic oligonucleotide
  Antisense Strand to SEQ ID NO: 463907
guuuauccugccaauaugc

SEQ ID NO: 463909 - RNA, 19 nt, Artificial Sequence
  Description of Artificial Sequence: Synthetic oligonucleotide
  Sense strand starting at position 1747 of SEQ ID NO: 317092
agaacucuugccuacuuga

SEQ ID NO: 463910 - RNA, 19 nt, Artificial Sequence
  Description of Artificial Sequence: Synthetic oligonucleotide
  Antisense Strand to SEQ ID NO: 463909
ucaaguaggcaagaguucu

SEQ ID NO: 463911 - RNA, 19 nt, Artificial Sequence
  Description of Artificial Sequence: Synthetic oligonucleotide
  Sense strand starting at position 1754 of SEQ ID NO: 317092
uugccuacuugauuaagga

SEQ ID NO: 463912 - RNA, 19 nt, Artificial Sequence
  Description of Artificial Sequence: Synthetic oligonucleotide
  Antisense Strand to SEQ ID NO: 463911
uccuuaaucaaguaggcaa

SEQ ID NO: 463913 - RNA, 19 nt, Artificial Sequence
  Description of Artificial Sequence: Synthetic oligonucleotide
  Sense strand starting at position 1755 of SEQ ID NO: 317092
ugccuacuugauuaaggau

SEQ ID NO: 463914 - RNA, 19 nt, Artificial Sequence
  Description of Artificial Sequence: Synthetic oligonucleotide
  Antisense Strand to SEQ ID NO: 463913
auccuuaaucaaguaggca

SEQ ID NO: 463915 - RNA, 19 nt, Artificial Sequence
  Description of Artificial Sequence: Synthetic oligonucleotide
  Sense strand starting at position 1802 of SEQ ID NO: 317092
cuuagauacugucuacucu

SEQ ID NO: 463916 - RNA, 19 nt, Artificial Sequence
  Description of Artificial Sequence: Synthetic oligonucleotide
  Antisense Strand to SEQ ID NO: 463915
agaguagacaguaucuaag

SEQ ID NO: 463917 - RNA, 19 nt, Artificial Sequence
  Description of Artificial Sequence: Synthetic oligonucleotide
  Sense strand starting at position 1830 of SEQ ID NO: 317092
ccaaucaggcuuuaaguaa

SEQ ID NO: 463918 - RNA, 19 nt, Artificial Sequence
  Description of Artificial Sequence: Synthetic oligonucleotide
  Antisense Strand to SEQ ID NO: 463917
uuacuuaaagccugauugg

SEQ ID NO: 463919 - RNA, 19 nt, Artificial Sequence
  Description of Artificial Sequence: Synthetic oligonucleotide
  Sense strand starting at position 1993 of SEQ ID NO: 317092
auauaauugccucagugag

SEQ ID NO: 463920 - RNA, 19 nt, Artificial Sequence
  Description of Artificial Sequence: Synthetic oligonucleotide
  Antisense Strand to SEQ ID NO: 463919
cucacugaggcaauuauau

SEQ ID NO: 463921 - RNA, 19 nt, Artificial Sequence
  Description of Artificial Sequence: Synthetic oligonucleotide
  Sense strand starting at position 2005 of SEQ ID NO: 317092
cagugaguggguggaauaa

SEQ ID NO: 463922 - RNA, 19 nt, Artificial Sequence
  Description of Artificial Sequence: Synthetic oligonucleotide
  Antisense Strand to SEQ ID NO: 463921
uuauuccacccacucacug

SEQ ID NO: 463923 - RNA, 19 nt, Artificial Sequence
  Description of Artificial Sequence: Synthetic oligonucleotide
  Sense strand starting at position 2191 of SEQ ID NO: 317092
ucacaagaaccagguguuu

SEQ ID NO: 463924 - RNA, 19 nt, Artificial Sequence
  Description of Artificial Sequence: Synthetic oligonucleotide
  Antisense Strand to SEQ ID NO: 463923
aaacaccugguucuuguga

SEQ ID NO: 463925 - RNA, 19 nt, Artificial Sequence
  Description of Artificial Sequence: Synthetic oligonucleotide
  Sense strand starting at position 2365 of SEQ ID NO: 317092
ugauguuaauugccauaaa

SEQ ID NO: 463926 - RNA, 19 nt, Artificial Sequence
  Description of Artificial Sequence: Synthetic oligonucleotide
  Antisense Strand to SEQ ID NO: 463925
uuuauggcaauuaacauca

SEQ ID NO: 463927 - RNA, 19 nt, Artificial Sequence
  Description of Artificial Sequence: Synthetic oligonucleotide
  Sense strand starting at position 2391 of SEQ ID NO: 317092
gugggcugaugaucaaagu

SEQ ID NO: 463928 - RNA, 19 nt, Artificial Sequence
  Description of Artificial Sequence: Synthetic oligonucleotide
  Antisense Strand to SEQ ID NO: 463927
acuuugaucaucagcccac

SEQ ID NO: 463929 - RNA, 19 nt, Artificial Sequence
  Description of Artificial Sequence: Synthetic oligonucleotide
  Sense strand starting at position 2402 of SEQ ID NO: 317092
aucaaaguguacucucauu

SEQ ID NO: 463930 - RNA, 19 nt, Artificial Sequence
  Description of Artificial Sequence: Synthetic oligonucleotide
  Antisense Strand to SEQ ID NO: 463929
aaugagaguacacuuugau

SEQ ID NO: 463931 - RNA, 19 nt, Artificial Sequence
  Description of Artificial Sequence: Synthetic oligonucleotide
  Sense strand starting at position 2407 of SEQ ID NO: 317092
aguguacucucauuaacaa

SEQ ID NO: 463932 - RNA, 19 nt, Artificial Sequence
  Description of Artificial Sequence: Synthetic oligonucleotide
  Antisense Strand to SEQ ID NO: 463931
uuguuaaugagaguacacu

SEQ ID NO: 463933 - RNA, 19 nt, Artificial Sequence
  Description of Artificial Sequence: Synthetic oligonucleotide
  Sense strand starting at position 2408 of SEQ ID NO: 317092
guguacucucauuaacaau

SEQ ID NO: 463934 - RNA, 19 nt, Artificial Sequence
  Description of Artificial Sequence: Synthetic oligonucleotide
  Antisense Strand to SEQ ID NO: 463933
auuguuaaugagaguacac

SEQ ID NO: 463935 - RNA, 19 nt, Artificial Sequence
  Description of Artificial Sequence: Synthetic oligonucleotide
  Sense strand starting at position 2581 of SEQ ID NO: 317092
ggugcuauuucucucauau

SEQ ID NO: 463936 - RNA, 19 nt, Artificial Sequence
  Description of Artificial Sequence: Synthetic oligonucleotide
  Antisense Strand to SEQ ID NO: 463935
auaugagagaaauagcacc

SEQ ID NO: 463937 - RNA, 19 nt, Artificial Sequence
  Description of Artificial Sequence: Synthetic oligonucleotide
  Sense strand starting at position 2591 of SEQ ID NO: 317092
cucucauaugcagaguaca

SEQ ID NO: 463938 - RNA, 19 nt, Artificial Sequence
  Description of Artificial Sequence: Synthetic oligonucleotide
  Antisense Strand to SEQ ID NO: 463937
uguacucugcauaugagag

SEQ ID NO: 463939 - RNA, 19 nt, Artificial Sequence
  Description of Artificial Sequence: Synthetic oligonucleotide
  Sense strand starting at position 2599 of SEQ ID NO: 317092
ugcagaguacaugaguuua

SEQ ID NO: 463940 - RNA, 19 nt, Artificial Sequence
  Description of Artificial Sequence: Synthetic oligonucleotide
  Antisense Strand to SEQ ID NO: 463939
uaaacucauguacucugca

SEQ ID NO: 463941 - RNA, 19 nt, Artificial Sequence
  Description of Artificial Sequence: Synthetic oligonucleotide
  Sense strand starting at position 2601 of SEQ ID NO: 317092
cagaguacaugaguuuaga

SEQ ID NO: 463942 - RNA, 19 nt, Artificial Sequence
  Description of Artificial Sequence: Synthetic oligonucleotide
  Antisense Strand to SEQ ID NO: 463941
ucuaaacucauguacucug

SEQ ID NO: 463943 - RNA, 19 nt, Artificial Sequence
  Description of Artificial Sequence: Synthetic oligonucleotide
  Sense strand starting at position 2685 of SEQ ID NO: 317092
gugacccaucccugaaacu

SEQ ID NO: 463944 - RNA, 19 nt, Artificial Sequence
  Description of Artificial Sequence: Synthetic oligonucleotide
  Antisense Strand to SEQ ID NO: 463943
aguuucagggaugggucac

SEQ ID NO: 463945 - RNA, 19 nt, Artificial Sequence
  Description of Artificial Sequence: Synthetic oligonucleotide
  Sense strand starting at position 3329 of SEQ ID NO: 317092
gucaguuuccucugaauaa

SEQ ID NO: 463946 - RNA, 19 nt, Artificial Sequence
  Description of Artificial Sequence: Synthetic oligonucleotide
  Antisense Strand to SEQ ID NO: 463945
uuauucagaggaaacugac

SEQ ID NO: 463947 - RNA, 19 nt, Artificial Sequence
  Description of Artificial Sequence: Synthetic oligonucleotide
  Sense strand starting at position 3400 of SEQ ID NO: 317092
uugcuacucuggguauaga

SEQ ID NO: 463948 - RNA, 19 nt, Artificial Sequence
  Description of Artificial Sequence: Synthetic oligonucleotide
  Antisense Strand to SEQ ID NO: 463947
ucuauacccagaguagcaa

SEQ ID NO: 463949 - RNA, 19 nt, Artificial Sequence
  Description of Artificial Sequence: Synthetic oligonucleotide
  Sense strand starting at position 3413 of SEQ ID NO: 317092
uauagaguguuacugaaga

SEQ ID NO: 463950 - RNA, 19 nt, Artificial Sequence
  Description of Artificial Sequence: Synthetic oligonucleotide
  Antisense Strand to SEQ ID NO: 463949
ucuucaguaacacucuaua

SEQ ID NO: 463951 - RNA, 19 nt, Artificial Sequence
  Description of Artificial Sequence: Synthetic oligonucleotide
  Sense strand starting at position 3491 of SEQ ID NO: 317092
uucugacauuguuuauaca

SEQ ID NO: 463952 - RNA, 19 nt, Artificial Sequence
  Description of Artificial Sequence: Synthetic oligonucleotide
  Antisense Strand to SEQ ID NO: 463951
uguauaaacaaugucagaa

SEQ ID NO: 463953 - RNA, 19 nt, Artificial Sequence
  Description of Artificial Sequence: Synthetic oligonucleotide
  Sense strand starting at position 3586 of SEQ ID NO: 317092
uuuaaaguuccuggguaca

SEQ ID NO: 463954 - RNA, 19 nt, Artificial Sequence
  Description of Artificial Sequence: Synthetic oligonucleotide
  Antisense Strand to SEQ ID NO: 463953
uguacccaggaacuuuaaa

SEQ ID NO: 463955 - RNA, 19 nt, Artificial Sequence
  Description of Artificial Sequence: Synthetic oligonucleotide
  Sense strand starting at position 16 of SEQ ID NO: 317093
ugagaauacucucuaguuc

SEQ ID NO: 463956 - RNA, 19 nt, Artificial Sequence
  Description of Artificial Sequence: Synthetic oligonucleotide
  Antisense Strand to SEQ ID NO: 463955
gaacuagagaguauucuca

SEQ ID NO: 463957 - RNA, 19 nt, Artificial Sequence
  Description of Artificial Sequence: Synthetic oligonucleotide
  Sense strand starting at position 118 of SEQ ID NO: 317093
ugcuuauacuuucugagaa

SEQ ID NO: 463958 - RNA, 19 nt, Artificial Sequence
  Description of Artificial Sequence: Synthetic oligonucleotide
  Antisense Strand to SEQ ID NO: 463957
uucucagaaaguauaagca

SEQ ID NO: 463959 - RNA, 19 nt, Artificial Sequence
  Description of Artificial Sequence: Synthetic oligonucleotide
  Sense strand starting at position 148 of SEQ ID NO: 317093
auucuaguggaaugugaag

SEQ ID NO: 463960 - RNA, 19 nt, Artificial Sequence
  Description of Artificial Sequence: Synthetic oligonucleotide
  Antisense Strand to SEQ ID NO: 463959
cuucacauuccacuagaau

SEQ ID NO: 463961 - RNA, 19 nt, Artificial Sequence
  Description of Artificial Sequence: Synthetic oligonucleotide
  Sense strand starting at position 150 of SEQ ID NO: 317093
ucuaguggaaugugaagaa

SEQ ID NO: 463962 - RNA, 19 nt, Artificial Sequence
  Description of Artificial Sequence: Synthetic oligonucleotide
  Antisense Strand to SEQ ID NO: 463961
uucuucacauuccacuaga

SEQ ID NO: 463963 - RNA, 19 nt, Artificial Sequence
  Description of Artificial Sequence: Synthetic oligonucleotide
  Sense strand starting at position 162 of SEQ ID NO: 317093
ugaagaaucuauguacuuu

SEQ ID NO: 463964 - RNA, 19 nt, Artificial Sequence
  Description of Artificial Sequence: Synthetic oligonucleotide
  Antisense Strand to SEQ ID NO: 463963
aaaguacauagauucuuca

SEQ ID NO: 463965 - RNA, 19 nt, Artificial Sequence
  Description of Artificial Sequence: Synthetic oligonucleotide
  Sense strand starting at position 179 of SEQ ID NO: 317093
uuugaccuucuuggauaaa

SEQ ID NO: 463966 - RNA, 19 nt, Artificial Sequence
  Description of Artificial Sequence: Synthetic oligonucleotide
  Antisense Strand to SEQ ID NO: 463965
uuuauccaagaaggucaaa

SEQ ID NO: 463967 - RNA, 19 nt, Artificial Sequence
  Description of Artificial Sequence: Synthetic oligonucleotide
  Sense strand starting at position 369 of SEQ ID NO: 317093
cugauuaucugaucagagu

SEQ ID NO: 463968 - RNA, 19 nt, Artificial Sequence
  Description of Artificial Sequence: Synthetic oligonucleotide
  Antisense Strand to SEQ ID NO: 463967
acucugaucagauaaucag

SEQ ID NO: 463969 - RNA, 19 nt, Artificial Sequence
  Description of Artificial Sequence: Synthetic oligonucleotide
  Sense strand starting at position 508 of SEQ ID NO: 317093
ugaggaaaguagucaacau

SEQ ID NO: 463970 - RNA, 19 nt, Artificial Sequence
  Description of Artificial Sequence: Synthetic oligonucleotide
  Antisense Strand to SEQ ID NO: 463969
auguugacuacuuuccuca

SEQ ID NO: 463971 - RNA, 19 nt, Artificial Sequence
  Description of Artificial Sequence: Synthetic oligonucleotide
  Sense strand starting at position 528 of SEQ ID NO: 317093
agcaacagguucucuaaga

SEQ ID NO: 463972 - RNA, 19 nt, Artificial Sequence
  Description of Artificial Sequence: Synthetic oligonucleotide
  Antisense Strand to SEQ ID NO: 463971
ucuuagagaaccuguugcu

SEQ ID NO: 463973 - RNA, 19 nt, Artificial Sequence
  Description of Artificial Sequence: Synthetic oligonucleotide
  Sense strand starting at position 529 of SEQ ID NO: 317093
gcaacagguucucuaagaa

SEQ ID NO: 463974 - RNA, 19 nt, Artificial Sequence
  Description of Artificial Sequence: Synthetic oligonucleotide
  Antisense Strand to SEQ ID NO: 463973
uucuuagagaaccuguugc

SEQ ID NO: 463975 - RNA, 19 nt, Artificial Sequence
  Description of Artificial Sequence: Synthetic oligonucleotide
  Sense strand starting at position 630 of SEQ ID NO: 317093
uugugacaauuagucaaga

SEQ ID NO: 463976 - RNA, 19 nt, Artificial Sequence
  Description of Artificial Sequence: Synthetic oligonucleotide
  Antisense Strand to SEQ ID NO: 463975
ucuugacuaauugucacaa

SEQ ID NO: 463977 - RNA, 19 nt, Artificial Sequence
  Description of Artificial Sequence: Synthetic oligonucleotide
  Sense strand starting at position 631 of SEQ ID NO: 317093
ugugacaauuagucaagaa

SEQ ID NO: 463978 - RNA, 19 nt, Artificial Sequence
  Description of Artificial Sequence: Synthetic oligonucleotide
  Antisense Strand to SEQ ID NO: 463977
uucuugacuaauugucaca

SEQ ID NO: 463979 - RNA, 19 nt, Artificial Sequence
  Description of Artificial Sequence: Synthetic oligonucleotide
  Sense strand starting at position 699 of SEQ ID NO: 317093
cccauaaguccuggauuaa

SEQ ID NO: 463980 - RNA, 19 nt, Artificial Sequence
  Description of Artificial Sequence: Synthetic oligonucleotide
  Antisense Strand to SEQ ID NO: 463979
uuaauccaggacuuauggg

SEQ ID NO: 463981 - RNA, 19 nt, Artificial Sequence
  Description of Artificial Sequence: Synthetic oligonucleotide
  Sense strand starting at position 748 of SEQ ID NO: 317093
ucaacauagcgugacauaa

SEQ ID NO: 463982 - RNA, 19 nt, Artificial Sequence
  Description of Artificial Sequence: Synthetic oligonucleotide
  Antisense Strand to SEQ ID NO: 463981
uuaugucacgcuauguuga

SEQ ID NO: 463983 - RNA, 19 nt, Artificial Sequence
  Description of Artificial Sequence: Synthetic oligonucleotide
  Sense strand starting at position 756 of SEQ ID NO: 317093
gcgugacauaaucagacau

SEQ ID NO: 463984 - RNA, 19 nt, Artificial Sequence
  Description of Artificial Sequence: Synthetic oligonucleotide
  Antisense Strand to SEQ ID NO: 463983
augucugauuaugucacgc

SEQ ID NO: 463985 - RNA, 19 nt, Artificial Sequence
  Description of Artificial Sequence: Synthetic oligonucleotide
  Sense strand starting at position 782 of SEQ ID NO: 317093
ugcacuucccaguagagau

SEQ ID NO: 463986 - RNA, 19 nt, Artificial Sequence
  Description of Artificial Sequence: Synthetic oligonucleotide
  Antisense Strand to SEQ ID NO: 463985
aucucuacugggaagugca

SEQ ID NO: 463987 - RNA, 19 nt, Artificial Sequence
  Description of Artificial Sequence: Synthetic oligonucleotide
  Sense strand starting at position 792 of SEQ ID NO: 317093
aguagagauacgcauguaa

SEQ ID NO: 463988 - RNA, 19 nt, Artificial Sequence
  Description of Artificial Sequence: Synthetic oligonucleotide
  Antisense Strand to SEQ ID NO: 463987
uuacaugcguaucucuacu

SEQ ID NO: 463989 - RNA, 19 nt, Artificial Sequence
  Description of Artificial Sequence: Synthetic oligonucleotide
  Sense strand starting at position 1148 of SEQ ID NO: 317093
auaccauagcauuauguua

SEQ ID NO: 463990 - RNA, 19 nt, Artificial Sequence
  Description of Artificial Sequence: Synthetic oligonucleotide
  Antisense Strand to SEQ ID NO: 463989
uaacauaaugcuaugguau

SEQ ID NO: 463991 - RNA, 19 nt, Artificial Sequence
  Description of Artificial Sequence: Synthetic oligonucleotide
  Sense strand starting at position 1282 of SEQ ID NO: 317093
ucgauuguaguggaugaaa

SEQ ID NO: 463992 - RNA, 19 nt, Artificial Sequence
  Description of Artificial Sequence: Synthetic oligonucleotide
  Antisense Strand to SEQ ID NO: 463991
uuucauccacuacaaucga

SEQ ID NO: 463993 - RNA, 19 nt, Artificial Sequence
  Description of Artificial Sequence: Synthetic oligonucleotide
  Sense strand starting at position 1530 of SEQ ID NO: 317093
gcacuuauaggcgagacaa

SEQ ID NO: 463994 - RNA, 19 nt, Artificial Sequence
  Description of Artificial Sequence: Synthetic oligonucleotide
  Antisense Strand to SEQ ID NO: 463993
uugucucgccuauaagugc

SEQ ID NO: 463995 - RNA, 19 nt, Artificial Sequence
  Description of Artificial Sequence: Synthetic oligonucleotide
  Sense strand starting at position 1532 of SEQ ID NO: 317093
acuuauaggcgagacaacu

SEQ ID NO: 463996 - RNA, 19 nt, Artificial Sequence
  Description of Artificial Sequence: Synthetic oligonucleotide
  Antisense Strand to SEQ ID NO: 463995
aguugucucgccuauaagu

SEQ ID NO: 463997 - RNA, 19 nt, Artificial Sequence
  Description of Artificial Sequence: Synthetic oligonucleotide
  Sense strand starting at position 1540 of SEQ ID NO: 317093
gcgagacaacucuaaacua

SEQ ID NO: 463998 - RNA, 19 nt, Artificial Sequence
  Description of Artificial Sequence: Synthetic oligonucleotide
  Antisense Strand to SEQ ID NO: 463997
uaguuuagaguugucucgc

SEQ ID NO: 463999 - RNA, 19 nt, Artificial Sequence
  Description of Artificial Sequence: Synthetic oligonucleotide
  Sense strand starting at position 1792 of SEQ ID NO: 317093
gagagugagucucccuuaa

SEQ ID NO: 464000 - RNA, 19 nt, Artificial Sequence
  Description of Artificial Sequence: Synthetic oligonucleotide
  Antisense Strand to SEQ ID NO: 463999
uuaagggagacucacucuc

SEQ ID NO: 464001 - RNA, 19 nt, Artificial Sequence
  Description of Artificial Sequence: Synthetic oligonucleotide
  Sense strand starting at position 2130 of SEQ ID NO: 317093
cagcgcucuccuuugguaa

SEQ ID NO: 464002 - RNA, 19 nt, Artificial Sequence
  Description of Artificial Sequence: Synthetic oligonucleotide
  Antisense Strand to SEQ ID NO: 464001
uuaccaaaggagagcgcug

SEQ ID NO: 464003 - RNA, 19 nt, Artificial Sequence
  Description of Artificial Sequence: Synthetic oligonucleotide
  Sense strand starting at position 2572 of SEQ ID NO: 317093
cccagugaggcugauugaa

SEQ ID NO: 464004 - RNA, 19 nt, Artificial Sequence
  Description of Artificial Sequence: Synthetic oligonucleotide
  Antisense Strand to SEQ ID NO: 464003
uucaaucagccucacuggg

SEQ ID NO: 464005 - RNA, 19 nt, Artificial Sequence
  Description of Artificial Sequence: Synthetic oligonucleotide
  Sense strand starting at position 2574 of SEQ ID NO: 317093
cagugaggcugauugaaug

SEQ ID NO: 464006 - RNA, 19 nt, Artificial Sequence
  Description of Artificial Sequence: Synthetic oligonucleotide
  Antisense Strand to SEQ ID NO: 464005
cauucaaucagccucacug

SEQ ID NO: 464007 - RNA, 19 nt, Artificial Sequence
  Description of Artificial Sequence: Synthetic oligonucleotide
  Sense strand starting at position 2852 of SEQ ID NO: 317093
gaugucauccaguggaaau

SEQ ID NO: 464008 - RNA, 19 nt, Artificial Sequence
  Description of Artificial Sequence: Synthetic oligonucleotide
  Antisense Strand to SEQ ID NO: 464007
auuuccacuggaugacauc

SEQ ID NO: 464009 - RNA, 19 nt, Artificial Sequence
  Description of Artificial Sequence: Synthetic oligonucleotide
  Sense strand starting at position 2876 of SEQ ID NO: 317093
augcucaaagacuggaaua

SEQ ID NO: 464010 - RNA, 19 nt, Artificial Sequence
  Description of Artificial Sequence: Synthetic oligonucleotide
  Antisense Strand to SEQ ID NO: 464009
uauuccagucuuugagcau

SEQ ID NO: 464011 - RNA, 19 nt, Artificial Sequence
  Description of Artificial Sequence: Synthetic oligonucleotide
  Sense strand starting at position 3093 of SEQ ID NO: 317093
ccguaaagauuccuaaauc

SEQ ID NO: 464012 - RNA, 19 nt, Artificial Sequence
  Description of Artificial Sequence: Synthetic oligonucleotide
  Antisense Strand to SEQ ID NO: 464011
gauuuaggaaucuuuacgg

SEQ ID NO: 464013 - RNA, 19 nt, Artificial Sequence
  Description of Artificial Sequence: Synthetic oligonucleotide
  Sense strand starting at position 3127 of SEQ ID NO: 317093
ggcagaugccaaggauaag

SEQ ID NO: 464014 - RNA, 19 nt, Artificial Sequence
  Description of Artificial Sequence: Synthetic oligonucleotide
  Antisense Strand to SEQ ID NO: 464013
cuuauccuuggcaucugcc

SEQ ID NO: 464015 - RNA, 19 nt, Artificial Sequence
  Description of Artificial Sequence: Synthetic oligonucleotide
  Sense strand starting at position 3266 of SEQ ID NO: 317093
gaaaguuuaggaugucuga

SEQ ID NO: 464016 - RNA, 19 nt, Artificial Sequence
  Description of Artificial Sequence: Synthetic oligonucleotide
  Antisense Strand to SEQ ID NO: 464015
ucagacauccuaaacuuuc

SEQ ID NO: 464017 - RNA, 19 nt, Artificial Sequence
  Description of Artificial Sequence: Synthetic oligonucleotide
  Sense strand starting at position 3273 of SEQ ID NO: 317093
uaggaugucugaccaauga

SEQ ID NO: 464018 - RNA, 19 nt, Artificial Sequence
  Description of Artificial Sequence: Synthetic oligonucleotide
  Antisense Strand to SEQ ID NO: 464017
ucauuggucagacauccua

SEQ ID NO: 464019 - RNA, 19 nt, Artificial Sequence
  Description of Artificial Sequence: Synthetic oligonucleotide
  Sense strand starting at position 3320 of SEQ ID NO: 317093
gggagaaagauguguacug

SEQ ID NO: 464020 - RNA, 19 nt, Artificial Sequence
  Description of Artificial Sequence: Synthetic oligonucleotide
  Antisense Strand to SEQ ID NO: 464019
caguacacaucuuucuccc

SEQ ID NO: 464021 - RNA, 19 nt, Artificial Sequence
  Description of Artificial Sequence: Synthetic oligonucleotide
  Sense strand starting at position 3321 of SEQ ID NO: 317093
ggagaaagauguguacugu

SEQ ID NO: 464022 - RNA, 19 nt, Artificial Sequence
  Description of Artificial Sequence: Synthetic oligonucleotide
  Antisense Strand to SEQ ID NO: 464021
acaguacacaucuuucucc

SEQ ID NO: 464023 - RNA, 19 nt, Artificial Sequence
  Description of Artificial Sequence: Synthetic oligonucleotide
  Sense strand starting at position 3322 of SEQ ID NO: 317093
gagaaagauguguacuguu

SEQ ID NO: 464024 - RNA, 19 nt, Artificial Sequence
  Description of Artificial Sequence: Synthetic oligonucleotide
  Antisense Strand to SEQ ID NO: 464023
aacaguacacaucuuucuc

SEQ ID NO: 464025 - RNA, 19 nt, Artificial Sequence
  Description of Artificial Sequence: Synthetic oligonucleotide
  Sense strand starting at position 3539 of SEQ ID NO: 317093
gacugucaucaaugaugaa

SEQ ID NO: 464026 - RNA, 19 nt, Artificial Sequence
  Description of Artificial Sequence: Synthetic oligonucleotide
  Antisense Strand to SEQ ID NO: 464025
uucaucauugaugacaguc

SEQ ID NO: 464027 - RNA, 19 nt, Artificial Sequence
  Description of Artificial Sequence: Synthetic oligonucleotide
  Sense strand starting at position 3568 of SEQ ID NO: 317093
ucacaagguuuauugaaac

SEQ ID NO: 464028 - RNA, 19 nt, Artificial Sequence
  Description of Artificial Sequence: Synthetic oligonucleotide
  Antisense Strand to SEQ ID NO: 464027
guuucaauaaaccuuguga

SEQ ID NO: 464029 - RNA, 19 nt, Artificial Sequence
  Description of Artificial Sequence: Synthetic oligonucleotide
  Sense strand starting at position 3660 of SEQ ID NO: 317093
agacaaacagccugaguau

SEQ ID NO: 464030 - RNA, 19 nt, Artificial Sequence
  Description of Artificial Sequence: Synthetic oligonucleotide
  Antisense Strand to SEQ ID NO: 464029
auacucaggcuguuugucu

SEQ ID NO: 464031 - RNA, 19 nt, Artificial Sequence
  Description of Artificial Sequence: Synthetic oligonucleotide
  Sense strand starting at position 3661 of SEQ ID NO: 317093
gacaaacagccugaguauu

SEQ ID NO: 464032 - RNA, 19 nt, Artificial Sequence
  Description of Artificial Sequence: Synthetic oligonucleotide
  Antisense Strand to SEQ ID NO: 464031
aauacucaggcuguuuguc

SEQ ID NO: 464033 - RNA, 19 nt, Artificial Sequence
  Description of Artificial Sequence: Synthetic oligonucleotide
  Sense strand starting at position 3869 of SEQ ID NO: 317093
ccugucauuccuggaagag

SEQ ID NO: 464034 - RNA, 19 nt, Artificial Sequence
  Description of Artificial Sequence: Synthetic oligonucleotide
  Antisense Strand to SEQ ID NO: 464033
cucuuccaggaaugacagg

SEQ ID NO: 464035 - RNA, 19 nt, Artificial Sequence
  Description of Artificial Sequence: Synthetic oligonucleotide
  Sense strand starting at position 55 of SEQ ID NO: 317094
gaaaccuuucgguauaugu

SEQ ID NO: 464036 - RNA, 19 nt, Artificial Sequence
  Description of Artificial Sequence: Synthetic oligonucleotide
  Antisense Strand to SEQ ID NO: 464035
acauauaccgaaagguuuc

SEQ ID NO: 464037 - RNA, 19 nt, Artificial Sequence
  Description of Artificial Sequence: Synthetic oligonucleotide
  Sense strand starting at position 267 of SEQ ID NO: 317094
gaauaucuuucugucagga

SEQ ID NO: 464038 - RNA, 19 nt, Artificial Sequence
  Description of Artificial Sequence: Synthetic oligonucleotide
  Antisense Strand to SEQ ID NO: 464037
uccugacagaaagauauuc

SEQ ID NO: 464039 - RNA, 19 nt, Artificial Sequence
  Description of Artificial Sequence: Synthetic oligonucleotide
  Sense strand starting at position 438 of SEQ ID NO: 317094
aucuaauuguacuugguaa

SEQ ID NO: 464040 - RNA, 19 nt, Artificial Sequence
  Description of Artificial Sequence: Synthetic oligonucleotide
  Antisense Strand to SEQ ID NO: 464039
uuaccaaguacaauuagau

SEQ ID NO: 464041 - RNA, 19 nt, Artificial Sequence
  Description of Artificial Sequence: Synthetic oligonucleotide
  Sense strand starting at position 638 of SEQ ID NO: 317094
gugacugaccugcauacuu

SEQ ID NO: 464042 - RNA, 19 nt, Artificial Sequence
  Description of Artificial Sequence: Synthetic oligonucleotide
  Antisense Strand to SEQ ID NO: 464041
aaguaugcaggucagucac

SEQ ID NO: 464043 - RNA, 19 nt, Artificial Sequence
  Description of Artificial Sequence: Synthetic oligonucleotide
  Sense strand starting at position 815 of SEQ ID NO: 317094
uuccuaagacuuugcaaga

SEQ ID NO: 464044 - RNA, 19 nt, Artificial Sequence
  Description of Artificial Sequence: Synthetic oligonucleotide
  Antisense Strand to SEQ ID NO: 464043
ucuugcaaagucuuaggaa

SEQ ID NO: 464045 - RNA, 19 nt, Artificial Sequence
  Description of Artificial Sequence: Synthetic oligonucleotide
  Sense strand starting at position 820 of SEQ ID NO: 317094
aagacuuugcaagagcuga

SEQ ID NO: 464046 - RNA, 19 nt, Artificial Sequence
  Description of Artificial Sequence: Synthetic oligonucleotide
  Antisense Strand to SEQ ID NO: 464045
ucagcucuugcaaagucuu

SEQ ID NO: 464047 - RNA, 19 nt, Artificial Sequence
  Description of Artificial Sequence: Synthetic oligonucleotide
  Sense strand starting at position 840 of SEQ ID NO: 317094
gaucucuguggugauaucu

SEQ ID NO: 464048 - RNA, 19 nt, Artificial Sequence
  Description of Artificial Sequence: Synthetic oligonucleotide
  Antisense Strand to SEQ ID NO: 464047
agauaucaccacagagauc

SEQ ID NO: 464049 - RNA, 19 nt, Artificial Sequence
  Description of Artificial Sequence: Synthetic oligonucleotide
  Sense strand starting at position 870 of SEQ ID NO: 317094
ucucaugauuccuugagga

SEQ ID NO: 464050 - RNA, 19 nt, Artificial Sequence
  Description of Artificial Sequence: Synthetic oligonucleotide
  Antisense Strand to SEQ ID NO: 464049
uccucaaggaaucaugaga

SEQ ID NO: 464051 - RNA, 19 nt, Artificial Sequence
  Description of Artificial Sequence: Synthetic oligonucleotide
  Sense strand starting at position 880 of SEQ ID NO: 317094
ccuugaggaucucuuaauu

SEQ ID NO: 464052 - RNA, 19 nt, Artificial Sequence
  Description of Artificial Sequence: Synthetic oligonucleotide
  Antisense Strand to SEQ ID NO: 464051
aauuaagagauccucaagg

SEQ ID NO: 464053 - RNA, 19 nt, Artificial Sequence
  Description of Artificial Sequence: Synthetic oligonucleotide
  Sense strand starting at position 1051 of SEQ ID NO: 317094
ggaagacccagcuaaguuu

SEQ ID NO: 464054 - RNA, 19 nt, Artificial Sequence
  Description of Artificial Sequence: Synthetic oligonucleotide
  Antisense Strand to SEQ ID NO: 464053
aaacuuagcugggucuucc

SEQ ID NO: 464055 - RNA, 19 nt, Artificial Sequence
  Description of Artificial Sequence: Synthetic oligonucleotide
  Sense strand starting at position 1139 of SEQ ID NO: 317094
gccugaauccaaugacucu

SEQ ID NO: 464056 - RNA, 19 nt, Artificial Sequence
  Description of Artificial Sequence: Synthetic oligonucleotide
  Antisense Strand to SEQ ID NO: 464055
agagucauuggauucaggc

SEQ ID NO: 464057 - RNA, 19 nt, Artificial Sequence
  Description of Artificial Sequence: Synthetic oligonucleotide
  Sense strand starting at position 1152 of SEQ ID NO: 317094
gacucucaucuguggaaga

SEQ ID NO: 464058 - RNA, 19 nt, Artificial Sequence
  Description of Artificial Sequence: Synthetic oligonucleotide
  Antisense Strand to SEQ ID NO: 464057
ucuuccacagaugagaguc

SEQ ID NO: 464059 - RNA, 19 nt, Artificial Sequence
  Description of Artificial Sequence: Synthetic oligonucleotide
  Sense strand starting at position 1175 of SEQ ID NO: 317094
ucugaagaaucuguguaaa

SEQ ID NO: 464060 - RNA, 19 nt, Artificial Sequence
  Description of Artificial Sequence: Synthetic oligonucleotide
  Antisense Strand to SEQ ID NO: 464059
uuuacacagauucuucaga

SEQ ID NO: 464061 - RNA, 19 nt, Artificial Sequence
  Description of Artificial Sequence: Synthetic oligonucleotide
  Sense strand starting at position 1178 of SEQ ID NO: 317094
gaagaaucuguguaaagcu

SEQ ID NO: 464062 - RNA, 19 nt, Artificial Sequence
  Description of Artificial Sequence: Synthetic oligonucleotide
  Antisense Strand to SEQ ID NO: 464061
agcuuuacacagauucuuc

SEQ ID NO: 464063 - RNA, 19 nt, Artificial Sequence
  Description of Artificial Sequence: Synthetic oligonucleotide
  Sense strand starting at position 1246 of SEQ ID NO: 317094
ucuuauuuguucuucugca

SEQ ID NO: 464064 - RNA, 19 nt, Artificial Sequence
  Description of Artificial Sequence: Synthetic oligonucleotide
  Antisense Strand to SEQ ID NO: 464063
ugcagaagaacaaauaaga

SEQ ID NO: 464065 - RNA, 19 nt, Artificial Sequence
  Description of Artificial Sequence: Synthetic oligonucleotide
  Sense strand starting at position 1390 of SEQ ID NO: 317094
ugacaugucaugcaagaug

SEQ ID NO: 464066 - RNA, 19 nt, Artificial Sequence
  Description of Artificial Sequence: Synthetic oligonucleotide
  Antisense Strand to SEQ ID NO: 464065
caucuugcaugacauguca

SEQ ID NO: 464067 - RNA, 19 nt, Artificial Sequence
  Description of Artificial Sequence: Synthetic oligonucleotide
  Sense strand starting at position 1806 of SEQ ID NO: 317094
aagguaauacaugguugau

SEQ ID NO: 464068 - RNA, 19 nt, Artificial Sequence
  Description of Artificial Sequence: Synthetic oligonucleotide
  Antisense Strand to SEQ ID NO: 464067
aucaaccauguauuaccuu

SEQ ID NO: 464069 - RNA, 19 nt, Artificial Sequence
  Description of Artificial Sequence: Synthetic oligonucleotide
  Sense strand starting at position 1808 of SEQ ID NO: 317094
gguaauacaugguugauau

SEQ ID NO: 464070 - RNA, 19 nt, Artificial Sequence
  Description of Artificial Sequence: Synthetic oligonucleotide
  Antisense Strand to SEQ ID NO: 464069
auaucaaccauguauuacc

SEQ ID NO: 464071 - RNA, 19 nt, Artificial Sequence
  Description of Artificial Sequence: Synthetic oligonucleotide
  Sense strand starting at position 1809 of SEQ ID NO: 317094
guaauacaugguugauauc

SEQ ID NO: 464072 - RNA, 19 nt, Artificial Sequence
  Description of Artificial Sequence: Synthetic oligonucleotide
  Antisense Strand to SEQ ID NO: 464071
gauaucaaccauguauuac

SEQ ID NO: 464073 - RNA, 19 nt, Artificial Sequence
  Description of Artificial Sequence: Synthetic oligonucleotide
  Sense strand starting at position 1884 of SEQ ID NO: 317094
gcuuauaaugcagaacaga

SEQ ID NO: 464074 - RNA, 19 nt, Artificial Sequence
  Description of Artificial Sequence: Synthetic oligonucleotide
  Antisense Strand to SEQ ID NO: 464073
ucuguucugcauuauaagc

SEQ ID NO: 464075 - RNA, 19 nt, Artificial Sequence
  Description of Artificial Sequence: Synthetic oligonucleotide
  Sense strand starting at position 2714 of SEQ ID NO: 317094
acauguuacagcugaggaa

SEQ ID NO: 464076 - RNA, 19 nt, Artificial Sequence
  Description of Artificial Sequence: Synthetic oligonucleotide
  Antisense Strand to SEQ ID NO: 464075
uuccucagcuguaacaugu

SEQ ID NO: 464077 - RNA, 19 nt, Artificial Sequence
  Description of Artificial Sequence: Synthetic oligonucleotide
  Sense strand starting at position 2834 of SEQ ID NO: 317094
ccuguuugacugcagagau

SEQ ID NO: 464078 - RNA, 19 nt, Artificial Sequence
  Description of Artificial Sequence: Synthetic oligonucleotide
  Antisense Strand to SEQ ID NO: 464077
aucucugcagucaaacagg

SEQ ID NO: 464079 - RNA, 19 nt, Artificial Sequence
  Description of Artificial Sequence: Synthetic oligonucleotide
  Sense strand starting at position 2857 of SEQ ID NO: 317094
ugcacaauuucgucaccaa

SEQ ID NO: 464080 - RNA, 19 nt, Artificial Sequence
  Description of Artificial Sequence: Synthetic oligonucleotide
  Antisense Strand to SEQ ID NO: 464079
uuggugacgaaauugugca

SEQ ID NO: 464081 - RNA, 19 nt, Artificial Sequence
  Description of Artificial Sequence: Synthetic oligonucleotide
  Sense strand starting at position 2941 of SEQ ID NO: 317094
ggaacuauguaaucaugau

SEQ ID NO: 464082 - RNA, 19 nt, Artificial Sequence
  Description of Artificial Sequence: Synthetic oligonucleotide
  Antisense Strand to SEQ ID NO: 464081
aucaugauuacauaguucc

SEQ ID NO: 464083 - RNA, 19 nt, Artificial Sequence
  Description of Artificial Sequence: Synthetic oligonucleotide
  Sense strand starting at position 2945 of SEQ ID NO: 317094
cuauguaaucaugauucug

SEQ ID NO: 464084 - RNA, 19 nt, Artificial Sequence
  Description of Artificial Sequence: Synthetic oligonucleotide
  Antisense Strand to SEQ ID NO: 464083
cagaaucaugauuacauag

SEQ ID NO: 464085 - RNA, 19 nt, Artificial Sequence
  Description of Artificial Sequence: Synthetic oligonucleotide
  Sense strand starting at position 2947 of SEQ ID NO: 317094
auguaaucaugauucugaa

SEQ ID NO: 464086 - RNA, 19 nt, Artificial Sequence
  Description of Artificial Sequence: Synthetic oligonucleotide
  Antisense Strand to SEQ ID NO: 464085
uucagaaucaugauuacau

SEQ ID NO: 464087 - RNA, 19 nt, Artificial Sequence
  Description of Artificial Sequence: Synthetic oligonucleotide
  Sense strand starting at position 2998 of SEQ ID NO: 317094
gagaucaggucauauuuga

SEQ ID NO: 464088 - RNA, 19 nt, Artificial Sequence
  Description of Artificial Sequence: Synthetic oligonucleotide
  Antisense Strand to SEQ ID NO: 464087
ucaaauaugaccugaucuc

SEQ ID NO: 464089 - RNA, 19 nt, Artificial Sequence
  Description of Artificial Sequence: Synthetic oligonucleotide
  Sense strand starting at position 3003 of SEQ ID NO: 317094
caggucauauuugaagaga

SEQ ID NO: 464090 - RNA, 19 nt, Artificial Sequence
  Description of Artificial Sequence: Synthetic oligonucleotide
  Antisense Strand to SEQ ID NO: 464089
ucucuucaaauaugaccug

SEQ ID NO: 464091 - RNA, 19 nt, Artificial Sequence
  Description of Artificial Sequence: Synthetic oligonucleotide
  Sense strand starting at position 3020 of SEQ ID NO: 317094
gaagguauaguaggcuaaa

SEQ ID NO: 464092 - RNA, 19 nt, Artificial Sequence
  Description of Artificial Sequence: Synthetic oligonucleotide
  Antisense Strand to SEQ ID NO: 464091
uuuagccuacuauaccuuc

SEQ ID NO: 464093 - RNA, 19 nt, Artificial Sequence
  Description of Artificial Sequence: Synthetic oligonucleotide
  Sense strand starting at position 3021 of SEQ ID NO: 317094
aagguauaguaggcuaaau

SEQ ID NO: 464094 - RNA, 19 nt, Artificial Sequence
  Description of Artificial Sequence: Synthetic oligonucleotide
  Antisense Strand to SEQ ID NO: 464093
auuuagccuacuauaccuu

SEQ ID NO: 464095 - RNA, 19 nt, Artificial Sequence
  Description of Artificial Sequence: Synthetic oligonucleotide
  Sense strand starting at position 3023 of SEQ ID NO: 317094
gguauaguaggcuaaauaa

SEQ ID NO: 464096 - RNA, 19 nt, Artificial Sequence
  Description of Artificial Sequence: Synthetic oligonucleotide
  Antisense Strand to SEQ ID NO: 464095
uuauuuagccuacuauacc

SEQ ID NO: 464097 - RNA, 19 nt, Artificial Sequence
  Description of Artificial Sequence: Synthetic oligonucleotide
  Sense strand starting at position 3130 of SEQ ID NO: 317094
guuaaccaucuugaguuga

SEQ ID NO: 464098 - RNA, 19 nt, Artificial Sequence
  Description of Artificial Sequence: Synthetic oligonucleotide
  Antisense Strand to SEQ ID NO: 464097
ucaacucaagaugguuaac

SEQ ID NO: 464099 - RNA, 19 nt, Artificial Sequence
  Description of Artificial Sequence: Synthetic oligonucleotide
  Sense strand starting at position 3187 of SEQ ID NO: 317094
ccauuaggauccuuaugag

SEQ ID NO: 464100 - RNA, 19 nt, Artificial Sequence
  Description of Artificial Sequence: Synthetic oligonucleotide
  Antisense Strand to SEQ ID NO: 464099
cucauaaggauccuaaugg

SEQ ID NO: 464101 - RNA, 19 nt, Artificial Sequence
  Description of Artificial Sequence: Synthetic oligonucleotide
  Sense strand starting at position 3237 of SEQ ID NO: 317094
gaugaagaauaugaauaga

SEQ ID NO: 464102 - RNA, 19 nt, Artificial Sequence
  Description of Artificial Sequence: Synthetic oligonucleotide
  Antisense Strand to SEQ ID NO: 464101
ucuauucauauucuucauc

SEQ ID NO: 464103 - RNA, 19 nt, Artificial Sequence
  Description of Artificial Sequence: Synthetic oligonucleotide
  Sense strand starting at position 3351 of SEQ ID NO: 317094
aaaugaguucuagaguuuc

SEQ ID NO: 464104 - RNA, 19 nt, Artificial Sequence
  Description of Artificial Sequence: Synthetic oligonucleotide
  Antisense Strand to SEQ ID NO: 464103
gaaacucuagaacucauuu

SEQ ID NO: 464105 - RNA, 19 nt, Artificial Sequence
  Description of Artificial Sequence: Synthetic oligonucleotide
  Sense strand starting at position 3357 of SEQ ID NO: 317094
guucuagaguuuccagaag

SEQ ID NO: 464106 - RNA, 19 nt, Artificial Sequence
  Description of Artificial Sequence: Synthetic oligonucleotide
  Antisense Strand to SEQ ID NO: 464105
cuucuggaaacucuagaac

SEQ ID NO: 464107 - RNA, 19 nt, Artificial Sequence
  Description of Artificial Sequence: Synthetic oligonucleotide
  Sense strand starting at position 3363 of SEQ ID NO: 317094
gaguuuccagaaggaauuc

SEQ ID NO: 464108 - RNA, 19 nt, Artificial Sequence
  Description of Artificial Sequence: Synthetic oligonucleotide
  Antisense Strand to SEQ ID NO: 464107
gaauuccuucuggaaacuc

SEQ ID NO: 464109 - RNA, 19 nt, Artificial Sequence
  Description of Artificial Sequence: Synthetic oligonucleotide
  Sense strand starting at position 3427 of SEQ ID NO: 317094
gcuucugaccucuagaacu

SEQ ID NO: 464110 - RNA, 19 nt, Artificial Sequence
  Description of Artificial Sequence: Synthetic oligonucleotide
  Antisense Strand to SEQ ID NO: 464109
aguucuagaggucagaagc

SEQ ID NO: 464111 - RNA, 19 nt, Artificial Sequence
  Description of Artificial Sequence: Synthetic oligonucleotide
  Sense strand starting at position 3685 of SEQ ID NO: 317094
gaaaccauuuguuaagaga

SEQ ID NO: 464112 - RNA, 19 nt, Artificial Sequence
  Description of Artificial Sequence: Synthetic oligonucleotide
  Antisense Strand to SEQ ID NO: 464111
ucucuuaacaaaugguuuc

SEQ ID NO: 464113 - RNA, 19 nt, Artificial Sequence
  Description of Artificial Sequence: Synthetic oligonucleotide
  Sense strand starting at position 3973 of SEQ ID NO: 317094
agauucugugcugauggaa

SEQ ID NO: 464114 - RNA, 19 nt, Artificial Sequence
  Description of Artificial Sequence: Synthetic oligonucleotide
  Antisense Strand to SEQ ID NO: 464113
uuccaucagcacagaaucu

SEQ ID NO: 464115 - RNA, 19 nt, Artificial Sequence
  Description of Artificial Sequence: Synthetic oligonucleotide
  Sense strand starting at position 63 of SEQ ID NO: 317095
ucuuguguggcugcaguaa

SEQ ID NO: 464116 - RNA, 19 nt, Artificial Sequence
  Description of Artificial Sequence: Synthetic oligonucleotide
  Antisense Strand to SEQ ID NO: 464115
uuacugcagccacacaaga

SEQ ID NO: 464117 - RNA, 19 nt, Artificial Sequence
  Description of Artificial Sequence: Synthetic oligonucleotide
  Sense strand starting at position 194 of SEQ ID NO: 317095
ggugcugggagucaacuuu

SEQ ID NO: 464118 - RNA, 19 nt, Artificial Sequence
  Description of Artificial Sequence: Synthetic oligonucleotide
  Antisense Strand to SEQ ID NO: 464117
aaaguugacucccagcacc

SEQ ID NO: 464119 - RNA, 19 nt, Artificial Sequence
  Description of Artificial Sequence: Synthetic oligonucleotide
  Sense strand starting at position 200 of SEQ ID NO: 317095
gggagucaacuuuggcuaa

SEQ ID NO: 464120 - RNA, 19 nt, Artificial Sequence
  Description of Artificial Sequence: Synthetic oligonucleotide
  Antisense Strand to SEQ ID NO: 464119
uuagccaaaguugacuccc

SEQ ID NO: 464121 - RNA, 19 nt, Artificial Sequence
  Description of Artificial Sequence: Synthetic oligonucleotide
  Sense strand starting at position 202 of SEQ ID NO: 317095
gagucaacuuuggcuaaga

SEQ ID NO: 464122 - RNA, 19 nt, Artificial Sequence
  Description of Artificial Sequence: Synthetic oligonucleotide
  Antisense Strand to SEQ ID NO: 464121
ucuuagccaaaguugacuc

SEQ ID NO: 464123 - RNA, 19 nt, Artificial Sequence
  Description of Artificial Sequence: Synthetic oligonucleotide
  Sense strand starting at position 204 of SEQ ID NO: 317095
gucaacuuuggcuaagacu

SEQ ID NO: 464124 - RNA, 19 nt, Artificial Sequence
  Description of Artificial Sequence: Synthetic oligonucleotide
  Antisense Strand to SEQ ID NO: 464123
agucuuagccaaaguugac

SEQ ID NO: 464125 - RNA, 19 nt, Artificial Sequence
  Description of Artificial Sequence: Synthetic oligonucleotide
  Sense strand starting at position 1164 of SEQ ID NO: 317095
cguacauuacuuuauuacu

SEQ ID NO: 464126 - RNA, 19 nt, Artificial Sequence
  Description of Artificial Sequence: Synthetic oligonucleotide
  Antisense Strand to SEQ ID NO: 464125
aguaauaaaguaauguacg

SEQ ID NO: 464127 - RNA, 19 nt, Artificial Sequence
  Description of Artificial Sequence: Synthetic oligonucleotide
  Sense strand starting at position 1187 of SEQ ID NO: 317095
aggaauagcucaucuucca

SEQ ID NO: 464128 - RNA, 19 nt, Artificial Sequence
  Description of Artificial Sequence: Synthetic oligonucleotide
  Antisense Strand to SEQ ID NO: 464127
uggaagaugagcuauuccu

SEQ ID NO: 464129 - RNA, 19 nt, Artificial Sequence
  Description of Artificial Sequence: Synthetic oligonucleotide
  Sense strand starting at position 1276 of SEQ ID NO: 317095
ccuuucuugcuacaaggua

SEQ ID NO: 464130 - RNA, 19 nt, Artificial Sequence
  Description of Artificial Sequence: Synthetic oligonucleotide
  Antisense Strand to SEQ ID NO: 464129
uaccuuguagcaagaaagg

SEQ ID NO: 464131 - RNA, 19 nt, Artificial Sequence
  Description of Artificial Sequence: Synthetic oligonucleotide
  Sense strand starting at position 1289 of SEQ ID NO: 317095
aagguaaacuccuugggca

SEQ ID NO: 464132 - RNA, 19 nt, Artificial Sequence
  Description of Artificial Sequence: Synthetic oligonucleotide
  Antisense Strand to SEQ ID NO: 464131
ugcccaaggaguuuaccuu

SEQ ID NO: 464133 - RNA, 19 nt, Artificial Sequence
  Description of Artificial Sequence: Synthetic oligonucleotide
  Sense strand starting at position 1290 of SEQ ID NO: 317095
agguaaacuccuugggcaa

SEQ ID NO: 464134 - RNA, 19 nt, Artificial Sequence
  Description of Artificial Sequence: Synthetic oligonucleotide
  Antisense Strand to SEQ ID NO: 464133
uugcccaaggaguuuaccu

SEQ ID NO: 464135 - RNA, 19 nt, Artificial Sequence
  Description of Artificial Sequence: Synthetic oligonucleotide
  Sense strand starting at position 1291 of SEQ ID NO: 317095
gguaaacuccuugggcaaa

SEQ ID NO: 464136 - RNA, 19 nt, Artificial Sequence
  Description of Artificial Sequence: Synthetic oligonucleotide
  Antisense Strand to SEQ ID NO: 464135
uuugcccaaggaguuuacc

SEQ ID NO: 464137 - RNA, 19 nt, Artificial Sequence
  Description of Artificial Sequence: Synthetic oligonucleotide
  Sense strand starting at position 1394 of SEQ ID NO: 317095
cugguaacuuaagucaauu

SEQ ID NO: 464138 - RNA, 19 nt, Artificial Sequence
  Description of Artificial Sequence: Synthetic oligonucleotide
  Antisense Strand to SEQ ID NO: 464137
aauugacuuaaguuaccag

SEQ ID NO: 464139 - RNA, 19 nt, Artificial Sequence
  Description of Artificial Sequence: Synthetic oligonucleotide
  Sense strand starting at position 1429 of SEQ ID NO: 317095
ccuuuaggaucguuuaaag

SEQ ID NO: 464140 - RNA, 19 nt, Artificial Sequence
  Description of Artificial Sequence: Synthetic oligonucleotide
  Antisense Strand to SEQ ID NO: 464139
cuuuaaacgauccuaaagg

SEQ ID NO: 464141 - RNA, 19 nt, Artificial Sequence
  Description of Artificial Sequence: Synthetic oligonucleotide
  Sense strand starting at position 1471 of SEQ ID NO: 317095
aggauacagcagugaaacu

SEQ ID NO: 464142 - RNA, 19 nt, Artificial Sequence
  Description of Artificial Sequence: Synthetic oligonucleotide
  Antisense Strand to SEQ ID NO: 464141
aguuucacugcuguauccu

SEQ ID NO: 464143 - RNA, 19 nt, Artificial Sequence
  Description of Artificial Sequence: Synthetic oligonucleotide
  Sense strand starting at position 1699 of SEQ ID NO: 317095
gcaagugacuuacuuuaag

SEQ ID NO: 464144 - RNA, 19 nt, Artificial Sequence
  Description of Artificial Sequence: Synthetic oligonucleotide
  Antisense Strand to SEQ ID NO: 464143
cuuaaaguaagucacuugc

SEQ ID NO: 464145 - RNA, 19 nt, Artificial Sequence
  Description of Artificial Sequence: Synthetic oligonucleotide
  Sense strand starting at position 1826 of SEQ ID NO: 317095
gucuuauauuaccucgaaa

SEQ ID NO: 464146 - RNA, 19 nt, Artificial Sequence
  Description of Artificial Sequence: Synthetic oligonucleotide
  Antisense Strand to SEQ ID NO: 464145
uuucgagguaauauaagac

SEQ ID NO: 464147 - RNA, 19 nt, Artificial Sequence
  Description of Artificial Sequence: Synthetic oligonucleotide
  Sense strand starting at position 1828 of SEQ ID NO: 317095
cuuauauuaccucgaaaga

SEQ ID NO: 464148 - RNA, 19 nt, Artificial Sequence
  Description of Artificial Sequence: Synthetic oligonucleotide
  Antisense Strand to SEQ ID NO: 464147
ucuuucgagguaauauaag

SEQ ID NO: 464149 - RNA, 19 nt, Artificial Sequence
  Description of Artificial Sequence: Synthetic oligonucleotide
  Sense strand starting at position 2208 of SEQ ID NO: 317095
ugaagacuuuggccggauu

SEQ ID NO: 464150 - RNA, 19 nt, Artificial Sequence
  Description of Artificial Sequence: Synthetic oligonucleotide
  Antisense Strand to SEQ ID NO: 464149
aauccggccaaagucuuca

SEQ ID NO: 464151 - RNA, 19 nt, Artificial Sequence
  Description of Artificial Sequence: Synthetic oligonucleotide
  Sense strand starting at position 2209 of SEQ ID NO: 317095
gaagacuuuggccggauua

SEQ ID NO: 464152 - RNA, 19 nt, Artificial Sequence
  Description of Artificial Sequence: Synthetic oligonucleotide
  Antisense Strand to SEQ ID NO: 464151
uaauccggccaaagucuuc

SEQ ID NO: 464153 - RNA, 19 nt, Artificial Sequence
  Description of Artificial Sequence: Synthetic oligonucleotide
  Sense strand starting at position 2211 of SEQ ID NO: 317095
agacuuuggccggauuaga

SEQ ID NO: 464154 - RNA, 19 nt, Artificial Sequence
  Description of Artificial Sequence: Synthetic oligonucleotide
  Antisense Strand to SEQ ID NO: 464153
ucuaauccggccaaagucu

SEQ ID NO: 464155 - RNA, 19 nt, Artificial Sequence
  Description of Artificial Sequence: Synthetic oligonucleotide
  Sense strand starting at position 2290 of SEQ ID NO: 317095
aggauacuacuaugcuagu

SEQ ID NO: 464156 - RNA, 19 nt, Artificial Sequence
  Description of Artificial Sequence: Synthetic oligonucleotide
  Antisense Strand to SEQ ID NO: 464155
acuagcauaguaguauccu

SEQ ID NO: 464157 - RNA, 19 nt, Artificial Sequence
  Description of Artificial Sequence: Synthetic oligonucleotide
  Sense strand starting at position 2332 of SEQ ID NO: 317095
gagagacuuuggcuaaguc

SEQ ID NO: 464158 - RNA, 19 nt, Artificial Sequence
  Description of Artificial Sequence: Synthetic oligonucleotide
  Antisense Strand to SEQ ID NO: 464157
gacuuagccaaagucucuc

SEQ ID NO: 464159 - RNA, 19 nt, Artificial Sequence
  Description of Artificial Sequence: Synthetic oligonucleotide
  Sense strand starting at position 2333 of SEQ ID NO: 317095
agagacuuuggcuaaguca

SEQ ID NO: 464160 - RNA, 19 nt, Artificial Sequence
  Description of Artificial Sequence: Synthetic oligonucleotide
  Antisense Strand to SEQ ID NO: 464159
ugacuuagccaaagucucu

SEQ ID NO: 464161 - RNA, 19 nt, Artificial Sequence
  Description of Artificial Sequence: Synthetic oligonucleotide
  Sense strand starting at position 2429 of SEQ ID NO: 317095
auugguuauagcgggaaca

SEQ ID NO: 464162 - RNA, 19 nt, Artificial Sequence
  Description of Artificial Sequence: Synthetic oligonucleotide
  Antisense Strand to SEQ ID NO: 464161
uguucccgcuauaaccaau

SEQ ID NO: 464163 - RNA, 19 nt, Artificial Sequence
  Description of Artificial Sequence: Synthetic oligonucleotide
  Sense strand starting at position 2430 of SEQ ID NO: 317095
uugguuauagcgggaacaa

SEQ ID NO: 464164 - RNA, 19 nt, Artificial Sequence
  Description of Artificial Sequence: Synthetic oligonucleotide
  Antisense Strand to SEQ ID NO: 464163
uuguucccgcuauaaccaa

SEQ ID NO: 464165 - RNA, 19 nt, Artificial Sequence
  Description of Artificial Sequence: Synthetic oligonucleotide
  Sense strand starting at position 2431 of SEQ ID NO: 317095
ugguuauagcgggaacaag

SEQ ID NO: 464166 - RNA, 19 nt, Artificial Sequence
  Description of Artificial Sequence: Synthetic oligonucleotide
  Antisense Strand to SEQ ID NO: 464165
cuuguucccgcuauaacca

SEQ ID NO: 464167 - RNA, 19 nt, Artificial Sequence
  Description of Artificial Sequence: Synthetic oligonucleotide
  Sense strand starting at position 2452 of SEQ ID NO: 317095
aggcaaaguucuuccugaa

SEQ ID NO: 464168 - RNA, 19 nt, Artificial Sequence
  Description of Artificial Sequence: Synthetic oligonucleotide
  Antisense Strand to SEQ ID NO: 464167
uucaggaagaacuuugccu

SEQ ID NO: 464169 - RNA, 19 nt, Artificial Sequence
  Description of Artificial Sequence: Synthetic oligonucleotide
  Sense strand starting at position 2465 of SEQ ID NO: 317095
ccugaauucuggucggaga

SEQ ID NO: 464170 - RNA, 19 nt, Artificial Sequence
  Description of Artificial Sequence: Synthetic oligonucleotide
  Antisense Strand to SEQ ID NO: 464169
ucuccgaccagaauucagg

SEQ ID NO: 464171 - RNA, 19 nt, Artificial Sequence
  Description of Artificial Sequence: Synthetic oligonucleotide
  Sense strand starting at position 2466 of SEQ ID NO: 317095
cugaauucuggucggagau

SEQ ID NO: 464172 - RNA, 19 nt, Artificial Sequence
  Description of Artificial Sequence: Synthetic oligonucleotide
  Antisense Strand to SEQ ID NO: 464171
aucuccgaccagaauucag

SEQ ID NO: 464173 - RNA, 19 nt, Artificial Sequence
  Description of Artificial Sequence: Synthetic oligonucleotide
  Sense strand starting at position 2467 of SEQ ID NO: 317095
ugaauucuggucggagaug

SEQ ID NO: 464174 - RNA, 19 nt, Artificial Sequence
  Description of Artificial Sequence: Synthetic oligonucleotide
  Antisense Strand to SEQ ID NO: 464173
caucuccgaccagaauuca

SEQ ID NO: 464175 - RNA, 19 nt, Artificial Sequence
  Description of Artificial Sequence: Synthetic oligonucleotide
  Sense strand starting at position 2472 of SEQ ID NO: 317095
ucuggucggagauggauaa

SEQ ID NO: 464176 - RNA, 19 nt, Artificial Sequence
  Description of Artificial Sequence: Synthetic oligonucleotide
  Antisense Strand to SEQ ID NO: 464175
uuauccaucuccgaccaga

SEQ ID NO: 464177 - RNA, 19 nt, Artificial Sequence
  Description of Artificial Sequence: Synthetic oligonucleotide
  Sense strand starting at position 2560 of SEQ ID NO: 317095
aagagaaagucacuaugcu

SEQ ID NO: 464178 - RNA, 19 nt, Artificial Sequence
  Description of Artificial Sequence: Synthetic oligonucleotide
  Antisense Strand to SEQ ID NO: 464177
agcauagugacuuucucuu

SEQ ID NO: 464179 - RNA, 19 nt, Artificial Sequence
  Description of Artificial Sequence: Synthetic oligonucleotide
  Sense strand starting at position 3556 of SEQ ID NO: 317095
guuauuacccagcacacuu

SEQ ID NO: 464180 - RNA, 19 nt, Artificial Sequence
  Description of Artificial Sequence: Synthetic oligonucleotide
  Antisense Strand to SEQ ID NO: 464179
aagugugcuggguaauaac

SEQ ID NO: 464181 - RNA, 19 nt, Artificial Sequence
  Description of Artificial Sequence: Synthetic oligonucleotide
  Sense strand starting at position 3604 of SEQ ID NO: 317095
uaaugaucuggagguuaua

SEQ ID NO: 464182 - RNA, 19 nt, Artificial Sequence
  Description of Artificial Sequence: Synthetic oligonucleotide
  Antisense Strand to SEQ ID NO: 464181
uauaaccuccagaucauua

SEQ ID NO: 464183 - RNA, 19 nt, Artificial Sequence
  Description of Artificial Sequence: Synthetic oligonucleotide
  Sense strand starting at position 3743 of SEQ ID NO: 317095
uguucuuugagauagguga

SEQ ID NO: 464184 - RNA, 19 nt, Artificial Sequence
  Description of Artificial Sequence: Synthetic oligonucleotide
  Antisense Strand to SEQ ID NO: 464183
ucaccuaucucaaagaaca

SEQ ID NO: 464185 - RNA, 19 nt, Artificial Sequence
  Description of Artificial Sequence: Synthetic oligonucleotide
  Sense strand starting at position 3745 of SEQ ID NO: 317095
uucuuugagauaggugauu

SEQ ID NO: 464186 - RNA, 19 nt, Artificial Sequence
  Description of Artificial Sequence: Synthetic oligonucleotide
  Antisense Strand to SEQ ID NO: 464185
aaucaccuaucucaaagaa

SEQ ID NO: 464187 - RNA, 19 nt, Artificial Sequence
  Description of Artificial Sequence: Synthetic oligonucleotide
  Sense strand starting at position 3822 of SEQ ID NO: 317095
gagugcuuucuacaccgaa

SEQ ID NO: 464188 - RNA, 19 nt, Artificial Sequence
  Description of Artificial Sequence: Synthetic oligonucleotide
  Antisense Strand to SEQ ID NO: 464187
uucgguguagaaagcacuc

SEQ ID NO: 464189 - RNA, 19 nt, Artificial Sequence
  Description of Artificial Sequence: Synthetic oligonucleotide
  Sense strand starting at position 3826 of SEQ ID NO: 317095
gcuuucuacaccgaaggau

SEQ ID NO: 464190 - RNA, 19 nt, Artificial Sequence
  Description of Artificial Sequence: Synthetic oligonucleotide
  Antisense Strand to SEQ ID NO: 464189
auccuucgguguagaaagc

SEQ ID NO: 464191 - RNA, 19 nt, Artificial Sequence
  Description of Artificial Sequence: Synthetic oligonucleotide
  Sense strand starting at position 3889 of SEQ ID NO: 317095
agcucauugccagaggagu

SEQ ID NO: 464192 - RNA, 19 nt, Artificial Sequence
  Description of Artificial Sequence: Synthetic oligonucleotide
  Antisense Strand to SEQ ID NO: 464191
acuccucuggcaaugagcu

SEQ ID NO: 464193 - RNA, 19 nt, Artificial Sequence
  Description of Artificial Sequence: Synthetic oligonucleotide
  Sense strand starting at position 3891 of SEQ ID NO: 317095
cucauugccagaggaguga

SEQ ID NO: 464194 - RNA, 19 nt, Artificial Sequence
  Description of Artificial Sequence: Synthetic oligonucleotide
  Antisense Strand to SEQ ID NO: 464193
ucacuccucuggcaaugag

SEQ ID NO: 464195 - RNA, 19 nt, Artificial Sequence
  Description of Artificial Sequence: Synthetic oligonucleotide
  Sense strand starting at position 44 of SEQ ID NO: 317096
uauugauugagucaucgug

SEQ ID NO: 464196 - RNA, 19 nt, Artificial Sequence
  Description of Artificial Sequence: Synthetic oligonucleotide
  Antisense Strand to SEQ ID NO: 464195
cacgaugacucaaucaaua

SEQ ID NO: 464197 - RNA, 19 nt, Artificial Sequence
  Description of Artificial Sequence: Synthetic oligonucleotide
  Sense strand starting at position 122 of SEQ ID NO: 317096
agggcagagucaucuuuga

SEQ ID NO: 464198 - RNA, 19 nt, Artificial Sequence
  Description of Artificial Sequence: Synthetic oligonucleotide
  Antisense Strand to SEQ ID NO: 464197
ucaaagaugacucugcccu

SEQ ID NO: 464199 - RNA, 19 nt, Artificial Sequence
  Description of Artificial Sequence: Synthetic oligonucleotide
  Sense strand starting at position 126 of SEQ ID NO: 317096
cagagucaucuuugagaag

SEQ ID NO: 464200 - RNA, 19 nt, Artificial Sequence
  Description of Artificial Sequence: Synthetic oligonucleotide
  Antisense Strand to SEQ ID NO: 464199
cuucucaaagaugacucug

SEQ ID NO: 464201 - RNA, 19 nt, Artificial Sequence
  Description of Artificial Sequence: Synthetic oligonucleotide
  Sense strand starting at position 237 of SEQ ID NO: 317096
gcaugucuaccaugaauua

SEQ ID NO: 464202 - RNA, 19 nt, Artificial Sequence
  Description of Artificial Sequence: Synthetic oligonucleotide
  Antisense Strand to SEQ ID NO: 464201
uaauucaugguagacaugc

SEQ ID NO: 464203 - RNA, 19 nt, Artificial Sequence
  Description of Artificial Sequence: Synthetic oligonucleotide
  Sense strand starting at position 331 of SEQ ID NO: 317096
uucugaaacguccaggaca

SEQ ID NO: 464204 - RNA, 19 nt, Artificial Sequence
  Description of Artificial Sequence: Synthetic oligonucleotide
  Antisense Strand to SEQ ID NO: 464203
uguccuggacguuucagaa

SEQ ID NO: 464205 - RNA, 19 nt, Artificial Sequence
  Description of Artificial Sequence: Synthetic oligonucleotide
  Sense strand starting at position 439 of SEQ ID NO: 317096
ccaaccaugucuuuaugga

SEQ ID NO: 464206 - RNA, 19 nt, Artificial Sequence
  Description of Artificial Sequence: Synthetic oligonucleotide
  Antisense Strand to SEQ ID NO: 464205
uccauaaagacaugguugg

SEQ ID NO: 464207 - RNA, 19 nt, Artificial Sequence
  Description of Artificial Sequence: Synthetic oligonucleotide
  Sense strand starting at position 447 of SEQ ID NO: 317096
gucuuuauggauuacauau

SEQ ID NO: 464208 - RNA, 19 nt, Artificial Sequence
  Description of Artificial Sequence: Synthetic oligonucleotide
  Antisense Strand to SEQ ID NO: 464207
auauguaauccauaaagac

SEQ ID NO: 464209 - RNA, 19 nt, Artificial Sequence
  Description of Artificial Sequence: Synthetic oligonucleotide
  Sense strand starting at position 469 of SEQ ID NO: 317096
accagaauugacugcagua

SEQ ID NO: 464210 - RNA, 19 nt, Artificial Sequence
  Description of Artificial Sequence: Synthetic oligonucleotide
  Antisense Strand to SEQ ID NO: 464209
uacugcagucaauucuggu

SEQ ID NO: 464211 - RNA, 19 nt, Artificial Sequence
  Description of Artificial Sequence: Synthetic oligonucleotide
  Sense strand starting at position 471 of SEQ ID NO: 317096
cagaauugacugcaguaca

SEQ ID NO: 464212 - RNA, 19 nt, Artificial Sequence
  Description of Artificial Sequence: Synthetic oligonucleotide
  Antisense Strand to SEQ ID NO: 464211
uguacugcagucaauucug

SEQ ID NO: 464213 - RNA, 19 nt, Artificial Sequence
  Description of Artificial Sequence: Synthetic oligonucleotide
  Sense strand starting at position 482 of SEQ ID NO: 317096
gcaguacaaccugagucuu

SEQ ID NO: 464214 - RNA, 19 nt, Artificial Sequence
  Description of Artificial Sequence: Synthetic oligonucleotide
  Antisense Strand to SEQ ID NO: 464213
aagacucagguuguacugc

SEQ ID NO: 464215 - RNA, 19 nt, Artificial Sequence
  Description of Artificial Sequence: Synthetic oligonucleotide
  Sense strand starting at position 727 of SEQ ID NO: 317096
cugacuccucaguagcaga

SEQ ID NO: 464216 - RNA, 19 nt, Artificial Sequence
  Description of Artificial Sequence: Synthetic oligonucleotide
  Antisense Strand to SEQ ID NO: 464215
ucugcuacugaggagucag

SEQ ID NO: 464217 - RNA, 19 nt, Artificial Sequence
  Description of Artificial Sequence: Synthetic oligonucleotide
  Sense strand starting at position 789 of SEQ ID NO: 317096
agugucauucuauggaauu

SEQ ID NO: 464218 - RNA, 19 nt, Artificial Sequence
  Description of Artificial Sequence: Synthetic oligonucleotide
  Antisense Strand to SEQ ID NO: 464217
aauuccauagaaugacacu

SEQ ID NO: 464219 - RNA, 19 nt, Artificial Sequence
  Description of Artificial Sequence: Synthetic oligonucleotide
  Sense strand starting at position 832 of SEQ ID NO: 317096
acaggugaugcuuauguuu

SEQ ID NO: 464220 - RNA, 19 nt, Artificial Sequence
  Description of Artificial Sequence: Synthetic oligonucleotide
  Antisense Strand to SEQ ID NO: 464219
aaacauaagcaucaccugu

SEQ ID NO: 464221 - RNA, 19 nt, Artificial Sequence
  Description of Artificial Sequence: Synthetic oligonucleotide
  Sense strand starting at position 1009 of SEQ ID NO: 317096
acggguugugagugggaaa

SEQ ID NO: 464222 - RNA, 19 nt, Artificial Sequence
  Description of Artificial Sequence: Synthetic oligonucleotide
  Antisense Strand to SEQ ID NO: 464221
uuucccacucacaacccgu

SEQ ID NO: 464223 - RNA, 19 nt, Artificial Sequence
  Description of Artificial Sequence: Synthetic oligonucleotide
  Sense strand starting at position 1011 of SEQ ID NO: 317096
ggguugugagugggaaagu

SEQ ID NO: 464224 - RNA, 19 nt, Artificial Sequence
  Description of Artificial Sequence: Synthetic oligonucleotide
  Antisense Strand to SEQ ID NO: 464223
acuuucccacucacaaccc

SEQ ID NO: 464225 - RNA, 19 nt, Artificial Sequence
  Description of Artificial Sequence: Synthetic oligonucleotide
  Sense strand starting at position 1022 of SEQ ID NO: 317096
gggaaaguccugggagucu

SEQ ID NO: 464226 - RNA, 19 nt, Artificial Sequence
  Description of Artificial Sequence: Synthetic oligonucleotide
  Antisense Strand to SEQ ID NO: 464225
agacucccaggacuuuccc

SEQ ID NO: 464227 - RNA, 19 nt, Artificial Sequence
  Description of Artificial Sequence: Synthetic oligonucleotide
  Sense strand starting at position 1103 of SEQ ID NO: 317096
auggguuauccuggaaagc

SEQ ID NO: 464228 - RNA, 19 nt, Artificial Sequence
  Description of Artificial Sequence: Synthetic oligonucleotide
  Antisense Strand to SEQ ID NO: 464227
gcuuuccaggauaacccau

SEQ ID NO: 464229 - RNA, 19 nt, Artificial Sequence
  Description of Artificial Sequence: Synthetic oligonucleotide
  Sense strand starting at position 1104 of SEQ ID NO: 317096
uggguuauccuggaaagca

SEQ ID NO: 464230 - RNA, 19 nt, Artificial Sequence
  Description of Artificial Sequence: Synthetic oligonucleotide
  Antisense Strand to SEQ ID NO: 464229
ugcuuuccaggauaaccca

SEQ ID NO: 464231 - RNA, 19 nt, Artificial Sequence
  Description of Artificial Sequence: Synthetic oligonucleotide
  Sense strand starting at position 1193 of SEQ ID NO: 317096
agacuaagcacugaguguu

SEQ ID NO: 464232 - RNA, 19 nt, Artificial Sequence
  Description of Artificial Sequence: Synthetic oligonucleotide
  Antisense Strand to SEQ ID NO: 464231
aacacucagugcuuagucu

SEQ ID NO: 464233 - RNA, 19 nt, Artificial Sequence
  Description of Artificial Sequence: Synthetic oligonucleotide
  Sense strand starting at position 1275 of SEQ ID NO: 317096
guaagacuuggcgggaaag

SEQ ID NO: 464234 - RNA, 19 nt, Artificial Sequence
  Description of Artificial Sequence: Synthetic oligonucleotide
  Antisense Strand to SEQ ID NO: 464233
cuuucccgccaagucuuac

SEQ ID NO: 464235 - RNA, 19 nt, Artificial Sequence
  Description of Artificial Sequence: Synthetic oligonucleotide
  Sense strand starting at position 1276 of SEQ ID NO: 317096
uaagacuuggcgggaaagu

SEQ ID NO: 464236 - RNA, 19 nt, Artificial Sequence
  Description of Artificial Sequence: Synthetic oligonucleotide
  Antisense Strand to SEQ ID NO: 464235
acuuucccgccaagucuua

SEQ ID NO: 464237 - RNA, 19 nt, Artificial Sequence
  Description of Artificial Sequence: Synthetic oligonucleotide
  Sense strand starting at position 1287 of SEQ ID NO: 317096
gggaaagucgggugagaca

SEQ ID NO: 464238 - RNA, 19 nt, Artificial Sequence
  Description of Artificial Sequence: Synthetic oligonucleotide
  Antisense Strand to SEQ ID NO: 464237
ugucucacccgacuuuccc

SEQ ID NO: 464239 - RNA, 19 nt, Artificial Sequence
  Description of Artificial Sequence: Synthetic oligonucleotide
  Sense strand starting at position 1331 of SEQ ID NO: 317096
gucuuuguccuacauugga

SEQ ID NO: 464240 - RNA, 19 nt, Artificial Sequence
  Description of Artificial Sequence: Synthetic oligonucleotide
  Antisense Strand to SEQ ID NO: 464239
uccaauguaggacaaagac

SEQ ID NO: 464241 - RNA, 19 nt, Artificial Sequence
  Description of Artificial Sequence: Synthetic oligonucleotide
  Sense strand starting at position 1334 of SEQ ID NO: 317096
uuuguccuacauuggagaa

SEQ ID NO: 464242 - RNA, 19 nt, Artificial Sequence
  Description of Artificial Sequence: Synthetic oligonucleotide
  Antisense Strand to SEQ ID NO: 464241
uucuccaauguaggacaaa

SEQ ID NO: 464243 - RNA, 19 nt, Artificial Sequence
  Description of Artificial Sequence: Synthetic oligonucleotide
  Sense strand starting at position 1396 of SEQ ID NO: 317096
uugguuaggcaucagguaa

SEQ ID NO: 464244 - RNA, 19 nt, Artificial Sequence
  Description of Artificial Sequence: Synthetic oligonucleotide
  Antisense Strand to SEQ ID NO: 464243
uuaccugaugccuaaccaa

SEQ ID NO: 464245 - RNA, 19 nt, Artificial Sequence
  Description of Artificial Sequence: Synthetic oligonucleotide
  Sense strand starting at position 1435 of SEQ ID NO: 317096
gguugcuuucguaaguggu

SEQ ID NO: 464246 - RNA, 19 nt, Artificial Sequence
  Description of Artificial Sequence: Synthetic oligonucleotide
  Antisense Strand to SEQ ID NO: 464245
accacuuacgaaagcaacc

SEQ ID NO: 464247 - RNA, 19 nt, Artificial Sequence
  Description of Artificial Sequence: Synthetic oligonucleotide
  Sense strand starting at position 1679 of SEQ ID NO: 317096
uacugucaucacgaggcua

SEQ ID NO: 464248 - RNA, 19 nt, Artificial Sequence
  Description of Artificial Sequence: Synthetic oligonucleotide
  Antisense Strand to SEQ ID NO: 464247
uagccucgugaugacagua

SEQ ID NO: 464249 - RNA, 19 nt, Artificial Sequence
  Description of Artificial Sequence: Synthetic oligonucleotide
  Sense strand starting at position 1907 of SEQ ID NO: 317096
acuugaaagccugagucuu

SEQ ID NO: 464250 - RNA, 19 nt, Artificial Sequence
  Description of Artificial Sequence: Synthetic oligonucleotide
  Antisense Strand to SEQ ID NO: 464249
aagacucaggcuuucaagu

SEQ ID NO: 464251 - RNA, 19 nt, Artificial Sequence
  Description of Artificial Sequence: Synthetic oligonucleotide
  Sense strand starting at position 1985 of SEQ ID NO: 317096
gcauuuguuuauguaaaug

SEQ ID NO: 464252 - RNA, 19 nt, Artificial Sequence
  Description of Artificial Sequence: Synthetic oligonucleotide
  Antisense Strand to SEQ ID NO: 464251
cauuuacauaaacaaaugc

SEQ ID NO: 464253 - RNA, 19 nt, Artificial Sequence
  Description of Artificial Sequence: Synthetic oligonucleotide
  Sense strand starting at position 2014 of SEQ ID NO: 317096
gaaggagcaaaguguugaa

SEQ ID NO: 464254 - RNA, 19 nt, Artificial Sequence
  Description of Artificial Sequence: Synthetic oligonucleotide
  Antisense Strand to SEQ ID NO: 464253
uucaacacuuugcuccuuc

SEQ ID NO: 464255 - RNA, 19 nt, Artificial Sequence
  Description of Artificial Sequence: Synthetic oligonucleotide
  Sense strand starting at position 2029 of SEQ ID NO: 317096
ugaaguuccuaccuugagu

SEQ ID NO: 464256 - RNA, 19 nt, Artificial Sequence
  Description of Artificial Sequence: Synthetic oligonucleotide
  Antisense Strand to SEQ ID NO: 464255
acucaagguaggaacuuca

SEQ ID NO: 464257 - RNA, 19 nt, Artificial Sequence
  Description of Artificial Sequence: Synthetic oligonucleotide
  Sense strand starting at position 2035 of SEQ ID NO: 317096
uccuaccuugaguauguaa

SEQ ID NO: 464258 - RNA, 19 nt, Artificial Sequence
  Description of Artificial Sequence: Synthetic oligonucleotide
  Antisense Strand to SEQ ID NO: 464257
uuacauacucaagguagga

SEQ ID NO: 464259 - RNA, 19 nt, Artificial Sequence
  Description of Artificial Sequence: Synthetic oligonucleotide
  Sense strand starting at position 2037 of SEQ ID NO: 317096
cuaccuugaguauguaaac

SEQ ID NO: 464260 - RNA, 19 nt, Artificial Sequence
  Description of Artificial Sequence: Synthetic oligonucleotide
  Antisense Strand to SEQ ID NO: 464259
guuuacauacucaagguag

SEQ ID NO: 464261 - RNA, 19 nt, Artificial Sequence
  Description of Artificial Sequence: Synthetic oligonucleotide
  Sense strand starting at position 2310 of SEQ ID NO: 317096
ucagucuaauagguaagua

SEQ ID NO: 464262 - RNA, 19 nt, Artificial Sequence
  Description of Artificial Sequence: Synthetic oligonucleotide
  Antisense Strand to SEQ ID NO: 464261
uacuuaccuauuagacuga

SEQ ID NO: 464263 - RNA, 19 nt, Artificial Sequence
  Description of Artificial Sequence: Synthetic oligonucleotide
  Sense strand starting at position 2694 of SEQ ID NO: 317096
gagugaaucuacgugaaag

SEQ ID NO: 464264 - RNA, 19 nt, Artificial Sequence
  Description of Artificial Sequence: Synthetic oligonucleotide
  Antisense Strand to SEQ ID NO: 464263
cuuucacguagauucacuc

SEQ ID NO: 464265 - RNA, 19 nt, Artificial Sequence
  Description of Artificial Sequence: Synthetic oligonucleotide
  Sense strand starting at position 2695 of SEQ ID NO: 317096
agugaaucuacgugaaagg

SEQ ID NO: 464266 - RNA, 19 nt, Artificial Sequence
  Description of Artificial Sequence: Synthetic oligonucleotide
  Antisense Strand to SEQ ID NO: 464265
ccuuucacguagauucacu

SEQ ID NO: 464267 - RNA, 19 nt, Artificial Sequence
  Description of Artificial Sequence: Synthetic oligonucleotide
  Sense strand starting at position 2696 of SEQ ID NO: 317096
gugaaucuacgugaaaggu

SEQ ID NO: 464268 - RNA, 19 nt, Artificial Sequence
  Description of Artificial Sequence: Synthetic oligonucleotide
  Antisense Strand to SEQ ID NO: 464267
accuuucacguagauucac

SEQ ID NO: 464269 - RNA, 19 nt, Artificial Sequence
  Description of Artificial Sequence: Synthetic oligonucleotide
  Sense strand starting at position 2704 of SEQ ID NO: 317096
acgugaaaggucuaauagg

SEQ ID NO: 464270 - RNA, 19 nt, Artificial Sequence
  Description of Artificial Sequence: Synthetic oligonucleotide
  Antisense Strand to SEQ ID NO: 464269
ccuauuagaccuuucacgu

SEQ ID NO: 464271 - RNA, 19 nt, Artificial Sequence
  Description of Artificial Sequence: Synthetic oligonucleotide
  Sense strand starting at position 2713 of SEQ ID NO: 317096
gucuaauaggcgcucuagu

SEQ ID NO: 464272 - RNA, 19 nt, Artificial Sequence
  Description of Artificial Sequence: Synthetic oligonucleotide
  Antisense Strand to SEQ ID NO: 464271
acuagagcgccuauuagac

SEQ ID NO: 464273 - RNA, 19 nt, Artificial Sequence
  Description of Artificial Sequence: Synthetic oligonucleotide
  Sense strand starting at position 3933 of SEQ ID NO: 317096
ugacuagcccaaggagaau

SEQ ID NO: 464274 - RNA, 19 nt, Artificial Sequence
  Description of Artificial Sequence: Synthetic oligonucleotide
  Antisense Strand to SEQ ID NO: 464273
auucuccuugggcuaguca

SEQ ID NO: 464275 - RNA, 19 nt, Artificial Sequence
  Description of Artificial Sequence: Synthetic oligonucleotide
  Sense strand starting at position 14 of SEQ ID NO: 317097
agcacauguuuauugagaa

SEQ ID NO: 464276 - RNA, 19 nt, Artificial Sequence
  Description of Artificial Sequence: Synthetic oligonucleotide
  Antisense Strand to SEQ ID NO: 464275
uucucaauaaacaugugcu

SEQ ID NO: 464277 - RNA, 19 nt, Artificial Sequence
  Description of Artificial Sequence: Synthetic oligonucleotide
  Sense strand starting at position 28 of SEQ ID NO: 317097
gagaaccuccuuuguuaag

SEQ ID NO: 464278 - RNA, 19 nt, Artificial Sequence
  Description of Artificial Sequence: Synthetic oligonucleotide
  Antisense Strand to SEQ ID NO: 464277
cuuaacaaaggagguucuc

SEQ ID NO: 464279 - RNA, 19 nt, Artificial Sequence
  Description of Artificial Sequence: Synthetic oligonucleotide
  Sense strand starting at position 29 of SEQ ID NO: 317097
agaaccuccuuuguuaaga

SEQ ID NO: 464280 - RNA, 19 nt, Artificial Sequence
  Description of Artificial Sequence: Synthetic oligonucleotide
  Antisense Strand to SEQ ID NO: 464279
ucuuaacaaaggagguucu

SEQ ID NO: 464281 - RNA, 19 nt, Artificial Sequence
  Description of Artificial Sequence: Synthetic oligonucleotide
  Sense strand starting at position 96 of SEQ ID NO: 317097
cugaauuagguagaugcua

SEQ ID NO: 464282 - RNA, 19 nt, Artificial Sequence
  Description of Artificial Sequence: Synthetic oligonucleotide
  Antisense Strand to SEQ ID NO: 464281
uagcaucuaccuaauucag

SEQ ID NO: 464283 - RNA, 19 nt, Artificial Sequence
  Description of Artificial Sequence: Synthetic oligonucleotide
  Sense strand starting at position 256 of SEQ ID NO: 317097
cuuugagaaucucuguaaa

SEQ ID NO: 464284 - RNA, 19 nt, Artificial Sequence
  Description of Artificial Sequence: Synthetic oligonucleotide
  Antisense Strand to SEQ ID NO: 464283
uuuacagagauucucaaag

SEQ ID NO: 464285 - RNA, 19 nt, Artificial Sequence
  Description of Artificial Sequence: Synthetic oligonucleotide
  Sense strand starting at position 400 of SEQ ID NO: 317097
uguauagacuauguauaac

SEQ ID NO: 464286 - RNA, 19 nt, Artificial Sequence
  Description of Artificial Sequence: Synthetic oligonucleotide
  Antisense Strand to SEQ ID NO: 464285
guuauacauagucuauaca

SEQ ID NO: 464287 - RNA, 19 nt, Artificial Sequence
  Description of Artificial Sequence: Synthetic oligonucleotide
  Sense strand starting at position 507 of SEQ ID NO: 317097
acaguaaagucaguugaua

SEQ ID NO: 464288 - RNA, 19 nt, Artificial Sequence
  Description of Artificial Sequence: Synthetic oligonucleotide
  Antisense Strand to SEQ ID NO: 464287
uaucaacugacuuuacugu

SEQ ID NO: 464289 - RNA, 19 nt, Artificial Sequence
  Description of Artificial Sequence: Synthetic oligonucleotide
  Sense strand starting at position 509 of SEQ ID NO: 317097
aguaaagucaguugauaga

SEQ ID NO: 464290 - RNA, 19 nt, Artificial Sequence
  Description of Artificial Sequence: Synthetic oligonucleotide
  Antisense Strand to SEQ ID NO: 464289
ucuaucaacugacuuuacu

SEQ ID NO: 464291 - RNA, 19 nt, Artificial Sequence
  Description of Artificial Sequence: Synthetic oligonucleotide
  Sense strand starting at position 574 of SEQ ID NO: 317097
uccucuugucuuuagaaag

SEQ ID NO: 464292 - RNA, 19 nt, Artificial Sequence
  Description of Artificial Sequence: Synthetic oligonucleotide
  Antisense Strand to SEQ ID NO: 464291
cuuucuaaagacaagagga

SEQ ID NO: 464293 - RNA, 19 nt, Artificial Sequence
  Description of Artificial Sequence: Synthetic oligonucleotide
  Sense strand starting at position 676 of SEQ ID NO: 317097
cagauugcacugugaggaa

SEQ ID NO: 464294 - RNA, 19 nt, Artificial Sequence
  Description of Artificial Sequence: Synthetic oligonucleotide
  Antisense Strand to SEQ ID NO: 464293
uuccucacagugcaaucug

SEQ ID NO: 464295 - RNA, 19 nt, Artificial Sequence
  Description of Artificial Sequence: Synthetic oligonucleotide
  Sense strand starting at position 805 of SEQ ID NO: 317097
ugacauuaauggcuaacau

SEQ ID NO: 464296 - RNA, 19 nt, Artificial Sequence
  Description of Artificial Sequence: Synthetic oligonucleotide
  Antisense Strand to SEQ ID NO: 464295
auguuagccauuaauguca

SEQ ID NO: 464297 - RNA, 19 nt, Artificial Sequence
  Description of Artificial Sequence: Synthetic oligonucleotide
  Sense strand starting at position 1110 of SEQ ID NO: 317097
ccauguacaguugacuuaa

SEQ ID NO: 464298 - RNA, 19 nt, Artificial Sequence
  Description of Artificial Sequence: Synthetic oligonucleotide
  Antisense Strand to SEQ ID NO: 464297
uuaagucaacuguacaugg

SEQ ID NO: 464299 - RNA, 19 nt, Artificial Sequence
  Description of Artificial Sequence: Synthetic oligonucleotide
  Sense strand starting at position 1250 of SEQ ID NO: 317097
uuaaguagccauuagauug

SEQ ID NO: 464300 - RNA, 19 nt, Artificial Sequence
  Description of Artificial Sequence: Synthetic oligonucleotide
  Antisense Strand to SEQ ID NO: 464299
caaucuaauggcuacuuaa

SEQ ID NO: 464301 - RNA, 19 nt, Artificial Sequence
  Description of Artificial Sequence: Synthetic oligonucleotide
  Sense strand starting at position 1277 of SEQ ID NO: 317097
ucaacaugucuuuggacua

SEQ ID NO: 464302 - RNA, 19 nt, Artificial Sequence
  Description of Artificial Sequence: Synthetic oligonucleotide
  Antisense Strand to SEQ ID NO: 464301
uaguccaaagacauguuga

SEQ ID NO: 464303 - RNA, 19 nt, Artificial Sequence
  Description of Artificial Sequence: Synthetic oligonucleotide
  Sense strand starting at position 1282 of SEQ ID NO: 317097
augucuuuggacuauugau

SEQ ID NO: 464304 - RNA, 19 nt, Artificial Sequence
  Description of Artificial Sequence: Synthetic oligonucleotide
  Antisense Strand to SEQ ID NO: 464303
aucaauaguccaaagacau

SEQ ID NO: 464305 - RNA, 19 nt, Artificial Sequence
  Description of Artificial Sequence: Synthetic oligonucleotide
  Sense strand starting at position 1288 of SEQ ID NO: 317097
uuggacuauugaucuuauu

SEQ ID NO: 464306 - RNA, 19 nt, Artificial Sequence
  Description of Artificial Sequence: Synthetic oligonucleotide
  Antisense Strand to SEQ ID NO: 464305
aauaagaucaauaguccaa

SEQ ID NO: 464307 - RNA, 19 nt, Artificial Sequence
  Description of Artificial Sequence: Synthetic oligonucleotide
  Sense strand starting at position 1494 of SEQ ID NO: 317097
augcaauuagaaggaucua

SEQ ID NO: 464308 - RNA, 19 nt, Artificial Sequence
  Description of Artificial Sequence: Synthetic oligonucleotide
  Antisense Strand to SEQ ID NO: 464307
uagauccuucuaauugcau

SEQ ID NO: 464309 - RNA, 19 nt, Artificial Sequence
  Description of Artificial Sequence: Synthetic oligonucleotide
  Sense strand starting at position 1555 of SEQ ID NO: 317097
ggacaacguaaguaacuua

SEQ ID NO: 464310 - RNA, 19 nt, Artificial Sequence
  Description of Artificial Sequence: Synthetic oligonucleotide
  Antisense Strand to SEQ ID NO: 464309
uaaguuacuuacguugucc

SEQ ID NO: 464311 - RNA, 19 nt, Artificial Sequence
  Description of Artificial Sequence: Synthetic oligonucleotide
  Sense strand starting at position 1587 of SEQ ID NO: 317097
ugcucaucaguagaaauau

SEQ ID NO: 464312 - RNA, 19 nt, Artificial Sequence
  Description of Artificial Sequence: Synthetic oligonucleotide
  Antisense Strand to SEQ ID NO: 464311
auauuucuacugaugagca

SEQ ID NO: 464313 - RNA, 19 nt, Artificial Sequence
  Description of Artificial Sequence: Synthetic oligonucleotide
  Sense strand starting at position 1661 of SEQ ID NO: 317097
uguuaagugaagggauaga

SEQ ID NO: 464314 - RNA, 19 nt, Artificial Sequence
  Description of Artificial Sequence: Synthetic oligonucleotide
  Antisense Strand to SEQ ID NO: 464313
ucuaucccuucacuuaaca

SEQ ID NO: 464315 - RNA, 19 nt, Artificial Sequence
  Description of Artificial Sequence: Synthetic oligonucleotide
  Sense strand starting at position 1836 of SEQ ID NO: 317097
uugcucaguagagaagauu

SEQ ID NO: 464316 - RNA, 19 nt, Artificial Sequence
  Description of Artificial Sequence: Synthetic oligonucleotide
  Antisense Strand to SEQ ID NO: 464315
aaucuucucuacugagcaa

SEQ ID NO: 464317 - RNA, 19 nt, Artificial Sequence
  Description of Artificial Sequence: Synthetic oligonucleotide
  Sense strand starting at position 1900 of SEQ ID NO: 317097
cguaaacaacuaugauaua

SEQ ID NO: 464318 - RNA, 19 nt, Artificial Sequence
  Description of Artificial Sequence: Synthetic oligonucleotide
  Antisense Strand to SEQ ID NO: 464317
uauaucauaguuguuuacg

SEQ ID NO: 464319 - RNA, 19 nt, Artificial Sequence
  Description of Artificial Sequence: Synthetic oligonucleotide
  Sense strand starting at position 2147 of SEQ ID NO: 317097
uguguuugugguagaaagc

SEQ ID NO: 464320 - RNA, 19 nt, Artificial Sequence
  Description of Artificial Sequence: Synthetic oligonucleotide
  Antisense Strand to SEQ ID NO: 464319
gcuuucuaccacaaacaca

SEQ ID NO: 464321 - RNA, 19 nt, Artificial Sequence
  Description of Artificial Sequence: Synthetic oligonucleotide
  Sense strand starting at position 2154 of SEQ ID NO: 317097
gugguagaaagcuacuauc

SEQ ID NO: 464322 - RNA, 19 nt, Artificial Sequence
  Description of Artificial Sequence: Synthetic oligonucleotide
  Antisense Strand to SEQ ID NO: 464321
gauaguagcuuucuaccac

SEQ ID NO: 464323 - RNA, 19 nt, Artificial Sequence
  Description of Artificial Sequence: Synthetic oligonucleotide
  Sense strand starting at position 2205 of SEQ ID NO: 317097
auaaauaccucaguuugga

SEQ ID NO: 464324 - RNA, 19 nt, Artificial Sequence
  Description of Artificial Sequence: Synthetic oligonucleotide
  Antisense Strand to SEQ ID NO: 464323
uccaaacugagguauuuau

SEQ ID NO: 464325 - RNA, 19 nt, Artificial Sequence
  Description of Artificial Sequence: Synthetic oligonucleotide
  Sense strand starting at position 2222 of SEQ ID NO: 317097
gacaucauguugucagaua

SEQ ID NO: 464326 - RNA, 19 nt, Artificial Sequence
  Description of Artificial Sequence: Synthetic oligonucleotide
  Antisense Strand to SEQ ID NO: 464325
uaucugacaacaugauguc

SEQ ID NO: 464327 - RNA, 19 nt, Artificial Sequence
  Description of Artificial Sequence: Synthetic oligonucleotide
  Sense strand starting at position 2262 of SEQ ID NO: 317097
gcuaauuaggacugacuga

SEQ ID NO: 464328 - RNA, 19 nt, Artificial Sequence
  Description of Artificial Sequence: Synthetic oligonucleotide
  Antisense Strand to SEQ ID NO: 464327
ucagucaguccuaauuagc

SEQ ID NO: 464329 - RNA, 19 nt, Artificial Sequence
  Description of Artificial Sequence: Synthetic oligonucleotide
  Sense strand starting at position 2593 of SEQ ID NO: 317097
gggacacuggguugaaauu

SEQ ID NO: 464330 - RNA, 19 nt, Artificial Sequence
  Description of Artificial Sequence: Synthetic oligonucleotide
  Antisense Strand to SEQ ID NO: 464329
aauuucaacccaguguccc

SEQ ID NO: 464331 - RNA, 19 nt, Artificial Sequence
  Description of Artificial Sequence: Synthetic oligonucleotide
  Sense strand starting at position 2657 of SEQ ID NO: 317097
gaguaaagaccuuguuaug

SEQ ID NO: 464332 - RNA, 19 nt, Artificial Sequence
  Description of Artificial Sequence: Synthetic oligonucleotide
  Antisense Strand to SEQ ID NO: 464331
cauaacaaggucuuuacuc

SEQ ID NO: 464333 - RNA, 19 nt, Artificial Sequence
  Description of Artificial Sequence: Synthetic oligonucleotide
  Sense strand starting at position 2783 of SEQ ID NO: 317097
cccaguaugaaugggauua

SEQ ID NO: 464334 - RNA, 19 nt, Artificial Sequence
  Description of Artificial Sequence: Synthetic oligonucleotide
  Antisense Strand to SEQ ID NO: 464333
uaaucccauucauacuggg

SEQ ID NO: 464335 - RNA, 19 nt, Artificial Sequence
  Description of Artificial Sequence: Synthetic oligonucleotide
  Sense strand starting at position 3161 of SEQ ID NO: 317097
ugacuuguuccaggaacag

SEQ ID NO: 464336 - RNA, 19 nt, Artificial Sequence
  Description of Artificial Sequence: Synthetic oligonucleotide
  Antisense Strand to SEQ ID NO: 464335
cuguuccuggaacaaguca

SEQ ID NO: 464337 - RNA, 19 nt, Artificial Sequence
  Description of Artificial Sequence: Synthetic oligonucleotide
  Sense strand starting at position 3229 of SEQ ID NO: 317097
ugaggucagaaggguauua

SEQ ID NO: 464338 - RNA, 19 nt, Artificial Sequence
  Description of Artificial Sequence: Synthetic oligonucleotide
  Antisense Strand to SEQ ID NO: 464337
uaauacccuucugaccuca

SEQ ID NO: 464339 - RNA, 19 nt, Artificial Sequence
  Description of Artificial Sequence: Synthetic oligonucleotide
  Sense strand starting at position 3238 of SEQ ID NO: 317097
aaggguauuagauggcaga

SEQ ID NO: 464340 - RNA, 19 nt, Artificial Sequence
  Description of Artificial Sequence: Synthetic oligonucleotide
  Antisense Strand to SEQ ID NO: 464339
ucugccaucuaauacccuu

SEQ ID NO: 464341 - RNA, 19 nt, Artificial Sequence
  Description of Artificial Sequence: Synthetic oligonucleotide
  Sense strand starting at position 3239 of SEQ ID NO: 317097
aggguauuagauggcagau

SEQ ID NO: 464342 - RNA, 19 nt, Artificial Sequence
  Description of Artificial Sequence: Synthetic oligonucleotide
  Antisense Strand to SEQ ID NO: 464341
aucugccaucuaauacccu

SEQ ID NO: 464343 - RNA, 19 nt, Artificial Sequence
  Description of Artificial Sequence: Synthetic oligonucleotide
  Sense strand starting at position 3245 of SEQ ID NO: 317097
uuagauggcagaugguaua

SEQ ID NO: 464344 - RNA, 19 nt, Artificial Sequence
  Description of Artificial Sequence: Synthetic oligonucleotide
  Antisense Strand to SEQ ID NO: 464343
uauaccaucugccaucuaa

SEQ ID NO: 464345 - RNA, 19 nt, Artificial Sequence
  Description of Artificial Sequence: Synthetic oligonucleotide
  Sense strand starting at position 3293 of SEQ ID NO: 317097
cauugcuaugagugagaag

SEQ ID NO: 464346 - RNA, 19 nt, Artificial Sequence
  Description of Artificial Sequence: Synthetic oligonucleotide
  Antisense Strand to SEQ ID NO: 464345
cuucucacucauagcaaug

SEQ ID NO: 464347 - RNA, 19 nt, Artificial Sequence
  Description of Artificial Sequence: Synthetic oligonucleotide
  Sense strand starting at position 3455 of SEQ ID NO: 317097
augagacguggucauauuc

SEQ ID NO: 464348 - RNA, 19 nt, Artificial Sequence
  Description of Artificial Sequence: Synthetic oligonucleotide
  Antisense Strand to SEQ ID NO: 464347
gaauaugaccacgucucau

SEQ ID NO: 464349 - RNA, 19 nt, Artificial Sequence
  Description of Artificial Sequence: Synthetic oligonucleotide
  Sense strand starting at position 3839 of SEQ ID NO: 317097
uuauaauaccuguaaaggu

SEQ ID NO: 464350 - RNA, 19 nt, Artificial Sequence
  Description of Artificial Sequence: Synthetic oligonucleotide
  Antisense Strand to SEQ ID NO: 464349
accuuuacagguauuauaa

SEQ ID NO: 464351 - RNA, 19 nt, Artificial Sequence
  Description of Artificial Sequence: Synthetic oligonucleotide
  Sense strand starting at position 3848 of SEQ ID NO: 317097
cuguaaaggucauugacau

SEQ ID NO: 464352 - RNA, 19 nt, Artificial Sequence
  Description of Artificial Sequence: Synthetic oligonucleotide
  Antisense Strand to SEQ ID NO: 464351
augucaaugaccuuuacag

SEQ ID NO: 464353 - RNA, 19 nt, Artificial Sequence
  Description of Artificial Sequence: Synthetic oligonucleotide
  Sense strand starting at position 3849 of SEQ ID NO: 317097
uguaaaggucauugacauu

SEQ ID NO: 464354 - RNA, 19 nt, Artificial Sequence
  Description of Artificial Sequence: Synthetic oligonucleotide
  Antisense Strand to SEQ ID NO: 464353
aaugucaaugaccuuuaca

SEQ ID NO: 464355 - RNA, 19 nt, Artificial Sequence
  Description of Artificial Sequence: Synthetic oligonucleotide
  Sense strand starting at position 10 of SEQ ID NO: 317098
gaggaaauguuccuaaacu

SEQ ID NO: 464356 - RNA, 19 nt, Artificial Sequence
  Description of Artificial Sequence: Synthetic oligonucleotide
  Antisense Strand to SEQ ID NO: 464355
aguuuaggaacauuuccuc

SEQ ID NO: 464357 - RNA, 19 nt, Artificial Sequence
  Description of Artificial Sequence: Synthetic oligonucleotide
  Sense strand starting at position 33 of SEQ ID NO: 317098
auuaauuaucgucaaggca

SEQ ID NO: 464358 - RNA, 19 nt, Artificial Sequence
  Description of Artificial Sequence: Synthetic oligonucleotide
  Antisense Strand to SEQ ID NO: 464357
ugccuugacgauaauuaau

SEQ ID NO: 464359 - RNA, 19 nt, Artificial Sequence
  Description of Artificial Sequence: Synthetic oligonucleotide
  Sense strand starting at position 75 of SEQ ID NO: 317098
ugcauuucuuauguugauu

SEQ ID NO: 464360 - RNA, 19 nt, Artificial Sequence
  Description of Artificial Sequence: Synthetic oligonucleotide
  Antisense Strand to SEQ ID NO: 464359
aaucaacauaagaaaugca

SEQ ID NO: 464361 - RNA, 19 nt, Artificial Sequence
  Description of Artificial Sequence: Synthetic oligonucleotide
  Sense strand starting at position 92 of SEQ ID NO: 317098
uucuuauaugaucauguga

SEQ ID NO: 464362 - RNA, 19 nt, Artificial Sequence
  Description of Artificial Sequence: Synthetic oligonucleotide
  Antisense Strand to SEQ ID NO: 464361
ucacaugaucauauaagaa

SEQ ID NO: 464363 - RNA, 19 nt, Artificial Sequence
  Description of Artificial Sequence: Synthetic oligonucleotide
  Sense strand starting at position 378 of SEQ ID NO: 317098
cugcaucuugaugaauauu

SEQ ID NO: 464364 - RNA, 19 nt, Artificial Sequence
  Description of Artificial Sequence: Synthetic oligonucleotide
  Antisense Strand to SEQ ID NO: 464363
aauauucaucaagaugcag

SEQ ID NO: 464365 - RNA, 19 nt, Artificial Sequence
  Description of Artificial Sequence: Synthetic oligonucleotide
  Sense strand starting at position 761 of SEQ ID NO: 317098
cugaucaguggucacugaa

SEQ ID NO: 464366 - RNA, 19 nt, Artificial Sequence
  Description of Artificial Sequence: Synthetic oligonucleotide
  Antisense Strand to SEQ ID NO: 464365
uucagugaccacugaucag

SEQ ID NO: 464367 - RNA, 19 nt, Artificial Sequence
  Description of Artificial Sequence: Synthetic oligonucleotide
  Sense strand starting at position 883 of SEQ ID NO: 317098
gagcuaggucagcaagacu

SEQ ID NO: 464368 - RNA, 19 nt, Artificial Sequence
  Description of Artificial Sequence: Synthetic oligonucleotide
  Antisense Strand to SEQ ID NO: 464367
agucuugcugaccuagcuc

SEQ ID NO: 464369 - RNA, 19 nt, Artificial Sequence
  Description of Artificial Sequence: Synthetic oligonucleotide
  Sense strand starting at position 947 of SEQ ID NO: 317098
ccuugauugagugaggucu

SEQ ID NO: 464370 - RNA, 19 nt, Artificial Sequence
  Description of Artificial Sequence: Synthetic oligonucleotide
  Antisense Strand to SEQ ID NO: 464369
agaccucacucaaucaagg

SEQ ID NO: 464371 - RNA, 19 nt, Artificial Sequence
  Description of Artificial Sequence: Synthetic oligonucleotide
  Sense strand starting at position 979 of SEQ ID NO: 317098
cgcaaauguguguugugag

SEQ ID NO: 464372 - RNA, 19 nt, Artificial Sequence
  Description of Artificial Sequence: Synthetic oligonucleotide
  Antisense Strand to SEQ ID NO: 464371
cucacaacacacauuugcg

SEQ ID NO: 464373 - RNA, 19 nt, Artificial Sequence
  Description of Artificial Sequence: Synthetic oligonucleotide
  Sense strand starting at position 1166 of SEQ ID NO: 317098
auauaaguaugauuggcaa

SEQ ID NO: 464374 - RNA, 19 nt, Artificial Sequence
  Description of Artificial Sequence: Synthetic oligonucleotide
  Antisense Strand to SEQ ID NO: 464373
uugccaaucauacuuauau

SEQ ID NO: 464375 - RNA, 19 nt, Artificial Sequence
  Description of Artificial Sequence: Synthetic oligonucleotide
  Sense strand starting at position 1168 of SEQ ID NO: 317098
auaaguaugauuggcaaug

SEQ ID NO: 464376 - RNA, 19 nt, Artificial Sequence
  Description of Artificial Sequence: Synthetic oligonucleotide
  Antisense Strand to SEQ ID NO: 464375
cauugccaaucauacuuau

SEQ ID NO: 464377 - RNA, 19 nt, Artificial Sequence
  Description of Artificial Sequence: Synthetic oligonucleotide
  Sense strand starting at position 1178 of SEQ ID NO: 317098
uuggcaaugggaugacuau

SEQ ID NO: 464378 - RNA, 19 nt, Artificial Sequence
  Description of Artificial Sequence: Synthetic oligonucleotide
  Antisense Strand to SEQ ID NO: 464377
auagucaucccauugccaa

SEQ ID NO: 464379 - RNA, 19 nt, Artificial Sequence
  Description of Artificial Sequence: Synthetic oligonucleotide
  Sense strand starting at position 1240 of SEQ ID NO: 317098
uaggaugcugcucagacau

SEQ ID NO: 464380 - RNA, 19 nt, Artificial Sequence
  Description of Artificial Sequence: Synthetic oligonucleotide
  Antisense Strand to SEQ ID NO: 464379
augucugagcagcauccua

SEQ ID NO: 464381 - RNA, 19 nt, Artificial Sequence
  Description of Artificial Sequence: Synthetic oligonucleotide
  Sense strand starting at position 1325 of SEQ ID NO: 317098
uggucacauccugaauauu

SEQ ID NO: 464382 - RNA, 19 nt, Artificial Sequence
  Description of Artificial Sequence: Synthetic oligonucleotide
  Antisense Strand to SEQ ID NO: 464381
aauauucaggaugugacca

SEQ ID NO: 464383 - RNA, 19 nt, Artificial Sequence
  Description of Artificial Sequence: Synthetic oligonucleotide
  Sense strand starting at position 1625 of SEQ ID NO: 317098
ugagucuuugaguaucacu

SEQ ID NO: 464384 - RNA, 19 nt, Artificial Sequence
  Description of Artificial Sequence: Synthetic oligonucleotide
  Antisense Strand to SEQ ID NO: 464383
agugauacucaaagacuca

SEQ ID NO: 464385 - RNA, 19 nt, Artificial Sequence
  Description of Artificial Sequence: Synthetic oligonucleotide
  Sense strand starting at position 1720 of SEQ ID NO: 317098
aagacaauguugucagauc

SEQ ID NO: 464386 - RNA, 19 nt, Artificial Sequence
  Description of Artificial Sequence: Synthetic oligonucleotide
  Antisense Strand to SEQ ID NO: 464385
gaucugacaacauugucuu

SEQ ID NO: 464387 - RNA, 19 nt, Artificial Sequence
  Description of Artificial Sequence: Synthetic oligonucleotide
  Sense strand starting at position 1748 of SEQ ID NO: 317098
agcacauguuuauugagaa

SEQ ID NO: 464388 - RNA, 19 nt, Artificial Sequence
  Description of Artificial Sequence: Synthetic oligonucleotide
  Antisense Strand to SEQ ID NO: 464387
uucucaauaaacaugugcu

SEQ ID NO: 464389 - RNA, 19 nt, Artificial Sequence
  Description of Artificial Sequence: Synthetic oligonucleotide
  Sense strand starting at position 1762 of SEQ ID NO: 317098
gagaaccuccuuuguuaag

SEQ ID NO: 464390 - RNA, 19 nt, Artificial Sequence
  Description of Artificial Sequence: Synthetic oligonucleotide
  Antisense Strand to SEQ ID NO: 464389
cuuaacaaaggagguucuc

SEQ ID NO: 464391 - RNA, 19 nt, Artificial Sequence
  Description of Artificial Sequence: Synthetic oligonucleotide
  Sense strand starting at position 1763 of SEQ ID NO: 317098
agaaccuccuuuguuaaga

SEQ ID NO: 464392 - RNA, 19 nt, Artificial Sequence
  Description of Artificial Sequence: Synthetic oligonucleotide
  Antisense Strand to SEQ ID NO: 464391
ucuuaacaaaggagguucu

SEQ ID NO: 464393 - RNA, 19 nt, Artificial Sequence
  Description of Artificial Sequence: Synthetic oligonucleotide
  Sense strand starting at position 1830 of SEQ ID NO: 317098
cugaauuagguagaugcua

SEQ ID NO: 464394 - RNA, 19 nt, Artificial Sequence
  Description of Artificial Sequence: Synthetic oligonucleotide
  Antisense Strand to SEQ ID NO: 464393
uagcaucuaccuaauucag

SEQ ID NO: 464395 - RNA, 19 nt, Artificial Sequence
  Description of Artificial Sequence: Synthetic oligonucleotide
  Sense strand starting at position 1990 of SEQ ID NO: 317098
cuuugagaaucucuguaaa

SEQ ID NO: 464396 - RNA, 19 nt, Artificial Sequence
  Description of Artificial Sequence: Synthetic oligonucleotide
  Antisense Strand to SEQ ID NO: 464395
uuuacagagauucucaaag

SEQ ID NO: 464397 - RNA, 19 nt, Artificial Sequence
  Description of Artificial Sequence: Synthetic oligonucleotide
  Sense strand starting at position 2134 of SEQ ID NO: 317098
uguauagacuauguauaac

SEQ ID NO: 464398 - RNA, 19 nt, Artificial Sequence
  Description of Artificial Sequence: Synthetic oligonucleotide
  Antisense Strand to SEQ ID NO: 464397
guuauacauagucuauaca

SEQ ID NO: 464399 - RNA, 19 nt, Artificial Sequence
  Description of Artificial Sequence: Synthetic oligonucleotide
  Sense strand starting at position 2241 of SEQ ID NO: 317098
acaguaaagucaguugaua

SEQ ID NO: 464400 - RNA, 19 nt, Artificial Sequence
  Description of Artificial Sequence: Synthetic oligonucleotide
  Antisense Strand to SEQ ID NO: 464399
uaucaacugacuuuacugu

SEQ ID NO: 464401 - RNA, 19 nt, Artificial Sequence
  Description of Artificial Sequence: Synthetic oligonucleotide
  Sense strand starting at position 2243 of SEQ ID NO: 317098
aguaaagucaguugauaga

SEQ ID NO: 464402 - RNA, 19 nt, Artificial Sequence
  Description of Artificial Sequence: Synthetic oligonucleotide
  Antisense Strand to SEQ ID NO: 464401
ucuaucaacugacuuuacu

SEQ ID NO: 464403 - RNA, 19 nt, Artificial Sequence
  Description of Artificial Sequence: Synthetic oligonucleotide
  Sense strand starting at position 2308 of SEQ ID NO: 317098
uccucuugucuuuagaaag

SEQ ID NO: 464404 - RNA, 19 nt, Artificial Sequence
  Description of Artificial Sequence: Synthetic oligonucleotide
  Antisense Strand to SEQ ID NO: 464403
cuuucuaaagacaagagga

SEQ ID NO: 464405 - RNA, 19 nt, Artificial Sequence
  Description of Artificial Sequence: Synthetic oligonucleotide
  Sense strand starting at position 2410 of SEQ ID NO: 317098
cagauugcacugugaggaa

SEQ ID NO: 464406 - RNA, 19 nt, Artificial Sequence
  Description of Artificial Sequence: Synthetic oligonucleotide
  Antisense Strand to SEQ ID NO: 464405
uuccucacagugcaaucug

SEQ ID NO: 464407 - RNA, 19 nt, Artificial Sequence
  Description of Artificial Sequence: Synthetic oligonucleotide
  Sense strand starting at position 2539 of SEQ ID NO: 317098
ugacauuaauggcuaacau

SEQ ID NO: 464408 - RNA, 19 nt, Artificial Sequence
  Description of Artificial Sequence: Synthetic oligonucleotide
  Antisense Strand to SEQ ID NO: 464407
auguuagccauuaauguca

SEQ ID NO: 464409 - RNA, 19 nt, Artificial Sequence
  Description of Artificial Sequence: Synthetic oligonucleotide
  Sense strand starting at position 2844 of SEQ ID NO: 317098
ccauguacaguugacuuaa

SEQ ID NO: 464410 - RNA, 19 nt, Artificial Sequence
  Description of Artificial Sequence: Synthetic oligonucleotide
  Antisense Strand to SEQ ID NO: 464409
uuaagucaacuguacaugg

SEQ ID NO: 464411 - RNA, 19 nt, Artificial Sequence
  Description of Artificial Sequence: Synthetic oligonucleotide
  Sense strand starting at position 2984 of SEQ ID NO: 317098
uuaaguagccauuagauug

SEQ ID NO: 464412 - RNA, 19 nt, Artificial Sequence
  Description of Artificial Sequence: Synthetic oligonucleotide
  Antisense Strand to SEQ ID NO: 464411
caaucuaauggcuacuuaa

SEQ ID NO: 464413 - RNA, 19 nt, Artificial Sequence
  Description of Artificial Sequence: Synthetic oligonucleotide
  Sense strand starting at position 3016 of SEQ ID NO: 317098
augucuuuggacuauugau

SEQ ID NO: 464414 - RNA, 19 nt, Artificial Sequence
  Description of Artificial Sequence: Synthetic oligonucleotide
  Antisense Strand to SEQ ID NO: 464413
aucaauaguccaaagacau

SEQ ID NO: 464415 - RNA, 19 nt, Artificial Sequence
  Description of Artificial Sequence: Synthetic oligonucleotide
  Sense strand starting at position 3022 of SEQ ID NO: 317098
uuggacuauugaucuuauu

SEQ ID NO: 464416 - RNA, 19 nt, Artificial Sequence
  Description of Artificial Sequence: Synthetic oligonucleotide
  Antisense Strand to SEQ ID NO: 464415
aauaagaucaauaguccaa

SEQ ID NO: 464417 - RNA, 19 nt, Artificial Sequence
  Description of Artificial Sequence: Synthetic oligonucleotide
  Sense strand starting at position 3228 of SEQ ID NO: 317098
augcaauuagaaggaucua

SEQ ID NO: 464418 - RNA, 19 nt, Artificial Sequence
  Description of Artificial Sequence: Synthetic oligonucleotide
  Antisense Strand to SEQ ID NO: 464417
uagauccuucuaauugcau

SEQ ID NO: 464419 - RNA, 19 nt, Artificial Sequence
  Description of Artificial Sequence: Synthetic oligonucleotide
  Sense strand starting at position 3289 of SEQ ID NO: 317098
ggacaacguaaguaacuua

SEQ ID NO: 464420 - RNA, 19 nt, Artificial Sequence
  Description of Artificial Sequence: Synthetic oligonucleotide
  Antisense Strand to SEQ ID NO: 464419
uaaguuacuuacguugucc

SEQ ID NO: 464421 - RNA, 19 nt, Artificial Sequence
  Description of Artificial Sequence: Synthetic oligonucleotide
  Sense strand starting at position 3321 of SEQ ID NO: 317098
ugcucaucaguagaaauau

SEQ ID NO: 464422 - RNA, 19 nt, Artificial Sequence
  Description of Artificial Sequence: Synthetic oligonucleotide
  Antisense Strand to SEQ ID NO: 464421
auauuucuacugaugagca

SEQ ID NO: 464423 - RNA, 19 nt, Artificial Sequence
  Description of Artificial Sequence: Synthetic oligonucleotide
  Sense strand starting at position 3395 of SEQ ID NO: 317098
uguuaagugaagggauaga

SEQ ID NO: 464424 - RNA, 19 nt, Artificial Sequence
  Description of Artificial Sequence: Synthetic oligonucleotide
  Antisense Strand to SEQ ID NO: 464423
ucuaucccuucacuuaaca

SEQ ID NO: 464425 - RNA, 19 nt, Artificial Sequence
  Description of Artificial Sequence: Synthetic oligonucleotide
  Sense strand starting at position 3570 of SEQ ID NO: 317098
uugcucaguagagaagauu

SEQ ID NO: 464426 - RNA, 19 nt, Artificial Sequence
  Description of Artificial Sequence: Synthetic oligonucleotide
  Antisense Strand to SEQ ID NO: 464425
aaucuucucuacugagcaa

SEQ ID NO: 464427 - RNA, 19 nt, Artificial Sequence
  Description of Artificial Sequence: Synthetic oligonucleotide
  Sense strand starting at position 3634 of SEQ ID NO: 317098
cguaaacaacuaugauaua

SEQ ID NO: 464428 - RNA, 19 nt, Artificial Sequence
  Description of Artificial Sequence: Synthetic oligonucleotide
  Antisense Strand to SEQ ID NO: 464427
uauaucauaguuguuuacg

SEQ ID NO: 464429 - RNA, 19 nt, Artificial Sequence
  Description of Artificial Sequence: Synthetic oligonucleotide
  Sense strand starting at position 3881 of SEQ ID NO: 317098
uguguuugugguagaaagc

SEQ ID NO: 464430 - RNA, 19 nt, Artificial Sequence
  Description of Artificial Sequence: Synthetic oligonucleotide
  Antisense Strand to SEQ ID NO: 464429
gcuuucuaccacaaacaca

SEQ ID NO: 464431 - RNA, 19 nt, Artificial Sequence
  Description of Artificial Sequence: Synthetic oligonucleotide
  Sense strand starting at position 3888 of SEQ ID NO: 317098
gugguagaaagcuacuauc

SEQ ID NO: 464432 - RNA, 19 nt, Artificial Sequence
  Description of Artificial Sequence: Synthetic oligonucleotide
  Antisense Strand to SEQ ID NO: 464431
gauaguagcuuucuaccac

SEQ ID NO: 464433 - RNA, 19 nt, Artificial Sequence
  Description of Artificial Sequence: Synthetic oligonucleotide
  Sense strand starting at position 3939 of SEQ ID NO: 317098
auaaauaccucaguuugga

SEQ ID NO: 464434 - RNA, 19 nt, Artificial Sequence
  Description of Artificial Sequence: Synthetic oligonucleotide
  Antisense Strand to SEQ ID NO: 464433
uccaaacugagguauuuau

SEQ ID NO: 464435 - RNA, 19 nt, Artificial Sequence
  Description of Artificial Sequence: Synthetic oligonucleotide
  Sense strand starting at position 79 of SEQ ID NO: 317099
uuauucuacucagauggua

SEQ ID NO: 464436 - RNA, 19 nt, Artificial Sequence
  Description of Artificial Sequence: Synthetic oligonucleotide
  Antisense Strand to SEQ ID NO: 464435
uaccaucugaguagaauaa

SEQ ID NO: 464437 - RNA, 19 nt, Artificial Sequence
  Description of Artificial Sequence: Synthetic oligonucleotide
  Sense strand starting at position 153 of SEQ ID NO: 317099
aagauagaauuugggaauu

SEQ ID NO: 464438 - RNA, 19 nt, Artificial Sequence
  Description of Artificial Sequence: Synthetic oligonucleotide
  Antisense Strand to SEQ ID NO: 464437
aauucccaaauucuaucuu

SEQ ID NO: 464439 - RNA, 19 nt, Artificial Sequence
  Description of Artificial Sequence: Synthetic oligonucleotide
  Sense strand starting at position 241 of SEQ ID NO: 317099
uccuuuagauuguucggua

SEQ ID NO: 464440 - RNA, 19 nt, Artificial Sequence
  Description of Artificial Sequence: Synthetic oligonucleotide
  Antisense Strand to SEQ ID NO: 464439
uaccgaacaaucuaaagga

SEQ ID NO: 464441 - RNA, 19 nt, Artificial Sequence
  Description of Artificial Sequence: Synthetic oligonucleotide
  Sense strand starting at position 242 of SEQ ID NO: 317099
ccuuuagauuguucgguaa

SEQ ID NO: 464442 - RNA, 19 nt, Artificial Sequence
  Description of Artificial Sequence: Synthetic oligonucleotide
  Antisense Strand to SEQ ID NO: 464441
uuaccgaacaaucuaaagg

SEQ ID NO: 464443 - RNA, 19 nt, Artificial Sequence
  Description of Artificial Sequence: Synthetic oligonucleotide
  Sense strand starting at position 246 of SEQ ID NO: 317099
uagauuguucgguaaugcu

SEQ ID NO: 464444 - RNA, 19 nt, Artificial Sequence
  Description of Artificial Sequence: Synthetic oligonucleotide
  Antisense Strand to SEQ ID NO: 464443
agcauuaccgaacaaucua

SEQ ID NO: 464445 - RNA, 19 nt, Artificial Sequence
  Description of Artificial Sequence: Synthetic oligonucleotide
  Sense strand starting at position 322 of SEQ ID NO: 317099
ggucaaggaucauauccua

SEQ ID NO: 464446 - RNA, 19 nt, Artificial Sequence
  Description of Artificial Sequence: Synthetic oligonucleotide
  Antisense Strand to SEQ ID NO: 464445
uaggauaugauccuugacc

SEQ ID NO: 464447 - RNA, 19 nt, Artificial Sequence
  Description of Artificial Sequence: Synthetic oligonucleotide
  Sense strand starting at position 376 of SEQ ID NO: 317099
uuugcaaucgcuuaucuac

SEQ ID NO: 464448 - RNA, 19 nt, Artificial Sequence
  Description of Artificial Sequence: Synthetic oligonucleotide
  Antisense Strand to SEQ ID NO: 464447
guagauaagcgauugcaaa

SEQ ID NO: 464449 - RNA, 19 nt, Artificial Sequence
  Description of Artificial Sequence: Synthetic oligonucleotide
  Sense strand starting at position 378 of SEQ ID NO: 317099
ugcaaucgcuuaucuacaa

SEQ ID NO: 464450 - RNA, 19 nt, Artificial Sequence
  Description of Artificial Sequence: Synthetic oligonucleotide
  Antisense Strand to SEQ ID NO: 464449
uuguagauaagcgauugca

SEQ ID NO: 464451 - RNA, 19 nt, Artificial Sequence
  Description of Artificial Sequence: Synthetic oligonucleotide
  Sense strand starting at position 379 of SEQ ID NO: 317099
gcaaucgcuuaucuacaaa

SEQ ID NO: 464452 - RNA, 19 nt, Artificial Sequence
  Description of Artificial Sequence: Synthetic oligonucleotide
  Antisense Strand to SEQ ID NO: 464451
uuuguagauaagcgauugc

SEQ ID NO: 464453 - RNA, 19 nt, Artificial Sequence
  Description of Artificial Sequence: Synthetic oligonucleotide
  Sense strand starting at position 392 of SEQ ID NO: 317099
uacaaauauugugacguaa

SEQ ID NO: 464454 - RNA, 19 nt, Artificial Sequence
  Description of Artificial Sequence: Synthetic oligonucleotide
  Antisense Strand to SEQ ID NO: 464453
uuacgucacaauauuugua

SEQ ID NO: 464455 - RNA, 19 nt, Artificial Sequence
  Description of Artificial Sequence: Synthetic oligonucleotide
  Sense strand starting at position 400 of SEQ ID NO: 317099
uugugacguaaagauugua

SEQ ID NO: 464456 - RNA, 19 nt, Artificial Sequence
  Description of Artificial Sequence: Synthetic oligonucleotide
  Antisense Strand to SEQ ID NO: 464455
uacaaucuuuacgucacaa

SEQ ID NO: 464457 - RNA, 19 nt, Artificial Sequence
  Description of Artificial Sequence: Synthetic oligonucleotide
  Sense strand starting at position 526 of SEQ ID NO: 317099
agaguuaaaucguacuaga

SEQ ID NO: 464458 - RNA, 19 nt, Artificial Sequence
  Description of Artificial Sequence: Synthetic oligonucleotide
  Antisense Strand to SEQ ID NO: 464457
ucuaguacgauuuaacucu

SEQ ID NO: 464459 - RNA, 19 nt, Artificial Sequence
  Description of Artificial Sequence: Synthetic oligonucleotide
  Sense strand starting at position 594 of SEQ ID NO: 317099
uuggauaaucugggucuca

SEQ ID NO: 464460 - RNA, 19 nt, Artificial Sequence
  Description of Artificial Sequence: Synthetic oligonucleotide
  Antisense Strand to SEQ ID NO: 464459
ugagacccagauuauccaa

SEQ ID NO: 464461 - RNA, 19 nt, Artificial Sequence
  Description of Artificial Sequence: Synthetic oligonucleotide
  Sense strand starting at position 599 of SEQ ID NO: 317099
uaaucugggucucagaaga

SEQ ID NO: 464462 - RNA, 19 nt, Artificial Sequence
  Description of Artificial Sequence: Synthetic oligonucleotide
  Antisense Strand to SEQ ID NO: 464461
ucuucugagacccagauua

SEQ ID NO: 464463 - RNA, 19 nt, Artificial Sequence
  Description of Artificial Sequence: Synthetic oligonucleotide
  Sense strand starting at position 610 of SEQ ID NO: 317099
ucagaagaagcuugugaaa

SEQ ID NO: 464464 - RNA, 19 nt, Artificial Sequence
  Description of Artificial Sequence: Synthetic oligonucleotide
  Antisense Strand to SEQ ID NO: 464463
uuucacaagcuucuucuga

SEQ ID NO: 464465 - RNA, 19 nt, Artificial Sequence
  Description of Artificial Sequence: Synthetic oligonucleotide
  Sense strand starting at position 613 of SEQ ID NO: 317099
gaagaagcuugugaaacuu

SEQ ID NO: 464466 - RNA, 19 nt, Artificial Sequence
  Description of Artificial Sequence: Synthetic oligonucleotide
  Antisense Strand to SEQ ID NO: 464465
aaguuucacaagcuucuuc

SEQ ID NO: 464467 - RNA, 19 nt, Artificial Sequence
  Description of Artificial Sequence: Synthetic oligonucleotide
  Sense strand starting at position 621 of SEQ ID NO: 317099
uugugaaacuuacaaagaa

SEQ ID NO: 464468 - RNA, 19 nt, Artificial Sequence
  Description of Artificial Sequence: Synthetic oligonucleotide
  Antisense Strand to SEQ ID NO: 464467
uucuuuguaaguuucacaa

SEQ ID NO: 464469 - RNA, 19 nt, Artificial Sequence
  Description of Artificial Sequence: Synthetic oligonucleotide
  Sense strand starting at position 962 of SEQ ID NO: 317099
cuggguuugcucuacugca

SEQ ID NO: 464470 - RNA, 19 nt, Artificial Sequence
  Description of Artificial Sequence: Synthetic oligonucleotide
  Antisense Strand to SEQ ID NO: 464469
ugcaguagagcaaacccag

SEQ ID NO: 464471 - RNA, 19 nt, Artificial Sequence
  Description of Artificial Sequence: Synthetic oligonucleotide
  Sense strand starting at position 1063 of SEQ ID NO: 317099
gacucaucccguuagcuua

SEQ ID NO: 464472 - RNA, 19 nt, Artificial Sequence
  Description of Artificial Sequence: Synthetic oligonucleotide
  Antisense Strand to SEQ ID NO: 464471
uaagcuaacgggaugaguc

SEQ ID NO: 464473 - RNA, 19 nt, Artificial Sequence
  Description of Artificial Sequence: Synthetic oligonucleotide
  Sense strand starting at position 1154 of SEQ ID NO: 317099
cccaaaguugcuuaagugu

SEQ ID NO: 464474 - RNA, 19 nt, Artificial Sequence
  Description of Artificial Sequence: Synthetic oligonucleotide
  Antisense Strand to SEQ ID NO: 464473
acacuuaagcaacuuuggg

SEQ ID NO: 464475 - RNA, 19 nt, Artificial Sequence
  Description of Artificial Sequence: Synthetic oligonucleotide
  Sense strand starting at position 1157 of SEQ ID NO: 317099
aaaguugcuuaagugucaa

SEQ ID NO: 464476 - RNA, 19 nt, Artificial Sequence
  Description of Artificial Sequence: Synthetic oligonucleotide
  Antisense Strand to SEQ ID NO: 464475
uugacacuuaagcaacuuu

SEQ ID NO: 464477 - RNA, 19 nt, Artificial Sequence
  Description of Artificial Sequence: Synthetic oligonucleotide
  Sense strand starting at position 1169 of SEQ ID NO: 317099
gugucaaagcacgguagua

SEQ ID NO: 464478 - RNA, 19 nt, Artificial Sequence
  Description of Artificial Sequence: Synthetic oligonucleotide
  Antisense Strand to SEQ ID NO: 464477
uacuaccgugcuuugacac

SEQ ID NO: 464479 - RNA, 19 nt, Artificial Sequence
  Description of Artificial Sequence: Synthetic oligonucleotide
  Sense strand starting at position 1171 of SEQ ID NO: 317099
gucaaagcacgguaguaaa

SEQ ID NO: 464480 - RNA, 19 nt, Artificial Sequence
  Description of Artificial Sequence: Synthetic oligonucleotide
  Antisense Strand to SEQ ID NO: 464479
uuuacuaccgugcuuugac

SEQ ID NO: 464481 - RNA, 19 nt, Artificial Sequence
  Description of Artificial Sequence: Synthetic oligonucleotide
  Sense strand starting at position 2293 of SEQ ID NO: 317099
ugccuacagucagauaaga

SEQ ID NO: 464482 - RNA, 19 nt, Artificial Sequence
  Description of Artificial Sequence: Synthetic oligonucleotide
  Antisense Strand to SEQ ID NO: 464481
ucuuaucugacuguaggca

SEQ ID NO: 464483 - RNA, 19 nt, Artificial Sequence
  Description of Artificial Sequence: Synthetic oligonucleotide
  Sense strand starting at position 2313 of SEQ ID NO: 317099
agucgucuucacugacgaa

SEQ ID NO: 464484 - RNA, 19 nt, Artificial Sequence
  Description of Artificial Sequence: Synthetic oligonucleotide
  Antisense Strand to SEQ ID NO: 464483
uucgucagugaagacgacu

SEQ ID NO: 464485 - RNA, 19 nt, Artificial Sequence
  Description of Artificial Sequence: Synthetic oligonucleotide
  Sense strand starting at position 2422 of SEQ ID NO: 317099
agaacagucccuuggguua

SEQ ID NO: 464486 - RNA, 19 nt, Artificial Sequence
  Description of Artificial Sequence: Synthetic oligonucleotide
  Antisense Strand to SEQ ID NO: 464485
uaacccaagggacuguucu

SEQ ID NO: 464487 - RNA, 19 nt, Artificial Sequence
  Description of Artificial Sequence: Synthetic oligonucleotide
  Sense strand starting at position 2435 of SEQ ID NO: 317099
ggguuaaguucuguuucuc

SEQ ID NO: 464488 - RNA, 19 nt, Artificial Sequence
  Description of Artificial Sequence: Synthetic oligonucleotide
  Antisense Strand to SEQ ID NO: 464487
gagaaacagaacuuaaccc

SEQ ID NO: 464489 - RNA, 19 nt, Artificial Sequence
  Description of Artificial Sequence: Synthetic oligonucleotide
  Sense strand starting at position 2443 of SEQ ID NO: 317099
uucuguuucucacugacau

SEQ ID NO: 464490 - RNA, 19 nt, Artificial Sequence
  Description of Artificial Sequence: Synthetic oligonucleotide
  Antisense Strand to SEQ ID NO: 464489
augucagugagaaacagaa

SEQ ID NO: 464491 - RNA, 19 nt, Artificial Sequence
  Description of Artificial Sequence: Synthetic oligonucleotide
  Sense strand starting at position 2444 of SEQ ID NO: 317099
ucuguuucucacugacauu

SEQ ID NO: 464492 - RNA, 19 nt, Artificial Sequence
  Description of Artificial Sequence: Synthetic oligonucleotide
  Antisense Strand to SEQ ID NO: 464491
aaugucagugagaaacaga

SEQ ID NO: 464493 - RNA, 19 nt, Artificial Sequence
  Description of Artificial Sequence: Synthetic oligonucleotide
  Sense strand starting at position 2702 of SEQ ID NO: 317099
gagaauugugcugauccug

SEQ ID NO: 464494 - RNA, 19 nt, Artificial Sequence
  Description of Artificial Sequence: Synthetic oligonucleotide
  Antisense Strand to SEQ ID NO: 464493
caggaucagcacaauucuc

SEQ ID NO: 464495 - RNA, 19 nt, Artificial Sequence
  Description of Artificial Sequence: Synthetic oligonucleotide
  Sense strand starting at position 2708 of SEQ ID NO: 317099
ugugcugauccugaaaugu

SEQ ID NO: 464496 - RNA, 19 nt, Artificial Sequence
  Description of Artificial Sequence: Synthetic oligonucleotide
  Antisense Strand to SEQ ID NO: 464495
acauuucaggaucagcaca

SEQ ID NO: 464497 - RNA, 19 nt, Artificial Sequence
  Description of Artificial Sequence: Synthetic oligonucleotide
  Sense strand starting at position 2731 of SEQ ID NO: 317099
gucgaaagaagcuguaaag

SEQ ID NO: 464498 - RNA, 19 nt, Artificial Sequence
  Description of Artificial Sequence: Synthetic oligonucleotide
  Antisense Strand to SEQ ID NO: 464497
cuuuacagcuucuuucgac

SEQ ID NO: 464499 - RNA, 19 nt, Artificial Sequence
  Description of Artificial Sequence: Synthetic oligonucleotide
  Sense strand starting at position 2786 of SEQ ID NO: 317099
gcuguauuccaggucgguu

SEQ ID NO: 464500 - RNA, 19 nt, Artificial Sequence
  Description of Artificial Sequence: Synthetic oligonucleotide
  Antisense Strand to SEQ ID NO: 464499
aaccgaccuggaauacagc

SEQ ID NO: 464501 - RNA, 19 nt, Artificial Sequence
  Description of Artificial Sequence: Synthetic oligonucleotide
  Sense strand starting at position 2804 of SEQ ID NO: 317099
uguguuguaacucaugcuu

SEQ ID NO: 464502 - RNA, 19 nt, Artificial Sequence
  Description of Artificial Sequence: Synthetic oligonucleotide
  Antisense Strand to SEQ ID NO: 464501
aagcaugaguuacaacaca

SEQ ID NO: 464503 - RNA, 19 nt, Artificial Sequence
  Description of Artificial Sequence: Synthetic oligonucleotide
  Sense strand starting at position 2828 of SEQ ID NO: 317099
ccuccuugucacuagggaa

SEQ ID NO: 464504 - RNA, 19 nt, Artificial Sequence
  Description of Artificial Sequence: Synthetic oligonucleotide
  Antisense Strand to SEQ ID NO: 464503
uucccuagugacaaggagg

SEQ ID NO: 464505 - RNA, 19 nt, Artificial Sequence
  Description of Artificial Sequence: Synthetic oligonucleotide
  Sense strand starting at position 2879 of SEQ ID NO: 317099
ggcugugaacuuuguuauu

SEQ ID NO: 464506 - RNA, 19 nt, Artificial Sequence
  Description of Artificial Sequence: Synthetic oligonucleotide
  Antisense Strand to SEQ ID NO: 464505
aauaacaaaguucacagcc

SEQ ID NO: 464507 - RNA, 19 nt, Artificial Sequence
  Description of Artificial Sequence: Synthetic oligonucleotide
  Sense strand starting at position 2881 of SEQ ID NO: 317099
cugugaacuuuguuauugu

SEQ ID NO: 464508 - RNA, 19 nt, Artificial Sequence
  Description of Artificial Sequence: Synthetic oligonucleotide
  Antisense Strand to SEQ ID NO: 464507
acaauaacaaaguucacag

SEQ ID NO: 464509 - RNA, 19 nt, Artificial Sequence
  Description of Artificial Sequence: Synthetic oligonucleotide
  Sense strand starting at position 3198 of SEQ ID NO: 317099
aucuguugaaccugagaag

SEQ ID NO: 464510 - RNA, 19 nt, Artificial Sequence
  Description of Artificial Sequence: Synthetic oligonucleotide
  Antisense Strand to SEQ ID NO: 464509
cuucucagguucaacagau

SEQ ID NO: 464511 - RNA, 19 nt, Artificial Sequence
  Description of Artificial Sequence: Synthetic oligonucleotide
  Sense strand starting at position 3199 of SEQ ID NO: 317099
ucuguugaaccugagaagu

SEQ ID NO: 464512 - RNA, 19 nt, Artificial Sequence
  Description of Artificial Sequence: Synthetic oligonucleotide
  Antisense Strand to SEQ ID NO: 464511
acuucucagguucaacaga

SEQ ID NO: 464513 - RNA, 19 nt, Artificial Sequence
  Description of Artificial Sequence: Synthetic oligonucleotide
  Sense strand starting at position 3220 of SEQ ID NO: 317099
aggauaugguaagcuauga

SEQ ID NO: 464514 - RNA, 19 nt, Artificial Sequence
  Description of Artificial Sequence: Synthetic oligonucleotide
  Antisense Strand to SEQ ID NO: 464513
ucauagcuuaccauauccu

SEQ ID NO: 464515 - RNA, 19 nt, Artificial Sequence
  Description of Artificial Sequence: Synthetic oligonucleotide
  Sense strand starting at position 2 of SEQ ID NO: 317100
gccaauuuccugugaagca

SEQ ID NO: 464516 - RNA, 19 nt, Artificial Sequence
  Description of Artificial Sequence: Synthetic oligonucleotide
  Antisense Strand to SEQ ID NO: 464515
ugcuucacaggaaauuggc

SEQ ID NO: 464517 - RNA, 19 nt, Artificial Sequence
  Description of Artificial Sequence: Synthetic oligonucleotide
  Sense strand starting at position 158 of SEQ ID NO: 317100
ugguauuuggcaugcucaa

SEQ ID NO: 464518 - RNA, 19 nt, Artificial Sequence
  Description of Artificial Sequence: Synthetic oligonucleotide
  Antisense Strand to SEQ ID NO: 464517
uugagcaugccaaauacca

SEQ ID NO: 464519 - RNA, 19 nt, Artificial Sequence
  Description of Artificial Sequence: Synthetic oligonucleotide
  Sense strand starting at position 169 of SEQ ID NO: 317100
augcucaaccaguaaguaa

SEQ ID NO: 464520 - RNA, 19 nt, Artificial Sequence
  Description of Artificial Sequence: Synthetic oligonucleotide
  Antisense Strand to SEQ ID NO: 464519
uuacuuacugguugagcau

SEQ ID NO: 464521 - RNA, 19 nt, Artificial Sequence
  Description of Artificial Sequence: Synthetic oligonucleotide
  Sense strand starting at position 945 of SEQ ID NO: 317100
acugcaagaugacuaauua

SEQ ID NO: 464522 - RNA, 19 nt, Artificial Sequence
  Description of Artificial Sequence: Synthetic oligonucleotide
  Antisense Strand to SEQ ID NO: 464521
uaauuagucaucuugcagu

SEQ ID NO: 464523 - RNA, 19 nt, Artificial Sequence
  Description of Artificial Sequence: Synthetic oligonucleotide
  Sense strand starting at position 1118 of SEQ ID NO: 317100
agugaaggacaaugguuua

SEQ ID NO: 464524 - RNA, 19 nt, Artificial Sequence
  Description of Artificial Sequence: Synthetic oligonucleotide
  Antisense Strand to SEQ ID NO: 464523
uaaaccauuguccuucacu

SEQ ID NO: 464525 - RNA, 19 nt, Artificial Sequence
  Description of Artificial Sequence: Synthetic oligonucleotide
  Sense strand starting at position 1153 of SEQ ID NO: 317100
gagacaaaccuagguucua

SEQ ID NO: 464526 - RNA, 19 nt, Artificial Sequence
  Description of Artificial Sequence: Synthetic oligonucleotide
  Antisense Strand to SEQ ID NO: 464525
uagaaccuagguuugucuc

SEQ ID NO: 464527 - RNA, 19 nt, Artificial Sequence
  Description of Artificial Sequence: Synthetic oligonucleotide
  Sense strand starting at position 1154 of SEQ ID NO: 317100
agacaaaccuagguucuau

SEQ ID NO: 464528 - RNA, 19 nt, Artificial Sequence
  Description of Artificial Sequence: Synthetic oligonucleotide
  Antisense Strand to SEQ ID NO: 464527
auagaaccuagguuugucu

SEQ ID NO: 464529 - RNA, 19 nt, Artificial Sequence
  Description of Artificial Sequence: Synthetic oligonucleotide
  Sense strand starting at position 1233 of SEQ ID NO: 317100
uuacuugauaagugaaggu

SEQ ID NO: 464530 - RNA, 19 nt, Artificial Sequence
  Description of Artificial Sequence: Synthetic oligonucleotide
  Antisense Strand to SEQ ID NO: 464529
accuucacuuaucaaguaa

SEQ ID NO: 464531 - RNA, 19 nt, Artificial Sequence
  Description of Artificial Sequence: Synthetic oligonucleotide
  Sense strand starting at position 1237 of SEQ ID NO: 317100
uugauaagugaagguaaua

SEQ ID NO: 464532 - RNA, 19 nt, Artificial Sequence
  Description of Artificial Sequence: Synthetic oligonucleotide
  Antisense Strand to SEQ ID NO: 464531
uauuaccuucacuuaucaa

SEQ ID NO: 464533 - RNA, 19 nt, Artificial Sequence
  Description of Artificial Sequence: Synthetic oligonucleotide
  Sense strand starting at position 1270 of SEQ ID NO: 317100
agauuauugugacuaacac

SEQ ID NO: 464534 - RNA, 19 nt, Artificial Sequence
  Description of Artificial Sequence: Synthetic oligonucleotide
  Antisense Strand to SEQ ID NO: 464533
guguuagucacaauaaucu

SEQ ID NO: 464535 - RNA, 19 nt, Artificial Sequence
  Description of Artificial Sequence: Synthetic oligonucleotide
  Sense strand starting at position 1302 of SEQ ID NO: 317100
aaauauuaacuguggaugu

SEQ ID NO: 464536 - RNA, 19 nt, Artificial Sequence
  Description of Artificial Sequence: Synthetic oligonucleotide
  Antisense Strand to SEQ ID NO: 464535
acauccacaguuaauauuu

SEQ ID NO: 464537 - RNA, 19 nt, Artificial Sequence
  Description of Artificial Sequence: Synthetic oligonucleotide
  Sense strand starting at position 1483 of SEQ ID NO: 317100
augaccauuuaauagugaa

SEQ ID NO: 464538 - RNA, 19 nt, Artificial Sequence
  Description of Artificial Sequence: Synthetic oligonucleotide
  Antisense Strand to SEQ ID NO: 464537
uucacuauuaaauggucau

SEQ ID NO: 464539 - RNA, 19 nt, Artificial Sequence
  Description of Artificial Sequence: Synthetic oligonucleotide
  Sense strand starting at position 1558 of SEQ ID NO: 317100
gugggaguuccacaaagcu

SEQ ID NO: 464540 - RNA, 19 nt, Artificial Sequence
  Description of Artificial Sequence: Synthetic oligonucleotide
  Antisense Strand to SEQ ID NO: 464539
agcuuuguggaacucccac

SEQ ID NO: 464541 - RNA, 19 nt, Artificial Sequence
  Description of Artificial Sequence: Synthetic oligonucleotide
  Sense strand starting at position 1990 of SEQ ID NO: 317100
cgaacagaguauccucaua

SEQ ID NO: 464542 - RNA, 19 nt, Artificial Sequence
  Description of Artificial Sequence: Synthetic oligonucleotide
  Antisense Strand to SEQ ID NO: 464541
uaugaggauacucuguucg

SEQ ID NO: 464543 - RNA, 19 nt, Artificial Sequence
  Description of Artificial Sequence: Synthetic oligonucleotide
  Sense strand starting at position 2008 of SEQ ID NO: 317100
agcuuuccucaguagagac

SEQ ID NO: 464544 - RNA, 19 nt, Artificial Sequence
  Description of Artificial Sequence: Synthetic oligonucleotide
  Antisense Strand to SEQ ID NO: 464543
gucucuacugaggaaagcu

SEQ ID NO: 464545 - RNA, 19 nt, Artificial Sequence
  Description of Artificial Sequence: Synthetic oligonucleotide
  Sense strand starting at position 2216 of SEQ ID NO: 317100
ucucuuucccaggauagca

SEQ ID NO: 464546 - RNA, 19 nt, Artificial Sequence
  Description of Artificial Sequence: Synthetic oligonucleotide
  Antisense Strand to SEQ ID NO: 464545
ugcuauccugggaaagaga

SEQ ID NO: 464547 - RNA, 19 nt, Artificial Sequence
  Description of Artificial Sequence: Synthetic oligonucleotide
  Sense strand starting at position 2294 of SEQ ID NO: 317100
gaugacaguccugacguuu

SEQ ID NO: 464548 - RNA, 19 nt, Artificial Sequence
  Description of Artificial Sequence: Synthetic oligonucleotide
  Antisense Strand to SEQ ID NO: 464547
aaacgucaggacugucauc

SEQ ID NO: 464549 - RNA, 19 nt, Artificial Sequence
  Description of Artificial Sequence: Synthetic oligonucleotide
  Sense strand starting at position 2369 of SEQ ID NO: 317100
ccagauugccuaggauuga

SEQ ID NO: 464550 - RNA, 19 nt, Artificial Sequence
  Description of Artificial Sequence: Synthetic oligonucleotide
  Antisense Strand to SEQ ID NO: 464549
ucaauccuaggcaaucugg

SEQ ID NO: 464551 - RNA, 19 nt, Artificial Sequence
  Description of Artificial Sequence: Synthetic oligonucleotide
  Sense strand starting at position 2668 of SEQ ID NO: 317100
gcuucuucccuuuagggaa

SEQ ID NO: 464552 - RNA, 19 nt, Artificial Sequence
  Description of Artificial Sequence: Synthetic oligonucleotide
  Antisense Strand to SEQ ID NO: 464551
uucccuaaagggaagaagc

SEQ ID NO: 464553 - RNA, 19 nt, Artificial Sequence
  Description of Artificial Sequence: Synthetic oligonucleotide
  Sense strand starting at position 2676 of SEQ ID NO: 317100
ccuuuagggaaaugaguau

SEQ ID NO: 464554 - RNA, 19 nt, Artificial Sequence
  Description of Artificial Sequence: Synthetic oligonucleotide
  Antisense Strand to SEQ ID NO: 464553
auacucauuucccuaaagg

SEQ ID NO: 464555 - RNA, 19 nt, Artificial Sequence
  Description of Artificial Sequence: Synthetic oligonucleotide
  Sense strand starting at position 2699 of SEQ ID NO: 317100
uaguaaagcgugucuuggu

SEQ ID NO: 464556 - RNA, 19 nt, Artificial Sequence
  Description of Artificial Sequence: Synthetic oligonucleotide
  Antisense Strand to SEQ ID NO: 464555
accaagacacgcuuuacua

SEQ ID NO: 464557 - RNA, 19 nt, Artificial Sequence
  Description of Artificial Sequence: Synthetic oligonucleotide
  Sense strand starting at position 2758 of SEQ ID NO: 317100
gcuuguacauuugucuuaa

SEQ ID NO: 464558 - RNA, 19 nt, Artificial Sequence
  Description of Artificial Sequence: Synthetic oligonucleotide
  Antisense Strand to SEQ ID NO: 464557
uuaagacaaauguacaagc

SEQ ID NO: 464559 - RNA, 19 nt, Artificial Sequence
  Description of Artificial Sequence: Synthetic oligonucleotide
  Sense strand starting at position 2812 of SEQ ID NO: 317100
uccugaaauuacucggauu

SEQ ID NO: 464560 - RNA, 19 nt, Artificial Sequence
  Description of Artificial Sequence: Synthetic oligonucleotide
  Antisense Strand to SEQ ID NO: 464559
aauccgaguaauuucagga

SEQ ID NO: 464561 - RNA, 19 nt, Artificial Sequence
  Description of Artificial Sequence: Synthetic oligonucleotide
  Sense strand starting at position 2813 of SEQ ID NO: 317100
ccugaaauuacucggauug

SEQ ID NO: 464562 - RNA, 19 nt, Artificial Sequence
  Description of Artificial Sequence: Synthetic oligonucleotide
  Antisense Strand to SEQ ID NO: 464561
caauccgaguaauuucagg

SEQ ID NO: 464563 - RNA, 19 nt, Artificial Sequence
  Description of Artificial Sequence: Synthetic oligonucleotide
  Sense strand starting at position 2892 of SEQ ID NO: 317100
gccaaagucuuauuugagu

SEQ ID NO: 464564 - RNA, 19 nt, Artificial Sequence
  Description of Artificial Sequence: Synthetic oligonucleotide
  Antisense Strand to SEQ ID NO: 464563
acucaaauaagacuuuggc

SEQ ID NO: 464565 - RNA, 19 nt, Artificial Sequence
  Description of Artificial Sequence: Synthetic oligonucleotide
  Sense strand starting at position 2989 of SEQ ID NO: 317100
ccucaaguuuaauuggaaa

SEQ ID NO: 464566 - RNA, 19 nt, Artificial Sequence
  Description of Artificial Sequence: Synthetic oligonucleotide
  Antisense Strand to SEQ ID NO: 464565
uuuccaauuaaacuugagg

SEQ ID NO: 464567 - RNA, 19 nt, Artificial Sequence
  Description of Artificial Sequence: Synthetic oligonucleotide
  Sense strand starting at position 3010 of SEQ ID NO: 317100
gcgguaaguacuuaacaaa

SEQ ID NO: 464568 - RNA, 19 nt, Artificial Sequence
  Description of Artificial Sequence: Synthetic oligonucleotide
  Antisense Strand to SEQ ID NO: 464567
uuuguuaaguacuuaccgc

SEQ ID NO: 464569 - RNA, 19 nt, Artificial Sequence
  Description of Artificial Sequence: Synthetic oligonucleotide
  Sense strand starting at position 3134 of SEQ ID NO: 317100
acuagauucuacuuaguca

SEQ ID NO: 464570 - RNA, 19 nt, Artificial Sequence
  Description of Artificial Sequence: Synthetic oligonucleotide
  Antisense Strand to SEQ ID NO: 464569
ugacuaaguagaaucuagu

SEQ ID NO: 464571 - RNA, 19 nt, Artificial Sequence
  Description of Artificial Sequence: Synthetic oligonucleotide
  Sense strand starting at position 3214 of SEQ ID NO: 317100
uugaacaaguaguccuaaa

SEQ ID NO: 464572 - RNA, 19 nt, Artificial Sequence
  Description of Artificial Sequence: Synthetic oligonucleotide
  Antisense Strand to SEQ ID NO: 464571
uuuaggacuacuuguucaa

SEQ ID NO: 464573 - RNA, 19 nt, Artificial Sequence
  Description of Artificial Sequence: Synthetic oligonucleotide
  Sense strand starting at position 3242 of SEQ ID NO: 317100
gaguaaugucagcacuacu

SEQ ID NO: 464574 - RNA, 19 nt, Artificial Sequence
  Description of Artificial Sequence: Synthetic oligonucleotide
  Antisense Strand to SEQ ID NO: 464573
aguagugcugacauuacuc

SEQ ID NO: 464575 - RNA, 19 nt, Artificial Sequence
  Description of Artificial Sequence: Synthetic oligonucleotide
  Sense strand starting at position 3253 of SEQ ID NO: 317100
gcacuacuuggauacugua

SEQ ID NO: 464576 - RNA, 19 nt, Artificial Sequence
  Description of Artificial Sequence: Synthetic oligonucleotide
  Antisense Strand to SEQ ID NO: 464575
uacaguauccaaguagugc

SEQ ID NO: 464577 - RNA, 19 nt, Artificial Sequence
  Description of Artificial Sequence: Synthetic oligonucleotide
  Sense strand starting at position 3282 of SEQ ID NO: 317100
guccauaugaguuaaagug

SEQ ID NO: 464578 - RNA, 19 nt, Artificial Sequence
  Description of Artificial Sequence: Synthetic oligonucleotide
  Antisense Strand to SEQ ID NO: 464577
cacuuuaacucauauggac

SEQ ID NO: 464579 - RNA, 19 nt, Artificial Sequence
  Description of Artificial Sequence: Synthetic oligonucleotide
  Sense strand starting at position 3370 of SEQ ID NO: 317100
uggugagaauaggcaauua

SEQ ID NO: 464580 - RNA, 19 nt, Artificial Sequence
  Description of Artificial Sequence: Synthetic oligonucleotide
  Antisense Strand to SEQ ID NO: 464579
uaauugccuauucucacca

SEQ ID NO: 464581 - RNA, 19 nt, Artificial Sequence
  Description of Artificial Sequence: Synthetic oligonucleotide
  Sense strand starting at position 3446 of SEQ ID NO: 317100
ggcccuagagucuauaaag

SEQ ID NO: 464582 - RNA, 19 nt, Artificial Sequence
  Description of Artificial Sequence: Synthetic oligonucleotide
  Antisense Strand to SEQ ID NO: 464581
cuuuauagacucuagggcc

SEQ ID NO: 464583 - RNA, 19 nt, Artificial Sequence
  Description of Artificial Sequence: Synthetic oligonucleotide
  Sense strand starting at position 3456 of SEQ ID NO: 317100
ucuauaaagucugucaaag

SEQ ID NO: 464584 - RNA, 19 nt, Artificial Sequence
  Description of Artificial Sequence: Synthetic oligonucleotide
  Antisense Strand to SEQ ID NO: 464583
cuuugacagacuuuauaga

SEQ ID NO: 464585 - RNA, 19 nt, Artificial Sequence
  Description of Artificial Sequence: Synthetic oligonucleotide
  Sense strand starting at position 3504 of SEQ ID NO: 317100
gaguuuacugucuaaugga

SEQ ID NO: 464586 - RNA, 19 nt, Artificial Sequence
  Description of Artificial Sequence: Synthetic oligonucleotide
  Antisense Strand to SEQ ID NO: 464585
uccauuagacaguaaacuc

SEQ ID NO: 464587 - RNA, 19 nt, Artificial Sequence
  Description of Artificial Sequence: Synthetic oligonucleotide
  Sense strand starting at position 3661 of SEQ ID NO: 317100
gauggcuuccuguaagacu

SEQ ID NO: 464588 - RNA, 19 nt, Artificial Sequence
  Description of Artificial Sequence: Synthetic oligonucleotide
  Antisense Strand to SEQ ID NO: 464587
agucuuacaggaagccauc

SEQ ID NO: 464589 - RNA, 19 nt, Artificial Sequence
  Description of Artificial Sequence: Synthetic oligonucleotide
  Sense strand starting at position 3844 of SEQ ID NO: 317100
cacccuuaacagugaguga

SEQ ID NO: 464590 - RNA, 19 nt, Artificial Sequence
  Description of Artificial Sequence: Synthetic oligonucleotide
  Antisense Strand to SEQ ID NO: 464589
ucacucacuguuaagggug

SEQ ID NO: 464591 - RNA, 19 nt, Artificial Sequence
  Description of Artificial Sequence: Synthetic oligonucleotide
  Sense strand starting at position 3859 of SEQ ID NO: 317100
gugaguuugcucuugugcu

SEQ ID NO: 464592 - RNA, 19 nt, Artificial Sequence
  Description of Artificial Sequence: Synthetic oligonucleotide
  Antisense Strand to SEQ ID NO: 464591
agcacaagagcaaacucac

SEQ ID NO: 464593 - RNA, 19 nt, Artificial Sequence
  Description of Artificial Sequence: Synthetic oligonucleotide
  Sense strand starting at position 3861 of SEQ ID NO: 317100
gaguuugcucuugugcuau

SEQ ID NO: 464594 - RNA, 19 nt, Artificial Sequence
  Description of Artificial Sequence: Synthetic oligonucleotide
  Antisense Strand to SEQ ID NO: 464593
auagcacaagagcaaacuc

SEQ ID NO: 464595 - RNA, 19 nt, Artificial Sequence
  Description of Artificial Sequence: Synthetic oligonucleotide
  Sense strand starting at position 194 of SEQ ID NO: 317101
ugaaauugcuccuuuccag

SEQ ID NO: 464596 - RNA, 19 nt, Artificial Sequence
  Description of Artificial Sequence: Synthetic oligonucleotide
  Antisense Strand to SEQ ID NO: 464595
cuggaaaggagcaauuuca

SEQ ID NO: 464597 - RNA, 19 nt, Artificial Sequence
  Description of Artificial Sequence: Synthetic oligonucleotide
  Sense strand starting at position 231 of SEQ ID NO: 317101
ggcagugugcuccuugagu

SEQ ID NO: 464598 - RNA, 19 nt, Artificial Sequence
  Description of Artificial Sequence: Synthetic oligonucleotide
  Antisense Strand to SEQ ID NO: 464597
acucaaggagcacacugcc

SEQ ID NO: 464599 - RNA, 19 nt, Artificial Sequence
  Description of Artificial Sequence: Synthetic oligonucleotide
  Sense strand starting at position 242 of SEQ ID NO: 317101
ccuugagugacucaccgau

SEQ ID NO: 464600 - RNA, 19 nt, Artificial Sequence
  Description of Artificial Sequence: Synthetic oligonucleotide
  Antisense Strand to SEQ ID NO: 464599
aucggugagucacucaagg

SEQ ID NO: 464601 - RNA, 19 nt, Artificial Sequence
  Description of Artificial Sequence: Synthetic oligonucleotide
  Sense strand starting at position 244 of SEQ ID NO: 317101
uugagugacucaccgauga

SEQ ID NO: 464602 - RNA, 19 nt, Artificial Sequence
  Description of Artificial Sequence: Synthetic oligonucleotide
  Antisense Strand to SEQ ID NO: 464601
ucaucggugagucacucaa

SEQ ID NO: 464603 - RNA, 19 nt, Artificial Sequence
  Description of Artificial Sequence: Synthetic oligonucleotide
  Sense strand starting at position 521 of SEQ ID NO: 317101
guuucucaucuguauacau

SEQ ID NO: 464604 - RNA, 19 nt, Artificial Sequence
  Description of Artificial Sequence: Synthetic oligonucleotide
  Antisense Strand to SEQ ID NO: 464603
auguauacagaugagaaac

SEQ ID NO: 464605 - RNA, 19 nt, Artificial Sequence
  Description of Artificial Sequence: Synthetic oligonucleotide
  Sense strand starting at position 557 of SEQ ID NO: 317101
cacuguagggcuuauuaua

SEQ ID NO: 464606 - RNA, 19 nt, Artificial Sequence
  Description of Artificial Sequence: Synthetic oligonucleotide
  Antisense Strand to SEQ ID NO: 464605
uauaauaagcccuacagug

SEQ ID NO: 464607 - RNA, 19 nt, Artificial Sequence
  Description of Artificial Sequence: Synthetic oligonucleotide
  Sense strand starting at position 1123 of SEQ ID NO: 317101
auggaaaucuauguccaua

SEQ ID NO: 464608 - RNA, 19 nt, Artificial Sequence
  Description of Artificial Sequence: Synthetic oligonucleotide
  Antisense Strand to SEQ ID NO: 464607
uauggacauagauuuccau

SEQ ID NO: 464609 - RNA, 19 nt, Artificial Sequence
  Description of Artificial Sequence: Synthetic oligonucleotide
  Sense strand starting at position 1125 of SEQ ID NO: 317101
ggaaaucuauguccauauu

SEQ ID NO: 464610 - RNA, 19 nt, Artificial Sequence
  Description of Artificial Sequence: Synthetic oligonucleotide
  Antisense Strand to SEQ ID NO: 464609
aauauggacauagauuucc

SEQ ID NO: 464611 - RNA, 19 nt, Artificial Sequence
  Description of Artificial Sequence: Synthetic oligonucleotide
  Sense strand starting at position 1477 of SEQ ID NO: 317101
ugaauucugauggagcagu

SEQ ID NO: 464612 - RNA, 19 nt, Artificial Sequence
  Description of Artificial Sequence: Synthetic oligonucleotide
  Antisense Strand to SEQ ID NO: 464611
acugcuccaucagaauuca

SEQ ID NO: 464613 - RNA, 19 nt, Artificial Sequence
  Description of Artificial Sequence: Synthetic oligonucleotide
  Sense strand starting at position 1750 of SEQ ID NO: 317101
uugggauaauccucgaaau

SEQ ID NO: 464614 - RNA, 19 nt, Artificial Sequence
  Description of Artificial Sequence: Synthetic oligonucleotide
  Antisense Strand to SEQ ID NO: 464613
auuucgaggauuaucccaa

SEQ ID NO: 464615 - RNA, 19 nt, Artificial Sequence
  Description of Artificial Sequence: Synthetic oligonucleotide
  Sense strand starting at position 1751 of SEQ ID NO: 317101
ugggauaauccucgaaaug

SEQ ID NO: 464616 - RNA, 19 nt, Artificial Sequence
  Description of Artificial Sequence: Synthetic oligonucleotide
  Antisense Strand to SEQ ID NO: 464615
cauuucgaggauuauccca

SEQ ID NO: 464617 - RNA, 19 nt, Artificial Sequence
  Description of Artificial Sequence: Synthetic oligonucleotide
  Sense strand starting at position 1870 of SEQ ID NO: 317101
agggauaaccuuugcuuua

SEQ ID NO: 464618 - RNA, 19 nt, Artificial Sequence
  Description of Artificial Sequence: Synthetic oligonucleotide
  Antisense Strand to SEQ ID NO: 464617
uaaagcaaagguuaucccu

SEQ ID NO: 464619 - RNA, 19 nt, Artificial Sequence
  Description of Artificial Sequence: Synthetic oligonucleotide
  Sense strand starting at position 1871 of SEQ ID NO: 317101
gggauaaccuuugcuuuag

SEQ ID NO: 464620 - RNA, 19 nt, Artificial Sequence
  Description of Artificial Sequence: Synthetic oligonucleotide
  Antisense Strand to SEQ ID NO: 464619
cuaaagcaaagguuauccc

SEQ ID NO: 464621 - RNA, 19 nt, Artificial Sequence
  Description of Artificial Sequence: Synthetic oligonucleotide
  Sense strand starting at position 2001 of SEQ ID NO: 317101
gccugcagugucuuuguua

SEQ ID NO: 464622 - RNA, 19 nt, Artificial Sequence
  Description of Artificial Sequence: Synthetic oligonucleotide
  Antisense Strand to SEQ ID NO: 464621
uaacaaagacacugcaggc

SEQ ID NO: 464623 - RNA, 19 nt, Artificial Sequence
  Description of Artificial Sequence: Synthetic oligonucleotide
  Sense strand starting at position 2064 of SEQ ID NO: 317101
cugacuuguccuggaggaa

SEQ ID NO: 464624 - RNA, 19 nt, Artificial Sequence
  Description of Artificial Sequence: Synthetic oligonucleotide
  Antisense Strand to SEQ ID NO: 464623
uuccuccaggacaagucag

SEQ ID NO: 464625 - RNA, 19 nt, Artificial Sequence
  Description of Artificial Sequence: Synthetic oligonucleotide
  Sense strand starting at position 2135 of SEQ ID NO: 317101
uuccacugucaguagugaa

SEQ ID NO: 464626 - RNA, 19 nt, Artificial Sequence
  Description of Artificial Sequence: Synthetic oligonucleotide
  Antisense Strand to SEQ ID NO: 464625
uucacuacugacaguggaa

SEQ ID NO: 464627 - RNA, 19 nt, Artificial Sequence
  Description of Artificial Sequence: Synthetic oligonucleotide
  Sense strand starting at position 2434 of SEQ ID NO: 317101
ggauuacaggccuagucau

SEQ ID NO: 464628 - RNA, 19 nt, Artificial Sequence
  Description of Artificial Sequence: Synthetic oligonucleotide
  Antisense Strand to SEQ ID NO: 464627
augacuaggccuguaaucc

SEQ ID NO: 464629 - RNA, 19 nt, Artificial Sequence
  Description of Artificial Sequence: Synthetic oligonucleotide
  Sense strand starting at position 2459 of SEQ ID NO: 317101
uuaauaauagcaggacuuu

SEQ ID NO: 464630 - RNA, 19 nt, Artificial Sequence
  Description of Artificial Sequence: Synthetic oligonucleotide
  Antisense Strand to SEQ ID NO: 464629
aaaguccugcuauuauuaa

SEQ ID NO: 464631 - RNA, 19 nt, Artificial Sequence
  Description of Artificial Sequence: Synthetic oligonucleotide
  Sense strand starting at position 2468 of SEQ ID NO: 317101
gcaggacuuugggcaaauu

SEQ ID NO: 464632 - RNA, 19 nt, Artificial Sequence
  Description of Artificial Sequence: Synthetic oligonucleotide
  Antisense Strand to SEQ ID NO: 464631
aauuugcccaaaguccugc

SEQ ID NO: 464633 - RNA, 19 nt, Artificial Sequence
  Description of Artificial Sequence: Synthetic oligonucleotide
  Sense strand starting at position 2557 of SEQ ID NO: 317101
auuccucuugguggguaaa

SEQ ID NO: 464634 - RNA, 19 nt, Artificial Sequence
  Description of Artificial Sequence: Synthetic oligonucleotide
  Antisense Strand to SEQ ID NO: 464633
uuuacccaccaagaggaau

SEQ ID NO: 464635 - RNA, 19 nt, Artificial Sequence
  Description of Artificial Sequence: Synthetic oligonucleotide
  Sense strand starting at position 2580 of SEQ ID NO: 317101
cgacucuccuagguuaaac

SEQ ID NO: 464636 - RNA, 19 nt, Artificial Sequence
  Description of Artificial Sequence: Synthetic oligonucleotide
  Antisense Strand to SEQ ID NO: 464635
guuuaaccuaggagagucg

SEQ ID NO: 464637 - RNA, 19 nt, Artificial Sequence
  Description of Artificial Sequence: Synthetic oligonucleotide
  Sense strand starting at position 2914 of SEQ ID NO: 317101
gggauugcucauugguuaa

SEQ ID NO: 464638 - RNA, 19 nt, Artificial Sequence
  Description of Artificial Sequence: Synthetic oligonucleotide
  Antisense Strand to SEQ ID NO: 464637
uuaaccaaugagcaauccc

SEQ ID NO: 464639 - RNA, 19 nt, Artificial Sequence
  Description of Artificial Sequence: Synthetic oligonucleotide
  Sense strand starting at position 2916 of SEQ ID NO: 317101
gauugcucauugguuaaag

SEQ ID NO: 464640 - RNA, 19 nt, Artificial Sequence
  Description of Artificial Sequence: Synthetic oligonucleotide
  Antisense Strand to SEQ ID NO: 464639
cuuuaaccaaugagcaauc

SEQ ID NO: 464641 - RNA, 19 nt, Artificial Sequence
  Description of Artificial Sequence: Synthetic oligonucleotide
  Sense strand starting at position 2917 of SEQ ID NO: 317101
auugcucauugguuaaaga

SEQ ID NO: 464642 - RNA, 19 nt, Artificial Sequence
  Description of Artificial Sequence: Synthetic oligonucleotide
  Antisense Strand to SEQ ID NO: 464641
ucuuuaaccaaugagcaau

SEQ ID NO: 464643 - RNA, 19 nt, Artificial Sequence
  Description of Artificial Sequence: Synthetic oligonucleotide
  Sense strand starting at position 2918 of SEQ ID NO: 317101
uugcucauugguuaaagaa

SEQ ID NO: 464644 - RNA, 19 nt, Artificial Sequence
  Description of Artificial Sequence: Synthetic oligonucleotide
  Antisense Strand to SEQ ID NO: 464643
uucuuuaaccaaugagcaa

SEQ ID NO: 464645 - RNA, 19 nt, Artificial Sequence
  Description of Artificial Sequence: Synthetic oligonucleotide
  Sense strand starting at position 2944 of SEQ ID NO: 317101
acaggagggcaaugugaau

SEQ ID NO: 464646 - RNA, 19 nt, Artificial Sequence
  Description of Artificial Sequence: Synthetic oligonucleotide
  Antisense Strand to SEQ ID NO: 464645
auucacauugcccuccugu

SEQ ID NO: 464647 - RNA, 19 nt, Artificial Sequence
  Description of Artificial Sequence: Synthetic oligonucleotide
  Sense strand starting at position 2950 of SEQ ID NO: 317101
gggcaaugugaauggaaga

SEQ ID NO: 464648 - RNA, 19 nt, Artificial Sequence
  Description of Artificial Sequence: Synthetic oligonucleotide
  Antisense Strand to SEQ ID NO: 464647
ucuuccauucacauugccc

SEQ ID NO: 464649 - RNA, 19 nt, Artificial Sequence
  Description of Artificial Sequence: Synthetic oligonucleotide
  Sense strand starting at position 2974 of SEQ ID NO: 317101
auaagcugcuacuuuagaa

SEQ ID NO: 464650 - RNA, 19 nt, Artificial Sequence
  Description of Artificial Sequence: Synthetic oligonucleotide
  Antisense Strand to SEQ ID NO: 464649
uucuaaaguagcagcuuau

SEQ ID NO: 464651 - RNA, 19 nt, Artificial Sequence
  Description of Artificial Sequence: Synthetic oligonucleotide
  Sense strand starting at position 2981 of SEQ ID NO: 317101
gcuacuuuagaacaauguu

SEQ ID NO: 464652 - RNA, 19 nt, Artificial Sequence
  Description of Artificial Sequence: Synthetic oligonucleotide
  Antisense Strand to SEQ ID NO: 464651
aacauuguucuaaaguagc

SEQ ID NO: 464653 - RNA, 19 nt, Artificial Sequence
  Description of Artificial Sequence: Synthetic oligonucleotide
  Sense strand starting at position 3070 of SEQ ID NO: 317101
uggucaaucugaccaggau

SEQ ID NO: 464654 - RNA, 19 nt, Artificial Sequence
  Description of Artificial Sequence: Synthetic oligonucleotide
  Antisense Strand to SEQ ID NO: 464653
auccuggucagauugacca

SEQ ID NO: 464655 - RNA, 19 nt, Artificial Sequence
  Description of Artificial Sequence: Synthetic oligonucleotide
  Sense strand starting at position 3166 of SEQ ID NO: 317101
uagucuuucccggagugag

SEQ ID NO: 464656 - RNA, 19 nt, Artificial Sequence
  Description of Artificial Sequence: Synthetic oligonucleotide
  Antisense Strand to SEQ ID NO: 464655
cucacuccgggaaagacua

SEQ ID NO: 464657 - RNA, 19 nt, Artificial Sequence
  Description of Artificial Sequence: Synthetic oligonucleotide
  Sense strand starting at position 3302 of SEQ ID NO: 317101
cagccaggucuccaggaau

SEQ ID NO: 464658 - RNA, 19 nt, Artificial Sequence
  Description of Artificial Sequence: Synthetic oligonucleotide
  Antisense Strand to SEQ ID NO: 464657
auuccuggagaccuggcug

SEQ ID NO: 464659 - RNA, 19 nt, Artificial Sequence
  Description of Artificial Sequence: Synthetic oligonucleotide
  Sense strand starting at position 3334 of SEQ ID NO: 317101
ugagacuugcacugagguu

SEQ ID NO: 464660 - RNA, 19 nt, Artificial Sequence
  Description of Artificial Sequence: Synthetic oligonucleotide
  Antisense Strand to SEQ ID NO: 464659
aaccucagugcaagucuca

SEQ ID NO: 464661 - RNA, 19 nt, Artificial Sequence
  Description of Artificial Sequence: Synthetic oligonucleotide
  Sense strand starting at position 3419 of SEQ ID NO: 317101
ggcuauauuguuuauucca

SEQ ID NO: 464662 - RNA, 19 nt, Artificial Sequence
  Description of Artificial Sequence: Synthetic oligonucleotide
  Antisense Strand to SEQ ID NO: 464661
uggaauaaacaauauagcc

SEQ ID NO: 464663 - RNA, 19 nt, Artificial Sequence
  Description of Artificial Sequence: Synthetic oligonucleotide
  Sense strand starting at position 3573 of SEQ ID NO: 317101
uguguuuguccuuugucuu

SEQ ID NO: 464664 - RNA, 19 nt, Artificial Sequence
  Description of Artificial Sequence: Synthetic oligonucleotide
  Antisense Strand to SEQ ID NO: 464663
aagacaaaggacaaacaca

SEQ ID NO: 464665 - RNA, 19 nt, Artificial Sequence
  Description of Artificial Sequence: Synthetic oligonucleotide
  Sense strand starting at position 3590 of SEQ ID NO: 317101
uucugugucaaugagggaa

SEQ ID NO: 464666 - RNA, 19 nt, Artificial Sequence
  Description of Artificial Sequence: Synthetic oligonucleotide
  Antisense Strand to SEQ ID NO: 464665
uucccucauugacacagaa

SEQ ID NO: 464667 - RNA, 19 nt, Artificial Sequence
  Description of Artificial Sequence: Synthetic oligonucleotide
  Sense strand starting at position 3626 of SEQ ID NO: 317101
uucuuugaauccuuaagga

SEQ ID NO: 464668 - RNA, 19 nt, Artificial Sequence
  Description of Artificial Sequence: Synthetic oligonucleotide
  Antisense Strand to SEQ ID NO: 464667
uccuuaaggauucaaagaa

SEQ ID NO: 464669 - RNA, 19 nt, Artificial Sequence
  Description of Artificial Sequence: Synthetic oligonucleotide
  Sense strand starting at position 3695 of SEQ ID NO: 317101
ucauuugcaugagaagaac

SEQ ID NO: 464670 - RNA, 19 nt, Artificial Sequence
  Description of Artificial Sequence: Synthetic oligonucleotide
  Antisense Strand to SEQ ID NO: 464669
guucuucucaugcaaauga

SEQ ID NO: 464671 - RNA, 19 nt, Artificial Sequence
  Description of Artificial Sequence: Synthetic oligonucleotide
  Sense strand starting at position 3905 of SEQ ID NO: 317101
cuuccuugacuaugauaug

SEQ ID NO: 464672 - RNA, 19 nt, Artificial Sequence
  Description of Artificial Sequence: Synthetic oligonucleotide
  Antisense Strand to SEQ ID NO: 464671
cauaucauagucaaggaag

SEQ ID NO: 464673 - RNA, 19 nt, Artificial Sequence
  Description of Artificial Sequence: Synthetic oligonucleotide
  Sense strand starting at position 3914 of SEQ ID NO: 317101
cuaugauauggucaguucu

SEQ ID NO: 464674 - RNA, 19 nt, Artificial Sequence
  Description of Artificial Sequence: Synthetic oligonucleotide
  Antisense Strand to SEQ ID NO: 464673
agaacugaccauaucauag

SEQ ID NO: 464675 - RNA, 19 nt, Artificial Sequence
  Description of Artificial Sequence: Synthetic oligonucleotide
  Sense strand starting at position 1 of SEQ ID NO: 317102
gggaaugucaccugaggau

SEQ ID NO: 464676 - RNA, 19 nt, Artificial Sequence
  Description of Artificial Sequence: Synthetic oligonucleotide
  Antisense Strand to SEQ ID NO: 464675
auccucaggugacauuccc

SEQ ID NO: 464677 - RNA, 19 nt, Artificial Sequence
  Description of Artificial Sequence: Synthetic oligonucleotide
  Sense strand starting at position 16 of SEQ ID NO: 317102
ggauaugagaccugcuguu

SEQ ID NO: 464678 - RNA, 19 nt, Artificial Sequence
  Description of Artificial Sequence: Synthetic oligonucleotide
  Antisense Strand to SEQ ID NO: 464677
aacagcaggucucauaucc

SEQ ID NO: 464679 - RNA, 19 nt, Artificial Sequence
  Description of Artificial Sequence: Synthetic oligonucleotide
  Sense strand starting at position 120 of SEQ ID NO: 317102
aauauuuguguuggaguuu

SEQ ID NO: 464680 - RNA, 19 nt, Artificial Sequence
  Description of Artificial Sequence: Synthetic oligonucleotide
  Antisense Strand to SEQ ID NO: 464679
aaacuccaacacaaauauu

SEQ ID NO: 464681 - RNA, 19 nt, Artificial Sequence
  Description of Artificial Sequence: Synthetic oligonucleotide
  Sense strand starting at position 168 of SEQ ID NO: 317102
gaaauaaauuuaggaugag

SEQ ID NO: 464682 - RNA, 19 nt, Artificial Sequence
  Description of Artificial Sequence: Synthetic oligonucleotide
  Antisense Strand to SEQ ID NO: 464681
cucauccuaaauuuauuuc

SEQ ID NO: 464683 - RNA, 19 nt, Artificial Sequence
  Description of Artificial Sequence: Synthetic oligonucleotide
  Sense strand starting at position 199 of SEQ ID NO: 317102
accagacuauuuggcuaaa

SEQ ID NO: 464684 - RNA, 19 nt, Artificial Sequence
  Description of Artificial Sequence: Synthetic oligonucleotide
  Antisense Strand to SEQ ID NO: 464683
uuuagccaaauagucuggu

SEQ ID NO: 464685 - RNA, 19 nt, Artificial Sequence
  Description of Artificial Sequence: Synthetic oligonucleotide
  Sense strand starting at position 270 of SEQ ID NO: 317102
ugcuguugucuggauguuu

SEQ ID NO: 464686 - RNA, 19 nt, Artificial Sequence
  Description of Artificial Sequence: Synthetic oligonucleotide
  Antisense Strand to SEQ ID NO: 464685
aaacauccagacaacagca

SEQ ID NO: 464687 - RNA, 19 nt, Artificial Sequence
  Description of Artificial Sequence: Synthetic oligonucleotide
  Sense strand starting at position 301 of SEQ ID NO: 317102
auuauuaaaccucgguuau

SEQ ID NO: 464688 - RNA, 19 nt, Artificial Sequence
  Description of Artificial Sequence: Synthetic oligonucleotide
  Antisense Strand to SEQ ID NO: 464687
auaaccgagguuuaauaau

SEQ ID NO: 464689 - RNA, 19 nt, Artificial Sequence
  Description of Artificial Sequence: Synthetic oligonucleotide
  Sense strand starting at position 302 of SEQ ID NO: 317102
uuauuaaaccucgguuaug

SEQ ID NO: 464690 - RNA, 19 nt, Artificial Sequence
  Description of Artificial Sequence: Synthetic oligonucleotide
  Antisense Strand to SEQ ID NO: 464689
cauaaccgagguuuaauaa

SEQ ID NO: 464691 - RNA, 19 nt, Artificial Sequence
  Description of Artificial Sequence: Synthetic oligonucleotide
  Sense strand starting at position 312 of SEQ ID NO: 317102
ucgguuaugcagcaucaca

SEQ ID NO: 464692 - RNA, 19 nt, Artificial Sequence
  Description of Artificial Sequence: Synthetic oligonucleotide
  Antisense Strand to SEQ ID NO: 464691
ugugaugcugcauaaccga

SEQ ID NO: 464693 - RNA, 19 nt, Artificial Sequence
  Description of Artificial Sequence: Synthetic oligonucleotide
  Sense strand starting at position 364 of SEQ ID NO: 317102
cccagagaguauccagaau

SEQ ID NO: 464694 - RNA, 19 nt, Artificial Sequence
  Description of Artificial Sequence: Synthetic oligonucleotide
  Antisense Strand to SEQ ID NO: 464693
auucuggauacucucuggg

SEQ ID NO: 464695 - RNA, 19 nt, Artificial Sequence
  Description of Artificial Sequence: Synthetic oligonucleotide
  Sense strand starting at position 379 of SEQ ID NO: 317102
gaauuagagcuggagccau

SEQ ID NO: 464696 - RNA, 19 nt, Artificial Sequence
  Description of Artificial Sequence: Synthetic oligonucleotide
  Antisense Strand to SEQ ID NO: 464695
auggcuccagcucuaauuc

SEQ ID NO: 464697 - RNA, 19 nt, Artificial Sequence
  Description of Artificial Sequence: Synthetic oligonucleotide
  Sense strand starting at position 576 of SEQ ID NO: 317102
uagcuuuaguuagcagaac

SEQ ID NO: 464698 - RNA, 19 nt, Artificial Sequence
  Description of Artificial Sequence: Synthetic oligonucleotide
  Antisense Strand to SEQ ID NO: 464697
guucugcuaacuaaagcua

SEQ ID NO: 464699 - RNA, 19 nt, Artificial Sequence
  Description of Artificial Sequence: Synthetic oligonucleotide
  Sense strand starting at position 590 of SEQ ID NO: 317102
agaacuaguucccacuaga

SEQ ID NO: 464700 - RNA, 19 nt, Artificial Sequence
  Description of Artificial Sequence: Synthetic oligonucleotide
  Antisense Strand to SEQ ID NO: 464699
ucuagugggaacuaguucu

SEQ ID NO: 464701 - RNA, 19 nt, Artificial Sequence
  Description of Artificial Sequence: Synthetic oligonucleotide
  Sense strand starting at position 604 of SEQ ID NO: 317102
cuagaacaggauuguuuau

SEQ ID NO: 464702 - RNA, 19 nt, Artificial Sequence
  Description of Artificial Sequence: Synthetic oligonucleotide
  Antisense Strand to SEQ ID NO: 464701
auaaacaauccuguucuag

SEQ ID NO: 464703 - RNA, 19 nt, Artificial Sequence
  Description of Artificial Sequence: Synthetic oligonucleotide
  Sense strand starting at position 718 of SEQ ID NO: 317102
ugcacuuucuguguaagua

SEQ ID NO: 464704 - RNA, 19 nt, Artificial Sequence
  Description of Artificial Sequence: Synthetic oligonucleotide
  Antisense Strand to SEQ ID NO: 464703
uacuuacacagaaagugca

SEQ ID NO: 464705 - RNA, 19 nt, Artificial Sequence
  Description of Artificial Sequence: Synthetic oligonucleotide
  Sense strand starting at position 719 of SEQ ID NO: 317102
gcacuuucuguguaaguaa

SEQ ID NO: 464706 - RNA, 19 nt, Artificial Sequence
  Description of Artificial Sequence: Synthetic oligonucleotide
  Antisense Strand to SEQ ID NO: 464705
uuacuuacacagaaagugc

SEQ ID NO: 464707 - RNA, 19 nt, Artificial Sequence
  Description of Artificial Sequence: Synthetic oligonucleotide
  Sense strand starting at position 770 of SEQ ID NO: 317102
ggucucaugaaacgacauu

SEQ ID NO: 464708 - RNA, 19 nt, Artificial Sequence
  Description of Artificial Sequence: Synthetic oligonucleotide
  Antisense Strand to SEQ ID NO: 464707
aaugucguuucaugagacc

SEQ ID NO: 464709 - RNA, 19 nt, Artificial Sequence
  Description of Artificial Sequence: Synthetic oligonucleotide
  Sense strand starting at position 1014 of SEQ ID NO: 317102
guucgaucguaucuuaacu

SEQ ID NO: 464710 - RNA, 19 nt, Artificial Sequence
  Description of Artificial Sequence: Synthetic oligonucleotide
  Antisense Strand to SEQ ID NO: 464709
aguuaagauacgaucgaac

SEQ ID NO: 464711 - RNA, 19 nt, Artificial Sequence
  Description of Artificial Sequence: Synthetic oligonucleotide
  Sense strand starting at position 1037 of SEQ ID NO: 317102
ucuacaaugugagcagaua

SEQ ID NO: 464712 - RNA, 19 nt, Artificial Sequence
  Description of Artificial Sequence: Synthetic oligonucleotide
  Antisense Strand to SEQ ID NO: 464711
uaucugcucacauuguaga

SEQ ID NO: 464713 - RNA, 19 nt, Artificial Sequence
  Description of Artificial Sequence: Synthetic oligonucleotide
  Sense strand starting at position 1078 of SEQ ID NO: 317102
gcuaccuugcuuuauaaag

SEQ ID NO: 464714 - RNA, 19 nt, Artificial Sequence
  Description of Artificial Sequence: Synthetic oligonucleotide
  Antisense Strand to SEQ ID NO: 464713
cuuuauaaagcaagguagc

SEQ ID NO: 464715 - RNA, 19 nt, Artificial Sequence
  Description of Artificial Sequence: Synthetic oligonucleotide
  Sense strand starting at position 1087 of SEQ ID NO: 317102
cuuuauaaagcuugcaagu

SEQ ID NO: 464716 - RNA, 19 nt, Artificial Sequence
  Description of Artificial Sequence: Synthetic oligonucleotide
  Antisense Strand to SEQ ID NO: 464715
acuugcaagcuuuauaaag

SEQ ID NO: 464717 - RNA, 19 nt, Artificial Sequence
  Description of Artificial Sequence: Synthetic oligonucleotide
  Sense strand starting at position 1217 of SEQ ID NO: 317102
gaagcaauucgaugucaac

SEQ ID NO: 464718 - RNA, 19 nt, Artificial Sequence
  Description of Artificial Sequence: Synthetic oligonucleotide
  Antisense Strand to SEQ ID NO: 464717
guugacaucgaauugcuuc

SEQ ID NO: 464719 - RNA, 19 nt, Artificial Sequence
  Description of Artificial Sequence: Synthetic oligonucleotide
  Sense strand starting at position 1227 of SEQ ID NO: 317102
gaugucaacuuguuaugga

SEQ ID NO: 464720 - RNA, 19 nt, Artificial Sequence
  Description of Artificial Sequence: Synthetic oligonucleotide
  Antisense Strand to SEQ ID NO: 464719
uccauaacaaguugacauc

SEQ ID NO: 464721 - RNA, 19 nt, Artificial Sequence
  Description of Artificial Sequence: Synthetic oligonucleotide
  Sense strand starting at position 1242 of SEQ ID NO: 317102
uggagucaaaugcgacaaa

SEQ ID NO: 464722 - RNA, 19 nt, Artificial Sequence
  Description of Artificial Sequence: Synthetic oligonucleotide
  Antisense Strand to SEQ ID NO: 464721
uuugucgcauuugacucca

SEQ ID NO: 464723 - RNA, 19 nt, Artificial Sequence
  Description of Artificial Sequence: Synthetic oligonucleotide
  Sense strand starting at position 1263 of SEQ ID NO: 317102
ccgagagcuucaguagcga

SEQ ID NO: 464724 - RNA, 19 nt, Artificial Sequence
  Description of Artificial Sequence: Synthetic oligonucleotide
  Antisense Strand to SEQ ID NO: 464723
ucgcuacugaagcucucgg

SEQ ID NO: 464725 - RNA, 19 nt, Artificial Sequence
  Description of Artificial Sequence: Synthetic oligonucleotide
  Sense strand starting at position 2506 of SEQ ID NO: 317102
cugcgcuguaagucuuaaa

SEQ ID NO: 464726 - RNA, 19 nt, Artificial Sequence
  Description of Artificial Sequence: Synthetic oligonucleotide
  Antisense Strand to SEQ ID NO: 464725
uuuaagacuuacagcgcag

SEQ ID NO: 464727 - RNA, 19 nt, Artificial Sequence
  Description of Artificial Sequence: Synthetic oligonucleotide
  Sense strand starting at position 2507 of SEQ ID NO: 317102
ugcgcuguaagucuuaaac

SEQ ID NO: 464728 - RNA, 19 nt, Artificial Sequence
  Description of Artificial Sequence: Synthetic oligonucleotide
  Antisense Strand to SEQ ID NO: 464727
guuuaagacuuacagcgca

SEQ ID NO: 464729 - RNA, 19 nt, Artificial Sequence
  Description of Artificial Sequence: Synthetic oligonucleotide
  Sense strand starting at position 2518 of SEQ ID NO: 317102
ucuuaaacgucucuuaaag

SEQ ID NO: 464730 - RNA, 19 nt, Artificial Sequence
  Description of Artificial Sequence: Synthetic oligonucleotide
  Antisense Strand to SEQ ID NO: 464729
cuuuaagagacguuuaaga

SEQ ID NO: 464731 - RNA, 19 nt, Artificial Sequence
  Description of Artificial Sequence: Synthetic oligonucleotide
  Sense strand starting at position 2647 of SEQ ID NO: 317102
auuuguaauuuccacguuu

SEQ ID NO: 464732 - RNA, 19 nt, Artificial Sequence
  Description of Artificial Sequence: Synthetic oligonucleotide
  Antisense Strand to SEQ ID NO: 464731
aaacguggaaauuacaaau

SEQ ID NO: 464733 - RNA, 19 nt, Artificial Sequence
  Description of Artificial Sequence: Synthetic oligonucleotide
  Sense strand starting at position 2735 of SEQ ID NO: 317102
gaaguuucgcuacacgauc

SEQ ID NO: 464734 - RNA, 19 nt, Artificial Sequence
  Description of Artificial Sequence: Synthetic oligonucleotide
  Antisense Strand to SEQ ID NO: 464733
gaucguguagcgaaacuuc

SEQ ID NO: 464735 - RNA, 19 nt, Artificial Sequence
  Description of Artificial Sequence: Synthetic oligonucleotide
  Sense strand starting at position 3033 of SEQ ID NO: 317102
aggcauugcugugccaaga

SEQ ID NO: 464736 - RNA, 19 nt, Artificial Sequence
  Description of Artificial Sequence: Synthetic oligonucleotide
  Antisense Strand to SEQ ID NO: 464735
ucuuggcacagcaaugccu

SEQ ID NO: 464737 - RNA, 19 nt, Artificial Sequence
  Description of Artificial Sequence: Synthetic oligonucleotide
  Sense strand starting at position 3287 of SEQ ID NO: 317102
gcucuagagaggcacgauu

SEQ ID NO: 464738 - RNA, 19 nt, Artificial Sequence
  Description of Artificial Sequence: Synthetic oligonucleotide
  Antisense Strand to SEQ ID NO: 464737
aaucgugccucucuagagc

SEQ ID NO: 464739 - RNA, 19 nt, Artificial Sequence
  Description of Artificial Sequence: Synthetic oligonucleotide
  Sense strand starting at position 3364 of SEQ ID NO: 317102
ggaucugucguaugaguga

SEQ ID NO: 464740 - RNA, 19 nt, Artificial Sequence
  Description of Artificial Sequence: Synthetic oligonucleotide
  Antisense Strand to SEQ ID NO: 464739
ucacucauacgacagaucc

SEQ ID NO: 464741 - RNA, 19 nt, Artificial Sequence
  Description of Artificial Sequence: Synthetic oligonucleotide
  Sense strand starting at position 3369 of SEQ ID NO: 317102
ugucguaugagugagucaa

SEQ ID NO: 464742 - RNA, 19 nt, Artificial Sequence
  Description of Artificial Sequence: Synthetic oligonucleotide
  Antisense Strand to SEQ ID NO: 464741
uugacucacucauacgaca

SEQ ID NO: 464743 - RNA, 19 nt, Artificial Sequence
  Description of Artificial Sequence: Synthetic oligonucleotide
  Sense strand starting at position 3371 of SEQ ID NO: 317102
ucguaugagugagucaaag

SEQ ID NO: 464744 - RNA, 19 nt, Artificial Sequence
  Description of Artificial Sequence: Synthetic oligonucleotide
  Antisense Strand to SEQ ID NO: 464743
cuuugacucacucauacga

SEQ ID NO: 464745 - RNA, 19 nt, Artificial Sequence
  Description of Artificial Sequence: Synthetic oligonucleotide
  Sense strand starting at position 3626 of SEQ ID NO: 317102
cgcaguauuauaucccguu

SEQ ID NO: 464746 - RNA, 19 nt, Artificial Sequence
  Description of Artificial Sequence: Synthetic oligonucleotide
  Antisense Strand to SEQ ID NO: 464745
aacgggauauaauacugcg

SEQ ID NO: 464747 - RNA, 19 nt, Artificial Sequence
  Description of Artificial Sequence: Synthetic oligonucleotide
  Sense strand starting at position 3627 of SEQ ID NO: 317102
gcaguauuauaucccguuu

SEQ ID NO: 464748 - RNA, 19 nt, Artificial Sequence
  Description of Artificial Sequence: Synthetic oligonucleotide
  Antisense Strand to SEQ ID NO: 464747
aaacgggauauaauacugc

SEQ ID NO: 464749 - RNA, 19 nt, Artificial Sequence
  Description of Artificial Sequence: Synthetic oligonucleotide
  Sense strand starting at position 3845 of SEQ ID NO: 317102
gauuguagauuaguaaaga

SEQ ID NO: 464750 - RNA, 19 nt, Artificial Sequence
  Description of Artificial Sequence: Synthetic oligonucleotide
  Antisense Strand to SEQ ID NO: 464749
ucuuuacuaaucuacaauc

SEQ ID NO: 464751 - RNA, 19 nt, Artificial Sequence
  Description of Artificial Sequence: Synthetic oligonucleotide
  Sense strand starting at position 3890 of SEQ ID NO: 317102
cagaaaggcgaauggaauu

SEQ ID NO: 464752 - RNA, 19 nt, Artificial Sequence
  Description of Artificial Sequence: Synthetic oligonucleotide
  Antisense Strand to SEQ ID NO: 464751
aauuccauucgccuuucug

SEQ ID NO: 464753 - RNA, 19 nt, Artificial Sequence
  Description of Artificial Sequence: Synthetic oligonucleotide
  Sense strand starting at position 3970 of SEQ ID NO: 317102
ggugugauagugggaguca

SEQ ID NO: 464754 - RNA, 19 nt, Artificial Sequence
  Description of Artificial Sequence: Synthetic oligonucleotide
  Antisense Strand to SEQ ID NO: 464753
ugacucccacuaucacacc

SEQ ID NO: 464755 - RNA, 19 nt, Artificial Sequence
  Description of Artificial Sequence: Synthetic oligonucleotide
  Sense strand starting at position 47 of SEQ ID NO: 317103
cacuuuacaucgcuaugga

SEQ ID NO: 464756 - RNA, 19 nt, Artificial Sequence
  Description of Artificial Sequence: Synthetic oligonucleotide
  Antisense Strand to SEQ ID NO: 464755
uccauagcgauguaaagug

SEQ ID NO: 464757 - RNA, 19 nt, Artificial Sequence
  Description of Artificial Sequence: Synthetic oligonucleotide
  Sense strand starting at position 48 of SEQ ID NO: 317103
acuuuacaucgcuauggaa

SEQ ID NO: 464758 - RNA, 19 nt, Artificial Sequence
  Description of Artificial Sequence: Synthetic oligonucleotide
  Antisense Strand to SEQ ID NO: 464757
uuccauagcgauguaaagu

SEQ ID NO: 464759 - RNA, 19 nt, Artificial Sequence
  Description of Artificial Sequence: Synthetic oligonucleotide
  Sense strand starting at position 50 of SEQ ID NO: 317103
uuuacaucgcuauggaauc

SEQ ID NO: 464760 - RNA, 19 nt, Artificial Sequence
  Description of Artificial Sequence: Synthetic oligonucleotide
  Antisense Strand to SEQ ID NO: 464759
gauuccauagcgauguaaa

SEQ ID NO: 464761 - RNA, 19 nt, Artificial Sequence
  Description of Artificial Sequence: Synthetic oligonucleotide
  Sense strand starting at position 240 of SEQ ID NO: 317103
ggugaagcccagugagaag

SEQ ID NO: 464762 - RNA, 19 nt, Artificial Sequence
  Description of Artificial Sequence: Synthetic oligonucleotide
  Antisense Strand to SEQ ID NO: 464761
cuucucacugggcuucacc

SEQ ID NO: 464763 - RNA, 19 nt, Artificial Sequence
  Description of Artificial Sequence: Synthetic oligonucleotide
  Sense strand starting at position 422 of SEQ ID NO: 317103
ugacguucccuuugcugau

SEQ ID NO: 464764 - RNA, 19 nt, Artificial Sequence
  Description of Artificial Sequence: Synthetic oligonucleotide
  Antisense Strand to SEQ ID NO: 464763
aucagcaaagggaacguca

SEQ ID NO: 464765 - RNA, 19 nt, Artificial Sequence
  Description of Artificial Sequence: Synthetic oligonucleotide
  Sense strand starting at position 566 of SEQ ID NO: 317103
ccaggaguggcucagagua

SEQ ID NO: 464766 - RNA, 19 nt, Artificial Sequence
  Description of Artificial Sequence: Synthetic oligonucleotide
  Antisense Strand to SEQ ID NO: 464765
uacucugagccacuccugg

SEQ ID NO: 464767 - RNA, 19 nt, Artificial Sequence
  Description of Artificial Sequence: Synthetic oligonucleotide
  Sense strand starting at position 617 of SEQ ID NO: 317103
cugcccuauuucgaagcau

SEQ ID NO: 464768 - RNA, 19 nt, Artificial Sequence
  Description of Artificial Sequence: Synthetic oligonucleotide
  Antisense Strand to SEQ ID NO: 464767
augcuucgaaauagggcag

SEQ ID NO: 464769 - RNA, 19 nt, Artificial Sequence
  Description of Artificial Sequence: Synthetic oligonucleotide
  Sense strand starting at position 641 of SEQ ID NO: 317103
ggccacuugcguucucagu

SEQ ID NO: 464770 - RNA, 19 nt, Artificial Sequence
  Description of Artificial Sequence: Synthetic oligonucleotide
  Antisense Strand to SEQ ID NO: 464769
acugagaacgcaaguggcc

SEQ ID NO: 464771 - RNA, 19 nt, Artificial Sequence
  Description of Artificial Sequence: Synthetic oligonucleotide
  Sense strand starting at position 1133 of SEQ ID NO: 317103
ugaggaaggaucugaacgu

SEQ ID NO: 464772 - RNA, 19 nt, Artificial Sequence
  Description of Artificial Sequence: Synthetic oligonucleotide
  Antisense Strand to SEQ ID NO: 464771
acguucagauccuuccuca

SEQ ID NO: 464773 - RNA, 19 nt, Artificial Sequence
  Description of Artificial Sequence: Synthetic oligonucleotide
  Sense strand starting at position 1137 of SEQ ID NO: 317103
gaaggaucugaacgugaca

SEQ ID NO: 464774 - RNA, 19 nt, Artificial Sequence
  Description of Artificial Sequence: Synthetic oligonucleotide
  Antisense Strand to SEQ ID NO: 464773
ugucacguucagauccuuc

SEQ ID NO: 464775 - RNA, 19 nt, Artificial Sequence
  Description of Artificial Sequence: Synthetic oligonucleotide
  Sense strand starting at position 1168 of SEQ ID NO: 317103
ggaucaugcccagaagcca

SEQ ID NO: 464776 - RNA, 19 nt, Artificial Sequence
  Description of Artificial Sequence: Synthetic oligonucleotide
  Antisense Strand to SEQ ID NO: 464775
uggcuucugggcaugaucc

SEQ ID NO: 464777 - RNA, 19 nt, Artificial Sequence
  Description of Artificial Sequence: Synthetic oligonucleotide
  Sense strand starting at position 1925 of SEQ ID NO: 317103
aggcaacgguccugagaga

SEQ ID NO: 464778 - RNA, 19 nt, Artificial Sequence
  Description of Artificial Sequence: Synthetic oligonucleotide
  Antisense Strand to SEQ ID NO: 464777
ucucucaggaccguugccu

SEQ ID NO: 464779 - RNA, 19 nt, Artificial Sequence
  Description of Artificial Sequence: Synthetic oligonucleotide
  Sense strand starting at position 2003 of SEQ ID NO: 317103
ccucguaacagcgagagaa

SEQ ID NO: 464780 - RNA, 19 nt, Artificial Sequence
  Description of Artificial Sequence: Synthetic oligonucleotide
  Antisense Strand to SEQ ID NO: 464779
uucucucgcuguuacgagg

SEQ ID NO: 464781 - RNA, 19 nt, Artificial Sequence
  Description of Artificial Sequence: Synthetic oligonucleotide
  Sense strand starting at position 3245 of SEQ ID NO: 317103
gcucuuuccgggcgcagaa

SEQ ID NO: 464782 - RNA, 19 nt, Artificial Sequence
  Description of Artificial Sequence: Synthetic oligonucleotide
  Antisense Strand to SEQ ID NO: 464781
uucugcgcccggaaagagc

SEQ ID NO: 464783 - RNA, 19 nt, Artificial Sequence
  Description of Artificial Sequence: Synthetic oligonucleotide
  Sense strand starting at position 19 of SEQ ID NO: 317104
ggccacuugcguucucagu

SEQ ID NO: 464784 - RNA, 19 nt, Artificial Sequence
  Description of Artificial Sequence: Synthetic oligonucleotide
  Antisense Strand to SEQ ID NO: 464783
acugagaacgcaaguggcc

SEQ ID NO: 464785 - RNA, 19 nt, Artificial Sequence
  Description of Artificial Sequence: Synthetic oligonucleotide
  Sense strand starting at position 511 of SEQ ID NO: 317104
ugaggaaggaucugaacgu

SEQ ID NO: 464786 - RNA, 19 nt, Artificial Sequence
  Description of Artificial Sequence: Synthetic oligonucleotide
  Antisense Strand to SEQ ID NO: 464785
acguucagauccuuccuca

SEQ ID NO: 464787 - RNA, 19 nt, Artificial Sequence
  Description of Artificial Sequence: Synthetic oligonucleotide
  Sense strand starting at position 515 of SEQ ID NO: 317104
gaaggaucugaacgugaca

SEQ ID NO: 464788 - RNA, 19 nt, Artificial Sequence
  Description of Artificial Sequence: Synthetic oligonucleotide
  Antisense Strand to SEQ ID NO: 464787
ugucacguucagauccuuc

SEQ ID NO: 464789 - RNA, 19 nt, Artificial Sequence
  Description of Artificial Sequence: Synthetic oligonucleotide
  Sense strand starting at position 546 of SEQ ID NO: 317104
ggaucaugcccagaagcca

SEQ ID NO: 464790 - RNA, 19 nt, Artificial Sequence
  Description of Artificial Sequence: Synthetic oligonucleotide
  Antisense Strand to SEQ ID NO: 464789
uggcuucugggcaugaucc

SEQ ID NO: 464791 - RNA, 19 nt, Artificial Sequence
  Description of Artificial Sequence: Synthetic oligonucleotide
  Sense strand starting at position 1303 of SEQ ID NO: 317104
aggcaacgguccugagaga

SEQ ID NO: 464792 - RNA, 19 nt, Artificial Sequence
  Description of Artificial Sequence: Synthetic oligonucleotide
  Antisense Strand to SEQ ID NO: 464791
ucucucaggaccguugccu

SEQ ID NO: 464793 - RNA, 19 nt, Artificial Sequence
  Description of Artificial Sequence: Synthetic oligonucleotide
  Sense strand starting at position 1381 of SEQ ID NO: 317104
ccucguaacagcgagagaa

SEQ ID NO: 464794 - RNA, 19 nt, Artificial Sequence
  Description of Artificial Sequence: Synthetic oligonucleotide
  Antisense Strand to SEQ ID NO: 464793
uucucucgcuguuacgagg

SEQ ID NO: 464795 - RNA, 19 nt, Artificial Sequence
  Description of Artificial Sequence: Synthetic oligonucleotide
  Sense strand starting at position 2623 of SEQ ID NO: 317104
gcucuuuccgggcgcagaa

SEQ ID NO: 464796 - RNA, 19 nt, Artificial Sequence
  Description of Artificial Sequence: Synthetic oligonucleotide
  Antisense Strand to SEQ ID NO: 464795
uucugcgcccggaaagagc

SEQ ID NO: 464797 - RNA, 19 nt, Artificial Sequence
  Description of Artificial Sequence: Synthetic oligonucleotide
  Sense strand starting at position 176 of SEQ ID NO: 317105
acagcugacucacugagaa

SEQ ID NO: 464798 - RNA, 19 nt, Artificial Sequence
  Description of Artificial Sequence: Synthetic oligonucleotide
  Antisense Strand to SEQ ID NO: 464797
uucucagugagucagcugu

SEQ ID NO: 464799 - RNA, 19 nt, Artificial Sequence
  Description of Artificial Sequence: Synthetic oligonucleotide
  Sense strand starting at position 180 of SEQ ID NO: 317105
cugacucacugagaagaga

SEQ ID NO: 464800 - RNA, 19 nt, Artificial Sequence
  Description of Artificial Sequence: Synthetic oligonucleotide
  Antisense Strand to SEQ ID NO: 464799
ucucuucucagugagucag

SEQ ID NO: 464801 - RNA, 19 nt, Artificial Sequence
  Description of Artificial Sequence: Synthetic oligonucleotide
  Sense strand starting at position 297 of SEQ ID NO: 317105
cuuugagucucauccagag

SEQ ID NO: 464802 - RNA, 19 nt, Artificial Sequence
  Description of Artificial Sequence: Synthetic oligonucleotide
  Antisense Strand to SEQ ID NO: 464801
cucuggaugagacucaaag

SEQ ID NO: 464803 - RNA, 19 nt, Artificial Sequence
  Description of Artificial Sequence: Synthetic oligonucleotide
  Sense strand starting at position 301 of SEQ ID NO: 317105
gagucucauccagagcacu

SEQ ID NO: 464804 - RNA, 19 nt, Artificial Sequence
  Description of Artificial Sequence: Synthetic oligonucleotide
  Antisense Strand to SEQ ID NO: 464803
agugcucuggaugagacuc

SEQ ID NO: 464805 - RNA, 19 nt, Artificial Sequence
  Description of Artificial Sequence: Synthetic oligonucleotide
  Sense strand starting at position 437 of SEQ ID NO: 317105
ggcacuuggcuggagugaa

SEQ ID NO: 464806 - RNA, 19 nt, Artificial Sequence
  Description of Artificial Sequence: Synthetic oligonucleotide
  Antisense Strand to SEQ ID NO: 464805
uucacuccagccaagugcc

SEQ ID NO: 464807 - RNA, 19 nt, Artificial Sequence
  Description of Artificial Sequence: Synthetic oligonucleotide
  Sense strand starting at position 518 of SEQ ID NO: 317105
gugagauuucugugugcuc

SEQ ID NO: 464808 - RNA, 19 nt, Artificial Sequence
  Description of Artificial Sequence: Synthetic oligonucleotide
  Antisense Strand to SEQ ID NO: 464807
gagcacacagaaaucucac

SEQ ID NO: 464809 - RNA, 19 nt, Artificial Sequence
  Description of Artificial Sequence: Synthetic oligonucleotide
  Sense strand starting at position 521 of SEQ ID NO: 317105
agauuucugugugcuccau

SEQ ID NO: 464810 - RNA, 19 nt, Artificial Sequence
  Description of Artificial Sequence: Synthetic oligonucleotide
  Antisense Strand to SEQ ID NO: 464809
auggagcacacagaaaucu

SEQ ID NO: 464811 - RNA, 19 nt, Artificial Sequence
  Description of Artificial Sequence: Synthetic oligonucleotide
  Sense strand starting at position 525 of SEQ ID NO: 317105
uucugugugcuccaugaug

SEQ ID NO: 464812 - RNA, 19 nt, Artificial Sequence
  Description of Artificial Sequence: Synthetic oligonucleotide
  Antisense Strand to SEQ ID NO: 464811
caucauggagcacacagaa

SEQ ID NO: 464813 - RNA, 19 nt, Artificial Sequence
  Description of Artificial Sequence: Synthetic oligonucleotide
  Sense strand starting at position 537 of SEQ ID NO: 317105
caugaugacucguggauau

SEQ ID NO: 464814 - RNA, 19 nt, Artificial Sequence
  Description of Artificial Sequence: Synthetic oligonucleotide
  Antisense Strand to SEQ ID NO: 464813
auauccacgagucaucaug

SEQ ID NO: 464815 - RNA, 19 nt, Artificial Sequence
  Description of Artificial Sequence: Synthetic oligonucleotide
  Sense strand starting at position 539 of SEQ ID NO: 317105
ugaugacucguggauauua

SEQ ID NO: 464816 - RNA, 19 nt, Artificial Sequence
  Description of Artificial Sequence: Synthetic oligonucleotide
  Antisense Strand to SEQ ID NO: 464815
uaauauccacgagucauca

SEQ ID NO: 464817 - RNA, 19 nt, Artificial Sequence
  Description of Artificial Sequence: Synthetic oligonucleotide
  Sense strand starting at position 541 of SEQ ID NO: 317105
augacucguggauauuaau

SEQ ID NO: 464818 - RNA, 19 nt, Artificial Sequence
  Description of Artificial Sequence: Synthetic oligonucleotide
  Antisense Strand to SEQ ID NO: 464817
auuaauauccacgagucau

SEQ ID NO: 464819 - RNA, 19 nt, Artificial Sequence
  Description of Artificial Sequence: Synthetic oligonucleotide
  Sense strand starting at position 544 of SEQ ID NO: 317105
acucguggauauuaauaaa

SEQ ID NO: 464820 - RNA, 19 nt, Artificial Sequence
  Description of Artificial Sequence: Synthetic oligonucleotide
  Antisense Strand to SEQ ID NO: 464819
uuuauuaauauccacgagu

SEQ ID NO: 464821 - RNA, 19 nt, Artificial Sequence
  Description of Artificial Sequence: Synthetic oligonucleotide
  Sense strand starting at position 1984 of SEQ ID NO: 317105
gccugugugcuucucagca

SEQ ID NO: 464822 - RNA, 19 nt, Artificial Sequence
  Description of Artificial Sequence: Synthetic oligonucleotide
  Antisense Strand to SEQ ID NO: 464821
ugcugagaagcacacaggc

SEQ ID NO: 464823 - RNA, 19 nt, Artificial Sequence
  Description of Artificial Sequence: Synthetic oligonucleotide
  Sense strand starting at position 1988 of SEQ ID NO: 317105
gugugcuucucagcaggaa

SEQ ID NO: 464824 - RNA, 19 nt, Artificial Sequence
  Description of Artificial Sequence: Synthetic oligonucleotide
  Antisense Strand to SEQ ID NO: 464823
uuccugcugagaagcacac

SEQ ID NO: 464825 - RNA, 19 nt, Artificial Sequence
  Description of Artificial Sequence: Synthetic oligonucleotide
  Sense strand starting at position 1989 of SEQ ID NO: 317105
ugugcuucucagcaggaaa

SEQ ID NO: 464826 - RNA, 19 nt, Artificial Sequence
  Description of Artificial Sequence: Synthetic oligonucleotide
  Antisense Strand to SEQ ID NO: 464825
uuuccugcugagaagcaca

SEQ ID NO: 464827 - RNA, 19 nt, Artificial Sequence
  Description of Artificial Sequence: Synthetic oligonucleotide
  Sense strand starting at position 2295 of SEQ ID NO: 317105
accggauuguuaccugcau

SEQ ID NO: 464828 - RNA, 19 nt, Artificial Sequence
  Description of Artificial Sequence: Synthetic oligonucleotide
  Antisense Strand to SEQ ID NO: 464827
augcagguaacaauccggu

SEQ ID NO: 464829 - RNA, 19 nt, Artificial Sequence
  Description of Artificial Sequence: Synthetic oligonucleotide
  Sense strand starting at position 2296 of SEQ ID NO: 317105
ccggauuguuaccugcauu

SEQ ID NO: 464830 - RNA, 19 nt, Artificial Sequence
  Description of Artificial Sequence: Synthetic oligonucleotide
  Antisense Strand to SEQ ID NO: 464829
aaugcagguaacaauccgg

SEQ ID NO: 464831 - RNA, 19 nt, Artificial Sequence
  Description of Artificial Sequence: Synthetic oligonucleotide
  Sense strand starting at position 2297 of SEQ ID NO: 317105
cggauuguuaccugcauuu

SEQ ID NO: 464832 - RNA, 19 nt, Artificial Sequence
  Description of Artificial Sequence: Synthetic oligonucleotide
  Antisense Strand to SEQ ID NO: 464831
aaaugcagguaacaauccg

SEQ ID NO: 464833 - RNA, 19 nt, Artificial Sequence
  Description of Artificial Sequence: Synthetic oligonucleotide
  Sense strand starting at position 2350 of SEQ ID NO: 317105
acagguuucuguuuguuua

SEQ ID NO: 464834 - RNA, 19 nt, Artificial Sequence
  Description of Artificial Sequence: Synthetic oligonucleotide
  Antisense Strand to SEQ ID NO: 464833
uaaacaaacagaaaccugu

SEQ ID NO: 464835 - RNA, 19 nt, Artificial Sequence
  Description of Artificial Sequence: Synthetic oligonucleotide
  Sense strand starting at position 2353 of SEQ ID NO: 317105
gguuucuguuuguuuagga

SEQ ID NO: 464836 - RNA, 19 nt, Artificial Sequence
  Description of Artificial Sequence: Synthetic oligonucleotide
  Antisense Strand to SEQ ID NO: 464835
uccuaaacaaacagaaacc

SEQ ID NO: 464837 - RNA, 19 nt, Artificial Sequence
  Description of Artificial Sequence: Synthetic oligonucleotide
  Sense strand starting at position 2354 of SEQ ID NO: 317105
guuucuguuuguuuaggau

SEQ ID NO: 464838 - RNA, 19 nt, Artificial Sequence
  Description of Artificial Sequence: Synthetic oligonucleotide
  Antisense Strand to SEQ ID NO: 464837
auccuaaacaaacagaaac

SEQ ID NO: 464839 - RNA, 19 nt, Artificial Sequence
  Description of Artificial Sequence: Synthetic oligonucleotide
  Sense strand starting at position 2357 of SEQ ID NO: 317105
ucuguuuguuuaggaugga

SEQ ID NO: 464840 - RNA, 19 nt, Artificial Sequence
  Description of Artificial Sequence: Synthetic oligonucleotide
  Antisense Strand to SEQ ID NO: 464839
uccauccuaaacaaacaga

SEQ ID NO: 464841 - RNA, 19 nt, Artificial Sequence
  Description of Artificial Sequence: Synthetic oligonucleotide
  Sense strand starting at position 2360 of SEQ ID NO: 317105
guuuguuuaggauggagag

SEQ ID NO: 464842 - RNA, 19 nt, Artificial Sequence
  Description of Artificial Sequence: Synthetic oligonucleotide
  Antisense Strand to SEQ ID NO: 464841
cucuccauccuaaacaaac

SEQ ID NO: 464843 - RNA, 19 nt, Artificial Sequence
  Description of Artificial Sequence: Synthetic oligonucleotide
  Sense strand starting at position 2401 of SEQ ID NO: 317105
gagggaguuucggcuuagu

SEQ ID NO: 464844 - RNA, 19 nt, Artificial Sequence
  Description of Artificial Sequence: Synthetic oligonucleotide
  Antisense Strand to SEQ ID NO: 464843
acuaagccgaaacucccuc

SEQ ID NO: 464845 - RNA, 19 nt, Artificial Sequence
  Description of Artificial Sequence: Synthetic oligonucleotide
  Sense strand starting at position 2404 of SEQ ID NO: 317105
ggaguuucggcuuagucuu

SEQ ID NO: 464846 - RNA, 19 nt, Artificial Sequence
  Description of Artificial Sequence: Synthetic oligonucleotide
  Antisense Strand to SEQ ID NO: 464845
aagacuaagccgaaacucc

SEQ ID NO: 464847 - RNA, 19 nt, Artificial Sequence
  Description of Artificial Sequence: Synthetic oligonucleotide
  Sense strand starting at position 2598 of SEQ ID NO: 317105
ccguuuccugaacaguauu

SEQ ID NO: 464848 - RNA, 19 nt, Artificial Sequence
  Description of Artificial Sequence: Synthetic oligonucleotide
  Antisense Strand to SEQ ID NO: 464847
aauacuguucaggaaacgg

SEQ ID NO: 464849 - RNA, 19 nt, Artificial Sequence
  Description of Artificial Sequence: Synthetic oligonucleotide
  Sense strand starting at position 2609 of SEQ ID NO: 317105
acaguauuauucgugguuu

SEQ ID NO: 464850 - RNA, 19 nt, Artificial Sequence
  Description of Artificial Sequence: Synthetic oligonucleotide
  Antisense Strand to SEQ ID NO: 464849
aaaccacgaauaauacugu

SEQ ID NO: 464851 - RNA, 19 nt, Artificial Sequence
  Description of Artificial Sequence: Synthetic oligonucleotide
  Sense strand starting at position 2681 of SEQ ID NO: 317105
gucugaacaggcuaaugau

SEQ ID NO: 464852 - RNA, 19 nt, Artificial Sequence
  Description of Artificial Sequence: Synthetic oligonucleotide
  Antisense Strand to SEQ ID NO: 464851
aucauuagccuguucagac

SEQ ID NO: 464853 - RNA, 19 nt, Artificial Sequence
  Description of Artificial Sequence: Synthetic oligonucleotide
  Sense strand starting at position 2719 of SEQ ID NO: 317105
ugcagucuucugcagggau

SEQ ID NO: 464854 - RNA, 19 nt, Artificial Sequence
  Description of Artificial Sequence: Synthetic oligonucleotide
  Antisense Strand to SEQ ID NO: 464853
aucccugcagaagacugca

SEQ ID NO: 464855 - RNA, 19 nt, Artificial Sequence
  Description of Artificial Sequence: Synthetic oligonucleotide
  Sense strand starting at position 2743 of SEQ ID NO: 317105
gugugucucagauagagcu

SEQ ID NO: 464856 - RNA, 19 nt, Artificial Sequence
  Description of Artificial Sequence: Synthetic oligonucleotide
  Antisense Strand to SEQ ID NO: 464855
agcucuaucugagacacac

SEQ ID NO: 464857 - RNA, 19 nt, Artificial Sequence
  Description of Artificial Sequence: Synthetic oligonucleotide
  Sense strand starting at position 2787 of SEQ ID NO: 317105
uguagagucucauccagua

SEQ ID NO: 464858 - RNA, 19 nt, Artificial Sequence
  Description of Artificial Sequence: Synthetic oligonucleotide
  Antisense Strand to SEQ ID NO: 464857
uacuggaugagacucuaca

SEQ ID NO: 464859 - RNA, 19 nt, Artificial Sequence
  Description of Artificial Sequence: Synthetic oligonucleotide
  Sense strand starting at position 2866 of SEQ ID NO: 317105
cauucucugagacguguga

SEQ ID NO: 464860 - RNA, 19 nt, Artificial Sequence
  Description of Artificial Sequence: Synthetic oligonucleotide
  Antisense Strand to SEQ ID NO: 464859
ucacacgucucagagaaug

SEQ ID NO: 464861 - RNA, 19 nt, Artificial Sequence
  Description of Artificial Sequence: Synthetic oligonucleotide
  Sense strand starting at position 2868 of SEQ ID NO: 317105
uucucugagacgugugaug

SEQ ID NO: 464862 - RNA, 19 nt, Artificial Sequence
  Description of Artificial Sequence: Synthetic oligonucleotide
  Antisense Strand to SEQ ID NO: 464861
caucacacgucucagagaa

SEQ ID NO: 464863 - RNA, 19 nt, Artificial Sequence
  Description of Artificial Sequence: Synthetic oligonucleotide
  Sense strand starting at position 2870 of SEQ ID NO: 317105
cucugagacgugugaugga

SEQ ID NO: 464864 - RNA, 19 nt, Artificial Sequence
  Description of Artificial Sequence: Synthetic oligonucleotide
  Antisense Strand to SEQ ID NO: 464863
uccaucacacgucucagag

SEQ ID NO: 464865 - RNA, 19 nt, Artificial Sequence
  Description of Artificial Sequence: Synthetic oligonucleotide
  Sense strand starting at position 3047 of SEQ ID NO: 317105
uccauaguccagugccaau

SEQ ID NO: 464866 - RNA, 19 nt, Artificial Sequence
  Description of Artificial Sequence: Synthetic oligonucleotide
  Antisense Strand to SEQ ID NO: 464865
auuggcacuggacuaugga

SEQ ID NO: 464867 - RNA, 19 nt, Artificial Sequence
  Description of Artificial Sequence: Synthetic oligonucleotide
  Sense strand starting at position 3183 of SEQ ID NO: 317105
ugagccugucaccaugaaa

SEQ ID NO: 464868 - RNA, 19 nt, Artificial Sequence
  Description of Artificial Sequence: Synthetic oligonucleotide
  Antisense Strand to SEQ ID NO: 464867
uuucauggugacaggcuca

SEQ ID NO: 464869 - RNA, 19 nt, Artificial Sequence
  Description of Artificial Sequence: Synthetic oligonucleotide
  Sense strand starting at position 3355 of SEQ ID NO: 317105
gucggaacucuuggguuga

SEQ ID NO: 464870 - RNA, 19 nt, Artificial Sequence
  Description of Artificial Sequence: Synthetic oligonucleotide
  Antisense Strand to SEQ ID NO: 464869
ucaacccaagaguuccgac

SEQ ID NO: 464871 - RNA, 19 nt, Artificial Sequence
  Description of Artificial Sequence: Synthetic oligonucleotide
  Sense strand starting at position 3376 of SEQ ID NO: 317105
aggugagcucagcaacauu

SEQ ID NO: 464872 - RNA, 19 nt, Artificial Sequence
  Description of Artificial Sequence: Synthetic oligonucleotide
  Antisense Strand to SEQ ID NO: 464871
aauguugcugagcucaccu

SEQ ID NO: 464873 - RNA, 19 nt, Artificial Sequence
  Description of Artificial Sequence: Synthetic oligonucleotide
  Sense strand starting at position 3420 of SEQ ID NO: 317105
aaucgcuugcauugaugua

SEQ ID NO: 464874 - RNA, 19 nt, Artificial Sequence
  Description of Artificial Sequence: Synthetic oligonucleotide
  Antisense Strand to SEQ ID NO: 464873
uacaucaaugcaagcgauu

SEQ ID NO: 464875 - RNA, 19 nt, Artificial Sequence
  Description of Artificial Sequence: Synthetic oligonucleotide
  Sense strand starting at position 3421 of SEQ ID NO: 317105
aucgcuugcauugauguau

SEQ ID NO: 464876 - RNA, 19 nt, Artificial Sequence
  Description of Artificial Sequence: Synthetic oligonucleotide
  Antisense Strand to SEQ ID NO: 464875
auacaucaaugcaagcgau

SEQ ID NO: 464877 - RNA, 19 nt, Artificial Sequence
  Description of Artificial Sequence: Synthetic oligonucleotide
  Sense strand starting at position 106 of SEQ ID NO: 317106
ugccgauugguguaguuac

SEQ ID NO: 464878 - RNA, 19 nt, Artificial Sequence
  Description of Artificial Sequence: Synthetic oligonucleotide
  Antisense Strand to SEQ ID NO: 464877
guaacuacaccaaucggca

SEQ ID NO: 464879 - RNA, 19 nt, Artificial Sequence
  Description of Artificial Sequence: Synthetic oligonucleotide
  Sense strand starting at position 1879 of SEQ ID NO: 317106
uucucuagcucggcuaaau

SEQ ID NO: 464880 - RNA, 19 nt, Artificial Sequence
  Description of Artificial Sequence: Synthetic oligonucleotide
  Antisense Strand to SEQ ID NO: 464879
auuuagccgagcuagagaa

SEQ ID NO: 464881 - RNA, 19 nt, Artificial Sequence
  Description of Artificial Sequence: Synthetic oligonucleotide
  Sense strand starting at position 2151 of SEQ ID NO: 317106
ucacuagaucuccauguuu

SEQ ID NO: 464882 - RNA, 19 nt, Artificial Sequence
  Description of Artificial Sequence: Synthetic oligonucleotide
  Antisense Strand to SEQ ID NO: 464881
aaacauggagaucuaguga

SEQ ID NO: 464883 - RNA, 19 nt, Artificial Sequence
  Description of Artificial Sequence: Synthetic oligonucleotide
  Sense strand starting at position 2153 of SEQ ID NO: 317106
acuagaucuccauguuuau

SEQ ID NO: 464884 - RNA, 19 nt, Artificial Sequence
  Description of Artificial Sequence: Synthetic oligonucleotide
  Antisense Strand to SEQ ID NO: 464883
auaaacauggagaucuagu

SEQ ID NO: 464885 - RNA, 19 nt, Artificial Sequence
  Description of Artificial Sequence: Synthetic oligonucleotide
  Sense strand starting at position 2165 of SEQ ID NO: 317106
uguuuauuucuuggugguu

SEQ ID NO: 464886 - RNA, 19 nt, Artificial Sequence
  Description of Artificial Sequence: Synthetic oligonucleotide
  Antisense Strand to SEQ ID NO: 464885
aaccaccaagaaauaaaca

SEQ ID NO: 464887 - RNA, 19 nt, Artificial Sequence
  Description of Artificial Sequence: Synthetic oligonucleotide
  Sense strand starting at position 2166 of SEQ ID NO: 317106
guuuauuucuuggugguua

SEQ ID NO: 464888 - RNA, 19 nt, Artificial Sequence
  Description of Artificial Sequence: Synthetic oligonucleotide
  Antisense Strand to SEQ ID NO: 464887
uaaccaccaagaaauaaac

SEQ ID NO: 464889 - RNA, 19 nt, Artificial Sequence
  Description of Artificial Sequence: Synthetic oligonucleotide
  Sense strand starting at position 2174 of SEQ ID NO: 317106
cuuggugguuauguauuaa

SEQ ID NO: 464890 - RNA, 19 nt, Artificial Sequence
  Description of Artificial Sequence: Synthetic oligonucleotide
  Antisense Strand to SEQ ID NO: 464889
uuaauacauaaccaccaag

SEQ ID NO: 464891 - RNA, 19 nt, Artificial Sequence
  Description of Artificial Sequence: Synthetic oligonucleotide
  Sense strand starting at position 2236 of SEQ ID NO: 317106
uagucauucugugucucau

SEQ ID NO: 464892 - RNA, 19 nt, Artificial Sequence
  Description of Artificial Sequence: Synthetic oligonucleotide
  Antisense Strand to SEQ ID NO: 464891
augagacacagaaugacua

SEQ ID NO: 464893 - RNA, 19 nt, Artificial Sequence
  Description of Artificial Sequence: Synthetic oligonucleotide
  Sense strand starting at position 2238 of SEQ ID NO: 317106
gucauucugugucucauaa

SEQ ID NO: 464894 - RNA, 19 nt, Artificial Sequence
  Description of Artificial Sequence: Synthetic oligonucleotide
  Antisense Strand to SEQ ID NO: 464893
uuaugagacacagaaugac

SEQ ID NO: 464895 - RNA, 19 nt, Artificial Sequence
  Description of Artificial Sequence: Synthetic oligonucleotide
  Sense strand starting at position 2266 of SEQ ID NO: 317106
uuauuagcgccagauacau

SEQ ID NO: 464896 - RNA, 19 nt, Artificial Sequence
  Description of Artificial Sequence: Synthetic oligonucleotide
  Antisense Strand to SEQ ID NO: 464895
auguaucuggcgcuaauaa

SEQ ID NO: 464897 - RNA, 19 nt, Artificial Sequence
  Description of Artificial Sequence: Synthetic oligonucleotide
  Sense strand starting at position 2275 of SEQ ID NO: 317106
ccagauacauugucaugua

SEQ ID NO: 464898 - RNA, 19 nt, Artificial Sequence
  Description of Artificial Sequence: Synthetic oligonucleotide
  Antisense Strand to SEQ ID NO: 464897
uacaugacaauguaucugg

SEQ ID NO: 464899 - RNA, 19 nt, Artificial Sequence
  Description of Artificial Sequence: Synthetic oligonucleotide
  Sense strand starting at position 2305 of SEQ ID NO: 317106
ucacaaguauccuaugaga

SEQ ID NO: 464900 - RNA, 19 nt, Artificial Sequence
  Description of Artificial Sequence: Synthetic oligonucleotide
  Antisense Strand to SEQ ID NO: 464899
ucucauaggauacuuguga

SEQ ID NO: 464901 - RNA, 19 nt, Artificial Sequence
  Description of Artificial Sequence: Synthetic oligonucleotide
  Sense strand starting at position 2308 of SEQ ID NO: 317106
caaguauccuaugagauag

SEQ ID NO: 464902 - RNA, 19 nt, Artificial Sequence
  Description of Artificial Sequence: Synthetic oligonucleotide
  Antisense Strand to SEQ ID NO: 464901
cuaucucauaggauacuug

SEQ ID NO: 464903 - RNA, 19 nt, Artificial Sequence
  Description of Artificial Sequence: Synthetic oligonucleotide
  Sense strand starting at position 2332 of SEQ ID NO: 317106
gcagacacauugcuaguuu

SEQ ID NO: 464904 - RNA, 19 nt, Artificial Sequence
  Description of Artificial Sequence: Synthetic oligonucleotide
  Antisense Strand to SEQ ID NO: 464903
aaacuagcaaugugucugc

SEQ ID NO: 464905 - RNA, 19 nt, Artificial Sequence
  Description of Artificial Sequence: Synthetic oligonucleotide
  Sense strand starting at position 2382 of SEQ ID NO: 317106
agagucacucuguguggaa

SEQ ID NO: 464906 - RNA, 19 nt, Artificial Sequence
  Description of Artificial Sequence: Synthetic oligonucleotide
  Antisense Strand to SEQ ID NO: 464905
uuccacacagagugacucu

SEQ ID NO: 464907 - RNA, 19 nt, Artificial Sequence
  Description of Artificial Sequence: Synthetic oligonucleotide
  Sense strand starting at position 2468 of SEQ ID NO: 317106
guccuauacuaguuacaca

SEQ ID NO: 464908 - RNA, 19 nt, Artificial Sequence
  Description of Artificial Sequence: Synthetic oligonucleotide
  Antisense Strand to SEQ ID NO: 464907
uguguaacuaguauaggac

SEQ ID NO: 464909 - RNA, 19 nt, Artificial Sequence
  Description of Artificial Sequence: Synthetic oligonucleotide
  Sense strand starting at position 2483 of SEQ ID NO: 317106
cacagucauguaugguaua

SEQ ID NO: 464910 - RNA, 19 nt, Artificial Sequence
  Description of Artificial Sequence: Synthetic oligonucleotide
  Antisense Strand to SEQ ID NO: 464909
uauaccauacaugacugug

SEQ ID NO: 464911 - RNA, 19 nt, Artificial Sequence
  Description of Artificial Sequence: Synthetic oligonucleotide
  Sense strand starting at position 2488 of SEQ ID NO: 317106
ucauguaugguauaugcca

SEQ ID NO: 464912 - RNA, 19 nt, Artificial Sequence
  Description of Artificial Sequence: Synthetic oligonucleotide
  Antisense Strand to SEQ ID NO: 464911
uggcauauaccauacauga

SEQ ID NO: 464913 - RNA, 19 nt, Artificial Sequence
  Description of Artificial Sequence: Synthetic oligonucleotide
  Sense strand starting at position 2496 of SEQ ID NO: 317106
gguauaugccaucacuucu

SEQ ID NO: 464914 - RNA, 19 nt, Artificial Sequence
  Description of Artificial Sequence: Synthetic oligonucleotide
  Antisense Strand to SEQ ID NO: 464913
agaagugauggcauauacc

SEQ ID NO: 464915 - RNA, 19 nt, Artificial Sequence
  Description of Artificial Sequence: Synthetic oligonucleotide
  Sense strand starting at position 2509 of SEQ ID NO: 317106
acuucugaucuuuguguca

SEQ ID NO: 464916 - RNA, 19 nt, Artificial Sequence
  Description of Artificial Sequence: Synthetic oligonucleotide
  Antisense Strand to SEQ ID NO: 464915
ugacacaaagaucagaagu

SEQ ID NO: 464917 - RNA, 19 nt, Artificial Sequence
  Description of Artificial Sequence: Synthetic oligonucleotide
  Sense strand starting at position 2512 of SEQ ID NO: 317106
ucugaucuuugugucauuu

SEQ ID NO: 464918 - RNA, 19 nt, Artificial Sequence
  Description of Artificial Sequence: Synthetic oligonucleotide
  Antisense Strand to SEQ ID NO: 464917
aaaugacacaaagaucaga

SEQ ID NO: 464919 - RNA, 19 nt, Artificial Sequence
  Description of Artificial Sequence: Synthetic oligonucleotide
  Sense strand starting at position 3026 of SEQ ID NO: 317106
ucagauuuguauuauuggu

SEQ ID NO: 464920 - RNA, 19 nt, Artificial Sequence
  Description of Artificial Sequence: Synthetic oligonucleotide
  Antisense Strand to SEQ ID NO: 464919
accaauaauacaaaucuga

SEQ ID NO: 464921 - RNA, 19 nt, Artificial Sequence
  Description of Artificial Sequence: Synthetic oligonucleotide
  Sense strand starting at position 3031 of SEQ ID NO: 317106
uuuguauuauugguuccaa

SEQ ID NO: 464922 - RNA, 19 nt, Artificial Sequence
  Description of Artificial Sequence: Synthetic oligonucleotide
  Antisense Strand to SEQ ID NO: 464921
uuggaaccaauaauacaaa

SEQ ID NO: 464923 - RNA, 19 nt, Artificial Sequence
  Description of Artificial Sequence: Synthetic oligonucleotide
  Sense strand starting at position 3032 of SEQ ID NO: 317106
uuguauuauugguuccaaa

SEQ ID NO: 464924 - RNA, 19 nt, Artificial Sequence
  Description of Artificial Sequence: Synthetic oligonucleotide
  Antisense Strand to SEQ ID NO: 464923
uuuggaaccaauaauacaa

SEQ ID NO: 464925 - RNA, 19 nt, Artificial Sequence
  Description of Artificial Sequence: Synthetic oligonucleotide
  Sense strand starting at position 3215 of SEQ ID NO: 317106
uuggaugaaugcucauuga

SEQ ID NO: 464926 - RNA, 19 nt, Artificial Sequence
  Description of Artificial Sequence: Synthetic oligonucleotide
  Antisense Strand to SEQ ID NO: 464925
ucaaugagcauucauccaa

SEQ ID NO: 464927 - RNA, 19 nt, Artificial Sequence
  Description of Artificial Sequence: Synthetic oligonucleotide
  Sense strand starting at position 3278 of SEQ ID NO: 317106
gucucauguguacaaggaa

SEQ ID NO: 464928 - RNA, 19 nt, Artificial Sequence
  Description of Artificial Sequence: Synthetic oligonucleotide
  Antisense Strand to SEQ ID NO: 464927
uuccuuguacacaugagac

SEQ ID NO: 464929 - RNA, 19 nt, Artificial Sequence
  Description of Artificial Sequence: Synthetic oligonucleotide
  Sense strand starting at position 3281 of SEQ ID NO: 317106
ucauguguacaaggaaaug

SEQ ID NO: 464930 - RNA, 19 nt, Artificial Sequence
  Description of Artificial Sequence: Synthetic oligonucleotide
  Antisense Strand to SEQ ID NO: 464929
cauuuccuuguacacauga

SEQ ID NO: 464931 - RNA, 19 nt, Artificial Sequence
  Description of Artificial Sequence: Synthetic oligonucleotide
  Sense strand starting at position 3317 of SEQ ID NO: 317106
guaacuugccuaggaucau

SEQ ID NO: 464932 - RNA, 19 nt, Artificial Sequence
  Description of Artificial Sequence: Synthetic oligonucleotide
  Antisense Strand to SEQ ID NO: 464931
augauccuaggcaaguuac

SEQ ID NO: 464933 - RNA, 19 nt, Artificial Sequence
  Description of Artificial Sequence: Synthetic oligonucleotide
  Sense strand starting at position 3329 of SEQ ID NO: 317106
ggaucauacuacuaacaag

SEQ ID NO: 464934 - RNA, 19 nt, Artificial Sequence
  Description of Artificial Sequence: Synthetic oligonucleotide
  Antisense Strand to SEQ ID NO: 464933
cuuguuaguaguaugaucc

SEQ ID NO: 464935 - RNA, 19 nt, Artificial Sequence
  Description of Artificial Sequence: Synthetic oligonucleotide
  Sense strand starting at position 3502 of SEQ ID NO: 317106
gugaaauaauuggcuauca

SEQ ID NO: 464936 - RNA, 19 nt, Artificial Sequence
  Description of Artificial Sequence: Synthetic oligonucleotide
  Antisense Strand to SEQ ID NO: 464935
ugauagccaauuauuucac

SEQ ID NO: 464937 - RNA, 19 nt, Artificial Sequence
  Description of Artificial Sequence: Synthetic oligonucleotide
  Sense strand starting at position 3503 of SEQ ID NO: 317106
ugaaauaauuggcuaucau

SEQ ID NO: 464938 - RNA, 19 nt, Artificial Sequence
  Description of Artificial Sequence: Synthetic oligonucleotide
  Antisense Strand to SEQ ID NO: 464937
augauagccaauuauuuca

SEQ ID NO: 464939 - RNA, 19 nt, Artificial Sequence
  Description of Artificial Sequence: Synthetic oligonucleotide
  Sense strand starting at position 3519 of SEQ ID NO: 317106
cauguaucagggcagauau

SEQ ID NO: 464940 - RNA, 19 nt, Artificial Sequence
  Description of Artificial Sequence: Synthetic oligonucleotide
  Antisense Strand to SEQ ID NO: 464939
auaucugcccugauacaug

SEQ ID NO: 464941 - RNA, 19 nt, Artificial Sequence
  Description of Artificial Sequence: Synthetic oligonucleotide
  Sense strand starting at position 3521 of SEQ ID NO: 317106
uguaucagggcagauauua

SEQ ID NO: 464942 - RNA, 19 nt, Artificial Sequence
  Description of Artificial Sequence: Synthetic oligonucleotide
  Antisense Strand to SEQ ID NO: 464941
uaauaucugcccugauaca

SEQ ID NO: 464943 - RNA, 19 nt, Artificial Sequence
  Description of Artificial Sequence: Synthetic oligonucleotide
  Sense strand starting at position 3529 of SEQ ID NO: 317106
ggcagauauuacuuucugu

SEQ ID NO: 464944 - RNA, 19 nt, Artificial Sequence
  Description of Artificial Sequence: Synthetic oligonucleotide
  Antisense Strand to SEQ ID NO: 464943
acagaaaguaauaucugcc

SEQ ID NO: 464945 - RNA, 19 nt, Artificial Sequence
  Description of Artificial Sequence: Synthetic oligonucleotide
  Sense strand starting at position 3674 of SEQ ID NO: 317106
acauauacagcuggugaaa

SEQ ID NO: 464946 - RNA, 19 nt, Artificial Sequence
  Description of Artificial Sequence: Synthetic oligonucleotide
  Antisense Strand to SEQ ID NO: 464945
uuucaccagcuguauaugu

SEQ ID NO: 464947 - RNA, 19 nt, Artificial Sequence
  Description of Artificial Sequence: Synthetic oligonucleotide
  Sense strand starting at position 3683 of SEQ ID NO: 317106
gcuggugaaaucuaaguaa

SEQ ID NO: 464948 - RNA, 19 nt, Artificial Sequence
  Description of Artificial Sequence: Synthetic oligonucleotide
  Antisense Strand to SEQ ID NO: 464947
uuacuuagauuucaccagc

SEQ ID NO: 464949 - RNA, 19 nt, Artificial Sequence
  Description of Artificial Sequence: Synthetic oligonucleotide
  Sense strand starting at position 3686 of SEQ ID NO: 317106
ggugaaaucuaaguaagcu

SEQ ID NO: 464950 - RNA, 19 nt, Artificial Sequence
  Description of Artificial Sequence: Synthetic oligonucleotide
  Antisense Strand to SEQ ID NO: 464949
agcuuacuuagauuucacc

SEQ ID NO: 464951 - RNA, 19 nt, Artificial Sequence
  Description of Artificial Sequence: Synthetic oligonucleotide
  Sense strand starting at position 3695 of SEQ ID NO: 317106
uaaguaagcuuaguguauu

SEQ ID NO: 464952 - RNA, 19 nt, Artificial Sequence
  Description of Artificial Sequence: Synthetic oligonucleotide
  Antisense Strand to SEQ ID NO: 464951
aauacacuaagcuuacuua

SEQ ID NO: 464953 - RNA, 19 nt, Artificial Sequence
  Description of Artificial Sequence: Synthetic oligonucleotide
  Sense strand starting at position 3698 of SEQ ID NO: 317106
guaagcuuaguguauugua

SEQ ID NO: 464954 - RNA, 19 nt, Artificial Sequence
  Description of Artificial Sequence: Synthetic oligonucleotide
  Antisense Strand to SEQ ID NO: 464953
uacaauacacuaagcuuac

SEQ ID NO: 464955 - RNA, 19 nt, Artificial Sequence
  Description of Artificial Sequence: Synthetic oligonucleotide
  Sense strand starting at position 3853 of SEQ ID NO: 317106
uagauuauuucccgaaugu

SEQ ID NO: 464956 - RNA, 19 nt, Artificial Sequence
  Description of Artificial Sequence: Synthetic oligonucleotide
  Antisense Strand to SEQ ID NO: 464955
acauucgggaaauaaucua

SEQ ID NO: 464957 - RNA, 19 nt, Artificial Sequence
  Description of Artificial Sequence: Synthetic oligonucleotide
  Sense strand starting at position 21 of SEQ ID NO: 317107
uuaaguaauguccacgacu

SEQ ID NO: 464958 - RNA, 19 nt, Artificial Sequence
  Description of Artificial Sequence: Synthetic oligonucleotide
  Antisense Strand to SEQ ID NO: 464957
agucguggacauuacuuaa

SEQ ID NO: 464959 - RNA, 19 nt, Artificial Sequence
  Description of Artificial Sequence: Synthetic oligonucleotide
  Sense strand starting at position 23 of SEQ ID NO: 317107
aaguaauguccacgacuga

SEQ ID NO: 464960 - RNA, 19 nt, Artificial Sequence
  Description of Artificial Sequence: Synthetic oligonucleotide
  Antisense Strand to SEQ ID NO: 464959
ucagucguggacauuacuu

SEQ ID NO: 464961 - RNA, 19 nt, Artificial Sequence
  Description of Artificial Sequence: Synthetic oligonucleotide
  Sense strand starting at position 24 of SEQ ID NO: 317107
aguaauguccacgacugaa

SEQ ID NO: 464962 - RNA, 19 nt, Artificial Sequence
  Description of Artificial Sequence: Synthetic oligonucleotide
  Antisense Strand to SEQ ID NO: 464961
uucagucguggacauuacu

SEQ ID NO: 464963 - RNA, 19 nt, Artificial Sequence
  Description of Artificial Sequence: Synthetic oligonucleotide
  Sense strand starting at position 211 of SEQ ID NO: 317107
uuuggaauuucugcagcua

SEQ ID NO: 464964 - RNA, 19 nt, Artificial Sequence
  Description of Artificial Sequence: Synthetic oligonucleotide
  Antisense Strand to SEQ ID NO: 464963
uagcugcagaaauuccaaa

SEQ ID NO: 464965 - RNA, 19 nt, Artificial Sequence
  Description of Artificial Sequence: Synthetic oligonucleotide
  Sense strand starting at position 326 of SEQ ID NO: 317107
cggucagaggacuaaucuu

SEQ ID NO: 464966 - RNA, 19 nt, Artificial Sequence
  Description of Artificial Sequence: Synthetic oligonucleotide
  Antisense Strand to SEQ ID NO: 464965
aagauuaguccucugaccg

SEQ ID NO: 464967 - RNA, 19 nt, Artificial Sequence
  Description of Artificial Sequence: Synthetic oligonucleotide
  Sense strand starting at position 611 of SEQ ID NO: 317107
aggccuaaucaacgugaaa

SEQ ID NO: 464968 - RNA, 19 nt, Artificial Sequence
  Description of Artificial Sequence: Synthetic oligonucleotide
  Antisense Strand to SEQ ID NO: 464967
uuucacguugauuaggccu

SEQ ID NO: 464969 - RNA, 19 nt, Artificial Sequence
  Description of Artificial Sequence: Synthetic oligonucleotide
  Sense strand starting at position 754 of SEQ ID NO: 317107
ucacgauauugucuaagag

SEQ ID NO: 464970 - RNA, 19 nt, Artificial Sequence
  Description of Artificial Sequence: Synthetic oligonucleotide
  Antisense Strand to SEQ ID NO: 464969
cucuuagacaauaucguga

SEQ ID NO: 464971 - RNA, 19 nt, Artificial Sequence
  Description of Artificial Sequence: Synthetic oligonucleotide
  Sense strand starting at position 755 of SEQ ID NO: 317107
cacgauauugucuaagagc

SEQ ID NO: 464972 - RNA, 19 nt, Artificial Sequence
  Description of Artificial Sequence: Synthetic oligonucleotide
  Antisense Strand to SEQ ID NO: 464971
gcucuuagacaauaucgug

SEQ ID NO: 464973 - RNA, 19 nt, Artificial Sequence
  Description of Artificial Sequence: Synthetic oligonucleotide
  Sense strand starting at position 913 of SEQ ID NO: 317107
cuauguucccagcacuaua

SEQ ID NO: 464974 - RNA, 19 nt, Artificial Sequence
  Description of Artificial Sequence: Synthetic oligonucleotide
  Antisense Strand to SEQ ID NO: 464973
uauagugcugggaacauag

SEQ ID NO: 464975 - RNA, 19 nt, Artificial Sequence
  Description of Artificial Sequence: Synthetic oligonucleotide
  Sense strand starting at position 998 of SEQ ID NO: 317107
uaguuaauugcugaguauu

SEQ ID NO: 464976 - RNA, 19 nt, Artificial Sequence
  Description of Artificial Sequence: Synthetic oligonucleotide
  Antisense Strand to SEQ ID NO: 464975
aauacucagcaauuaacua

SEQ ID NO: 464977 - RNA, 19 nt, Artificial Sequence
  Description of Artificial Sequence: Synthetic oligonucleotide
  Sense strand starting at position 1367 of SEQ ID NO: 317107
guaagcugcgacuuuguca

SEQ ID NO: 464978 - RNA, 19 nt, Artificial Sequence
  Description of Artificial Sequence: Synthetic oligonucleotide
  Antisense Strand to SEQ ID NO: 464977
ugacaaagucgcagcuuac

SEQ ID NO: 464979 - RNA, 19 nt, Artificial Sequence
  Description of Artificial Sequence: Synthetic oligonucleotide
  Sense strand starting at position 2023 of SEQ ID NO: 317107
cccugaggucucuagagcu

SEQ ID NO: 464980 - RNA, 19 nt, Artificial Sequence
  Description of Artificial Sequence: Synthetic oligonucleotide
  Antisense Strand to SEQ ID NO: 464979
agcucuagagaccucaggg

SEQ ID NO: 464981 - RNA, 19 nt, Artificial Sequence
  Description of Artificial Sequence: Synthetic oligonucleotide
  Sense strand starting at position 2148 of SEQ ID NO: 317107
uugggaauuggacgagauu

SEQ ID NO: 464982 - RNA, 19 nt, Artificial Sequence
  Description of Artificial Sequence: Synthetic oligonucleotide
  Antisense Strand to SEQ ID NO: 464981
aaucucguccaauucccaa

SEQ ID NO: 464983 - RNA, 19 nt, Artificial Sequence
  Description of Artificial Sequence: Synthetic oligonucleotide
  Sense strand starting at position 2218 of SEQ ID NO: 317107
uccugcauuccguuagcuu

SEQ ID NO: 464984 - RNA, 19 nt, Artificial Sequence
  Description of Artificial Sequence: Synthetic oligonucleotide
  Antisense Strand to SEQ ID NO: 464983
aagcuaacggaaugcagga

SEQ ID NO: 464985 - RNA, 19 nt, Artificial Sequence
  Description of Artificial Sequence: Synthetic oligonucleotide
  Sense strand starting at position 2317 of SEQ ID NO: 317107
cugggugaugcucagaauc

SEQ ID NO: 464986 - RNA, 19 nt, Artificial Sequence
  Description of Artificial Sequence: Synthetic oligonucleotide
  Antisense Strand to SEQ ID NO: 464985
gauucugagcaucacccag

SEQ ID NO: 464987 - RNA, 19 nt, Artificial Sequence
  Description of Artificial Sequence: Synthetic oligonucleotide
  Sense strand starting at position 2347 of SEQ ID NO: 317107
ugcagacaaugguugaauu

SEQ ID NO: 464988 - RNA, 19 nt, Artificial Sequence
  Description of Artificial Sequence: Synthetic oligonucleotide
  Antisense Strand to SEQ ID NO: 464987
aauucaaccauugucugca

SEQ ID NO: 464989 - RNA, 19 nt, Artificial Sequence
  Description of Artificial Sequence: Synthetic oligonucleotide
  Sense strand starting at position 2367 of SEQ ID NO: 317107
cuagacagcucacuguuaa

SEQ ID NO: 464990 - RNA, 19 nt, Artificial Sequence
  Description of Artificial Sequence: Synthetic oligonucleotide
  Antisense Strand to SEQ ID NO: 464989
uuaacagugagcugucuag

SEQ ID NO: 464991 - RNA, 19 nt, Artificial Sequence
  Description of Artificial Sequence: Synthetic oligonucleotide
  Sense strand starting at position 2411 of SEQ ID NO: 317107
uguauauuccucuauggga

SEQ ID NO: 464992 - RNA, 19 nt, Artificial Sequence
  Description of Artificial Sequence: Synthetic oligonucleotide
  Antisense Strand to SEQ ID NO: 464991
ucccauagaggaauauaca

SEQ ID NO: 464993 - RNA, 19 nt, Artificial Sequence
  Description of Artificial Sequence: Synthetic oligonucleotide
  Sense strand starting at position 2413 of SEQ ID NO: 317107
uauauuccucuaugggaug

SEQ ID NO: 464994 - RNA, 19 nt, Artificial Sequence
  Description of Artificial Sequence: Synthetic oligonucleotide
  Antisense Strand to SEQ ID NO: 464993
caucccauagaggaauaua

SEQ ID NO: 464995 - RNA, 19 nt, Artificial Sequence
  Description of Artificial Sequence: Synthetic oligonucleotide
  Sense strand starting at position 2418 of SEQ ID NO: 317107
uccucuaugggaugugaaa

SEQ ID NO: 464996 - RNA, 19 nt, Artificial Sequence
  Description of Artificial Sequence: Synthetic oligonucleotide
  Antisense Strand to SEQ ID NO: 464995
uuucacaucccauagagga

SEQ ID NO: 464997 - RNA, 19 nt, Artificial Sequence
  Description of Artificial Sequence: Synthetic oligonucleotide
  Sense strand starting at position 2420 of SEQ ID NO: 317107
cucuaugggaugugaaauu

SEQ ID NO: 464998 - RNA, 19 nt, Artificial Sequence
  Description of Artificial Sequence: Synthetic oligonucleotide
  Antisense Strand to SEQ ID NO: 464997
aauuucacaucccauagag

SEQ ID NO: 464999 - RNA, 19 nt, Artificial Sequence
  Description of Artificial Sequence: Synthetic oligonucleotide
  Sense strand starting at position 2835 of SEQ ID NO: 317107
cgucucaucguggcuacaa

SEQ ID NO: 465000 - RNA, 19 nt, Artificial Sequence
  Description of Artificial Sequence: Synthetic oligonucleotide
  Antisense Strand to SEQ ID NO: 464999
uuguagccacgaugagacg

SEQ ID NO: 465001 - RNA, 19 nt, Artificial Sequence
  Description of Artificial Sequence: Synthetic oligonucleotide
  Sense strand starting at position 2837 of SEQ ID NO: 317107
ucucaucguggcuacaaga

SEQ ID NO: 465002 - RNA, 19 nt, Artificial Sequence
  Description of Artificial Sequence: Synthetic oligonucleotide
  Antisense Strand to SEQ ID NO: 465001
ucuuguagccacgaugaga

SEQ ID NO: 465003 - RNA, 19 nt, Artificial Sequence
  Description of Artificial Sequence: Synthetic oligonucleotide
  Sense strand starting at position 2853 of SEQ ID NO: 317107
agaacuugucaugguuuga

SEQ ID NO: 465004 - RNA, 19 nt, Artificial Sequence
  Description of Artificial Sequence: Synthetic oligonucleotide
  Antisense Strand to SEQ ID NO: 465003
ucaaaccaugacaaguucu

SEQ ID NO: 465005 - RNA, 19 nt, Artificial Sequence
  Description of Artificial Sequence: Synthetic oligonucleotide
  Sense strand starting at position 2857 of SEQ ID NO: 317107
cuugucaugguuugaauau

SEQ ID NO: 465006 - RNA, 19 nt, Artificial Sequence
  Description of Artificial Sequence: Synthetic oligonucleotide
  Antisense Strand to SEQ ID NO: 465005
auauucaaaccaugacaag

SEQ ID NO: 465007 - RNA, 19 nt, Artificial Sequence
  Description of Artificial Sequence: Synthetic oligonucleotide
  Sense strand starting at position 2947 of SEQ ID NO: 317107
auaauaaucccuuaugugu

SEQ ID NO: 465008 - RNA, 19 nt, Artificial Sequence
  Description of Artificial Sequence: Synthetic oligonucleotide
  Antisense Strand to SEQ ID NO: 465007
acacauaagggauuauuau

SEQ ID NO: 465009 - RNA, 19 nt, Artificial Sequence
  Description of Artificial Sequence: Synthetic oligonucleotide
  Sense strand starting at position 3103 of SEQ ID NO: 317107
uuuacugguggucaugaau

SEQ ID NO: 465010 - RNA, 19 nt, Artificial Sequence
  Description of Artificial Sequence: Synthetic oligonucleotide
  Antisense Strand to SEQ ID NO: 465009
auucaugaccaccaguaaa

SEQ ID NO: 465011 - RNA, 19 nt, Artificial Sequence
  Description of Artificial Sequence: Synthetic oligonucleotide
  Sense strand starting at position 3175 of SEQ ID NO: 317107
auguaacaggcacaauauu

SEQ ID NO: 465012 - RNA, 19 nt, Artificial Sequence
  Description of Artificial Sequence: Synthetic oligonucleotide
  Antisense Strand to SEQ ID NO: 465011
aauauugugccuguuacau

SEQ ID NO: 465013 - RNA, 19 nt, Artificial Sequence
  Description of Artificial Sequence: Synthetic oligonucleotide
  Sense strand starting at position 3211 of SEQ ID NO: 317107
aauagacguuucucagaag

SEQ ID NO: 465014 - RNA, 19 nt, Artificial Sequence
  Description of Artificial Sequence: Synthetic oligonucleotide
  Antisense Strand to SEQ ID NO: 465013
cuucugagaaacgucuauu

SEQ ID NO: 465015 - RNA, 19 nt, Artificial Sequence
  Description of Artificial Sequence: Synthetic oligonucleotide
  Sense strand starting at position 3228 of SEQ ID NO: 317107
aguuauaguccugaaccua

SEQ ID NO: 465016 - RNA, 19 nt, Artificial Sequence
  Description of Artificial Sequence: Synthetic oligonucleotide
  Antisense Strand to SEQ ID NO: 465015
uagguucaggacuauaacu

SEQ ID NO: 465017 - RNA, 19 nt, Artificial Sequence
  Description of Artificial Sequence: Synthetic oligonucleotide
  Sense strand starting at position 3284 of SEQ ID NO: 317107
acaagccaaugaucagauu

SEQ ID NO: 465018 - RNA, 19 nt, Artificial Sequence
  Description of Artificial Sequence: Synthetic oligonucleotide
  Antisense Strand to SEQ ID NO: 465017
aaucugaucauuggcuugu

SEQ ID NO: 465019 - RNA, 19 nt, Artificial Sequence
  Description of Artificial Sequence: Synthetic oligonucleotide
  Sense strand starting at position 3324 of SEQ ID NO: 317107
agaguuaacuaguuuaauc

SEQ ID NO: 465020 - RNA, 19 nt, Artificial Sequence
  Description of Artificial Sequence: Synthetic oligonucleotide
  Antisense Strand to SEQ ID NO: 465019
gauuaaacuaguuaacucu

SEQ ID NO: 465021 - RNA, 19 nt, Artificial Sequence
  Description of Artificial Sequence: Synthetic oligonucleotide
  Sense strand starting at position 3332 of SEQ ID NO: 317107
cuaguuuaaucacuagggu

SEQ ID NO: 465022 - RNA, 19 nt, Artificial Sequence
  Description of Artificial Sequence: Synthetic oligonucleotide
  Antisense Strand to SEQ ID NO: 465021
acccuagugauuaaacuag

SEQ ID NO: 465023 - RNA, 19 nt, Artificial Sequence
  Description of Artificial Sequence: Synthetic oligonucleotide
  Sense strand starting at position 3779 of SEQ ID NO: 317107
gcuagauucugacuuccag

SEQ ID NO: 465024 - RNA, 19 nt, Artificial Sequence
  Description of Artificial Sequence: Synthetic oligonucleotide
  Antisense Strand to SEQ ID NO: 465023
cuggaagucagaaucuagc

SEQ ID NO: 465025 - RNA, 19 nt, Artificial Sequence
  Description of Artificial Sequence: Synthetic oligonucleotide
  Sense strand starting at position 3849 of SEQ ID NO: 317107
ggcacauggccggauucau

SEQ ID NO: 465026 - RNA, 19 nt, Artificial Sequence
  Description of Artificial Sequence: Synthetic oligonucleotide
  Antisense Strand to SEQ ID NO: 465025
augaauccggccaugugcc

SEQ ID NO: 465027 - RNA, 19 nt, Artificial Sequence
  Description of Artificial Sequence: Synthetic oligonucleotide
  Sense strand starting at position 3928 of SEQ ID NO: 317107
guugaauauggccauacca

SEQ ID NO: 465028 - RNA, 19 nt, Artificial Sequence
  Description of Artificial Sequence: Synthetic oligonucleotide
  Antisense Strand to SEQ ID NO: 465027
ugguauggccauauucaac

SEQ ID NO: 465029 - RNA, 19 nt, Artificial Sequence
  Description of Artificial Sequence: Synthetic oligonucleotide
  Sense strand starting at position 3937 of SEQ ID NO: 317107
ggccauaccagcugggaua

SEQ ID NO: 465030 - RNA, 19 nt, Artificial Sequence
  Description of Artificial Sequence: Synthetic oligonucleotide
  Antisense Strand to SEQ ID NO: 465029
uaucccagcugguauggcc

SEQ ID NO: 465031 - RNA, 19 nt, Artificial Sequence
  Description of Artificial Sequence: Synthetic oligonucleotide
  Sense strand starting at position 3938 of SEQ ID NO: 317107
gccauaccagcugggauau

SEQ ID NO: 465032 - RNA, 19 nt, Artificial Sequence
  Description of Artificial Sequence: Synthetic oligonucleotide
  Antisense Strand to SEQ ID NO: 465031
auaucccagcugguauggc

SEQ ID NO: 465033 - RNA, 19 nt, Artificial Sequence
  Description of Artificial Sequence: Synthetic oligonucleotide
  Sense strand starting at position 3939 of SEQ ID NO: 317107
ccauaccagcugggauaua

SEQ ID NO: 465034 - RNA, 19 nt, Artificial Sequence
  Description of Artificial Sequence: Synthetic oligonucleotide
  Antisense Strand to SEQ ID NO: 465033
uauaucccagcugguaugg

SEQ ID NO: 465035 - RNA, 19 nt, Artificial Sequence
  Description of Artificial Sequence: Synthetic oligonucleotide
  Sense strand starting at position 3967 of SEQ ID NO: 317107
ugagauaaauaguuccauu

SEQ ID NO: 465036 - RNA, 19 nt, Artificial Sequence
  Description of Artificial Sequence: Synthetic oligonucleotide
  Antisense Strand to SEQ ID NO: 465035
aauggaacuauuuaucuca

SEQ ID NO: 465037 - RNA, 19 nt, Artificial Sequence
  Description of Artificial Sequence: Synthetic oligonucleotide
  Sense strand starting at position 23 of SEQ ID NO: 317108
acauaaaugcuuugaggaa

SEQ ID NO: 465038 - RNA, 19 nt, Artificial Sequence
  Description of Artificial Sequence: Synthetic oligonucleotide
  Antisense Strand to SEQ ID NO: 465037
uuccucaaagcauuuaugu

SEQ ID NO: 465039 - RNA, 19 nt, Artificial Sequence
  Description of Artificial Sequence: Synthetic oligonucleotide
  Sense strand starting at position 568 of SEQ ID NO: 317108
ggaugauguucuuuauaga

SEQ ID NO: 465040 - RNA, 19 nt, Artificial Sequence
  Description of Artificial Sequence: Synthetic oligonucleotide
  Antisense Strand to SEQ ID NO: 465039
ucuauaaagaacaucaucc

SEQ ID NO: 465041 - RNA, 19 nt, Artificial Sequence
  Description of Artificial Sequence: Synthetic oligonucleotide
  Sense strand starting at position 725 of SEQ ID NO: 317108
guauuaacuggagggcuaa

SEQ ID NO: 465042 - RNA, 19 nt, Artificial Sequence
  Description of Artificial Sequence: Synthetic oligonucleotide
  Antisense Strand to SEQ ID NO: 465041
uuagcccuccaguuaauac

SEQ ID NO: 465043 - RNA, 19 nt, Artificial Sequence
  Description of Artificial Sequence: Synthetic oligonucleotide
  Sense strand starting at position 790 of SEQ ID NO: 317108
uuaccuugugugcacuuaa

SEQ ID NO: 465044 - RNA, 19 nt, Artificial Sequence
  Description of Artificial Sequence: Synthetic oligonucleotide
  Antisense Strand to SEQ ID NO: 465043
uuaagugcacacaagguaa

SEQ ID NO: 465045 - RNA, 19 nt, Artificial Sequence
  Description of Artificial Sequence: Synthetic oligonucleotide
  Sense strand starting at position 808 of SEQ ID NO: 317108
agucauacauguguaaaua

SEQ ID NO: 465046 - RNA, 19 nt, Artificial Sequence
  Description of Artificial Sequence: Synthetic oligonucleotide
  Antisense Strand to SEQ ID NO: 465045
uauuuacacauguaugacu

SEQ ID NO: 465047 - RNA, 19 nt, Artificial Sequence
  Description of Artificial Sequence: Synthetic oligonucleotide
  Sense strand starting at position 809 of SEQ ID NO: 317108
gucauacauguguaaauaa

SEQ ID NO: 465048 - RNA, 19 nt, Artificial Sequence
  Description of Artificial Sequence: Synthetic oligonucleotide
  Antisense Strand to SEQ ID NO: 465047
uuauuuacacauguaugac

SEQ ID NO: 465049 - RNA, 19 nt, Artificial Sequence
  Description of Artificial Sequence: Synthetic oligonucleotide
  Sense strand starting at position 863 of SEQ ID NO: 317108
guggaaggcuggguucaua

SEQ ID NO: 465050 - RNA, 19 nt, Artificial Sequence
  Description of Artificial Sequence: Synthetic oligonucleotide
  Antisense Strand to SEQ ID NO: 465049
uaugaacccagccuuccac

SEQ ID NO: 465051 - RNA, 19 nt, Artificial Sequence
  Description of Artificial Sequence: Synthetic oligonucleotide
  Sense strand starting at position 887 of SEQ ID NO: 317108
caggguuccuaagucuuaa

SEQ ID NO: 465052 - RNA, 19 nt, Artificial Sequence
  Description of Artificial Sequence: Synthetic oligonucleotide
  Antisense Strand to SEQ ID NO: 465051
uuaagacuuaggaacccug

SEQ ID NO: 465053 - RNA, 19 nt, Artificial Sequence
  Description of Artificial Sequence: Synthetic oligonucleotide
  Sense strand starting at position 975 of SEQ ID NO: 317108
uaggauaccugguuaaauu

SEQ ID NO: 465054 - RNA, 19 nt, Artificial Sequence
  Description of Artificial Sequence: Synthetic oligonucleotide
  Antisense Strand to SEQ ID NO: 465053
aauuuaaccagguauccua

SEQ ID NO: 465055 - RNA, 19 nt, Artificial Sequence
  Description of Artificial Sequence: Synthetic oligonucleotide
  Sense strand starting at position 1104 of SEQ ID NO: 317108
guaccuuuguuuccuaaau

SEQ ID NO: 465056 - RNA, 19 nt, Artificial Sequence
  Description of Artificial Sequence: Synthetic oligonucleotide
  Antisense Strand to SEQ ID NO: 465055
auuuaggaaacaaagguac

SEQ ID NO: 465057 - RNA, 19 nt, Artificial Sequence
  Description of Artificial Sequence: Synthetic oligonucleotide
  Sense strand starting at position 1129 of SEQ ID NO: 317108
uucuaugggccaggagaaa

SEQ ID NO: 465058 - RNA, 19 nt, Artificial Sequence
  Description of Artificial Sequence: Synthetic oligonucleotide
  Antisense Strand to SEQ ID NO: 465057
uuucuccuggcccauagaa

SEQ ID NO: 465059 - RNA, 19 nt, Artificial Sequence
  Description of Artificial Sequence: Synthetic oligonucleotide
  Sense strand starting at position 1386 of SEQ ID NO: 317108
gggucagacagccauaguu

SEQ ID NO: 465060 - RNA, 19 nt, Artificial Sequence
  Description of Artificial Sequence: Synthetic oligonucleotide
  Antisense Strand to SEQ ID NO: 465059
aacuauggcugucugaccc

SEQ ID NO: 465061 - RNA, 19 nt, Artificial Sequence
  Description of Artificial Sequence: Synthetic oligonucleotide
  Sense strand starting at position 1752 of SEQ ID NO: 317108
ugguuugaguuauccugua

SEQ ID NO: 465062 - RNA, 19 nt, Artificial Sequence
  Description of Artificial Sequence: Synthetic oligonucleotide
  Antisense Strand to SEQ ID NO: 465061
uacaggauaacucaaacca

SEQ ID NO: 465063 - RNA, 19 nt, Artificial Sequence
  Description of Artificial Sequence: Synthetic oligonucleotide
  Sense strand starting at position 1757 of SEQ ID NO: 317108
ugaguuauccuguagaugg

SEQ ID NO: 465064 - RNA, 19 nt, Artificial Sequence
  Description of Artificial Sequence: Synthetic oligonucleotide
  Antisense Strand to SEQ ID NO: 465063
ccaucuacaggauaacuca

SEQ ID NO: 465065 - RNA, 19 nt, Artificial Sequence
  Description of Artificial Sequence: Synthetic oligonucleotide
  Sense strand starting at position 1761 of SEQ ID NO: 317108
uuauccuguagauggagaa

SEQ ID NO: 465066 - RNA, 19 nt, Artificial Sequence
  Description of Artificial Sequence: Synthetic oligonucleotide
  Antisense Strand to SEQ ID NO: 465065
uucuccaucuacaggauaa

SEQ ID NO: 465067 - RNA, 19 nt, Artificial Sequence
  Description of Artificial Sequence: Synthetic oligonucleotide
  Sense strand starting at position 2015 of SEQ ID NO: 317108
gguucagcgcgugcuauaa

SEQ ID NO: 465068 - RNA, 19 nt, Artificial Sequence
  Description of Artificial Sequence: Synthetic oligonucleotide
  Antisense Strand to SEQ ID NO: 465067
uuauagcacgcgcugaacc

SEQ ID NO: 465069 - RNA, 19 nt, Artificial Sequence
  Description of Artificial Sequence: Synthetic oligonucleotide
  Sense strand starting at position 2123 of SEQ ID NO: 317108
aggugacuuuccucgagug

SEQ ID NO: 465070 - RNA, 19 nt, Artificial Sequence
  Description of Artificial Sequence: Synthetic oligonucleotide
  Antisense Strand to SEQ ID NO: 465069
cacucgaggaaagucaccu

SEQ ID NO: 465071 - RNA, 19 nt, Artificial Sequence
  Description of Artificial Sequence: Synthetic oligonucleotide
  Sense strand starting at position 2133 of SEQ ID NO: 317108
ccucgaguggcuuaucaaa

SEQ ID NO: 465072 - RNA, 19 nt, Artificial Sequence
  Description of Artificial Sequence: Synthetic oligonucleotide
  Antisense Strand to SEQ ID NO: 465071
uuugauaagccacucgagg

SEQ ID NO: 465073 - RNA, 19 nt, Artificial Sequence
  Description of Artificial Sequence: Synthetic oligonucleotide
  Sense strand starting at position 2173 of SEQ ID NO: 317108
acuagagcaucaguaggau

SEQ ID NO: 465074 - RNA, 19 nt, Artificial Sequence
  Description of Artificial Sequence: Synthetic oligonucleotide
  Antisense Strand to SEQ ID NO: 465073
auccuacugaugcucuagu

SEQ ID NO: 465075 - RNA, 19 nt, Artificial Sequence
  Description of Artificial Sequence: Synthetic oligonucleotide
  Sense strand starting at position 2179 of SEQ ID NO: 317108
gcaucaguaggaugagacu

SEQ ID NO: 465076 - RNA, 19 nt, Artificial Sequence
  Description of Artificial Sequence: Synthetic oligonucleotide
  Antisense Strand to SEQ ID NO: 465075
agucucauccuacugaugc

SEQ ID NO: 465077 - RNA, 19 nt, Artificial Sequence
  Description of Artificial Sequence: Synthetic oligonucleotide
  Sense strand starting at position 2229 of SEQ ID NO: 317108
gcucuccucucauugagga

SEQ ID NO: 465078 - RNA, 19 nt, Artificial Sequence
  Description of Artificial Sequence: Synthetic oligonucleotide
  Antisense Strand to SEQ ID NO: 465077
uccucaaugagaggagagc

SEQ ID NO: 465079 - RNA, 19 nt, Artificial Sequence
  Description of Artificial Sequence: Synthetic oligonucleotide
  Sense strand starting at position 2383 of SEQ ID NO: 317108
gcguguucucaugugcuaa

SEQ ID NO: 465080 - RNA, 19 nt, Artificial Sequence
  Description of Artificial Sequence: Synthetic oligonucleotide
  Antisense Strand to SEQ ID NO: 465079
uuagcacaugagaacacgc

SEQ ID NO: 465081 - RNA, 19 nt, Artificial Sequence
  Description of Artificial Sequence: Synthetic oligonucleotide
  Sense strand starting at position 2410 of SEQ ID NO: 317108
agcugugacuuuccauuga

SEQ ID NO: 465082 - RNA, 19 nt, Artificial Sequence
  Description of Artificial Sequence: Synthetic oligonucleotide
  Antisense Strand to SEQ ID NO: 465081
ucaauggaaagucacagcu

SEQ ID NO: 465083 - RNA, 19 nt, Artificial Sequence
  Description of Artificial Sequence: Synthetic oligonucleotide
  Sense strand starting at position 2523 of SEQ ID NO: 317108
uuggcugagcucuacugaa

SEQ ID NO: 465084 - RNA, 19 nt, Artificial Sequence
  Description of Artificial Sequence: Synthetic oligonucleotide
  Antisense Strand to SEQ ID NO: 465083
uucaguagagcucagccaa

SEQ ID NO: 465085 - RNA, 19 nt, Artificial Sequence
  Description of Artificial Sequence: Synthetic oligonucleotide
  Sense strand starting at position 2564 of SEQ ID NO: 317108
gcuugauguacuggauggu

SEQ ID NO: 465086 - RNA, 19 nt, Artificial Sequence
  Description of Artificial Sequence: Synthetic oligonucleotide
  Antisense Strand to SEQ ID NO: 465085
accauccaguacaucaagc

SEQ ID NO: 465087 - RNA, 19 nt, Artificial Sequence
  Description of Artificial Sequence: Synthetic oligonucleotide
  Sense strand starting at position 2814 of SEQ ID NO: 317108
uucccagagucccuugauu

SEQ ID NO: 465088 - RNA, 19 nt, Artificial Sequence
  Description of Artificial Sequence: Synthetic oligonucleotide
  Antisense Strand to SEQ ID NO: 465087
aaucaagggacucugggaa

SEQ ID NO: 465089 - RNA, 19 nt, Artificial Sequence
  Description of Artificial Sequence: Synthetic oligonucleotide
  Sense strand starting at position 2842 of SEQ ID NO: 317108
gcaucauaguucuucuuac

SEQ ID NO: 465090 - RNA, 19 nt, Artificial Sequence
  Description of Artificial Sequence: Synthetic oligonucleotide
  Antisense Strand to SEQ ID NO: 465089
guaagaagaacuaugaugc

SEQ ID NO: 465091 - RNA, 19 nt, Artificial Sequence
  Description of Artificial Sequence: Synthetic oligonucleotide
  Sense strand starting at position 2912 of SEQ ID NO: 317108
uaccuaaaggauuguguuu

SEQ ID NO: 465092 - RNA, 19 nt, Artificial Sequence
  Description of Artificial Sequence: Synthetic oligonucleotide
  Antisense Strand to SEQ ID NO: 465091
aaacacaauccuuuaggua

SEQ ID NO: 465093 - RNA, 19 nt, Artificial Sequence
  Description of Artificial Sequence: Synthetic oligonucleotide
  Sense strand starting at position 2917 of SEQ ID NO: 317108
aaaggauuguguuucuguu

SEQ ID NO: 465094 - RNA, 19 nt, Artificial Sequence
  Description of Artificial Sequence: Synthetic oligonucleotide
  Antisense Strand to SEQ ID NO: 465093
aacagaaacacaauccuuu

SEQ ID NO: 465095 - RNA, 19 nt, Artificial Sequence
  Description of Artificial Sequence: Synthetic oligonucleotide
  Sense strand starting at position 2959 of SEQ ID NO: 317108
agaugaucacagugacauu

SEQ ID NO: 465096 - RNA, 19 nt, Artificial Sequence
  Description of Artificial Sequence: Synthetic oligonucleotide
  Antisense Strand to SEQ ID NO: 465095
aaugucacugugaucaucu

SEQ ID NO: 465097 - RNA, 19 nt, Artificial Sequence
  Description of Artificial Sequence: Synthetic oligonucleotide
  Sense strand starting at position 3000 of SEQ ID NO: 317108
ggaucuacccucugcaauc

SEQ ID NO: 465098 - RNA, 19 nt, Artificial Sequence
  Description of Artificial Sequence: Synthetic oligonucleotide
  Antisense Strand to SEQ ID NO: 465097
gauugcagaggguagaucc

SEQ ID NO: 465099 - RNA, 19 nt, Artificial Sequence
  Description of Artificial Sequence: Synthetic oligonucleotide
  Sense strand starting at position 3081 of SEQ ID NO: 317108
agcuccacuccugaaugaa

SEQ ID NO: 465100 - RNA, 19 nt, Artificial Sequence
  Description of Artificial Sequence: Synthetic oligonucleotide
  Antisense Strand to SEQ ID NO: 465099
uucauucaggaguggagcu

SEQ ID NO: 465101 - RNA, 19 nt, Artificial Sequence
  Description of Artificial Sequence: Synthetic oligonucleotide
  Sense strand starting at position 3274 of SEQ ID NO: 317108
guccucucugaccauugaa

SEQ ID NO: 465102 - RNA, 19 nt, Artificial Sequence
  Description of Artificial Sequence: Synthetic oligonucleotide
  Antisense Strand to SEQ ID NO: 465101
uucaauggucagagaggac

SEQ ID NO: 465103 - RNA, 19 nt, Artificial Sequence
  Description of Artificial Sequence: Synthetic oligonucleotide
  Sense strand starting at position 3710 of SEQ ID NO: 317108
aaguuacacccaugguuga

SEQ ID NO: 465104 - RNA, 19 nt, Artificial Sequence
  Description of Artificial Sequence: Synthetic oligonucleotide
  Antisense Strand to SEQ ID NO: 465103
ucaaccauggguguaacuu

SEQ ID NO: 465105 - RNA, 19 nt, Artificial Sequence
  Description of Artificial Sequence: Synthetic oligonucleotide
  Sense strand starting at position 3759 of SEQ ID NO: 317108
acugguaguuguccaaaga

SEQ ID NO: 465106 - RNA, 19 nt, Artificial Sequence
  Description of Artificial Sequence: Synthetic oligonucleotide
  Antisense Strand to SEQ ID NO: 465105
ucuuuggacaacuaccagu

SEQ ID NO: 465107 - RNA, 19 nt, Artificial Sequence
  Description of Artificial Sequence: Synthetic oligonucleotide
  Sense strand starting at position 3760 of SEQ ID NO: 317108
cugguaguuguccaaagaa

SEQ ID NO: 465108 - RNA, 19 nt, Artificial Sequence
  Description of Artificial Sequence: Synthetic oligonucleotide
  Antisense Strand to SEQ ID NO: 465107
uucuuuggacaacuaccag

SEQ ID NO: 465109 - RNA, 19 nt, Artificial Sequence
  Description of Artificial Sequence: Synthetic oligonucleotide
  Sense strand starting at position 3795 of SEQ ID NO: 317108
uagcauaaaugguuaugga

SEQ ID NO: 465110 - RNA, 19 nt, Artificial Sequence
  Description of Artificial Sequence: Synthetic oligonucleotide
  Antisense Strand to SEQ ID NO: 465109
uccauaaccauuuaugcua

SEQ ID NO: 465111 - RNA, 19 nt, Artificial Sequence
  Description of Artificial Sequence: Synthetic oligonucleotide
  Sense strand starting at position 3833 of SEQ ID NO: 317108
gcgguagaugccugagaaa

SEQ ID NO: 465112 - RNA, 19 nt, Artificial Sequence
  Description of Artificial Sequence: Synthetic oligonucleotide
  Antisense Strand to SEQ ID NO: 465111
uuucucaggcaucuaccgc

SEQ ID NO: 465113 - RNA, 19 nt, Artificial Sequence
  Description of Artificial Sequence: Synthetic oligonucleotide
  Sense strand starting at position 3875 of SEQ ID NO: 317108
uguguagucaugcaugaua

SEQ ID NO: 465114 - RNA, 19 nt, Artificial Sequence
  Description of Artificial Sequence: Synthetic oligonucleotide
  Antisense Strand to SEQ ID NO: 465113
uaucaugcaugacuacaca

SEQ ID NO: 465115 - RNA, 19 nt, Artificial Sequence
  Description of Artificial Sequence: Synthetic oligonucleotide
  Sense strand starting at position 3877 of SEQ ID NO: 317108
uguagucaugcaugauaca

SEQ ID NO: 465116 - RNA, 19 nt, Artificial Sequence
  Description of Artificial Sequence: Synthetic oligonucleotide
  Antisense Strand to SEQ ID NO: 465115
uguaucaugcaugacuaca

SEQ ID NO: 465117 - RNA, 19 nt, Artificial Sequence
  Description of Artificial Sequence: Synthetic oligonucleotide
  Sense strand starting at position 464 of SEQ ID NO: 317109
cuaaauuagguuuagccua

SEQ ID NO: 465118 - RNA, 19 nt, Artificial Sequence
  Description of Artificial Sequence: Synthetic oligonucleotide
  Antisense Strand to SEQ ID NO: 465117
uaggcuaaaccuaauuuag

SEQ ID NO: 465119 - RNA, 19 nt, Artificial Sequence
  Description of Artificial Sequence: Synthetic oligonucleotide
  Sense strand starting at position 531 of SEQ ID NO: 317109
caucgugaacuauaugcuu

SEQ ID NO: 465120 - RNA, 19 nt, Artificial Sequence
  Description of Artificial Sequence: Synthetic oligonucleotide
  Antisense Strand to SEQ ID NO: 465119
aagcauauaguucacgaug

SEQ ID NO: 465121 - RNA, 19 nt, Artificial Sequence
  Description of Artificial Sequence: Synthetic oligonucleotide
  Sense strand starting at position 652 of SEQ ID NO: 317109
cugugaaucguucuuugcu

SEQ ID NO: 465122 - RNA, 19 nt, Artificial Sequence
  Description of Artificial Sequence: Synthetic oligonucleotide
  Antisense Strand to SEQ ID NO: 465121
agcaaagaacgauucacag

SEQ ID NO: 465123 - RNA, 19 nt, Artificial Sequence
  Description of Artificial Sequence: Synthetic oligonucleotide
  Sense strand starting at position 718 of SEQ ID NO: 317109
agaucuaagugcuucuuua

SEQ ID NO: 465124 - RNA, 19 nt, Artificial Sequence
  Description of Artificial Sequence: Synthetic oligonucleotide
  Antisense Strand to SEQ ID NO: 465123
uaaagaagcacuuagaucu

SEQ ID NO: 465125 - RNA, 19 nt, Artificial Sequence
  Description of Artificial Sequence: Synthetic oligonucleotide
  Sense strand starting at position 726 of SEQ ID NO: 317109
gugcuucuuuaauuagaaa

SEQ ID NO: 465126 - RNA, 19 nt, Artificial Sequence
  Description of Artificial Sequence: Synthetic oligonucleotide
  Antisense Strand to SEQ ID NO: 465125
uuucuaauuaaagaagcac

SEQ ID NO: 465127 - RNA, 19 nt, Artificial Sequence
  Description of Artificial Sequence: Synthetic oligonucleotide
  Sense strand starting at position 765 of SEQ ID NO: 317109
acaacagauugugugaauc

SEQ ID NO: 465128 - RNA, 19 nt, Artificial Sequence
  Description of Artificial Sequence: Synthetic oligonucleotide
  Antisense Strand to SEQ ID NO: 465127
gauucacacaaucuguugu

SEQ ID NO: 465129 - RNA, 19 nt, Artificial Sequence
  Description of Artificial Sequence: Synthetic oligonucleotide
  Sense strand starting at position 844 of SEQ ID NO: 317109
uaggcaagacauugagcau

SEQ ID NO: 465130 - RNA, 19 nt, Artificial Sequence
  Description of Artificial Sequence: Synthetic oligonucleotide
  Antisense Strand to SEQ ID NO: 465129
augcucaaugucuugccua

SEQ ID NO: 465131 - RNA, 19 nt, Artificial Sequence
  Description of Artificial Sequence: Synthetic oligonucleotide
  Sense strand starting at position 877 of SEQ ID NO: 317109
acuggauccucagcuguga

SEQ ID NO: 465132 - RNA, 19 nt, Artificial Sequence
  Description of Artificial Sequence: Synthetic oligonucleotide
  Antisense Strand to SEQ ID NO: 465131
ucacagcugaggauccagu

SEQ ID NO: 465133 - RNA, 19 nt, Artificial Sequence
  Description of Artificial Sequence: Synthetic oligonucleotide
  Sense strand starting at position 919 of SEQ ID NO: 317109
guguaaccugagcagucua

SEQ ID NO: 465134 - RNA, 19 nt, Artificial Sequence
  Description of Artificial Sequence: Synthetic oligonucleotide
  Antisense Strand to SEQ ID NO: 465133
uagacugcucagguuacac

SEQ ID NO: 465135 - RNA, 19 nt, Artificial Sequence
  Description of Artificial Sequence: Synthetic oligonucleotide
  Sense strand starting at position 945 of SEQ ID NO: 317109
gcccuauuuccugguacag

SEQ ID NO: 465136 - RNA, 19 nt, Artificial Sequence
  Description of Artificial Sequence: Synthetic oligonucleotide
  Antisense Strand to SEQ ID NO: 465135
cuguaccaggaaauagggc

SEQ ID NO: 465137 - RNA, 19 nt, Artificial Sequence
  Description of Artificial Sequence: Synthetic oligonucleotide
  Sense strand starting at position 960 of SEQ ID NO: 317109
acaggcauacuuggaaaua

SEQ ID NO: 465138 - RNA, 19 nt, Artificial Sequence
  Description of Artificial Sequence: Synthetic oligonucleotide
  Antisense Strand to SEQ ID NO: 465137
uauuuccaaguaugccugu

SEQ ID NO: 465139 - RNA, 19 nt, Artificial Sequence
  Description of Artificial Sequence: Synthetic oligonucleotide
  Sense strand starting at position 984 of SEQ ID NO: 317109
aaauaugcaugcuugguaa

SEQ ID NO: 465140 - RNA, 19 nt, Artificial Sequence
  Description of Artificial Sequence: Synthetic oligonucleotide
  Antisense Strand to SEQ ID NO: 465139
uuaccaagcaugcauauuu

SEQ ID NO: 465141 - RNA, 19 nt, Artificial Sequence
  Description of Artificial Sequence: Synthetic oligonucleotide
  Sense strand starting at position 987 of SEQ ID NO: 317109
uaugcaugcuugguaagaa

SEQ ID NO: 465142 - RNA, 19 nt, Artificial Sequence
  Description of Artificial Sequence: Synthetic oligonucleotide
  Antisense Strand to SEQ ID NO: 465141
uucuuaccaagcaugcaua

SEQ ID NO: 465143 - RNA, 19 nt, Artificial Sequence
  Description of Artificial Sequence: Synthetic oligonucleotide
  Sense strand starting at position 1040 of SEQ ID NO: 317109
gcugacauuguagguaaga

SEQ ID NO: 465144 - RNA, 19 nt, Artificial Sequence
  Description of Artificial Sequence: Synthetic oligonucleotide
  Antisense Strand to SEQ ID NO: 465143
ucuuaccuacaaugucagc

SEQ ID NO: 465145 - RNA, 19 nt, Artificial Sequence
  Description of Artificial Sequence: Synthetic oligonucleotide
  Sense strand starting at position 1041 of SEQ ID NO: 317109
cugacauuguagguaagau

SEQ ID NO: 465146 - RNA, 19 nt, Artificial Sequence
  Description of Artificial Sequence: Synthetic oligonucleotide
  Antisense Strand to SEQ ID NO: 465145
aucuuaccuacaaugucag

SEQ ID NO: 465147 - RNA, 19 nt, Artificial Sequence
  Description of Artificial Sequence: Synthetic oligonucleotide
  Sense strand starting at position 1070 of SEQ ID NO: 317109
gagcaaaugugacucccau

SEQ ID NO: 465148 - RNA, 19 nt, Artificial Sequence
  Description of Artificial Sequence: Synthetic oligonucleotide
  Antisense Strand to SEQ ID NO: 465147
augggagucacauuugcuc

SEQ ID NO: 465149 - RNA, 19 nt, Artificial Sequence
  Description of Artificial Sequence: Synthetic oligonucleotide
  Sense strand starting at position 1076 of SEQ ID NO: 317109
augugacucccauggagua

SEQ ID NO: 465150 - RNA, 19 nt, Artificial Sequence
  Description of Artificial Sequence: Synthetic oligonucleotide
  Antisense Strand to SEQ ID NO: 465149
uacuccaugggagucacau

SEQ ID NO: 465151 - RNA, 19 nt, Artificial Sequence
  Description of Artificial Sequence: Synthetic oligonucleotide
  Sense strand starting at position 1077 of SEQ ID NO: 317109
ugugacucccauggaguaa

SEQ ID NO: 465152 - RNA, 19 nt, Artificial Sequence
  Description of Artificial Sequence: Synthetic oligonucleotide
  Antisense Strand to SEQ ID NO: 465151
uuacuccaugggagucaca

SEQ ID NO: 465153 - RNA, 19 nt, Artificial Sequence
  Description of Artificial Sequence: Synthetic oligonucleotide
  Sense strand starting at position 1392 of SEQ ID NO: 317109
gugggucguaaucacagau

SEQ ID NO: 465154 - RNA, 19 nt, Artificial Sequence
  Description of Artificial Sequence: Synthetic oligonucleotide
  Antisense Strand to SEQ ID NO: 465153
aucugugauuacgacccac

SEQ ID NO: 465155 - RNA, 19 nt, Artificial Sequence
  Description of Artificial Sequence: Synthetic oligonucleotide
  Sense strand starting at position 1396 of SEQ ID NO: 317109
gucguaaucacagaugaug

SEQ ID NO: 465156 - RNA, 19 nt, Artificial Sequence
  Description of Artificial Sequence: Synthetic oligonucleotide
  Antisense Strand to SEQ ID NO: 465155
caucaucugugauuacgac

SEQ ID NO: 465157 - RNA, 19 nt, Artificial Sequence
  Description of Artificial Sequence: Synthetic oligonucleotide
  Sense strand starting at position 1398 of SEQ ID NO: 317109
cguaaucacagaugaugca

SEQ ID NO: 465158 - RNA, 19 nt, Artificial Sequence
  Description of Artificial Sequence: Synthetic oligonucleotide
  Antisense Strand to SEQ ID NO: 465157
ugcaucaucugugauuacg

SEQ ID NO: 465159 - RNA, 19 nt, Artificial Sequence
  Description of Artificial Sequence: Synthetic oligonucleotide
  Sense strand starting at position 1467 of SEQ ID NO: 317109
ucuggaauguucucagucu

SEQ ID NO: 465160 - RNA, 19 nt, Artificial Sequence
  Description of Artificial Sequence: Synthetic oligonucleotide
  Antisense Strand to SEQ ID NO: 465159
agacugagaacauuccaga

SEQ ID NO: 465161 - RNA, 19 nt, Artificial Sequence
  Description of Artificial Sequence: Synthetic oligonucleotide
  Sense strand starting at position 2258 of SEQ ID NO: 317109
cccagucuagcagauuaca

SEQ ID NO: 465162 - RNA, 19 nt, Artificial Sequence
  Description of Artificial Sequence: Synthetic oligonucleotide
  Antisense Strand to SEQ ID NO: 465161
uguaaucugcuagacuggg

SEQ ID NO: 465163 - RNA, 19 nt, Artificial Sequence
  Description of Artificial Sequence: Synthetic oligonucleotide
  Sense strand starting at position 2708 of SEQ ID NO: 317109
gcaggagaaucugcucuuu

SEQ ID NO: 465164 - RNA, 19 nt, Artificial Sequence
  Description of Artificial Sequence: Synthetic oligonucleotide
  Antisense Strand to SEQ ID NO: 465163
aaagagcagauucuccugc

SEQ ID NO: 465165 - RNA, 19 nt, Artificial Sequence
  Description of Artificial Sequence: Synthetic oligonucleotide
  Sense strand starting at position 2710 of SEQ ID NO: 317109
aggagaaucugcucuuuag

SEQ ID NO: 465166 - RNA, 19 nt, Artificial Sequence
  Description of Artificial Sequence: Synthetic oligonucleotide
  Antisense Strand to SEQ ID NO: 465165
cuaaagagcagauucuccu

SEQ ID NO: 465167 - RNA, 19 nt, Artificial Sequence
  Description of Artificial Sequence: Synthetic oligonucleotide
  Sense strand starting at position 2713 of SEQ ID NO: 317109
agaaucugcucuuuagaga

SEQ ID NO: 465168 - RNA, 19 nt, Artificial Sequence
  Description of Artificial Sequence: Synthetic oligonucleotide
  Antisense Strand to SEQ ID NO: 465167
ucucuaaagagcagauucu

SEQ ID NO: 465169 - RNA, 19 nt, Artificial Sequence
  Description of Artificial Sequence: Synthetic oligonucleotide
  Sense strand starting at position 2720 of SEQ ID NO: 317109
gcucuuuagagaugcagau

SEQ ID NO: 465170 - RNA, 19 nt, Artificial Sequence
  Description of Artificial Sequence: Synthetic oligonucleotide
  Antisense Strand to SEQ ID NO: 465169
aucugcaucucuaaagagc

SEQ ID NO: 465171 - RNA, 19 nt, Artificial Sequence
  Description of Artificial Sequence: Synthetic oligonucleotide
  Sense strand starting at position 2732 of SEQ ID NO: 317109
ugcagauucuggccuggaa

SEQ ID NO: 465172 - RNA, 19 nt, Artificial Sequence
  Description of Artificial Sequence: Synthetic oligonucleotide
  Antisense Strand to SEQ ID NO: 465171
uuccaggccagaaucugca

SEQ ID NO: 465173 - RNA, 19 nt, Artificial Sequence
  Description of Artificial Sequence: Synthetic oligonucleotide
  Sense strand starting at position 2735 of SEQ ID NO: 317109
agauucuggccuggaagga

SEQ ID NO: 465174 - RNA, 19 nt, Artificial Sequence
  Description of Artificial Sequence: Synthetic oligonucleotide
  Antisense Strand to SEQ ID NO: 465173
uccuuccaggccagaaucu

SEQ ID NO: 465175 - RNA, 19 nt, Artificial Sequence
  Description of Artificial Sequence: Synthetic oligonucleotide
  Sense strand starting at position 3097 of SEQ ID NO: 317109
gcaccauuagaggguauau

SEQ ID NO: 465176 - RNA, 19 nt, Artificial Sequence
  Description of Artificial Sequence: Synthetic oligonucleotide
  Antisense Strand to SEQ ID NO: 465175
auauacccucuaauggugc

SEQ ID NO: 465177 - RNA, 19 nt, Artificial Sequence
  Description of Artificial Sequence: Synthetic oligonucleotide
  Sense strand starting at position 3107 of SEQ ID NO: 317109
aggguauaucuuggcucaa

SEQ ID NO: 465178 - RNA, 19 nt, Artificial Sequence
  Description of Artificial Sequence: Synthetic oligonucleotide
  Antisense Strand to SEQ ID NO: 465177
uugagccaagauauacccu

SEQ ID NO: 465179 - RNA, 19 nt, Artificial Sequence
  Description of Artificial Sequence: Synthetic oligonucleotide
  Sense strand starting at position 3108 of SEQ ID NO: 317109
ggguauaucuuggcucaag

SEQ ID NO: 465180 - RNA, 19 nt, Artificial Sequence
  Description of Artificial Sequence: Synthetic oligonucleotide
  Antisense Strand to SEQ ID NO: 465179
cuugagccaagauauaccc

SEQ ID NO: 465181 - RNA, 19 nt, Artificial Sequence
  Description of Artificial Sequence: Synthetic oligonucleotide
  Sense strand starting at position 3154 of SEQ ID NO: 317109
gguggcuuacaauagcaau

SEQ ID NO: 465182 - RNA, 19 nt, Artificial Sequence
  Description of Artificial Sequence: Synthetic oligonucleotide
  Antisense Strand to SEQ ID NO: 465181
auugcuauuguaagccacc

SEQ ID NO: 465183 - RNA, 19 nt, Artificial Sequence
  Description of Artificial Sequence: Synthetic oligonucleotide
  Sense strand starting at position 3168 of SEQ ID NO: 317109
gcaauuuauucgucacagu

SEQ ID NO: 465184 - RNA, 19 nt, Artificial Sequence
  Description of Artificial Sequence: Synthetic oligonucleotide
  Antisense Strand to SEQ ID NO: 465183
acugugacgaauaaauugc

SEQ ID NO: 465185 - RNA, 19 nt, Artificial Sequence
  Description of Artificial Sequence: Synthetic oligonucleotide
  Sense strand starting at position 3302 of SEQ ID NO: 317109
ccuggucacuucuuauaag

SEQ ID NO: 465186 - RNA, 19 nt, Artificial Sequence
  Description of Artificial Sequence: Synthetic oligonucleotide
  Antisense Strand to SEQ ID NO: 465185
cuuauaagaagugaccagg

SEQ ID NO: 465187 - RNA, 19 nt, Artificial Sequence
  Description of Artificial Sequence: Synthetic oligonucleotide
  Sense strand starting at position 3376 of SEQ ID NO: 317109
cugccaaaugccugauaac

SEQ ID NO: 465188 - RNA, 19 nt, Artificial Sequence
  Description of Artificial Sequence: Synthetic oligonucleotide
  Antisense Strand to SEQ ID NO: 465187
guuaucaggcauuuggcag

SEQ ID NO: 465189 - RNA, 19 nt, Artificial Sequence
  Description of Artificial Sequence: Synthetic oligonucleotide
  Sense strand starting at position 3377 of SEQ ID NO: 317109
ugccaaaugccugauaaca

SEQ ID NO: 465190 - RNA, 19 nt, Artificial Sequence
  Description of Artificial Sequence: Synthetic oligonucleotide
  Antisense Strand to SEQ ID NO: 465189
uguuaucaggcauuuggca

SEQ ID NO: 465191 - RNA, 19 nt, Artificial Sequence
  Description of Artificial Sequence: Synthetic oligonucleotide
  Sense strand starting at position 3571 of SEQ ID NO: 317109
gcuaauaagagcugaagag

SEQ ID NO: 465192 - RNA, 19 nt, Artificial Sequence
  Description of Artificial Sequence: Synthetic oligonucleotide
  Antisense Strand to SEQ ID NO: 465191
cucuucagcucuuauuagc

SEQ ID NO: 465193 - RNA, 19 nt, Artificial Sequence
  Description of Artificial Sequence: Synthetic oligonucleotide
  Sense strand starting at position 3675 of SEQ ID NO: 317109
guguucugugugucugcaa

SEQ ID NO: 465194 - RNA, 19 nt, Artificial Sequence
  Description of Artificial Sequence: Synthetic oligonucleotide
  Antisense Strand to SEQ ID NO: 465193
uugcagacacacagaacac

SEQ ID NO: 465195 - RNA, 19 nt, Artificial Sequence
  Description of Artificial Sequence: Synthetic oligonucleotide
  Sense strand starting at position 3979 of SEQ ID NO: 317109
cuguuugcucuugaaauca

SEQ ID NO: 465196 - RNA, 19 nt, Artificial Sequence
  Description of Artificial Sequence: Synthetic oligonucleotide
  Antisense Strand to SEQ ID NO: 465195
ugauuucaagagcaaacag

SEQ ID NO: 465197 - RNA, 19 nt, Artificial Sequence
  Description of Artificial Sequence: Synthetic oligonucleotide
  Sense strand starting at position 29 of SEQ ID NO: 317110
cuuaaaugugcuugagaag

SEQ ID NO: 465198 - RNA, 19 nt, Artificial Sequence
  Description of Artificial Sequence: Synthetic oligonucleotide
  Antisense Strand to SEQ ID NO: 465197
cuucucaagcacauuuaag

SEQ ID NO: 465199 - RNA, 19 nt, Artificial Sequence
  Description of Artificial Sequence: Synthetic oligonucleotide
  Sense strand starting at position 30 of SEQ ID NO: 317110
uuaaaugugcuugagaagu

SEQ ID NO: 465200 - RNA, 19 nt, Artificial Sequence
  Description of Artificial Sequence: Synthetic oligonucleotide
  Antisense Strand to SEQ ID NO: 465199
acuucucaagcacauuuaa

SEQ ID NO: 465201 - RNA, 19 nt, Artificial Sequence
  Description of Artificial Sequence: Synthetic oligonucleotide
  Sense strand starting at position 207 of SEQ ID NO: 317110
uuaagaucuacguaucagg

SEQ ID NO: 465202 - RNA, 19 nt, Artificial Sequence
  Description of Artificial Sequence: Synthetic oligonucleotide
  Antisense Strand to SEQ ID NO: 465201
ccugauacguagaucuuaa

SEQ ID NO: 465203 - RNA, 19 nt, Artificial Sequence
  Description of Artificial Sequence: Synthetic oligonucleotide
  Sense strand starting at position 224 of SEQ ID NO: 317110
ggaucauggugaguauaaa

SEQ ID NO: 465204 - RNA, 19 nt, Artificial Sequence
  Description of Artificial Sequence: Synthetic oligonucleotide
  Antisense Strand to SEQ ID NO: 465203
uuuauacucaccaugaucc

SEQ ID NO: 465205 - RNA, 19 nt, Artificial Sequence
  Description of Artificial Sequence: Synthetic oligonucleotide
  Sense strand starting at position 234 of SEQ ID NO: 317110
gaguauaaaugaguaugca

SEQ ID NO: 465206 - RNA, 19 nt, Artificial Sequence
  Description of Artificial Sequence: Synthetic oligonucleotide
  Antisense Strand to SEQ ID NO: 465205
ugcauacucauuuauacuc

SEQ ID NO: 465207 - RNA, 19 nt, Artificial Sequence
  Description of Artificial Sequence: Synthetic oligonucleotide
  Sense strand starting at position 235 of SEQ ID NO: 317110
aguauaaaugaguaugcau

SEQ ID NO: 465208 - RNA, 19 nt, Artificial Sequence
  Description of Artificial Sequence: Synthetic oligonucleotide
  Antisense Strand to SEQ ID NO: 465207
augcauacucauuuauacu

SEQ ID NO: 465209 - RNA, 19 nt, Artificial Sequence
  Description of Artificial Sequence: Synthetic oligonucleotide
  Sense strand starting at position 237 of SEQ ID NO: 317110
uauaaaugaguaugcauga

SEQ ID NO: 465210 - RNA, 19 nt, Artificial Sequence
  Description of Artificial Sequence: Synthetic oligonucleotide
  Antisense Strand to SEQ ID NO: 465209
ucaugcauacucauuuaua

SEQ ID NO: 465211 - RNA, 19 nt, Artificial Sequence
  Description of Artificial Sequence: Synthetic oligonucleotide
  Sense strand starting at position 286 of SEQ ID NO: 317110
aggugcuaaucaccucuaa

SEQ ID NO: 465212 - RNA, 19 nt, Artificial Sequence
  Description of Artificial Sequence: Synthetic oligonucleotide
  Antisense Strand to SEQ ID NO: 465211
uuagaggugauuagcaccu

SEQ ID NO: 465213 - RNA, 19 nt, Artificial Sequence
  Description of Artificial Sequence: Synthetic oligonucleotide
  Sense strand starting at position 369 of SEQ ID NO: 317110
cugaaaggugaaugugauc

SEQ ID NO: 465214 - RNA, 19 nt, Artificial Sequence
  Description of Artificial Sequence: Synthetic oligonucleotide
  Antisense Strand to SEQ ID NO: 465213
gaucacauucaccuuucag

SEQ ID NO: 465215 - RNA, 19 nt, Artificial Sequence
  Description of Artificial Sequence: Synthetic oligonucleotide
  Sense strand starting at position 374 of SEQ ID NO: 317110
aggugaaugugaucuccuu

SEQ ID NO: 465216 - RNA, 19 nt, Artificial Sequence
  Description of Artificial Sequence: Synthetic oligonucleotide
  Antisense Strand to SEQ ID NO: 465215
aaggagaucacauucaccu

SEQ ID NO: 465217 - RNA, 19 nt, Artificial Sequence
  Description of Artificial Sequence: Synthetic oligonucleotide
  Sense strand starting at position 478 of SEQ ID NO: 317110
uugcgcuugccuuuccaaa

SEQ ID NO: 465218 - RNA, 19 nt, Artificial Sequence
  Description of Artificial Sequence: Synthetic oligonucleotide
  Antisense Strand to SEQ ID NO: 465217
uuuggaaaggcaagcgcaa

SEQ ID NO: 465219 - RNA, 19 nt, Artificial Sequence
  Description of Artificial Sequence: Synthetic oligonucleotide
  Sense strand starting at position 751 of SEQ ID NO: 317110
ugaaccauuguguaagugu

SEQ ID NO: 465220 - RNA, 19 nt, Artificial Sequence
  Description of Artificial Sequence: Synthetic oligonucleotide
  Antisense Strand to SEQ ID NO: 465219
acacuuacacaaugguuca

SEQ ID NO: 465221 - RNA, 19 nt, Artificial Sequence
  Description of Artificial Sequence: Synthetic oligonucleotide
  Sense strand starting at position 959 of SEQ ID NO: 317110
uggcaacaaucagcuaaau

SEQ ID NO: 465222 - RNA, 19 nt, Artificial Sequence
  Description of Artificial Sequence: Synthetic oligonucleotide
  Antisense Strand to SEQ ID NO: 465221
auuuagcugauuguugcca

SEQ ID NO: 465223 - RNA, 19 nt, Artificial Sequence
  Description of Artificial Sequence: Synthetic oligonucleotide
  Sense strand starting at position 1414 of SEQ ID NO: 317110
agaaauacauaugaagaca

SEQ ID NO: 465224 - RNA, 19 nt, Artificial Sequence
  Description of Artificial Sequence: Synthetic oligonucleotide
  Antisense Strand to SEQ ID NO: 465223
ugucuucauauguauuucu

SEQ ID NO: 465225 - RNA, 19 nt, Artificial Sequence
  Description of Artificial Sequence: Synthetic oligonucleotide
  Sense strand starting at position 1488 of SEQ ID NO: 317110
ccuagauacuguuuguaac

SEQ ID NO: 465226 - RNA, 19 nt, Artificial Sequence
  Description of Artificial Sequence: Synthetic oligonucleotide
  Antisense Strand to SEQ ID NO: 465225
guuacaaacaguaucuagg

SEQ ID NO: 465227 - RNA, 19 nt, Artificial Sequence
  Description of Artificial Sequence: Synthetic oligonucleotide
  Sense strand starting at position 1489 of SEQ ID NO: 317110
cuagauacuguuuguaacu

SEQ ID NO: 465228 - RNA, 19 nt, Artificial Sequence
  Description of Artificial Sequence: Synthetic oligonucleotide
  Antisense Strand to SEQ ID NO: 465227
aguuacaaacaguaucuag

SEQ ID NO: 465229 - RNA, 19 nt, Artificial Sequence
  Description of Artificial Sequence: Synthetic oligonucleotide
  Sense strand starting at position 1568 of SEQ ID NO: 317110
cacucuuugguaggaguca

SEQ ID NO: 465230 - RNA, 19 nt, Artificial Sequence
  Description of Artificial Sequence: Synthetic oligonucleotide
  Antisense Strand to SEQ ID NO: 465229
ugacuccuaccaaagagug

SEQ ID NO: 465231 - RNA, 19 nt, Artificial Sequence
  Description of Artificial Sequence: Synthetic oligonucleotide
  Sense strand starting at position 2306 of SEQ ID NO: 317110
gaaguucgaggguaacuuu

SEQ ID NO: 465232 - RNA, 19 nt, Artificial Sequence
  Description of Artificial Sequence: Synthetic oligonucleotide
  Antisense Strand to SEQ ID NO: 465231
aaaguuacccucgaacuuc

SEQ ID NO: 465233 - RNA, 19 nt, Artificial Sequence
  Description of Artificial Sequence: Synthetic oligonucleotide
  Sense strand starting at position 2464 of SEQ ID NO: 317110
agacgcguuacguuugaca

SEQ ID NO: 465234 - RNA, 19 nt, Artificial Sequence
  Description of Artificial Sequence: Synthetic oligonucleotide
  Antisense Strand to SEQ ID NO: 465233
ugucaaacguaacgcgucu

SEQ ID NO: 465235 - RNA, 19 nt, Artificial Sequence
  Description of Artificial Sequence: Synthetic oligonucleotide
  Sense strand starting at position 2475 of SEQ ID NO: 317110
guuugacagaccggugaaa

SEQ ID NO: 465236 - RNA, 19 nt, Artificial Sequence
  Description of Artificial Sequence: Synthetic oligonucleotide
  Antisense Strand to SEQ ID NO: 465235
uuucaccggucugucaaac

SEQ ID NO: 465237 - RNA, 19 nt, Artificial Sequence
  Description of Artificial Sequence: Synthetic oligonucleotide
  Sense strand starting at position 2477 of SEQ ID NO: 317110
uugacagaccggugaaauu

SEQ ID NO: 465238 - RNA, 19 nt, Artificial Sequence
  Description of Artificial Sequence: Synthetic oligonucleotide
  Antisense Strand to SEQ ID NO: 465237
aauuucaccggucugucaa

SEQ ID NO: 465239 - RNA, 19 nt, Artificial Sequence
  Description of Artificial Sequence: Synthetic oligonucleotide
  Sense strand starting at position 2534 of SEQ ID NO: 317110
cucagcguucugccgaaau

SEQ ID NO: 465240 - RNA, 19 nt, Artificial Sequence
  Description of Artificial Sequence: Synthetic oligonucleotide
  Antisense Strand to SEQ ID NO: 465239
auuucggcagaacgcugag

SEQ ID NO: 465241 - RNA, 19 nt, Artificial Sequence
  Description of Artificial Sequence: Synthetic oligonucleotide
  Sense strand starting at position 2815 of SEQ ID NO: 317110
aacgucuuagaugacauau

SEQ ID NO: 465242 - RNA, 19 nt, Artificial Sequence
  Description of Artificial Sequence: Synthetic oligonucleotide
  Antisense Strand to SEQ ID NO: 465241
auaugucaucuaagacguu

SEQ ID NO: 465243 - RNA, 19 nt, Artificial Sequence
  Description of Artificial Sequence: Synthetic oligonucleotide
  Sense strand starting at position 2890 of SEQ ID NO: 317110
aaauguuugcuauaaugug

SEQ ID NO: 465244 - RNA, 19 nt, Artificial Sequence
  Description of Artificial Sequence: Synthetic oligonucleotide
  Antisense Strand to SEQ ID NO: 465243
cacauuauagcaaacauuu

SEQ ID NO: 465245 - RNA, 19 nt, Artificial Sequence
  Description of Artificial Sequence: Synthetic oligonucleotide
  Sense strand starting at position 2927 of SEQ ID NO: 317110
ggcaguagccaggaucaaa

SEQ ID NO: 465246 - RNA, 19 nt, Artificial Sequence
  Description of Artificial Sequence: Synthetic oligonucleotide
  Antisense Strand to SEQ ID NO: 465245
uuugauccuggcuacugcc

SEQ ID NO: 465247 - RNA, 19 nt, Artificial Sequence
  Description of Artificial Sequence: Synthetic oligonucleotide
  Sense strand starting at position 2971 of SEQ ID NO: 317110
gggcccaugcaguauaauu

SEQ ID NO: 465248 - RNA, 19 nt, Artificial Sequence
  Description of Artificial Sequence: Synthetic oligonucleotide
  Antisense Strand to SEQ ID NO: 465247
aauuauacugcaugggccc

SEQ ID NO: 465249 - RNA, 19 nt, Artificial Sequence
  Description of Artificial Sequence: Synthetic oligonucleotide
  Sense strand starting at position 2979 of SEQ ID NO: 317110
gcaguauaauuaguauaug

SEQ ID NO: 465250 - RNA, 19 nt, Artificial Sequence
  Description of Artificial Sequence: Synthetic oligonucleotide
  Antisense Strand to SEQ ID NO: 465249
cauauacuaauuauacugc

SEQ ID NO: 465251 - RNA, 19 nt, Artificial Sequence
  Description of Artificial Sequence: Synthetic oligonucleotide
  Sense strand starting at position 3078 of SEQ ID NO: 317110
acagguugauucuuacuga

SEQ ID NO: 465252 - RNA, 19 nt, Artificial Sequence
  Description of Artificial Sequence: Synthetic oligonucleotide
  Antisense Strand to SEQ ID NO: 465251
ucaguaagaaucaaccugu

SEQ ID NO: 465253 - RNA, 19 nt, Artificial Sequence
  Description of Artificial Sequence: Synthetic oligonucleotide
  Sense strand starting at position 3081 of SEQ ID NO: 317110
gguugauucuuacugaaua

SEQ ID NO: 465254 - RNA, 19 nt, Artificial Sequence
  Description of Artificial Sequence: Synthetic oligonucleotide
  Antisense Strand to SEQ ID NO: 465253
uauucaguaagaaucaacc

SEQ ID NO: 465255 - RNA, 19 nt, Artificial Sequence
  Description of Artificial Sequence: Synthetic oligonucleotide
  Sense strand starting at position 3176 of SEQ ID NO: 317110
uccaaagauugauuguaga

SEQ ID NO: 465256 - RNA, 19 nt, Artificial Sequence
  Description of Artificial Sequence: Synthetic oligonucleotide
  Antisense Strand to SEQ ID NO: 465255
ucuacaaucaaucuuugga

SEQ ID NO: 465257 - RNA, 19 nt, Artificial Sequence
  Description of Artificial Sequence: Synthetic oligonucleotide
  Sense strand starting at position 3195 of SEQ ID NO: 317110
cucaauagccaaugacaga

SEQ ID NO: 465258 - RNA, 19 nt, Artificial Sequence
  Description of Artificial Sequence: Synthetic oligonucleotide
  Antisense Strand to SEQ ID NO: 465257
ucugucauuggcuauugag

SEQ ID NO: 465259 - RNA, 19 nt, Artificial Sequence
  Description of Artificial Sequence: Synthetic oligonucleotide
  Sense strand starting at position 3231 of SEQ ID NO: 317110
aaaugaagccgaggaucua

SEQ ID NO: 465260 - RNA, 19 nt, Artificial Sequence
  Description of Artificial Sequence: Synthetic oligonucleotide
  Antisense Strand to SEQ ID NO: 465259
uagauccucggcuucauuu

SEQ ID NO: 465261 - RNA, 19 nt, Artificial Sequence
  Description of Artificial Sequence: Synthetic oligonucleotide
  Sense strand starting at position 3304 of SEQ ID NO: 317110
gauugacaguucuugagac

SEQ ID NO: 465262 - RNA, 19 nt, Artificial Sequence
  Description of Artificial Sequence: Synthetic oligonucleotide
  Antisense Strand to SEQ ID NO: 465261
gucucaagaacugucaauc

SEQ ID NO: 465263 - RNA, 19 nt, Artificial Sequence
  Description of Artificial Sequence: Synthetic oligonucleotide
  Sense strand starting at position 3352 of SEQ ID NO: 317110
ugcucaucugaacaauugu

SEQ ID NO: 465264 - RNA, 19 nt, Artificial Sequence
  Description of Artificial Sequence: Synthetic oligonucleotide
  Antisense Strand to SEQ ID NO: 465263
acaauuguucagaugagca

SEQ ID NO: 465265 - RNA, 19 nt, Artificial Sequence
  Description of Artificial Sequence: Synthetic oligonucleotide
  Sense strand starting at position 3377 of SEQ ID NO: 317110
aaggguuacguuugaugaa

SEQ ID NO: 465266 - RNA, 19 nt, Artificial Sequence
  Description of Artificial Sequence: Synthetic oligonucleotide
  Antisense Strand to SEQ ID NO: 465265
uucaucaaacguaacccuu

SEQ ID NO: 465267 - RNA, 19 nt, Artificial Sequence
  Description of Artificial Sequence: Synthetic oligonucleotide
  Sense strand starting at position 3445 of SEQ ID NO: 317110
uugaguuuauccuuaccug

SEQ ID NO: 465268 - RNA, 19 nt, Artificial Sequence
  Description of Artificial Sequence: Synthetic oligonucleotide
  Antisense Strand to SEQ ID NO: 465267
cagguaaggauaaacucaa

SEQ ID NO: 465269 - RNA, 19 nt, Artificial Sequence
  Description of Artificial Sequence: Synthetic oligonucleotide
  Sense strand starting at position 3541 of SEQ ID NO: 317110
ggaacacauuuccauggaa

SEQ ID NO: 465270 - RNA, 19 nt, Artificial Sequence
  Description of Artificial Sequence: Synthetic oligonucleotide
  Antisense Strand to SEQ ID NO: 465269
uuccauggaaauguguucc

SEQ ID NO: 465271 - RNA, 19 nt, Artificial Sequence
  Description of Artificial Sequence: Synthetic oligonucleotide
  Sense strand starting at position 3699 of SEQ ID NO: 317110
accugaaucugauugugag

SEQ ID NO: 465272 - RNA, 19 nt, Artificial Sequence
  Description of Artificial Sequence: Synthetic oligonucleotide
  Antisense Strand to SEQ ID NO: 465271
cucacaaucagauucaggu

SEQ ID NO: 465273 - RNA, 19 nt, Artificial Sequence
  Description of Artificial Sequence: Synthetic oligonucleotide
  Sense strand starting at position 3716 of SEQ ID NO: 317110
aggaaacacugagauaaau

SEQ ID NO: 465274 - RNA, 19 nt, Artificial Sequence
  Description of Artificial Sequence: Synthetic oligonucleotide
  Antisense Strand to SEQ ID NO: 465273
auuuaucucaguguuuccu

SEQ ID NO: 465275 - RNA, 19 nt, Artificial Sequence
  Description of Artificial Sequence: Synthetic oligonucleotide
  Sense strand starting at position 3740 of SEQ ID NO: 317110
augugauuuguucggacuu

SEQ ID NO: 465276 - RNA, 19 nt, Artificial Sequence
  Description of Artificial Sequence: Synthetic oligonucleotide
  Antisense Strand to SEQ ID NO: 465275
aaguccgaacaaaucacau

SEQ ID NO: 465277 - RNA, 19 nt, Artificial Sequence
  Description of Artificial Sequence: Synthetic oligonucleotide
  Sense strand starting at position 385 of SEQ ID NO: 317111
uacagaugacucugagcau

SEQ ID NO: 465278 - RNA, 19 nt, Artificial Sequence
  Description of Artificial Sequence: Synthetic oligonucleotide
  Antisense Strand to SEQ ID NO: 465277
augcucagagucaucugua

SEQ ID NO: 465279 - RNA, 19 nt, Artificial Sequence
  Description of Artificial Sequence: Synthetic oligonucleotide
  Sense strand starting at position 637 of SEQ ID NO: 317111
ugaguuguugagcaccuau

SEQ ID NO: 465280 - RNA, 19 nt, Artificial Sequence
  Description of Artificial Sequence: Synthetic oligonucleotide
  Antisense Strand to SEQ ID NO: 465279
auaggugcucaacaacuca

SEQ ID NO: 465281 - RNA, 19 nt, Artificial Sequence
  Description of Artificial Sequence: Synthetic oligonucleotide
  Sense strand starting at position 647 of SEQ ID NO: 317111
agcaccuauucugugagga

SEQ ID NO: 465282 - RNA, 19 nt, Artificial Sequence
  Description of Artificial Sequence: Synthetic oligonucleotide
  Antisense Strand to SEQ ID NO: 465281
uccucacagaauaggugcu

SEQ ID NO: 465283 - RNA, 19 nt, Artificial Sequence
  Description of Artificial Sequence: Synthetic oligonucleotide
  Sense strand starting at position 648 of SEQ ID NO: 317111
gcaccuauucugugaggag

SEQ ID NO: 465284 - RNA, 19 nt, Artificial Sequence
  Description of Artificial Sequence: Synthetic oligonucleotide
  Antisense Strand to SEQ ID NO: 465283
cuccucacagaauaggugc

SEQ ID NO: 465285 - RNA, 19 nt, Artificial Sequence
  Description of Artificial Sequence: Synthetic oligonucleotide
  Sense strand starting at position 701 of SEQ ID NO: 317111
gaacgagaacccugcaaag

SEQ ID NO: 465286 - RNA, 19 nt, Artificial Sequence
  Description of Artificial Sequence: Synthetic oligonucleotide
  Antisense Strand to SEQ ID NO: 465285
cuuugcaggguucucguuc

SEQ ID NO: 465287 - RNA, 19 nt, Artificial Sequence
  Description of Artificial Sequence: Synthetic oligonucleotide
  Sense strand starting at position 703 of SEQ ID NO: 317111
acgagaacccugcaaaguu

SEQ ID NO: 465288 - RNA, 19 nt, Artificial Sequence
  Description of Artificial Sequence: Synthetic oligonucleotide
  Antisense Strand to SEQ ID NO: 465287
aacuuugcaggguucucgu

SEQ ID NO: 465289 - RNA, 19 nt, Artificial Sequence
  Description of Artificial Sequence: Synthetic oligonucleotide
  Sense strand starting at position 730 of SEQ ID NO: 317111
auugacauuccuuguauua

SEQ ID NO: 465290 - RNA, 19 nt, Artificial Sequence
  Description of Artificial Sequence: Synthetic oligonucleotide
  Antisense Strand to SEQ ID NO: 465289
uaauacaaggaaugucaau

SEQ ID NO: 465291 - RNA, 19 nt, Artificial Sequence
  Description of Artificial Sequence: Synthetic oligonucleotide
  Sense strand starting at position 743 of SEQ ID NO: 317111
guauuaaaucuguaguuuc

SEQ ID NO: 465292 - RNA, 19 nt, Artificial Sequence
  Description of Artificial Sequence: Synthetic oligonucleotide
  Antisense Strand to SEQ ID NO: 465291
gaaacuacagauuuaauac

SEQ ID NO: 465293 - RNA, 19 nt, Artificial Sequence
  Description of Artificial Sequence: Synthetic oligonucleotide
  Sense strand starting at position 956 of SEQ ID NO: 317111
ucauauugugaauaugguu

SEQ ID NO: 465294 - RNA, 19 nt, Artificial Sequence
  Description of Artificial Sequence: Synthetic oligonucleotide
  Antisense Strand to SEQ ID NO: 465293
aaccauauucacaauauga

SEQ ID NO: 465295 - RNA, 19 nt, Artificial Sequence
  Description of Artificial Sequence: Synthetic oligonucleotide
  Sense strand starting at position 961 of SEQ ID NO: 317111
uugugaauaugguugggaa

SEQ ID NO: 465296 - RNA, 19 nt, Artificial Sequence
  Description of Artificial Sequence: Synthetic oligonucleotide
  Antisense Strand to SEQ ID NO: 465295
uucccaaccauauucacaa

SEQ ID NO: 465297 - RNA, 19 nt, Artificial Sequence
  Description of Artificial Sequence: Synthetic oligonucleotide
  Sense strand starting at position 962 of SEQ ID NO: 317111
ugugaauaugguugggaac

SEQ ID NO: 465298 - RNA, 19 nt, Artificial Sequence
  Description of Artificial Sequence: Synthetic oligonucleotide
  Antisense Strand to SEQ ID NO: 465297
guucccaaccauauucaca

SEQ ID NO: 465299 - RNA, 19 nt, Artificial Sequence
  Description of Artificial Sequence: Synthetic oligonucleotide
  Sense strand starting at position 963 of SEQ ID NO: 317111
gugaauaugguugggaaca

SEQ ID NO: 465300 - RNA, 19 nt, Artificial Sequence
  Description of Artificial Sequence: Synthetic oligonucleotide
  Antisense Strand to SEQ ID NO: 465299
uguucccaaccauauucac

SEQ ID NO: 465301 - RNA, 19 nt, Artificial Sequence
  Description of Artificial Sequence: Synthetic oligonucleotide
  Sense strand starting at position 1032 of SEQ ID NO: 317111
cuuggcaaugacuauucua

SEQ ID NO: 465302 - RNA, 19 nt, Artificial Sequence
  Description of Artificial Sequence: Synthetic oligonucleotide
  Antisense Strand to SEQ ID NO: 465301
uagaauagucauugccaag

SEQ ID NO: 465303 - RNA, 19 nt, Artificial Sequence
  Description of Artificial Sequence: Synthetic oligonucleotide
  Sense strand starting at position 1035 of SEQ ID NO: 317111
ggcaaugacuauucuaagu

SEQ ID NO: 465304 - RNA, 19 nt, Artificial Sequence
  Description of Artificial Sequence: Synthetic oligonucleotide
  Antisense Strand to SEQ ID NO: 465303
acuuagaauagucauugcc

SEQ ID NO: 465305 - RNA, 19 nt, Artificial Sequence
  Description of Artificial Sequence: Synthetic oligonucleotide
  Sense strand starting at position 1058 of SEQ ID NO: 317111
cuaccucuauaagugagua

SEQ ID NO: 465306 - RNA, 19 nt, Artificial Sequence
  Description of Artificial Sequence: Synthetic oligonucleotide
  Antisense Strand to SEQ ID NO: 465305
uacucacuuauagagguag

SEQ ID NO: 465307 - RNA, 19 nt, Artificial Sequence
  Description of Artificial Sequence: Synthetic oligonucleotide
  Sense strand starting at position 1062 of SEQ ID NO: 317111
cucuauaagugaguagaaa

SEQ ID NO: 465308 - RNA, 19 nt, Artificial Sequence
  Description of Artificial Sequence: Synthetic oligonucleotide
  Antisense Strand to SEQ ID NO: 465307
uuucuacucacuuauagag

SEQ ID NO: 465309 - RNA, 19 nt, Artificial Sequence
  Description of Artificial Sequence: Synthetic oligonucleotide
  Sense strand starting at position 1250 of SEQ ID NO: 317111
ugcaaucuucuagaccuga

SEQ ID NO: 465310 - RNA, 19 nt, Artificial Sequence
  Description of Artificial Sequence: Synthetic oligonucleotide
  Antisense Strand to SEQ ID NO: 465309
ucaggucuagaagauugca

SEQ ID NO: 465311 - RNA, 19 nt, Artificial Sequence
  Description of Artificial Sequence: Synthetic oligonucleotide
  Sense strand starting at position 2036 of SEQ ID NO: 317111
caguuugagauguguagag

SEQ ID NO: 465312 - RNA, 19 nt, Artificial Sequence
  Description of Artificial Sequence: Synthetic oligonucleotide
  Antisense Strand to SEQ ID NO: 465311
cucuacacaucucaaacug

SEQ ID NO: 465313 - RNA, 19 nt, Artificial Sequence
  Description of Artificial Sequence: Synthetic oligonucleotide
  Sense strand starting at position 2038 of SEQ ID NO: 317111
guuugagauguguagagga

SEQ ID NO: 465314 - RNA, 19 nt, Artificial Sequence
  Description of Artificial Sequence: Synthetic oligonucleotide
  Antisense Strand to SEQ ID NO: 465313
uccucuacacaucucaaac

SEQ ID NO: 465315 - RNA, 19 nt, Artificial Sequence
  Description of Artificial Sequence: Synthetic oligonucleotide
  Sense strand starting at position 2137 of SEQ ID NO: 317111
gugggauggcucuauggaa

SEQ ID NO: 465316 - RNA, 19 nt, Artificial Sequence
  Description of Artificial Sequence: Synthetic oligonucleotide
  Antisense Strand to SEQ ID NO: 465315
uuccauagagccaucccac

SEQ ID NO: 465317 - RNA, 19 nt, Artificial Sequence
  Description of Artificial Sequence: Synthetic oligonucleotide
  Sense strand starting at position 2158 of SEQ ID NO: 317111
gcugaagggucucugacaa

SEQ ID NO: 465318 - RNA, 19 nt, Artificial Sequence
  Description of Artificial Sequence: Synthetic oligonucleotide
  Antisense Strand to SEQ ID NO: 465317
uugucagagacccuucagc

SEQ ID NO: 465319 - RNA, 19 nt, Artificial Sequence
  Description of Artificial Sequence: Synthetic oligonucleotide
  Sense strand starting at position 2330 of SEQ ID NO: 317111
guugauauaggcugaauac

SEQ ID NO: 465320 - RNA, 19 nt, Artificial Sequence
  Description of Artificial Sequence: Synthetic oligonucleotide
  Antisense Strand to SEQ ID NO: 465319
guauucagccuauaucaac

SEQ ID NO: 465321 - RNA, 19 nt, Artificial Sequence
  Description of Artificial Sequence: Synthetic oligonucleotide
  Sense strand starting at position 2444 of SEQ ID NO: 317111
aguguauauccacaugcau

SEQ ID NO: 465322 - RNA, 19 nt, Artificial Sequence
  Description of Artificial Sequence: Synthetic oligonucleotide
  Antisense Strand to SEQ ID NO: 465321
augcauguggauauacacu

SEQ ID NO: 465323 - RNA, 19 nt, Artificial Sequence
  Description of Artificial Sequence: Synthetic oligonucleotide
  Sense strand starting at position 3039 of SEQ ID NO: 317111
ucauaucagucuguuuaaa

SEQ ID NO: 465324 - RNA, 19 nt, Artificial Sequence
  Description of Artificial Sequence: Synthetic oligonucleotide
  Antisense Strand to SEQ ID NO: 465323
uuuaaacagacugauauga

SEQ ID NO: 465325 - RNA, 19 nt, Artificial Sequence
  Description of Artificial Sequence: Synthetic oligonucleotide
  Sense strand starting at position 3208 of SEQ ID NO: 317111
ugcugucaauuugcuaaau

SEQ ID NO: 465326 - RNA, 19 nt, Artificial Sequence
  Description of Artificial Sequence: Synthetic oligonucleotide
  Antisense Strand to SEQ ID NO: 465325
auuuagcaaauugacagca

SEQ ID NO: 465327 - RNA, 19 nt, Artificial Sequence
  Description of Artificial Sequence: Synthetic oligonucleotide
  Sense strand starting at position 3209 of SEQ ID NO: 317111
gcugucaauuugcuaaaug

SEQ ID NO: 465328 - RNA, 19 nt, Artificial Sequence
  Description of Artificial Sequence: Synthetic oligonucleotide
  Antisense Strand to SEQ ID NO: 465327
cauuuagcaaauugacagc

SEQ ID NO: 465329 - RNA, 19 nt, Artificial Sequence
  Description of Artificial Sequence: Synthetic oligonucleotide
  Sense strand starting at position 3314 of SEQ ID NO: 317111
ucagucauugauuguuaaa

SEQ ID NO: 465330 - RNA, 19 nt, Artificial Sequence
  Description of Artificial Sequence: Synthetic oligonucleotide
  Antisense Strand to SEQ ID NO: 465329
uuuaacaaucaaugacuga

SEQ ID NO: 465331 - RNA, 19 nt, Artificial Sequence
  Description of Artificial Sequence: Synthetic oligonucleotide
  Sense strand starting at position 3316 of SEQ ID NO: 317111
agucauugauuguuaaacu

SEQ ID NO: 465332 - RNA, 19 nt, Artificial Sequence
  Description of Artificial Sequence: Synthetic oligonucleotide
  Antisense Strand to SEQ ID NO: 465331
aguuuaacaaucaaugacu

SEQ ID NO: 465333 - RNA, 19 nt, Artificial Sequence
  Description of Artificial Sequence: Synthetic oligonucleotide
  Sense strand starting at position 3446 of SEQ ID NO: 317111
guccuuauuccuggacaca

SEQ ID NO: 465334 - RNA, 19 nt, Artificial Sequence
  Description of Artificial Sequence: Synthetic oligonucleotide
  Antisense Strand to SEQ ID NO: 465333
uguguccaggaauaaggac

SEQ ID NO: 465335 - RNA, 19 nt, Artificial Sequence
  Description of Artificial Sequence: Synthetic oligonucleotide
  Sense strand starting at position 3467 of SEQ ID NO: 317111
gcaccaggauuugaaauaa

SEQ ID NO: 465336 - RNA, 19 nt, Artificial Sequence
  Description of Artificial Sequence: Synthetic oligonucleotide
  Antisense Strand to SEQ ID NO: 465335
uuauuucaaauccuggugc

SEQ ID NO: 465337 - RNA, 19 nt, Artificial Sequence
  Description of Artificial Sequence: Synthetic oligonucleotide
  Sense strand starting at position 3485 of SEQ ID NO: 317111
aggccuaauucuuccuuga

SEQ ID NO: 465338 - RNA, 19 nt, Artificial Sequence
  Description of Artificial Sequence: Synthetic oligonucleotide
  Antisense Strand to SEQ ID NO: 465337
ucaaggaagaauuaggccu

SEQ ID NO: 465339 - RNA, 19 nt, Artificial Sequence
  Description of Artificial Sequence: Synthetic oligonucleotide
  Sense strand starting at position 3504 of SEQ ID NO: 317111
gcuacuaacuacuugggau

SEQ ID NO: 465340 - RNA, 19 nt, Artificial Sequence
  Description of Artificial Sequence: Synthetic oligonucleotide
  Antisense Strand to SEQ ID NO: 465339
aucccaaguaguuaguagc

SEQ ID NO: 465341 - RNA, 19 nt, Artificial Sequence
  Description of Artificial Sequence: Synthetic oligonucleotide
  Sense strand starting at position 3555 of SEQ ID NO: 317111
uuauuuccguaaguguauu

SEQ ID NO: 465342 - RNA, 19 nt, Artificial Sequence
  Description of Artificial Sequence: Synthetic oligonucleotide
  Antisense Strand to SEQ ID NO: 465341
aauacacuuacggaaauaa

SEQ ID NO: 465343 - RNA, 19 nt, Artificial Sequence
  Description of Artificial Sequence: Synthetic oligonucleotide
  Sense strand starting at position 3623 of SEQ ID NO: 317111
cccaaucgacucugauaug

SEQ ID NO: 465344 - RNA, 19 nt, Artificial Sequence
  Description of Artificial Sequence: Synthetic oligonucleotide
  Antisense Strand to SEQ ID NO: 465343
cauaucagagucgauuggg

SEQ ID NO: 465345 - RNA, 19 nt, Artificial Sequence
  Description of Artificial Sequence: Synthetic oligonucleotide
  Sense strand starting at position 3628 of SEQ ID NO: 317111
ucgacucugauauggagua

SEQ ID NO: 465346 - RNA, 19 nt, Artificial Sequence
  Description of Artificial Sequence: Synthetic oligonucleotide
  Antisense Strand to SEQ ID NO: 465345
uacuccauaucagagucga

SEQ ID NO: 465347 - RNA, 19 nt, Artificial Sequence
  Description of Artificial Sequence: Synthetic oligonucleotide
  Sense strand starting at position 3694 of SEQ ID NO: 317111
gccuuaguaaaggagcaaa

SEQ ID NO: 465348 - RNA, 19 nt, Artificial Sequence
  Description of Artificial Sequence: Synthetic oligonucleotide
  Antisense Strand to SEQ ID NO: 465347
uuugcuccuuuacuaaggc

SEQ ID NO: 465349 - RNA, 19 nt, Artificial Sequence
  Description of Artificial Sequence: Synthetic oligonucleotide
  Sense strand starting at position 3734 of SEQ ID NO: 317111
aggaaacgauuaguuacua

SEQ ID NO: 465350 - RNA, 19 nt, Artificial Sequence
  Description of Artificial Sequence: Synthetic oligonucleotide
  Antisense Strand to SEQ ID NO: 465349
uaguaacuaaucguuuccu

SEQ ID NO: 465351 - RNA, 19 nt, Artificial Sequence
  Description of Artificial Sequence: Synthetic oligonucleotide
  Sense strand starting at position 3735 of SEQ ID NO: 317111
ggaaacgauuaguuacuaa

SEQ ID NO: 465352 - RNA, 19 nt, Artificial Sequence
  Description of Artificial Sequence: Synthetic oligonucleotide
  Antisense Strand to SEQ ID NO: 465351
uuaguaacuaaucguuucc

SEQ ID NO: 465353 - RNA, 19 nt, Artificial Sequence
  Description of Artificial Sequence: Synthetic oligonucleotide
  Sense strand starting at position 3856 of SEQ ID NO: 317111
agaaacuagcuuuggcuua

SEQ ID NO: 465354 - RNA, 19 nt, Artificial Sequence
  Description of Artificial Sequence: Synthetic oligonucleotide
  Antisense Strand to SEQ ID NO: 465353
uaagccaaagcuaguuucu

SEQ ID NO: 465355 - RNA, 19 nt, Artificial Sequence
  Description of Artificial Sequence: Synthetic oligonucleotide
  Sense strand starting at position 3861 of SEQ ID NO: 317111
cuagcuuuggcuuauggaa

SEQ ID NO: 465356 - RNA, 19 nt, Artificial Sequence
  Description of Artificial Sequence: Synthetic oligonucleotide
  Antisense Strand to SEQ ID NO: 465355
uuccauaagccaaagcuag

SEQ ID NO: 465357 - RNA, 19 nt, Artificial Sequence
  Description of Artificial Sequence: Synthetic oligonucleotide
  Sense strand starting at position 63 of SEQ ID NO: 317112
ggaguaucauagccagaau

SEQ ID NO: 465358 - RNA, 19 nt, Artificial Sequence
  Description of Artificial Sequence: Synthetic oligonucleotide
  Antisense Strand to SEQ ID NO: 465357
auucuggcuaugauacucc

SEQ ID NO: 465359 - RNA, 19 nt, Artificial Sequence
  Description of Artificial Sequence: Synthetic oligonucleotide
  Sense strand starting at position 66 of SEQ ID NO: 317112
guaucauagccagaauuaa

SEQ ID NO: 465360 - RNA, 19 nt, Artificial Sequence
  Description of Artificial Sequence: Synthetic oligonucleotide
  Antisense Strand to SEQ ID NO: 465359
uuaauucuggcuaugauac

SEQ ID NO: 465361 - RNA, 19 nt, Artificial Sequence
  Description of Artificial Sequence: Synthetic oligonucleotide
  Sense strand starting at position 193 of SEQ ID NO: 317112
guauaaguuagagaugcau

SEQ ID NO: 465362 - RNA, 19 nt, Artificial Sequence
  Description of Artificial Sequence: Synthetic oligonucleotide
  Antisense Strand to SEQ ID NO: 465361
augcaucucuaacuuauac

SEQ ID NO: 465363 - RNA, 19 nt, Artificial Sequence
  Description of Artificial Sequence: Synthetic oligonucleotide
  Sense strand starting at position 253 of SEQ ID NO: 317112
cuaugaagcuuucuggaag

SEQ ID NO: 465364 - RNA, 19 nt, Artificial Sequence
  Description of Artificial Sequence: Synthetic oligonucleotide
  Antisense Strand to SEQ ID NO: 465363
cuuccagaaagcuucauag

SEQ ID NO: 465365 - RNA, 19 nt, Artificial Sequence
  Description of Artificial Sequence: Synthetic oligonucleotide
  Sense strand starting at position 256 of SEQ ID NO: 317112
ugaagcuuucuggaaguau

SEQ ID NO: 465366 - RNA, 19 nt, Artificial Sequence
  Description of Artificial Sequence: Synthetic oligonucleotide
  Antisense Strand to SEQ ID NO: 465365
auacuuccagaaagcuuca

SEQ ID NO: 465367 - RNA, 19 nt, Artificial Sequence
  Description of Artificial Sequence: Synthetic oligonucleotide
  Sense strand starting at position 290 of SEQ ID NO: 317112
aaaucauguuaucugagga

SEQ ID NO: 465368 - RNA, 19 nt, Artificial Sequence
  Description of Artificial Sequence: Synthetic oligonucleotide
  Antisense Strand to SEQ ID NO: 465367
uccucagauaacaugauuu

SEQ ID NO: 465369 - RNA, 19 nt, Artificial Sequence
  Description of Artificial Sequence: Synthetic oligonucleotide
  Sense strand starting at position 303 of SEQ ID NO: 317112
ugaggaaccuucucaguua

SEQ ID NO: 465370 - RNA, 19 nt, Artificial Sequence
  Description of Artificial Sequence: Synthetic oligonucleotide
  Antisense Strand to SEQ ID NO: 465369
uaacugagaagguuccuca

SEQ ID NO: 465371 - RNA, 19 nt, Artificial Sequence
  Description of Artificial Sequence: Synthetic oligonucleotide
  Sense strand starting at position 306 of SEQ ID NO: 317112
ggaaccuucucaguuagaa

SEQ ID NO: 465372 - RNA, 19 nt, Artificial Sequence
  Description of Artificial Sequence: Synthetic oligonucleotide
  Antisense Strand to SEQ ID NO: 465371
uucuaacugagaagguucc

SEQ ID NO: 465373 - RNA, 19 nt, Artificial Sequence
  Description of Artificial Sequence: Synthetic oligonucleotide
  Sense strand starting at position 613 of SEQ ID NO: 317112
uucucuauuaucggaggua

SEQ ID NO: 465374 - RNA, 19 nt, Artificial Sequence
  Description of Artificial Sequence: Synthetic oligonucleotide
  Antisense Strand to SEQ ID NO: 465373
uaccuccgauaauagagaa

SEQ ID NO: 465375 - RNA, 19 nt, Artificial Sequence
  Description of Artificial Sequence: Synthetic oligonucleotide
  Sense strand starting at position 654 of SEQ ID NO: 317112
uuaguauuagcaggugauu

SEQ ID NO: 465376 - RNA, 19 nt, Artificial Sequence
  Description of Artificial Sequence: Synthetic oligonucleotide
  Antisense Strand to SEQ ID NO: 465375
aaucaccugcuaauacuaa

SEQ ID NO: 465377 - RNA, 19 nt, Artificial Sequence
  Description of Artificial Sequence: Synthetic oligonucleotide
  Sense strand starting at position 666 of SEQ ID NO: 317112
ggugauucauguguagaga

SEQ ID NO: 465378 - RNA, 19 nt, Artificial Sequence
  Description of Artificial Sequence: Synthetic oligonucleotide
  Antisense Strand to SEQ ID NO: 465377
ucucuacacaugaaucacc

SEQ ID NO: 465379 - RNA, 19 nt, Artificial Sequence
  Description of Artificial Sequence: Synthetic oligonucleotide
  Sense strand starting at position 667 of SEQ ID NO: 317112
gugauucauguguagagag

SEQ ID NO: 465380 - RNA, 19 nt, Artificial Sequence
  Description of Artificial Sequence: Synthetic oligonucleotide
  Antisense Strand to SEQ ID NO: 465379
cucucuacacaugaaucac

SEQ ID NO: 465381 - RNA, 19 nt, Artificial Sequence
  Description of Artificial Sequence: Synthetic oligonucleotide
  Sense strand starting at position 720 of SEQ ID NO: 317112
ugcacaguucuccaaguca

SEQ ID NO: 465382 - RNA, 19 nt, Artificial Sequence
  Description of Artificial Sequence: Synthetic oligonucleotide
  Antisense Strand to SEQ ID NO: 465381
ugacuuggagaacugugca

SEQ ID NO: 465383 - RNA, 19 nt, Artificial Sequence
  Description of Artificial Sequence: Synthetic oligonucleotide
  Sense strand starting at position 750 of SEQ ID NO: 317112
ccagcaacucugcagagaa

SEQ ID NO: 465384 - RNA, 19 nt, Artificial Sequence
  Description of Artificial Sequence: Synthetic oligonucleotide
  Antisense Strand to SEQ ID NO: 465383
uucucugcagaguugcugg

SEQ ID NO: 465385 - RNA, 19 nt, Artificial Sequence
  Description of Artificial Sequence: Synthetic oligonucleotide
  Sense strand starting at position 860 of SEQ ID NO: 317112
uuguuaguuuaaccacaaa

SEQ ID NO: 465386 - RNA, 19 nt, Artificial Sequence
  Description of Artificial Sequence: Synthetic oligonucleotide
  Antisense Strand to SEQ ID NO: 465385
uuugugguuaaacuaacaa

SEQ ID NO: 465387 - RNA, 19 nt, Artificial Sequence
  Description of Artificial Sequence: Synthetic oligonucleotide
  Sense strand starting at position 875 of SEQ ID NO: 317112
caaagaagccguuaucauu

SEQ ID NO: 465388 - RNA, 19 nt, Artificial Sequence
  Description of Artificial Sequence: Synthetic oligonucleotide
  Antisense Strand to SEQ ID NO: 465387
aaugauaacggcuucuuug

SEQ ID NO: 465389 - RNA, 19 nt, Artificial Sequence
  Description of Artificial Sequence: Synthetic oligonucleotide
  Sense strand starting at position 1039 of SEQ ID NO: 317112
uugauucuucgccaacuga

SEQ ID NO: 465390 - RNA, 19 nt, Artificial Sequence
  Description of Artificial Sequence: Synthetic oligonucleotide
  Antisense Strand to SEQ ID NO: 465389
ucaguuggcgaagaaucaa

SEQ ID NO: 465391 - RNA, 19 nt, Artificial Sequence
  Description of Artificial Sequence: Synthetic oligonucleotide
  Sense strand starting at position 1074 of SEQ ID NO: 317112
ugaaacuuugaagguuuau

SEQ ID NO: 465392 - RNA, 19 nt, Artificial Sequence
  Description of Artificial Sequence: Synthetic oligonucleotide
  Antisense Strand to SEQ ID NO: 465391
auaaaccuucaaaguuuca

SEQ ID NO: 465393 - RNA, 19 nt, Artificial Sequence
  Description of Artificial Sequence: Synthetic oligonucleotide
  Sense strand starting at position 1134 of SEQ ID NO: 317112
ccgaucuuaccaggacuua

SEQ ID NO: 465394 - RNA, 19 nt, Artificial Sequence
  Description of Artificial Sequence: Synthetic oligonucleotide
  Antisense Strand to SEQ ID NO: 465393
uaaguccugguaagaucgg

SEQ ID NO: 465395 - RNA, 19 nt, Artificial Sequence
  Description of Artificial Sequence: Synthetic oligonucleotide
  Sense strand starting at position 1318 of SEQ ID NO: 317112
uccauuagguaacucgaaa

SEQ ID NO: 465396 - RNA, 19 nt, Artificial Sequence
  Description of Artificial Sequence: Synthetic oligonucleotide
  Antisense Strand to SEQ ID NO: 465395
uuucgaguuaccuaaugga

SEQ ID NO: 465397 - RNA, 19 nt, Artificial Sequence
  Description of Artificial Sequence: Synthetic oligonucleotide
  Sense strand starting at position 1346 of SEQ ID NO: 317112
ucuggaaugugcucuacau

SEQ ID NO: 465398 - RNA, 19 nt, Artificial Sequence
  Description of Artificial Sequence: Synthetic oligonucleotide
  Antisense Strand to SEQ ID NO: 465397
auguagagcacauuccaga

SEQ ID NO: 465399 - RNA, 19 nt, Artificial Sequence
  Description of Artificial Sequence: Synthetic oligonucleotide
  Sense strand starting at position 1348 of SEQ ID NO: 317112
uggaaugugcucuacauau

SEQ ID NO: 465400 - RNA, 19 nt, Artificial Sequence
  Description of Artificial Sequence: Synthetic oligonucleotide
  Antisense Strand to SEQ ID NO: 465399
auauguagagcacauucca

SEQ ID NO: 465401 - RNA, 19 nt, Artificial Sequence
  Description of Artificial Sequence: Synthetic oligonucleotide
  Sense strand starting at position 1554 of SEQ ID NO: 317112
uagauaaauccagguuggu

SEQ ID NO: 465402 - RNA, 19 nt, Artificial Sequence
  Description of Artificial Sequence: Synthetic oligonucleotide
  Antisense Strand to SEQ ID NO: 465401
accaaccuggauuuaucua

SEQ ID NO: 465403 - RNA, 19 nt, Artificial Sequence
  Description of Artificial Sequence: Synthetic oligonucleotide
  Sense strand starting at position 1596 of SEQ ID NO: 317112
aacgcuucccgcguucuaa

SEQ ID NO: 465404 - RNA, 19 nt, Artificial Sequence
  Description of Artificial Sequence: Synthetic oligonucleotide
  Antisense Strand to SEQ ID NO: 465403
uuagaacgcgggaagcguu

SEQ ID NO: 465405 - RNA, 19 nt, Artificial Sequence
  Description of Artificial Sequence: Synthetic oligonucleotide
  Sense strand starting at position 2256 of SEQ ID NO: 317112
uuucuuggcgccgcagaaa

SEQ ID NO: 465406 - RNA, 19 nt, Artificial Sequence
  Description of Artificial Sequence: Synthetic oligonucleotide
  Antisense Strand to SEQ ID NO: 465405
uuucugcggcgccaagaaa

SEQ ID NO: 465407 - RNA, 19 nt, Artificial Sequence
  Description of Artificial Sequence: Synthetic oligonucleotide
  Sense strand starting at position 2268 of SEQ ID NO: 317112
gcagaaauauggccuaagu

SEQ ID NO: 465408 - RNA, 19 nt, Artificial Sequence
  Description of Artificial Sequence: Synthetic oligonucleotide
  Antisense Strand to SEQ ID NO: 465407
acuuaggccauauuucugc

SEQ ID NO: 465409 - RNA, 19 nt, Artificial Sequence
  Description of Artificial Sequence: Synthetic oligonucleotide
  Sense strand starting at position 2270 of SEQ ID NO: 317112
agaaauauggccuaaguuu

SEQ ID NO: 465410 - RNA, 19 nt, Artificial Sequence
  Description of Artificial Sequence: Synthetic oligonucleotide
  Antisense Strand to SEQ ID NO: 465409
aaacuuaggccauauuucu

SEQ ID NO: 465411 - RNA, 19 nt, Artificial Sequence
  Description of Artificial Sequence: Synthetic oligonucleotide
  Sense strand starting at position 2453 of SEQ ID NO: 317112
uguguaugucuguuuguuu

SEQ ID NO: 465412 - RNA, 19 nt, Artificial Sequence
  Description of Artificial Sequence: Synthetic oligonucleotide
  Antisense Strand to SEQ ID NO: 465411
aaacaaacagacauacaca

SEQ ID NO: 465413 - RNA, 19 nt, Artificial Sequence
  Description of Artificial Sequence: Synthetic oligonucleotide
  Sense strand starting at position 2947 of SEQ ID NO: 317112
gagugagacucuguaacac

SEQ ID NO: 465414 - RNA, 19 nt, Artificial Sequence
  Description of Artificial Sequence: Synthetic oligonucleotide
  Antisense Strand to SEQ ID NO: 465413
guguuacagagucucacuc

SEQ ID NO: 465415 - RNA, 19 nt, Artificial Sequence
  Description of Artificial Sequence: Synthetic oligonucleotide
  Sense strand starting at position 3010 of SEQ ID NO: 317112
guaagucuuguagaugcua

SEQ ID NO: 465416 - RNA, 19 nt, Artificial Sequence
  Description of Artificial Sequence: Synthetic oligonucleotide
  Antisense Strand to SEQ ID NO: 465415
uagcaucuacaagacuuac

SEQ ID NO: 465417 - RNA, 19 nt, Artificial Sequence
  Description of Artificial Sequence: Synthetic oligonucleotide
  Sense strand starting at position 3136 of SEQ ID NO: 317112
agaguuauaccauguaacu

SEQ ID NO: 465418 - RNA, 19 nt, Artificial Sequence
  Description of Artificial Sequence: Synthetic oligonucleotide
  Antisense Strand to SEQ ID NO: 465417
aguuacaugguauaacucu

SEQ ID NO: 465419 - RNA, 19 nt, Artificial Sequence
  Description of Artificial Sequence: Synthetic oligonucleotide
  Sense strand starting at position 3146 of SEQ ID NO: 317112
cauguaacugaugguacau

SEQ ID NO: 465420 - RNA, 19 nt, Artificial Sequence
  Description of Artificial Sequence: Synthetic oligonucleotide
  Antisense Strand to SEQ ID NO: 465419
auguaccaucaguuacaug

SEQ ID NO: 465421 - RNA, 19 nt, Artificial Sequence
  Description of Artificial Sequence: Synthetic oligonucleotide
  Sense strand starting at position 3187 of SEQ ID NO: 317112
ugaguacauuaaguaacua

SEQ ID NO: 465422 - RNA, 19 nt, Artificial Sequence
  Description of Artificial Sequence: Synthetic oligonucleotide
  Antisense Strand to SEQ ID NO: 465421
uaguuacuuaauguacuca

SEQ ID NO: 465423 - RNA, 19 nt, Artificial Sequence
  Description of Artificial Sequence: Synthetic oligonucleotide
  Sense strand starting at position 3236 of SEQ ID NO: 317112
gggaaagccuugucuuaau

SEQ ID NO: 465424 - RNA, 19 nt, Artificial Sequence
  Description of Artificial Sequence: Synthetic oligonucleotide
  Antisense Strand to SEQ ID NO: 465423
auuaagacaaggcuuuccc

SEQ ID NO: 465425 - RNA, 19 nt, Artificial Sequence
  Description of Artificial Sequence: Synthetic oligonucleotide
  Sense strand starting at position 3276 of SEQ ID NO: 317112
gugaguggugacuaucuga

SEQ ID NO: 465426 - RNA, 19 nt, Artificial Sequence
  Description of Artificial Sequence: Synthetic oligonucleotide
  Antisense Strand to SEQ ID NO: 465425
ucagauagucaccacucac

SEQ ID NO: 465427 - RNA, 19 nt, Artificial Sequence
  Description of Artificial Sequence: Synthetic oligonucleotide
  Sense strand starting at position 3328 of SEQ ID NO: 317112
ggcaguuguaaguaaagaa

SEQ ID NO: 465428 - RNA, 19 nt, Artificial Sequence
  Description of Artificial Sequence: Synthetic oligonucleotide
  Antisense Strand to SEQ ID NO: 465427
uucuuuacuuacaacugcc

SEQ ID NO: 465429 - RNA, 19 nt, Artificial Sequence
  Description of Artificial Sequence: Synthetic oligonucleotide
  Sense strand starting at position 3394 of SEQ ID NO: 317112
ugggcagaaucagcagaaa

SEQ ID NO: 465430 - RNA, 19 nt, Artificial Sequence
  Description of Artificial Sequence: Synthetic oligonucleotide
  Antisense Strand to SEQ ID NO: 465429
uuucugcugauucugccca

SEQ ID NO: 465431 - RNA, 19 nt, Artificial Sequence
  Description of Artificial Sequence: Synthetic oligonucleotide
  Sense strand starting at position 3612 of SEQ ID NO: 317112
augagugcuaaauggauau

SEQ ID NO: 465432 - RNA, 19 nt, Artificial Sequence
  Description of Artificial Sequence: Synthetic oligonucleotide
  Antisense Strand to SEQ ID NO: 465431
auauccauuuagcacucau

SEQ ID NO: 465433 - RNA, 19 nt, Artificial Sequence
  Description of Artificial Sequence: Synthetic oligonucleotide
  Sense strand starting at position 3660 of SEQ ID NO: 317112
uccuaagugucacugagag

SEQ ID NO: 465434 - RNA, 19 nt, Artificial Sequence
  Description of Artificial Sequence: Synthetic oligonucleotide
  Antisense Strand to SEQ ID NO: 465433
cucucagugacacuuagga

SEQ ID NO: 465435 - RNA, 19 nt, Artificial Sequence
  Description of Artificial Sequence: Synthetic oligonucleotide
  Sense strand starting at position 3662 of SEQ ID NO: 317112
cuaagugucacugagagcu

SEQ ID NO: 465436 - RNA, 19 nt, Artificial Sequence
  Description of Artificial Sequence: Synthetic oligonucleotide
  Antisense Strand to SEQ ID NO: 465435
agcucucagugacacuuag

SEQ ID NO: 465437 - RNA, 19 nt, Artificial Sequence
  Description of Artificial Sequence: Synthetic oligonucleotide
  Sense strand starting at position 435 of SEQ ID NO: 317113
ccgacaaacucagaaucaa

SEQ ID NO: 465438 - RNA, 19 nt, Artificial Sequence
  Description of Artificial Sequence: Synthetic oligonucleotide
  Antisense Strand to SEQ ID NO: 465437
uugauucugaguuugucgg

SEQ ID NO: 465439 - RNA, 19 nt, Artificial Sequence
  Description of Artificial Sequence: Synthetic oligonucleotide
  Sense strand starting at position 471 of SEQ ID NO: 317113
agaaaucccuuuccguuua

SEQ ID NO: 465440 - RNA, 19 nt, Artificial Sequence
  Description of Artificial Sequence: Synthetic oligonucleotide
  Antisense Strand to SEQ ID NO: 465439
uaaacggaaagggauuucu

SEQ ID NO: 465441 - RNA, 19 nt, Artificial Sequence
  Description of Artificial Sequence: Synthetic oligonucleotide
  Sense strand starting at position 476 of SEQ ID NO: 317113
ucccuuuccguuuaaaggu

SEQ ID NO: 465442 - RNA, 19 nt, Artificial Sequence
  Description of Artificial Sequence: Synthetic oligonucleotide
  Antisense Strand to SEQ ID NO: 465441
accuuuaaacggaaaggga

SEQ ID NO: 465443 - RNA, 19 nt, Artificial Sequence
  Description of Artificial Sequence: Synthetic oligonucleotide
  Sense strand starting at position 524 of SEQ ID NO: 317113
cuaugcauauuggaaauau

SEQ ID NO: 465444 - RNA, 19 nt, Artificial Sequence
  Description of Artificial Sequence: Synthetic oligonucleotide
  Antisense Strand to SEQ ID NO: 465443
auauuuccaauaugcauag

SEQ ID NO: 465445 - RNA, 19 nt, Artificial Sequence
  Description of Artificial Sequence: Synthetic oligonucleotide
  Sense strand starting at position 602 of SEQ ID NO: 317113
ucuagaugugagcauguga

SEQ ID NO: 465446 - RNA, 19 nt, Artificial Sequence
  Description of Artificial Sequence: Synthetic oligonucleotide
  Antisense Strand to SEQ ID NO: 465445
ucacaugcucacaucuaga

SEQ ID NO: 465447 - RNA, 19 nt, Artificial Sequence
  Description of Artificial Sequence: Synthetic oligonucleotide
  Sense strand starting at position 745 of SEQ ID NO: 317113
aacaguauaugggugaguu

SEQ ID NO: 465448 - RNA, 19 nt, Artificial Sequence
  Description of Artificial Sequence: Synthetic oligonucleotide
  Antisense Strand to SEQ ID NO: 465447
aacucacccauauacuguu

SEQ ID NO: 465449 - RNA, 19 nt, Artificial Sequence
  Description of Artificial Sequence: Synthetic oligonucleotide
  Sense strand starting at position 746 of SEQ ID NO: 317113
acaguauaugggugaguuu

SEQ ID NO: 465450 - RNA, 19 nt, Artificial Sequence
  Description of Artificial Sequence: Synthetic oligonucleotide
  Antisense Strand to SEQ ID NO: 465449
aaacucacccauauacugu

SEQ ID NO: 465451 - RNA, 19 nt, Artificial Sequence
  Description of Artificial Sequence: Synthetic oligonucleotide
  Sense strand starting at position 749 of SEQ ID NO: 317113
guauaugggugaguuucaa

SEQ ID NO: 465452 - RNA, 19 nt, Artificial Sequence
  Description of Artificial Sequence: Synthetic oligonucleotide
  Antisense Strand to SEQ ID NO: 465451
uugaaacucacccauauac

SEQ ID NO: 465453 - RNA, 19 nt, Artificial Sequence
  Description of Artificial Sequence: Synthetic oligonucleotide
  Sense strand starting at position 840 of SEQ ID NO: 317113
aggaguuauuccucaggcu

SEQ ID NO: 465454 - RNA, 19 nt, Artificial Sequence
  Description of Artificial Sequence: Synthetic oligonucleotide
  Antisense Strand to SEQ ID NO: 465453
agccugaggaauaacuccu

SEQ ID NO: 465455 - RNA, 19 nt, Artificial Sequence
  Description of Artificial Sequence: Synthetic oligonucleotide
  Sense strand starting at position 841 of SEQ ID NO: 317113
ggaguuauuccucaggcug

SEQ ID NO: 465456 - RNA, 19 nt, Artificial Sequence
  Description of Artificial Sequence: Synthetic oligonucleotide
  Antisense Strand to SEQ ID NO: 465455
cagccugaggaauaacucc

SEQ ID NO: 465457 - RNA, 19 nt, Artificial Sequence
  Description of Artificial Sequence: Synthetic oligonucleotide
  Sense strand starting at position 953 of SEQ ID NO: 317113
ccuccacucgucuggaaca

SEQ ID NO: 465458 - RNA, 19 nt, Artificial Sequence
  Description of Artificial Sequence: Synthetic oligonucleotide
  Antisense Strand to SEQ ID NO: 465457
uguuccagacgaguggagg

SEQ ID NO: 465459 - RNA, 19 nt, Artificial Sequence
  Description of Artificial Sequence: Synthetic oligonucleotide
  Sense strand starting at position 955 of SEQ ID NO: 317113
uccacucgucuggaacaaa

SEQ ID NO: 465460 - RNA, 19 nt, Artificial Sequence
  Description of Artificial Sequence: Synthetic oligonucleotide
  Antisense Strand to SEQ ID NO: 465459
uuuguuccagacgagugga

SEQ ID NO: 465461 - RNA, 19 nt, Artificial Sequence
  Description of Artificial Sequence: Synthetic oligonucleotide
  Sense strand starting at position 972 of SEQ ID NO: 317113
aacgauaaguaagugaaau

SEQ ID NO: 465462 - RNA, 19 nt, Artificial Sequence
  Description of Artificial Sequence: Synthetic oligonucleotide
  Antisense Strand to SEQ ID NO: 465461
auuucacuuacuuaucguu

SEQ ID NO: 465463 - RNA, 19 nt, Artificial Sequence
  Description of Artificial Sequence: Synthetic oligonucleotide
  Sense strand starting at position 973 of SEQ ID NO: 317113
acgauaaguaagugaaaua

SEQ ID NO: 465464 - RNA, 19 nt, Artificial Sequence
  Description of Artificial Sequence: Synthetic oligonucleotide
  Antisense Strand to SEQ ID NO: 465463
uauuucacuuacuuaucgu

SEQ ID NO: 465465 - RNA, 19 nt, Artificial Sequence
  Description of Artificial Sequence: Synthetic oligonucleotide
  Sense strand starting at position 1003 of SEQ ID NO: 317113
uaaacaugacgccaaaguu

SEQ ID NO: 465466 - RNA, 19 nt, Artificial Sequence
  Description of Artificial Sequence: Synthetic oligonucleotide
  Antisense Strand to SEQ ID NO: 465465
aacuuuggcgucauguuua

SEQ ID NO: 465467 - RNA, 19 nt, Artificial Sequence
  Description of Artificial Sequence: Synthetic oligonucleotide
  Sense strand starting at position 1011 of SEQ ID NO: 317113
acgccaaaguuggcauuua

SEQ ID NO: 465468 - RNA, 19 nt, Artificial Sequence
  Description of Artificial Sequence: Synthetic oligonucleotide
  Antisense Strand to SEQ ID NO: 465467
uaaaugccaacuuuggcgu

SEQ ID NO: 465469 - RNA, 19 nt, Artificial Sequence
  Description of Artificial Sequence: Synthetic oligonucleotide
  Sense strand starting at position 1095 of SEQ ID NO: 317113
ccuauuugcugguugucua

SEQ ID NO: 465470 - RNA, 19 nt, Artificial Sequence
  Description of Artificial Sequence: Synthetic oligonucleotide
  Antisense Strand to SEQ ID NO: 465469
uagacaaccagcaaauagg

SEQ ID NO: 465471 - RNA, 19 nt, Artificial Sequence
  Description of Artificial Sequence: Synthetic oligonucleotide
  Sense strand starting at position 1096 of SEQ ID NO: 317113
cuauuugcugguugucuaa

SEQ ID NO: 465472 - RNA, 19 nt, Artificial Sequence
  Description of Artificial Sequence: Synthetic oligonucleotide
  Antisense Strand to SEQ ID NO: 465471
uuagacaaccagcaaauag

SEQ ID NO: 465473 - RNA, 19 nt, Artificial Sequence
  Description of Artificial Sequence: Synthetic oligonucleotide
  Sense strand starting at position 1255 of SEQ ID NO: 317113
guguuacaucuacagaacu

SEQ ID NO: 465474 - RNA, 19 nt, Artificial Sequence
  Description of Artificial Sequence: Synthetic oligonucleotide
  Antisense Strand to SEQ ID NO: 465473
aguucuguagauguaacac

SEQ ID NO: 465475 - RNA, 19 nt, Artificial Sequence
  Description of Artificial Sequence: Synthetic oligonucleotide
  Sense strand starting at position 1336 of SEQ ID NO: 317113
gggaaaguacgacagucuu

SEQ ID NO: 465476 - RNA, 19 nt, Artificial Sequence
  Description of Artificial Sequence: Synthetic oligonucleotide
  Antisense Strand to SEQ ID NO: 465475
aagacugucguacuuuccc

SEQ ID NO: 465477 - RNA, 19 nt, Artificial Sequence
  Description of Artificial Sequence: Synthetic oligonucleotide
  Sense strand starting at position 1996 of SEQ ID NO: 317113
gguagcgcucgucuugaau

SEQ ID NO: 465478 - RNA, 19 nt, Artificial Sequence
  Description of Artificial Sequence: Synthetic oligonucleotide
  Antisense Strand to SEQ ID NO: 465477
auucaagacgagcgcuacc

SEQ ID NO: 465479 - RNA, 19 nt, Artificial Sequence
  Description of Artificial Sequence: Synthetic oligonucleotide
  Sense strand starting at position 2231 of SEQ ID NO: 317113
ccgguuaggagucauggca

SEQ ID NO: 465480 - RNA, 19 nt, Artificial Sequence
  Description of Artificial Sequence: Synthetic oligonucleotide
  Antisense Strand to SEQ ID NO: 465479
ugccaugacuccuaaccgg

SEQ ID NO: 465481 - RNA, 19 nt, Artificial Sequence
  Description of Artificial Sequence: Synthetic oligonucleotide
  Sense strand starting at position 2325 of SEQ ID NO: 317113
cgcagugagggauggaauu

SEQ ID NO: 465482 - RNA, 19 nt, Artificial Sequence
  Description of Artificial Sequence: Synthetic oligonucleotide
  Antisense Strand to SEQ ID NO: 465481
aauuccaucccucacugcg

SEQ ID NO: 465483 - RNA, 19 nt, Artificial Sequence
  Description of Artificial Sequence: Synthetic oligonucleotide
  Sense strand starting at position 2337 of SEQ ID NO: 317113
uggaauuaccaccggaguu

SEQ ID NO: 465484 - RNA, 19 nt, Artificial Sequence
  Description of Artificial Sequence: Synthetic oligonucleotide
  Antisense Strand to SEQ ID NO: 465483
aacuccggugguaauucca

SEQ ID NO: 465485 - RNA, 19 nt, Artificial Sequence
  Description of Artificial Sequence: Synthetic oligonucleotide
  Sense strand starting at position 2338 of SEQ ID NO: 317113
ggaauuaccaccggaguua

SEQ ID NO: 465486 - RNA, 19 nt, Artificial Sequence
  Description of Artificial Sequence: Synthetic oligonucleotide
  Antisense Strand to SEQ ID NO: 465485
uaacuccggugguaauucc

SEQ ID NO: 465487 - RNA, 19 nt, Artificial Sequence
  Description of Artificial Sequence: Synthetic oligonucleotide
  Sense strand starting at position 2415 of SEQ ID NO: 317113
cacggaacccagcaugaua

SEQ ID NO: 465488 - RNA, 19 nt, Artificial Sequence
  Description of Artificial Sequence: Synthetic oligonucleotide
  Antisense Strand to SEQ ID NO: 465487
uaucaugcuggguuccgug

SEQ ID NO: 465489 - RNA, 19 nt, Artificial Sequence
  Description of Artificial Sequence: Synthetic oligonucleotide
  Sense strand starting at position 2426 of SEQ ID NO: 317113
gcaugauaggguggucauc

SEQ ID NO: 465490 - RNA, 19 nt, Artificial Sequence
  Description of Artificial Sequence: Synthetic oligonucleotide
  Antisense Strand to SEQ ID NO: 465489
gaugaccacccuaucaugc

SEQ ID NO: 465491 - RNA, 19 nt, Artificial Sequence
  Description of Artificial Sequence: Synthetic oligonucleotide
  Sense strand starting at position 2609 of SEQ ID NO: 317113
ugaauaugucaccacagca

SEQ ID NO: 465492 - RNA, 19 nt, Artificial Sequence
  Description of Artificial Sequence: Synthetic oligonucleotide
  Antisense Strand to SEQ ID NO: 465491
ugcuguggugacauauuca

SEQ ID NO: 465493 - RNA, 19 nt, Artificial Sequence
  Description of Artificial Sequence: Synthetic oligonucleotide
  Sense strand starting at position 2649 of SEQ ID NO: 317113
acggguaucgaagagaugu

SEQ ID NO: 465494 - RNA, 19 nt, Artificial Sequence
  Description of Artificial Sequence: Synthetic oligonucleotide
  Antisense Strand to SEQ ID NO: 465493
acaucucuucgauacccgu

SEQ ID NO: 465495 - RNA, 19 nt, Artificial Sequence
  Description of Artificial Sequence: Synthetic oligonucleotide
  Sense strand starting at position 2657 of SEQ ID NO: 317113
cgaagagauguccgucuuc

SEQ ID NO: 465496 - RNA, 19 nt, Artificial Sequence
  Description of Artificial Sequence: Synthetic oligonucleotide
  Antisense Strand to SEQ ID NO: 465495
gaagacggacaucucuucg

SEQ ID NO: 465497 - RNA, 19 nt, Artificial Sequence
  Description of Artificial Sequence: Synthetic oligonucleotide
  Sense strand starting at position 2729 of SEQ ID NO: 317113
acaaaucaugugcagauau

SEQ ID NO: 465498 - RNA, 19 nt, Artificial Sequence
  Description of Artificial Sequence: Synthetic oligonucleotide
  Antisense Strand to SEQ ID NO: 465497
auaucugcacaugauuugu

SEQ ID NO: 465499 - RNA, 19 nt, Artificial Sequence
  Description of Artificial Sequence: Synthetic oligonucleotide
  Sense strand starting at position 2789 of SEQ ID NO: 317113
gaaguaggugcagauauga

SEQ ID NO: 465500 - RNA, 19 nt, Artificial Sequence
  Description of Artificial Sequence: Synthetic oligonucleotide
  Antisense Strand to SEQ ID NO: 465499
ucauaucugcaccuacuuc

SEQ ID NO: 465501 - RNA, 19 nt, Artificial Sequence
  Description of Artificial Sequence: Synthetic oligonucleotide
  Sense strand starting at position 3290 of SEQ ID NO: 317113
auuaccagaucaggauaaa

SEQ ID NO: 465502 - RNA, 19 nt, Artificial Sequence
  Description of Artificial Sequence: Synthetic oligonucleotide
  Antisense Strand to SEQ ID NO: 465501
uuuauccugaucugguaau

SEQ ID NO: 465503 - RNA, 19 nt, Artificial Sequence
  Description of Artificial Sequence: Synthetic oligonucleotide
  Sense strand starting at position 3529 of SEQ ID NO: 317113
uccaaauauugauauggua

SEQ ID NO: 465504 - RNA, 19 nt, Artificial Sequence
  Description of Artificial Sequence: Synthetic oligonucleotide
  Antisense Strand to SEQ ID NO: 465503
uaccauaucaauauuugga

SEQ ID NO: 465505 - RNA, 19 nt, Artificial Sequence
  Description of Artificial Sequence: Synthetic oligonucleotide
  Sense strand starting at position 3544 of SEQ ID NO: 317113
gguacugacuuacuguaua

SEQ ID NO: 465506 - RNA, 19 nt, Artificial Sequence
  Description of Artificial Sequence: Synthetic oligonucleotide
  Antisense Strand to SEQ ID NO: 465505
uauacaguaagucaguacc

SEQ ID NO: 465507 - RNA, 19 nt, Artificial Sequence
  Description of Artificial Sequence: Synthetic oligonucleotide
  Sense strand starting at position 3862 of SEQ ID NO: 317113
cgcccagcccuguaugauu

SEQ ID NO: 465508 - RNA, 19 nt, Artificial Sequence
  Description of Artificial Sequence: Synthetic oligonucleotide
  Antisense Strand to SEQ ID NO: 465507
aaucauacagggcugggcg

SEQ ID NO: 465509 - RNA, 19 nt, Artificial Sequence
  Description of Artificial Sequence: Synthetic oligonucleotide
  Sense strand starting at position 3870 of SEQ ID NO: 317113
ccuguaugauucuuguaag

SEQ ID NO: 465510 - RNA, 19 nt, Artificial Sequence
  Description of Artificial Sequence: Synthetic oligonucleotide
  Antisense Strand to SEQ ID NO: 465509
cuuacaagaaucauacagg

SEQ ID NO: 465511 - RNA, 19 nt, Artificial Sequence
  Description of Artificial Sequence: Synthetic oligonucleotide
  Sense strand starting at position 3882 of SEQ ID NO: 317113
uuguaagggucuucugaaa

SEQ ID NO: 465512 - RNA, 19 nt, Artificial Sequence
  Description of Artificial Sequence: Synthetic oligonucleotide
  Antisense Strand to SEQ ID NO: 465511
uuucagaagacccuuacaa

SEQ ID NO: 465513 - RNA, 19 nt, Artificial Sequence
  Description of Artificial Sequence: Synthetic oligonucleotide
  Sense strand starting at position 3910 of SEQ ID NO: 317113
gcauuaccagauuacugau

SEQ ID NO: 465514 - RNA, 19 nt, Artificial Sequence
  Description of Artificial Sequence: Synthetic oligonucleotide
  Antisense Strand to SEQ ID NO: 465513
aucaguaaucugguaaugc

SEQ ID NO: 465515 - RNA, 19 nt, Artificial Sequence
  Description of Artificial Sequence: Synthetic oligonucleotide
  Sense strand starting at position 3925 of SEQ ID NO: 317113
ugauuaucuuuggaaagag

SEQ ID NO: 465516 - RNA, 19 nt, Artificial Sequence
  Description of Artificial Sequence: Synthetic oligonucleotide
  Antisense Strand to SEQ ID NO: 465515
cucuuuccaaagauaauca

SEQ ID NO: 465517 - RNA, 19 nt, Artificial Sequence
  Description of Artificial Sequence: Synthetic oligonucleotide
  Sense strand starting at position 385 of SEQ ID NO: 317114
ucaucaucgagagguuaau

SEQ ID NO: 465518 - RNA, 19 nt, Artificial Sequence
  Description of Artificial Sequence: Synthetic oligonucleotide
  Antisense Strand to SEQ ID NO: 465517
auuaaccucucgaugauga

SEQ ID NO: 465519 - RNA, 19 nt, Artificial Sequence
  Description of Artificial Sequence: Synthetic oligonucleotide
  Sense strand starting at position 396 of SEQ ID NO: 317114
agguuaaucccaggcacaa

SEQ ID NO: 465520 - RNA, 19 nt, Artificial Sequence
  Description of Artificial Sequence: Synthetic oligonucleotide
  Antisense Strand to SEQ ID NO: 465519
uugugccugggauuaaccu

SEQ ID NO: 465521 - RNA, 19 nt, Artificial Sequence
  Description of Artificial Sequence: Synthetic oligonucleotide
  Sense strand starting at position 584 of SEQ ID NO: 317114
cuuggcgacucugagauuu

SEQ ID NO: 465522 - RNA, 19 nt, Artificial Sequence
  Description of Artificial Sequence: Synthetic oligonucleotide
  Antisense Strand to SEQ ID NO: 465521
aaaucucagagucgccaag

SEQ ID NO: 465523 - RNA, 19 nt, Artificial Sequence
  Description of Artificial Sequence: Synthetic oligonucleotide
  Sense strand starting at position 586 of SEQ ID NO: 317114
uggcgacucugagauuuau

SEQ ID NO: 465524 - RNA, 19 nt, Artificial Sequence
  Description of Artificial Sequence: Synthetic oligonucleotide
  Antisense Strand to SEQ ID NO: 465523
auaaaucucagagucgcca

SEQ ID NO: 465525 - RNA, 19 nt, Artificial Sequence
  Description of Artificial Sequence: Synthetic oligonucleotide
  Sense strand starting at position 592 of SEQ ID NO: 317114
cucugagauuuaugacccu

SEQ ID NO: 465526 - RNA, 19 nt, Artificial Sequence
  Description of Artificial Sequence: Synthetic oligonucleotide
  Antisense Strand to SEQ ID NO: 465525
agggucauaaaucucagag

SEQ ID NO: 465527 - RNA, 19 nt, Artificial Sequence
  Description of Artificial Sequence: Synthetic oligonucleotide
  Sense strand starting at position 749 of SEQ ID NO: 317114
uccggugcaucucgaugaa

SEQ ID NO: 465528 - RNA, 19 nt, Artificial Sequence
  Description of Artificial Sequence: Synthetic oligonucleotide
  Antisense Strand to SEQ ID NO: 465527
uucaucgagaugcaccgga

SEQ ID NO: 465529 - RNA, 19 nt, Artificial Sequence
  Description of Artificial Sequence: Synthetic oligonucleotide
  Sense strand starting at position 752 of SEQ ID NO: 317114
ggugcaucucgaugaaauc

SEQ ID NO: 465530 - RNA, 19 nt, Artificial Sequence
  Description of Artificial Sequence: Synthetic oligonucleotide
  Antisense Strand to SEQ ID NO: 465529
gauuucaucgagaugcacc

SEQ ID NO: 465531 - RNA, 19 nt, Artificial Sequence
  Description of Artificial Sequence: Synthetic oligonucleotide
  Sense strand starting at position 753 of SEQ ID NO: 317114
gugcaucucgaugaaauca

SEQ ID NO: 465532 - RNA, 19 nt, Artificial Sequence
  Description of Artificial Sequence: Synthetic oligonucleotide
  Antisense Strand to SEQ ID NO: 465531
ugauuucaucgagaugcac

SEQ ID NO: 465533 - RNA, 19 nt, Artificial Sequence
  Description of Artificial Sequence: Synthetic oligonucleotide
  Sense strand starting at position 763 of SEQ ID NO: 317114
augaaaucaucgcucucga

SEQ ID NO: 465534 - RNA, 19 nt, Artificial Sequence
  Description of Artificial Sequence: Synthetic oligonucleotide
  Antisense Strand to SEQ ID NO: 465533
ucgagagcgaugauuucau

SEQ ID NO: 465535 - RNA, 19 nt, Artificial Sequence
  Description of Artificial Sequence: Synthetic oligonucleotide
  Sense strand starting at position 2066 of SEQ ID NO: 317114
ggaggauccuacgugauaa

SEQ ID NO: 465536 - RNA, 19 nt, Artificial Sequence
  Description of Artificial Sequence: Synthetic oligonucleotide
  Antisense Strand to SEQ ID NO: 465535
uuaucacguaggauccucc

SEQ ID NO: 465537 - RNA, 19 nt, Artificial Sequence
  Description of Artificial Sequence: Synthetic oligonucleotide
  Sense strand starting at position 2070 of SEQ ID NO: 317114
gauccuacgugauaaugca

SEQ ID NO: 465538 - RNA, 19 nt, Artificial Sequence
  Description of Artificial Sequence: Synthetic oligonucleotide
  Antisense Strand to SEQ ID NO: 465537
ugcauuaucacguaggauc

SEQ ID NO: 465539 - RNA, 19 nt, Artificial Sequence
  Description of Artificial Sequence: Synthetic oligonucleotide
  Sense strand starting at position 2569 of SEQ ID NO: 317114
ccuugaucuucuggccuca

SEQ ID NO: 465540 - RNA, 19 nt, Artificial Sequence
  Description of Artificial Sequence: Synthetic oligonucleotide
  Antisense Strand to SEQ ID NO: 465539
ugaggccagaagaucaagg

SEQ ID NO: 465541 - RNA, 19 nt, Artificial Sequence
  Description of Artificial Sequence: Synthetic oligonucleotide
  Sense strand starting at position 2678 of SEQ ID NO: 317114
uuccuucuuccuuggauga

SEQ ID NO: 465542 - RNA, 19 nt, Artificial Sequence
  Description of Artificial Sequence: Synthetic oligonucleotide
  Antisense Strand to SEQ ID NO: 465541
ucauccaaggaagaaggaa

SEQ ID NO: 465543 - RNA, 19 nt, Artificial Sequence
  Description of Artificial Sequence: Synthetic oligonucleotide
  Sense strand starting at position 2680 of SEQ ID NO: 317114
ccuucuuccuuggaugaca

SEQ ID NO: 465544 - RNA, 19 nt, Artificial Sequence
  Description of Artificial Sequence: Synthetic oligonucleotide
  Antisense Strand to SEQ ID NO: 465543
ugucauccaaggaagaagg

SEQ ID NO: 465545 - RNA, 19 nt, Artificial Sequence
  Description of Artificial Sequence: Synthetic oligonucleotide
  Sense strand starting at position 2865 of SEQ ID NO: 317114
uuagcucuguggccuuaau

SEQ ID NO: 465546 - RNA, 19 nt, Artificial Sequence
  Description of Artificial Sequence: Synthetic oligonucleotide
  Antisense Strand to SEQ ID NO: 465545
auuaaggccacagagcuaa

SEQ ID NO: 465547 - RNA, 19 nt, Artificial Sequence
  Description of Artificial Sequence: Synthetic oligonucleotide
  Sense strand starting at position 2898 of SEQ ID NO: 317114
ggcagagcuuggcgcauau

SEQ ID NO: 465548 - RNA, 19 nt, Artificial Sequence
  Description of Artificial Sequence: Synthetic oligonucleotide
  Antisense Strand to SEQ ID NO: 465547
auaugcgccaagcucugcc

SEQ ID NO: 465549 - RNA, 19 nt, Artificial Sequence
  Description of Artificial Sequence: Synthetic oligonucleotide
  Sense strand starting at position 2907 of SEQ ID NO: 317114
uggcgcauauugguaaauu

SEQ ID NO: 465550 - RNA, 19 nt, Artificial Sequence
  Description of Artificial Sequence: Synthetic oligonucleotide
  Antisense Strand to SEQ ID NO: 465549
aauuuaccaauaugcgcca

SEQ ID NO: 465551 - RNA, 19 nt, Artificial Sequence
  Description of Artificial Sequence: Synthetic oligonucleotide
  Sense strand starting at position 2908 of SEQ ID NO: 317114
ggcgcauauugguaaauuu

SEQ ID NO: 465552 - RNA, 19 nt, Artificial Sequence
  Description of Artificial Sequence: Synthetic oligonucleotide
  Antisense Strand to SEQ ID NO: 465551
aaauuuaccaauaugcgcc

SEQ ID NO: 465553 - RNA, 19 nt, Artificial Sequence
  Description of Artificial Sequence: Synthetic oligonucleotide
  Sense strand starting at position 2952 of SEQ ID NO: 317114
ugaggagagauacguuaau

SEQ ID NO: 465554 - RNA, 19 nt, Artificial Sequence
  Description of Artificial Sequence: Synthetic oligonucleotide
  Antisense Strand to SEQ ID NO: 465553
auuaacguaucucuccuca

SEQ ID NO: 465555 - RNA, 19 nt, Artificial Sequence
  Description of Artificial Sequence: Synthetic oligonucleotide
  Sense strand starting at position 2963 of SEQ ID NO: 317114
acguuaauuuccuagcuug

SEQ ID NO: 465556 - RNA, 19 nt, Artificial Sequence
  Description of Artificial Sequence: Synthetic oligonucleotide
  Antisense Strand to SEQ ID NO: 465555
caagcuaggaaauuaacgu

SEQ ID NO: 465557 - RNA, 19 nt, Artificial Sequence
  Description of Artificial Sequence: Synthetic oligonucleotide
  Sense strand starting at position 3108 of SEQ ID NO: 317114
agagaaacguaaguauaug

SEQ ID NO: 465558 - RNA, 19 nt, Artificial Sequence
  Description of Artificial Sequence: Synthetic oligonucleotide
  Antisense Strand to SEQ ID NO: 465557
cauauacuuacguuucucu

SEQ ID NO: 465559 - RNA, 19 nt, Artificial Sequence
  Description of Artificial Sequence: Synthetic oligonucleotide
  Sense strand starting at position 3109 of SEQ ID NO: 317114
gagaaacguaaguauaugu

SEQ ID NO: 465560 - RNA, 19 nt, Artificial Sequence
  Description of Artificial Sequence: Synthetic oligonucleotide
  Antisense Strand to SEQ ID NO: 465559
acauauacuuacguuucuc

SEQ ID NO: 465561 - RNA, 19 nt, Artificial Sequence
  Description of Artificial Sequence: Synthetic oligonucleotide
  Sense strand starting at position 3189 of SEQ ID NO: 317114
gggcuugugugaaaggaaa

SEQ ID NO: 465562 - RNA, 19 nt, Artificial Sequence
  Description of Artificial Sequence: Synthetic oligonucleotide
  Antisense Strand to SEQ ID NO: 465561
uuuccuuucacacaagccc

SEQ ID NO: 465563 - RNA, 19 nt, Artificial Sequence
  Description of Artificial Sequence: Synthetic oligonucleotide
  Sense strand starting at position 3787 of SEQ ID NO: 317114
gugccauucuggugugcua

SEQ ID NO: 465564 - RNA, 19 nt, Artificial Sequence
  Description of Artificial Sequence: Synthetic oligonucleotide
  Antisense Strand to SEQ ID NO: 465563
uagcacaccagaauggcac

SEQ ID NO: 465565 - RNA, 19 nt, Artificial Sequence
  Description of Artificial Sequence: Synthetic oligonucleotide
  Sense strand starting at position 3789 of SEQ ID NO: 317114
gccauucuggugugcuaca

SEQ ID NO: 465566 - RNA, 19 nt, Artificial Sequence
  Description of Artificial Sequence: Synthetic oligonucleotide
  Antisense Strand to SEQ ID NO: 465565
uguagcacaccagaauggc

SEQ ID NO: 465567 - RNA, 19 nt, Artificial Sequence
  Description of Artificial Sequence: Synthetic oligonucleotide
  Sense strand starting at position 103 of SEQ ID NO: 317115
guauuacaauagucccuau

SEQ ID NO: 465568 - RNA, 19 nt, Artificial Sequence
  Description of Artificial Sequence: Synthetic oligonucleotide
  Antisense Strand to SEQ ID NO: 465567
auagggacuauuguaauac

SEQ ID NO: 465569 - RNA, 19 nt, Artificial Sequence
  Description of Artificial Sequence: Synthetic oligonucleotide
  Sense strand starting at position 147 of SEQ ID NO: 317115
agcuauguugucuaaauca

SEQ ID NO: 465570 - RNA, 19 nt, Artificial Sequence
  Description of Artificial Sequence: Synthetic oligonucleotide
  Antisense Strand to SEQ ID NO: 465569
ugauuuagacaacauagcu

SEQ ID NO: 465571 - RNA, 19 nt, Artificial Sequence
  Description of Artificial Sequence: Synthetic oligonucleotide
  Sense strand starting at position 229 of SEQ ID NO: 317115
ucgucucacagaggaacua

SEQ ID NO: 465572 - RNA, 19 nt, Artificial Sequence
  Description of Artificial Sequence: Synthetic oligonucleotide
  Antisense Strand to SEQ ID NO: 465571
uaguuccucugugagacga

SEQ ID NO: 465573 - RNA, 19 nt, Artificial Sequence
  Description of Artificial Sequence: Synthetic oligonucleotide
  Sense strand starting at position 358 of SEQ ID NO: 317115
uagcguagugucuuccauu

SEQ ID NO: 465574 - RNA, 19 nt, Artificial Sequence
  Description of Artificial Sequence: Synthetic oligonucleotide
  Antisense Strand to SEQ ID NO: 465573
aauggaagacacuacgcua

SEQ ID NO: 465575 - RNA, 19 nt, Artificial Sequence
  Description of Artificial Sequence: Synthetic oligonucleotide
  Sense strand starting at position 379 of SEQ ID NO: 317115
accucuaaaguuggaagau

SEQ ID NO: 465576 - RNA, 19 nt, Artificial Sequence
  Description of Artificial Sequence: Synthetic oligonucleotide
  Antisense Strand to SEQ ID NO: 465575
aucuuccaacuuuagaggu

SEQ ID NO: 465577 - RNA, 19 nt, Artificial Sequence
  Description of Artificial Sequence: Synthetic oligonucleotide
  Sense strand starting at position 391 of SEQ ID NO: 317115
ggaagauucugaucccacg

SEQ ID NO: 465578 - RNA, 19 nt, Artificial Sequence
  Description of Artificial Sequence: Synthetic oligonucleotide
  Antisense Strand to SEQ ID NO: 465577
cgugggaucagaaucuucc

SEQ ID NO: 465579 - RNA, 19 nt, Artificial Sequence
  Description of Artificial Sequence: Synthetic oligonucleotide
  Sense strand starting at position 608 of SEQ ID NO: 317115
aauccauaucgaggucauc

SEQ ID NO: 465580 - RNA, 19 nt, Artificial Sequence
  Description of Artificial Sequence: Synthetic oligonucleotide
  Antisense Strand to SEQ ID NO: 465579
gaugaccucgauauggauu

SEQ ID NO: 465581 - RNA, 19 nt, Artificial Sequence
  Description of Artificial Sequence: Synthetic oligonucleotide
  Sense strand starting at position 611 of SEQ ID NO: 317115
ccauaucgaggucaucaau

SEQ ID NO: 465582 - RNA, 19 nt, Artificial Sequence
  Description of Artificial Sequence: Synthetic oligonucleotide
  Antisense Strand to SEQ ID NO: 465581
auugaugaccucgauaugg

SEQ ID NO: 465583 - RNA, 19 nt, Artificial Sequence
  Description of Artificial Sequence: Synthetic oligonucleotide
  Sense strand starting at position 790 of SEQ ID NO: 317115
ccaugaagacauugacucu

SEQ ID NO: 465584 - RNA, 19 nt, Artificial Sequence
  Description of Artificial Sequence: Synthetic oligonucleotide
  Antisense Strand to SEQ ID NO: 465583
agagucaaugucuucaugg

SEQ ID NO: 465585 - RNA, 19 nt, Artificial Sequence
  Description of Artificial Sequence: Synthetic oligonucleotide
  Sense strand starting at position 813 of SEQ ID NO: 317115
guuccauauccugauguua

SEQ ID NO: 465586 - RNA, 19 nt, Artificial Sequence
  Description of Artificial Sequence: Synthetic oligonucleotide
  Antisense Strand to SEQ ID NO: 465585
uaacaucaggauauggaac

SEQ ID NO: 465587 - RNA, 19 nt, Artificial Sequence
  Description of Artificial Sequence: Synthetic oligonucleotide
  Sense strand starting at position 858 of SEQ ID NO: 317115
augccacuucuuugagaca

SEQ ID NO: 465588 - RNA, 19 nt, Artificial Sequence
  Description of Artificial Sequence: Synthetic oligonucleotide
  Antisense Strand to SEQ ID NO: 465587
ugucucaaagaaguggcau

SEQ ID NO: 465589 - RNA, 19 nt, Artificial Sequence
  Description of Artificial Sequence: Synthetic oligonucleotide
  Sense strand starting at position 885 of SEQ ID NO: 317115
ugacauaccugucucauag

SEQ ID NO: 465590 - RNA, 19 nt, Artificial Sequence
  Description of Artificial Sequence: Synthetic oligonucleotide
  Antisense Strand to SEQ ID NO: 465589
cuaugagacagguauguca

SEQ ID NO: 465591 - RNA, 19 nt, Artificial Sequence
  Description of Artificial Sequence: Synthetic oligonucleotide
  Sense strand starting at position 1253 of SEQ ID NO: 317115
gaugcaggccuagaacaua

SEQ ID NO: 465592 - RNA, 19 nt, Artificial Sequence
  Description of Artificial Sequence: Synthetic oligonucleotide
  Antisense Strand to SEQ ID NO: 465591
uauguucuaggccugcauc

SEQ ID NO: 465593 - RNA, 19 nt, Artificial Sequence
  Description of Artificial Sequence: Synthetic oligonucleotide
  Sense strand starting at position 1549 of SEQ ID NO: 317115
ugaucuggauaagcauauu

SEQ ID NO: 465594 - RNA, 19 nt, Artificial Sequence
  Description of Artificial Sequence: Synthetic oligonucleotide
  Antisense Strand to SEQ ID NO: 465593
aauaugcuuauccagauca

SEQ ID NO: 465595 - RNA, 19 nt, Artificial Sequence
  Description of Artificial Sequence: Synthetic oligonucleotide
  Sense strand starting at position 1925 of SEQ ID NO: 317115
cacaacucugcgggaagaa

SEQ ID NO: 465596 - RNA, 19 nt, Artificial Sequence
  Description of Artificial Sequence: Synthetic oligonucleotide
  Antisense Strand to SEQ ID NO: 465595
uucuucccgcagaguugug

SEQ ID NO: 465597 - RNA, 19 nt, Artificial Sequence
  Description of Artificial Sequence: Synthetic oligonucleotide
  Sense strand starting at position 1948 of SEQ ID NO: 317115
cguggaugcacacaaauaa

SEQ ID NO: 465598 - RNA, 19 nt, Artificial Sequence
  Description of Artificial Sequence: Synthetic oligonucleotide
  Antisense Strand to SEQ ID NO: 465597
uuauuugugugcauccacg

SEQ ID NO: 465599 - RNA, 19 nt, Artificial Sequence
  Description of Artificial Sequence: Synthetic oligonucleotide
  Sense strand starting at position 2146 of SEQ ID NO: 317115
cucgcccucuaauuuagau

SEQ ID NO: 465600 - RNA, 19 nt, Artificial Sequence
  Description of Artificial Sequence: Synthetic oligonucleotide
  Antisense Strand to SEQ ID NO: 465599
aucuaaauuagagggcgag

SEQ ID NO: 465601 - RNA, 19 nt, Artificial Sequence
  Description of Artificial Sequence: Synthetic oligonucleotide
  Sense strand starting at position 2175 of SEQ ID NO: 317115
agguuuguucgcgucuuca

SEQ ID NO: 465602 - RNA, 19 nt, Artificial Sequence
  Description of Artificial Sequence: Synthetic oligonucleotide
  Antisense Strand to SEQ ID NO: 465601
ugaagacgcgaacaaaccu

SEQ ID NO: 465603 - RNA, 19 nt, Artificial Sequence
  Description of Artificial Sequence: Synthetic oligonucleotide
  Sense strand starting at position 2285 of SEQ ID NO: 317115
gcguucacagcgcuuacua

SEQ ID NO: 465604 - RNA, 19 nt, Artificial Sequence
  Description of Artificial Sequence: Synthetic oligonucleotide
  Antisense Strand to SEQ ID NO: 465603
uaguaagcgcugugaacgc

SEQ ID NO: 465605 - RNA, 19 nt, Artificial Sequence
  Description of Artificial Sequence: Synthetic oligonucleotide
  Sense strand starting at position 2311 of SEQ ID NO: 317115
augcacaagcuugaauuaa

SEQ ID NO: 465606 - RNA, 19 nt, Artificial Sequence
  Description of Artificial Sequence: Synthetic oligonucleotide
  Antisense Strand to SEQ ID NO: 465605
uuaauucaagcuugugcau

SEQ ID NO: 465607 - RNA, 19 nt, Artificial Sequence
  Description of Artificial Sequence: Synthetic oligonucleotide
  Sense strand starting at position 2558 of SEQ ID NO: 317115
cuguaagguccucaaggua

SEQ ID NO: 465608 - RNA, 19 nt, Artificial Sequence
  Description of Artificial Sequence: Synthetic oligonucleotide
  Antisense Strand to SEQ ID NO: 465607
uaccuugaggaccuuacag

SEQ ID NO: 465609 - RNA, 19 nt, Artificial Sequence
  Description of Artificial Sequence: Synthetic oligonucleotide
  Sense strand starting at position 2660 of SEQ ID NO: 317115
gaggaauucuucucuagua

SEQ ID NO: 465610 - RNA, 19 nt, Artificial Sequence
  Description of Artificial Sequence: Synthetic oligonucleotide
  Antisense Strand to SEQ ID NO: 465609
uacuagagaagaauuccuc

SEQ ID NO: 465611 - RNA, 19 nt, Artificial Sequence
  Description of Artificial Sequence: Synthetic oligonucleotide
  Sense strand starting at position 2661 of SEQ ID NO: 317115
aggaauucuucucuaguac

SEQ ID NO: 465612 - RNA, 19 nt, Artificial Sequence
  Description of Artificial Sequence: Synthetic oligonucleotide
  Antisense Strand to SEQ ID NO: 465611
guacuagagaagaauuccu

SEQ ID NO: 465613 - RNA, 19 nt, Artificial Sequence
  Description of Artificial Sequence: Synthetic oligonucleotide
  Sense strand starting at position 2662 of SEQ ID NO: 317115
ggaauucuucucuaguaca

SEQ ID NO: 465614 - RNA, 19 nt, Artificial Sequence
  Description of Artificial Sequence: Synthetic oligonucleotide
  Antisense Strand to SEQ ID NO: 465613
uguacuagagaagaauucc

SEQ ID NO: 465615 - RNA, 19 nt, Artificial Sequence
  Description of Artificial Sequence: Synthetic oligonucleotide
  Sense strand starting at position 2790 of SEQ ID NO: 317115
ggcuuugauggucaguaca

SEQ ID NO: 465616 - RNA, 19 nt, Artificial Sequence
  Description of Artificial Sequence: Synthetic oligonucleotide
  Antisense Strand to SEQ ID NO: 465615
uguacugaccaucaaagcc

SEQ ID NO: 465617 - RNA, 19 nt, Artificial Sequence
  Description of Artificial Sequence: Synthetic oligonucleotide
  Sense strand starting at position 2821 of SEQ ID NO: 317115
accuaaugccauuguggaa

SEQ ID NO: 465618 - RNA, 19 nt, Artificial Sequence
  Description of Artificial Sequence: Synthetic oligonucleotide
  Antisense Strand to SEQ ID NO: 465617
uuccacaauggcauuaggu

SEQ ID NO: 465619 - RNA, 19 nt, Artificial Sequence
  Description of Artificial Sequence: Synthetic oligonucleotide
  Sense strand starting at position 2986 of SEQ ID NO: 317115
gaauaucugucagugggaa

SEQ ID NO: 465620 - RNA, 19 nt, Artificial Sequence
  Description of Artificial Sequence: Synthetic oligonucleotide
  Antisense Strand to SEQ ID NO: 465619
uucccacugacagauauuc

SEQ ID NO: 465621 - RNA, 19 nt, Artificial Sequence
  Description of Artificial Sequence: Synthetic oligonucleotide
  Sense strand starting at position 2987 of SEQ ID NO: 317115
aauaucugucagugggaag

SEQ ID NO: 465622 - RNA, 19 nt, Artificial Sequence
  Description of Artificial Sequence: Synthetic oligonucleotide
  Antisense Strand to SEQ ID NO: 465621
cuucccacugacagauauu

SEQ ID NO: 465623 - RNA, 19 nt, Artificial Sequence
  Description of Artificial Sequence: Synthetic oligonucleotide
  Sense strand starting at position 3006 of SEQ ID NO: 317115
agggauuuguaagaugaca

SEQ ID NO: 465624 - RNA, 19 nt, Artificial Sequence
  Description of Artificial Sequence: Synthetic oligonucleotide
  Antisense Strand to SEQ ID NO: 465623
ugucaucuuacaaaucccu

SEQ ID NO: 465625 - RNA, 19 nt, Artificial Sequence
  Description of Artificial Sequence: Synthetic oligonucleotide
  Sense strand starting at position 3017 of SEQ ID NO: 317115
agaugacaugcgugaaaca

SEQ ID NO: 465626 - RNA, 19 nt, Artificial Sequence
  Description of Artificial Sequence: Synthetic oligonucleotide
  Antisense Strand to SEQ ID NO: 465625
uguuucacgcaugucaucu

SEQ ID NO: 465627 - RNA, 19 nt, Artificial Sequence
  Description of Artificial Sequence: Synthetic oligonucleotide
  Sense strand starting at position 3413 of SEQ ID NO: 317115
auucuugauggaugucuua

SEQ ID NO: 465628 - RNA, 19 nt, Artificial Sequence
  Description of Artificial Sequence: Synthetic oligonucleotide
  Antisense Strand to SEQ ID NO: 465627
uaagacauccaucaagaau

SEQ ID NO: 465629 - RNA, 19 nt, Artificial Sequence
  Description of Artificial Sequence: Synthetic oligonucleotide
  Sense strand starting at position 3432 of SEQ ID NO: 317115
gucuacucuggacaccaua

SEQ ID NO: 465630 - RNA, 19 nt, Artificial Sequence
  Description of Artificial Sequence: Synthetic oligonucleotide
  Antisense Strand to SEQ ID NO: 465629
uaugguguccagaguagac

SEQ ID NO: 465631 - RNA, 19 nt, Artificial Sequence
  Description of Artificial Sequence: Synthetic oligonucleotide
  Sense strand starting at position 3460 of SEQ ID NO: 317115
uauagacugguuggcuuaa

SEQ ID NO: 465632 - RNA, 19 nt, Artificial Sequence
  Description of Artificial Sequence: Synthetic oligonucleotide
  Antisense Strand to SEQ ID NO: 465631
uuaagccaaccagucuaua

SEQ ID NO: 465633 - RNA, 19 nt, Artificial Sequence
  Description of Artificial Sequence: Synthetic oligonucleotide
  Sense strand starting at position 3819 of SEQ ID NO: 317115
uaauaaugggaauguaagu

SEQ ID NO: 465634 - RNA, 19 nt, Artificial Sequence
  Description of Artificial Sequence: Synthetic oligonucleotide
  Antisense Strand to SEQ ID NO: 465633
acuuacauucccauuauua

SEQ ID NO: 465635 - RNA, 19 nt, Artificial Sequence
  Description of Artificial Sequence: Synthetic oligonucleotide
  Sense strand starting at position 3824 of SEQ ID NO: 317115
augggaauguaaguuguua

SEQ ID NO: 465636 - RNA, 19 nt, Artificial Sequence
  Description of Artificial Sequence: Synthetic oligonucleotide
  Antisense Strand to SEQ ID NO: 465635
uaacaacuuacauucccau

SEQ ID NO: 465637 - RNA, 19 nt, Artificial Sequence
  Description of Artificial Sequence: Synthetic oligonucleotide
  Sense strand starting at position 3826 of SEQ ID NO: 317115
gggaauguaaguuguuaca

SEQ ID NO: 465638 - RNA, 19 nt, Artificial Sequence
  Description of Artificial Sequence: Synthetic oligonucleotide
  Antisense Strand to SEQ ID NO: 465637
uguaacaacuuacauuccc

SEQ ID NO: 465639 - RNA, 19 nt, Artificial Sequence
  Description of Artificial Sequence: Synthetic oligonucleotide
  Sense strand starting at position 3828 of SEQ ID NO: 317115
gaauguaaguuguuacaau

SEQ ID NO: 465640 - RNA, 19 nt, Artificial Sequence
  Description of Artificial Sequence: Synthetic oligonucleotide
  Antisense Strand to SEQ ID NO: 465639
auuguaacaacuuacauuc

SEQ ID NO: 465641 - RNA, 19 nt, Artificial Sequence
  Description of Artificial Sequence: Synthetic oligonucleotide
  Sense strand starting at position 3913 of SEQ ID NO: 317115
acugacaccuuguuauaca

SEQ ID NO: 465642 - RNA, 19 nt, Artificial Sequence
  Description of Artificial Sequence: Synthetic oligonucleotide
  Antisense Strand to SEQ ID NO: 465641
uguauaacaaggugucagu

SEQ ID NO: 465643 - RNA, 19 nt, Artificial Sequence
  Description of Artificial Sequence: Synthetic oligonucleotide
  Sense strand starting at position 3935 of SEQ ID NO: 317115
aagagaguuugagugcaau

SEQ ID NO: 465644 - RNA, 19 nt, Artificial Sequence
  Description of Artificial Sequence: Synthetic oligonucleotide
  Antisense Strand to SEQ ID NO: 465643
auugcacucaaacucucuu

SEQ ID NO: 465645 - RNA, 19 nt, Artificial Sequence
  Description of Artificial Sequence: Synthetic oligonucleotide
  Sense strand starting at position 3945 of SEQ ID NO: 317115
gagugcaauuguuuauaaa

SEQ ID NO: 465646 - RNA, 19 nt, Artificial Sequence
  Description of Artificial Sequence: Synthetic oligonucleotide
  Antisense Strand to SEQ ID NO: 465645
uuuauaaacaauugcacuc

SEQ ID NO: 465647 - RNA, 19 nt, Artificial Sequence
  Description of Artificial Sequence: Synthetic oligonucleotide
  Sense strand starting at position 129 of SEQ ID NO: 317116
guucuugaacuaugaaaug

SEQ ID NO: 465648 - RNA, 19 nt, Artificial Sequence
  Description of Artificial Sequence: Synthetic oligonucleotide
  Antisense Strand to SEQ ID NO: 465647
cauuucauaguucaagaac

SEQ ID NO: 465649 - RNA, 19 nt, Artificial Sequence
  Description of Artificial Sequence: Synthetic oligonucleotide
  Sense strand starting at position 145 of SEQ ID NO: 317116
augugaaaguuucuccuga

SEQ ID NO: 465650 - RNA, 19 nt, Artificial Sequence
  Description of Artificial Sequence: Synthetic oligonucleotide
  Antisense Strand to SEQ ID NO: 465649
ucaggagaaacuuucacau

SEQ ID NO: 465651 - RNA, 19 nt, Artificial Sequence
  Description of Artificial Sequence: Synthetic oligonucleotide
  Sense strand starting at position 146 of SEQ ID NO: 317116
ugugaaaguuucuccugau

SEQ ID NO: 465652 - RNA, 19 nt, Artificial Sequence
  Description of Artificial Sequence: Synthetic oligonucleotide
  Antisense Strand to SEQ ID NO: 465651
aucaggagaaacuuucaca

SEQ ID NO: 465653 - RNA, 19 nt, Artificial Sequence
  Description of Artificial Sequence: Synthetic oligonucleotide
  Sense strand starting at position 147 of SEQ ID NO: 317116
gugaaaguuucuccugaua

SEQ ID NO: 465654 - RNA, 19 nt, Artificial Sequence
  Description of Artificial Sequence: Synthetic oligonucleotide
  Antisense Strand to SEQ ID NO: 465653
uaucaggagaaacuuucac

SEQ ID NO: 465655 - RNA, 19 nt, Artificial Sequence
  Description of Artificial Sequence: Synthetic oligonucleotide
  Sense strand starting at position 211 of SEQ ID NO: 317116
acaaacuuuggaugagcua

SEQ ID NO: 465656 - RNA, 19 nt, Artificial Sequence
  Description of Artificial Sequence: Synthetic oligonucleotide
  Antisense Strand to SEQ ID NO: 465655
uagcucauccaaaguuugu

SEQ ID NO: 465657 - RNA, 19 nt, Artificial Sequence
  Description of Artificial Sequence: Synthetic oligonucleotide
  Sense strand starting at position 332 of SEQ ID NO: 317116
agccaaguaaugugagaaa

SEQ ID NO: 465658 - RNA, 19 nt, Artificial Sequence
  Description of Artificial Sequence: Synthetic oligonucleotide
  Antisense Strand to SEQ ID NO: 465657
uuucucacauuacuuggcu

SEQ ID NO: 465659 - RNA, 19 nt, Artificial Sequence
  Description of Artificial Sequence: Synthetic oligonucleotide
  Sense strand starting at position 457 of SEQ ID NO: 317116
ggauuuguguaacauaacg

SEQ ID NO: 465660 - RNA, 19 nt, Artificial Sequence
  Description of Artificial Sequence: Synthetic oligonucleotide
  Antisense Strand to SEQ ID NO: 465659
cguuauguuacacaaaucc

SEQ ID NO: 465661 - RNA, 19 nt, Artificial Sequence
  Description of Artificial Sequence: Synthetic oligonucleotide
  Sense strand starting at position 474 of SEQ ID NO: 317116
cgauuucugucauacauga

SEQ ID NO: 465662 - RNA, 19 nt, Artificial Sequence
  Description of Artificial Sequence: Synthetic oligonucleotide
  Antisense Strand to SEQ ID NO: 465661
ucauguaugacagaaaucg

SEQ ID NO: 465663 - RNA, 19 nt, Artificial Sequence
  Description of Artificial Sequence: Synthetic oligonucleotide
  Sense strand starting at position 731 of SEQ ID NO: 317116
auaugaacuuggccacaua

SEQ ID NO: 465664 - RNA, 19 nt, Artificial Sequence
  Description of Artificial Sequence: Synthetic oligonucleotide
  Antisense Strand to SEQ ID NO: 465663
uauguggccaaguucauau

SEQ ID NO: 465665 - RNA, 19 nt, Artificial Sequence
  Description of Artificial Sequence: Synthetic oligonucleotide
  Sense strand starting at position 734 of SEQ ID NO: 317116
ugaacuuggccacauaucu

SEQ ID NO: 465666 - RNA, 19 nt, Artificial Sequence
  Description of Artificial Sequence: Synthetic oligonucleotide
  Antisense Strand to SEQ ID NO: 465665
agauauguggccaaguuca

SEQ ID NO: 465667 - RNA, 19 nt, Artificial Sequence
  Description of Artificial Sequence: Synthetic oligonucleotide
  Sense strand starting at position 951 of SEQ ID NO: 317116
ugcgauuaggagugcaaga

SEQ ID NO: 465668 - RNA, 19 nt, Artificial Sequence
  Description of Artificial Sequence: Synthetic oligonucleotide
  Antisense Strand to SEQ ID NO: 465667
ucuugcacuccuaaucgca

SEQ ID NO: 465669 - RNA, 19 nt, Artificial Sequence
  Description of Artificial Sequence: Synthetic oligonucleotide
  Sense strand starting at position 953 of SEQ ID NO: 317116
cgauuaggagugcaagacu

SEQ ID NO: 465670 - RNA, 19 nt, Artificial Sequence
  Description of Artificial Sequence: Synthetic oligonucleotide
  Antisense Strand to SEQ ID NO: 465669
agucuugcacuccuaaucg

SEQ ID NO: 465671 - RNA, 19 nt, Artificial Sequence
  Description of Artificial Sequence: Synthetic oligonucleotide
  Sense strand starting at position 964 of SEQ ID NO: 317116
gcaagacuagccuggucaa

SEQ ID NO: 465672 - RNA, 19 nt, Artificial Sequence
  Description of Artificial Sequence: Synthetic oligonucleotide
  Antisense Strand to SEQ ID NO: 465671
uugaccaggcuagucuugc

SEQ ID NO: 465673 - RNA, 19 nt, Artificial Sequence
  Description of Artificial Sequence: Synthetic oligonucleotide
  Sense strand starting at position 1289 of SEQ ID NO: 317116
aaugauaaacguugaucca

SEQ ID NO: 465674 - RNA, 19 nt, Artificial Sequence
  Description of Artificial Sequence: Synthetic oligonucleotide
  Antisense Strand to SEQ ID NO: 465673
uggaucaacguuuaucauu

SEQ ID NO: 465675 - RNA, 19 nt, Artificial Sequence
  Description of Artificial Sequence: Synthetic oligonucleotide
  Sense strand starting at position 1292 of SEQ ID NO: 317116
gauaaacguugauccaaau

SEQ ID NO: 465676 - RNA, 19 nt, Artificial Sequence
  Description of Artificial Sequence: Synthetic oligonucleotide
  Antisense Strand to SEQ ID NO: 465675
auuuggaucaacguuuauc

SEQ ID NO: 465677 - RNA, 19 nt, Artificial Sequence
  Description of Artificial Sequence: Synthetic oligonucleotide
  Sense strand starting at position 1337 of SEQ ID NO: 317116
uggaaucgccuauaacgaa

SEQ ID NO: 465678 - RNA, 19 nt, Artificial Sequence
  Description of Artificial Sequence: Synthetic oligonucleotide
  Antisense Strand to SEQ ID NO: 465677
uucguuauaggcgauucca

SEQ ID NO: 465679 - RNA, 19 nt, Artificial Sequence
  Description of Artificial Sequence: Synthetic oligonucleotide
  Sense strand starting at position 1575 of SEQ ID NO: 317116
gguggacgucuccagaaug

SEQ ID NO: 465680 - RNA, 19 nt, Artificial Sequence
  Description of Artificial Sequence: Synthetic oligonucleotide
  Antisense Strand to SEQ ID NO: 465679
cauucuggagacguccacc

SEQ ID NO: 465681 - RNA, 19 nt, Artificial Sequence
  Description of Artificial Sequence: Synthetic oligonucleotide
  Sense strand starting at position 2117 of SEQ ID NO: 317116
guguacucagagcgacaau

SEQ ID NO: 465682 - RNA, 19 nt, Artificial Sequence
  Description of Artificial Sequence: Synthetic oligonucleotide
  Antisense Strand to SEQ ID NO: 465681
auugucgcucugaguacac

SEQ ID NO: 465683 - RNA, 19 nt, Artificial Sequence
  Description of Artificial Sequence: Synthetic oligonucleotide
  Sense strand starting at position 2118 of SEQ ID NO: 317116
uguacucagagcgacaauu

SEQ ID NO: 465684 - RNA, 19 nt, Artificial Sequence
  Description of Artificial Sequence: Synthetic oligonucleotide
  Antisense Strand to SEQ ID NO: 465683
aauugucgcucugaguaca

SEQ ID NO: 465685 - RNA, 19 nt, Artificial Sequence
  Description of Artificial Sequence: Synthetic oligonucleotide
  Sense strand starting at position 2145 of SEQ ID NO: 317116
cugugagaguacuuaauac

SEQ ID NO: 465686 - RNA, 19 nt, Artificial Sequence
  Description of Artificial Sequence: Synthetic oligonucleotide
  Antisense Strand to SEQ ID NO: 465685
guauuaaguacucucacag

SEQ ID NO: 465687 - RNA, 19 nt, Artificial Sequence
  Description of Artificial Sequence: Synthetic oligonucleotide
  Sense strand starting at position 2400 of SEQ ID NO: 317116
cgaguagacuuaccauuag

SEQ ID NO: 465688 - RNA, 19 nt, Artificial Sequence
  Description of Artificial Sequence: Synthetic oligonucleotide
  Antisense Strand to SEQ ID NO: 465687
cuaaugguaagucuacucg

SEQ ID NO: 465689 - RNA, 19 nt, Artificial Sequence
  Description of Artificial Sequence: Synthetic oligonucleotide
  Sense strand starting at position 2489 of SEQ ID NO: 317116
cgcacaaguuauucugaua

SEQ ID NO: 465690 - RNA, 19 nt, Artificial Sequence
  Description of Artificial Sequence: Synthetic oligonucleotide
  Antisense Strand to SEQ ID NO: 465689
uaucagaauaacuugugcg

SEQ ID NO: 465691 - RNA, 19 nt, Artificial Sequence
  Description of Artificial Sequence: Synthetic oligonucleotide
  Sense strand starting at position 2532 of SEQ ID NO: 317116
gaaugaguguacuuuccau

SEQ ID NO: 465692 - RNA, 19 nt, Artificial Sequence
  Description of Artificial Sequence: Synthetic oligonucleotide
  Antisense Strand to SEQ ID NO: 465691
auggaaaguacacucauuc

SEQ ID NO: 465693 - RNA, 19 nt, Artificial Sequence
  Description of Artificial Sequence: Synthetic oligonucleotide
  Sense strand starting at position 2539 of SEQ ID NO: 317116
uguacuuuccauuacguca

SEQ ID NO: 465694 - RNA, 19 nt, Artificial Sequence
  Description of Artificial Sequence: Synthetic oligonucleotide
  Antisense Strand to SEQ ID NO: 465693
ugacguaauggaaaguaca

SEQ ID NO: 465695 - RNA, 19 nt, Artificial Sequence
  Description of Artificial Sequence: Synthetic oligonucleotide
  Sense strand starting at position 2667 of SEQ ID NO: 317116
acacguuucucaccuccau

SEQ ID NO: 465696 - RNA, 19 nt, Artificial Sequence
  Description of Artificial Sequence: Synthetic oligonucleotide
  Antisense Strand to SEQ ID NO: 465695
auggaggugagaaacgugu

SEQ ID NO: 465697 - RNA, 19 nt, Artificial Sequence
  Description of Artificial Sequence: Synthetic oligonucleotide
  Sense strand starting at position 2852 of SEQ ID NO: 317116
aguguacucaaagaguugu

SEQ ID NO: 465698 - RNA, 19 nt, Artificial Sequence
  Description of Artificial Sequence: Synthetic oligonucleotide
  Antisense Strand to SEQ ID NO: 465697
acaacucuuugaguacacu

SEQ ID NO: 465699 - RNA, 19 nt, Artificial Sequence
  Description of Artificial Sequence: Synthetic oligonucleotide
  Sense strand starting at position 2983 of SEQ ID NO: 317116
ggaggcucucaguaaaugu

SEQ ID NO: 465700 - RNA, 19 nt, Artificial Sequence
  Description of Artificial Sequence: Synthetic oligonucleotide
  Antisense Strand to SEQ ID NO: 465699
acauuuacugagagccucc

SEQ ID NO: 465701 - RNA, 19 nt, Artificial Sequence
  Description of Artificial Sequence: Synthetic oligonucleotide
  Sense strand starting at position 3029 of SEQ ID NO: 317116
augaauuagugacucaauu

SEQ ID NO: 465702 - RNA, 19 nt, Artificial Sequence
  Description of Artificial Sequence: Synthetic oligonucleotide
  Antisense Strand to SEQ ID NO: 465701
aauugagucacuaauucau

SEQ ID NO: 465703 - RNA, 19 nt, Artificial Sequence
  Description of Artificial Sequence: Synthetic oligonucleotide
  Sense strand starting at position 3352 of SEQ ID NO: 317116
ccaugugucaagcagugua

SEQ ID NO: 465704 - RNA, 19 nt, Artificial Sequence
  Description of Artificial Sequence: Synthetic oligonucleotide
  Antisense Strand to SEQ ID NO: 465703
uacacugcuugacacaugg

SEQ ID NO: 465705 - RNA, 19 nt, Artificial Sequence
  Description of Artificial Sequence: Synthetic oligonucleotide
  Sense strand starting at position 3365 of SEQ ID NO: 317116
aguguacuuggcuaugcau

SEQ ID NO: 465706 - RNA, 19 nt, Artificial Sequence
  Description of Artificial Sequence: Synthetic oligonucleotide
  Antisense Strand to SEQ ID NO: 465705
augcauagccaaguacacu

SEQ ID NO: 465707 - RNA, 19 nt, Artificial Sequence
  Description of Artificial Sequence: Synthetic oligonucleotide
  Sense strand starting at position 3368 of SEQ ID NO: 317116
guacuuggcuaugcauaaa

SEQ ID NO: 465708 - RNA, 19 nt, Artificial Sequence
  Description of Artificial Sequence: Synthetic oligonucleotide
  Antisense Strand to SEQ ID NO: 465707
uuuaugcauagccaaguac

SEQ ID NO: 465709 - RNA, 19 nt, Artificial Sequence
  Description of Artificial Sequence: Synthetic oligonucleotide
  Sense strand starting at position 3371 of SEQ ID NO: 317116
cuuggcuaugcauaaauga

SEQ ID NO: 465710 - RNA, 19 nt, Artificial Sequence
  Description of Artificial Sequence: Synthetic oligonucleotide
  Antisense Strand to SEQ ID NO: 465709
ucauuuaugcauagccaag

SEQ ID NO: 465711 - RNA, 19 nt, Artificial Sequence
  Description of Artificial Sequence: Synthetic oligonucleotide
  Sense strand starting at position 3419 of SEQ ID NO: 317116
ccagaauuggagcaaguuu

SEQ ID NO: 465712 - RNA, 19 nt, Artificial Sequence
  Description of Artificial Sequence: Synthetic oligonucleotide
  Antisense Strand to SEQ ID NO: 465711
aaacuugcuccaauucugg

SEQ ID NO: 465713 - RNA, 19 nt, Artificial Sequence
  Description of Artificial Sequence: Synthetic oligonucleotide
  Sense strand starting at position 3428 of SEQ ID NO: 317116
gagcaaguuuacccaguca

SEQ ID NO: 465714 - RNA, 19 nt, Artificial Sequence
  Description of Artificial Sequence: Synthetic oligonucleotide
  Antisense Strand to SEQ ID NO: 465713
ugacuggguaaacuugcuc

SEQ ID NO: 465715 - RNA, 19 nt, Artificial Sequence
  Description of Artificial Sequence: Synthetic oligonucleotide
  Sense strand starting at position 3485 of SEQ ID NO: 317116
guccuuagacccuauaucu

SEQ ID NO: 465716 - RNA, 19 nt, Artificial Sequence
  Description of Artificial Sequence: Synthetic oligonucleotide
  Antisense Strand to SEQ ID NO: 465715
agauauagggucuaaggac

SEQ ID NO: 465717 - RNA, 19 nt, Artificial Sequence
  Description of Artificial Sequence: Synthetic oligonucleotide
  Sense strand starting at position 3880 of SEQ ID NO: 317116
cuguucuaacaagagaguu

SEQ ID NO: 465718 - RNA, 19 nt, Artificial Sequence
  Description of Artificial Sequence: Synthetic oligonucleotide
  Antisense Strand to SEQ ID NO: 465717
aacucucuuguuagaacag

SEQ ID NO: 465719 - RNA, 19 nt, Artificial Sequence
  Description of Artificial Sequence: Synthetic oligonucleotide
  Sense strand starting at position 3923 of SEQ ID NO: 317116
accauauaguaugcuuaca

SEQ ID NO: 465720 - RNA, 19 nt, Artificial Sequence
  Description of Artificial Sequence: Synthetic oligonucleotide
  Antisense Strand to SEQ ID NO: 465719
uguaagcauacuauauggu

SEQ ID NO: 465721 - RNA, 19 nt, Artificial Sequence
  Description of Artificial Sequence: Synthetic oligonucleotide
  Sense strand starting at position 3943 of SEQ ID NO: 317116
accauauaguaugcuuaua

SEQ ID NO: 465722 - RNA, 19 nt, Artificial Sequence
  Description of Artificial Sequence: Synthetic oligonucleotide
  Antisense Strand to SEQ ID NO: 465721
uauaagcauacuauauggu

SEQ ID NO: 465723 - RNA, 19 nt, Artificial Sequence
  Description of Artificial Sequence: Synthetic oligonucleotide
  Sense strand starting at position 3962 of SEQ ID NO: 317116
gugguagccuaauuaaagu

SEQ ID NO: 465724 - RNA, 19 nt, Artificial Sequence
  Description of Artificial Sequence: Synthetic oligonucleotide
  Antisense Strand to SEQ ID NO: 465723
acuuuaauuaggcuaccac

SEQ ID NO: 465725 - RNA, 19 nt, Artificial Sequence
  Description of Artificial Sequence: Synthetic oligonucleotide
  Sense strand starting at position 3978 of SEQ ID NO: 317116
aguaauguccuguacaggu

SEQ ID NO: 465726 - RNA, 19 nt, Artificial Sequence
  Description of Artificial Sequence: Synthetic oligonucleotide
  Antisense Strand to SEQ ID NO: 465725
accuguacaggacauuacu

SEQ ID NO: 465727 - RNA, 19 nt, Artificial Sequence
  Description of Artificial Sequence: Synthetic oligonucleotide
  Sense strand starting at position 144 of SEQ ID NO: 317117
uauggcugucuccaggaua

SEQ ID NO: 465728 - RNA, 19 nt, Artificial Sequence
  Description of Artificial Sequence: Synthetic oligonucleotide
  Antisense Strand to SEQ ID NO: 465727
uauccuggagacagccaua

SEQ ID NO: 465729 - RNA, 19 nt, Artificial Sequence
  Description of Artificial Sequence: Synthetic oligonucleotide
  Sense strand starting at position 162 of SEQ ID NO: 317117
agagguucuuaaucuagaa

SEQ ID NO: 465730 - RNA, 19 nt, Artificial Sequence
  Description of Artificial Sequence: Synthetic oligonucleotide
  Antisense Strand to SEQ ID NO: 465729
uucuagauuaagaaccucu

SEQ ID NO: 465731 - RNA, 19 nt, Artificial Sequence
  Description of Artificial Sequence: Synthetic oligonucleotide
  Sense strand starting at position 262 of SEQ ID NO: 317117
gguccauaacuuugauuag

SEQ ID NO: 465732 - RNA, 19 nt, Artificial Sequence
  Description of Artificial Sequence: Synthetic oligonucleotide
  Antisense Strand to SEQ ID NO: 465731
cuaaucaaaguuauggacc

SEQ ID NO: 465733 - RNA, 19 nt, Artificial Sequence
  Description of Artificial Sequence: Synthetic oligonucleotide
  Sense strand starting at position 280 of SEQ ID NO: 317117
gagacaaagugggauuuau

SEQ ID NO: 465734 - RNA, 19 nt, Artificial Sequence
  Description of Artificial Sequence: Synthetic oligonucleotide
  Antisense Strand to SEQ ID NO: 465733
auaaaucccacuuugucuc

SEQ ID NO: 465735 - RNA, 19 nt, Artificial Sequence
  Description of Artificial Sequence: Synthetic oligonucleotide
  Sense strand starting at position 333 of SEQ ID NO: 317117
uaaaguauggugcauggau

SEQ ID NO: 465736 - RNA, 19 nt, Artificial Sequence
  Description of Artificial Sequence: Synthetic oligonucleotide
  Antisense Strand to SEQ ID NO: 465735
auccaugcaccauacuuua

SEQ ID NO: 465737 - RNA, 19 nt, Artificial Sequence
  Description of Artificial Sequence: Synthetic oligonucleotide
  Sense strand starting at position 335 of SEQ ID NO: 317117
aaguauggugcauggauua

SEQ ID NO: 465738 - RNA, 19 nt, Artificial Sequence
  Description of Artificial Sequence: Synthetic oligonucleotide
  Antisense Strand to SEQ ID NO: 465737
uaauccaugcaccauacuu

SEQ ID NO: 465739 - RNA, 19 nt, Artificial Sequence
  Description of Artificial Sequence: Synthetic oligonucleotide
  Sense strand starting at position 340 of SEQ ID NO: 317117
uggugcauggauuagauua

SEQ ID NO: 465740 - RNA, 19 nt, Artificial Sequence
  Description of Artificial Sequence: Synthetic oligonucleotide
  Antisense Strand to SEQ ID NO: 465739
uaaucuaauccaugcacca

SEQ ID NO: 465741 - RNA, 19 nt, Artificial Sequence
  Description of Artificial Sequence: Synthetic oligonucleotide
  Sense strand starting at position 470 of SEQ ID NO: 317117
cuuuguauggucuaauuag

SEQ ID NO: 465742 - RNA, 19 nt, Artificial Sequence
  Description of Artificial Sequence: Synthetic oligonucleotide
  Antisense Strand to SEQ ID NO: 465741
cuaauuagaccauacaaag

SEQ ID NO: 465743 - RNA, 19 nt, Artificial Sequence
  Description of Artificial Sequence: Synthetic oligonucleotide
  Sense strand starting at position 527 of SEQ ID NO: 317117
ucagaaaguccauguuaau

SEQ ID NO: 465744 - RNA, 19 nt, Artificial Sequence
  Description of Artificial Sequence: Synthetic oligonucleotide
  Antisense Strand to SEQ ID NO: 465743
auuaacauggacuuucuga

SEQ ID NO: 465745 - RNA, 19 nt, Artificial Sequence
  Description of Artificial Sequence: Synthetic oligonucleotide
  Sense strand starting at position 643 of SEQ ID NO: 317117
cuuacaaagggcuauguaa

SEQ ID NO: 465746 - RNA, 19 nt, Artificial Sequence
  Description of Artificial Sequence: Synthetic oligonucleotide
  Antisense Strand to SEQ ID NO: 465745
uuacauagcccuuuguaag

SEQ ID NO: 465747 - RNA, 19 nt, Artificial Sequence
  Description of Artificial Sequence: Synthetic oligonucleotide
  Sense strand starting at position 737 of SEQ ID NO: 317117
cuuugcuucuaaucuagga

SEQ ID NO: 465748 - RNA, 19 nt, Artificial Sequence
  Description of Artificial Sequence: Synthetic oligonucleotide
  Antisense Strand to SEQ ID NO: 465747
uccuagauuagaagcaaag

SEQ ID NO: 465749 - RNA, 19 nt, Artificial Sequence
  Description of Artificial Sequence: Synthetic oligonucleotide
  Sense strand starting at position 741 of SEQ ID NO: 317117
gcuucuaaucuaggaauuc

SEQ ID NO: 465750 - RNA, 19 nt, Artificial Sequence
  Description of Artificial Sequence: Synthetic oligonucleotide
  Antisense Strand to SEQ ID NO: 465749
gaauuccuagauuagaagc

SEQ ID NO: 465751 - RNA, 19 nt, Artificial Sequence
  Description of Artificial Sequence: Synthetic oligonucleotide
  Sense strand starting at position 938 of SEQ ID NO: 317117
uugcaaaggccuuacuaau

SEQ ID NO: 465752 - RNA, 19 nt, Artificial Sequence
  Description of Artificial Sequence: Synthetic oligonucleotide
  Antisense Strand to SEQ ID NO: 465751
auuaguaaggccuuugcaa

SEQ ID NO: 465753 - RNA, 19 nt, Artificial Sequence
  Description of Artificial Sequence: Synthetic oligonucleotide
  Sense strand starting at position 1062 of SEQ ID NO: 317117
uucuuagcugaauagcuaa

SEQ ID NO: 465754 - RNA, 19 nt, Artificial Sequence
  Description of Artificial Sequence: Synthetic oligonucleotide
  Antisense Strand to SEQ ID NO: 465753
uuagcuauucagcuaagaa

SEQ ID NO: 465755 - RNA, 19 nt, Artificial Sequence
  Description of Artificial Sequence: Synthetic oligonucleotide
  Sense strand starting at position 1329 of SEQ ID NO: 317117
acagaaaggcacugucaua

SEQ ID NO: 465756 - RNA, 19 nt, Artificial Sequence
  Description of Artificial Sequence: Synthetic oligonucleotide
  Antisense Strand to SEQ ID NO: 465755
uaugacagugccuuucugu

SEQ ID NO: 465757 - RNA, 19 nt, Artificial Sequence
  Description of Artificial Sequence: Synthetic oligonucleotide
  Sense strand starting at position 1626 of SEQ ID NO: 317117
cccacccaucuuggagaaa

SEQ ID NO: 465758 - RNA, 19 nt, Artificial Sequence
  Description of Artificial Sequence: Synthetic oligonucleotide
  Antisense Strand to SEQ ID NO: 465757
uuucuccaagauggguggg

SEQ ID NO: 465759 - RNA, 19 nt, Artificial Sequence
  Description of Artificial Sequence: Synthetic oligonucleotide
  Sense strand starting at position 1638 of SEQ ID NO: 317117
ggagaaacuuaaucgccua

SEQ ID NO: 465760 - RNA, 19 nt, Artificial Sequence
  Description of Artificial Sequence: Synthetic oligonucleotide
  Antisense Strand to SEQ ID NO: 465759
uaggcgauuaaguuucucc

SEQ ID NO: 465761 - RNA, 19 nt, Artificial Sequence
  Description of Artificial Sequence: Synthetic oligonucleotide
  Sense strand starting at position 1682 of SEQ ID NO: 317117
ggacgacucuaaccauuag

SEQ ID NO: 465762 - RNA, 19 nt, Artificial Sequence
  Description of Artificial Sequence: Synthetic oligonucleotide
  Antisense Strand to SEQ ID NO: 465761
cuaaugguuagagucgucc

SEQ ID NO: 465763 - RNA, 19 nt, Artificial Sequence
  Description of Artificial Sequence: Synthetic oligonucleotide
  Sense strand starting at position 2043 of SEQ ID NO: 317117
gcaggucacgugaggcuua

SEQ ID NO: 465764 - RNA, 19 nt, Artificial Sequence
  Description of Artificial Sequence: Synthetic oligonucleotide
  Antisense Strand to SEQ ID NO: 465763
uaagccucacgugaccugc

SEQ ID NO: 465765 - RNA, 19 nt, Artificial Sequence
  Description of Artificial Sequence: Synthetic oligonucleotide
  Sense strand starting at position 2048 of SEQ ID NO: 317117
ucacgugaggcuuaugauu

SEQ ID NO: 465766 - RNA, 19 nt, Artificial Sequence
  Description of Artificial Sequence: Synthetic oligonucleotide
  Antisense Strand to SEQ ID NO: 465765
aaucauaagccucacguga

SEQ ID NO: 465767 - RNA, 19 nt, Artificial Sequence
  Description of Artificial Sequence: Synthetic oligonucleotide
  Sense strand starting at position 2053 of SEQ ID NO: 317117
ugaggcuuaugauuggaca

SEQ ID NO: 465768 - RNA, 19 nt, Artificial Sequence
  Description of Artificial Sequence: Synthetic oligonucleotide
  Antisense Strand to SEQ ID NO: 465767
uguccaaucauaagccuca

SEQ ID NO: 465769 - RNA, 19 nt, Artificial Sequence
  Description of Artificial Sequence: Synthetic oligonucleotide
  Sense strand starting at position 2231 of SEQ ID NO: 317117
guccuugccauggaugaau

SEQ ID NO: 465770 - RNA, 19 nt, Artificial Sequence
  Description of Artificial Sequence: Synthetic oligonucleotide
  Antisense Strand to SEQ ID NO: 465769
auucauccauggcaaggac

SEQ ID NO: 465771 - RNA, 19 nt, Artificial Sequence
  Description of Artificial Sequence: Synthetic oligonucleotide
  Sense strand starting at position 2370 of SEQ ID NO: 317117
aggaaaugguggcugagaa

SEQ ID NO: 465772 - RNA, 19 nt, Artificial Sequence
  Description of Artificial Sequence: Synthetic oligonucleotide
  Antisense Strand to SEQ ID NO: 465771
uucucagccaccauuuccu

SEQ ID NO: 465773 - RNA, 19 nt, Artificial Sequence
  Description of Artificial Sequence: Synthetic oligonucleotide
  Sense strand starting at position 2371 of SEQ ID NO: 317117
ggaaaugguggcugagaac

SEQ ID NO: 465774 - RNA, 19 nt, Artificial Sequence
  Description of Artificial Sequence: Synthetic oligonucleotide
  Antisense Strand to SEQ ID NO: 465773
guucucagccaccauuucc

SEQ ID NO: 465775 - RNA, 19 nt, Artificial Sequence
  Description of Artificial Sequence: Synthetic oligonucleotide
  Sense strand starting at position 2574 of SEQ ID NO: 317117
gcauccuucccagaugcaa

SEQ ID NO: 465776 - RNA, 19 nt, Artificial Sequence
  Description of Artificial Sequence: Synthetic oligonucleotide
  Antisense Strand to SEQ ID NO: 465775
uugcaucugggaaggaugc

SEQ ID NO: 465777 - RNA, 19 nt, Artificial Sequence
  Description of Artificial Sequence: Synthetic oligonucleotide
  Sense strand starting at position 2622 of SEQ ID NO: 317117
acuucucucgucuucguua

SEQ ID NO: 465778 - RNA, 19 nt, Artificial Sequence
  Description of Artificial Sequence: Synthetic oligonucleotide
  Antisense Strand to SEQ ID NO: 465777
uaacgaagacgagagaagu

SEQ ID NO: 465779 - RNA, 19 nt, Artificial Sequence
  Description of Artificial Sequence: Synthetic oligonucleotide
  Sense strand starting at position 2668 of SEQ ID NO: 317117
uugauugccuuguuauuua

SEQ ID NO: 465780 - RNA, 19 nt, Artificial Sequence
  Description of Artificial Sequence: Synthetic oligonucleotide
  Antisense Strand to SEQ ID NO: 465779
uaaauaacaaggcaaucaa

SEQ ID NO: 465781 - RNA, 19 nt, Artificial Sequence
  Description of Artificial Sequence: Synthetic oligonucleotide
  Sense strand starting at position 2671 of SEQ ID NO: 317117
auugccuuguuauuuacau

SEQ ID NO: 465782 - RNA, 19 nt, Artificial Sequence
  Description of Artificial Sequence: Synthetic oligonucleotide
  Antisense Strand to SEQ ID NO: 465781
auguaaauaacaaggcaau

SEQ ID NO: 465783 - RNA, 19 nt, Artificial Sequence
  Description of Artificial Sequence: Synthetic oligonucleotide
  Sense strand starting at position 2672 of SEQ ID NO: 317117
uugccuuguuauuuacauu

SEQ ID NO: 465784 - RNA, 19 nt, Artificial Sequence
  Description of Artificial Sequence: Synthetic oligonucleotide
  Antisense Strand to SEQ ID NO: 465783
aauguaaauaacaaggcaa

SEQ ID NO: 465785 - RNA, 19 nt, Artificial Sequence
  Description of Artificial Sequence: Synthetic oligonucleotide
  Sense strand starting at position 3046 of SEQ ID NO: 317117
ugucuagugguacaaccau

SEQ ID NO: 465786 - RNA, 19 nt, Artificial Sequence
  Description of Artificial Sequence: Synthetic oligonucleotide
  Antisense Strand to SEQ ID NO: 465785
augguuguaccacuagaca

SEQ ID NO: 465787 - RNA, 19 nt, Artificial Sequence
  Description of Artificial Sequence: Synthetic oligonucleotide
  Sense strand starting at position 3059 of SEQ ID NO: 317117
aaccauguuucuguuagag

SEQ ID NO: 465788 - RNA, 19 nt, Artificial Sequence
  Description of Artificial Sequence: Synthetic oligonucleotide
  Antisense Strand to SEQ ID NO: 465787
cucuaacagaaacaugguu

SEQ ID NO: 465789 - RNA, 19 nt, Artificial Sequence
  Description of Artificial Sequence: Synthetic oligonucleotide
  Sense strand starting at position 3079 of SEQ ID NO: 317117
ccagucacuguagauugua

SEQ ID NO: 465790 - RNA, 19 nt, Artificial Sequence
  Description of Artificial Sequence: Synthetic oligonucleotide
  Antisense Strand to SEQ ID NO: 465789
uacaaucuacagugacugg

SEQ ID NO: 465791 - RNA, 19 nt, Artificial Sequence
  Description of Artificial Sequence: Synthetic oligonucleotide
  Sense strand starting at position 3091 of SEQ ID NO: 317117
gauuguagucugggaggga

SEQ ID NO: 465792 - RNA, 19 nt, Artificial Sequence
  Description of Artificial Sequence: Synthetic oligonucleotide
  Antisense Strand to SEQ ID NO: 465791
ucccucccagacuacaauc

SEQ ID NO: 465793 - RNA, 19 nt, Artificial Sequence
  Description of Artificial Sequence: Synthetic oligonucleotide
  Sense strand starting at position 3131 of SEQ ID NO: 317117
uucgaaugcgcugacauuu

SEQ ID NO: 465794 - RNA, 19 nt, Artificial Sequence
  Description of Artificial Sequence: Synthetic oligonucleotide
  Antisense Strand to SEQ ID NO: 465793
aaaugucagcgcauucgaa

SEQ ID NO: 465795 - RNA, 19 nt, Artificial Sequence
  Description of Artificial Sequence: Synthetic oligonucleotide
  Sense strand starting at position 3180 of SEQ ID NO: 317117
uuaguacagcuuuaagaau

SEQ ID NO: 465796 - RNA, 19 nt, Artificial Sequence
  Description of Artificial Sequence: Synthetic oligonucleotide
  Antisense Strand to SEQ ID NO: 465795
auucuuaaagcuguacuaa

SEQ ID NO: 465797 - RNA, 19 nt, Artificial Sequence
  Description of Artificial Sequence: Synthetic oligonucleotide
  Sense strand starting at position 3449 of SEQ ID NO: 317117
ugagcugugaucgugcagu

SEQ ID NO: 465798 - RNA, 19 nt, Artificial Sequence
  Description of Artificial Sequence: Synthetic oligonucleotide
  Antisense Strand to SEQ ID NO: 465797
acugcacgaucacagcuca

SEQ ID NO: 465799 - RNA, 19 nt, Artificial Sequence
  Description of Artificial Sequence: Synthetic oligonucleotide
  Sense strand starting at position 3627 of SEQ ID NO: 317117
auaggucugugauccauau

SEQ ID NO: 465800 - RNA, 19 nt, Artificial Sequence
  Description of Artificial Sequence: Synthetic oligonucleotide
  Antisense Strand to SEQ ID NO: 465799
auauggaucacagaccuau

SEQ ID NO: 465801 - RNA, 19 nt, Artificial Sequence
  Description of Artificial Sequence: Synthetic oligonucleotide
  Sense strand starting at position 3631 of SEQ ID NO: 317117
gucugugauccauauguga

SEQ ID NO: 465802 - RNA, 19 nt, Artificial Sequence
  Description of Artificial Sequence: Synthetic oligonucleotide
  Antisense Strand to SEQ ID NO: 465801
ucacauauggaucacagac

SEQ ID NO: 465803 - RNA, 19 nt, Artificial Sequence
  Description of Artificial Sequence: Synthetic oligonucleotide
  Sense strand starting at position 3638 of SEQ ID NO: 317117
auccauaugugaccauaua

SEQ ID NO: 465804 - RNA, 19 nt, Artificial Sequence
  Description of Artificial Sequence: Synthetic oligonucleotide
  Antisense Strand to SEQ ID NO: 465803
uauauggucacauauggau

SEQ ID NO: 465805 - RNA, 19 nt, Artificial Sequence
  Description of Artificial Sequence: Synthetic oligonucleotide
  Sense strand starting at position 3952 of SEQ ID NO: 317117
uggaauugaccauaagcgu

SEQ ID NO: 465806 - RNA, 19 nt, Artificial Sequence
  Description of Artificial Sequence: Synthetic oligonucleotide
  Antisense Strand to SEQ ID NO: 465805
acgcuuauggucaauucca

SEQ ID NO: 465807 - RNA, 19 nt, Artificial Sequence
  Description of Artificial Sequence: Synthetic oligonucleotide
  Sense strand starting at position 2444 of SEQ ID NO: 317118
ggccuuaggucuguggaca

SEQ ID NO: 465808 - RNA, 19 nt, Artificial Sequence
  Description of Artificial Sequence: Synthetic oligonucleotide
  Antisense Strand to SEQ ID NO: 465807
uguccacagaccuaaggcc

SEQ ID NO: 465809 - RNA, 19 nt, Artificial Sequence
  Description of Artificial Sequence: Synthetic oligonucleotide
  Sense strand starting at position 2567 of SEQ ID NO: 317118
aaaggugagcucuguuuga

SEQ ID NO: 465810 - RNA, 19 nt, Artificial Sequence
  Description of Artificial Sequence: Synthetic oligonucleotide
  Antisense Strand to SEQ ID NO: 465809
ucaaacagagcucaccuuu

SEQ ID NO: 465811 - RNA, 19 nt, Artificial Sequence
  Description of Artificial Sequence: Synthetic oligonucleotide
  Sense strand starting at position 2571 of SEQ ID NO: 317118
gugagcucuguuugagaca

SEQ ID NO: 465812 - RNA, 19 nt, Artificial Sequence
  Description of Artificial Sequence: Synthetic oligonucleotide
  Antisense Strand to SEQ ID NO: 465811
ugucucaaacagagcucac

SEQ ID NO: 465813 - RNA, 19 nt, Artificial Sequence
  Description of Artificial Sequence: Synthetic oligonucleotide
  Sense strand starting at position 2856 of SEQ ID NO: 317118
ggguucugcccggagaagu

SEQ ID NO: 465814 - RNA, 19 nt, Artificial Sequence
  Description of Artificial Sequence: Synthetic oligonucleotide
  Antisense Strand to SEQ ID NO: 465813
acuucuccgggcagaaccc

SEQ ID NO: 465815 - RNA, 19 nt, Artificial Sequence
  Description of Artificial Sequence: Synthetic oligonucleotide
  Sense strand starting at position 2857 of SEQ ID NO: 317118
gguucugcccggagaagug

SEQ ID NO: 465816 - RNA, 19 nt, Artificial Sequence
  Description of Artificial Sequence: Synthetic oligonucleotide
  Antisense Strand to SEQ ID NO: 465815
cacuucuccgggcagaacc

SEQ ID NO: 465817 - RNA, 19 nt, Artificial Sequence
  Description of Artificial Sequence: Synthetic oligonucleotide
  Sense strand starting at position 3755 of SEQ ID NO: 317118
cagcauggaccuuagucau

SEQ ID NO: 465818 - RNA, 19 nt, Artificial Sequence
  Description of Artificial Sequence: Synthetic oligonucleotide
  Antisense Strand to SEQ ID NO: 465817
augacuaagguccaugcug

SEQ ID NO: 465819 - RNA, 19 nt, Artificial Sequence
  Description of Artificial Sequence: Synthetic oligonucleotide
  Sense strand starting at position 3813 of SEQ ID NO: 317118
gguaacaggaucugacuau

SEQ ID NO: 465820 - RNA, 19 nt, Artificial Sequence
  Description of Artificial Sequence: Synthetic oligonucleotide
  Antisense Strand to SEQ ID NO: 465819
auagucagauccuguuacc

SEQ ID NO: 465821 - RNA, 19 nt, Artificial Sequence
  Description of Artificial Sequence: Synthetic oligonucleotide
  Sense strand starting at position 3814 of SEQ ID NO: 317118
guaacaggaucugacuaua

SEQ ID NO: 465822 - RNA, 19 nt, Artificial Sequence
  Description of Artificial Sequence: Synthetic oligonucleotide
  Antisense Strand to SEQ ID NO: 465821
uauagucagauccuguuac

SEQ ID NO: 465823 - RNA, 19 nt, Artificial Sequence
  Description of Artificial Sequence: Synthetic oligonucleotide
  Sense strand starting at position 92 of SEQ ID NO: 317119
uggaguuuauuugacuaau

SEQ ID NO: 465824 - RNA, 19 nt, Artificial Sequence
  Description of Artificial Sequence: Synthetic oligonucleotide
  Antisense Strand to SEQ ID NO: 465823
auuagucaaauaaacucca

SEQ ID NO: 465825 - RNA, 19 nt, Artificial Sequence
  Description of Artificial Sequence: Synthetic oligonucleotide
  Sense strand starting at position 110 of SEQ ID NO: 317119
ucuggaagauuugauacuu

SEQ ID NO: 465826 - RNA, 19 nt, Artificial Sequence
  Description of Artificial Sequence: Synthetic oligonucleotide
  Antisense Strand to SEQ ID NO: 465825
aaguaucaaaucuuccaga

SEQ ID NO: 465827 - RNA, 19 nt, Artificial Sequence
  Description of Artificial Sequence: Synthetic oligonucleotide
  Sense strand starting at position 312 of SEQ ID NO: 317119
gggaauacacagugcuaug

SEQ ID NO: 465828 - RNA, 19 nt, Artificial Sequence
  Description of Artificial Sequence: Synthetic oligonucleotide
  Antisense Strand to SEQ ID NO: 465827
cauagcacuguguauuccc

SEQ ID NO: 465829 - RNA, 19 nt, Artificial Sequence
  Description of Artificial Sequence: Synthetic oligonucleotide
  Sense strand starting at position 488 of SEQ ID NO: 317119
agaauugaagcuggaaagu

SEQ ID NO: 465830 - RNA, 19 nt, Artificial Sequence
  Description of Artificial Sequence: Synthetic oligonucleotide
  Antisense Strand to SEQ ID NO: 465829
acuuuccagcuucaauucu

SEQ ID NO: 465831 - RNA, 19 nt, Artificial Sequence
  Description of Artificial Sequence: Synthetic oligonucleotide
  Sense strand starting at position 497 of SEQ ID NO: 317119
gcuggaaaguuucccaaua

SEQ ID NO: 465832 - RNA, 19 nt, Artificial Sequence
  Description of Artificial Sequence: Synthetic oligonucleotide
  Antisense Strand to SEQ ID NO: 465831
uauugggaaacuuuccagc

SEQ ID NO: 465833 - RNA, 19 nt, Artificial Sequence
  Description of Artificial Sequence: Synthetic oligonucleotide
  Sense strand starting at position 498 of SEQ ID NO: 317119
cuggaaaguuucccaauaa

SEQ ID NO: 465834 - RNA, 19 nt, Artificial Sequence
  Description of Artificial Sequence: Synthetic oligonucleotide
  Antisense Strand to SEQ ID NO: 465833
uuauugggaaacuuuccag

SEQ ID NO: 465835 - RNA, 19 nt, Artificial Sequence
  Description of Artificial Sequence: Synthetic oligonucleotide
  Sense strand starting at position 544 of SEQ ID NO: 317119
ccagauugucuugggugau

SEQ ID NO: 465836 - RNA, 19 nt, Artificial Sequence
  Description of Artificial Sequence: Synthetic oligonucleotide
  Antisense Strand to SEQ ID NO: 465835
aucacccaagacaaucugg

SEQ ID NO: 465837 - RNA, 19 nt, Artificial Sequence
  Description of Artificial Sequence: Synthetic oligonucleotide
  Sense strand starting at position 548 of SEQ ID NO: 317119
auugucuugggugaucuua

SEQ ID NO: 465838 - RNA, 19 nt, Artificial Sequence
  Description of Artificial Sequence: Synthetic oligonucleotide
  Antisense Strand to SEQ ID NO: 465837
uaagaucacccaagacaau

SEQ ID NO: 465839 - RNA, 19 nt, Artificial Sequence
  Description of Artificial Sequence: Synthetic oligonucleotide
  Sense strand starting at position 550 of SEQ ID NO: 317119
ugucuugggugaucuuaac

SEQ ID NO: 465840 - RNA, 19 nt, Artificial Sequence
  Description of Artificial Sequence: Synthetic oligonucleotide
  Antisense Strand to SEQ ID NO: 465839
guuaagaucacccaagaca

SEQ ID NO: 465841 - RNA, 19 nt, Artificial Sequence
  Description of Artificial Sequence: Synthetic oligonucleotide
  Sense strand starting at position 635 of SEQ ID NO: 317119
aggaucuaauuauccaagu

SEQ ID NO: 465842 - RNA, 19 nt, Artificial Sequence
  Description of Artificial Sequence: Synthetic oligonucleotide
  Antisense Strand to SEQ ID NO: 465841
acuuggauaauuagauccu

SEQ ID NO: 465843 - RNA, 19 nt, Artificial Sequence
  Description of Artificial Sequence: Synthetic oligonucleotide
  Sense strand starting at position 636 of SEQ ID NO: 317119
ggaucuaauuauccaaguu

SEQ ID NO: 465844 - RNA, 19 nt, Artificial Sequence
  Description of Artificial Sequence: Synthetic oligonucleotide
  Antisense Strand to SEQ ID NO: 465843
aacuuggauaauuagaucc

SEQ ID NO: 465845 - RNA, 19 nt, Artificial Sequence
  Description of Artificial Sequence: Synthetic oligonucleotide
  Sense strand starting at position 840 of SEQ ID NO: 317119
uagaaacacuugguuuagu

SEQ ID NO: 465846 - RNA, 19 nt, Artificial Sequence
  Description of Artificial Sequence: Synthetic oligonucleotide
  Antisense Strand to SEQ ID NO: 465845
acuaaaccaaguguuucua

SEQ ID NO: 465847 - RNA, 19 nt, Artificial Sequence
  Description of Artificial Sequence: Synthetic oligonucleotide
  Sense strand starting at position 841 of SEQ ID NO: 317119
agaaacacuugguuuaguu

SEQ ID NO: 465848 - RNA, 19 nt, Artificial Sequence
  Description of Artificial Sequence: Synthetic oligonucleotide
  Antisense Strand to SEQ ID NO: 465847
aacuaaaccaaguguuucu

SEQ ID NO: 465849 - RNA, 19 nt, Artificial Sequence
  Description of Artificial Sequence: Synthetic oligonucleotide
  Sense strand starting at position 845 of SEQ ID NO: 317119
acacuugguuuaguuaaca

SEQ ID NO: 465850 - RNA, 19 nt, Artificial Sequence
  Description of Artificial Sequence: Synthetic oligonucleotide
  Antisense Strand to SEQ ID NO: 465849
uguuaacuaaaccaagugu

SEQ ID NO: 465851 - RNA, 19 nt, Artificial Sequence
  Description of Artificial Sequence: Synthetic oligonucleotide
  Sense strand starting at position 888 of SEQ ID NO: 317119
gagcgagggaauggauaua

SEQ ID NO: 465852 - RNA, 19 nt, Artificial Sequence
  Description of Artificial Sequence: Synthetic oligonucleotide
  Antisense Strand to SEQ ID NO: 465851
uauauccauucccucgcuc

SEQ ID NO: 465853 - RNA, 19 nt, Artificial Sequence
  Description of Artificial Sequence: Synthetic oligonucleotide
  Sense strand starting at position 1192 of SEQ ID NO: 317119
augcaaugccacgaucuau

SEQ ID NO: 465854 - RNA, 19 nt, Artificial Sequence
  Description of Artificial Sequence: Synthetic oligonucleotide
  Antisense Strand to SEQ ID NO: 465853
auagaucguggcauugcau

SEQ ID NO: 465855 - RNA, 19 nt, Artificial Sequence
  Description of Artificial Sequence: Synthetic oligonucleotide
  Sense strand starting at position 1198 of SEQ ID NO: 317119
ugccacgaucuauauaaau

SEQ ID NO: 465856 - RNA, 19 nt, Artificial Sequence
  Description of Artificial Sequence: Synthetic oligonucleotide
  Antisense Strand to SEQ ID NO: 465855
auuuauauagaucguggca

SEQ ID NO: 465857 - RNA, 19 nt, Artificial Sequence
  Description of Artificial Sequence: Synthetic oligonucleotide
  Sense strand starting at position 1267 of SEQ ID NO: 317119
uugcccuaagcauaaagau

SEQ ID NO: 465858 - RNA, 19 nt, Artificial Sequence
  Description of Artificial Sequence: Synthetic oligonucleotide
  Antisense Strand to SEQ ID NO: 465857
aucuuuaugcuuagggcaa

SEQ ID NO: 465859 - RNA, 19 nt, Artificial Sequence
  Description of Artificial Sequence: Synthetic oligonucleotide
  Sense strand starting at position 1295 of SEQ ID NO: 317119
cugugauugaugcacacga

SEQ ID NO: 465860 - RNA, 19 nt, Artificial Sequence
  Description of Artificial Sequence: Synthetic oligonucleotide
  Antisense Strand to SEQ ID NO: 465859
ucgugugcaucaaucacag

SEQ ID NO: 465861 - RNA, 19 nt, Artificial Sequence
  Description of Artificial Sequence: Synthetic oligonucleotide
  Sense strand starting at position 1377 of SEQ ID NO: 317119
ugcaguaucugaucacuca

SEQ ID NO: 465862 - RNA, 19 nt, Artificial Sequence
  Description of Artificial Sequence: Synthetic oligonucleotide
  Antisense Strand to SEQ ID NO: 465861
ugagugaucagauacugca

SEQ ID NO: 465863 - RNA, 19 nt, Artificial Sequence
  Description of Artificial Sequence: Synthetic oligonucleotide
  Sense strand starting at position 1378 of SEQ ID NO: 317119
gcaguaucugaucacucau

SEQ ID NO: 465864 - RNA, 19 nt, Artificial Sequence
  Description of Artificial Sequence: Synthetic oligonucleotide
  Antisense Strand to SEQ ID NO: 465863
augagugaucagauacugc

SEQ ID NO: 465865 - RNA, 19 nt, Artificial Sequence
  Description of Artificial Sequence: Synthetic oligonucleotide
  Sense strand starting at position 1416 of SEQ ID NO: 317119
cucucugcccacggaaaua

SEQ ID NO: 465866 - RNA, 19 nt, Artificial Sequence
  Description of Artificial Sequence: Synthetic oligonucleotide
  Antisense Strand to SEQ ID NO: 465865
uauuuccgugggcagagag

SEQ ID NO: 465867 - RNA, 19 nt, Artificial Sequence
  Description of Artificial Sequence: Synthetic oligonucleotide
  Sense strand starting at position 1652 of SEQ ID NO: 317119
agaaacaugcccuagccua

SEQ ID NO: 465868 - RNA, 19 nt, Artificial Sequence
  Description of Artificial Sequence: Synthetic oligonucleotide
  Antisense Strand to SEQ ID NO: 465867
uaggcuagggcauguuucu

SEQ ID NO: 465869 - RNA, 19 nt, Artificial Sequence
  Description of Artificial Sequence: Synthetic oligonucleotide
  Sense strand starting at position 2064 of SEQ ID NO: 317119
gcggugauuggucugugca

SEQ ID NO: 465870 - RNA, 19 nt, Artificial Sequence
  Description of Artificial Sequence: Synthetic oligonucleotide
  Antisense Strand to SEQ ID NO: 465869
ugcacagaccaaucaccgc

SEQ ID NO: 465871 - RNA, 19 nt, Artificial Sequence
  Description of Artificial Sequence: Synthetic oligonucleotide
  Sense strand starting at position 2279 of SEQ ID NO: 317119
cgcggagucgccuuggcaa

SEQ ID NO: 465872 - RNA, 19 nt, Artificial Sequence
  Description of Artificial Sequence: Synthetic oligonucleotide
  Antisense Strand to SEQ ID NO: 465871
uugccaaggcgacuccgcg

SEQ ID NO: 465873 - RNA, 19 nt, Artificial Sequence
  Description of Artificial Sequence: Synthetic oligonucleotide
  Sense strand starting at position 2381 of SEQ ID NO: 317119
ucaaaugugaccuguguag

SEQ ID NO: 465874 - RNA, 19 nt, Artificial Sequence
  Description of Artificial Sequence: Synthetic oligonucleotide
  Antisense Strand to SEQ ID NO: 465873
cuacacaggucacauuuga

SEQ ID NO: 465875 - RNA, 19 nt, Artificial Sequence
  Description of Artificial Sequence: Synthetic oligonucleotide
  Sense strand starting at position 2430 of SEQ ID NO: 317119
gaguauagaugagucuuaa

SEQ ID NO: 465876 - RNA, 19 nt, Artificial Sequence
  Description of Artificial Sequence: Synthetic oligonucleotide
  Antisense Strand to SEQ ID NO: 465875
uuaagacucaucuauacuc

SEQ ID NO: 465877 - RNA, 19 nt, Artificial Sequence
  Description of Artificial Sequence: Synthetic oligonucleotide
  Sense strand starting at position 2797 of SEQ ID NO: 317119
agcucuaaagcucaguuua

SEQ ID NO: 465878 - RNA, 19 nt, Artificial Sequence
  Description of Artificial Sequence: Synthetic oligonucleotide
  Antisense Strand to SEQ ID NO: 465877
uaaacugagcuuuagagcu

SEQ ID NO: 465879 - RNA, 19 nt, Artificial Sequence
  Description of Artificial Sequence: Synthetic oligonucleotide
  Sense strand starting at position 3003 of SEQ ID NO: 317119
uguguuuacggcguacaca

SEQ ID NO: 465880 - RNA, 19 nt, Artificial Sequence
  Description of Artificial Sequence: Synthetic oligonucleotide
  Antisense Strand to SEQ ID NO: 465879
uguguacgccguaaacaca

SEQ ID NO: 465881 - RNA, 19 nt, Artificial Sequence
  Description of Artificial Sequence: Synthetic oligonucleotide
  Sense strand starting at position 3114 of SEQ ID NO: 317119
cccuucugccuggaauaau

SEQ ID NO: 465882 - RNA, 19 nt, Artificial Sequence
  Description of Artificial Sequence: Synthetic oligonucleotide
  Antisense Strand to SEQ ID NO: 465881
auuauuccaggcagaaggg

SEQ ID NO: 465883 - RNA, 19 nt, Artificial Sequence
  Description of Artificial Sequence: Synthetic oligonucleotide
  Sense strand starting at position 3163 of SEQ ID NO: 317119
gguacuaucuccuugagga

SEQ ID NO: 465884 - RNA, 19 nt, Artificial Sequence
  Description of Artificial Sequence: Synthetic oligonucleotide
  Antisense Strand to SEQ ID NO: 465883
uccucaaggagauaguacc

SEQ ID NO: 465885 - RNA, 19 nt, Artificial Sequence
  Description of Artificial Sequence: Synthetic oligonucleotide
  Sense strand starting at position 3164 of SEQ ID NO: 317119
guacuaucuccuugaggaa

SEQ ID NO: 465886 - RNA, 19 nt, Artificial Sequence
  Description of Artificial Sequence: Synthetic oligonucleotide
  Antisense Strand to SEQ ID NO: 465885
uuccucaaggagauaguac

SEQ ID NO: 465887 - RNA, 19 nt, Artificial Sequence
  Description of Artificial Sequence: Synthetic oligonucleotide
  Sense strand starting at position 3176 of SEQ ID NO: 317119
ugaggaaguucccucuuga

SEQ ID NO: 465888 - RNA, 19 nt, Artificial Sequence
  Description of Artificial Sequence: Synthetic oligonucleotide
  Antisense Strand to SEQ ID NO: 465887
ucaagagggaacuuccuca

SEQ ID NO: 465889 - RNA, 19 nt, Artificial Sequence
  Description of Artificial Sequence: Synthetic oligonucleotide
  Sense strand starting at position 3214 of SEQ ID NO: 317119
cagugugaccuguacuuau

SEQ ID NO: 465890 - RNA, 19 nt, Artificial Sequence
  Description of Artificial Sequence: Synthetic oligonucleotide
  Antisense Strand to SEQ ID NO: 465889
auaaguacaggucacacug

SEQ ID NO: 465891 - RNA, 19 nt, Artificial Sequence
  Description of Artificial Sequence: Synthetic oligonucleotide
  Sense strand starting at position 3379 of SEQ ID NO: 317119
gccuauauacuuuaugaag

SEQ ID NO: 465892 - RNA, 19 nt, Artificial Sequence
  Description of Artificial Sequence: Synthetic oligonucleotide
  Antisense Strand to SEQ ID NO: 465891
cuucauaaaguauauaggc

SEQ ID NO: 465893 - RNA, 19 nt, Artificial Sequence
  Description of Artificial Sequence: Synthetic oligonucleotide
  Sense strand starting at position 3390 of SEQ ID NO: 317119
uuaugaaguuaaucuggga

SEQ ID NO: 465894 - RNA, 19 nt, Artificial Sequence
  Description of Artificial Sequence: Synthetic oligonucleotide
  Antisense Strand to SEQ ID NO: 465893
ucccagauuaacuucauaa

SEQ ID NO: 465895 - RNA, 19 nt, Artificial Sequence
  Description of Artificial Sequence: Synthetic oligonucleotide
  Sense strand starting at position 3523 of SEQ ID NO: 317119
ucauguagacucuguuaca

SEQ ID NO: 465896 - RNA, 19 nt, Artificial Sequence
  Description of Artificial Sequence: Synthetic oligonucleotide
  Antisense Strand to SEQ ID NO: 465895
uguaacagagucuacauga

SEQ ID NO: 465897 - RNA, 19 nt, Artificial Sequence
  Description of Artificial Sequence: Synthetic oligonucleotide
  Sense strand starting at position 3627 of SEQ ID NO: 317119
guccuucguacugaugaaa

SEQ ID NO: 465898 - RNA, 19 nt, Artificial Sequence
  Description of Artificial Sequence: Synthetic oligonucleotide
  Antisense Strand to SEQ ID NO: 465897
uuucaucaguacgaaggac

SEQ ID NO: 465899 - RNA, 19 nt, Artificial Sequence
  Description of Artificial Sequence: Synthetic oligonucleotide
  Sense strand starting at position 3630 of SEQ ID NO: 317119
cuucguacugaugaaacua

SEQ ID NO: 465900 - RNA, 19 nt, Artificial Sequence
  Description of Artificial Sequence: Synthetic oligonucleotide
  Antisense Strand to SEQ ID NO: 465899
uaguuucaucaguacgaag

SEQ ID NO: 465901 - RNA, 19 nt, Artificial Sequence
  Description of Artificial Sequence: Synthetic oligonucleotide
  Sense strand starting at position 3650 of SEQ ID NO: 317119
ugacucagcuggucugaca

SEQ ID NO: 465902 - RNA, 19 nt, Artificial Sequence
  Description of Artificial Sequence: Synthetic oligonucleotide
  Antisense Strand to SEQ ID NO: 465901
ugucagaccagcugaguca

SEQ ID NO: 465903 - RNA, 19 nt, Artificial Sequence
  Description of Artificial Sequence: Synthetic oligonucleotide
  Sense strand starting at position 64 of SEQ ID NO: 317120
cagcuuucccggcagaaag

SEQ ID NO: 465904 - RNA, 19 nt, Artificial Sequence
  Description of Artificial Sequence: Synthetic oligonucleotide
  Antisense Strand to SEQ ID NO: 465903
cuuucugccgggaaagcug

SEQ ID NO: 465905 - RNA, 19 nt, Artificial Sequence
  Description of Artificial Sequence: Synthetic oligonucleotide
  Sense strand starting at position 231 of SEQ ID NO: 317120
augugagucaaacgaaauc

SEQ ID NO: 465906 - RNA, 19 nt, Artificial Sequence
  Description of Artificial Sequence: Synthetic oligonucleotide
  Antisense Strand to SEQ ID NO: 465905
gauuucguuugacucacau

SEQ ID NO: 465907 - RNA, 19 nt, Artificial Sequence
  Description of Artificial Sequence: Synthetic oligonucleotide
  Sense strand starting at position 354 of SEQ ID NO: 317120
agagaaacgucacucccuu

SEQ ID NO: 465908 - RNA, 19 nt, Artificial Sequence
  Description of Artificial Sequence: Synthetic oligonucleotide
  Antisense Strand to SEQ ID NO: 465907
aagggagugacguuucucu

SEQ ID NO: 465909 - RNA, 19 nt, Artificial Sequence
  Description of Artificial Sequence: Synthetic oligonucleotide
  Sense strand starting at position 544 of SEQ ID NO: 317120
gggaauuucccgugcuccu

SEQ ID NO: 465910 - RNA, 19 nt, Artificial Sequence
  Description of Artificial Sequence: Synthetic oligonucleotide
  Antisense Strand to SEQ ID NO: 465909
aggagcacgggaaauuccc

SEQ ID NO: 465911 - RNA, 19 nt, Artificial Sequence
  Description of Artificial Sequence: Synthetic oligonucleotide
  Sense strand starting at position 576 of SEQ ID NO: 317120
gcguguucucugaguagag

SEQ ID NO: 465912 - RNA, 19 nt, Artificial Sequence
  Description of Artificial Sequence: Synthetic oligonucleotide
  Antisense Strand to SEQ ID NO: 465911
cucuacucagagaacacgc

SEQ ID NO: 465913 - RNA, 19 nt, Artificial Sequence
  Description of Artificial Sequence: Synthetic oligonucleotide
  Sense strand starting at position 675 of SEQ ID NO: 317120
gggagcuucccauaggauu

SEQ ID NO: 465914 - RNA, 19 nt, Artificial Sequence
  Description of Artificial Sequence: Synthetic oligonucleotide
  Antisense Strand to SEQ ID NO: 465913
aauccuaugggaagcuccc

SEQ ID NO: 465915 - RNA, 19 nt, Artificial Sequence
  Description of Artificial Sequence: Synthetic oligonucleotide
  Sense strand starting at position 823 of SEQ ID NO: 317120
gguagaauucuguaggagc

SEQ ID NO: 465916 - RNA, 19 nt, Artificial Sequence
  Description of Artificial Sequence: Synthetic oligonucleotide
  Antisense Strand to SEQ ID NO: 465915
gcuccuacagaauucuacc

SEQ ID NO: 465917 - RNA, 19 nt, Artificial Sequence
  Description of Artificial Sequence: Synthetic oligonucleotide
  Sense strand starting at position 825 of SEQ ID NO: 317120
uagaauucuguaggagcuu

SEQ ID NO: 465918 - RNA, 19 nt, Artificial Sequence
  Description of Artificial Sequence: Synthetic oligonucleotide
  Antisense Strand to SEQ ID NO: 465917
aagcuccuacagaauucua

SEQ ID NO: 465919 - RNA, 19 nt, Artificial Sequence
  Description of Artificial Sequence: Synthetic oligonucleotide
  Sense strand starting at position 966 of SEQ ID NO: 317120
gggugaagccgaugaaaca

SEQ ID NO: 465920 - RNA, 19 nt, Artificial Sequence
  Description of Artificial Sequence: Synthetic oligonucleotide
  Antisense Strand to SEQ ID NO: 465919
uguuucaucggcuucaccc

SEQ ID NO: 465921 - RNA, 19 nt, Artificial Sequence
  Description of Artificial Sequence: Synthetic oligonucleotide
  Sense strand starting at position 1059 of SEQ ID NO: 317120
aucgguguccuauccguua

SEQ ID NO: 465922 - RNA, 19 nt, Artificial Sequence
  Description of Artificial Sequence: Synthetic oligonucleotide
  Antisense Strand to SEQ ID NO: 465921
uaacggauaggacaccgau

SEQ ID NO: 465923 - RNA, 19 nt, Artificial Sequence
  Description of Artificial Sequence: Synthetic oligonucleotide
  Sense strand starting at position 1108 of SEQ ID NO: 317120
cgaggaggucuggaaccuu

SEQ ID NO: 465924 - RNA, 19 nt, Artificial Sequence
  Description of Artificial Sequence: Synthetic oligonucleotide
  Antisense Strand to SEQ ID NO: 465923
aagguuccagaccuccucg

SEQ ID NO: 465925 - RNA, 19 nt, Artificial Sequence
  Description of Artificial Sequence: Synthetic oligonucleotide
  Sense strand starting at position 2471 of SEQ ID NO: 317120
ccacaauaauuugaguuga

SEQ ID NO: 465926 - RNA, 19 nt, Artificial Sequence
  Description of Artificial Sequence: Synthetic oligonucleotide
  Antisense Strand to SEQ ID NO: 465925
ucaacucaaauuauugugg

SEQ ID NO: 465927 - RNA, 19 nt, Artificial Sequence
  Description of Artificial Sequence: Synthetic oligonucleotide
  Sense strand starting at position 2632 of SEQ ID NO: 317120
uaaacuuuaccucgaggua

SEQ ID NO: 465928 - RNA, 19 nt, Artificial Sequence
  Description of Artificial Sequence: Synthetic oligonucleotide
  Antisense Strand to SEQ ID NO: 465927
uaccucgagguaaaguuua

SEQ ID NO: 465929 - RNA, 19 nt, Artificial Sequence
  Description of Artificial Sequence: Synthetic oligonucleotide
  Sense strand starting at position 2633 of SEQ ID NO: 317120
aaacuuuaccucgagguaa

SEQ ID NO: 465930 - RNA, 19 nt, Artificial Sequence
  Description of Artificial Sequence: Synthetic oligonucleotide
  Antisense Strand to SEQ ID NO: 465929
uuaccucgagguaaaguuu

SEQ ID NO: 465931 - RNA, 19 nt, Artificial Sequence
  Description of Artificial Sequence: Synthetic oligonucleotide
  Sense strand starting at position 2668 of SEQ ID NO: 317120
cuaacuuagagcuggagua

SEQ ID NO: 465932 - RNA, 19 nt, Artificial Sequence
  Description of Artificial Sequence: Synthetic oligonucleotide
  Antisense Strand to SEQ ID NO: 465931
uacuccagcucuaaguuag

SEQ ID NO: 465933 - RNA, 19 nt, Artificial Sequence
  Description of Artificial Sequence: Synthetic oligonucleotide
  Sense strand starting at position 2669 of SEQ ID NO: 317120
uaacuuagagcuggaguaa

SEQ ID NO: 465934 - RNA, 19 nt, Artificial Sequence
  Description of Artificial Sequence: Synthetic oligonucleotide
  Antisense Strand to SEQ ID NO: 465933
uuacuccagcucuaaguua

SEQ ID NO: 465935 - RNA, 19 nt, Artificial Sequence
  Description of Artificial Sequence: Synthetic oligonucleotide
  Sense strand starting at position 2684 of SEQ ID NO: 317120
guaaaccuugcgggaagaa

SEQ ID NO: 465936 - RNA, 19 nt, Artificial Sequence
  Description of Artificial Sequence: Synthetic oligonucleotide
  Antisense Strand to SEQ ID NO: 465935
uucuucccgcaagguuuac

SEQ ID NO: 465937 - RNA, 19 nt, Artificial Sequence
  Description of Artificial Sequence: Synthetic oligonucleotide
  Sense strand starting at position 2717 of SEQ ID NO: 317120
gugccaaggaugugagaau

SEQ ID NO: 465938 - RNA, 19 nt, Artificial Sequence
  Description of Artificial Sequence: Synthetic oligonucleotide
  Antisense Strand to SEQ ID NO: 465937
auucucacauccuuggcac

SEQ ID NO: 465939 - RNA, 19 nt, Artificial Sequence
  Description of Artificial Sequence: Synthetic oligonucleotide
  Sense strand starting at position 2726 of SEQ ID NO: 317120
augugagaauacguaagau

SEQ ID NO: 465940 - RNA, 19 nt, Artificial Sequence
  Description of Artificial Sequence: Synthetic oligonucleotide
  Antisense Strand to SEQ ID NO: 465939
aucuuacguauucucacau

SEQ ID NO: 465941 - RNA, 19 nt, Artificial Sequence
  Description of Artificial Sequence: Synthetic oligonucleotide
  Sense strand starting at position 2735 of SEQ ID NO: 317120
uacguaagauuaucuagaa

SEQ ID NO: 465942 - RNA, 19 nt, Artificial Sequence
  Description of Artificial Sequence: Synthetic oligonucleotide
  Antisense Strand to SEQ ID NO: 465941
uucuagauaaucuuacgua

SEQ ID NO: 465943 - RNA, 19 nt, Artificial Sequence
  Description of Artificial Sequence: Synthetic oligonucleotide
  Sense strand starting at position 2736 of SEQ ID NO: 317120
acguaagauuaucuagaau

SEQ ID NO: 465944 - RNA, 19 nt, Artificial Sequence
  Description of Artificial Sequence: Synthetic oligonucleotide
  Antisense Strand to SEQ ID NO: 465943
auucuagauaaucuuacgu

SEQ ID NO: 465945 - RNA, 19 nt, Artificial Sequence
  Description of Artificial Sequence: Synthetic oligonucleotide
  Sense strand starting at position 2900 of SEQ ID NO: 317120
ccaacagaaucgucaauga

SEQ ID NO: 465946 - RNA, 19 nt, Artificial Sequence
  Description of Artificial Sequence: Synthetic oligonucleotide
  Antisense Strand to SEQ ID NO: 465945
ucauugacgauucuguugg

SEQ ID NO: 465947 - RNA, 19 nt, Artificial Sequence
  Description of Artificial Sequence: Synthetic oligonucleotide
  Sense strand starting at position 2931 of SEQ ID NO: 317120
gccuuaaggugaccucaaa

SEQ ID NO: 465948 - RNA, 19 nt, Artificial Sequence
  Description of Artificial Sequence: Synthetic oligonucleotide
  Antisense Strand to SEQ ID NO: 465947
uuugaggucaccuuaaggc

SEQ ID NO: 465949 - RNA, 19 nt, Artificial Sequence
  Description of Artificial Sequence: Synthetic oligonucleotide
  Sense strand starting at position 2969 of SEQ ID NO: 317120
augacaugucccuaucucu

SEQ ID NO: 465950 - RNA, 19 nt, Artificial Sequence
  Description of Artificial Sequence: Synthetic oligonucleotide
  Antisense Strand to SEQ ID NO: 465949
agagauagggacaugucau

SEQ ID NO: 465951 - RNA, 19 nt, Artificial Sequence
  Description of Artificial Sequence: Synthetic oligonucleotide
  Sense strand starting at position 3042 of SEQ ID NO: 317120
aggaaaguuccuggaggug

SEQ ID NO: 465952 - RNA, 19 nt, Artificial Sequence
  Description of Artificial Sequence: Synthetic oligonucleotide
  Antisense Strand to SEQ ID NO: 465951
caccuccaggaacuuuccu

SEQ ID NO: 465953 - RNA, 19 nt, Artificial Sequence
  Description of Artificial Sequence: Synthetic oligonucleotide
  Sense strand starting at position 3066 of SEQ ID NO: 317120
uagugugggacuugagaac

SEQ ID NO: 465954 - RNA, 19 nt, Artificial Sequence
  Description of Artificial Sequence: Synthetic oligonucleotide
  Antisense Strand to SEQ ID NO: 465953
guucucaagucccacacua

SEQ ID NO: 465955 - RNA, 19 nt, Artificial Sequence
  Description of Artificial Sequence: Synthetic oligonucleotide
  Sense strand starting at position 3112 of SEQ ID NO: 317120
gugauuuaauguuugcugu

SEQ ID NO: 465956 - RNA, 19 nt, Artificial Sequence
  Description of Artificial Sequence: Synthetic oligonucleotide
  Antisense Strand to SEQ ID NO: 465955
acagcaaacauuaaaucac

SEQ ID NO: 465957 - RNA, 19 nt, Artificial Sequence
  Description of Artificial Sequence: Synthetic oligonucleotide
  Sense strand starting at position 3113 of SEQ ID NO: 317120
ugauuuaauguuugcuguu

SEQ ID NO: 465958 - RNA, 19 nt, Artificial Sequence
  Description of Artificial Sequence: Synthetic oligonucleotide
  Antisense Strand to SEQ ID NO: 465957
aacagcaaacauuaaauca

SEQ ID NO: 465959 - RNA, 19 nt, Artificial Sequence
  Description of Artificial Sequence: Synthetic oligonucleotide
  Sense strand starting at position 3114 of SEQ ID NO: 317120
gauuuaauguuugcuguua

SEQ ID NO: 465960 - RNA, 19 nt, Artificial Sequence
  Description of Artificial Sequence: Synthetic oligonucleotide
  Antisense Strand to SEQ ID NO: 465959
uaacagcaaacauuaaauc

SEQ ID NO: 465961 - RNA, 19 nt, Artificial Sequence
  Description of Artificial Sequence: Synthetic oligonucleotide
  Sense strand starting at position 3181 of SEQ ID NO: 317120
agaugcaagaucugccuga

SEQ ID NO: 465962 - RNA, 19 nt, Artificial Sequence
  Description of Artificial Sequence: Synthetic oligonucleotide
  Antisense Strand to SEQ ID NO: 465961
ucaggcagaucuugcaucu

SEQ ID NO: 465963 - RNA, 19 nt, Artificial Sequence
  Description of Artificial Sequence: Synthetic oligonucleotide
  Sense strand starting at position 3182 of SEQ ID NO: 317120
gaugcaagaucugccugaa

SEQ ID NO: 465964 - RNA, 19 nt, Artificial Sequence
  Description of Artificial Sequence: Synthetic oligonucleotide
  Antisense Strand to SEQ ID NO: 465963
uucaggcagaucuugcauc

SEQ ID NO: 465965 - RNA, 19 nt, Artificial Sequence
  Description of Artificial Sequence: Synthetic oligonucleotide
  Sense strand starting at position 3333 of SEQ ID NO: 317120
ggguucuaaucuccaggaa

SEQ ID NO: 465966 - RNA, 19 nt, Artificial Sequence
  Description of Artificial Sequence: Synthetic oligonucleotide
  Antisense Strand to SEQ ID NO: 465965
uuccuggagauuagaaccc

SEQ ID NO: 465967 - RNA, 19 nt, Artificial Sequence
  Description of Artificial Sequence: Synthetic oligonucleotide
  Sense strand starting at position 3381 of SEQ ID NO: 317120
guaauuauccgagcgcgga

SEQ ID NO: 465968 - RNA, 19 nt, Artificial Sequence
  Description of Artificial Sequence: Synthetic oligonucleotide
  Antisense Strand to SEQ ID NO: 465967
uccgcgcucggauaauuac

SEQ ID NO: 465969 - RNA, 19 nt, Artificial Sequence
  Description of Artificial Sequence: Synthetic oligonucleotide
  Sense strand starting at position 3422 of SEQ ID NO: 317120
uuuaacugggcgcaauaaa

SEQ ID NO: 465970 - RNA, 19 nt, Artificial Sequence
  Description of Artificial Sequence: Synthetic oligonucleotide
  Antisense Strand to SEQ ID NO: 465969
uuuauugcgcccaguuaaa

SEQ ID NO: 465971 - RNA, 19 nt, Artificial Sequence
  Description of Artificial Sequence: Synthetic oligonucleotide
  Sense strand starting at position 3474 of SEQ ID NO: 317120
augaauuagagcgggaacu

SEQ ID NO: 465972 - RNA, 19 nt, Artificial Sequence
  Description of Artificial Sequence: Synthetic oligonucleotide
  Antisense Strand to SEQ ID NO: 465971
aguucccgcucuaauucau

SEQ ID NO: 465973 - RNA, 19 nt, Artificial Sequence
  Description of Artificial Sequence: Synthetic oligonucleotide
  Sense strand starting at position 3475 of SEQ ID NO: 317120
ugaauuagagcgggaacuu

SEQ ID NO: 465974 - RNA, 19 nt, Artificial Sequence
  Description of Artificial Sequence: Synthetic oligonucleotide
  Antisense Strand to SEQ ID NO: 465973
aaguucccgcucuaauuca

SEQ ID NO: 465975 - RNA, 19 nt, Artificial Sequence
  Description of Artificial Sequence: Synthetic oligonucleotide
  Sense strand starting at position 3487 of SEQ ID NO: 317120
ggaacuuuauuauccggaa

SEQ ID NO: 465976 - RNA, 19 nt, Artificial Sequence
  Description of Artificial Sequence: Synthetic oligonucleotide
  Antisense Strand to SEQ ID NO: 465975
uuccggauaauaaaguucc

SEQ ID NO: 465977 - RNA, 19 nt, Artificial Sequence
  Description of Artificial Sequence: Synthetic oligonucleotide
  Sense strand starting at position 3488 of SEQ ID NO: 317120
gaacuuuauuauccggaag

SEQ ID NO: 465978 - RNA, 19 nt, Artificial Sequence
  Description of Artificial Sequence: Synthetic oligonucleotide
  Antisense Strand to SEQ ID NO: 465977
cuuccggauaauaaaguuc

SEQ ID NO: 465979 - RNA, 19 nt, Artificial Sequence
  Description of Artificial Sequence: Synthetic oligonucleotide
  Sense strand starting at position 3491 of SEQ ID NO: 317120
cuuuauuauccggaagacg

SEQ ID NO: 465980 - RNA, 19 nt, Artificial Sequence
  Description of Artificial Sequence: Synthetic oligonucleotide
  Antisense Strand to SEQ ID NO: 465979
cgucuuccggauaauaaag

SEQ ID NO: 465981 - RNA, 19 nt, Artificial Sequence
  Description of Artificial Sequence: Synthetic oligonucleotide
  Sense strand starting at position 3611 of SEQ ID NO: 317120
cgggaauaccggcaucuga

SEQ ID NO: 465982 - RNA, 19 nt, Artificial Sequence
  Description of Artificial Sequence: Synthetic oligonucleotide
  Antisense Strand to SEQ ID NO: 465981
ucagaugccgguauucccg

SEQ ID NO: 465983 - RNA, 19 nt, Artificial Sequence
  Description of Artificial Sequence: Synthetic oligonucleotide
  Sense strand starting at position 16 of SEQ ID NO: 317121
aguggcaaccucuggaaga

SEQ ID NO: 465984 - RNA, 19 nt, Artificial Sequence
  Description of Artificial Sequence: Synthetic oligonucleotide
  Antisense Strand to SEQ ID NO: 465983
ucuuccagagguugccacu

SEQ ID NO: 465985 - RNA, 19 nt, Artificial Sequence
  Description of Artificial Sequence: Synthetic oligonucleotide
  Sense strand starting at position 129 of SEQ ID NO: 317121
guccacagguguuucucaa

SEQ ID NO: 465986 - RNA, 19 nt, Artificial Sequence
  Description of Artificial Sequence: Synthetic oligonucleotide
  Antisense Strand to SEQ ID NO: 465985
uugagaaacaccuguggac

SEQ ID NO: 465987 - RNA, 19 nt, Artificial Sequence
  Description of Artificial Sequence: Synthetic oligonucleotide
  Sense strand starting at position 391 of SEQ ID NO: 317121
uaaagaggucauuaugugu

SEQ ID NO: 465988 - RNA, 19 nt, Artificial Sequence
  Description of Artificial Sequence: Synthetic oligonucleotide
  Antisense Strand to SEQ ID NO: 465987
acacauaaugaccucuuua

SEQ ID NO: 465989 - RNA, 19 nt, Artificial Sequence
  Description of Artificial Sequence: Synthetic oligonucleotide
  Sense strand starting at position 396 of SEQ ID NO: 317121
aggucauuauguguaacuu

SEQ ID NO: 465990 - RNA, 19 nt, Artificial Sequence
  Description of Artificial Sequence: Synthetic oligonucleotide
  Antisense Strand to SEQ ID NO: 465989
aaguuacacauaaugaccu

SEQ ID NO: 465991 - RNA, 19 nt, Artificial Sequence
  Description of Artificial Sequence: Synthetic oligonucleotide
  Sense strand starting at position 397 of SEQ ID NO: 317121
ggucauuauguguaacuua

SEQ ID NO: 465992 - RNA, 19 nt, Artificial Sequence
  Description of Artificial Sequence: Synthetic oligonucleotide
  Antisense Strand to SEQ ID NO: 465991
uaaguuacacauaaugacc

SEQ ID NO: 465993 - RNA, 19 nt, Artificial Sequence
  Description of Artificial Sequence: Synthetic oligonucleotide
  Sense strand starting at position 540 of SEQ ID NO: 317121
gggagauggaguuguuuac

SEQ ID NO: 465994 - RNA, 19 nt, Artificial Sequence
  Description of Artificial Sequence: Synthetic oligonucleotide
  Antisense Strand to SEQ ID NO: 465993
guaaacaacuccaucuccc

SEQ ID NO: 465995 - RNA, 19 nt, Artificial Sequence
  Description of Artificial Sequence: Synthetic oligonucleotide
  Sense strand starting at position 544 of SEQ ID NO: 317121
gauggaguuguuuacagca

SEQ ID NO: 465996 - RNA, 19 nt, Artificial Sequence
  Description of Artificial Sequence: Synthetic oligonucleotide
  Antisense Strand to SEQ ID NO: 465995
ugcuguaaacaacuccauc

SEQ ID NO: 465997 - RNA, 19 nt, Artificial Sequence
  Description of Artificial Sequence: Synthetic oligonucleotide
  Sense strand starting at position 560 of SEQ ID NO: 317121
gcaagcugacagggaaauu

SEQ ID NO: 465998 - RNA, 19 nt, Artificial Sequence
  Description of Artificial Sequence: Synthetic oligonucleotide
  Antisense Strand to SEQ ID NO: 465997
aauuucccugucagcuugc

SEQ ID NO: 465999 - RNA, 19 nt, Artificial Sequence
  Description of Artificial Sequence: Synthetic oligonucleotide
  Sense strand starting at position 585 of SEQ ID NO: 317121
guuguacuauuugaaacaa

SEQ ID NO: 466000 - RNA, 19 nt, Artificial Sequence
  Description of Artificial Sequence: Synthetic oligonucleotide
  Antisense Strand to SEQ ID NO: 465999
uuguuucaaauaguacaac

SEQ ID NO: 466001 - RNA, 19 nt, Artificial Sequence
  Description of Artificial Sequence: Synthetic oligonucleotide
  Sense strand starting at position 774 of SEQ ID NO: 317121
aguggaacauucuuaccca

SEQ ID NO: 466002 - RNA, 19 nt, Artificial Sequence
  Description of Artificial Sequence: Synthetic oligonucleotide
  Antisense Strand to SEQ ID NO: 466001
uggguaagaauguuccacu

SEQ ID NO: 466003 - RNA, 19 nt, Artificial Sequence
  Description of Artificial Sequence: Synthetic oligonucleotide
  Sense strand starting at position 833 of SEQ ID NO: 317121
cucacauauccuuguggaa

SEQ ID NO: 466004 - RNA, 19 nt, Artificial Sequence
  Description of Artificial Sequence: Synthetic oligonucleotide
  Antisense Strand to SEQ ID NO: 466003
uuccacaaggauaugugag

SEQ ID NO: 466005 - RNA, 19 nt, Artificial Sequence
  Description of Artificial Sequence: Synthetic oligonucleotide
  Sense strand starting at position 1187 of SEQ ID NO: 317121
ugcaacuaagacugguaaa

SEQ ID NO: 466006 - RNA, 19 nt, Artificial Sequence
  Description of Artificial Sequence: Synthetic oligonucleotide
  Antisense Strand to SEQ ID NO: 466005
uuuaccagucuuaguugca

SEQ ID NO: 466007 - RNA, 19 nt, Artificial Sequence
  Description of Artificial Sequence: Synthetic oligonucleotide
  Sense strand starting at position 1188 of SEQ ID NO: 317121
gcaacuaagacugguaaag

SEQ ID NO: 466008 - RNA, 19 nt, Artificial Sequence
  Description of Artificial Sequence: Synthetic oligonucleotide
  Antisense Strand to SEQ ID NO: 466007
cuuuaccagucuuaguugc

SEQ ID NO: 466009 - RNA, 19 nt, Artificial Sequence
  Description of Artificial Sequence: Synthetic oligonucleotide
  Sense strand starting at position 1221 of SEQ ID NO: 317121
gugcguacccuguuguauu

SEQ ID NO: 466010 - RNA, 19 nt, Artificial Sequence
  Description of Artificial Sequence: Synthetic oligonucleotide
  Antisense Strand to SEQ ID NO: 466009
aauacaacaggguacgcac

SEQ ID NO: 466011 - RNA, 19 nt, Artificial Sequence
  Description of Artificial Sequence: Synthetic oligonucleotide
  Sense strand starting at position 1232 of SEQ ID NO: 317121
guuguauuugcaugguucu

SEQ ID NO: 466012 - RNA, 19 nt, Artificial Sequence
  Description of Artificial Sequence: Synthetic oligonucleotide
  Antisense Strand to SEQ ID NO: 466011
agaaccaugcaaauacaac

SEQ ID NO: 466013 - RNA, 19 nt, Artificial Sequence
  Description of Artificial Sequence: Synthetic oligonucleotide
  Sense strand starting at position 1245 of SEQ ID NO: 317121
gguucuugccagcaaccaa

SEQ ID NO: 466014 - RNA, 19 nt, Artificial Sequence
  Description of Artificial Sequence: Synthetic oligonucleotide
  Antisense Strand to SEQ ID NO: 466013
uugguugcuggcaagaacc

SEQ ID NO: 466015 - RNA, 19 nt, Artificial Sequence
  Description of Artificial Sequence: Synthetic oligonucleotide
  Sense strand starting at position 1545 of SEQ ID NO: 317121
uucuuagugccucaaaugu

SEQ ID NO: 466016 - RNA, 19 nt, Artificial Sequence
  Description of Artificial Sequence: Synthetic oligonucleotide
  Antisense Strand to SEQ ID NO: 466015
acauuugaggcacuaagaa

SEQ ID NO: 466017 - RNA, 19 nt, Artificial Sequence
  Description of Artificial Sequence: Synthetic oligonucleotide
  Sense strand starting at position 2350 of SEQ ID NO: 317121
agagauccugcccaacagu

SEQ ID NO: 466018 - RNA, 19 nt, Artificial Sequence
  Description of Artificial Sequence: Synthetic oligonucleotide
  Antisense Strand to SEQ ID NO: 466017
acuguugggcaggaucucu

SEQ ID NO: 466019 - RNA, 19 nt, Artificial Sequence
  Description of Artificial Sequence: Synthetic oligonucleotide
  Sense strand starting at position 2361 of SEQ ID NO: 317121
ccaacagucuccgugacua

SEQ ID NO: 466020 - RNA, 19 nt, Artificial Sequence
  Description of Artificial Sequence: Synthetic oligonucleotide
  Antisense Strand to SEQ ID NO: 466019
uagucacggagacuguugg

SEQ ID NO: 466021 - RNA, 19 nt, Artificial Sequence
  Description of Artificial Sequence: Synthetic oligonucleotide
  Sense strand starting at position 2373 of SEQ ID NO: 317121
gugacuacguggaauugga

SEQ ID NO: 466022 - RNA, 19 nt, Artificial Sequence
  Description of Artificial Sequence: Synthetic oligonucleotide
  Antisense Strand to SEQ ID NO: 466021
uccaauuccacguagucac

SEQ ID NO: 466023 - RNA, 19 nt, Artificial Sequence
  Description of Artificial Sequence: Synthetic oligonucleotide
  Sense strand starting at position 2426 of SEQ ID NO: 317121
ucccacuuccuuugugaga

SEQ ID NO: 466024 - RNA, 19 nt, Artificial Sequence
  Description of Artificial Sequence: Synthetic oligonucleotide
  Antisense Strand to SEQ ID NO: 466023
ucucacaaaggaaguggga

SEQ ID NO: 466025 - RNA, 19 nt, Artificial Sequence
  Description of Artificial Sequence: Synthetic oligonucleotide
  Sense strand starting at position 2427 of SEQ ID NO: 317121
cccacuuccuuugugagau

SEQ ID NO: 466026 - RNA, 19 nt, Artificial Sequence
  Description of Artificial Sequence: Synthetic oligonucleotide
  Antisense Strand to SEQ ID NO: 466025
aucucacaaaggaaguggg

SEQ ID NO: 466027 - RNA, 19 nt, Artificial Sequence
  Description of Artificial Sequence: Synthetic oligonucleotide
  Sense strand starting at position 2437 of SEQ ID NO: 317121
uugugagauuccuuggaag

SEQ ID NO: 466028 - RNA, 19 nt, Artificial Sequence
  Description of Artificial Sequence: Synthetic oligonucleotide
  Antisense Strand to SEQ ID NO: 466027
cuuccaaggaaucucacaa

SEQ ID NO: 466029 - RNA, 19 nt, Artificial Sequence
  Description of Artificial Sequence: Synthetic oligonucleotide
  Sense strand starting at position 2439 of SEQ ID NO: 317121
gugagauuccuuggaaguu

SEQ ID NO: 466030 - RNA, 19 nt, Artificial Sequence
  Description of Artificial Sequence: Synthetic oligonucleotide
  Antisense Strand to SEQ ID NO: 466029
aacuuccaaggaaucucac

SEQ ID NO: 466031 - RNA, 19 nt, Artificial Sequence
  Description of Artificial Sequence: Synthetic oligonucleotide
  Sense strand starting at position 2760 of SEQ ID NO: 317121
cugggaaguuaacaggaaa

SEQ ID NO: 466032 - RNA, 19 nt, Artificial Sequence
  Description of Artificial Sequence: Synthetic oligonucleotide
  Antisense Strand to SEQ ID NO: 466031
uuuccuguuaacuucccag

SEQ ID NO: 466033 - RNA, 19 nt, Artificial Sequence
  Description of Artificial Sequence: Synthetic oligonucleotide
  Sense strand starting at position 2812 of SEQ ID NO: 317121
gagucagaacaacgucuuu

SEQ ID NO: 466034 - RNA, 19 nt, Artificial Sequence
  Description of Artificial Sequence: Synthetic oligonucleotide
  Antisense Strand to SEQ ID NO: 466033
aaagacguuguucugacuc

SEQ ID NO: 466035 - RNA, 19 nt, Artificial Sequence
  Description of Artificial Sequence: Synthetic oligonucleotide
  Sense strand starting at position 2926 of SEQ ID NO: 317121
cuacucuuuccuggcugau

SEQ ID NO: 466036 - RNA, 19 nt, Artificial Sequence
  Description of Artificial Sequence: Synthetic oligonucleotide
  Antisense Strand to SEQ ID NO: 466035
aucagccaggaaagaguag

SEQ ID NO: 466037 - RNA, 19 nt, Artificial Sequence
  Description of Artificial Sequence: Synthetic oligonucleotide
  Sense strand starting at position 2929 of SEQ ID NO: 317121
cucuuuccuggcugaucua

SEQ ID NO: 466038 - RNA, 19 nt, Artificial Sequence
  Description of Artificial Sequence: Synthetic oligonucleotide
  Antisense Strand to SEQ ID NO: 466037
uagaucagccaggaaagag

SEQ ID NO: 466039 - RNA, 19 nt, Artificial Sequence
  Description of Artificial Sequence: Synthetic oligonucleotide
  Sense strand starting at position 2932 of SEQ ID NO: 317121
uuuccuggcugaucuaaau

SEQ ID NO: 466040 - RNA, 19 nt, Artificial Sequence
  Description of Artificial Sequence: Synthetic oligonucleotide
  Antisense Strand to SEQ ID NO: 466039
auuuagaucagccaggaaa

SEQ ID NO: 466041 - RNA, 19 nt, Artificial Sequence
  Description of Artificial Sequence: Synthetic oligonucleotide
  Sense strand starting at position 3008 of SEQ ID NO: 317121
uggguuuggcaaugagacu

SEQ ID NO: 466042 - RNA, 19 nt, Artificial Sequence
  Description of Artificial Sequence: Synthetic oligonucleotide
  Antisense Strand to SEQ ID NO: 466041
agucucauugccaaaccca

SEQ ID NO: 466043 - RNA, 19 nt, Artificial Sequence
  Description of Artificial Sequence: Synthetic oligonucleotide
  Sense strand starting at position 3009 of SEQ ID NO: 317121
ggguuuggcaaugagacuu

SEQ ID NO: 466044 - RNA, 19 nt, Artificial Sequence
  Description of Artificial Sequence: Synthetic oligonucleotide
  Antisense Strand to SEQ ID NO: 466043
aagucucauugccaaaccc

SEQ ID NO: 466045 - RNA, 19 nt, Artificial Sequence
  Description of Artificial Sequence: Synthetic oligonucleotide
  Sense strand starting at position 3092 of SEQ ID NO: 317121
agacacuguuaauaaagaa

SEQ ID NO: 466046 - RNA, 19 nt, Artificial Sequence
  Description of Artificial Sequence: Synthetic oligonucleotide
  Antisense Strand to SEQ ID NO: 466045
uucuuuauuaacagugucu

SEQ ID NO: 466047 - RNA, 19 nt, Artificial Sequence
  Description of Artificial Sequence: Synthetic oligonucleotide
  Sense strand starting at position 3528 of SEQ ID NO: 317121
gcaaccauguuccuaugua

SEQ ID NO: 466048 - RNA, 19 nt, Artificial Sequence
  Description of Artificial Sequence: Synthetic oligonucleotide
  Antisense Strand to SEQ ID NO: 466047
uacauaggaacaugguugc

SEQ ID NO: 466049 - RNA, 19 nt, Artificial Sequence
  Description of Artificial Sequence: Synthetic oligonucleotide
  Sense strand starting at position 3637 of SEQ ID NO: 317121
uucuuaaauaagcggugaa

SEQ ID NO: 466050 - RNA, 19 nt, Artificial Sequence
  Description of Artificial Sequence: Synthetic oligonucleotide
  Antisense Strand to SEQ ID NO: 466049
uucaccgcuuauuuaagaa

SEQ ID NO: 466051 - RNA, 19 nt, Artificial Sequence
  Description of Artificial Sequence: Synthetic oligonucleotide
  Sense strand starting at position 3638 of SEQ ID NO: 317121
ucuuaaauaagcggugaaa

SEQ ID NO: 466052 - RNA, 19 nt, Artificial Sequence
  Description of Artificial Sequence: Synthetic oligonucleotide
  Antisense Strand to SEQ ID NO: 466051
uuucaccgcuuauuuaaga

SEQ ID NO: 466053 - RNA, 19 nt, Artificial Sequence
  Description of Artificial Sequence: Synthetic oligonucleotide
  Sense strand starting at position 3640 of SEQ ID NO: 317121
uuaaauaagcggugaaaua

SEQ ID NO: 466054 - RNA, 19 nt, Artificial Sequence
  Description of Artificial Sequence: Synthetic oligonucleotide
  Antisense Strand to SEQ ID NO: 466053
uauuucaccgcuuauuuaa

SEQ ID NO: 466055 - RNA, 19 nt, Artificial Sequence
  Description of Artificial Sequence: Synthetic oligonucleotide
  Sense strand starting at position 3641 of SEQ ID NO: 317121
uaaauaagcggugaaauau

SEQ ID NO: 466056 - RNA, 19 nt, Artificial Sequence
  Description of Artificial Sequence: Synthetic oligonucleotide
  Antisense Strand to SEQ ID NO: 466055
auauuucaccgcuuauuua

SEQ ID NO: 466057 - RNA, 19 nt, Artificial Sequence
  Description of Artificial Sequence: Synthetic oligonucleotide
  Sense strand starting at position 3879 of SEQ ID NO: 317121
uugaauaguguguagcaca

SEQ ID NO: 466058 - RNA, 19 nt, Artificial Sequence
  Description of Artificial Sequence: Synthetic oligonucleotide
  Antisense Strand to SEQ ID NO: 466057
ugugcuacacacuauucaa

SEQ ID NO: 466059 - RNA, 19 nt, Artificial Sequence
  Description of Artificial Sequence: Synthetic oligonucleotide
  Sense strand starting at position 3936 of SEQ ID NO: 317121
uguaauguuagacacguga

SEQ ID NO: 466060 - RNA, 19 nt, Artificial Sequence
  Description of Artificial Sequence: Synthetic oligonucleotide
  Antisense Strand to SEQ ID NO: 466059
ucacgugucuaacauuaca

SEQ ID NO: 466061 - RNA, 19 nt, Artificial Sequence
  Description of Artificial Sequence: Synthetic oligonucleotide
  Sense strand starting at position 3940 of SEQ ID NO: 317121
auguuagacacgugacacu

SEQ ID NO: 466062 - RNA, 19 nt, Artificial Sequence
  Description of Artificial Sequence: Synthetic oligonucleotide
  Antisense Strand to SEQ ID NO: 466061
agugucacgugucuaacau

SEQ ID NO: 466063 - RNA, 19 nt, Artificial Sequence
  Description of Artificial Sequence: Synthetic oligonucleotide
  Sense strand starting at position 12 of SEQ ID NO: 317122
cucuuaagagcacgucuua

SEQ ID NO: 466064 - RNA, 19 nt, Artificial Sequence
  Description of Artificial Sequence: Synthetic oligonucleotide
  Antisense Strand to SEQ ID NO: 466063
uaagacgugcucuuaagag

SEQ ID NO: 466065 - RNA, 19 nt, Artificial Sequence
  Description of Artificial Sequence: Synthetic oligonucleotide
  Sense strand starting at position 19 of SEQ ID NO: 317122
gagcacgucuuagcaaaua

SEQ ID NO: 466066 - RNA, 19 nt, Artificial Sequence
  Description of Artificial Sequence: Synthetic oligonucleotide
  Antisense Strand to SEQ ID NO: 466065
uauuugcuaagacgugcuc

SEQ ID NO: 466067 - RNA, 19 nt, Artificial Sequence
  Description of Artificial Sequence: Synthetic oligonucleotide
  Sense strand starting at position 98 of SEQ ID NO: 317122
uuguucaggcgugaucauu

SEQ ID NO: 466068 - RNA, 19 nt, Artificial Sequence
  Description of Artificial Sequence: Synthetic oligonucleotide
  Antisense Strand to SEQ ID NO: 466067
aaugaucacgccugaacaa

SEQ ID NO: 466069 - RNA, 19 nt, Artificial Sequence
  Description of Artificial Sequence: Synthetic oligonucleotide
  Sense strand starting at position 439 of SEQ ID NO: 317122
uuuaaagguucugcaggau

SEQ ID NO: 466070 - RNA, 19 nt, Artificial Sequence
  Description of Artificial Sequence: Synthetic oligonucleotide
  Antisense Strand to SEQ ID NO: 466069
auccugcagaaccuuuaaa

SEQ ID NO: 466071 - RNA, 19 nt, Artificial Sequence
  Description of Artificial Sequence: Synthetic oligonucleotide
  Sense strand starting at position 478 of SEQ ID NO: 317122
agguguugacagcaaggaa

SEQ ID NO: 466072 - RNA, 19 nt, Artificial Sequence
  Description of Artificial Sequence: Synthetic oligonucleotide
  Antisense Strand to SEQ ID NO: 466071
uuccuugcugucaacaccu

SEQ ID NO: 466073 - RNA, 19 nt, Artificial Sequence
  Description of Artificial Sequence: Synthetic oligonucleotide
  Sense strand starting at position 656 of SEQ ID NO: 317122
accuguuugguccagagaa

SEQ ID NO: 466074 - RNA, 19 nt, Artificial Sequence
  Description of Artificial Sequence: Synthetic oligonucleotide
  Antisense Strand to SEQ ID NO: 466073
uucucuggaccaaacaggu

SEQ ID NO: 466075 - RNA, 19 nt, Artificial Sequence
  Description of Artificial Sequence: Synthetic oligonucleotide
  Sense strand starting at position 658 of SEQ ID NO: 317122
cuguuugguccagagaaag

SEQ ID NO: 466076 - RNA, 19 nt, Artificial Sequence
  Description of Artificial Sequence: Synthetic oligonucleotide
  Antisense Strand to SEQ ID NO: 466075
cuuucucuggaccaaacag

SEQ ID NO: 466077 - RNA, 19 nt, Artificial Sequence
  Description of Artificial Sequence: Synthetic oligonucleotide
  Sense strand starting at position 697 of SEQ ID NO: 317122
gaaagagccucuucucgaa

SEQ ID NO: 466078 - RNA, 19 nt, Artificial Sequence
  Description of Artificial Sequence: Synthetic oligonucleotide
  Antisense Strand to SEQ ID NO: 466077
uucgagaagaggcucuuuc

SEQ ID NO: 466079 - RNA, 19 nt, Artificial Sequence
  Description of Artificial Sequence: Synthetic oligonucleotide
  Sense strand starting at position 704 of SEQ ID NO: 317122
ccucuucucgaaggcagaa

SEQ ID NO: 466080 - RNA, 19 nt, Artificial Sequence
  Description of Artificial Sequence: Synthetic oligonucleotide
  Antisense Strand to SEQ ID NO: 466079
uucugccuucgagaagagg

SEQ ID NO: 466081 - RNA, 19 nt, Artificial Sequence
  Description of Artificial Sequence: Synthetic oligonucleotide
  Sense strand starting at position 717 of SEQ ID NO: 317122
gcagaauuccuccaguuua

SEQ ID NO: 466082 - RNA, 19 nt, Artificial Sequence
  Description of Artificial Sequence: Synthetic oligonucleotide
  Antisense Strand to SEQ ID NO: 466081
uaaacuggaggaauucugc

SEQ ID NO: 466083 - RNA, 19 nt, Artificial Sequence
  Description of Artificial Sequence: Synthetic oligonucleotide
  Sense strand starting at position 942 of SEQ ID NO: 317122
uugaucuuggcagacaugu

SEQ ID NO: 466084 - RNA, 19 nt, Artificial Sequence
  Description of Artificial Sequence: Synthetic oligonucleotide
  Antisense Strand to SEQ ID NO: 466083
acaugucugccaagaucaa

SEQ ID NO: 466085 - RNA, 19 nt, Artificial Sequence
  Description of Artificial Sequence: Synthetic oligonucleotide
  Sense strand starting at position 1049 of SEQ ID NO: 317122
cacucagaggucugaacau

SEQ ID NO: 466086 - RNA, 19 nt, Artificial Sequence
  Description of Artificial Sequence: Synthetic oligonucleotide
  Antisense Strand to SEQ ID NO: 466085
auguucagaccucugagug

SEQ ID NO: 466087 - RNA, 19 nt, Artificial Sequence
  Description of Artificial Sequence: Synthetic oligonucleotide
  Sense strand starting at position 1120 of SEQ ID NO: 317122
caaugcauugcucggagga

SEQ ID NO: 466088 - RNA, 19 nt, Artificial Sequence
  Description of Artificial Sequence: Synthetic oligonucleotide
  Antisense Strand to SEQ ID NO: 466087
uccuccgagcaaugcauug

SEQ ID NO: 466089 - RNA, 19 nt, Artificial Sequence
  Description of Artificial Sequence: Synthetic oligonucleotide
  Sense strand starting at position 1121 of SEQ ID NO: 317122
aaugcauugcucggaggaa

SEQ ID NO: 466090 - RNA, 19 nt, Artificial Sequence
  Description of Artificial Sequence: Synthetic oligonucleotide
  Antisense Strand to SEQ ID NO: 466089
uuccuccgagcaaugcauu

SEQ ID NO: 466091 - RNA, 19 nt, Artificial Sequence
  Description of Artificial Sequence: Synthetic oligonucleotide
  Sense strand starting at position 1168 of SEQ ID NO: 317122
ccuguaguugcauauuaua

SEQ ID NO: 466092 - RNA, 19 nt, Artificial Sequence
  Description of Artificial Sequence: Synthetic oligonucleotide
  Antisense Strand to SEQ ID NO: 466091
uauaauaugcaacuacagg

SEQ ID NO: 466093 - RNA, 19 nt, Artificial Sequence
  Description of Artificial Sequence: Synthetic oligonucleotide
  Sense strand starting at position 1177 of SEQ ID NO: 317122
gcauauuauacguaagugu

SEQ ID NO: 466094 - RNA, 19 nt, Artificial Sequence
  Description of Artificial Sequence: Synthetic oligonucleotide
  Antisense Strand to SEQ ID NO: 466093
acacuuacguauaauaugc

SEQ ID NO: 466095 - RNA, 19 nt, Artificial Sequence
  Description of Artificial Sequence: Synthetic oligonucleotide
  Sense strand starting at position 1256 of SEQ ID NO: 317122
agugucaacuuguuuacuu

SEQ ID NO: 466096 - RNA, 19 nt, Artificial Sequence
  Description of Artificial Sequence: Synthetic oligonucleotide
  Antisense Strand to SEQ ID NO: 466095
aaguaaacaaguugacacu

SEQ ID NO: 466097 - RNA, 19 nt, Artificial Sequence
  Description of Artificial Sequence: Synthetic oligonucleotide
  Sense strand starting at position 1394 of SEQ ID NO: 317122
gcuucuauguuuccauauu

SEQ ID NO: 466098 - RNA, 19 nt, Artificial Sequence
  Description of Artificial Sequence: Synthetic oligonucleotide
  Antisense Strand to SEQ ID NO: 466097
aauauggaaacauagaagc

SEQ ID NO: 466099 - RNA, 19 nt, Artificial Sequence
  Description of Artificial Sequence: Synthetic oligonucleotide
  Sense strand starting at position 1505 of SEQ ID NO: 317122
accugaggcuucucaaucu

SEQ ID NO: 466100 - RNA, 19 nt, Artificial Sequence
  Description of Artificial Sequence: Synthetic oligonucleotide
  Antisense Strand to SEQ ID NO: 466099
agauugagaagccucaggu

SEQ ID NO: 466101 - RNA, 19 nt, Artificial Sequence
  Description of Artificial Sequence: Synthetic oligonucleotide
  Sense strand starting at position 1610 of SEQ ID NO: 317122
cugugacuccgcgccuuau

SEQ ID NO: 466102 - RNA, 19 nt, Artificial Sequence
  Description of Artificial Sequence: Synthetic oligonucleotide
  Antisense Strand to SEQ ID NO: 466101
auaaggcgcggagucacag

SEQ ID NO: 466103 - RNA, 19 nt, Artificial Sequence
  Description of Artificial Sequence: Synthetic oligonucleotide
  Sense strand starting at position 1614 of SEQ ID NO: 317122
gacuccgcgccuuaugaaa

SEQ ID NO: 466104 - RNA, 19 nt, Artificial Sequence
  Description of Artificial Sequence: Synthetic oligonucleotide
  Antisense Strand to SEQ ID NO: 466103
uuucauaaggcgcggaguc

SEQ ID NO: 466105 - RNA, 19 nt, Artificial Sequence
  Description of Artificial Sequence: Synthetic oligonucleotide
  Sense strand starting at position 1655 of SEQ ID NO: 317122
ggagaagaguccucucuaa

SEQ ID NO: 466106 - RNA, 19 nt, Artificial Sequence
  Description of Artificial Sequence: Synthetic oligonucleotide
  Antisense Strand to SEQ ID NO: 466105
uuagagaggacucuucucc

SEQ ID NO: 466107 - RNA, 19 nt, Artificial Sequence
  Description of Artificial Sequence: Synthetic oligonucleotide
  Sense strand starting at position 1692 of SEQ ID NO: 317122
guccgcaguguuuaggaaa

SEQ ID NO: 466108 - RNA, 19 nt, Artificial Sequence
  Description of Artificial Sequence: Synthetic oligonucleotide
  Antisense Strand to SEQ ID NO: 466107
uuuccuaaacacugcggac

SEQ ID NO: 466109 - RNA, 19 nt, Artificial Sequence
  Description of Artificial Sequence: Synthetic oligonucleotide
  Sense strand starting at position 2313 of SEQ ID NO: 317122
uguguuuccucucugggau

SEQ ID NO: 466110 - RNA, 19 nt, Artificial Sequence
  Description of Artificial Sequence: Synthetic oligonucleotide
  Antisense Strand to SEQ ID NO: 466109
aucccagagaggaaacaca

SEQ ID NO: 466111 - RNA, 19 nt, Artificial Sequence
  Description of Artificial Sequence: Synthetic oligonucleotide
  Sense strand starting at position 2314 of SEQ ID NO: 317122
guguuuccucucugggaug

SEQ ID NO: 466112 - RNA, 19 nt, Artificial Sequence
  Description of Artificial Sequence: Synthetic oligonucleotide
  Antisense Strand to SEQ ID NO: 466111
caucccagagaggaaacac

SEQ ID NO: 466113 - RNA, 19 nt, Artificial Sequence
  Description of Artificial Sequence: Synthetic oligonucleotide
  Sense strand starting at position 2368 of SEQ ID NO: 317122
ucaaaugcgaaaugggauu

SEQ ID NO: 466114 - RNA, 19 nt, Artificial Sequence
  Description of Artificial Sequence: Synthetic oligonucleotide
  Antisense Strand to SEQ ID NO: 466113
aaucccauuucgcauuuga

SEQ ID NO: 466115 - RNA, 19 nt, Artificial Sequence
  Description of Artificial Sequence: Synthetic oligonucleotide
  Sense strand starting at position 2390 of SEQ ID NO: 317122
gcgaguucaccagcugugu

SEQ ID NO: 466116 - RNA, 19 nt, Artificial Sequence
  Description of Artificial Sequence: Synthetic oligonucleotide
  Antisense Strand to SEQ ID NO: 466115
acacagcuggugaacucgc

SEQ ID NO: 466117 - RNA, 19 nt, Artificial Sequence
  Description of Artificial Sequence: Synthetic oligonucleotide
  Sense strand starting at position 2503 of SEQ ID NO: 317122
gacugucuuccguugugua

SEQ ID NO: 466118 - RNA, 19 nt, Artificial Sequence
  Description of Artificial Sequence: Synthetic oligonucleotide
  Antisense Strand to SEQ ID NO: 466117
uacacaacggaagacaguc

SEQ ID NO: 466119 - RNA, 19 nt, Artificial Sequence
  Description of Artificial Sequence: Synthetic oligonucleotide
  Sense strand starting at position 2505 of SEQ ID NO: 317122
cugucuuccguuguguauu

SEQ ID NO: 466120 - RNA, 19 nt, Artificial Sequence
  Description of Artificial Sequence: Synthetic oligonucleotide
  Antisense Strand to SEQ ID NO: 466119
aauacacaacggaagacag

SEQ ID NO: 466121 - RNA, 19 nt, Artificial Sequence
  Description of Artificial Sequence: Synthetic oligonucleotide
  Sense strand starting at position 2515 of SEQ ID NO: 317122
uuguguauugcaccgcuua

SEQ ID NO: 466122 - RNA, 19 nt, Artificial Sequence
  Description of Artificial Sequence: Synthetic oligonucleotide
  Antisense Strand to SEQ ID NO: 466121
uaagcggugcaauacacaa

SEQ ID NO: 466123 - RNA, 19 nt, Artificial Sequence
  Description of Artificial Sequence: Synthetic oligonucleotide
  Sense strand starting at position 2517 of SEQ ID NO: 317122
guguauugcaccgcuuaag

SEQ ID NO: 466124 - RNA, 19 nt, Artificial Sequence
  Description of Artificial Sequence: Synthetic oligonucleotide
  Antisense Strand to SEQ ID NO: 466123
cuuaagcggugcaauacac

SEQ ID NO: 466125 - RNA, 19 nt, Artificial Sequence
  Description of Artificial Sequence: Synthetic oligonucleotide
  Sense strand starting at position 2589 of SEQ ID NO: 317122
acucaauauuugcagauga

SEQ ID NO: 466126 - RNA, 19 nt, Artificial Sequence
  Description of Artificial Sequence: Synthetic oligonucleotide
  Antisense Strand to SEQ ID NO: 466125
ucaucugcaaauauugagu

SEQ ID NO: 466127 - RNA, 19 nt, Artificial Sequence
  Description of Artificial Sequence: Synthetic oligonucleotide
  Sense strand starting at position 2615 of SEQ ID NO: 317122
guauguacuucuguaagua

SEQ ID NO: 466128 - RNA, 19 nt, Artificial Sequence
  Description of Artificial Sequence: Synthetic oligonucleotide
  Antisense Strand to SEQ ID NO: 466127
uacuuacagaaguacauac

SEQ ID NO: 466129 - RNA, 19 nt, Artificial Sequence
  Description of Artificial Sequence: Synthetic oligonucleotide
  Sense strand starting at position 2673 of SEQ ID NO: 317122
gauacauggcagcaaugua

SEQ ID NO: 466130 - RNA, 19 nt, Artificial Sequence
  Description of Artificial Sequence: Synthetic oligonucleotide
  Antisense Strand to SEQ ID NO: 466129
uacauugcugccauguauc

SEQ ID NO: 466131 - RNA, 19 nt, Artificial Sequence
  Description of Artificial Sequence: Synthetic oligonucleotide
  Sense strand starting at position 2716 of SEQ ID NO: 317122
aguugugugcagugaggaa

SEQ ID NO: 466132 - RNA, 19 nt, Artificial Sequence
  Description of Artificial Sequence: Synthetic oligonucleotide
  Antisense Strand to SEQ ID NO: 466131
uuccucacugcacacaacu

SEQ ID NO: 466133 - RNA, 19 nt, Artificial Sequence
  Description of Artificial Sequence: Synthetic oligonucleotide
  Sense strand starting at position 2795 of SEQ ID NO: 317122
agcuucgaagccugaaauu

SEQ ID NO: 466134 - RNA, 19 nt, Artificial Sequence
  Description of Artificial Sequence: Synthetic oligonucleotide
  Antisense Strand to SEQ ID NO: 466133
aauuucaggcuucgaagcu

SEQ ID NO: 466135 - RNA, 19 nt, Artificial Sequence
  Description of Artificial Sequence: Synthetic oligonucleotide
  Sense strand starting at position 2863 of SEQ ID NO: 317122
ccuaaaguuucuuugaaag

SEQ ID NO: 466136 - RNA, 19 nt, Artificial Sequence
  Description of Artificial Sequence: Synthetic oligonucleotide
  Antisense Strand to SEQ ID NO: 466135
cuuucaaagaaacuuuagg

SEQ ID NO: 466137 - RNA, 19 nt, Artificial Sequence
  Description of Artificial Sequence: Synthetic oligonucleotide
  Sense strand starting at position 3851 of SEQ ID NO: 317122
uggcaucgguaucuuacaa

SEQ ID NO: 466138 - RNA, 19 nt, Artificial Sequence
  Description of Artificial Sequence: Synthetic oligonucleotide
  Antisense Strand to SEQ ID NO: 466137
uuguaagauaccgaugcca

SEQ ID NO: 466139 - RNA, 19 nt, Artificial Sequence
  Description of Artificial Sequence: Synthetic oligonucleotide
  Sense strand starting at position 3933 of SEQ ID NO: 317122
acgagaaaccucuggugcu

SEQ ID NO: 466140 - RNA, 19 nt, Artificial Sequence
  Description of Artificial Sequence: Synthetic oligonucleotide
  Antisense Strand to SEQ ID NO: 466139
agcaccagagguuucucgu

SEQ ID NO: 466141 - RNA, 19 nt, Artificial Sequence
  Description of Artificial Sequence: Synthetic oligonucleotide
  Sense strand starting at position 3954 of SEQ ID NO: 317122
gagguuaagcaauguacca

SEQ ID NO: 466142 - RNA, 19 nt, Artificial Sequence
  Description of Artificial Sequence: Synthetic oligonucleotide
  Antisense Strand to SEQ ID NO: 466141
ugguacauugcuuaaccuc

SEQ ID NO: 466143 - RNA, 19 nt, Artificial Sequence
  Description of Artificial Sequence: Synthetic oligonucleotide
  Sense strand starting at position 99 of SEQ ID NO: 317123
ccuaaaugacccgguuaau

SEQ ID NO: 466144 - RNA, 19 nt, Artificial Sequence
  Description of Artificial Sequence: Synthetic oligonucleotide
  Antisense Strand to SEQ ID NO: 466143
auuaaccgggucauuuagg

SEQ ID NO: 466145 - RNA, 19 nt, Artificial Sequence
  Description of Artificial Sequence: Synthetic oligonucleotide
  Sense strand starting at position 102 of SEQ ID NO: 317123
aaaugacccgguuaauguu

SEQ ID NO: 466146 - RNA, 19 nt, Artificial Sequence
  Description of Artificial Sequence: Synthetic oligonucleotide
  Antisense Strand to SEQ ID NO: 466145
aacauuaaccgggucauuu

SEQ ID NO: 466147 - RNA, 19 nt, Artificial Sequence
  Description of Artificial Sequence: Synthetic oligonucleotide
  Sense strand starting at position 129 of SEQ ID NO: 317123
ccuacaguuguccaaguua

SEQ ID NO: 466148 - RNA, 19 nt, Artificial Sequence
  Description of Artificial Sequence: Synthetic oligonucleotide
  Antisense Strand to SEQ ID NO: 466147
uaacuuggacaacuguagg

SEQ ID NO: 466149 - RNA, 19 nt, Artificial Sequence
  Description of Artificial Sequence: Synthetic oligonucleotide
  Sense strand starting at position 134 of SEQ ID NO: 317123
aguuguccaaguuagagaa

SEQ ID NO: 466150 - RNA, 19 nt, Artificial Sequence
  Description of Artificial Sequence: Synthetic oligonucleotide
  Antisense Strand to SEQ ID NO: 466149
uucucuaacuuggacaacu

SEQ ID NO: 466151 - RNA, 19 nt, Artificial Sequence
  Description of Artificial Sequence: Synthetic oligonucleotide
  Sense strand starting at position 146 of SEQ ID NO: 317123
uagagaagcccuuaggguu

SEQ ID NO: 466152 - RNA, 19 nt, Artificial Sequence
  Description of Artificial Sequence: Synthetic oligonucleotide
  Antisense Strand to SEQ ID NO: 466151
aacccuaagggcuucucua

SEQ ID NO: 466153 - RNA, 19 nt, Artificial Sequence
  Description of Artificial Sequence: Synthetic oligonucleotide
  Sense strand starting at position 160 of SEQ ID NO: 317123
ggguuauuaucuccuccuu

SEQ ID NO: 466154 - RNA, 19 nt, Artificial Sequence
  Description of Artificial Sequence: Synthetic oligonucleotide
  Antisense Strand to SEQ ID NO: 466153
aaggaggagauaauaaccc

SEQ ID NO: 466155 - RNA, 19 nt, Artificial Sequence
  Description of Artificial Sequence: Synthetic oligonucleotide
  Sense strand starting at position 359 of SEQ ID NO: 317123
ggagcauuuaguugcuucu

SEQ ID NO: 466156 - RNA, 19 nt, Artificial Sequence
  Description of Artificial Sequence: Synthetic oligonucleotide
  Antisense Strand to SEQ ID NO: 466155
agaagcaacuaaaugcucc

SEQ ID NO: 466157 - RNA, 19 nt, Artificial Sequence
  Description of Artificial Sequence: Synthetic oligonucleotide
  Sense strand starting at position 447 of SEQ ID NO: 317123
aggauuccuuaagcacaga

SEQ ID NO: 466158 - RNA, 19 nt, Artificial Sequence
  Description of Artificial Sequence: Synthetic oligonucleotide
  Antisense Strand to SEQ ID NO: 466157
ucugugcuuaaggaauccu

SEQ ID NO: 466159 - RNA, 19 nt, Artificial Sequence
  Description of Artificial Sequence: Synthetic oligonucleotide
  Sense strand starting at position 509 of SEQ ID NO: 317123
acgcauagaacucgauaca

SEQ ID NO: 466160 - RNA, 19 nt, Artificial Sequence
  Description of Artificial Sequence: Synthetic oligonucleotide
  Antisense Strand to SEQ ID NO: 466159
uguaucgaguucuaugcgu

SEQ ID NO: 466161 - RNA, 19 nt, Artificial Sequence
  Description of Artificial Sequence: Synthetic oligonucleotide
  Sense strand starting at position 510 of SEQ ID NO: 317123
cgcauagaacucgauacau

SEQ ID NO: 466162 - RNA, 19 nt, Artificial Sequence
  Description of Artificial Sequence: Synthetic oligonucleotide
  Antisense Strand to SEQ ID NO: 466161
auguaucgaguucuaugcg

SEQ ID NO: 466163 - RNA, 19 nt, Artificial Sequence
  Description of Artificial Sequence: Synthetic oligonucleotide
  Sense strand starting at position 512 of SEQ ID NO: 317123
cauagaacucgauacaugu

SEQ ID NO: 466164 - RNA, 19 nt, Artificial Sequence
  Description of Artificial Sequence: Synthetic oligonucleotide
  Antisense Strand to SEQ ID NO: 466163
acauguaucgaguucuaug

SEQ ID NO: 466165 - RNA, 19 nt, Artificial Sequence
  Description of Artificial Sequence: Synthetic oligonucleotide
  Sense strand starting at position 519 of SEQ ID NO: 317123
cucgauacaugugucaaau

SEQ ID NO: 466166 - RNA, 19 nt, Artificial Sequence
  Description of Artificial Sequence: Synthetic oligonucleotide
  Antisense Strand to SEQ ID NO: 466165
auuugacacauguaucgag

SEQ ID NO: 466167 - RNA, 19 nt, Artificial Sequence
  Description of Artificial Sequence: Synthetic oligonucleotide
  Sense strand starting at position 653 of SEQ ID NO: 317123
uggugcuuacuuuggauua

SEQ ID NO: 466168 - RNA, 19 nt, Artificial Sequence
  Description of Artificial Sequence: Synthetic oligonucleotide
  Antisense Strand to SEQ ID NO: 466167
uaauccaaaguaagcacca

SEQ ID NO: 466169 - RNA, 19 nt, Artificial Sequence
  Description of Artificial Sequence: Synthetic oligonucleotide
  Sense strand starting at position 713 of SEQ ID NO: 317123
guuaaaugucuaugucaaa

SEQ ID NO: 466170 - RNA, 19 nt, Artificial Sequence
  Description of Artificial Sequence: Synthetic oligonucleotide
  Antisense Strand to SEQ ID NO: 466169
uuugacauagacauuuaac

SEQ ID NO: 466171 - RNA, 19 nt, Artificial Sequence
  Description of Artificial Sequence: Synthetic oligonucleotide
  Sense strand starting at position 936 of SEQ ID NO: 317123
agggcuacauauccaauua

SEQ ID NO: 466172 - RNA, 19 nt, Artificial Sequence
  Description of Artificial Sequence: Synthetic oligonucleotide
  Antisense Strand to SEQ ID NO: 466171
uaauuggauauguagcccu

SEQ ID NO: 466173 - RNA, 19 nt, Artificial Sequence
  Description of Artificial Sequence: Synthetic oligonucleotide
  Sense strand starting at position 1115 of SEQ ID NO: 317123
aguguuauagcugauacag

SEQ ID NO: 466174 - RNA, 19 nt, Artificial Sequence
  Description of Artificial Sequence: Synthetic oligonucleotide
  Antisense Strand to SEQ ID NO: 466173
cuguaucagcuauaacacu

SEQ ID NO: 466175 - RNA, 19 nt, Artificial Sequence
  Description of Artificial Sequence: Synthetic oligonucleotide
  Sense strand starting at position 1160 of SEQ ID NO: 317123
uggcaagagugacuuuagu

SEQ ID NO: 466176 - RNA, 19 nt, Artificial Sequence
  Description of Artificial Sequence: Synthetic oligonucleotide
  Antisense Strand to SEQ ID NO: 466175
acuaaagucacucuugcca

SEQ ID NO: 466177 - RNA, 19 nt, Artificial Sequence
  Description of Artificial Sequence: Synthetic oligonucleotide
  Sense strand starting at position 1446 of SEQ ID NO: 317123
cucaguugacaugaucuau

SEQ ID NO: 466178 - RNA, 19 nt, Artificial Sequence
  Description of Artificial Sequence: Synthetic oligonucleotide
  Antisense Strand to SEQ ID NO: 466177
auagaucaugucaacugag

SEQ ID NO: 466179 - RNA, 19 nt, Artificial Sequence
  Description of Artificial Sequence: Synthetic oligonucleotide
  Sense strand starting at position 1636 of SEQ ID NO: 317123
uugugaaucugacucacuu

SEQ ID NO: 466180 - RNA, 19 nt, Artificial Sequence
  Description of Artificial Sequence: Synthetic oligonucleotide
  Antisense Strand to SEQ ID NO: 466179
aagugagucagauucacaa

SEQ ID NO: 466181 - RNA, 19 nt, Artificial Sequence
  Description of Artificial Sequence: Synthetic oligonucleotide
  Sense strand starting at position 2060 of SEQ ID NO: 317123
gccucugggaauugaaguu

SEQ ID NO: 466182 - RNA, 19 nt, Artificial Sequence
  Description of Artificial Sequence: Synthetic oligonucleotide
  Antisense Strand to SEQ ID NO: 466181
aacuucaauucccagaggc

SEQ ID NO: 466183 - RNA, 19 nt, Artificial Sequence
  Description of Artificial Sequence: Synthetic oligonucleotide
  Sense strand starting at position 2070 of SEQ ID NO: 317123
auugaaguuucuguggaag

SEQ ID NO: 466184 - RNA, 19 nt, Artificial Sequence
  Description of Artificial Sequence: Synthetic oligonucleotide
  Antisense Strand to SEQ ID NO: 466183
cuuccacagaaacuucaau

SEQ ID NO: 466185 - RNA, 19 nt, Artificial Sequence
  Description of Artificial Sequence: Synthetic oligonucleotide
  Sense strand starting at position 2205 of SEQ ID NO: 317123
ugguauucucuggacgcaa

SEQ ID NO: 466186 - RNA, 19 nt, Artificial Sequence
  Description of Artificial Sequence: Synthetic oligonucleotide
  Antisense Strand to SEQ ID NO: 466185
uugcguccagagaauacca

SEQ ID NO: 466187 - RNA, 19 nt, Artificial Sequence
  Description of Artificial Sequence: Synthetic oligonucleotide
  Sense strand starting at position 2322 of SEQ ID NO: 317123
ggaaaugacgucgaugaca

SEQ ID NO: 466188 - RNA, 19 nt, Artificial Sequence
  Description of Artificial Sequence: Synthetic oligonucleotide
  Antisense Strand to SEQ ID NO: 466187
ugucaucgacgucauuucc

SEQ ID NO: 466189 - RNA, 19 nt, Artificial Sequence
  Description of Artificial Sequence: Synthetic oligonucleotide
  Sense strand starting at position 2390 of SEQ ID NO: 317123
uuaaucccgucucugaaau

SEQ ID NO: 466190 - RNA, 19 nt, Artificial Sequence
  Description of Artificial Sequence: Synthetic oligonucleotide
  Antisense Strand to SEQ ID NO: 466189
auuucagagacgggauuaa

SEQ ID NO: 466191 - RNA, 19 nt, Artificial Sequence
  Description of Artificial Sequence: Synthetic oligonucleotide
  Sense strand starting at position 2529 of SEQ ID NO: 317123
ugcaaagaaucagugggaa

SEQ ID NO: 466192 - RNA, 19 nt, Artificial Sequence
  Description of Artificial Sequence: Synthetic oligonucleotide
  Antisense Strand to SEQ ID NO: 466191
uucccacugauucuuugca

SEQ ID NO: 466193 - RNA, 19 nt, Artificial Sequence
  Description of Artificial Sequence: Synthetic oligonucleotide
  Sense strand starting at position 2541 of SEQ ID NO: 317123
gugggaaaucuguacucua

SEQ ID NO: 466194 - RNA, 19 nt, Artificial Sequence
  Description of Artificial Sequence: Synthetic oligonucleotide
  Antisense Strand to SEQ ID NO: 466193
uagaguacagauuucccac

SEQ ID NO: 466195 - RNA, 19 nt, Artificial Sequence
  Description of Artificial Sequence: Synthetic oligonucleotide
  Sense strand starting at position 2544 of SEQ ID NO: 317123
ggaaaucuguacucuaaag

SEQ ID NO: 466196 - RNA, 19 nt, Artificial Sequence
  Description of Artificial Sequence: Synthetic oligonucleotide
  Antisense Strand to SEQ ID NO: 466195
cuuuagaguacagauuucc

SEQ ID NO: 466197 - RNA, 19 nt, Artificial Sequence
  Description of Artificial Sequence: Synthetic oligonucleotide
  Sense strand starting at position 2572 of SEQ ID NO: 317123
gcguguuauggcccugcca

SEQ ID NO: 466198 - RNA, 19 nt, Artificial Sequence
  Description of Artificial Sequence: Synthetic oligonucleotide
  Antisense Strand to SEQ ID NO: 466197
uggcagggccauaacacgc

SEQ ID NO: 466199 - RNA, 19 nt, Artificial Sequence
  Description of Artificial Sequence: Synthetic oligonucleotide
  Sense strand starting at position 2665 of SEQ ID NO: 317123
cgcugaacucucugaaaug

SEQ ID NO: 466200 - RNA, 19 nt, Artificial Sequence
  Description of Artificial Sequence: Synthetic oligonucleotide
  Antisense Strand to SEQ ID NO: 466199
cauuucagagaguucagcg

SEQ ID NO: 466201 - RNA, 19 nt, Artificial Sequence
  Description of Artificial Sequence: Synthetic oligonucleotide
  Sense strand starting at position 2733 of SEQ ID NO: 317123
uuuauaaagaucgaagugu

SEQ ID NO: 466202 - RNA, 19 nt, Artificial Sequence
  Description of Artificial Sequence: Synthetic oligonucleotide
  Antisense Strand to SEQ ID NO: 466201
acacuucgaucuuuauaaa

SEQ ID NO: 466203 - RNA, 19 nt, Artificial Sequence
  Description of Artificial Sequence: Synthetic oligonucleotide
  Sense strand starting at position 2742 of SEQ ID NO: 317123
aucgaaguguuacuugauu

SEQ ID NO: 466204 - RNA, 19 nt, Artificial Sequence
  Description of Artificial Sequence: Synthetic oligonucleotide
  Antisense Strand to SEQ ID NO: 466203
aaucaaguaacacuucgau

SEQ ID NO: 466205 - RNA, 19 nt, Artificial Sequence
  Description of Artificial Sequence: Synthetic oligonucleotide
  Sense strand starting at position 2744 of SEQ ID NO: 317123
cgaaguguuacuugauuuc

SEQ ID NO: 466206 - RNA, 19 nt, Artificial Sequence
  Description of Artificial Sequence: Synthetic oligonucleotide
  Antisense Strand to SEQ ID NO: 466205
gaaaucaaguaacacuucg

SEQ ID NO: 466207 - RNA, 19 nt, Artificial Sequence
  Description of Artificial Sequence: Synthetic oligonucleotide
  Sense strand starting at position 2822 of SEQ ID NO: 317123
acuugucacuuucugaaag

SEQ ID NO: 466208 - RNA, 19 nt, Artificial Sequence
  Description of Artificial Sequence: Synthetic oligonucleotide
  Antisense Strand to SEQ ID NO: 466207
cuuucagaaagugacaagu

SEQ ID NO: 466209 - RNA, 19 nt, Artificial Sequence
  Description of Artificial Sequence: Synthetic oligonucleotide
  Sense strand starting at position 3572 of SEQ ID NO: 317123
uuugcuaucgcugucaagu

SEQ ID NO: 466210 - RNA, 19 nt, Artificial Sequence
  Description of Artificial Sequence: Synthetic oligonucleotide
  Antisense Strand to SEQ ID NO: 466209
acuugacagcgauagcaaa

SEQ ID NO: 466211 - RNA, 19 nt, Artificial Sequence
  Description of Artificial Sequence: Synthetic oligonucleotide
  Sense strand starting at position 3573 of SEQ ID NO: 317123
uugcuaucgcugucaaguc

SEQ ID NO: 466212 - RNA, 19 nt, Artificial Sequence
  Description of Artificial Sequence: Synthetic oligonucleotide
  Antisense Strand to SEQ ID NO: 466211
gacuugacagcgauagcaa

SEQ ID NO: 466213 - RNA, 19 nt, Artificial Sequence
  Description of Artificial Sequence: Synthetic oligonucleotide
  Sense strand starting at position 3606 of SEQ ID NO: 317123
gcauuauucccacauucgu

SEQ ID NO: 466214 - RNA, 19 nt, Artificial Sequence
  Description of Artificial Sequence: Synthetic oligonucleotide
  Antisense Strand to SEQ ID NO: 466213
acgaaugugggaauaaugc

SEQ ID NO: 466215 - RNA, 19 nt, Artificial Sequence
  Description of Artificial Sequence: Synthetic oligonucleotide
  Sense strand starting at position 3613 of SEQ ID NO: 317123
ucccacauucguugagauu

SEQ ID NO: 466216 - RNA, 19 nt, Artificial Sequence
  Description of Artificial Sequence: Synthetic oligonucleotide
  Antisense Strand to SEQ ID NO: 466215
aaucucaacgaauguggga

SEQ ID NO: 466217 - RNA, 19 nt, Artificial Sequence
  Description of Artificial Sequence: Synthetic oligonucleotide
  Sense strand starting at position 3730 of SEQ ID NO: 317123
ugcucauugauguaggaug

SEQ ID NO: 466218 - RNA, 19 nt, Artificial Sequence
  Description of Artificial Sequence: Synthetic oligonucleotide
  Antisense Strand to SEQ ID NO: 466217
cauccuacaucaaugagca

SEQ ID NO: 466219 - RNA, 19 nt, Artificial Sequence
  Description of Artificial Sequence: Synthetic oligonucleotide
  Sense strand starting at position 3791 of SEQ ID NO: 317123
auaaccuaugucugcgaau

SEQ ID NO: 466220 - RNA, 19 nt, Artificial Sequence
  Description of Artificial Sequence: Synthetic oligonucleotide
  Antisense Strand to SEQ ID NO: 466219
auucgcagacauagguuau

SEQ ID NO: 466221 - RNA, 19 nt, Artificial Sequence
  Description of Artificial Sequence: Synthetic oligonucleotide
  Sense strand starting at position 3793 of SEQ ID NO: 317123
aaccuaugucugcgaauga

SEQ ID NO: 466222 - RNA, 19 nt, Artificial Sequence
  Description of Artificial Sequence: Synthetic oligonucleotide
  Antisense Strand to SEQ ID NO: 466221
ucauucgcagacauagguu

SEQ ID NO: 466223 - RNA, 19 nt, Artificial Sequence
  Description of Artificial Sequence: Synthetic oligonucleotide
  Sense strand starting at position 624 of SEQ ID NO: 317124
ccuaauguuacugacgagu

SEQ ID NO: 466224 - RNA, 19 nt, Artificial Sequence
  Description of Artificial Sequence: Synthetic oligonucleotide
  Antisense Strand to SEQ ID NO: 466223
acucgucaguaacauuagg

SEQ ID NO: 466225 - RNA, 19 nt, Artificial Sequence
  Description of Artificial Sequence: Synthetic oligonucleotide
  Sense strand starting at position 627 of SEQ ID NO: 317124
aauguuacugacgaguuaa

SEQ ID NO: 466226 - RNA, 19 nt, Artificial Sequence
  Description of Artificial Sequence: Synthetic oligonucleotide
  Antisense Strand to SEQ ID NO: 466225
uuaacucgucaguaacauu

SEQ ID NO: 466227 - RNA, 19 nt, Artificial Sequence
  Description of Artificial Sequence: Synthetic oligonucleotide
  Sense strand starting at position 786 of SEQ ID NO: 317124
agcugugaaauugguuaau

SEQ ID NO: 466228 - RNA, 19 nt, Artificial Sequence
  Description of Artificial Sequence: Synthetic oligonucleotide
  Antisense Strand to SEQ ID NO: 466227
auuaaccaauuucacagcu

SEQ ID NO: 466229 - RNA, 19 nt, Artificial Sequence
  Description of Artificial Sequence: Synthetic oligonucleotide
  Sense strand starting at position 788 of SEQ ID NO: 317124
cugugaaauugguuaauaa

SEQ ID NO: 466230 - RNA, 19 nt, Artificial Sequence
  Description of Artificial Sequence: Synthetic oligonucleotide
  Antisense Strand to SEQ ID NO: 466229
uuauuaaccaauuucacag

SEQ ID NO: 466231 - RNA, 19 nt, Artificial Sequence
  Description of Artificial Sequence: Synthetic oligonucleotide
  Sense strand starting at position 795 of SEQ ID NO: 317124
auugguuaauaagugcaua

SEQ ID NO: 466232 - RNA, 19 nt, Artificial Sequence
  Description of Artificial Sequence: Synthetic oligonucleotide
  Antisense Strand to SEQ ID NO: 466231
uaugcacuuauuaaccaau

SEQ ID NO: 466233 - RNA, 19 nt, Artificial Sequence
  Description of Artificial Sequence: Synthetic oligonucleotide
  Sense strand starting at position 823 of SEQ ID NO: 317124
uguuacuacgguugaauaa

SEQ ID NO: 466234 - RNA, 19 nt, Artificial Sequence
  Description of Artificial Sequence: Synthetic oligonucleotide
  Antisense Strand to SEQ ID NO: 466233
uuauucaaccguaguaaca

SEQ ID NO: 466235 - RNA, 19 nt, Artificial Sequence
  Description of Artificial Sequence: Synthetic oligonucleotide
  Sense strand starting at position 967 of SEQ ID NO: 317124
cuucuagaauaguuguaua

SEQ ID NO: 466236 - RNA, 19 nt, Artificial Sequence
  Description of Artificial Sequence: Synthetic oligonucleotide
  Antisense Strand to SEQ ID NO: 466235
uauacaacuauucuagaag

SEQ ID NO: 466237 - RNA, 19 nt, Artificial Sequence
  Description of Artificial Sequence: Synthetic oligonucleotide
  Sense strand starting at position 1080 of SEQ ID NO: 317124
ugaacucuuuguguuugaa

SEQ ID NO: 466238 - RNA, 19 nt, Artificial Sequence
  Description of Artificial Sequence: Synthetic oligonucleotide
  Antisense Strand to SEQ ID NO: 466237
uucaaacacaaagaguuca

SEQ ID NO: 466239 - RNA, 19 nt, Artificial Sequence
  Description of Artificial Sequence: Synthetic oligonucleotide
  Sense strand starting at position 1083 of SEQ ID NO: 317124
acucuuuguguuugaagau

SEQ ID NO: 466240 - RNA, 19 nt, Artificial Sequence
  Description of Artificial Sequence: Synthetic oligonucleotide
  Antisense Strand to SEQ ID NO: 466239
aucuucaaacacaaagagu

SEQ ID NO: 466241 - RNA, 19 nt, Artificial Sequence
  Description of Artificial Sequence: Synthetic oligonucleotide
  Sense strand starting at position 1309 of SEQ ID NO: 317124
agaccuuaucuagggcaaa

SEQ ID NO: 466242 - RNA, 19 nt, Artificial Sequence
  Description of Artificial Sequence: Synthetic oligonucleotide
  Antisense Strand to SEQ ID NO: 466241
uuugcccuagauaaggucu

SEQ ID NO: 466243 - RNA, 19 nt, Artificial Sequence
  Description of Artificial Sequence: Synthetic oligonucleotide
  Sense strand starting at position 1557 of SEQ ID NO: 317124
uuaggaagaauguggaguu

SEQ ID NO: 466244 - RNA, 19 nt, Artificial Sequence
  Description of Artificial Sequence: Synthetic oligonucleotide
  Antisense Strand to SEQ ID NO: 466243
aacuccacauucuuccuaa

SEQ ID NO: 466245 - RNA, 19 nt, Artificial Sequence
  Description of Artificial Sequence: Synthetic oligonucleotide
  Sense strand starting at position 1575 of SEQ ID NO: 317124
ucacuaguauuaguccuau

SEQ ID NO: 466246 - RNA, 19 nt, Artificial Sequence
  Description of Artificial Sequence: Synthetic oligonucleotide
  Antisense Strand to SEQ ID NO: 466245
auaggacuaauacuaguga

SEQ ID NO: 466247 - RNA, 19 nt, Artificial Sequence
  Description of Artificial Sequence: Synthetic oligonucleotide
  Sense strand starting at position 1581 of SEQ ID NO: 317124
guauuaguccuaugaaauc

SEQ ID NO: 466248 - RNA, 19 nt, Artificial Sequence
  Description of Artificial Sequence: Synthetic oligonucleotide
  Antisense Strand to SEQ ID NO: 466247
gauuucauaggacuaauac

SEQ ID NO: 466249 - RNA, 19 nt, Artificial Sequence
  Description of Artificial Sequence: Synthetic oligonucleotide
  Sense strand starting at position 1729 of SEQ ID NO: 317124
uuagaaaugcaaugcuuaa

SEQ ID NO: 466250 - RNA, 19 nt, Artificial Sequence
  Description of Artificial Sequence: Synthetic oligonucleotide
  Antisense Strand to SEQ ID NO: 466249
uuaagcauugcauuucuaa

SEQ ID NO: 466251 - RNA, 19 nt, Artificial Sequence
  Description of Artificial Sequence: Synthetic oligonucleotide
  Sense strand starting at position 1785 of SEQ ID NO: 317124
ugugaauucccagguaccu

SEQ ID NO: 466252 - RNA, 19 nt, Artificial Sequence
  Description of Artificial Sequence: Synthetic oligonucleotide
  Antisense Strand to SEQ ID NO: 466251
agguaccugggaauucaca

SEQ ID NO: 466253 - RNA, 19 nt, Artificial Sequence
  Description of Artificial Sequence: Synthetic oligonucleotide
  Sense strand starting at position 1794 of SEQ ID NO: 317124
ccagguaccuaccuuugaa

SEQ ID NO: 466254 - RNA, 19 nt, Artificial Sequence
  Description of Artificial Sequence: Synthetic oligonucleotide
  Antisense Strand to SEQ ID NO: 466253
uucaaagguagguaccugg

SEQ ID NO: 466255 - RNA, 19 nt, Artificial Sequence
  Description of Artificial Sequence: Synthetic oligonucleotide
  Sense strand starting at position 1797 of SEQ ID NO: 317124
gguaccuaccuuugaagga

SEQ ID NO: 466256 - RNA, 19 nt, Artificial Sequence
  Description of Artificial Sequence: Synthetic oligonucleotide
  Antisense Strand to SEQ ID NO: 466255
uccuucaaagguagguacc

SEQ ID NO: 466257 - RNA, 19 nt, Artificial Sequence
  Description of Artificial Sequence: Synthetic oligonucleotide
  Sense strand starting at position 1984 of SEQ ID NO: 317124
gaaauacuguaauugagua

SEQ ID NO: 466258 - RNA, 19 nt, Artificial Sequence
  Description of Artificial Sequence: Synthetic oligonucleotide
  Antisense Strand to SEQ ID NO: 466257
uacucaauuacaguauuuc

SEQ ID NO: 466259 - RNA, 19 nt, Artificial Sequence
  Description of Artificial Sequence: Synthetic oligonucleotide
  Sense strand starting at position 1989 of SEQ ID NO: 317124
acuguaauugaguaaaggu

SEQ ID NO: 466260 - RNA, 19 nt, Artificial Sequence
  Description of Artificial Sequence: Synthetic oligonucleotide
  Antisense Strand to SEQ ID NO: 466259
accuuuacucaauuacagu

SEQ ID NO: 466261 - RNA, 19 nt, Artificial Sequence
  Description of Artificial Sequence: Synthetic oligonucleotide
  Sense strand starting at position 1996 of SEQ ID NO: 317124
uugaguaaaggucaugugu

SEQ ID NO: 466262 - RNA, 19 nt, Artificial Sequence
  Description of Artificial Sequence: Synthetic oligonucleotide
  Antisense Strand to SEQ ID NO: 466261
acacaugaccuuuacucaa

SEQ ID NO: 466263 - RNA, 19 nt, Artificial Sequence
  Description of Artificial Sequence: Synthetic oligonucleotide
  Sense strand starting at position 2032 of SEQ ID NO: 317124
ccaagaaugguugguuguu

SEQ ID NO: 466264 - RNA, 19 nt, Artificial Sequence
  Description of Artificial Sequence: Synthetic oligonucleotide
  Antisense Strand to SEQ ID NO: 466263
aacaaccaaccauucuugg

SEQ ID NO: 466265 - RNA, 19 nt, Artificial Sequence
  Description of Artificial Sequence: Synthetic oligonucleotide
  Sense strand starting at position 2033 of SEQ ID NO: 317124
caagaaugguugguuguuu

SEQ ID NO: 466266 - RNA, 19 nt, Artificial Sequence
  Description of Artificial Sequence: Synthetic oligonucleotide
  Antisense Strand to SEQ ID NO: 466265
aaacaaccaaccauucuug

SEQ ID NO: 466267 - RNA, 19 nt, Artificial Sequence
  Description of Artificial Sequence: Synthetic oligonucleotide
  Sense strand starting at position 2078 of SEQ ID NO: 317124
cuugauuacuuccugagaa

SEQ ID NO: 466268 - RNA, 19 nt, Artificial Sequence
  Description of Artificial Sequence: Synthetic oligonucleotide
  Antisense Strand to SEQ ID NO: 466267
uucucaggaaguaaucaag

SEQ ID NO: 466269 - RNA, 19 nt, Artificial Sequence
  Description of Artificial Sequence: Synthetic oligonucleotide
  Sense strand starting at position 2090 of SEQ ID NO: 317124
cugagaaacaguggauugu

SEQ ID NO: 466270 - RNA, 19 nt, Artificial Sequence
  Description of Artificial Sequence: Synthetic oligonucleotide
  Antisense Strand to SEQ ID NO: 466269
acaauccacuguuucucag

SEQ ID NO: 466271 - RNA, 19 nt, Artificial Sequence
  Description of Artificial Sequence: Synthetic oligonucleotide
  Sense strand starting at position 2099 of SEQ ID NO: 317124
aguggauugugucuuaaua

SEQ ID NO: 466272 - RNA, 19 nt, Artificial Sequence
  Description of Artificial Sequence: Synthetic oligonucleotide
  Antisense Strand to SEQ ID NO: 466271
uauuaagacacaauccacu

SEQ ID NO: 466273 - RNA, 19 nt, Artificial Sequence
  Description of Artificial Sequence: Synthetic oligonucleotide
  Sense strand starting at position 2185 of SEQ ID NO: 317124
auaguagacucacuugcua

SEQ ID NO: 466274 - RNA, 19 nt, Artificial Sequence
  Description of Artificial Sequence: Synthetic oligonucleotide
  Antisense Strand to SEQ ID NO: 466273
uagcaagugagucuacuau

SEQ ID NO: 466275 - RNA, 19 nt, Artificial Sequence
  Description of Artificial Sequence: Synthetic oligonucleotide
  Sense strand starting at position 2260 of SEQ ID NO: 317124
guuaauacauuugagacua

SEQ ID NO: 466276 - RNA, 19 nt, Artificial Sequence
  Description of Artificial Sequence: Synthetic oligonucleotide
  Antisense Strand to SEQ ID NO: 466275
uagucucaaauguauuaac

SEQ ID NO: 466277 - RNA, 19 nt, Artificial Sequence
  Description of Artificial Sequence: Synthetic oligonucleotide
  Sense strand starting at position 2343 of SEQ ID NO: 317124
caguauuuaugggauacaa

SEQ ID NO: 466278 - RNA, 19 nt, Artificial Sequence
  Description of Artificial Sequence: Synthetic oligonucleotide
  Antisense Strand to SEQ ID NO: 466277
uuguaucccauaaauacug

SEQ ID NO: 466279 - RNA, 19 nt, Artificial Sequence
  Description of Artificial Sequence: Synthetic oligonucleotide
  Sense strand starting at position 2489 of SEQ ID NO: 317124
aagcgauauaagggcagaa

SEQ ID NO: 466280 - RNA, 19 nt, Artificial Sequence
  Description of Artificial Sequence: Synthetic oligonucleotide
  Antisense Strand to SEQ ID NO: 466279
uucugcccuuauaucgcuu

SEQ ID NO: 466281 - RNA, 19 nt, Artificial Sequence
  Description of Artificial Sequence: Synthetic oligonucleotide
  Sense strand starting at position 2491 of SEQ ID NO: 317124
gcgauauaagggcagaaau

SEQ ID NO: 466282 - RNA, 19 nt, Artificial Sequence
  Description of Artificial Sequence: Synthetic oligonucleotide
  Antisense Strand to SEQ ID NO: 466281
auuucugcccuuauaucgc

SEQ ID NO: 466283 - RNA, 19 nt, Artificial Sequence
  Description of Artificial Sequence: Synthetic oligonucleotide
  Sense strand starting at position 2612 of SEQ ID NO: 317124
ucugaugagaguuguucuu

SEQ ID NO: 466284 - RNA, 19 nt, Artificial Sequence
  Description of Artificial Sequence: Synthetic oligonucleotide
  Antisense Strand to SEQ ID NO: 466283
aagaacaacucucaucaga

SEQ ID NO: 466285 - RNA, 19 nt, Artificial Sequence
  Description of Artificial Sequence: Synthetic oligonucleotide
  Sense strand starting at position 2619 of SEQ ID NO: 317124
agaguuguucuugaugaua

SEQ ID NO: 466286 - RNA, 19 nt, Artificial Sequence
  Description of Artificial Sequence: Synthetic oligonucleotide
  Antisense Strand to SEQ ID NO: 466285
uaucaucaagaacaacucu

SEQ ID NO: 466287 - RNA, 19 nt, Artificial Sequence
  Description of Artificial Sequence: Synthetic oligonucleotide
  Sense strand starting at position 2622 of SEQ ID NO: 317124
guuguucuugaugauauua

SEQ ID NO: 466288 - RNA, 19 nt, Artificial Sequence
  Description of Artificial Sequence: Synthetic oligonucleotide
  Antisense Strand to SEQ ID NO: 466287
uaauaucaucaagaacaac

SEQ ID NO: 466289 - RNA, 19 nt, Artificial Sequence
  Description of Artificial Sequence: Synthetic oligonucleotide
  Sense strand starting at position 2683 of SEQ ID NO: 317124
uaguuaaucugaguaguuu

SEQ ID NO: 466290 - RNA, 19 nt, Artificial Sequence
  Description of Artificial Sequence: Synthetic oligonucleotide
  Antisense Strand to SEQ ID NO: 466289
aaacuacucagauuaacua

SEQ ID NO: 466291 - RNA, 19 nt, Artificial Sequence
  Description of Artificial Sequence: Synthetic oligonucleotide
  Sense strand starting at position 2684 of SEQ ID NO: 317124
aguuaaucugaguaguuug

SEQ ID NO: 466292 - RNA, 19 nt, Artificial Sequence
  Description of Artificial Sequence: Synthetic oligonucleotide
  Antisense Strand to SEQ ID NO: 466291
caaacuacucagauuaacu

SEQ ID NO: 466293 - RNA, 19 nt, Artificial Sequence
  Description of Artificial Sequence: Synthetic oligonucleotide
  Sense strand starting at position 2689 of SEQ ID NO: 317124
aucugaguaguuugcauuu

SEQ ID NO: 466294 - RNA, 19 nt, Artificial Sequence
  Description of Artificial Sequence: Synthetic oligonucleotide
  Antisense Strand to SEQ ID NO: 466293
aaaugcaaacuacucagau

SEQ ID NO: 466295 - RNA, 19 nt, Artificial Sequence
  Description of Artificial Sequence: Synthetic oligonucleotide
  Sense strand starting at position 2741 of SEQ ID NO: 317124
uuacuuuagguccagggua

SEQ ID NO: 466296 - RNA, 19 nt, Artificial Sequence
  Description of Artificial Sequence: Synthetic oligonucleotide
  Antisense Strand to SEQ ID NO: 466295
uacccuggaccuaaaguaa

SEQ ID NO: 466297 - RNA, 19 nt, Artificial Sequence
  Description of Artificial Sequence: Synthetic oligonucleotide
  Sense strand starting at position 2922 of SEQ ID NO: 317124
uuucuuuguguccaugaau

SEQ ID NO: 466298 - RNA, 19 nt, Artificial Sequence
  Description of Artificial Sequence: Synthetic oligonucleotide
  Antisense Strand to SEQ ID NO: 466297
auucauggacacaaagaaa

SEQ ID NO: 466299 - RNA, 19 nt, Artificial Sequence
  Description of Artificial Sequence: Synthetic oligonucleotide
  Sense strand starting at position 2957 of SEQ ID NO: 317124
acgcuuauaagugagaaua

SEQ ID NO: 466300 - RNA, 19 nt, Artificial Sequence
  Description of Artificial Sequence: Synthetic oligonucleotide
  Antisense Strand to SEQ ID NO: 466299
uauucucacuuauaagcgu

SEQ ID NO: 466301 - RNA, 19 nt, Artificial Sequence
  Description of Artificial Sequence: Synthetic oligonucleotide
  Sense strand starting at position 3229 of SEQ ID NO: 317124
cugaguauuuaccaagcaa

SEQ ID NO: 466302 - RNA, 19 nt, Artificial Sequence
  Description of Artificial Sequence: Synthetic oligonucleotide
  Antisense Strand to SEQ ID NO: 466301
uugcuugguaaauacucag

SEQ ID NO: 466303 - RNA, 19 nt, Artificial Sequence
  Description of Artificial Sequence: Synthetic oligonucleotide
  Sense strand starting at position 240 of SEQ ID NO: 317125
uuaggaaguuuagcaauaa

SEQ ID NO: 466304 - RNA, 19 nt, Artificial Sequence
  Description of Artificial Sequence: Synthetic oligonucleotide
  Antisense Strand to SEQ ID NO: 466303
uuauugcuaaacuuccuaa

SEQ ID NO: 466305 - RNA, 19 nt, Artificial Sequence
  Description of Artificial Sequence: Synthetic oligonucleotide
  Sense strand starting at position 861 of SEQ ID NO: 317125
ugucaucaugccuaguaca

SEQ ID NO: 466306 - RNA, 19 nt, Artificial Sequence
  Description of Artificial Sequence: Synthetic oligonucleotide
  Antisense Strand to SEQ ID NO: 466305
uguacuaggcaugaugaca

SEQ ID NO: 466307 - RNA, 19 nt, Artificial Sequence
  Description of Artificial Sequence: Synthetic oligonucleotide
  Sense strand starting at position 875 of SEQ ID NO: 317125
guacauagugcagacuuaa

SEQ ID NO: 466308 - RNA, 19 nt, Artificial Sequence
  Description of Artificial Sequence: Synthetic oligonucleotide
  Antisense Strand to SEQ ID NO: 466307
uuaagucugcacuauguac

SEQ ID NO: 466309 - RNA, 19 nt, Artificial Sequence
  Description of Artificial Sequence: Synthetic oligonucleotide
  Sense strand starting at position 938 of SEQ ID NO: 317125
uuggcuauagguuguagaa

SEQ ID NO: 466310 - RNA, 19 nt, Artificial Sequence
  Description of Artificial Sequence: Synthetic oligonucleotide
  Antisense Strand to SEQ ID NO: 466309
uucuacaaccuauagccaa

SEQ ID NO: 466311 - RNA, 19 nt, Artificial Sequence
  Description of Artificial Sequence: Synthetic oligonucleotide
  Sense strand starting at position 966 of SEQ ID NO: 317125
gagagaagaauguggucuu

SEQ ID NO: 466312 - RNA, 19 nt, Artificial Sequence
  Description of Artificial Sequence: Synthetic oligonucleotide
  Antisense Strand to SEQ ID NO: 466311
aagaccacauucuucucuc

SEQ ID NO: 466313 - RNA, 19 nt, Artificial Sequence
  Description of Artificial Sequence: Synthetic oligonucleotide
  Sense strand starting at position 1000 of SEQ ID NO: 317125
ugguuauauauguaaugug

SEQ ID NO: 466314 - RNA, 19 nt, Artificial Sequence
  Description of Artificial Sequence: Synthetic oligonucleotide
  Antisense Strand to SEQ ID NO: 466313
cacauuacauauauaacca

SEQ ID NO: 466315 - RNA, 19 nt, Artificial Sequence
  Description of Artificial Sequence: Synthetic oligonucleotide
  Sense strand starting at position 1009 of SEQ ID NO: 317125
auguaauguguacauguca

SEQ ID NO: 466316 - RNA, 19 nt, Artificial Sequence
  Description of Artificial Sequence: Synthetic oligonucleotide
  Antisense Strand to SEQ ID NO: 466315
ugacauguacacauuacau

SEQ ID NO: 466317 - RNA, 19 nt, Artificial Sequence
  Description of Artificial Sequence: Synthetic oligonucleotide
  Sense strand starting at position 1079 of SEQ ID NO: 317125
cauauuagggcagguaauu

SEQ ID NO: 466318 - RNA, 19 nt, Artificial Sequence
  Description of Artificial Sequence: Synthetic oligonucleotide
  Antisense Strand to SEQ ID NO: 466317
aauuaccugcccuaauaug

SEQ ID NO: 466319 - RNA, 19 nt, Artificial Sequence
  Description of Artificial Sequence: Synthetic oligonucleotide
  Sense strand starting at position 1171 of SEQ ID NO: 317125
guguuagagucagucagag

SEQ ID NO: 466320 - RNA, 19 nt, Artificial Sequence
  Description of Artificial Sequence: Synthetic oligonucleotide
  Antisense Strand to SEQ ID NO: 466319
cucugacugacucuaacac

SEQ ID NO: 466321 - RNA, 19 nt, Artificial Sequence
  Description of Artificial Sequence: Synthetic oligonucleotide
  Sense strand starting at position 1173 of SEQ ID NO: 317125
guuagagucagucagagac

SEQ ID NO: 466322 - RNA, 19 nt, Artificial Sequence
  Description of Artificial Sequence: Synthetic oligonucleotide
  Antisense Strand to SEQ ID NO: 466321
gucucugacugacucuaac

SEQ ID NO: 466323 - RNA, 19 nt, Artificial Sequence
  Description of Artificial Sequence: Synthetic oligonucleotide
  Sense strand starting at position 1237 of SEQ ID NO: 317125
gcaugacuuugagugaguu

SEQ ID NO: 466324 - RNA, 19 nt, Artificial Sequence
  Description of Artificial Sequence: Synthetic oligonucleotide
  Antisense Strand to SEQ ID NO: 466323
aacucacucaaagucaugc

SEQ ID NO: 466325 - RNA, 19 nt, Artificial Sequence
  Description of Artificial Sequence: Synthetic oligonucleotide
  Sense strand starting at position 1241 of SEQ ID NO: 317125
gacuuugagugaguugcaa

SEQ ID NO: 466326 - RNA, 19 nt, Artificial Sequence
  Description of Artificial Sequence: Synthetic oligonucleotide
  Antisense Strand to SEQ ID NO: 466325
uugcaacucacucaaaguc

SEQ ID NO: 466327 - RNA, 19 nt, Artificial Sequence
  Description of Artificial Sequence: Synthetic oligonucleotide
  Sense strand starting at position 1342 of SEQ ID NO: 317125
aauaaagucucagugguau

SEQ ID NO: 466328 - RNA, 19 nt, Artificial Sequence
  Description of Artificial Sequence: Synthetic oligonucleotide
  Antisense Strand to SEQ ID NO: 466327
auaccacugagacuuuauu

SEQ ID NO: 466329 - RNA, 19 nt, Artificial Sequence
  Description of Artificial Sequence: Synthetic oligonucleotide
  Sense strand starting at position 1411 of SEQ ID NO: 317125
acgaaaugguuacuuauua

SEQ ID NO: 466330 - RNA, 19 nt, Artificial Sequence
  Description of Artificial Sequence: Synthetic oligonucleotide
  Antisense Strand to SEQ ID NO: 466329
uaauaaguaaccauuucgu

SEQ ID NO: 466331 - RNA, 19 nt, Artificial Sequence
  Description of Artificial Sequence: Synthetic oligonucleotide
  Sense strand starting at position 1412 of SEQ ID NO: 317125
cgaaaugguuacuuauuau

SEQ ID NO: 466332 - RNA, 19 nt, Artificial Sequence
  Description of Artificial Sequence: Synthetic oligonucleotide
  Antisense Strand to SEQ ID NO: 466331
auaauaaguaaccauuucg

SEQ ID NO: 466333 - RNA, 19 nt, Artificial Sequence
  Description of Artificial Sequence: Synthetic oligonucleotide
  Sense strand starting at position 1609 of SEQ ID NO: 317125
uguauauuacuugaaagcu

SEQ ID NO: 466334 - RNA, 19 nt, Artificial Sequence
  Description of Artificial Sequence: Synthetic oligonucleotide
  Antisense Strand to SEQ ID NO: 466333
agcuuucaaguaauauaca

SEQ ID NO: 466335 - RNA, 19 nt, Artificial Sequence
  Description of Artificial Sequence: Synthetic oligonucleotide
  Sense strand starting at position 1619 of SEQ ID NO: 317125
uugaaagcuguuuaguuua

SEQ ID NO: 466336 - RNA, 19 nt, Artificial Sequence
  Description of Artificial Sequence: Synthetic oligonucleotide
  Antisense Strand to SEQ ID NO: 466335
uaaacuaaacagcuuucaa

SEQ ID NO: 466337 - RNA, 19 nt, Artificial Sequence
  Description of Artificial Sequence: Synthetic oligonucleotide
  Sense strand starting at position 1621 of SEQ ID NO: 317125
gaaagcuguuuaguuuaua

SEQ ID NO: 466338 - RNA, 19 nt, Artificial Sequence
  Description of Artificial Sequence: Synthetic oligonucleotide
  Antisense Strand to SEQ ID NO: 466337
uauaaacuaaacagcuuuc

SEQ ID NO: 466339 - RNA, 19 nt, Artificial Sequence
  Description of Artificial Sequence: Synthetic oligonucleotide
  Sense strand starting at position 1831 of SEQ ID NO: 317125
gauuuaagauaaggucauu

SEQ ID NO: 466340 - RNA, 19 nt, Artificial Sequence
  Description of Artificial Sequence: Synthetic oligonucleotide
  Antisense Strand to SEQ ID NO: 466339
aaugaccuuaucuuaaauc

SEQ ID NO: 466341 - RNA, 19 nt, Artificial Sequence
  Description of Artificial Sequence: Synthetic oligonucleotide
  Sense strand starting at position 1986 of SEQ ID NO: 317125
ugaguaguggaacaguaau

SEQ ID NO: 466342 - RNA, 19 nt, Artificial Sequence
  Description of Artificial Sequence: Synthetic oligonucleotide
  Antisense Strand to SEQ ID NO: 466341
auuacuguuccacuacuca

SEQ ID NO: 466343 - RNA, 19 nt, Artificial Sequence
  Description of Artificial Sequence: Synthetic oligonucleotide
  Sense strand starting at position 2009 of SEQ ID NO: 317125
ggcgcuuacggagaaacaa

SEQ ID NO: 466344 - RNA, 19 nt, Artificial Sequence
  Description of Artificial Sequence: Synthetic oligonucleotide
  Antisense Strand to SEQ ID NO: 466343
uuguuucuccguaagcgcc

SEQ ID NO: 466345 - RNA, 19 nt, Artificial Sequence
  Description of Artificial Sequence: Synthetic oligonucleotide
  Sense strand starting at position 2098 of SEQ ID NO: 317125
cagagugauugccuucuga

SEQ ID NO: 466346 - RNA, 19 nt, Artificial Sequence
  Description of Artificial Sequence: Synthetic oligonucleotide
  Antisense Strand to SEQ ID NO: 466345
ucagaaggcaaucacucug

SEQ ID NO: 466347 - RNA, 19 nt, Artificial Sequence
  Description of Artificial Sequence: Synthetic oligonucleotide
  Sense strand starting at position 2329 of SEQ ID NO: 317125
guaguagaacuauauacuc

SEQ ID NO: 466348 - RNA, 19 nt, Artificial Sequence
  Description of Artificial Sequence: Synthetic oligonucleotide
  Antisense Strand to SEQ ID NO: 466347
gaguauauaguucuacuac

SEQ ID NO: 466349 - RNA, 19 nt, Artificial Sequence
  Description of Artificial Sequence: Synthetic oligonucleotide
  Sense strand starting at position 2609 of SEQ ID NO: 317125
ccguguguugcagugacuu

SEQ ID NO: 466350 - RNA, 19 nt, Artificial Sequence
  Description of Artificial Sequence: Synthetic oligonucleotide
  Antisense Strand to SEQ ID NO: 466349
aagucacugcaacacacgg

SEQ ID NO: 466351 - RNA, 19 nt, Artificial Sequence
  Description of Artificial Sequence: Synthetic oligonucleotide
  Sense strand starting at position 2814 of SEQ ID NO: 317125
aucguuaaucuggaauaca

SEQ ID NO: 466352 - RNA, 19 nt, Artificial Sequence
  Description of Artificial Sequence: Synthetic oligonucleotide
  Antisense Strand to SEQ ID NO: 466351
uguauuccagauuaacgau

SEQ ID NO: 466353 - RNA, 19 nt, Artificial Sequence
  Description of Artificial Sequence: Synthetic oligonucleotide
  Sense strand starting at position 2817 of SEQ ID NO: 317125
guuaaucuggaauacaguu

SEQ ID NO: 466354 - RNA, 19 nt, Artificial Sequence
  Description of Artificial Sequence: Synthetic oligonucleotide
  Antisense Strand to SEQ ID NO: 466353
aacuguauuccagauuaac

SEQ ID NO: 466355 - RNA, 19 nt, Artificial Sequence
  Description of Artificial Sequence: Synthetic oligonucleotide
  Sense strand starting at position 2901 of SEQ ID NO: 317125
uacauucuuuggguuugau

SEQ ID NO: 466356 - RNA, 19 nt, Artificial Sequence
  Description of Artificial Sequence: Synthetic oligonucleotide
  Antisense Strand to SEQ ID NO: 466355
aucaaacccaaagaaugua

SEQ ID NO: 466357 - RNA, 19 nt, Artificial Sequence
  Description of Artificial Sequence: Synthetic oligonucleotide
  Sense strand starting at position 2994 of SEQ ID NO: 317125
cugcuaauuaggugugaca

SEQ ID NO: 466358 - RNA, 19 nt, Artificial Sequence
  Description of Artificial Sequence: Synthetic oligonucleotide
  Antisense Strand to SEQ ID NO: 466357
ugucacaccuaauuagcag

SEQ ID NO: 466359 - RNA, 19 nt, Artificial Sequence
  Description of Artificial Sequence: Synthetic oligonucleotide
  Sense strand starting at position 2996 of SEQ ID NO: 317125
gcuaauuaggugugacauc

SEQ ID NO: 466360 - RNA, 19 nt, Artificial Sequence
  Description of Artificial Sequence: Synthetic oligonucleotide
  Antisense Strand to SEQ ID NO: 466359
gaugucacaccuaauuagc

SEQ ID NO: 466361 - RNA, 19 nt, Artificial Sequence
  Description of Artificial Sequence: Synthetic oligonucleotide
  Sense strand starting at position 3018 of SEQ ID NO: 317125
uuuacaaaguugucagacu

SEQ ID NO: 466362 - RNA, 19 nt, Artificial Sequence
  Description of Artificial Sequence: Synthetic oligonucleotide
  Antisense Strand to SEQ ID NO: 466361
agucugacaacuuuguaaa

SEQ ID NO: 466363 - RNA, 19 nt, Artificial Sequence
  Description of Artificial Sequence: Synthetic oligonucleotide
  Sense strand starting at position 3025 of SEQ ID NO: 317125
aguugucagacugaaagua

SEQ ID NO: 466364 - RNA, 19 nt, Artificial Sequence
  Description of Artificial Sequence: Synthetic oligonucleotide
  Antisense Strand to SEQ ID NO: 466363
uacuuucagucugacaacu

SEQ ID NO: 466365 - RNA, 19 nt, Artificial Sequence
  Description of Artificial Sequence: Synthetic oligonucleotide
  Sense strand starting at position 3079 of SEQ ID NO: 317125
ggaacacccucagcuauua

SEQ ID NO: 466366 - RNA, 19 nt, Artificial Sequence
  Description of Artificial Sequence: Synthetic oligonucleotide
  Antisense Strand to SEQ ID NO: 466365
uaauagcugaggguguucc

SEQ ID NO: 466367 - RNA, 19 nt, Artificial Sequence
  Description of Artificial Sequence: Synthetic oligonucleotide
  Sense strand starting at position 3100 of SEQ ID NO: 317125
cugccauuaguggaaaguu

SEQ ID NO: 466368 - RNA, 19 nt, Artificial Sequence
  Description of Artificial Sequence: Synthetic oligonucleotide
  Antisense Strand to SEQ ID NO: 466367
aacuuuccacuaauggcag

SEQ ID NO: 466369 - RNA, 19 nt, Artificial Sequence
  Description of Artificial Sequence: Synthetic oligonucleotide
  Sense strand starting at position 3130 of SEQ ID NO: 317125
uugagauagcaaugaguua

SEQ ID NO: 466370 - RNA, 19 nt, Artificial Sequence
  Description of Artificial Sequence: Synthetic oligonucleotide
  Antisense Strand to SEQ ID NO: 466369
uaacucauugcuaucucaa

SEQ ID NO: 466371 - RNA, 19 nt, Artificial Sequence
  Description of Artificial Sequence: Synthetic oligonucleotide
  Sense strand starting at position 3147 of SEQ ID NO: 317125
uaguaaauaugggcuauaa

SEQ ID NO: 466372 - RNA, 19 nt, Artificial Sequence
  Description of Artificial Sequence: Synthetic oligonucleotide
  Antisense Strand to SEQ ID NO: 466371
uuauagcccauauuuacua

SEQ ID NO: 466373 - RNA, 19 nt, Artificial Sequence
  Description of Artificial Sequence: Synthetic oligonucleotide
  Sense strand starting at position 3157 of SEQ ID NO: 317125
gggcuauaauauuaauuuc

SEQ ID NO: 466374 - RNA, 19 nt, Artificial Sequence
  Description of Artificial Sequence: Synthetic oligonucleotide
  Antisense Strand to SEQ ID NO: 466373
gaaauuaauauuauagccc

SEQ ID NO: 466375 - RNA, 19 nt, Artificial Sequence
  Description of Artificial Sequence: Synthetic oligonucleotide
  Sense strand starting at position 3381 of SEQ ID NO: 317125
uugucuaauuauccucagu

SEQ ID NO: 466376 - RNA, 19 nt, Artificial Sequence
  Description of Artificial Sequence: Synthetic oligonucleotide
  Antisense Strand to SEQ ID NO: 466375
acugaggauaauuagacaa

SEQ ID NO: 466377 - RNA, 19 nt, Artificial Sequence
  Description of Artificial Sequence: Synthetic oligonucleotide
  Sense strand starting at position 3400 of SEQ ID NO: 317125
ccuaaauaaugccuggaga

SEQ ID NO: 466378 - RNA, 19 nt, Artificial Sequence
  Description of Artificial Sequence: Synthetic oligonucleotide
  Antisense Strand to SEQ ID NO: 466377
ucuccaggcauuauuuagg

SEQ ID NO: 466379 - RNA, 19 nt, Artificial Sequence
  Description of Artificial Sequence: Synthetic oligonucleotide
  Sense strand starting at position 3401 of SEQ ID NO: 317125
cuaaauaaugccuggagau

SEQ ID NO: 466380 - RNA, 19 nt, Artificial Sequence
  Description of Artificial Sequence: Synthetic oligonucleotide
  Antisense Strand to SEQ ID NO: 466379
aucuccaggcauuauuuag

SEQ ID NO: 466381 - RNA, 19 nt, Artificial Sequence
  Description of Artificial Sequence: Synthetic oligonucleotide
  Sense strand starting at position 3558 of SEQ ID NO: 317125
uuauauucucuugggauac

SEQ ID NO: 466382 - RNA, 19 nt, Artificial Sequence
  Description of Artificial Sequence: Synthetic oligonucleotide
  Antisense Strand to SEQ ID NO: 466381
guaucccaagagaauauaa

SEQ ID NO: 466383 - RNA, 19 nt, Artificial Sequence
  Description of Artificial Sequence: Synthetic oligonucleotide
  Sense strand starting at position 30 of SEQ ID NO: 317126
ggugaauacuuaccgagaa

SEQ ID NO: 466384 - RNA, 19 nt, Artificial Sequence
  Description of Artificial Sequence: Synthetic oligonucleotide
  Antisense Strand to SEQ ID NO: 466383
uucucgguaaguauucacc

SEQ ID NO: 466385 - RNA, 19 nt, Artificial Sequence
  Description of Artificial Sequence: Synthetic oligonucleotide
  Sense strand starting at position 123 of SEQ ID NO: 317126
agaaauguggcguacuauu

SEQ ID NO: 466386 - RNA, 19 nt, Artificial Sequence
  Description of Artificial Sequence: Synthetic oligonucleotide
  Antisense Strand to SEQ ID NO: 466385
aauaguacgccacauuucu

SEQ ID NO: 466387 - RNA, 19 nt, Artificial Sequence
  Description of Artificial Sequence: Synthetic oligonucleotide
  Sense strand starting at position 146 of SEQ ID NO: 317126
augauauuaugggagagga

SEQ ID NO: 466388 - RNA, 19 nt, Artificial Sequence
  Description of Artificial Sequence: Synthetic oligonucleotide
  Antisense Strand to SEQ ID NO: 466387
uccucucccauaauaucau

SEQ ID NO: 466389 - RNA, 19 nt, Artificial Sequence
  Description of Artificial Sequence: Synthetic oligonucleotide
  Sense strand starting at position 399 of SEQ ID NO: 317126
uuaggaaguuuagcaauaa

SEQ ID NO: 466390 - RNA, 19 nt, Artificial Sequence
  Description of Artificial Sequence: Synthetic oligonucleotide
  Antisense Strand to SEQ ID NO: 466389
uuauugcuaaacuuccuaa

SEQ ID NO: 466391 - RNA, 19 nt, Artificial Sequence
  Description of Artificial Sequence: Synthetic oligonucleotide
  Sense strand starting at position 1020 of SEQ ID NO: 317126
ugucaucaugccuaguaca

SEQ ID NO: 466392 - RNA, 19 nt, Artificial Sequence
  Description of Artificial Sequence: Synthetic oligonucleotide
  Antisense Strand to SEQ ID NO: 466391
uguacuaggcaugaugaca

SEQ ID NO: 466393 - RNA, 19 nt, Artificial Sequence
  Description of Artificial Sequence: Synthetic oligonucleotide
  Sense strand starting at position 1034 of SEQ ID NO: 317126
guacauagugcagacuuaa

SEQ ID NO: 466394 - RNA, 19 nt, Artificial Sequence
  Description of Artificial Sequence: Synthetic oligonucleotide
  Antisense Strand to SEQ ID NO: 466393
uuaagucugcacuauguac

SEQ ID NO: 466395 - RNA, 19 nt, Artificial Sequence
  Description of Artificial Sequence: Synthetic oligonucleotide
  Sense strand starting at position 1097 of SEQ ID NO: 317126
uuggcuauagguuguagaa

SEQ ID NO: 466396 - RNA, 19 nt, Artificial Sequence
  Description of Artificial Sequence: Synthetic oligonucleotide
  Antisense Strand to SEQ ID NO: 466395
uucuacaaccuauagccaa

SEQ ID NO: 466397 - RNA, 19 nt, Artificial Sequence
  Description of Artificial Sequence: Synthetic oligonucleotide
  Sense strand starting at position 1125 of SEQ ID NO: 317126
gagagaagaauguggucuu

SEQ ID NO: 466398 - RNA, 19 nt, Artificial Sequence
  Description of Artificial Sequence: Synthetic oligonucleotide
  Antisense Strand to SEQ ID NO: 466397
aagaccacauucuucucuc

SEQ ID NO: 466399 - RNA, 19 nt, Artificial Sequence
  Description of Artificial Sequence: Synthetic oligonucleotide
  Sense strand starting at position 1159 of SEQ ID NO: 317126
ugguuauauauguaaugug

SEQ ID NO: 466400 - RNA, 19 nt, Artificial Sequence
  Description of Artificial Sequence: Synthetic oligonucleotide
  Antisense Strand to SEQ ID NO: 466399
cacauuacauauauaacca

SEQ ID NO: 466401 - RNA, 19 nt, Artificial Sequence
  Description of Artificial Sequence: Synthetic oligonucleotide
  Sense strand starting at position 1168 of SEQ ID NO: 317126
auguaauguguacauguca

SEQ ID NO: 466402 - RNA, 19 nt, Artificial Sequence
  Description of Artificial Sequence: Synthetic oligonucleotide
  Antisense Strand to SEQ ID NO: 466401
ugacauguacacauuacau

SEQ ID NO: 466403 - RNA, 19 nt, Artificial Sequence
  Description of Artificial Sequence: Synthetic oligonucleotide
  Sense strand starting at position 1238 of SEQ ID NO: 317126
cauauuagggcagguaauu

SEQ ID NO: 466404 - RNA, 19 nt, Artificial Sequence
  Description of Artificial Sequence: Synthetic oligonucleotide
  Antisense Strand to SEQ ID NO: 466403
aauuaccugcccuaauaug

SEQ ID NO: 466405 - RNA, 19 nt, Artificial Sequence
  Description of Artificial Sequence: Synthetic oligonucleotide
  Sense strand starting at position 1330 of SEQ ID NO: 317126
guguuagagucagucagag

SEQ ID NO: 466406 - RNA, 19 nt, Artificial Sequence
  Description of Artificial Sequence: Synthetic oligonucleotide
  Antisense Strand to SEQ ID NO: 466405
cucugacugacucuaacac

SEQ ID NO: 466407 - RNA, 19 nt, Artificial Sequence
  Description of Artificial Sequence: Synthetic oligonucleotide
  Sense strand starting at position 1332 of SEQ ID NO: 317126
guuagagucagucagagac

SEQ ID NO: 466408 - RNA, 19 nt, Artificial Sequence
  Description of Artificial Sequence: Synthetic oligonucleotide
  Antisense Strand to SEQ ID NO: 466407
gucucugacugacucuaac

SEQ ID NO: 466409 - RNA, 19 nt, Artificial Sequence
  Description of Artificial Sequence: Synthetic oligonucleotide
  Sense strand starting at position 1400 of SEQ ID NO: 317126
gacuuugagugaguugcaa

SEQ ID NO: 466410 - RNA, 19 nt, Artificial Sequence
  Description of Artificial Sequence: Synthetic oligonucleotide
  Antisense Strand to SEQ ID NO: 466409
uugcaacucacucaaaguc

SEQ ID NO: 466411 - RNA, 19 nt, Artificial Sequence
  Description of Artificial Sequence: Synthetic oligonucleotide
  Sense strand starting at position 1501 of SEQ ID NO: 317126
aauaaagucucagugguau

SEQ ID NO: 466412 - RNA, 19 nt, Artificial Sequence
  Description of Artificial Sequence: Synthetic oligonucleotide
  Antisense Strand to SEQ ID NO: 466411
auaccacugagacuuuauu

SEQ ID NO: 466413 - RNA, 19 nt, Artificial Sequence
  Description of Artificial Sequence: Synthetic oligonucleotide
  Sense strand starting at position 1570 of SEQ ID NO: 317126
acgaaaugguuacuuauua

SEQ ID NO: 466414 - RNA, 19 nt, Artificial Sequence
  Description of Artificial Sequence: Synthetic oligonucleotide
  Antisense Strand to SEQ ID NO: 466413
uaauaaguaaccauuucgu

SEQ ID NO: 466415 - RNA, 19 nt, Artificial Sequence
  Description of Artificial Sequence: Synthetic oligonucleotide
  Sense strand starting at position 1571 of SEQ ID NO: 317126
cgaaaugguuacuuauuau

SEQ ID NO: 466416 - RNA, 19 nt, Artificial Sequence
  Description of Artificial Sequence: Synthetic oligonucleotide
  Antisense Strand to SEQ ID NO: 466415
auaauaaguaaccauuucg

SEQ ID NO: 466417 - RNA, 19 nt, Artificial Sequence
  Description of Artificial Sequence: Synthetic oligonucleotide
  Sense strand starting at position 1768 of SEQ ID NO: 317126
uguauauuacuugaaagcu

SEQ ID NO: 466418 - RNA, 19 nt, Artificial Sequence
  Description of Artificial Sequence: Synthetic oligonucleotide
  Antisense Strand to SEQ ID NO: 466417
agcuuucaaguaauauaca

SEQ ID NO: 466419 - RNA, 19 nt, Artificial Sequence
  Description of Artificial Sequence: Synthetic oligonucleotide
  Sense strand starting at position 1778 of SEQ ID NO: 317126
uugaaagcuguuuaguuua

SEQ ID NO: 466420 - RNA, 19 nt, Artificial Sequence
  Description of Artificial Sequence: Synthetic oligonucleotide
  Antisense Strand to SEQ ID NO: 466419
uaaacuaaacagcuuucaa

SEQ ID NO: 466421 - RNA, 19 nt, Artificial Sequence
  Description of Artificial Sequence: Synthetic oligonucleotide
  Sense strand starting at position 1780 of SEQ ID NO: 317126
gaaagcuguuuaguuuaua

SEQ ID NO: 466422 - RNA, 19 nt, Artificial Sequence
  Description of Artificial Sequence: Synthetic oligonucleotide
  Antisense Strand to SEQ ID NO: 466421
uauaaacuaaacagcuuuc

SEQ ID NO: 466423 - RNA, 19 nt, Artificial Sequence
  Description of Artificial Sequence: Synthetic oligonucleotide
  Sense strand starting at position 1990 of SEQ ID NO: 317126
gauuuaagauaaggucauu

SEQ ID NO: 466424 - RNA, 19 nt, Artificial Sequence
  Description of Artificial Sequence: Synthetic oligonucleotide
  Antisense Strand to SEQ ID NO: 466423
aaugaccuuaucuuaaauc

SEQ ID NO: 466425 - RNA, 19 nt, Artificial Sequence
  Description of Artificial Sequence: Synthetic oligonucleotide
  Sense strand starting at position 2145 of SEQ ID NO: 317126
ugaguaguggaacaguaau

SEQ ID NO: 466426 - RNA, 19 nt, Artificial Sequence
  Description of Artificial Sequence: Synthetic oligonucleotide
  Antisense Strand to SEQ ID NO: 466425
auuacuguuccacuacuca

SEQ ID NO: 466427 - RNA, 19 nt, Artificial Sequence
  Description of Artificial Sequence: Synthetic oligonucleotide
  Sense strand starting at position 2168 of SEQ ID NO: 317126
ggcgcuuacggagaaacaa

SEQ ID NO: 466428 - RNA, 19 nt, Artificial Sequence
  Description of Artificial Sequence: Synthetic oligonucleotide
  Antisense Strand to SEQ ID NO: 466427
uuguuucuccguaagcgcc

SEQ ID NO: 466429 - RNA, 19 nt, Artificial Sequence
  Description of Artificial Sequence: Synthetic oligonucleotide
  Sense strand starting at position 2257 of SEQ ID NO: 317126
cagagugauugccuucuga

SEQ ID NO: 466430 - RNA, 19 nt, Artificial Sequence
  Description of Artificial Sequence: Synthetic oligonucleotide
  Antisense Strand to SEQ ID NO: 466429
ucagaaggcaaucacucug

SEQ ID NO: 466431 - RNA, 19 nt, Artificial Sequence
  Description of Artificial Sequence: Synthetic oligonucleotide
  Sense strand starting at position 2488 of SEQ ID NO: 317126
guaguagaacuauauacuc

SEQ ID NO: 466432 - RNA, 19 nt, Artificial Sequence
  Description of Artificial Sequence: Synthetic oligonucleotide
  Antisense Strand to SEQ ID NO: 466431
gaguauauaguucuacuac

SEQ ID NO: 466433 - RNA, 19 nt, Artificial Sequence
  Description of Artificial Sequence: Synthetic oligonucleotide
  Sense strand starting at position 2768 of SEQ ID NO: 317126
ccguguguugcagugacuu

SEQ ID NO: 466434 - RNA, 19 nt, Artificial Sequence
  Description of Artificial Sequence: Synthetic oligonucleotide
  Antisense Strand to SEQ ID NO: 466433
aagucacugcaacacacgg

SEQ ID NO: 466435 - RNA, 19 nt, Artificial Sequence
  Description of Artificial Sequence: Synthetic oligonucleotide
  Sense strand starting at position 2973 of SEQ ID NO: 317126
aucguuaaucuggaauaca

SEQ ID NO: 466436 - RNA, 19 nt, Artificial Sequence
  Description of Artificial Sequence: Synthetic oligonucleotide
  Antisense Strand to SEQ ID NO: 466435
uguauuccagauuaacgau

SEQ ID NO: 466437 - RNA, 19 nt, Artificial Sequence
  Description of Artificial Sequence: Synthetic oligonucleotide
  Sense strand starting at position 2976 of SEQ ID NO: 317126
guuaaucuggaauacaguu

SEQ ID NO: 466438 - RNA, 19 nt, Artificial Sequence
  Description of Artificial Sequence: Synthetic oligonucleotide
  Antisense Strand to SEQ ID NO: 466437
aacuguauuccagauuaac

SEQ ID NO: 466439 - RNA, 19 nt, Artificial Sequence
  Description of Artificial Sequence: Synthetic oligonucleotide
  Sense strand starting at position 3060 of SEQ ID NO: 317126
uacauucuuuggguuugau

SEQ ID NO: 466440 - RNA, 19 nt, Artificial Sequence
  Description of Artificial Sequence: Synthetic oligonucleotide
  Antisense Strand to SEQ ID NO: 466439
aucaaacccaaagaaugua

SEQ ID NO: 466441 - RNA, 19 nt, Artificial Sequence
  Description of Artificial Sequence: Synthetic oligonucleotide
  Sense strand starting at position 3153 of SEQ ID NO: 317126
cugcuaauuaggugugaca

SEQ ID NO: 466442 - RNA, 19 nt, Artificial Sequence
  Description of Artificial Sequence: Synthetic oligonucleotide
  Antisense Strand to SEQ ID NO: 466441
ugucacaccuaauuagcag

SEQ ID NO: 466443 - RNA, 19 nt, Artificial Sequence
  Description of Artificial Sequence: Synthetic oligonucleotide
  Sense strand starting at position 3177 of SEQ ID NO: 317126
uuuacaaaguugucagacu

SEQ ID NO: 466444 - RNA, 19 nt, Artificial Sequence
  Description of Artificial Sequence: Synthetic oligonucleotide
  Antisense Strand to SEQ ID NO: 466443
agucugacaacuuuguaaa

SEQ ID NO: 466445 - RNA, 19 nt, Artificial Sequence
  Description of Artificial Sequence: Synthetic oligonucleotide
  Sense strand starting at position 3184 of SEQ ID NO: 317126
aguugucagacugaaagua

SEQ ID NO: 466446 - RNA, 19 nt, Artificial Sequence
  Description of Artificial Sequence: Synthetic oligonucleotide
  Antisense Strand to SEQ ID NO: 466445
uacuuucagucugacaacu

SEQ ID NO: 466447 - RNA, 19 nt, Artificial Sequence
  Description of Artificial Sequence: Synthetic oligonucleotide
  Sense strand starting at position 3238 of SEQ ID NO: 317126
ggaacacccucagcuauua

SEQ ID NO: 466448 - RNA, 19 nt, Artificial Sequence
  Description of Artificial Sequence: Synthetic oligonucleotide
  Antisense Strand to SEQ ID NO: 466447
uaauagcugaggguguucc

SEQ ID NO: 466449 - RNA, 19 nt, Artificial Sequence
  Description of Artificial Sequence: Synthetic oligonucleotide
  Sense strand starting at position 3259 of SEQ ID NO: 317126
cugccauuaguggaaaguu

SEQ ID NO: 466450 - RNA, 19 nt, Artificial Sequence
  Description of Artificial Sequence: Synthetic oligonucleotide
  Antisense Strand to SEQ ID NO: 466449
aacuuuccacuaauggcag

SEQ ID NO: 466451 - RNA, 19 nt, Artificial Sequence
  Description of Artificial Sequence: Synthetic oligonucleotide
  Sense strand starting at position 3289 of SEQ ID NO: 317126
uugagauagcaaugaguua

SEQ ID NO: 466452 - RNA, 19 nt, Artificial Sequence
  Description of Artificial Sequence: Synthetic oligonucleotide
  Antisense Strand to SEQ ID NO: 466451
uaacucauugcuaucucaa

SEQ ID NO: 466453 - RNA, 19 nt, Artificial Sequence
  Description of Artificial Sequence: Synthetic oligonucleotide
  Sense strand starting at position 3306 of SEQ ID NO: 317126
uaguaaauaugggcuauaa

SEQ ID NO: 466454 - RNA, 19 nt, Artificial Sequence
  Description of Artificial Sequence: Synthetic oligonucleotide
  Antisense Strand to SEQ ID NO: 466453
uuauagcccauauuuacua

SEQ ID NO: 466455 - RNA, 19 nt, Artificial Sequence
  Description of Artificial Sequence: Synthetic oligonucleotide
  Sense strand starting at position 3316 of SEQ ID NO: 317126
gggcuauaauauuaauuuc

SEQ ID NO: 466456 - RNA, 19 nt, Artificial Sequence
  Description of Artificial Sequence: Synthetic oligonucleotide
  Antisense Strand to SEQ ID NO: 466455
gaaauuaauauuauagccc

SEQ ID NO: 466457 - RNA, 19 nt, Artificial Sequence
  Description of Artificial Sequence: Synthetic oligonucleotide
  Sense strand starting at position 3559 of SEQ ID NO: 317126
ccuaaauaaugccuggaga

SEQ ID NO: 466458 - RNA, 19 nt, Artificial Sequence
  Description of Artificial Sequence: Synthetic oligonucleotide
  Antisense Strand to SEQ ID NO: 466457
ucuccaggcauuauuuagg

SEQ ID NO: 466459 - RNA, 19 nt, Artificial Sequence
  Description of Artificial Sequence: Synthetic oligonucleotide
  Sense strand starting at position 3560 of SEQ ID NO: 317126
cuaaauaaugccuggagau

SEQ ID NO: 466460 - RNA, 19 nt, Artificial Sequence
  Description of Artificial Sequence: Synthetic oligonucleotide
  Antisense Strand to SEQ ID NO: 466459
aucuccaggcauuauuuag

SEQ ID NO: 466461 - RNA, 19 nt, Artificial Sequence
  Description of Artificial Sequence: Synthetic oligonucleotide
  Sense strand starting at position 3717 of SEQ ID NO: 317126
uuauauucucuugggauac

SEQ ID NO: 466462 - RNA, 19 nt, Artificial Sequence
  Description of Artificial Sequence: Synthetic oligonucleotide
  Antisense Strand to SEQ ID NO: 466461
guaucccaagagaauauaa

SEQ ID NO: 466463 - RNA, 19 nt, Artificial Sequence
  Description of Artificial Sequence: Synthetic oligonucleotide
  Sense strand starting at position 258 of SEQ ID NO: 317127
ggcgucaucagagaugggu

SEQ ID NO: 466464 - RNA, 19 nt, Artificial Sequence
  Description of Artificial Sequence: Synthetic oligonucleotide
  Antisense Strand to SEQ ID NO: 466463
acccaucucugaugacgcc

SEQ ID NO: 466465 - RNA, 19 nt, Artificial Sequence
  Description of Artificial Sequence: Synthetic oligonucleotide
  Sense strand starting at position 260 of SEQ ID NO: 317127
cgucaucagagauggguga

SEQ ID NO: 466466 - RNA, 19 nt, Artificial Sequence
  Description of Artificial Sequence: Synthetic oligonucleotide
  Antisense Strand to SEQ ID NO: 466465
ucacccaucucugaugacg

SEQ ID NO: 466467 - RNA, 19 nt, Artificial Sequence
  Description of Artificial Sequence: Synthetic oligonucleotide
  Sense strand starting at position 262 of SEQ ID NO: 317127
ucaucagagaugggugagu

SEQ ID NO: 466468 - RNA, 19 nt, Artificial Sequence
  Description of Artificial Sequence: Synthetic oligonucleotide
  Antisense Strand to SEQ ID NO: 466467
acucacccaucucugauga

SEQ ID NO: 466469 - RNA, 19 nt, Artificial Sequence
  Description of Artificial Sequence: Synthetic oligonucleotide
  Sense strand starting at position 312 of SEQ ID NO: 317127
caguuuccuuggccauaga

SEQ ID NO: 466470 - RNA, 19 nt, Artificial Sequence
  Description of Artificial Sequence: Synthetic oligonucleotide
  Antisense Strand to SEQ ID NO: 466469
ucuauggccaaggaaacug

SEQ ID NO: 466471 - RNA, 19 nt, Artificial Sequence
  Description of Artificial Sequence: Synthetic oligonucleotide
  Sense strand starting at position 315 of SEQ ID NO: 317127
uuuccuuggccauagagau

SEQ ID NO: 466472 - RNA, 19 nt, Artificial Sequence
  Description of Artificial Sequence: Synthetic oligonucleotide
  Antisense Strand to SEQ ID NO: 466471
aucucuauggccaaggaaa

SEQ ID NO: 466473 - RNA, 19 nt, Artificial Sequence
  Description of Artificial Sequence: Synthetic oligonucleotide
  Sense strand starting at position 373 of SEQ ID NO: 317127
acuggcugcaugugugaaa

SEQ ID NO: 466474 - RNA, 19 nt, Artificial Sequence
  Description of Artificial Sequence: Synthetic oligonucleotide
  Antisense Strand to SEQ ID NO: 466473
uuucacacaugcagccagu

SEQ ID NO: 466475 - RNA, 19 nt, Artificial Sequence
  Description of Artificial Sequence: Synthetic oligonucleotide
  Sense strand starting at position 384 of SEQ ID NO: 317127
gugugaaacgcucagcaua

SEQ ID NO: 466476 - RNA, 19 nt, Artificial Sequence
  Description of Artificial Sequence: Synthetic oligonucleotide
  Antisense Strand to SEQ ID NO: 466475
uaugcugagcguuucacac

SEQ ID NO: 466477 - RNA, 19 nt, Artificial Sequence
  Description of Artificial Sequence: Synthetic oligonucleotide
  Sense strand starting at position 386 of SEQ ID NO: 317127
gugaaacgcucagcauaga

SEQ ID NO: 466478 - RNA, 19 nt, Artificial Sequence
  Description of Artificial Sequence: Synthetic oligonucleotide
  Antisense Strand to SEQ ID NO: 466477
ucuaugcugagcguuucac

SEQ ID NO: 466479 - RNA, 19 nt, Artificial Sequence
  Description of Artificial Sequence: Synthetic oligonucleotide
  Sense strand starting at position 486 of SEQ ID NO: 317127
cagaguucuccacggguca

SEQ ID NO: 466480 - RNA, 19 nt, Artificial Sequence
  Description of Artificial Sequence: Synthetic oligonucleotide
  Antisense Strand to SEQ ID NO: 466479
ugacccguggagaacucug

SEQ ID NO: 466481 - RNA, 19 nt, Artificial Sequence
  Description of Artificial Sequence: Synthetic oligonucleotide
  Sense strand starting at position 505 of SEQ ID NO: 317127
gggacuugguuuggagaga

SEQ ID NO: 466482 - RNA, 19 nt, Artificial Sequence
  Description of Artificial Sequence: Synthetic oligonucleotide
  Antisense Strand to SEQ ID NO: 466481
ucucuccaaaccaaguccc

SEQ ID NO: 466483 - RNA, 19 nt, Artificial Sequence
  Description of Artificial Sequence: Synthetic oligonucleotide
  Sense strand starting at position 506 of SEQ ID NO: 317127
ggacuugguuuggagagaa

SEQ ID NO: 466484 - RNA, 19 nt, Artificial Sequence
  Description of Artificial Sequence: Synthetic oligonucleotide
  Antisense Strand to SEQ ID NO: 466483
uucucuccaaaccaagucc

SEQ ID NO: 466485 - RNA, 19 nt, Artificial Sequence
  Description of Artificial Sequence: Synthetic oligonucleotide
  Sense strand starting at position 539 of SEQ ID NO: 317127
cgggcuugcucacugagga

SEQ ID NO: 466486 - RNA, 19 nt, Artificial Sequence
  Description of Artificial Sequence: Synthetic oligonucleotide
  Antisense Strand to SEQ ID NO: 466485
uccucagugagcaagcccg

SEQ ID NO: 466487 - RNA, 19 nt, Artificial Sequence
  Description of Artificial Sequence: Synthetic oligonucleotide
  Sense strand starting at position 565 of SEQ ID NO: 317127
ggcaaugguucccucguca

SEQ ID NO: 466488 - RNA, 19 nt, Artificial Sequence
  Description of Artificial Sequence: Synthetic oligonucleotide
  Antisense Strand to SEQ ID NO: 466487
ugacgagggaaccauugcc

SEQ ID NO: 466489 - RNA, 19 nt, Artificial Sequence
  Description of Artificial Sequence: Synthetic oligonucleotide
  Sense strand starting at position 961 of SEQ ID NO: 317127
ggcuucugcugccugaaca

SEQ ID NO: 466490 - RNA, 19 nt, Artificial Sequence
  Description of Artificial Sequence: Synthetic oligonucleotide
  Antisense Strand to SEQ ID NO: 466489
uguucaggcagcagaagcc

SEQ ID NO: 466491 - RNA, 19 nt, Artificial Sequence
  Description of Artificial Sequence: Synthetic oligonucleotide
  Sense strand starting at position 1117 of SEQ ID NO: 317127
gaguuucgcugugucagga

SEQ ID NO: 466492 - RNA, 19 nt, Artificial Sequence
  Description of Artificial Sequence: Synthetic oligonucleotide
  Antisense Strand to SEQ ID NO: 466491
uccugacacagcgaaacuc

SEQ ID NO: 466493 - RNA, 19 nt, Artificial Sequence
  Description of Artificial Sequence: Synthetic oligonucleotide
  Sense strand starting at position 2245 of SEQ ID NO: 317127
ggccgagaauguugacaga

SEQ ID NO: 466494 - RNA, 19 nt, Artificial Sequence
  Description of Artificial Sequence: Synthetic oligonucleotide
  Antisense Strand to SEQ ID NO: 466493
ucugucaacauucucggcc

SEQ ID NO: 466495 - RNA, 19 nt, Artificial Sequence
  Description of Artificial Sequence: Synthetic oligonucleotide
  Sense strand starting at position 2290 of SEQ ID NO: 317127
ccgcgcuaguaacaauuua

SEQ ID NO: 466496 - RNA, 19 nt, Artificial Sequence
  Description of Artificial Sequence: Synthetic oligonucleotide
  Antisense Strand to SEQ ID NO: 466495
uaaauuguuacuagcgcgg

SEQ ID NO: 466497 - RNA, 19 nt, Artificial Sequence
  Description of Artificial Sequence: Synthetic oligonucleotide
  Sense strand starting at position 2405 of SEQ ID NO: 317127
gccagagcggccuauguaa

SEQ ID NO: 466498 - RNA, 19 nt, Artificial Sequence
  Description of Artificial Sequence: Synthetic oligonucleotide
  Antisense Strand to SEQ ID NO: 466497
uuacauaggccgcucuggc

SEQ ID NO: 466499 - RNA, 19 nt, Artificial Sequence
  Description of Artificial Sequence: Synthetic oligonucleotide
  Sense strand starting at position 2555 of SEQ ID NO: 317127
gagcgucuccgcuacgaga

SEQ ID NO: 466500 - RNA, 19 nt, Artificial Sequence
  Description of Artificial Sequence: Synthetic oligonucleotide
  Antisense Strand to SEQ ID NO: 466499
ucucguagcggagacgcuc

SEQ ID NO: 466501 - RNA, 19 nt, Artificial Sequence
  Description of Artificial Sequence: Synthetic oligonucleotide
  Sense strand starting at position 2621 of SEQ ID NO: 317127
gggucugagcgcgacgaaa

SEQ ID NO: 466502 - RNA, 19 nt, Artificial Sequence
  Description of Artificial Sequence: Synthetic oligonucleotide
  Antisense Strand to SEQ ID NO: 466501
uuucgucgcgcucagaccc

SEQ ID NO: 466503 - RNA, 19 nt, Artificial Sequence
  Description of Artificial Sequence: Synthetic oligonucleotide
  Sense strand starting at position 3482 of SEQ ID NO: 317127
uggagaguguggaggcaua

SEQ ID NO: 466504 - RNA, 19 nt, Artificial Sequence
  Description of Artificial Sequence: Synthetic oligonucleotide
  Antisense Strand to SEQ ID NO: 466503
uaugccuccacacucucca

SEQ ID NO: 466505 - RNA, 19 nt, Artificial Sequence
  Description of Artificial Sequence: Synthetic oligonucleotide
  Sense strand starting at position 3483 of SEQ ID NO: 317127
ggagaguguggaggcauaa

SEQ ID NO: 466506 - RNA, 19 nt, Artificial Sequence
  Description of Artificial Sequence: Synthetic oligonucleotide
  Antisense Strand to SEQ ID NO: 466505
uuaugccuccacacucucc

SEQ ID NO: 466507 - RNA, 19 nt, Artificial Sequence
  Description of Artificial Sequence: Synthetic oligonucleotide
  Sense strand starting at position 3519 of SEQ ID NO: 317127
agaaguacucagugggaca

SEQ ID NO: 466508 - RNA, 19 nt, Artificial Sequence
  Description of Artificial Sequence: Synthetic oligonucleotide
  Antisense Strand to SEQ ID NO: 466507
ugucccacugaguacuucu

SEQ ID NO: 466509 - RNA, 19 nt, Artificial Sequence
  Description of Artificial Sequence: Synthetic oligonucleotide
  Sense strand starting at position 3599 of SEQ ID NO: 317127
ugugaaagcuucgugugca

SEQ ID NO: 466510 - RNA, 19 nt, Artificial Sequence
  Description of Artificial Sequence: Synthetic oligonucleotide
  Antisense Strand to SEQ ID NO: 466509
ugcacacgaagcuuucaca

SEQ ID NO: 466511 - RNA, 19 nt, Artificial Sequence
  Description of Artificial Sequence: Synthetic oligonucleotide
  Sense strand starting at position 3600 of SEQ ID NO: 317127
gugaaagcuucgugugcau

SEQ ID NO: 466512 - RNA, 19 nt, Artificial Sequence
  Description of Artificial Sequence: Synthetic oligonucleotide
  Antisense Strand to SEQ ID NO: 466511
augcacacgaagcuuucac

SEQ ID NO: 466513 - RNA, 19 nt, Artificial Sequence
  Description of Artificial Sequence: Synthetic oligonucleotide
  Sense strand starting at position 3602 of SEQ ID NO: 317127
gaaagcuucgugugcaucu

SEQ ID NO: 466514 - RNA, 19 nt, Artificial Sequence
  Description of Artificial Sequence: Synthetic oligonucleotide
  Antisense Strand to SEQ ID NO: 466513
agaugcacacgaagcuuuc

SEQ ID NO: 466515 - RNA, 19 nt, Artificial Sequence
  Description of Artificial Sequence: Synthetic oligonucleotide
  Sense strand starting at position 3612 of SEQ ID NO: 317127
ugugcaucucccuguguuu

SEQ ID NO: 466516 - RNA, 19 nt, Artificial Sequence
  Description of Artificial Sequence: Synthetic oligonucleotide
  Antisense Strand to SEQ ID NO: 466515
aaacacagggagaugcaca

SEQ ID NO: 466517 - RNA, 19 nt, Artificial Sequence
  Description of Artificial Sequence: Synthetic oligonucleotide
  Sense strand starting at position 3660 of SEQ ID NO: 317127
ggacuagacgcucagggau

SEQ ID NO: 466518 - RNA, 19 nt, Artificial Sequence
  Description of Artificial Sequence: Synthetic oligonucleotide
  Antisense Strand to SEQ ID NO: 466517
aucccugagcgucuagucc

SEQ ID NO: 466519 - RNA, 19 nt, Artificial Sequence
  Description of Artificial Sequence: Synthetic oligonucleotide
  Sense strand starting at position 3662 of SEQ ID NO: 317127
acuagacgcucagggauuu

SEQ ID NO: 466520 - RNA, 19 nt, Artificial Sequence
  Description of Artificial Sequence: Synthetic oligonucleotide
  Antisense Strand to SEQ ID NO: 466519
aaaucccugagcgucuagu

SEQ ID NO: 466521 - RNA, 19 nt, Artificial Sequence
  Description of Artificial Sequence: Synthetic oligonucleotide
  Sense strand starting at position 3692 of SEQ ID NO: 317127
ccagaaaucucagcagaau

SEQ ID NO: 466522 - RNA, 19 nt, Artificial Sequence
  Description of Artificial Sequence: Synthetic oligonucleotide
  Antisense Strand to SEQ ID NO: 466521
auucugcugagauuucugg

SEQ ID NO: 466523 - RNA, 19 nt, Artificial Sequence
  Description of Artificial Sequence: Synthetic oligonucleotide
  Sense strand starting at position 3711 of SEQ ID NO: 317127
ggagauuagugcugccaca

SEQ ID NO: 466524 - RNA, 19 nt, Artificial Sequence
  Description of Artificial Sequence: Synthetic oligonucleotide
  Antisense Strand to SEQ ID NO: 466523
uguggcagcacuaaucucc

SEQ ID NO: 466525 - RNA, 19 nt, Artificial Sequence
  Description of Artificial Sequence: Synthetic oligonucleotide
  Sense strand starting at position 3733 of SEQ ID NO: 317127
ggcucagggcuauaggaau

SEQ ID NO: 466526 - RNA, 19 nt, Artificial Sequence
  Description of Artificial Sequence: Synthetic oligonucleotide
  Antisense Strand to SEQ ID NO: 466525
auuccuauagcccugagcc

SEQ ID NO: 466527 - RNA, 19 nt, Artificial Sequence
  Description of Artificial Sequence: Synthetic oligonucleotide
  Sense strand starting at position 3815 of SEQ ID NO: 317127
agaauaauguguguuccca

SEQ ID NO: 466528 - RNA, 19 nt, Artificial Sequence
  Description of Artificial Sequence: Synthetic oligonucleotide
  Antisense Strand to SEQ ID NO: 466527
ugggaacacacauuauucu

SEQ ID NO: 466529 - RNA, 19 nt, Artificial Sequence
  Description of Artificial Sequence: Synthetic oligonucleotide
  Sense strand starting at position 3819 of SEQ ID NO: 317127
uaauguguguucccacaga

SEQ ID NO: 466530 - RNA, 19 nt, Artificial Sequence
  Description of Artificial Sequence: Synthetic oligonucleotide
  Antisense Strand to SEQ ID NO: 466529
ucugugggaacacacauua

SEQ ID NO: 466531 - RNA, 19 nt, Artificial Sequence
  Description of Artificial Sequence: Synthetic oligonucleotide
  Sense strand starting at position 3861 of SEQ ID NO: 317127
cucggacacugcuaugaga

SEQ ID NO: 466532 - RNA, 19 nt, Artificial Sequence
  Description of Artificial Sequence: Synthetic oligonucleotide
  Antisense Strand to SEQ ID NO: 466531
ucucauagcaguguccgag

SEQ ID NO: 466533 - RNA, 19 nt, Artificial Sequence
  Description of Artificial Sequence: Synthetic oligonucleotide
  Sense strand starting at position 3863 of SEQ ID NO: 317127
cggacacugcuaugagaca

SEQ ID NO: 466534 - RNA, 19 nt, Artificial Sequence
  Description of Artificial Sequence: Synthetic oligonucleotide
  Antisense Strand to SEQ ID NO: 466533
ugucucauagcaguguccg

SEQ ID NO: 466535 - RNA, 19 nt, Artificial Sequence
  Description of Artificial Sequence: Synthetic oligonucleotide
  Sense strand starting at position 3885 of SEQ ID NO: 317127
cugcauggacauugagaca

SEQ ID NO: 466536 - RNA, 19 nt, Artificial Sequence
  Description of Artificial Sequence: Synthetic oligonucleotide
  Antisense Strand to SEQ ID NO: 466535
ugucucaauguccaugcag

SEQ ID NO: 466537 - RNA, 19 nt, Artificial Sequence
  Description of Artificial Sequence: Synthetic oligonucleotide
  Sense strand starting at position 2 of SEQ ID NO: 317128
ggucuugccuguuacagac

SEQ ID NO: 466538 - RNA, 19 nt, Artificial Sequence
  Description of Artificial Sequence: Synthetic oligonucleotide
  Antisense Strand to SEQ ID NO: 466537
gucuguaacaggcaagacc

SEQ ID NO: 466539 - RNA, 19 nt, Artificial Sequence
  Description of Artificial Sequence: Synthetic oligonucleotide
  Sense strand starting at position 257 of SEQ ID NO: 317128
gggaucugcuguucuuaau

SEQ ID NO: 466540 - RNA, 19 nt, Artificial Sequence
  Description of Artificial Sequence: Synthetic oligonucleotide
  Antisense Strand to SEQ ID NO: 466539
auuaagaacagcagauccc

SEQ ID NO: 466541 - RNA, 19 nt, Artificial Sequence
  Description of Artificial Sequence: Synthetic oligonucleotide
  Sense strand starting at position 267 of SEQ ID NO: 317128
guucuuaauucugggcaua

SEQ ID NO: 466542 - RNA, 19 nt, Artificial Sequence
  Description of Artificial Sequence: Synthetic oligonucleotide
  Antisense Strand to SEQ ID NO: 466541
uaugcccagaauuaagaac

SEQ ID NO: 466543 - RNA, 19 nt, Artificial Sequence
  Description of Artificial Sequence: Synthetic oligonucleotide
  Sense strand starting at position 268 of SEQ ID NO: 317128
uucuuaauucugggcauaa

SEQ ID NO: 466544 - RNA, 19 nt, Artificial Sequence
  Description of Artificial Sequence: Synthetic oligonucleotide
  Antisense Strand to SEQ ID NO: 466543
uuaugcccagaauuaagaa

SEQ ID NO: 466545 - RNA, 19 nt, Artificial Sequence
  Description of Artificial Sequence: Synthetic oligonucleotide
  Sense strand starting at position 269 of SEQ ID NO: 317128
ucuuaauucugggcauaag

SEQ ID NO: 466546 - RNA, 19 nt, Artificial Sequence
  Description of Artificial Sequence: Synthetic oligonucleotide
  Antisense Strand to SEQ ID NO: 466545
cuuaugcccagaauuaaga

SEQ ID NO: 466547 - RNA, 19 nt, Artificial Sequence
  Description of Artificial Sequence: Synthetic oligonucleotide
  Sense strand starting at position 840 of SEQ ID NO: 317128
cuguguucgccuccuccaa

SEQ ID NO: 466548 - RNA, 19 nt, Artificial Sequence
  Description of Artificial Sequence: Synthetic oligonucleotide
  Antisense Strand to SEQ ID NO: 466547
uuggaggaggcgaacacag

SEQ ID NO: 466549 - RNA, 19 nt, Artificial Sequence
  Description of Artificial Sequence: Synthetic oligonucleotide
  Sense strand starting at position 1145 of SEQ ID NO: 317128
aggaaagucucaccuccuu

SEQ ID NO: 466550 - RNA, 19 nt, Artificial Sequence
  Description of Artificial Sequence: Synthetic oligonucleotide
  Antisense Strand to SEQ ID NO: 466549
aaggaggugagacuuuccu

SEQ ID NO: 466551 - RNA, 19 nt, Artificial Sequence
  Description of Artificial Sequence: Synthetic oligonucleotide
  Sense strand starting at position 1339 of SEQ ID NO: 317128
agacuuaacucagaugaag

SEQ ID NO: 466552 - RNA, 19 nt, Artificial Sequence
  Description of Artificial Sequence: Synthetic oligonucleotide
  Antisense Strand to SEQ ID NO: 466551
cuucaucugaguuaagucu

SEQ ID NO: 466553 - RNA, 19 nt, Artificial Sequence
  Description of Artificial Sequence: Synthetic oligonucleotide
  Sense strand starting at position 1676 of SEQ ID NO: 317128
gcacguacuucccacaaca

SEQ ID NO: 466554 - RNA, 19 nt, Artificial Sequence
  Description of Artificial Sequence: Synthetic oligonucleotide
  Antisense Strand to SEQ ID NO: 466553
uguugugggaaguacgugc

SEQ ID NO: 466555 - RNA, 19 nt, Artificial Sequence
  Description of Artificial Sequence: Synthetic oligonucleotide
  Sense strand starting at position 2172 of SEQ ID NO: 317128
gaggcuuuguucucccaag

SEQ ID NO: 466556 - RNA, 19 nt, Artificial Sequence
  Description of Artificial Sequence: Synthetic oligonucleotide
  Antisense Strand to SEQ ID NO: 466555
cuugggagaacaaagccuc

SEQ ID NO: 466557 - RNA, 19 nt, Artificial Sequence
  Description of Artificial Sequence: Synthetic oligonucleotide
  Sense strand starting at position 2187 of SEQ ID NO: 317128
caaggauucugugugucag

SEQ ID NO: 466558 - RNA, 19 nt, Artificial Sequence
  Description of Artificial Sequence: Synthetic oligonucleotide
  Antisense Strand to SEQ ID NO: 466557
cugacacacagaauccuug

SEQ ID NO: 466559 - RNA, 19 nt, Artificial Sequence
  Description of Artificial Sequence: Synthetic oligonucleotide
  Sense strand starting at position 2189 of SEQ ID NO: 317128
aggauucugugugucagca

SEQ ID NO: 466560 - RNA, 19 nt, Artificial Sequence
  Description of Artificial Sequence: Synthetic oligonucleotide
  Antisense Strand to SEQ ID NO: 466559
ugcugacacacagaauccu

SEQ ID NO: 466561 - RNA, 19 nt, Artificial Sequence
  Description of Artificial Sequence: Synthetic oligonucleotide
  Sense strand starting at position 2377 of SEQ ID NO: 317128
cugccuuggugacagaagu

SEQ ID NO: 466562 - RNA, 19 nt, Artificial Sequence
  Description of Artificial Sequence: Synthetic oligonucleotide
  Antisense Strand to SEQ ID NO: 466561
acuucugucaccaaggcag

SEQ ID NO: 466563 - RNA, 19 nt, Artificial Sequence
  Description of Artificial Sequence: Synthetic oligonucleotide
  Sense strand starting at position 2391 of SEQ ID NO: 317128
gaagucaguccauagccuu

SEQ ID NO: 466564 - RNA, 19 nt, Artificial Sequence
  Description of Artificial Sequence: Synthetic oligonucleotide
  Antisense Strand to SEQ ID NO: 466563
aaggcuauggacugacuuc

SEQ ID NO: 466565 - RNA, 19 nt, Artificial Sequence
  Description of Artificial Sequence: Synthetic oligonucleotide
  Sense strand starting at position 2459 of SEQ ID NO: 317128
gcccaugggugaugacauu

SEQ ID NO: 466566 - RNA, 19 nt, Artificial Sequence
  Description of Artificial Sequence: Synthetic oligonucleotide
  Antisense Strand to SEQ ID NO: 466565
aaugucaucacccaugggc

SEQ ID NO: 466567 - RNA, 19 nt, Artificial Sequence
  Description of Artificial Sequence: Synthetic oligonucleotide
  Sense strand starting at position 2613 of SEQ ID NO: 317128
gucuguugguggugucaga

SEQ ID NO: 466568 - RNA, 19 nt, Artificial Sequence
  Description of Artificial Sequence: Synthetic oligonucleotide
  Antisense Strand to SEQ ID NO: 466567
ucugacaccaccaacagac

SEQ ID NO: 466569 - RNA, 19 nt, Artificial Sequence
  Description of Artificial Sequence: Synthetic oligonucleotide
  Sense strand starting at position 2617 of SEQ ID NO: 317128
guugguggugucagacauc

SEQ ID NO: 466570 - RNA, 19 nt, Artificial Sequence
  Description of Artificial Sequence: Synthetic oligonucleotide
  Antisense Strand to SEQ ID NO: 466569
gaugucugacaccaccaac

SEQ ID NO: 466571 - RNA, 19 nt, Artificial Sequence
  Description of Artificial Sequence: Synthetic oligonucleotide
  Sense strand starting at position 2620 of SEQ ID NO: 317128
gguggugucagacaucaga

SEQ ID NO: 466572 - RNA, 19 nt, Artificial Sequence
  Description of Artificial Sequence: Synthetic oligonucleotide
  Antisense Strand to SEQ ID NO: 466571
ucugaugucugacaccacc

SEQ ID NO: 466573 - RNA, 19 nt, Artificial Sequence
  Description of Artificial Sequence: Synthetic oligonucleotide
  Sense strand starting at position 2831 of SEQ ID NO: 317128
aguggugggagugacuaua

SEQ ID NO: 466574 - RNA, 19 nt, Artificial Sequence
  Description of Artificial Sequence: Synthetic oligonucleotide
  Antisense Strand to SEQ ID NO: 466573
uauagucacucccaccacu

SEQ ID NO: 466575 - RNA, 19 nt, Artificial Sequence
  Description of Artificial Sequence: Synthetic oligonucleotide
  Sense strand starting at position 2888 of SEQ ID NO: 317128
ccgugucugcaaggcuaaa

SEQ ID NO: 466576 - RNA, 19 nt, Artificial Sequence
  Description of Artificial Sequence: Synthetic oligonucleotide
  Antisense Strand to SEQ ID NO: 466575
uuuagccuugcagacacgg

SEQ ID NO: 466577 - RNA, 19 nt, Artificial Sequence
  Description of Artificial Sequence: Synthetic oligonucleotide
  Sense strand starting at position 2956 of SEQ ID NO: 317128
gggacacauggucacaguu

SEQ ID NO: 466578 - RNA, 19 nt, Artificial Sequence
  Description of Artificial Sequence: Synthetic oligonucleotide
  Antisense Strand to SEQ ID NO: 466577
aacugugaccauguguccc

SEQ ID NO: 466579 - RNA, 19 nt, Artificial Sequence
  Description of Artificial Sequence: Synthetic oligonucleotide
  Sense strand starting at position 3029 of SEQ ID NO: 317128
agcacugacuccugagguu

SEQ ID NO: 466580 - RNA, 19 nt, Artificial Sequence
  Description of Artificial Sequence: Synthetic oligonucleotide
  Antisense Strand to SEQ ID NO: 466579
aaccucaggagucagugcu

SEQ ID NO: 466581 - RNA, 19 nt, Artificial Sequence
  Description of Artificial Sequence: Synthetic oligonucleotide
  Sense strand starting at position 3326 of SEQ ID NO: 317128
gucugagcacagugcuaaa

SEQ ID NO: 466582 - RNA, 19 nt, Artificial Sequence
  Description of Artificial Sequence: Synthetic oligonucleotide
  Antisense Strand to SEQ ID NO: 466581
uuuagcacugugcucagac

SEQ ID NO: 466583 - RNA, 19 nt, Artificial Sequence
  Description of Artificial Sequence: Synthetic oligonucleotide
  Sense strand starting at position 3329 of SEQ ID NO: 317128
ugagcacagugcuaaagau

SEQ ID NO: 466584 - RNA, 19 nt, Artificial Sequence
  Description of Artificial Sequence: Synthetic oligonucleotide
  Antisense Strand to SEQ ID NO: 466583
aucuuuagcacugugcuca

SEQ ID NO: 466585 - RNA, 19 nt, Artificial Sequence
  Description of Artificial Sequence: Synthetic oligonucleotide
  Sense strand starting at position 3455 of SEQ ID NO: 317128
ccacuaagcucucaggaaa

SEQ ID NO: 466586 - RNA, 19 nt, Artificial Sequence
  Description of Artificial Sequence: Synthetic oligonucleotide
  Antisense Strand to SEQ ID NO: 466585
uuuccugagagcuuagugg

SEQ ID NO: 466587 - RNA, 19 nt, Artificial Sequence
  Description of Artificial Sequence: Synthetic oligonucleotide
  Sense strand starting at position 3467 of SEQ ID NO: 317128
caggaaaggccuugagcaa

SEQ ID NO: 466588 - RNA, 19 nt, Artificial Sequence
  Description of Artificial Sequence: Synthetic oligonucleotide
  Antisense Strand to SEQ ID NO: 466587
uugcucaaggccuuuccug

SEQ ID NO: 466589 - RNA, 19 nt, Artificial Sequence
  Description of Artificial Sequence: Synthetic oligonucleotide
  Sense strand starting at position 3528 of SEQ ID NO: 317128
guguguuugcccgcauguu

SEQ ID NO: 466590 - RNA, 19 nt, Artificial Sequence
  Description of Artificial Sequence: Synthetic oligonucleotide
  Antisense Strand to SEQ ID NO: 466589
aacaugcgggcaaacacac

SEQ ID NO: 466591 - RNA, 19 nt, Artificial Sequence
  Description of Artificial Sequence: Synthetic oligonucleotide
  Sense strand starting at position 3529 of SEQ ID NO: 317128
uguguuugcccgcauguuu

SEQ ID NO: 466592 - RNA, 19 nt, Artificial Sequence
  Description of Artificial Sequence: Synthetic oligonucleotide
  Antisense Strand to SEQ ID NO: 466591
aaacaugcgggcaaacaca

SEQ ID NO: 466593 - RNA, 19 nt, Artificial Sequence
  Description of Artificial Sequence: Synthetic oligonucleotide
  Sense strand starting at position 3652 of SEQ ID NO: 317128
gcaggaguugcugaggagu

SEQ ID NO: 466594 - RNA, 19 nt, Artificial Sequence
  Description of Artificial Sequence: Synthetic oligonucleotide
  Antisense Strand to SEQ ID NO: 466593
acuccucagcaacuccugc

SEQ ID NO: 466595 - RNA, 19 nt, Artificial Sequence
  Description of Artificial Sequence: Synthetic oligonucleotide
  Sense strand starting at position 3660 of SEQ ID NO: 317128
ugcugaggagucuggauua

SEQ ID NO: 466596 - RNA, 19 nt, Artificial Sequence
  Description of Artificial Sequence: Synthetic oligonucleotide
  Antisense Strand to SEQ ID NO: 466595
uaauccagacuccucagca

SEQ ID NO: 466597 - RNA, 19 nt, Artificial Sequence
  Description of Artificial Sequence: Synthetic oligonucleotide
  Sense strand starting at position 3763 of SEQ ID NO: 317128
gguucugugccuuguggau

SEQ ID NO: 466598 - RNA, 19 nt, Artificial Sequence
  Description of Artificial Sequence: Synthetic oligonucleotide
  Antisense Strand to SEQ ID NO: 466597
auccacaaggcacagaacc

SEQ ID NO: 466599 - RNA, 19 nt, Artificial Sequence
  Description of Artificial Sequence: Synthetic oligonucleotide
  Sense strand starting at position 1 of SEQ ID NO: 317129
aacuuuggauugguaugaa

SEQ ID NO: 466600 - RNA, 19 nt, Artificial Sequence
  Description of Artificial Sequence: Synthetic oligonucleotide
  Antisense Strand to SEQ ID NO: 466599
uucauaccaauccaaaguu

SEQ ID NO: 466601 - RNA, 19 nt, Artificial Sequence
  Description of Artificial Sequence: Synthetic oligonucleotide
  Sense strand starting at position 4 of SEQ ID NO: 317129
uuuggauugguaugaauuc

SEQ ID NO: 466602 - RNA, 19 nt, Artificial Sequence
  Description of Artificial Sequence: Synthetic oligonucleotide
  Antisense Strand to SEQ ID NO: 466601
gaauucauaccaauccaaa

SEQ ID NO: 466603 - RNA, 19 nt, Artificial Sequence
  Description of Artificial Sequence: Synthetic oligonucleotide
  Sense strand starting at position 26 of SEQ ID NO: 317129
ucugguaucugacucagaa

SEQ ID NO: 466604 - RNA, 19 nt, Artificial Sequence
  Description of Artificial Sequence: Synthetic oligonucleotide
  Antisense Strand to SEQ ID NO: 466603
uucugagucagauaccaga

SEQ ID NO: 466605 - RNA, 19 nt, Artificial Sequence
  Description of Artificial Sequence: Synthetic oligonucleotide
  Sense strand starting at position 206 of SEQ ID NO: 317129
uuccucuugcuuuauggaa

SEQ ID NO: 466606 - RNA, 19 nt, Artificial Sequence
  Description of Artificial Sequence: Synthetic oligonucleotide
  Antisense Strand to SEQ ID NO: 466605
uuccauaaagcaagaggaa

SEQ ID NO: 466607 - RNA, 19 nt, Artificial Sequence
  Description of Artificial Sequence: Synthetic oligonucleotide
  Sense strand starting at position 215 of SEQ ID NO: 317129
cuuuauggaagguguaaua

SEQ ID NO: 466608 - RNA, 19 nt, Artificial Sequence
  Description of Artificial Sequence: Synthetic oligonucleotide
  Antisense Strand to SEQ ID NO: 466607
uauuacaccuuccauaaag

SEQ ID NO: 466609 - RNA, 19 nt, Artificial Sequence
  Description of Artificial Sequence: Synthetic oligonucleotide
  Sense strand starting at position 536 of SEQ ID NO: 317129
agugaaauauuaccuugca

SEQ ID NO: 466610 - RNA, 19 nt, Artificial Sequence
  Description of Artificial Sequence: Synthetic oligonucleotide
  Antisense Strand to SEQ ID NO: 466609
ugcaagguaauauuucacu

SEQ ID NO: 466611 - RNA, 19 nt, Artificial Sequence
  Description of Artificial Sequence: Synthetic oligonucleotide
  Sense strand starting at position 700 of SEQ ID NO: 317129
agcaauagaaauggaguua

SEQ ID NO: 466612 - RNA, 19 nt, Artificial Sequence
  Description of Artificial Sequence: Synthetic oligonucleotide
  Antisense Strand to SEQ ID NO: 466611
uaacuccauuucuauugcu

SEQ ID NO: 466613 - RNA, 19 nt, Artificial Sequence
  Description of Artificial Sequence: Synthetic oligonucleotide
  Sense strand starting at position 856 of SEQ ID NO: 317129
guaugagacuuguccagaa

SEQ ID NO: 466614 - RNA, 19 nt, Artificial Sequence
  Description of Artificial Sequence: Synthetic oligonucleotide
  Antisense Strand to SEQ ID NO: 466613
uucuggacaagucucauac

SEQ ID NO: 466615 - RNA, 19 nt, Artificial Sequence
  Description of Artificial Sequence: Synthetic oligonucleotide
  Sense strand starting at position 881 of SEQ ID NO: 317129
aagaaucgagagugaucuu

SEQ ID NO: 466616 - RNA, 19 nt, Artificial Sequence
  Description of Artificial Sequence: Synthetic oligonucleotide
  Antisense Strand to SEQ ID NO: 466615
aagaucacucucgauucuu

SEQ ID NO: 466617 - RNA, 19 nt, Artificial Sequence
  Description of Artificial Sequence: Synthetic oligonucleotide
  Sense strand starting at position 884 of SEQ ID NO: 317129
aaucgagagugaucuuaac

SEQ ID NO: 466618 - RNA, 19 nt, Artificial Sequence
  Description of Artificial Sequence: Synthetic oligonucleotide
  Antisense Strand to SEQ ID NO: 466617
guuaagaucacucucgauu

SEQ ID NO: 466619 - RNA, 19 nt, Artificial Sequence
  Description of Artificial Sequence: Synthetic oligonucleotide
  Sense strand starting at position 1152 of SEQ ID NO: 317129
auauuaaugcuacgaagga

SEQ ID NO: 466620 - RNA, 19 nt, Artificial Sequence
  Description of Artificial Sequence: Synthetic oligonucleotide
  Antisense Strand to SEQ ID NO: 466619
uccuucguagcauuaauau

SEQ ID NO: 466621 - RNA, 19 nt, Artificial Sequence
  Description of Artificial Sequence: Synthetic oligonucleotide
  Sense strand starting at position 1498 of SEQ ID NO: 317129
aucaucaggcagugagaaa

SEQ ID NO: 466622 - RNA, 19 nt, Artificial Sequence
  Description of Artificial Sequence: Synthetic oligonucleotide
  Antisense Strand to SEQ ID NO: 466621
uuucucacugccugaugau

SEQ ID NO: 466623 - RNA, 19 nt, Artificial Sequence
  Description of Artificial Sequence: Synthetic oligonucleotide
  Sense strand starting at position 1627 of SEQ ID NO: 317129
uccagcaaacuguaagaau

SEQ ID NO: 466624 - RNA, 19 nt, Artificial Sequence
  Description of Artificial Sequence: Synthetic oligonucleotide
  Antisense Strand to SEQ ID NO: 466623
auucuuacaguuugcugga

SEQ ID NO: 466625 - RNA, 19 nt, Artificial Sequence
  Description of Artificial Sequence: Synthetic oligonucleotide
  Sense strand starting at position 1746 of SEQ ID NO: 317129
cucugaauauccuuggaca

SEQ ID NO: 466626 - RNA, 19 nt, Artificial Sequence
  Description of Artificial Sequence: Synthetic oligonucleotide
  Antisense Strand to SEQ ID NO: 466625
uguccaaggauauucagag

SEQ ID NO: 466627 - RNA, 19 nt, Artificial Sequence
  Description of Artificial Sequence: Synthetic oligonucleotide
  Sense strand starting at position 1747 of SEQ ID NO: 317129
ucugaauauccuuggacaa

SEQ ID NO: 466628 - RNA, 19 nt, Artificial Sequence
  Description of Artificial Sequence: Synthetic oligonucleotide
  Antisense Strand to SEQ ID NO: 466627
uuguccaaggauauucaga

SEQ ID NO: 466629 - RNA, 19 nt, Artificial Sequence
  Description of Artificial Sequence: Synthetic oligonucleotide
  Sense strand starting at position 1748 of SEQ ID NO: 317129
cugaauauccuuggacaac

SEQ ID NO: 466630 - RNA, 19 nt, Artificial Sequence
  Description of Artificial Sequence: Synthetic oligonucleotide
  Antisense Strand to SEQ ID NO: 466629
guuguccaaggauauucag

SEQ ID NO: 466631 - RNA, 19 nt, Artificial Sequence
  Description of Artificial Sequence: Synthetic oligonucleotide
  Sense strand starting at position 2142 of SEQ ID NO: 317129
gcacuuucuguugaacaga

SEQ ID NO: 466632 - RNA, 19 nt, Artificial Sequence
  Description of Artificial Sequence: Synthetic oligonucleotide
  Antisense Strand to SEQ ID NO: 466631
ucuguucaacagaaagugc

SEQ ID NO: 466633 - RNA, 19 nt, Artificial Sequence
  Description of Artificial Sequence: Synthetic oligonucleotide
  Sense strand starting at position 2293 of SEQ ID NO: 317129
ggcaguaauaucuauguag

SEQ ID NO: 466634 - RNA, 19 nt, Artificial Sequence
  Description of Artificial Sequence: Synthetic oligonucleotide
  Antisense Strand to SEQ ID NO: 466633
cuacauagauauuacugcc

SEQ ID NO: 466635 - RNA, 19 nt, Artificial Sequence
  Description of Artificial Sequence: Synthetic oligonucleotide
  Sense strand starting at position 2296 of SEQ ID NO: 317129
aguaauaucuauguagacu

SEQ ID NO: 466636 - RNA, 19 nt, Artificial Sequence
  Description of Artificial Sequence: Synthetic oligonucleotide
  Antisense Strand to SEQ ID NO: 466635
agucuacauagauauuacu

SEQ ID NO: 466637 - RNA, 19 nt, Artificial Sequence
  Description of Artificial Sequence: Synthetic oligonucleotide
  Sense strand starting at position 2375 of SEQ ID NO: 317129
aacucaugcuagguugaga

SEQ ID NO: 466638 - RNA, 19 nt, Artificial Sequence
  Description of Artificial Sequence: Synthetic oligonucleotide
  Antisense Strand to SEQ ID NO: 466637
ucucaaccuagcaugaguu

SEQ ID NO: 466639 - RNA, 19 nt, Artificial Sequence
  Description of Artificial Sequence: Synthetic oligonucleotide
  Sense strand starting at position 2449 of SEQ ID NO: 317129
gaggauaagccaugaagcu

SEQ ID NO: 466640 - RNA, 19 nt, Artificial Sequence
  Description of Artificial Sequence: Synthetic oligonucleotide
  Antisense Strand to SEQ ID NO: 466639
agcuucauggcuuauccuc

SEQ ID NO: 466641 - RNA, 19 nt, Artificial Sequence
  Description of Artificial Sequence: Synthetic oligonucleotide
  Sense strand starting at position 2481 of SEQ ID NO: 317129
gacucauaacugggucaug

SEQ ID NO: 466642 - RNA, 19 nt, Artificial Sequence
  Description of Artificial Sequence: Synthetic oligonucleotide
  Antisense Strand to SEQ ID NO: 466641
caugacccaguuaugaguc

SEQ ID NO: 466643 - RNA, 19 nt, Artificial Sequence
  Description of Artificial Sequence: Synthetic oligonucleotide
  Sense strand starting at position 2484 of SEQ ID NO: 317129
ucauaacugggucaugcuu

SEQ ID NO: 466644 - RNA, 19 nt, Artificial Sequence
  Description of Artificial Sequence: Synthetic oligonucleotide
  Antisense Strand to SEQ ID NO: 466643
aagcaugacccaguuauga

SEQ ID NO: 466645 - RNA, 19 nt, Artificial Sequence
  Description of Artificial Sequence: Synthetic oligonucleotide
  Sense strand starting at position 2548 of SEQ ID NO: 317129
uuacaaugucuagggucaa

SEQ ID NO: 466646 - RNA, 19 nt, Artificial Sequence
  Description of Artificial Sequence: Synthetic oligonucleotide
  Antisense Strand to SEQ ID NO: 466645
uugacccuagacauuguaa

SEQ ID NO: 466647 - RNA, 19 nt, Artificial Sequence
  Description of Artificial Sequence: Synthetic oligonucleotide
  Sense strand starting at position 2585 of SEQ ID NO: 317129
cugacaagauuugaaaggu

SEQ ID NO: 466648 - RNA, 19 nt, Artificial Sequence
  Description of Artificial Sequence: Synthetic oligonucleotide
  Antisense Strand to SEQ ID NO: 466647
accuuucaaaucuugucag

SEQ ID NO: 466649 - RNA, 19 nt, Artificial Sequence
  Description of Artificial Sequence: Synthetic oligonucleotide
  Sense strand starting at position 2627 of SEQ ID NO: 317129
ccuugauggucccuggaca

SEQ ID NO: 466650 - RNA, 19 nt, Artificial Sequence
  Description of Artificial Sequence: Synthetic oligonucleotide
  Antisense Strand to SEQ ID NO: 466649
uguccagggaccaucaagg

SEQ ID NO: 466651 - RNA, 19 nt, Artificial Sequence
  Description of Artificial Sequence: Synthetic oligonucleotide
  Sense strand starting at position 2852 of SEQ ID NO: 317129
ucaggacucugcucagaua

SEQ ID NO: 466652 - RNA, 19 nt, Artificial Sequence
  Description of Artificial Sequence: Synthetic oligonucleotide
  Antisense Strand to SEQ ID NO: 466651
uaucugagcagaguccuga

SEQ ID NO: 466653 - RNA, 19 nt, Artificial Sequence
  Description of Artificial Sequence: Synthetic oligonucleotide
  Sense strand starting at position 2987 of SEQ ID NO: 317129
gucaaaugggagugacaga

SEQ ID NO: 466654 - RNA, 19 nt, Artificial Sequence
  Description of Artificial Sequence: Synthetic oligonucleotide
  Antisense Strand to SEQ ID NO: 466653
ucugucacucccauuugac

SEQ ID NO: 466655 - RNA, 19 nt, Artificial Sequence
  Description of Artificial Sequence: Synthetic oligonucleotide
  Sense strand starting at position 3036 of SEQ ID NO: 317129
ggaagauguuucucucaca

SEQ ID NO: 466656 - RNA, 19 nt, Artificial Sequence
  Description of Artificial Sequence: Synthetic oligonucleotide
  Antisense Strand to SEQ ID NO: 466655
ugugagagaaacaucuucc

SEQ ID NO: 466657 - RNA, 19 nt, Artificial Sequence
  Description of Artificial Sequence: Synthetic oligonucleotide
  Sense strand starting at position 3037 of SEQ ID NO: 317129
gaagauguuucucucacag

SEQ ID NO: 466658 - RNA, 19 nt, Artificial Sequence
  Description of Artificial Sequence: Synthetic oligonucleotide
  Antisense Strand to SEQ ID NO: 466657
cugugagagaaacaucuuc

SEQ ID NO: 466659 - RNA, 19 nt, Artificial Sequence
  Description of Artificial Sequence: Synthetic oligonucleotide
  Sense strand starting at position 3058 of SEQ ID NO: 317129
aagcuuagucuagaaguaa

SEQ ID NO: 466660 - RNA, 19 nt, Artificial Sequence
  Description of Artificial Sequence: Synthetic oligonucleotide
  Antisense Strand to SEQ ID NO: 466659
uuacuucuagacuaagcuu

SEQ ID NO: 466661 - RNA, 19 nt, Artificial Sequence
  Description of Artificial Sequence: Synthetic oligonucleotide
  Sense strand starting at position 3070 of SEQ ID NO: 317129
gaaguaaguaauugagggu

SEQ ID NO: 466662 - RNA, 19 nt, Artificial Sequence
  Description of Artificial Sequence: Synthetic oligonucleotide
  Antisense Strand to SEQ ID NO: 466661
acccucaauuacuuacuuc

SEQ ID NO: 466663 - RNA, 19 nt, Artificial Sequence
  Description of Artificial Sequence: Synthetic oligonucleotide
  Sense strand starting at position 3262 of SEQ ID NO: 317129
ucagaacaugucugauauu

SEQ ID NO: 466664 - RNA, 19 nt, Artificial Sequence
  Description of Artificial Sequence: Synthetic oligonucleotide
  Antisense Strand to SEQ ID NO: 466663
aauaucagacauguucuga

SEQ ID NO: 466665 - RNA, 19 nt, Artificial Sequence
  Description of Artificial Sequence: Synthetic oligonucleotide
  Sense strand starting at position 3310 of SEQ ID NO: 317129
ggcagaacuuagccauaua

SEQ ID NO: 466666 - RNA, 19 nt, Artificial Sequence
  Description of Artificial Sequence: Synthetic oligonucleotide
  Antisense Strand to SEQ ID NO: 466665
uauauggcuaaguucugcc

SEQ ID NO: 466667 - RNA, 19 nt, Artificial Sequence
  Description of Artificial Sequence: Synthetic oligonucleotide
  Sense strand starting at position 3341 of SEQ ID NO: 317129
ucaagaaagguugggaagu

SEQ ID NO: 466668 - RNA, 19 nt, Artificial Sequence
  Description of Artificial Sequence: Synthetic oligonucleotide
  Antisense Strand to SEQ ID NO: 466667
acuucccaaccuuucuuga

SEQ ID NO: 466669 - RNA, 19 nt, Artificial Sequence
  Description of Artificial Sequence: Synthetic oligonucleotide
  Sense strand starting at position 3795 of SEQ ID NO: 317129
aaaugaguagguuggagau

SEQ ID NO: 466670 - RNA, 19 nt, Artificial Sequence
  Description of Artificial Sequence: Synthetic oligonucleotide
  Antisense Strand to SEQ ID NO: 466669
aucuccaaccuacucauuu

SEQ ID NO: 466671 - RNA, 19 nt, Artificial Sequence
  Description of Artificial Sequence: Synthetic oligonucleotide
  Sense strand starting at position 3805 of SEQ ID NO: 317129
guuggagauuaacugcaga

SEQ ID NO: 466672 - RNA, 19 nt, Artificial Sequence
  Description of Artificial Sequence: Synthetic oligonucleotide
  Antisense Strand to SEQ ID NO: 466671
ucugcaguuaaucuccaac

SEQ ID NO: 466673 - RNA, 19 nt, Artificial Sequence
  Description of Artificial Sequence: Synthetic oligonucleotide
  Sense strand starting at position 3810 of SEQ ID NO: 317129
agauuaacugcagaaugca

SEQ ID NO: 466674 - RNA, 19 nt, Artificial Sequence
  Description of Artificial Sequence: Synthetic oligonucleotide
  Antisense Strand to SEQ ID NO: 466673
ugcauucugcaguuaaucu

SEQ ID NO: 466675 - RNA, 19 nt, Artificial Sequence
  Description of Artificial Sequence: Synthetic oligonucleotide
  Sense strand starting at position 3818 of SEQ ID NO: 317129
ugcagaaugcauuaaaggu

SEQ ID NO: 466676 - RNA, 19 nt, Artificial Sequence
  Description of Artificial Sequence: Synthetic oligonucleotide
  Antisense Strand to SEQ ID NO: 466675
accuuuaaugcauucugca

SEQ ID NO: 466677 - RNA, 19 nt, Artificial Sequence
  Description of Artificial Sequence: Synthetic oligonucleotide
  Sense strand starting at position 3922 of SEQ ID NO: 317129
auugaaaucgguuauacau

SEQ ID NO: 466678 - RNA, 19 nt, Artificial Sequence
  Description of Artificial Sequence: Synthetic oligonucleotide
  Antisense Strand to SEQ ID NO: 466677
auguauaaccgauuucaau

SEQ ID NO: 466679 - RNA, 19 nt, Artificial Sequence
  Description of Artificial Sequence: Synthetic oligonucleotide
  Sense strand starting at position 158 of SEQ ID NO: 317130
agcuucuacuguguacaua

SEQ ID NO: 466680 - RNA, 19 nt, Artificial Sequence
  Description of Artificial Sequence: Synthetic oligonucleotide
  Antisense Strand to SEQ ID NO: 466679
uauguacacaguagaagcu

SEQ ID NO: 466681 - RNA, 19 nt, Artificial Sequence
  Description of Artificial Sequence: Synthetic oligonucleotide
  Sense strand starting at position 346 of SEQ ID NO: 317130
cugcuuuauucuuuauugu

SEQ ID NO: 466682 - RNA, 19 nt, Artificial Sequence
  Description of Artificial Sequence: Synthetic oligonucleotide
  Antisense Strand to SEQ ID NO: 466681
acaauaaagaauaaagcag

SEQ ID NO: 466683 - RNA, 19 nt, Artificial Sequence
  Description of Artificial Sequence: Synthetic oligonucleotide
  Sense strand starting at position 395 of SEQ ID NO: 317130
auuguagccuccuugcaaa

SEQ ID NO: 466684 - RNA, 19 nt, Artificial Sequence
  Description of Artificial Sequence: Synthetic oligonucleotide
  Antisense Strand to SEQ ID NO: 466683
uuugcaaggaggcuacaau

SEQ ID NO: 466685 - RNA, 19 nt, Artificial Sequence
  Description of Artificial Sequence: Synthetic oligonucleotide
  Sense strand starting at position 532 of SEQ ID NO: 317130
cuguuuauuucugaccuuu

SEQ ID NO: 466686 - RNA, 19 nt, Artificial Sequence
  Description of Artificial Sequence: Synthetic oligonucleotide
  Antisense Strand to SEQ ID NO: 466685
aaaggucagaaauaaacag

SEQ ID NO: 466687 - RNA, 19 nt, Artificial Sequence
  Description of Artificial Sequence: Synthetic oligonucleotide
  Sense strand starting at position 540 of SEQ ID NO: 317130
uucugaccuuuagcaguaa

SEQ ID NO: 466688 - RNA, 19 nt, Artificial Sequence
  Description of Artificial Sequence: Synthetic oligonucleotide
  Antisense Strand to SEQ ID NO: 466687
uuacugcuaaaggucagaa

SEQ ID NO: 466689 - RNA, 19 nt, Artificial Sequence
  Description of Artificial Sequence: Synthetic oligonucleotide
  Sense strand starting at position 551 of SEQ ID NO: 317130
agcaguaaacaauguuaga

SEQ ID NO: 466690 - RNA, 19 nt, Artificial Sequence
  Description of Artificial Sequence: Synthetic oligonucleotide
  Antisense Strand to SEQ ID NO: 466689
ucuaacauuguuuacugcu

SEQ ID NO: 466691 - RNA, 19 nt, Artificial Sequence
  Description of Artificial Sequence: Synthetic oligonucleotide
  Sense strand starting at position 554 of SEQ ID NO: 317130
aguaaacaauguuagaaag

SEQ ID NO: 466692 - RNA, 19 nt, Artificial Sequence
  Description of Artificial Sequence: Synthetic oligonucleotide
  Antisense Strand to SEQ ID NO: 466691
cuuucuaacauuguuuacu

SEQ ID NO: 466693 - RNA, 19 nt, Artificial Sequence
  Description of Artificial Sequence: Synthetic oligonucleotide
  Sense strand starting at position 578 of SEQ ID NO: 317130
uggaaccacguuuaucaaa

SEQ ID NO: 466694 - RNA, 19 nt, Artificial Sequence
  Description of Artificial Sequence: Synthetic oligonucleotide
  Antisense Strand to SEQ ID NO: 466693
uuugauaaacgugguucca

SEQ ID NO: 466695 - RNA, 19 nt, Artificial Sequence
  Description of Artificial Sequence: Synthetic oligonucleotide
  Sense strand starting at position 647 of SEQ ID NO: 317130
auuaaaggaugagaguuaa

SEQ ID NO: 466696 - RNA, 19 nt, Artificial Sequence
  Description of Artificial Sequence: Synthetic oligonucleotide
  Antisense Strand to SEQ ID NO: 466695
uuaacucucauccuuuaau

SEQ ID NO: 466697 - RNA, 19 nt, Artificial Sequence
  Description of Artificial Sequence: Synthetic oligonucleotide
  Sense strand starting at position 681 of SEQ ID NO: 317130
acagcugguguuugaaaga

SEQ ID NO: 466698 - RNA, 19 nt, Artificial Sequence
  Description of Artificial Sequence: Synthetic oligonucleotide
  Antisense Strand to SEQ ID NO: 466697
ucuuucaaacaccagcugu

SEQ ID NO: 466699 - RNA, 19 nt, Artificial Sequence
  Description of Artificial Sequence: Synthetic oligonucleotide
  Sense strand starting at position 731 of SEQ ID NO: 317130
aaggcugauguugggauua

SEQ ID NO: 466700 - RNA, 19 nt, Artificial Sequence
  Description of Artificial Sequence: Synthetic oligonucleotide
  Antisense Strand to SEQ ID NO: 466699
uaaucccaacaucagccuu

SEQ ID NO: 466701 - RNA, 19 nt, Artificial Sequence
  Description of Artificial Sequence: Synthetic oligonucleotide
  Sense strand starting at position 885 of SEQ ID NO: 317130
ccuugcugauuggcucaaa

SEQ ID NO: 466702 - RNA, 19 nt, Artificial Sequence
  Description of Artificial Sequence: Synthetic oligonucleotide
  Antisense Strand to SEQ ID NO: 466701
uuugagccaaucagcaagg

SEQ ID NO: 466703 - RNA, 19 nt, Artificial Sequence
  Description of Artificial Sequence: Synthetic oligonucleotide
  Sense strand starting at position 888 of SEQ ID NO: 317130
ugcugauuggcucaaagau

SEQ ID NO: 466704 - RNA, 19 nt, Artificial Sequence
  Description of Artificial Sequence: Synthetic oligonucleotide
  Antisense Strand to SEQ ID NO: 466703
aucuuugagccaaucagca

SEQ ID NO: 466705 - RNA, 19 nt, Artificial Sequence
  Description of Artificial Sequence: Synthetic oligonucleotide
  Sense strand starting at position 898 of SEQ ID NO: 317130
cucaaagaugucgaguaga

SEQ ID NO: 466706 - RNA, 19 nt, Artificial Sequence
  Description of Artificial Sequence: Synthetic oligonucleotide
  Antisense Strand to SEQ ID NO: 466705
ucuacucgacaucuuugag

SEQ ID NO: 466707 - RNA, 19 nt, Artificial Sequence
  Description of Artificial Sequence: Synthetic oligonucleotide
  Sense strand starting at position 950 of SEQ ID NO: 317130
gugccauggagacauuaca

SEQ ID NO: 466708 - RNA, 19 nt, Artificial Sequence
  Description of Artificial Sequence: Synthetic oligonucleotide
  Antisense Strand to SEQ ID NO: 466707
uguaaugucuccauggcac

SEQ ID NO: 466709 - RNA, 19 nt, Artificial Sequence
  Description of Artificial Sequence: Synthetic oligonucleotide
  Sense strand starting at position 978 of SEQ ID NO: 317130
uggcgagaauguguacaaa

SEQ ID NO: 466710 - RNA, 19 nt, Artificial Sequence
  Description of Artificial Sequence: Synthetic oligonucleotide
  Antisense Strand to SEQ ID NO: 466709
uuuguacacauucucgcca

SEQ ID NO: 466711 - RNA, 19 nt, Artificial Sequence
  Description of Artificial Sequence: Synthetic oligonucleotide
  Sense strand starting at position 981 of SEQ ID NO: 317130
cgagaauguguacaaaccu

SEQ ID NO: 466712 - RNA, 19 nt, Artificial Sequence
  Description of Artificial Sequence: Synthetic oligonucleotide
  Antisense Strand to SEQ ID NO: 466711
agguuuguacacauucucg

SEQ ID NO: 466713 - RNA, 19 nt, Artificial Sequence
  Description of Artificial Sequence: Synthetic oligonucleotide
  Sense strand starting at position 998 of SEQ ID NO: 317130
cuguccgugccacaaauau

SEQ ID NO: 466714 - RNA, 19 nt, Artificial Sequence
  Description of Artificial Sequence: Synthetic oligonucleotide
  Antisense Strand to SEQ ID NO: 466713
auauuuguggcacggacag

SEQ ID NO: 466715 - RNA, 19 nt, Artificial Sequence
  Description of Artificial Sequence: Synthetic oligonucleotide
  Sense strand starting at position 1075 of SEQ ID NO: 317130
acugaccugucaucuacau

SEQ ID NO: 466716 - RNA, 19 nt, Artificial Sequence
  Description of Artificial Sequence: Synthetic oligonucleotide
  Antisense Strand to SEQ ID NO: 466715
auguagaugacaggucagu

SEQ ID NO: 466717 - RNA, 19 nt, Artificial Sequence
  Description of Artificial Sequence: Synthetic oligonucleotide
  Sense strand starting at position 1385 of SEQ ID NO: 317130
cuggacuugaacugaguaa

SEQ ID NO: 466718 - RNA, 19 nt, Artificial Sequence
  Description of Artificial Sequence: Synthetic oligonucleotide
  Antisense Strand to SEQ ID NO: 466717
uuacucaguucaaguccag

SEQ ID NO: 466719 - RNA, 19 nt, Artificial Sequence
  Description of Artificial Sequence: Synthetic oligonucleotide
  Sense strand starting at position 1419 of SEQ ID NO: 317130
aggacuaugugcucaggaa

SEQ ID NO: 466720 - RNA, 19 nt, Artificial Sequence
  Description of Artificial Sequence: Synthetic oligonucleotide
  Antisense Strand to SEQ ID NO: 466719
uuccugagcacauaguccu

SEQ ID NO: 466721 - RNA, 19 nt, Artificial Sequence
  Description of Artificial Sequence: Synthetic oligonucleotide
  Sense strand starting at position 1420 of SEQ ID NO: 317130
ggacuaugugcucaggaag

SEQ ID NO: 466722 - RNA, 19 nt, Artificial Sequence
  Description of Artificial Sequence: Synthetic oligonucleotide
  Antisense Strand to SEQ ID NO: 466721
cuuccugagcacauagucc

SEQ ID NO: 466723 - RNA, 19 nt, Artificial Sequence
  Description of Artificial Sequence: Synthetic oligonucleotide
  Sense strand starting at position 1456 of SEQ ID NO: 317130
gaaggcuccgccuggcaaa

SEQ ID NO: 466724 - RNA, 19 nt, Artificial Sequence
  Description of Artificial Sequence: Synthetic oligonucleotide
  Antisense Strand to SEQ ID NO: 466723
uuugccaggcggagccuuc

SEQ ID NO: 466725 - RNA, 19 nt, Artificial Sequence
  Description of Artificial Sequence: Synthetic oligonucleotide
  Sense strand starting at position 2959 of SEQ ID NO: 317130
ccaguucgagcuugaguuu

SEQ ID NO: 466726 - RNA, 19 nt, Artificial Sequence
  Description of Artificial Sequence: Synthetic oligonucleotide
  Antisense Strand to SEQ ID NO: 466725
aaacucaagcucgaacugg

SEQ ID NO: 466727 - RNA, 19 nt, Artificial Sequence
  Description of Artificial Sequence: Synthetic oligonucleotide
  Sense strand starting at position 3073 of SEQ ID NO: 317130
cucugcuuucccugguuua

SEQ ID NO: 466728 - RNA, 19 nt, Artificial Sequence
  Description of Artificial Sequence: Synthetic oligonucleotide
  Antisense Strand to SEQ ID NO: 466727
uaaaccagggaaagcagag

SEQ ID NO: 466729 - RNA, 19 nt, Artificial Sequence
  Description of Artificial Sequence: Synthetic oligonucleotide
  Sense strand starting at position 3074 of SEQ ID NO: 317130
ucugcuuucccugguuuau

SEQ ID NO: 466730 - RNA, 19 nt, Artificial Sequence
  Description of Artificial Sequence: Synthetic oligonucleotide
  Antisense Strand to SEQ ID NO: 466729
auaaaccagggaaagcaga

SEQ ID NO: 466731 - RNA, 19 nt, Artificial Sequence
  Description of Artificial Sequence: Synthetic oligonucleotide
  Sense strand starting at position 3085 of SEQ ID NO: 317130
ugguuuauuuguucugggu

SEQ ID NO: 466732 - RNA, 19 nt, Artificial Sequence
  Description of Artificial Sequence: Synthetic oligonucleotide
  Antisense Strand to SEQ ID NO: 466731
acccagaacaaauaaacca

SEQ ID NO: 466733 - RNA, 19 nt, Artificial Sequence
  Description of Artificial Sequence: Synthetic oligonucleotide
  Sense strand starting at position 3099 of SEQ ID NO: 317130
uggguucugaugugaaaug

SEQ ID NO: 466734 - RNA, 19 nt, Artificial Sequence
  Description of Artificial Sequence: Synthetic oligonucleotide
  Antisense Strand to SEQ ID NO: 466733
cauuucacaucagaaccca

SEQ ID NO: 466735 - RNA, 19 nt, Artificial Sequence
  Description of Artificial Sequence: Synthetic oligonucleotide
  Sense strand starting at position 3104 of SEQ ID NO: 317130
ucugaugugaaauguuuag

SEQ ID NO: 466736 - RNA, 19 nt, Artificial Sequence
  Description of Artificial Sequence: Synthetic oligonucleotide
  Antisense Strand to SEQ ID NO: 466735
cuaaacauuucacaucaga

SEQ ID NO: 466737 - RNA, 19 nt, Artificial Sequence
  Description of Artificial Sequence: Synthetic oligonucleotide
  Sense strand starting at position 3282 of SEQ ID NO: 317130
gcgaaauaaccucaugaca

SEQ ID NO: 466738 - RNA, 19 nt, Artificial Sequence
  Description of Artificial Sequence: Synthetic oligonucleotide
  Antisense Strand to SEQ ID NO: 466737
ugucaugagguuauuucgc

SEQ ID NO: 466739 - RNA, 19 nt, Artificial Sequence
  Description of Artificial Sequence: Synthetic oligonucleotide
  Sense strand starting at position 3297 of SEQ ID NO: 317130
gacaaagugucccuuugca

SEQ ID NO: 466740 - RNA, 19 nt, Artificial Sequence
  Description of Artificial Sequence: Synthetic oligonucleotide
  Antisense Strand to SEQ ID NO: 466739
ugcaaagggacacuuuguc

SEQ ID NO: 466741 - RNA, 19 nt, Artificial Sequence
  Description of Artificial Sequence: Synthetic oligonucleotide
  Sense strand starting at position 3305 of SEQ ID NO: 317130
gucccuuugcaucgaagau

SEQ ID NO: 466742 - RNA, 19 nt, Artificial Sequence
  Description of Artificial Sequence: Synthetic oligonucleotide
  Antisense Strand to SEQ ID NO: 466741
aucuucgaugcaaagggac

SEQ ID NO: 466743 - RNA, 19 nt, Artificial Sequence
  Description of Artificial Sequence: Synthetic oligonucleotide
  Sense strand starting at position 3309 of SEQ ID NO: 317130
cuuugcaucgaagauacau

SEQ ID NO: 466744 - RNA, 19 nt, Artificial Sequence
  Description of Artificial Sequence: Synthetic oligonucleotide
  Antisense Strand to SEQ ID NO: 466743
auguaucuucgaugcaaag

SEQ ID NO: 466745 - RNA, 19 nt, Artificial Sequence
  Description of Artificial Sequence: Synthetic oligonucleotide
  Sense strand starting at position 3321 of SEQ ID NO: 317130
gauacauuguugguuguua

SEQ ID NO: 466746 - RNA, 19 nt, Artificial Sequence
  Description of Artificial Sequence: Synthetic oligonucleotide
  Antisense Strand to SEQ ID NO: 466745
uaacaaccaacaauguauc

SEQ ID NO: 466747 - RNA, 19 nt, Artificial Sequence
  Description of Artificial Sequence: Synthetic oligonucleotide
  Sense strand starting at position 3322 of SEQ ID NO: 317130
auacauuguugguuguuau

SEQ ID NO: 466748 - RNA, 19 nt, Artificial Sequence
  Description of Artificial Sequence: Synthetic oligonucleotide
  Antisense Strand to SEQ ID NO: 466747
auaacaaccaacaauguau

SEQ ID NO: 466749 - RNA, 19 nt, Artificial Sequence
  Description of Artificial Sequence: Synthetic oligonucleotide
  Sense strand starting at position 3420 of SEQ ID NO: 317130
ucacaaugagaacguugua

SEQ ID NO: 466750 - RNA, 19 nt, Artificial Sequence
  Description of Artificial Sequence: Synthetic oligonucleotide
  Antisense Strand to SEQ ID NO: 466749
uacaacguucucauuguga

SEQ ID NO: 466751 - RNA, 19 nt, Artificial Sequence
  Description of Artificial Sequence: Synthetic oligonucleotide
  Sense strand starting at position 3423 of SEQ ID NO: 317130
caaugagaacguuguagug

SEQ ID NO: 466752 - RNA, 19 nt, Artificial Sequence
  Description of Artificial Sequence: Synthetic oligonucleotide
  Antisense Strand to SEQ ID NO: 466751
cacuacaacguucucauug

SEQ ID NO: 466753 - RNA, 19 nt, Artificial Sequence
  Description of Artificial Sequence: Synthetic oligonucleotide
  Sense strand starting at position 3457 of SEQ ID NO: 317130
aguaauauauaaggagaga

SEQ ID NO: 466754 - RNA, 19 nt, Artificial Sequence
  Description of Artificial Sequence: Synthetic oligonucleotide
  Antisense Strand to SEQ ID NO: 466753
ucucuccuuauauauuacu

SEQ ID NO: 466755 - RNA, 19 nt, Artificial Sequence
  Description of Artificial Sequence: Synthetic oligonucleotide
  Sense strand starting at position 3704 of SEQ ID NO: 317130
cugagaagcuaacauuaac

SEQ ID NO: 466756 - RNA, 19 nt, Artificial Sequence
  Description of Artificial Sequence: Synthetic oligonucleotide
  Antisense Strand to SEQ ID NO: 466755
guuaauguuagcuucucag

SEQ ID NO: 466757 - RNA, 19 nt, Artificial Sequence
  Description of Artificial Sequence: Synthetic oligonucleotide
  Sense strand starting at position 3891 of SEQ ID NO: 317130
uugaacaucuguuaaggau

SEQ ID NO: 466758 - RNA, 19 nt, Artificial Sequence
  Description of Artificial Sequence: Synthetic oligonucleotide
  Antisense Strand to SEQ ID NO: 466757
auccuuaacagauguucaa

SEQ ID NO: 466759 - RNA, 19 nt, Artificial Sequence
  Description of Artificial Sequence: Synthetic oligonucleotide
  Sense strand starting at position 352 of SEQ ID NO: 317131
uauacaugguuuguuugaa

SEQ ID NO: 466760 - RNA, 19 nt, Artificial Sequence
  Description of Artificial Sequence: Synthetic oligonucleotide
  Antisense Strand to SEQ ID NO: 466759
uucaaacaaaccauguaua

SEQ ID NO: 466761 - RNA, 19 nt, Artificial Sequence
  Description of Artificial Sequence: Synthetic oligonucleotide
  Sense strand starting at position 353 of SEQ ID NO: 317131
auacaugguuuguuugaau

SEQ ID NO: 466762 - RNA, 19 nt, Artificial Sequence
  Description of Artificial Sequence: Synthetic oligonucleotide
  Antisense Strand to SEQ ID NO: 466761
auucaaacaaaccauguau

SEQ ID NO: 466763 - RNA, 19 nt, Artificial Sequence
  Description of Artificial Sequence: Synthetic oligonucleotide
  Sense strand starting at position 623 of SEQ ID NO: 317131
gugcacuuccuguugcaua

SEQ ID NO: 466764 - RNA, 19 nt, Artificial Sequence
  Description of Artificial Sequence: Synthetic oligonucleotide
  Antisense Strand to SEQ ID NO: 466763
uaugcaacaggaagugcac

SEQ ID NO: 466765 - RNA, 19 nt, Artificial Sequence
  Description of Artificial Sequence: Synthetic oligonucleotide
  Sense strand starting at position 649 of SEQ ID NO: 317131
acauauuugucuccacguu

SEQ ID NO: 466766 - RNA, 19 nt, Artificial Sequence
  Description of Artificial Sequence: Synthetic oligonucleotide
  Antisense Strand to SEQ ID NO: 466765
aacguggagacaaauaugu

SEQ ID NO: 466767 - RNA, 19 nt, Artificial Sequence
  Description of Artificial Sequence: Synthetic oligonucleotide
  Sense strand starting at position 874 of SEQ ID NO: 317131
cgugguuacccugaaauac

SEQ ID NO: 466768 - RNA, 19 nt, Artificial Sequence
  Description of Artificial Sequence: Synthetic oligonucleotide
  Antisense Strand to SEQ ID NO: 466767
guauuucaggguaaccacg

SEQ ID NO: 466769 - RNA, 19 nt, Artificial Sequence
  Description of Artificial Sequence: Synthetic oligonucleotide
  Sense strand starting at position 985 of SEQ ID NO: 317131
gcguguaaugagucucccu

SEQ ID NO: 466770 - RNA, 19 nt, Artificial Sequence
  Description of Artificial Sequence: Synthetic oligonucleotide
  Antisense Strand to SEQ ID NO: 466769
agggagacucauuacacgc

SEQ ID NO: 466771 - RNA, 19 nt, Artificial Sequence
  Description of Artificial Sequence: Synthetic oligonucleotide
  Sense strand starting at position 1220 of SEQ ID NO: 317131
uccacagacuccuuagguu

SEQ ID NO: 466772 - RNA, 19 nt, Artificial Sequence
  Description of Artificial Sequence: Synthetic oligonucleotide
  Antisense Strand to SEQ ID NO: 466771
aaccuaaggagucugugga

SEQ ID NO: 466773 - RNA, 19 nt, Artificial Sequence
  Description of Artificial Sequence: Synthetic oligonucleotide
  Sense strand starting at position 1476 of SEQ ID NO: 317131
gaaaguugaggguguuaga

SEQ ID NO: 466774 - RNA, 19 nt, Artificial Sequence
  Description of Artificial Sequence: Synthetic oligonucleotide
  Antisense Strand to SEQ ID NO: 466773
ucuaacacccucaacuuuc

SEQ ID NO: 466775 - RNA, 19 nt, Artificial Sequence
  Description of Artificial Sequence: Synthetic oligonucleotide
  Sense strand starting at position 1530 of SEQ ID NO: 317131
cgugcagagacacguauuu

SEQ ID NO: 466776 - RNA, 19 nt, Artificial Sequence
  Description of Artificial Sequence: Synthetic oligonucleotide
  Antisense Strand to SEQ ID NO: 466775
aaauacgugucucugcacg

SEQ ID NO: 466777 - RNA, 19 nt, Artificial Sequence
  Description of Artificial Sequence: Synthetic oligonucleotide
  Sense strand starting at position 1552 of SEQ ID NO: 317131
guuaaaguucucuaucaug

SEQ ID NO: 466778 - RNA, 19 nt, Artificial Sequence
  Description of Artificial Sequence: Synthetic oligonucleotide
  Antisense Strand to SEQ ID NO: 466777
caugauagagaacuuuaac

SEQ ID NO: 466779 - RNA, 19 nt, Artificial Sequence
  Description of Artificial Sequence: Synthetic oligonucleotide
  Sense strand starting at position 1721 of SEQ ID NO: 317131
uccucagcgauguaagaaa

SEQ ID NO: 466780 - RNA, 19 nt, Artificial Sequence
  Description of Artificial Sequence: Synthetic oligonucleotide
  Antisense Strand to SEQ ID NO: 466779
uuucuuacaucgcugagga

SEQ ID NO: 466781 - RNA, 19 nt, Artificial Sequence
  Description of Artificial Sequence: Synthetic oligonucleotide
  Sense strand starting at position 1782 of SEQ ID NO: 317131
gguaguucucaggaaggca

SEQ ID NO: 466782 - RNA, 19 nt, Artificial Sequence
  Description of Artificial Sequence: Synthetic oligonucleotide
  Antisense Strand to SEQ ID NO: 466781
ugccuuccugagaacuacc

SEQ ID NO: 466783 - RNA, 19 nt, Artificial Sequence
  Description of Artificial Sequence: Synthetic oligonucleotide
  Sense strand starting at position 1806 of SEQ ID NO: 317131
gguugcaguguugcauauu

SEQ ID NO: 466784 - RNA, 19 nt, Artificial Sequence
  Description of Artificial Sequence: Synthetic oligonucleotide
  Antisense Strand to SEQ ID NO: 466783
aauaugcaacacugcaacc

SEQ ID NO: 466785 - RNA, 19 nt, Artificial Sequence
  Description of Artificial Sequence: Synthetic oligonucleotide
  Sense strand starting at position 1843 of SEQ ID NO: 317131
agcguugcggauguucaua

SEQ ID NO: 466786 - RNA, 19 nt, Artificial Sequence
  Description of Artificial Sequence: Synthetic oligonucleotide
  Antisense Strand to SEQ ID NO: 466785
uaugaacauccgcaacgcu

SEQ ID NO: 466787 - RNA, 19 nt, Artificial Sequence
  Description of Artificial Sequence: Synthetic oligonucleotide
  Sense strand starting at position 1930 of SEQ ID NO: 317131
cacuguuugccucaggaau

SEQ ID NO: 466788 - RNA, 19 nt, Artificial Sequence
  Description of Artificial Sequence: Synthetic oligonucleotide
  Antisense Strand to SEQ ID NO: 466787
auuccugaggcaaacagug

SEQ ID NO: 466789 - RNA, 19 nt, Artificial Sequence
  Description of Artificial Sequence: Synthetic oligonucleotide
  Sense strand starting at position 2160 of SEQ ID NO: 317131
uuuaaauaacgcgauccau

SEQ ID NO: 466790 - RNA, 19 nt, Artificial Sequence
  Description of Artificial Sequence: Synthetic oligonucleotide
  Antisense Strand to SEQ ID NO: 466789
auggaucgcguuauuuaaa

SEQ ID NO: 466791 - RNA, 19 nt, Artificial Sequence
  Description of Artificial Sequence: Synthetic oligonucleotide
  Sense strand starting at position 2360 of SEQ ID NO: 317131
cuagacuuccgacagacuu

SEQ ID NO: 466792 - RNA, 19 nt, Artificial Sequence
  Description of Artificial Sequence: Synthetic oligonucleotide
  Antisense Strand to SEQ ID NO: 466791
aagucugucggaagucuag

SEQ ID NO: 466793 - RNA, 19 nt, Artificial Sequence
  Description of Artificial Sequence: Synthetic oligonucleotide
  Sense strand starting at position 2388 of SEQ ID NO: 317131
ggaaucauagugcaugcau

SEQ ID NO: 466794 - RNA, 19 nt, Artificial Sequence
  Description of Artificial Sequence: Synthetic oligonucleotide
  Antisense Strand to SEQ ID NO: 466793
augcaugcacuaugauucc

SEQ ID NO: 466795 - RNA, 19 nt, Artificial Sequence
  Description of Artificial Sequence: Synthetic oligonucleotide
  Sense strand starting at position 2600 of SEQ ID NO: 317131
auucuagacuugucuuuag

SEQ ID NO: 466796 - RNA, 19 nt, Artificial Sequence
  Description of Artificial Sequence: Synthetic oligonucleotide
  Antisense Strand to SEQ ID NO: 466795
cuaaagacaagucuagaau

SEQ ID NO: 466797 - RNA, 19 nt, Artificial Sequence
  Description of Artificial Sequence: Synthetic oligonucleotide
  Sense strand starting at position 2647 of SEQ ID NO: 317131
uagaauuauugggucauug

SEQ ID NO: 466798 - RNA, 19 nt, Artificial Sequence
  Description of Artificial Sequence: Synthetic oligonucleotide
  Antisense Strand to SEQ ID NO: 466797
caaugacccaauaauucua

SEQ ID NO: 466799 - RNA, 19 nt, Artificial Sequence
  Description of Artificial Sequence: Synthetic oligonucleotide
  Sense strand starting at position 2651 of SEQ ID NO: 317131
auuauugggucauugaaua

SEQ ID NO: 466800 - RNA, 19 nt, Artificial Sequence
  Description of Artificial Sequence: Synthetic oligonucleotide
  Antisense Strand to SEQ ID NO: 466799
uauucaaugacccaauaau

SEQ ID NO: 466801 - RNA, 19 nt, Artificial Sequence
  Description of Artificial Sequence: Synthetic oligonucleotide
  Sense strand starting at position 2815 of SEQ ID NO: 317131
ugcacugaugaguaguaaa

SEQ ID NO: 466802 - RNA, 19 nt, Artificial Sequence
  Description of Artificial Sequence: Synthetic oligonucleotide
  Antisense Strand to SEQ ID NO: 466801
uuuacuacucaucagugca

SEQ ID NO: 466803 - RNA, 19 nt, Artificial Sequence
  Description of Artificial Sequence: Synthetic oligonucleotide
  Sense strand starting at position 2828 of SEQ ID NO: 317131
aguaaaguugagcacuuua

SEQ ID NO: 466804 - RNA, 19 nt, Artificial Sequence
  Description of Artificial Sequence: Synthetic oligonucleotide
  Antisense Strand to SEQ ID NO: 466803
uaaagugcucaacuuuacu

SEQ ID NO: 466805 - RNA, 19 nt, Artificial Sequence
  Description of Artificial Sequence: Synthetic oligonucleotide
  Sense strand starting at position 2956 of SEQ ID NO: 317131
aauauauucuggguauaag

SEQ ID NO: 466806 - RNA, 19 nt, Artificial Sequence
  Description of Artificial Sequence: Synthetic oligonucleotide
  Antisense Strand to SEQ ID NO: 466805
cuuauacccagaauauauu

SEQ ID NO: 466807 - RNA, 19 nt, Artificial Sequence
  Description of Artificial Sequence: Synthetic oligonucleotide
  Sense strand starting at position 3003 of SEQ ID NO: 317131
aucauucuugucuauugau

SEQ ID NO: 466808 - RNA, 19 nt, Artificial Sequence
  Description of Artificial Sequence: Synthetic oligonucleotide
  Antisense Strand to SEQ ID NO: 466807
aucaauagacaagaaugau

SEQ ID NO: 466809 - RNA, 19 nt, Artificial Sequence
  Description of Artificial Sequence: Synthetic oligonucleotide
  Sense strand starting at position 3009 of SEQ ID NO: 317131
cuugucuauugauugauau

SEQ ID NO: 466810 - RNA, 19 nt, Artificial Sequence
  Description of Artificial Sequence: Synthetic oligonucleotide
  Antisense Strand to SEQ ID NO: 466809
auaucaaucaauagacaag

SEQ ID NO: 466811 - RNA, 19 nt, Artificial Sequence
  Description of Artificial Sequence: Synthetic oligonucleotide
  Sense strand starting at position 3216 of SEQ ID NO: 317131
aucugcaauugacugaaau

SEQ ID NO: 466812 - RNA, 19 nt, Artificial Sequence
  Description of Artificial Sequence: Synthetic oligonucleotide
  Antisense Strand to SEQ ID NO: 466811
auuucagucaauugcagau

SEQ ID NO: 466813 - RNA, 19 nt, Artificial Sequence
  Description of Artificial Sequence: Synthetic oligonucleotide
  Sense strand starting at position 3217 of SEQ ID NO: 317131
ucugcaauugacugaaauu

SEQ ID NO: 466814 - RNA, 19 nt, Artificial Sequence
  Description of Artificial Sequence: Synthetic oligonucleotide
  Antisense Strand to SEQ ID NO: 466813
aauuucagucaauugcaga

SEQ ID NO: 466815 - RNA, 19 nt, Artificial Sequence
  Description of Artificial Sequence: Synthetic oligonucleotide
  Sense strand starting at position 3505 of SEQ ID NO: 317131
aguuuaaggcuguagugaa

SEQ ID NO: 466816 - RNA, 19 nt, Artificial Sequence
  Description of Artificial Sequence: Synthetic oligonucleotide
  Antisense Strand to SEQ ID NO: 466815
uucacuacagccuuaaacu

SEQ ID NO: 466817 - RNA, 19 nt, Artificial Sequence
  Description of Artificial Sequence: Synthetic oligonucleotide
  Sense strand starting at position 3590 of SEQ ID NO: 317131
augccaucucgauaaagca

SEQ ID NO: 466818 - RNA, 19 nt, Artificial Sequence
  Description of Artificial Sequence: Synthetic oligonucleotide
  Antisense Strand to SEQ ID NO: 466817
ugcuuuaucgagauggcau

SEQ ID NO: 466819 - RNA, 19 nt, Artificial Sequence
  Description of Artificial Sequence: Synthetic oligonucleotide
  Sense strand starting at position 3672 of SEQ ID NO: 317131
auuaucugugugucucgua

SEQ ID NO: 466820 - RNA, 19 nt, Artificial Sequence
  Description of Artificial Sequence: Synthetic oligonucleotide
  Antisense Strand to SEQ ID NO: 466819
uacgagacacacagauaau

SEQ ID NO: 466821 - RNA, 19 nt, Artificial Sequence
  Description of Artificial Sequence: Synthetic oligonucleotide
  Sense strand starting at position 3763 of SEQ ID NO: 317131
ggucauggauacccucuua

SEQ ID NO: 466822 - RNA, 19 nt, Artificial Sequence
  Description of Artificial Sequence: Synthetic oligonucleotide
  Antisense Strand to SEQ ID NO: 466821
uaagaggguauccaugacc

SEQ ID NO: 466823 - RNA, 19 nt, Artificial Sequence
  Description of Artificial Sequence: Synthetic oligonucleotide
  Sense strand starting at position 3832 of SEQ ID NO: 317131
cuuuaauagcuagaguaac

SEQ ID NO: 466824 - RNA, 19 nt, Artificial Sequence
  Description of Artificial Sequence: Synthetic oligonucleotide
  Antisense Strand to SEQ ID NO: 466823
guuacucuagcuauuaaag

SEQ ID NO: 466825 - RNA, 19 nt, Artificial Sequence
  Description of Artificial Sequence: Synthetic oligonucleotide
  Sense strand starting at position 3842 of SEQ ID NO: 317131
uagaguaaccuagagccau

SEQ ID NO: 466826 - RNA, 19 nt, Artificial Sequence
  Description of Artificial Sequence: Synthetic oligonucleotide
  Antisense Strand to SEQ ID NO: 466825
auggcucuagguuacucua

SEQ ID NO: 466827 - RNA, 19 nt, Artificial Sequence
  Description of Artificial Sequence: Synthetic oligonucleotide
  Sense strand starting at position 3848 of SEQ ID NO: 317131
aaccuagagccaugugauc

SEQ ID NO: 466828 - RNA, 19 nt, Artificial Sequence
  Description of Artificial Sequence: Synthetic oligonucleotide
  Antisense Strand to SEQ ID NO: 466827
gaucacauggcucuagguu

SEQ ID NO: 466829 - RNA, 19 nt, Artificial Sequence
  Description of Artificial Sequence: Synthetic oligonucleotide
  Sense strand starting at position 3857 of SEQ ID NO: 317131
ccaugugaucugugaaaca

SEQ ID NO: 466830 - RNA, 19 nt, Artificial Sequence
  Description of Artificial Sequence: Synthetic oligonucleotide
  Antisense Strand to SEQ ID NO: 466829
uguuucacagaucacaugg

SEQ ID NO: 466831 - RNA, 19 nt, Artificial Sequence
  Description of Artificial Sequence: Synthetic oligonucleotide
  Sense strand starting at position 3867 of SEQ ID NO: 317131
ugugaaacauagcuugaau

SEQ ID NO: 466832 - RNA, 19 nt, Artificial Sequence
  Description of Artificial Sequence: Synthetic oligonucleotide
  Antisense Strand to SEQ ID NO: 466831
auucaagcuauguuucaca

SEQ ID NO: 466833 - RNA, 19 nt, Artificial Sequence
  Description of Artificial Sequence: Synthetic oligonucleotide
  Sense strand starting at position 3869 of SEQ ID NO: 317131
ugaaacauagcuugaauag

SEQ ID NO: 466834 - RNA, 19 nt, Artificial Sequence
  Description of Artificial Sequence: Synthetic oligonucleotide
  Antisense Strand to SEQ ID NO: 466833
cuauucaagcuauguuuca

SEQ ID NO: 466835 - RNA, 19 nt, Artificial Sequence
  Description of Artificial Sequence: Synthetic oligonucleotide
  Sense strand starting at position 3909 of SEQ ID NO: 317131
gacaauuggcaguaucuau

SEQ ID NO: 466836 - RNA, 19 nt, Artificial Sequence
  Description of Artificial Sequence: Synthetic oligonucleotide
  Antisense Strand to SEQ ID NO: 466835
auagauacugccaauuguc

SEQ ID NO: 466837 - RNA, 19 nt, Artificial Sequence
  Description of Artificial Sequence: Synthetic oligonucleotide
  Sense strand starting at position 3974 of SEQ ID NO: 317131
uuugauaggcuguauacau

SEQ ID NO: 466838 - RNA, 19 nt, Artificial Sequence
  Description of Artificial Sequence: Synthetic oligonucleotide
  Antisense Strand to SEQ ID NO: 466837
auguauacagccuaucaaa

SEQ ID NO: 466839 - RNA, 19 nt, Artificial Sequence
  Description of Artificial Sequence: Synthetic oligonucleotide
  Sense strand starting at position 101 of SEQ ID NO: 317132
uaaguaaagguuuaugagu

SEQ ID NO: 466840 - RNA, 19 nt, Artificial Sequence
  Description of Artificial Sequence: Synthetic oligonucleotide
  Antisense Strand to SEQ ID NO: 466839
acucauaaaccuuuacuua

SEQ ID NO: 466841 - RNA, 19 nt, Artificial Sequence
  Description of Artificial Sequence: Synthetic oligonucleotide
  Sense strand starting at position 395 of SEQ ID NO: 317132
ucacuaaaucuguagggca

SEQ ID NO: 466842 - RNA, 19 nt, Artificial Sequence
  Description of Artificial Sequence: Synthetic oligonucleotide
  Antisense Strand to SEQ ID NO: 466841
ugcccuacagauuuaguga

SEQ ID NO: 466843 - RNA, 19 nt, Artificial Sequence
  Description of Artificial Sequence: Synthetic oligonucleotide
  Sense strand starting at position 397 of SEQ ID NO: 317132
acuaaaucuguagggcaua

SEQ ID NO: 466844 - RNA, 19 nt, Artificial Sequence
  Description of Artificial Sequence: Synthetic oligonucleotide
  Antisense Strand to SEQ ID NO: 466843
uaugcccuacagauuuagu

SEQ ID NO: 466845 - RNA, 19 nt, Artificial Sequence
  Description of Artificial Sequence: Synthetic oligonucleotide
  Sense strand starting at position 787 of SEQ ID NO: 317132
agggaauaagucugagcua

SEQ ID NO: 466846 - RNA, 19 nt, Artificial Sequence
  Description of Artificial Sequence: Synthetic oligonucleotide
  Antisense Strand to SEQ ID NO: 466845
uagcucagacuuauucccu

SEQ ID NO: 466847 - RNA, 19 nt, Artificial Sequence
  Description of Artificial Sequence: Synthetic oligonucleotide
  Sense strand starting at position 997 of SEQ ID NO: 317132
ggcuguuucccgcucggaa

SEQ ID NO: 466848 - RNA, 19 nt, Artificial Sequence
  Description of Artificial Sequence: Synthetic oligonucleotide
  Antisense Strand to SEQ ID NO: 466847
uuccgagcgggaaacagcc

SEQ ID NO: 466849 - RNA, 19 nt, Artificial Sequence
  Description of Artificial Sequence: Synthetic oligonucleotide
  Sense strand starting at position 998 of SEQ ID NO: 317132
gcuguuucccgcucggaaa

SEQ ID NO: 466850 - RNA, 19 nt, Artificial Sequence
  Description of Artificial Sequence: Synthetic oligonucleotide
  Antisense Strand to SEQ ID NO: 466849
uuuccgagcgggaaacagc

SEQ ID NO: 466851 - RNA, 19 nt, Artificial Sequence
  Description of Artificial Sequence: Synthetic oligonucleotide
  Sense strand starting at position 2375 of SEQ ID NO: 317132
guuugagaagcgcuguagu

SEQ ID NO: 466852 - RNA, 19 nt, Artificial Sequence
  Description of Artificial Sequence: Synthetic oligonucleotide
  Antisense Strand to SEQ ID NO: 466851
acuacagcgcuucucaaac

SEQ ID NO: 466853 - RNA, 19 nt, Artificial Sequence
  Description of Artificial Sequence: Synthetic oligonucleotide
  Sense strand starting at position 2392 of SEQ ID NO: 317132
guugauuauggacgaaaug

SEQ ID NO: 466854 - RNA, 19 nt, Artificial Sequence
  Description of Artificial Sequence: Synthetic oligonucleotide
  Antisense Strand to SEQ ID NO: 466853
cauuucguccauaaucaac

SEQ ID NO: 466855 - RNA, 19 nt, Artificial Sequence
  Description of Artificial Sequence: Synthetic oligonucleotide
  Sense strand starting at position 2461 of SEQ ID NO: 317132
aguggagacuuguuaacag

SEQ ID NO: 466856 - RNA, 19 nt, Artificial Sequence
  Description of Artificial Sequence: Synthetic oligonucleotide
  Antisense Strand to SEQ ID NO: 466855
cuguuaacaagucuccacu

SEQ ID NO: 466857 - RNA, 19 nt, Artificial Sequence
  Description of Artificial Sequence: Synthetic oligonucleotide
  Sense strand starting at position 2497 of SEQ ID NO: 317132
cuuaacagagucuggaaau

SEQ ID NO: 466858 - RNA, 19 nt, Artificial Sequence
  Description of Artificial Sequence: Synthetic oligonucleotide
  Antisense Strand to SEQ ID NO: 466857
auuuccagacucuguuaag

SEQ ID NO: 466859 - RNA, 19 nt, Artificial Sequence
  Description of Artificial Sequence: Synthetic oligonucleotide
  Sense strand starting at position 2504 of SEQ ID NO: 317132
gagucuggaaaucgugaaa

SEQ ID NO: 466860 - RNA, 19 nt, Artificial Sequence
  Description of Artificial Sequence: Synthetic oligonucleotide
  Antisense Strand to SEQ ID NO: 466859
uuucacgauuuccagacuc

SEQ ID NO: 466861 - RNA, 19 nt, Artificial Sequence
  Description of Artificial Sequence: Synthetic oligonucleotide
  Sense strand starting at position 2517 of SEQ ID NO: 317132
gugaaagagcuugaccgau

SEQ ID NO: 466862 - RNA, 19 nt, Artificial Sequence
  Description of Artificial Sequence: Synthetic oligonucleotide
  Antisense Strand to SEQ ID NO: 466861
aucggucaagcucuuucac

SEQ ID NO: 466863 - RNA, 19 nt, Artificial Sequence
  Description of Artificial Sequence: Synthetic oligonucleotide
  Sense strand starting at position 2519 of SEQ ID NO: 317132
gaaagagcuugaccgauga

SEQ ID NO: 466864 - RNA, 19 nt, Artificial Sequence
  Description of Artificial Sequence: Synthetic oligonucleotide
  Antisense Strand to SEQ ID NO: 466863
ucaucggucaagcucuuuc

SEQ ID NO: 466865 - RNA, 19 nt, Artificial Sequence
  Description of Artificial Sequence: Synthetic oligonucleotide
  Sense strand starting at position 2523 of SEQ ID NO: 317132
gagcuugaccgaugaaaug

SEQ ID NO: 466866 - RNA, 19 nt, Artificial Sequence
  Description of Artificial Sequence: Synthetic oligonucleotide
  Antisense Strand to SEQ ID NO: 466865
cauuucaucggucaagcuc

SEQ ID NO: 466867 - RNA, 19 nt, Artificial Sequence
  Description of Artificial Sequence: Synthetic oligonucleotide
  Sense strand starting at position 2545 of SEQ ID NO: 317132
cuggcugucguaucgguaa

SEQ ID NO: 466868 - RNA, 19 nt, Artificial Sequence
  Description of Artificial Sequence: Synthetic oligonucleotide
  Antisense Strand to SEQ ID NO: 466867
uuaccgauacgacagccag

SEQ ID NO: 466869 - RNA, 19 nt, Artificial Sequence
  Description of Artificial Sequence: Synthetic oligonucleotide
  Sense strand starting at position 2568 of SEQ ID NO: 317132
gugaauguugcuuaagauc

SEQ ID NO: 466870 - RNA, 19 nt, Artificial Sequence
  Description of Artificial Sequence: Synthetic oligonucleotide
  Antisense Strand to SEQ ID NO: 466869
gaucuuaagcaacauucac

SEQ ID NO: 466871 - RNA, 19 nt, Artificial Sequence
  Description of Artificial Sequence: Synthetic oligonucleotide
  Sense strand starting at position 2579 of SEQ ID NO: 317132
uuaagaucagccuggaaag

SEQ ID NO: 466872 - RNA, 19 nt, Artificial Sequence
  Description of Artificial Sequence: Synthetic oligonucleotide
  Antisense Strand to SEQ ID NO: 466871
cuuuccaggcugaucuuaa

SEQ ID NO: 466873 - RNA, 19 nt, Artificial Sequence
  Description of Artificial Sequence: Synthetic oligonucleotide
  Sense strand starting at position 2590 of SEQ ID NO: 317132
cuggaaagguaguuaguca

SEQ ID NO: 466874 - RNA, 19 nt, Artificial Sequence
  Description of Artificial Sequence: Synthetic oligonucleotide
  Antisense Strand to SEQ ID NO: 466873
ugacuaacuaccuuuccag

SEQ ID NO: 466875 - RNA, 19 nt, Artificial Sequence
  Description of Artificial Sequence: Synthetic oligonucleotide
  Sense strand starting at position 2594 of SEQ ID NO: 317132
aaagguaguuagucagauc

SEQ ID NO: 466876 - RNA, 19 nt, Artificial Sequence
  Description of Artificial Sequence: Synthetic oligonucleotide
  Antisense Strand to SEQ ID NO: 466875
gaucugacuaacuaccuuu

SEQ ID NO: 466877 - RNA, 19 nt, Artificial Sequence
  Description of Artificial Sequence: Synthetic oligonucleotide
  Sense strand starting at position 2606 of SEQ ID NO: 317132
ucagauccgaagugacaua

SEQ ID NO: 466878 - RNA, 19 nt, Artificial Sequence
  Description of Artificial Sequence: Synthetic oligonucleotide
  Antisense Strand to SEQ ID NO: 466877
uaugucacuucggaucuga

SEQ ID NO: 466879 - RNA, 19 nt, Artificial Sequence
  Description of Artificial Sequence: Synthetic oligonucleotide
  Sense strand starting at position 2639 of SEQ ID NO: 317132
ggaggcucuggagguuaaa

SEQ ID NO: 466880 - RNA, 19 nt, Artificial Sequence
  Description of Artificial Sequence: Synthetic oligonucleotide
  Antisense Strand to SEQ ID NO: 466879
uuuaaccuccagagccucc

SEQ ID NO: 466881 - RNA, 19 nt, Artificial Sequence
  Description of Artificial Sequence: Synthetic oligonucleotide
  Sense strand starting at position 2642 of SEQ ID NO: 317132
ggcucuggagguuaaagua

SEQ ID NO: 466882 - RNA, 19 nt, Artificial Sequence
  Description of Artificial Sequence: Synthetic oligonucleotide
  Antisense Strand to SEQ ID NO: 466881
uacuuuaaccuccagagcc

SEQ ID NO: 466883 - RNA, 19 nt, Artificial Sequence
  Description of Artificial Sequence: Synthetic oligonucleotide
  Sense strand starting at position 2685 of SEQ ID NO: 317132
ccauauaaugcagaguuga

SEQ ID NO: 466884 - RNA, 19 nt, Artificial Sequence
  Description of Artificial Sequence: Synthetic oligonucleotide
  Antisense Strand to SEQ ID NO: 466883
ucaacucugcauuauaugg

SEQ ID NO: 466885 - RNA, 19 nt, Artificial Sequence
  Description of Artificial Sequence: Synthetic oligonucleotide
  Sense strand starting at position 2712 of SEQ ID NO: 317132
ccuuaugagucaccuugga

SEQ ID NO: 466886 - RNA, 19 nt, Artificial Sequence
  Description of Artificial Sequence: Synthetic oligonucleotide
  Antisense Strand to SEQ ID NO: 466885
uccaaggugacucauaagg

SEQ ID NO: 466887 - RNA, 19 nt, Artificial Sequence
  Description of Artificial Sequence: Synthetic oligonucleotide
  Sense strand starting at position 2732 of SEQ ID NO: 317132
cggaguaguggagacuuaa

SEQ ID NO: 466888 - RNA, 19 nt, Artificial Sequence
  Description of Artificial Sequence: Synthetic oligonucleotide
  Antisense Strand to SEQ ID NO: 466887
uuaagucuccacuacuccg

SEQ ID NO: 466889 - RNA, 19 nt, Artificial Sequence
  Description of Artificial Sequence: Synthetic oligonucleotide
  Sense strand starting at position 2787 of SEQ ID NO: 317132
uuaauauugugacucgaac

SEQ ID NO: 466890 - RNA, 19 nt, Artificial Sequence
  Description of Artificial Sequence: Synthetic oligonucleotide
  Antisense Strand to SEQ ID NO: 466889
guucgagucacaauauuaa

SEQ ID NO: 466891 - RNA, 19 nt, Artificial Sequence
  Description of Artificial Sequence: Synthetic oligonucleotide
  Sense strand starting at position 2861 of SEQ ID NO: 317132
gagggaacuacucgaguag

SEQ ID NO: 466892 - RNA, 19 nt, Artificial Sequence
  Description of Artificial Sequence: Synthetic oligonucleotide
  Antisense Strand to SEQ ID NO: 466891
cuacucgaguaguucccuc

SEQ ID NO: 466893 - RNA, 19 nt, Artificial Sequence
  Description of Artificial Sequence: Synthetic oligonucleotide
  Sense strand starting at position 3152 of SEQ ID NO: 317132
ucuuaacugucccugaaag

SEQ ID NO: 466894 - RNA, 19 nt, Artificial Sequence
  Description of Artificial Sequence: Synthetic oligonucleotide
  Antisense Strand to SEQ ID NO: 466893
cuuucagggacaguuaaga

SEQ ID NO: 466895 - RNA, 19 nt, Artificial Sequence
  Description of Artificial Sequence: Synthetic oligonucleotide
  Sense strand starting at position 3154 of SEQ ID NO: 317132
uuaacugucccugaaaggu

SEQ ID NO: 466896 - RNA, 19 nt, Artificial Sequence
  Description of Artificial Sequence: Synthetic oligonucleotide
  Antisense Strand to SEQ ID NO: 466895
accuuucagggacaguuaa

SEQ ID NO: 466897 - RNA, 19 nt, Artificial Sequence
  Description of Artificial Sequence: Synthetic oligonucleotide
  Sense strand starting at position 3167 of SEQ ID NO: 317132
aaaggugugaguugagaua

SEQ ID NO: 466898 - RNA, 19 nt, Artificial Sequence
  Description of Artificial Sequence: Synthetic oligonucleotide
  Antisense Strand to SEQ ID NO: 466897
uaucucaacucacaccuuu

SEQ ID NO: 466899 - RNA, 19 nt, Artificial Sequence
  Description of Artificial Sequence: Synthetic oligonucleotide
  Sense strand starting at position 3174 of SEQ ID NO: 317132
ugaguugagauacauguuu

SEQ ID NO: 466900 - RNA, 19 nt, Artificial Sequence
  Description of Artificial Sequence: Synthetic oligonucleotide
  Antisense Strand to SEQ ID NO: 466899
aaacauguaucucaacuca

SEQ ID NO: 466901 - RNA, 19 nt, Artificial Sequence
  Description of Artificial Sequence: Synthetic oligonucleotide
  Sense strand starting at position 3179 of SEQ ID NO: 317132
ugagauacauguuucccaa

SEQ ID NO: 466902 - RNA, 19 nt, Artificial Sequence
  Description of Artificial Sequence: Synthetic oligonucleotide
  Antisense Strand to SEQ ID NO: 466901
uugggaaacauguaucuca

SEQ ID NO: 466903 - RNA, 19 nt, Artificial Sequence
  Description of Artificial Sequence: Synthetic oligonucleotide
  Sense strand starting at position 3272 of SEQ ID NO: 317132
agucaaauccuggaguuuc

SEQ ID NO: 466904 - RNA, 19 nt, Artificial Sequence
  Description of Artificial Sequence: Synthetic oligonucleotide
  Antisense Strand to SEQ ID NO: 466903
gaaacuccaggauuugacu

SEQ ID NO: 466905 - RNA, 19 nt, Artificial Sequence
  Description of Artificial Sequence: Synthetic oligonucleotide
  Sense strand starting at position 3280 of SEQ ID NO: 317132
ccuggaguuuccuuaaauu

SEQ ID NO: 466906 - RNA, 19 nt, Artificial Sequence
  Description of Artificial Sequence: Synthetic oligonucleotide
  Antisense Strand to SEQ ID NO: 466905
aauuuaaggaaacuccagg

SEQ ID NO: 466907 - RNA, 19 nt, Artificial Sequence
  Description of Artificial Sequence: Synthetic oligonucleotide
  Sense strand starting at position 3358 of SEQ ID NO: 317132
uugaaauauggccaguauu

SEQ ID NO: 466908 - RNA, 19 nt, Artificial Sequence
  Description of Artificial Sequence: Synthetic oligonucleotide
  Antisense Strand to SEQ ID NO: 466907
aauacuggccauauuucaa

SEQ ID NO: 466909 - RNA, 19 nt, Artificial Sequence
  Description of Artificial Sequence: Synthetic oligonucleotide
  Sense strand starting at position 3705 of SEQ ID NO: 317132
gaaccugaguaccugauua

SEQ ID NO: 466910 - RNA, 19 nt, Artificial Sequence
  Description of Artificial Sequence: Synthetic oligonucleotide
  Antisense Strand to SEQ ID NO: 466909
uaaucagguacucagguuc

SEQ ID NO: 466911 - RNA, 19 nt, Artificial Sequence
  Description of Artificial Sequence: Synthetic oligonucleotide
  Sense strand starting at position 3709 of SEQ ID NO: 317132
cugaguaccugauuagaug

SEQ ID NO: 466912 - RNA, 19 nt, Artificial Sequence
  Description of Artificial Sequence: Synthetic oligonucleotide
  Antisense Strand to SEQ ID NO: 466911
caucuaaucagguacucag

SEQ ID NO: 466913 - RNA, 19 nt, Artificial Sequence
  Description of Artificial Sequence: Synthetic oligonucleotide
  Sense strand starting at position 3717 of SEQ ID NO: 317132
cugauuagaugagccagaa

SEQ ID NO: 466914 - RNA, 19 nt, Artificial Sequence
  Description of Artificial Sequence: Synthetic oligonucleotide
  Antisense Strand to SEQ ID NO: 466913
uucuggcucaucuaaucag

SEQ ID NO: 466915 - RNA, 19 nt, Artificial Sequence
  Description of Artificial Sequence: Synthetic oligonucleotide
  Sense strand starting at position 3732 of SEQ ID NO: 317132
agaaauagaguuuggcaaa

SEQ ID NO: 466916 - RNA, 19 nt, Artificial Sequence
  Description of Artificial Sequence: Synthetic oligonucleotide
  Antisense Strand to SEQ ID NO: 466915
uuugccaaacucuauuucu

SEQ ID NO: 466917 - RNA, 19 nt, Artificial Sequence
  Description of Artificial Sequence: Synthetic oligonucleotide
  Sense strand starting at position 3952 of SEQ ID NO: 317132
ugaguuauacuguaaguaa

SEQ ID NO: 466918 - RNA, 19 nt, Artificial Sequence
  Description of Artificial Sequence: Synthetic oligonucleotide
  Antisense Strand to SEQ ID NO: 466917
uuacuuacaguauaacuca

SEQ ID NO: 466919 - RNA, 19 nt, Artificial Sequence
  Description of Artificial Sequence: Synthetic oligonucleotide
  Sense strand starting at position 179 of SEQ ID NO: 317133
acuggcuggcccuauuaga

SEQ ID NO: 466920 - RNA, 19 nt, Artificial Sequence
  Description of Artificial Sequence: Synthetic oligonucleotide
  Antisense Strand to SEQ ID NO: 466919
ucuaauagggccagccagu

SEQ ID NO: 466921 - RNA, 19 nt, Artificial Sequence
  Description of Artificial Sequence: Synthetic oligonucleotide
  Sense strand starting at position 187 of SEQ ID NO: 317133
gcccuauuagagcaguguu

SEQ ID NO: 466922 - RNA, 19 nt, Artificial Sequence
  Description of Artificial Sequence: Synthetic oligonucleotide
  Antisense Strand to SEQ ID NO: 466921
aacacugcucuaauagggc

SEQ ID NO: 466923 - RNA, 19 nt, Artificial Sequence
  Description of Artificial Sequence: Synthetic oligonucleotide
  Sense strand starting at position 315 of SEQ ID NO: 317133
cuggaaggccacugaguua

SEQ ID NO: 466924 - RNA, 19 nt, Artificial Sequence
  Description of Artificial Sequence: Synthetic oligonucleotide
  Antisense Strand to SEQ ID NO: 466923
uaacucaguggccuuccag

SEQ ID NO: 466925 - RNA, 19 nt, Artificial Sequence
  Description of Artificial Sequence: Synthetic oligonucleotide
  Sense strand starting at position 351 of SEQ ID NO: 317133
agaggaggcuuaguuucaa

SEQ ID NO: 466926 - RNA, 19 nt, Artificial Sequence
  Description of Artificial Sequence: Synthetic oligonucleotide
  Antisense Strand to SEQ ID NO: 466925
uugaaacuaagccuccucu

SEQ ID NO: 466927 - RNA, 19 nt, Artificial Sequence
  Description of Artificial Sequence: Synthetic oligonucleotide
  Sense strand starting at position 696 of SEQ ID NO: 317133
ccggccuuugagcagaauu

SEQ ID NO: 466928 - RNA, 19 nt, Artificial Sequence
  Description of Artificial Sequence: Synthetic oligonucleotide
  Antisense Strand to SEQ ID NO: 466927
aauucugcucaaaggccgg

SEQ ID NO: 466929 - RNA, 19 nt, Artificial Sequence
  Description of Artificial Sequence: Synthetic oligonucleotide
  Sense strand starting at position 767 of SEQ ID NO: 317133
agggaaaguuuaguguuga

SEQ ID NO: 466930 - RNA, 19 nt, Artificial Sequence
  Description of Artificial Sequence: Synthetic oligonucleotide
  Antisense Strand to SEQ ID NO: 466929
ucaacacuaaacuuucccu

SEQ ID NO: 466931 - RNA, 19 nt, Artificial Sequence
  Description of Artificial Sequence: Synthetic oligonucleotide
  Sense strand starting at position 768 of SEQ ID NO: 317133
gggaaaguuuaguguugaa

SEQ ID NO: 466932 - RNA, 19 nt, Artificial Sequence
  Description of Artificial Sequence: Synthetic oligonucleotide
  Antisense Strand to SEQ ID NO: 466931
uucaacacuaaacuuuccc

SEQ ID NO: 466933 - RNA, 19 nt, Artificial Sequence
  Description of Artificial Sequence: Synthetic oligonucleotide
  Sense strand starting at position 777 of SEQ ID NO: 317133
uaguguugaaucggagaau

SEQ ID NO: 466934 - RNA, 19 nt, Artificial Sequence
  Description of Artificial Sequence: Synthetic oligonucleotide
  Antisense Strand to SEQ ID NO: 466933
auucuccgauucaacacua

SEQ ID NO: 466935 - RNA, 19 nt, Artificial Sequence
  Description of Artificial Sequence: Synthetic oligonucleotide
  Sense strand starting at position 778 of SEQ ID NO: 317133
aguguugaaucggagaauc

SEQ ID NO: 466936 - RNA, 19 nt, Artificial Sequence
  Description of Artificial Sequence: Synthetic oligonucleotide
  Antisense Strand to SEQ ID NO: 466935
gauucuccgauucaacacu

SEQ ID NO: 466937 - RNA, 19 nt, Artificial Sequence
  Description of Artificial Sequence: Synthetic oligonucleotide
  Sense strand starting at position 780 of SEQ ID NO: 317133
uguugaaucggagaaucug

SEQ ID NO: 466938 - RNA, 19 nt, Artificial Sequence
  Description of Artificial Sequence: Synthetic oligonucleotide
  Antisense Strand to SEQ ID NO: 466937
cagauucuccgauucaaca

SEQ ID NO: 466939 - RNA, 19 nt, Artificial Sequence
  Description of Artificial Sequence: Synthetic oligonucleotide
  Sense strand starting at position 788 of SEQ ID NO: 317133
cggagaaucugcuuucccu

SEQ ID NO: 466940 - RNA, 19 nt, Artificial Sequence
  Description of Artificial Sequence: Synthetic oligonucleotide
  Antisense Strand to SEQ ID NO: 466939
agggaaagcagauucuccg

SEQ ID NO: 466941 - RNA, 19 nt, Artificial Sequence
  Description of Artificial Sequence: Synthetic oligonucleotide
  Sense strand starting at position 818 of SEQ ID NO: 317133
cgaugugcagcucagauuu

SEQ ID NO: 466942 - RNA, 19 nt, Artificial Sequence
  Description of Artificial Sequence: Synthetic oligonucleotide
  Antisense Strand to SEQ ID NO: 466941
aaaucugagcugcacaucg

SEQ ID NO: 466943 - RNA, 19 nt, Artificial Sequence
  Description of Artificial Sequence: Synthetic oligonucleotide
  Sense strand starting at position 863 of SEQ ID NO: 317133
ggagguuucuaggcaagca

SEQ ID NO: 466944 - RNA, 19 nt, Artificial Sequence
  Description of Artificial Sequence: Synthetic oligonucleotide
  Antisense Strand to SEQ ID NO: 466943
ugcuugccuagaaaccucc

SEQ ID NO: 466945 - RNA, 19 nt, Artificial Sequence
  Description of Artificial Sequence: Synthetic oligonucleotide
  Sense strand starting at position 1141 of SEQ ID NO: 317133
gggacucugucccuagaaa

SEQ ID NO: 466946 - RNA, 19 nt, Artificial Sequence
  Description of Artificial Sequence: Synthetic oligonucleotide
  Antisense Strand to SEQ ID NO: 466945
uuucuagggacagaguccc

SEQ ID NO: 466947 - RNA, 19 nt, Artificial Sequence
  Description of Artificial Sequence: Synthetic oligonucleotide
  Sense strand starting at position 1381 of SEQ ID NO: 317133
gagugaggcuggucccaaa

SEQ ID NO: 466948 - RNA, 19 nt, Artificial Sequence
  Description of Artificial Sequence: Synthetic oligonucleotide
  Antisense Strand to SEQ ID NO: 466947
uuugggaccagccucacuc

SEQ ID NO: 466949 - RNA, 19 nt, Artificial Sequence
  Description of Artificial Sequence: Synthetic oligonucleotide
  Sense strand starting at position 2312 of SEQ ID NO: 317133
aguuaaacuuuguuugcuu

SEQ ID NO: 466950 - RNA, 19 nt, Artificial Sequence
  Description of Artificial Sequence: Synthetic oligonucleotide
  Antisense Strand to SEQ ID NO: 466949
aagcaaacaaaguuuaacu

SEQ ID NO: 466951 - RNA, 19 nt, Artificial Sequence
  Description of Artificial Sequence: Synthetic oligonucleotide
  Sense strand starting at position 2687 of SEQ ID NO: 317133
cgcggacauuaucucauuu

SEQ ID NO: 466952 - RNA, 19 nt, Artificial Sequence
  Description of Artificial Sequence: Synthetic oligonucleotide
  Antisense Strand to SEQ ID NO: 466951
aaaugagauaauguccgcg

SEQ ID NO: 466953 - RNA, 19 nt, Artificial Sequence
  Description of Artificial Sequence: Synthetic oligonucleotide
  Sense strand starting at position 2689 of SEQ ID NO: 317133
cggacauuaucucauuuaa

SEQ ID NO: 466954 - RNA, 19 nt, Artificial Sequence
  Description of Artificial Sequence: Synthetic oligonucleotide
  Antisense Strand to SEQ ID NO: 466953
uuaaaugagauaauguccg

SEQ ID NO: 466955 - RNA, 19 nt, Artificial Sequence
  Description of Artificial Sequence: Synthetic oligonucleotide
  Sense strand starting at position 2724 of SEQ ID NO: 317133
acagguagguuccacuaau

SEQ ID NO: 466956 - RNA, 19 nt, Artificial Sequence
  Description of Artificial Sequence: Synthetic oligonucleotide
  Antisense Strand to SEQ ID NO: 466955
auuaguggaaccuaccugu

SEQ ID NO: 466957 - RNA, 19 nt, Artificial Sequence
  Description of Artificial Sequence: Synthetic oligonucleotide
  Sense strand starting at position 2746 of SEQ ID NO: 317133
cgcuuuacugaugaggagu

SEQ ID NO: 466958 - RNA, 19 nt, Artificial Sequence
  Description of Artificial Sequence: Synthetic oligonucleotide
  Antisense Strand to SEQ ID NO: 466957
acuccucaucaguaaagcg

SEQ ID NO: 466959 - RNA, 19 nt, Artificial Sequence
  Description of Artificial Sequence: Synthetic oligonucleotide
  Sense strand starting at position 2784 of SEQ ID NO: 317133
agccauguacccgagguua

SEQ ID NO: 466960 - RNA, 19 nt, Artificial Sequence
  Description of Artificial Sequence: Synthetic oligonucleotide
  Antisense Strand to SEQ ID NO: 466959
uaaccucggguacauggcu

SEQ ID NO: 466961 - RNA, 19 nt, Artificial Sequence
  Description of Artificial Sequence: Synthetic oligonucleotide
  Sense strand starting at position 2786 of SEQ ID NO: 317133
ccauguacccgagguuacu

SEQ ID NO: 466962 - RNA, 19 nt, Artificial Sequence
  Description of Artificial Sequence: Synthetic oligonucleotide
  Antisense Strand to SEQ ID NO: 466961
aguaaccucggguacaugg

SEQ ID NO: 466963 - RNA, 19 nt, Artificial Sequence
  Description of Artificial Sequence: Synthetic oligonucleotide
  Sense strand starting at position 2882 of SEQ ID NO: 317133
accuuugaguucccaaugu

SEQ ID NO: 466964 - RNA, 19 nt, Artificial Sequence
  Description of Artificial Sequence: Synthetic oligonucleotide
  Antisense Strand to SEQ ID NO: 466963
acauugggaacucaaaggu

SEQ ID NO: 466965 - RNA, 19 nt, Artificial Sequence
  Description of Artificial Sequence: Synthetic oligonucleotide
  Sense strand starting at position 2890 of SEQ ID NO: 317133
guucccaaugucugggaga

SEQ ID NO: 466966 - RNA, 19 nt, Artificial Sequence
  Description of Artificial Sequence: Synthetic oligonucleotide
  Antisense Strand to SEQ ID NO: 466965
ucucccagacauugggaac

SEQ ID NO: 466967 - RNA, 19 nt, Artificial Sequence
  Description of Artificial Sequence: Synthetic oligonucleotide
  Sense strand starting at position 2892 of SEQ ID NO: 317133
ucccaaugucugggagaca

SEQ ID NO: 466968 - RNA, 19 nt, Artificial Sequence
  Description of Artificial Sequence: Synthetic oligonucleotide
  Antisense Strand to SEQ ID NO: 466967
ugucucccagacauuggga

SEQ ID NO: 466969 - RNA, 19 nt, Artificial Sequence
  Description of Artificial Sequence: Synthetic oligonucleotide
  Sense strand starting at position 2893 of SEQ ID NO: 317133
cccaaugucugggagacaa

SEQ ID NO: 466970 - RNA, 19 nt, Artificial Sequence
  Description of Artificial Sequence: Synthetic oligonucleotide
  Antisense Strand to SEQ ID NO: 466969
uugucucccagacauuggg

SEQ ID NO: 466971 - RNA, 19 nt, Artificial Sequence
  Description of Artificial Sequence: Synthetic oligonucleotide
  Sense strand starting at position 2924 of SEQ ID NO: 317133
cuuaguaaggcugggacau

SEQ ID NO: 466972 - RNA, 19 nt, Artificial Sequence
  Description of Artificial Sequence: Synthetic oligonucleotide
  Antisense Strand to SEQ ID NO: 466971
augucccagccuuacuaag

SEQ ID NO: 466973 - RNA, 19 nt, Artificial Sequence
  Description of Artificial Sequence: Synthetic oligonucleotide
  Sense strand starting at position 2925 of SEQ ID NO: 317133
uuaguaaggcugggacauu

SEQ ID NO: 466974 - RNA, 19 nt, Artificial Sequence
  Description of Artificial Sequence: Synthetic oligonucleotide
  Antisense Strand to SEQ ID NO: 466973
aaugucccagccuuacuaa

SEQ ID NO: 466975 - RNA, 19 nt, Artificial Sequence
  Description of Artificial Sequence: Synthetic oligonucleotide
  Sense strand starting at position 2934 of SEQ ID NO: 317133
cugggacauucuuaacggu

SEQ ID NO: 466976 - RNA, 19 nt, Artificial Sequence
  Description of Artificial Sequence: Synthetic oligonucleotide
  Antisense Strand to SEQ ID NO: 466975
accguuaagaaugucccag

SEQ ID NO: 466977 - RNA, 19 nt, Artificial Sequence
  Description of Artificial Sequence: Synthetic oligonucleotide
  Sense strand starting at position 2941 of SEQ ID NO: 317133
auucuuaacgguuagcaca

SEQ ID NO: 466978 - RNA, 19 nt, Artificial Sequence
  Description of Artificial Sequence: Synthetic oligonucleotide
  Antisense Strand to SEQ ID NO: 466977
ugugcuaaccguuaagaau

SEQ ID NO: 466979 - RNA, 19 nt, Artificial Sequence
  Description of Artificial Sequence: Synthetic oligonucleotide
  Sense strand starting at position 2956 of SEQ ID NO: 317133
cacaguugucuguggguaa

SEQ ID NO: 466980 - RNA, 19 nt, Artificial Sequence
  Description of Artificial Sequence: Synthetic oligonucleotide
  Antisense Strand to SEQ ID NO: 466979
uuacccacagacaacugug

SEQ ID NO: 466981 - RNA, 19 nt, Artificial Sequence
  Description of Artificial Sequence: Synthetic oligonucleotide
  Sense strand starting at position 2980 of SEQ ID NO: 317133
gguacauguguacaugaau

SEQ ID NO: 466982 - RNA, 19 nt, Artificial Sequence
  Description of Artificial Sequence: Synthetic oligonucleotide
  Antisense Strand to SEQ ID NO: 466981
auucauguacacauguacc

SEQ ID NO: 466983 - RNA, 19 nt, Artificial Sequence
  Description of Artificial Sequence: Synthetic oligonucleotide
  Sense strand starting at position 2986 of SEQ ID NO: 317133
uguguacaugaauaguaga

SEQ ID NO: 466984 - RNA, 19 nt, Artificial Sequence
  Description of Artificial Sequence: Synthetic oligonucleotide
  Antisense Strand to SEQ ID NO: 466983
ucuacuauucauguacaca

SEQ ID NO: 466985 - RNA, 19 nt, Artificial Sequence
  Description of Artificial Sequence: Synthetic oligonucleotide
  Sense strand starting at position 2989 of SEQ ID NO: 317133
guacaugaauaguagaaac

SEQ ID NO: 466986 - RNA, 19 nt, Artificial Sequence
  Description of Artificial Sequence: Synthetic oligonucleotide
  Antisense Strand to SEQ ID NO: 466985
guuucuacuauucauguac

SEQ ID NO: 466987 - RNA, 19 nt, Artificial Sequence
  Description of Artificial Sequence: Synthetic oligonucleotide
  Sense strand starting at position 3522 of SEQ ID NO: 317133
ugaggucacuugguuuaau

SEQ ID NO: 466988 - RNA, 19 nt, Artificial Sequence
  Description of Artificial Sequence: Synthetic oligonucleotide
  Antisense Strand to SEQ ID NO: 466987
auuaaaccaagugaccuca

SEQ ID NO: 466989 - RNA, 19 nt, Artificial Sequence
  Description of Artificial Sequence: Synthetic oligonucleotide
  Sense strand starting at position 3523 of SEQ ID NO: 317133
gaggucacuugguuuaaug

SEQ ID NO: 466990 - RNA, 19 nt, Artificial Sequence
  Description of Artificial Sequence: Synthetic oligonucleotide
  Antisense Strand to SEQ ID NO: 466989
cauuaaaccaagugaccuc

SEQ ID NO: 466991 - RNA, 19 nt, Artificial Sequence
  Description of Artificial Sequence: Synthetic oligonucleotide
  Sense strand starting at position 3525 of SEQ ID NO: 317133
ggucacuugguuuaaugaa

SEQ ID NO: 466992 - RNA, 19 nt, Artificial Sequence
  Description of Artificial Sequence: Synthetic oligonucleotide
  Antisense Strand to SEQ ID NO: 466991
uucauuaaaccaagugacc

SEQ ID NO: 466993 - RNA, 19 nt, Artificial Sequence
  Description of Artificial Sequence: Synthetic oligonucleotide
  Sense strand starting at position 3548 of SEQ ID NO: 317133
aucagaauugcuggugguu

SEQ ID NO: 466994 - RNA, 19 nt, Artificial Sequence
  Description of Artificial Sequence: Synthetic oligonucleotide
  Antisense Strand to SEQ ID NO: 466993
aaccaccagcaauucugau

SEQ ID NO: 466995 - RNA, 19 nt, Artificial Sequence
  Description of Artificial Sequence: Synthetic oligonucleotide
  Sense strand starting at position 3561 of SEQ ID NO: 317133
gugguugacuuccaagacu

SEQ ID NO: 466996 - RNA, 19 nt, Artificial Sequence
  Description of Artificial Sequence: Synthetic oligonucleotide
  Antisense Strand to SEQ ID NO: 466995
agucuuggaagucaaccac

SEQ ID NO: 466997 - RNA, 19 nt, Artificial Sequence
  Description of Artificial Sequence: Synthetic oligonucleotide
  Sense strand starting at position 3643 of SEQ ID NO: 317133
uugucauguccugaggaag

SEQ ID NO: 466998 - RNA, 19 nt, Artificial Sequence
  Description of Artificial Sequence: Synthetic oligonucleotide
  Antisense Strand to SEQ ID NO: 466997
cuuccucaggacaugacaa

SEQ ID NO: 466999 - RNA, 19 nt, Artificial Sequence
  Description of Artificial Sequence: Synthetic oligonucleotide
  Sense strand starting at position 7 of SEQ ID NO: 317134
accacugucucaguuuaaa

SEQ ID NO: 467000 - RNA, 19 nt, Artificial Sequence
  Description of Artificial Sequence: Synthetic oligonucleotide
  Antisense Strand to SEQ ID NO: 466999
uuuaaacugagacaguggu

SEQ ID NO: 467001 - RNA, 19 nt, Artificial Sequence
  Description of Artificial Sequence: Synthetic oligonucleotide
  Sense strand starting at position 145 of SEQ ID NO: 317134
agucaucauccaugugaau

SEQ ID NO: 467002 - RNA, 19 nt, Artificial Sequence
  Description of Artificial Sequence: Synthetic oligonucleotide
  Antisense Strand to SEQ ID NO: 467001
auucacauggaugaugacu

SEQ ID NO: 467003 - RNA, 19 nt, Artificial Sequence
  Description of Artificial Sequence: Synthetic oligonucleotide
  Sense strand starting at position 159 of SEQ ID NO: 317134
ugaauuaacgccuaaaucu

SEQ ID NO: 467004 - RNA, 19 nt, Artificial Sequence
  Description of Artificial Sequence: Synthetic oligonucleotide
  Antisense Strand to SEQ ID NO: 467003
agauuuaggcguuaauuca

SEQ ID NO: 467005 - RNA, 19 nt, Artificial Sequence
  Description of Artificial Sequence: Synthetic oligonucleotide
  Sense strand starting at position 236 of SEQ ID NO: 317134
guacgaauggccuauacac

SEQ ID NO: 467006 - RNA, 19 nt, Artificial Sequence
  Description of Artificial Sequence: Synthetic oligonucleotide
  Antisense Strand to SEQ ID NO: 467005
guguauaggccauucguac

SEQ ID NO: 467007 - RNA, 19 nt, Artificial Sequence
  Description of Artificial Sequence: Synthetic oligonucleotide
  Sense strand starting at position 428 of SEQ ID NO: 317134
acacuaaguuggccuauua

SEQ ID NO: 467008 - RNA, 19 nt, Artificial Sequence
  Description of Artificial Sequence: Synthetic oligonucleotide
  Antisense Strand to SEQ ID NO: 467007
uaauaggccaacuuagugu

SEQ ID NO: 467009 - RNA, 19 nt, Artificial Sequence
  Description of Artificial Sequence: Synthetic oligonucleotide
  Sense strand starting at position 450 of SEQ ID NO: 317134
cgccauaucccuucugcuu

SEQ ID NO: 467010 - RNA, 19 nt, Artificial Sequence
  Description of Artificial Sequence: Synthetic oligonucleotide
  Antisense Strand to SEQ ID NO: 467009
aagcagaagggauauggcg

SEQ ID NO: 467011 - RNA, 19 nt, Artificial Sequence
  Description of Artificial Sequence: Synthetic oligonucleotide
  Sense strand starting at position 671 of SEQ ID NO: 317134
gcugaugacuucccugaaa

SEQ ID NO: 467012 - RNA, 19 nt, Artificial Sequence
  Description of Artificial Sequence: Synthetic oligonucleotide
  Antisense Strand to SEQ ID NO: 467011
uuucagggaagucaucagc

SEQ ID NO: 467013 - RNA, 19 nt, Artificial Sequence
  Description of Artificial Sequence: Synthetic oligonucleotide
  Sense strand starting at position 1111 of SEQ ID NO: 317134
agccuaaacugaguaguua

SEQ ID NO: 467014 - RNA, 19 nt, Artificial Sequence
  Description of Artificial Sequence: Synthetic oligonucleotide
  Antisense Strand to SEQ ID NO: 467013
uaacuacucaguuuaggcu

SEQ ID NO: 467015 - RNA, 19 nt, Artificial Sequence
  Description of Artificial Sequence: Synthetic oligonucleotide
  Sense strand starting at position 1112 of SEQ ID NO: 317134
gccuaaacugaguaguuac

SEQ ID NO: 467016 - RNA, 19 nt, Artificial Sequence
  Description of Artificial Sequence: Synthetic oligonucleotide
  Antisense Strand to SEQ ID NO: 467015
guaacuacucaguuuaggc

SEQ ID NO: 467017 - RNA, 19 nt, Artificial Sequence
  Description of Artificial Sequence: Synthetic oligonucleotide
  Sense strand starting at position 1928 of SEQ ID NO: 317134
cgcguuucucagguaacua

SEQ ID NO: 467018 - RNA, 19 nt, Artificial Sequence
  Description of Artificial Sequence: Synthetic oligonucleotide
  Antisense Strand to SEQ ID NO: 467017
uaguuaccugagaaacgcg

SEQ ID NO: 467019 - RNA, 19 nt, Artificial Sequence
  Description of Artificial Sequence: Synthetic oligonucleotide
  Sense strand starting at position 2052 of SEQ ID NO: 317134
ggauacaugcgucauaucu

SEQ ID NO: 467020 - RNA, 19 nt, Artificial Sequence
  Description of Artificial Sequence: Synthetic oligonucleotide
  Antisense Strand to SEQ ID NO: 467019
agauaugacgcauguaucc

SEQ ID NO: 467021 - RNA, 19 nt, Artificial Sequence
  Description of Artificial Sequence: Synthetic oligonucleotide
  Sense strand starting at position 2472 of SEQ ID NO: 317134
ugaaccaauucugcuugaa

SEQ ID NO: 467022 - RNA, 19 nt, Artificial Sequence
  Description of Artificial Sequence: Synthetic oligonucleotide
  Antisense Strand to SEQ ID NO: 467021
uucaagcagaauugguuca

SEQ ID NO: 467023 - RNA, 19 nt, Artificial Sequence
  Description of Artificial Sequence: Synthetic oligonucleotide
  Sense strand starting at position 2540 of SEQ ID NO: 317134
cuaaguucuguacaucaga

SEQ ID NO: 467024 - RNA, 19 nt, Artificial Sequence
  Description of Artificial Sequence: Synthetic oligonucleotide
  Antisense Strand to SEQ ID NO: 467023
ucugauguacagaacuuag

SEQ ID NO: 467025 - RNA, 19 nt, Artificial Sequence
  Description of Artificial Sequence: Synthetic oligonucleotide
  Sense strand starting at position 2543 of SEQ ID NO: 317134
aguucuguacaucagaaac

SEQ ID NO: 467026 - RNA, 19 nt, Artificial Sequence
  Description of Artificial Sequence: Synthetic oligonucleotide
  Antisense Strand to SEQ ID NO: 467025
guuucugauguacagaacu

SEQ ID NO: 467027 - RNA, 19 nt, Artificial Sequence
  Description of Artificial Sequence: Synthetic oligonucleotide
  Sense strand starting at position 2627 of SEQ ID NO: 317134
auagauccaucugucgaua

SEQ ID NO: 467028 - RNA, 19 nt, Artificial Sequence
  Description of Artificial Sequence: Synthetic oligonucleotide
  Antisense Strand to SEQ ID NO: 467027
uaucgacagauggaucuau

SEQ ID NO: 467029 - RNA, 19 nt, Artificial Sequence
  Description of Artificial Sequence: Synthetic oligonucleotide
  Sense strand starting at position 2630 of SEQ ID NO: 317134
gauccaucugucgauagau

SEQ ID NO: 467030 - RNA, 19 nt, Artificial Sequence
  Description of Artificial Sequence: Synthetic oligonucleotide
  Antisense Strand to SEQ ID NO: 467029
aucuaucgacagauggauc

SEQ ID NO: 467031 - RNA, 19 nt, Artificial Sequence
  Description of Artificial Sequence: Synthetic oligonucleotide
  Sense strand starting at position 2632 of SEQ ID NO: 317134
uccaucugucgauagauag

SEQ ID NO: 467032 - RNA, 19 nt, Artificial Sequence
  Description of Artificial Sequence: Synthetic oligonucleotide
  Antisense Strand to SEQ ID NO: 467031
cuaucuaucgacagaugga

SEQ ID NO: 467033 - RNA, 19 nt, Artificial Sequence
  Description of Artificial Sequence: Synthetic oligonucleotide
  Sense strand starting at position 2754 of SEQ ID NO: 317134
ucauguuauggugaugucu

SEQ ID NO: 467034 - RNA, 19 nt, Artificial Sequence
  Description of Artificial Sequence: Synthetic oligonucleotide
  Antisense Strand to SEQ ID NO: 467033
agacaucaccauaacauga

SEQ ID NO: 467035 - RNA, 19 nt, Artificial Sequence
  Description of Artificial Sequence: Synthetic oligonucleotide
  Sense strand starting at position 2760 of SEQ ID NO: 317134
uauggugaugucuauauca

SEQ ID NO: 467036 - RNA, 19 nt, Artificial Sequence
  Description of Artificial Sequence: Synthetic oligonucleotide
  Antisense Strand to SEQ ID NO: 467035
ugauauagacaucaccaua

SEQ ID NO: 467037 - RNA, 19 nt, Artificial Sequence
  Description of Artificial Sequence: Synthetic oligonucleotide
  Sense strand starting at position 2762 of SEQ ID NO: 317134
uggugaugucuauaucaua

SEQ ID NO: 467038 - RNA, 19 nt, Artificial Sequence
  Description of Artificial Sequence: Synthetic oligonucleotide
  Antisense Strand to SEQ ID NO: 467037
uaugauauagacaucacca

SEQ ID NO: 467039 - RNA, 19 nt, Artificial Sequence
  Description of Artificial Sequence: Synthetic oligonucleotide
  Sense strand starting at position 2789 of SEQ ID NO: 317134
uguuucguaguagagagau

SEQ ID NO: 467040 - RNA, 19 nt, Artificial Sequence
  Description of Artificial Sequence: Synthetic oligonucleotide
  Antisense Strand to SEQ ID NO: 467039
aucucucuacuacgaaaca

SEQ ID NO: 467041 - RNA, 19 nt, Artificial Sequence
  Description of Artificial Sequence: Synthetic oligonucleotide
  Sense strand starting at position 2791 of SEQ ID NO: 317134
uuucguaguagagagauga

SEQ ID NO: 467042 - RNA, 19 nt, Artificial Sequence
  Description of Artificial Sequence: Synthetic oligonucleotide
  Antisense Strand to SEQ ID NO: 467041
ucaucucucuacuacgaaa

SEQ ID NO: 467043 - RNA, 19 nt, Artificial Sequence
  Description of Artificial Sequence: Synthetic oligonucleotide
  Sense strand starting at position 2795 of SEQ ID NO: 317134
guaguagagagaugagacu

SEQ ID NO: 467044 - RNA, 19 nt, Artificial Sequence
  Description of Artificial Sequence: Synthetic oligonucleotide
  Antisense Strand to SEQ ID NO: 467043
agucucaucucucuacuac

SEQ ID NO: 467045 - RNA, 19 nt, Artificial Sequence
  Description of Artificial Sequence: Synthetic oligonucleotide
  Sense strand starting at position 2829 of SEQ ID NO: 317134
acucacuuauuguuggaaa

SEQ ID NO: 467046 - RNA, 19 nt, Artificial Sequence
  Description of Artificial Sequence: Synthetic oligonucleotide
  Antisense Strand to SEQ ID NO: 467045
uuuccaacaauaagugagu

SEQ ID NO: 467047 - RNA, 19 nt, Artificial Sequence
  Description of Artificial Sequence: Synthetic oligonucleotide
  Sense strand starting at position 2840 of SEQ ID NO: 317134
guuggaaaccacuagucua

SEQ ID NO: 467048 - RNA, 19 nt, Artificial Sequence
  Description of Artificial Sequence: Synthetic oligonucleotide
  Antisense Strand to SEQ ID NO: 467047
uagacuagugguuuccaac

SEQ ID NO: 467049 - RNA, 19 nt, Artificial Sequence
  Description of Artificial Sequence: Synthetic oligonucleotide
  Sense strand starting at position 2865 of SEQ ID NO: 317134
ggagaaagcaagcagaguu

SEQ ID NO: 467050 - RNA, 19 nt, Artificial Sequence
  Description of Artificial Sequence: Synthetic oligonucleotide
  Antisense Strand to SEQ ID NO: 467049
aacucugcuugcuuucucc

SEQ ID NO: 467051 - RNA, 19 nt, Artificial Sequence
  Description of Artificial Sequence: Synthetic oligonucleotide
  Sense strand starting at position 2942 of SEQ ID NO: 317134
gcaucagucccuguguagu

SEQ ID NO: 467052 - RNA, 19 nt, Artificial Sequence
  Description of Artificial Sequence: Synthetic oligonucleotide
  Antisense Strand to SEQ ID NO: 467051
acuacacagggacugaugc

SEQ ID NO: 467053 - RNA, 19 nt, Artificial Sequence
  Description of Artificial Sequence: Synthetic oligonucleotide
  Sense strand starting at position 3051 of SEQ ID NO: 317134
ugucaucuacaacaguaga

SEQ ID NO: 467054 - RNA, 19 nt, Artificial Sequence
  Description of Artificial Sequence: Synthetic oligonucleotide
  Antisense Strand to SEQ ID NO: 467053
ucuacuguuguagaugaca

SEQ ID NO: 467055 - RNA, 19 nt, Artificial Sequence
  Description of Artificial Sequence: Synthetic oligonucleotide
  Sense strand starting at position 3092 of SEQ ID NO: 317134
guguaauaagaguaagguu

SEQ ID NO: 467056 - RNA, 19 nt, Artificial Sequence
  Description of Artificial Sequence: Synthetic oligonucleotide
  Antisense Strand to SEQ ID NO: 467055
aaccuuacucuuauuacac

SEQ ID NO: 467057 - RNA, 19 nt, Artificial Sequence
  Description of Artificial Sequence: Synthetic oligonucleotide
  Sense strand starting at position 3144 of SEQ ID NO: 317134
gggcaaugcacaggagaua

SEQ ID NO: 467058 - RNA, 19 nt, Artificial Sequence
  Description of Artificial Sequence: Synthetic oligonucleotide
  Antisense Strand to SEQ ID NO: 467057
uaucuccugugcauugccc

SEQ ID NO: 467059 - RNA, 19 nt, Artificial Sequence
  Description of Artificial Sequence: Synthetic oligonucleotide
  Sense strand starting at position 3195 of SEQ ID NO: 317134
auccaagugcagcagaaau

SEQ ID NO: 467060 - RNA, 19 nt, Artificial Sequence
  Description of Artificial Sequence: Synthetic oligonucleotide
  Antisense Strand to SEQ ID NO: 467059
auuucugcugcacuuggau

SEQ ID NO: 467061 - RNA, 19 nt, Artificial Sequence
  Description of Artificial Sequence: Synthetic oligonucleotide
  Sense strand starting at position 3385 of SEQ ID NO: 317134
uugggcaguuaaucuaaau

SEQ ID NO: 467062 - RNA, 19 nt, Artificial Sequence
  Description of Artificial Sequence: Synthetic oligonucleotide
  Antisense Strand to SEQ ID NO: 467061
auuuagauuaacugcccaa

SEQ ID NO: 467063 - RNA, 19 nt, Artificial Sequence
  Description of Artificial Sequence: Synthetic oligonucleotide
  Sense strand starting at position 3454 of SEQ ID NO: 317134
ucaugugagcacuaaguaa

SEQ ID NO: 467064 - RNA, 19 nt, Artificial Sequence
  Description of Artificial Sequence: Synthetic oligonucleotide
  Antisense Strand to SEQ ID NO: 467063
uuacuuagugcucacauga

SEQ ID NO: 467065 - RNA, 19 nt, Artificial Sequence
  Description of Artificial Sequence: Synthetic oligonucleotide
  Sense strand starting at position 3483 of SEQ ID NO: 317134
aagggaguggcaugucaua

SEQ ID NO: 467066 - RNA, 19 nt, Artificial Sequence
  Description of Artificial Sequence: Synthetic oligonucleotide
  Antisense Strand to SEQ ID NO: 467065
uaugacaugccacucccuu

SEQ ID NO: 467067 - RNA, 19 nt, Artificial Sequence
  Description of Artificial Sequence: Synthetic oligonucleotide
  Sense strand starting at position 3610 of SEQ ID NO: 317134
gaagacguuugagccagaa

SEQ ID NO: 467068 - RNA, 19 nt, Artificial Sequence
  Description of Artificial Sequence: Synthetic oligonucleotide
  Antisense Strand to SEQ ID NO: 467067
uucuggcucaaacgucuuc

SEQ ID NO: 467069 - RNA, 19 nt, Artificial Sequence
  Description of Artificial Sequence: Synthetic oligonucleotide
  Sense strand starting at position 3612 of SEQ ID NO: 317134
agacguuugagccagaauu

SEQ ID NO: 467070 - RNA, 19 nt, Artificial Sequence
  Description of Artificial Sequence: Synthetic oligonucleotide
  Antisense Strand to SEQ ID NO: 467069
aauucuggcucaaacgucu

SEQ ID NO: 467071 - RNA, 19 nt, Artificial Sequence
  Description of Artificial Sequence: Synthetic oligonucleotide
  Sense strand starting at position 3614 of SEQ ID NO: 317134
acguuugagccagaauuau

SEQ ID NO: 467072 - RNA, 19 nt, Artificial Sequence
  Description of Artificial Sequence: Synthetic oligonucleotide
  Antisense Strand to SEQ ID NO: 467071
auaauucuggcucaaacgu

SEQ ID NO: 467073 - RNA, 19 nt, Artificial Sequence
  Description of Artificial Sequence: Synthetic oligonucleotide
  Sense strand starting at position 3693 of SEQ ID NO: 317134
gcuuacagucaaugaaaua

SEQ ID NO: 467074 - RNA, 19 nt, Artificial Sequence
  Description of Artificial Sequence: Synthetic oligonucleotide
  Antisense Strand to SEQ ID NO: 467073
uauuucauugacuguaagc

SEQ ID NO: 467075 - RNA, 19 nt, Artificial Sequence
  Description of Artificial Sequence: Synthetic oligonucleotide
  Sense strand starting at position 3777 of SEQ ID NO: 317134
uuagaaagaaguugguauu

SEQ ID NO: 467076 - RNA, 19 nt, Artificial Sequence
  Description of Artificial Sequence: Synthetic oligonucleotide
  Antisense Strand to SEQ ID NO: 467075
aauaccaacuucuuucuaa

SEQ ID NO: 467077 - RNA, 19 nt, Artificial Sequence
  Description of Artificial Sequence: Synthetic oligonucleotide
  Sense strand starting at position 3778 of SEQ ID NO: 317134
uagaaagaaguugguauua

SEQ ID NO: 467078 - RNA, 19 nt, Artificial Sequence
  Description of Artificial Sequence: Synthetic oligonucleotide
  Antisense Strand to SEQ ID NO: 467077
uaauaccaacuucuuucua

SEQ ID NO: 467079 - RNA, 19 nt, Artificial Sequence
  Description of Artificial Sequence: Synthetic oligonucleotide
  Sense strand starting at position 93 of SEQ ID NO: 317135
agcuuauguuucuuuauag

SEQ ID NO: 467080 - RNA, 19 nt, Artificial Sequence
  Description of Artificial Sequence: Synthetic oligonucleotide
  Antisense Strand to SEQ ID NO: 467079
cuauaaagaaacauaagcu

SEQ ID NO: 467081 - RNA, 19 nt, Artificial Sequence
  Description of Artificial Sequence: Synthetic oligonucleotide
  Sense strand starting at position 94 of SEQ ID NO: 317135
gcuuauguuucuuuauaga

SEQ ID NO: 467082 - RNA, 19 nt, Artificial Sequence
  Description of Artificial Sequence: Synthetic oligonucleotide
  Antisense Strand to SEQ ID NO: 467081
ucuauaaagaaacauaagc

SEQ ID NO: 467083 - RNA, 19 nt, Artificial Sequence
  Description of Artificial Sequence: Synthetic oligonucleotide
  Sense strand starting at position 105 of SEQ ID NO: 317135
uuuauagaucacuggcuca

SEQ ID NO: 467084 - RNA, 19 nt, Artificial Sequence
  Description of Artificial Sequence: Synthetic oligonucleotide
  Antisense Strand to SEQ ID NO: 467083
ugagccagugaucuauaaa

SEQ ID NO: 467085 - RNA, 19 nt, Artificial Sequence
  Description of Artificial Sequence: Synthetic oligonucleotide
  Sense strand starting at position 148 of SEQ ID NO: 317135
agcuaagagucuuuacauu

SEQ ID NO: 467086 - RNA, 19 nt, Artificial Sequence
  Description of Artificial Sequence: Synthetic oligonucleotide
  Antisense Strand to SEQ ID NO: 467085
aauguaaagacucuuagcu

SEQ ID NO: 467087 - RNA, 19 nt, Artificial Sequence
  Description of Artificial Sequence: Synthetic oligonucleotide
  Sense strand starting at position 197 of SEQ ID NO: 317135
augcaucuguccucaagca

SEQ ID NO: 467088 - RNA, 19 nt, Artificial Sequence
  Description of Artificial Sequence: Synthetic oligonucleotide
  Antisense Strand to SEQ ID NO: 467087
ugcuugaggacagaugcau

SEQ ID NO: 467089 - RNA, 19 nt, Artificial Sequence
  Description of Artificial Sequence: Synthetic oligonucleotide
  Sense strand starting at position 461 of SEQ ID NO: 317135
guacauaacgcuggauaca

SEQ ID NO: 467090 - RNA, 19 nt, Artificial Sequence
  Description of Artificial Sequence: Synthetic oligonucleotide
  Antisense Strand to SEQ ID NO: 467089
uguauccagcguuauguac

SEQ ID NO: 467091 - RNA, 19 nt, Artificial Sequence
  Description of Artificial Sequence: Synthetic oligonucleotide
  Sense strand starting at position 473 of SEQ ID NO: 317135
ggauacacaugcuuuacau

SEQ ID NO: 467092 - RNA, 19 nt, Artificial Sequence
  Description of Artificial Sequence: Synthetic oligonucleotide
  Antisense Strand to SEQ ID NO: 467091
auguaaagcauguguaucc

SEQ ID NO: 467093 - RNA, 19 nt, Artificial Sequence
  Description of Artificial Sequence: Synthetic oligonucleotide
  Sense strand starting at position 616 of SEQ ID NO: 317135
acacaaacaugagauugua

SEQ ID NO: 467094 - RNA, 19 nt, Artificial Sequence
  Description of Artificial Sequence: Synthetic oligonucleotide
  Antisense Strand to SEQ ID NO: 467093
uacaaucucauguuugugu

SEQ ID NO: 467095 - RNA, 19 nt, Artificial Sequence
  Description of Artificial Sequence: Synthetic oligonucleotide
  Sense strand starting at position 692 of SEQ ID NO: 317135
ccauguuguuucucuaaau

SEQ ID NO: 467096 - RNA, 19 nt, Artificial Sequence
  Description of Artificial Sequence: Synthetic oligonucleotide
  Antisense Strand to SEQ ID NO: 467095
auuuagagaaacaacaugg

SEQ ID NO: 467097 - RNA, 19 nt, Artificial Sequence
  Description of Artificial Sequence: Synthetic oligonucleotide
  Sense strand starting at position 774 of SEQ ID NO: 317135
ugucaugaucuccauugca

SEQ ID NO: 467098 - RNA, 19 nt, Artificial Sequence
  Description of Artificial Sequence: Synthetic oligonucleotide
  Antisense Strand to SEQ ID NO: 467097
ugcaauggagaucaugaca

SEQ ID NO: 467099 - RNA, 19 nt, Artificial Sequence
  Description of Artificial Sequence: Synthetic oligonucleotide
  Sense strand starting at position 808 of SEQ ID NO: 317135
aucaaucuccugugaagug

SEQ ID NO: 467100 - RNA, 19 nt, Artificial Sequence
  Description of Artificial Sequence: Synthetic oligonucleotide
  Antisense Strand to SEQ ID NO: 467099
cacuucacaggagauugau

SEQ ID NO: 467101 - RNA, 19 nt, Artificial Sequence
  Description of Artificial Sequence: Synthetic oligonucleotide
  Sense strand starting at position 813 of SEQ ID NO: 317135
ucuccugugaaguguaaag

SEQ ID NO: 467102 - RNA, 19 nt, Artificial Sequence
  Description of Artificial Sequence: Synthetic oligonucleotide
  Antisense Strand to SEQ ID NO: 467101
cuuuacacuucacaggaga

SEQ ID NO: 467103 - RNA, 19 nt, Artificial Sequence
  Description of Artificial Sequence: Synthetic oligonucleotide
  Sense strand starting at position 901 of SEQ ID NO: 317135
gcgaaaugucaugaguaaa

SEQ ID NO: 467104 - RNA, 19 nt, Artificial Sequence
  Description of Artificial Sequence: Synthetic oligonucleotide
  Antisense Strand to SEQ ID NO: 467103
uuuacucaugacauuucgc

SEQ ID NO: 467105 - RNA, 19 nt, Artificial Sequence
  Description of Artificial Sequence: Synthetic oligonucleotide
  Sense strand starting at position 940 of SEQ ID NO: 317135
ugagaacguguucagucau

SEQ ID NO: 467106 - RNA, 19 nt, Artificial Sequence
  Description of Artificial Sequence: Synthetic oligonucleotide
  Antisense Strand to SEQ ID NO: 467105
augacugaacacguucuca

SEQ ID NO: 467107 - RNA, 19 nt, Artificial Sequence
  Description of Artificial Sequence: Synthetic oligonucleotide
  Sense strand starting at position 987 of SEQ ID NO: 317135
cugugugaugaauggguuu

SEQ ID NO: 467108 - RNA, 19 nt, Artificial Sequence
  Description of Artificial Sequence: Synthetic oligonucleotide
  Antisense Strand to SEQ ID NO: 467107
aaacccauucaucacacag

SEQ ID NO: 467109 - RNA, 19 nt, Artificial Sequence
  Description of Artificial Sequence: Synthetic oligonucleotide
  Sense strand starting at position 990 of SEQ ID NO: 317135
ugugaugaauggguuucaa

SEQ ID NO: 467110 - RNA, 19 nt, Artificial Sequence
  Description of Artificial Sequence: Synthetic oligonucleotide
  Antisense Strand to SEQ ID NO: 467109
uugaaacccauucaucaca

SEQ ID NO: 467111 - RNA, 19 nt, Artificial Sequence
  Description of Artificial Sequence: Synthetic oligonucleotide
  Sense strand starting at position 1051 of SEQ ID NO: 317135
ccucaauccucagagaaga

SEQ ID NO: 467112 - RNA, 19 nt, Artificial Sequence
  Description of Artificial Sequence: Synthetic oligonucleotide
  Antisense Strand to SEQ ID NO: 467111
ucuucucugaggauugagg

SEQ ID NO: 467113 - RNA, 19 nt, Artificial Sequence
  Description of Artificial Sequence: Synthetic oligonucleotide
  Sense strand starting at position 1171 of SEQ ID NO: 317135
aggaucuaauugcuuuaau

SEQ ID NO: 467114 - RNA, 19 nt, Artificial Sequence
  Description of Artificial Sequence: Synthetic oligonucleotide
  Antisense Strand to SEQ ID NO: 467113
auuaaagcaauuagauccu

SEQ ID NO: 467115 - RNA, 19 nt, Artificial Sequence
  Description of Artificial Sequence: Synthetic oligonucleotide
  Sense strand starting at position 1172 of SEQ ID NO: 317135
ggaucuaauugcuuuaauu

SEQ ID NO: 467116 - RNA, 19 nt, Artificial Sequence
  Description of Artificial Sequence: Synthetic oligonucleotide
  Antisense Strand to SEQ ID NO: 467115
aauuaaagcaauuagaucc

SEQ ID NO: 467117 - RNA, 19 nt, Artificial Sequence
  Description of Artificial Sequence: Synthetic oligonucleotide
  Sense strand starting at position 1200 of SEQ ID NO: 317135
uuaggaaugucagaauaaa

SEQ ID NO: 467118 - RNA, 19 nt, Artificial Sequence
  Description of Artificial Sequence: Synthetic oligonucleotide
  Antisense Strand to SEQ ID NO: 467117
uuuauucugacauuccuaa

SEQ ID NO: 467119 - RNA, 19 nt, Artificial Sequence
  Description of Artificial Sequence: Synthetic oligonucleotide
  Sense strand starting at position 1663 of SEQ ID NO: 317135
gcaggcucucgauaaaguc

SEQ ID NO: 467120 - RNA, 19 nt, Artificial Sequence
  Description of Artificial Sequence: Synthetic oligonucleotide
  Antisense Strand to SEQ ID NO: 467119
gacuuuaucgagagccugc

SEQ ID NO: 467121 - RNA, 19 nt, Artificial Sequence
  Description of Artificial Sequence: Synthetic oligonucleotide
  Sense strand starting at position 1876 of SEQ ID NO: 317135
cggccauguuagaggagaa

SEQ ID NO: 467122 - RNA, 19 nt, Artificial Sequence
  Description of Artificial Sequence: Synthetic oligonucleotide
  Antisense Strand to SEQ ID NO: 467121
uucuccucuaacauggccg

SEQ ID NO: 467123 - RNA, 19 nt, Artificial Sequence
  Description of Artificial Sequence: Synthetic oligonucleotide
  Sense strand starting at position 1935 of SEQ ID NO: 317135
ccgagcugguccagagaga

SEQ ID NO: 467124 - RNA, 19 nt, Artificial Sequence
  Description of Artificial Sequence: Synthetic oligonucleotide
  Antisense Strand to SEQ ID NO: 467123
ucucucuggaccagcucgg

SEQ ID NO: 467125 - RNA, 19 nt, Artificial Sequence
  Description of Artificial Sequence: Synthetic oligonucleotide
  Sense strand starting at position 1936 of SEQ ID NO: 317135
cgagcugguccagagagau

SEQ ID NO: 467126 - RNA, 19 nt, Artificial Sequence
  Description of Artificial Sequence: Synthetic oligonucleotide
  Antisense Strand to SEQ ID NO: 467125
aucucucuggaccagcucg

SEQ ID NO: 467127 - RNA, 19 nt, Artificial Sequence
  Description of Artificial Sequence: Synthetic oligonucleotide
  Sense strand starting at position 2080 of SEQ ID NO: 317135
gcaccagauuccuccuguu

SEQ ID NO: 467128 - RNA, 19 nt, Artificial Sequence
  Description of Artificial Sequence: Synthetic oligonucleotide
  Antisense Strand to SEQ ID NO: 467127
aacaggaggaaucuggugc

SEQ ID NO: 467129 - RNA, 19 nt, Artificial Sequence
  Description of Artificial Sequence: Synthetic oligonucleotide
  Sense strand starting at position 2213 of SEQ ID NO: 317135
cgaggugcuucuucaggaa

SEQ ID NO: 467130 - RNA, 19 nt, Artificial Sequence
  Description of Artificial Sequence: Synthetic oligonucleotide
  Antisense Strand to SEQ ID NO: 467129
uuccugaagaagcaccucg

SEQ ID NO: 467131 - RNA, 19 nt, Artificial Sequence
  Description of Artificial Sequence: Synthetic oligonucleotide
  Sense strand starting at position 2356 of SEQ ID NO: 317135
cucuuagauuccuccgcau

SEQ ID NO: 467132 - RNA, 19 nt, Artificial Sequence
  Description of Artificial Sequence: Synthetic oligonucleotide
  Antisense Strand to SEQ ID NO: 467131
augcggaggaaucuaagag

SEQ ID NO: 467133 - RNA, 19 nt, Artificial Sequence
  Description of Artificial Sequence: Synthetic oligonucleotide
  Sense strand starting at position 2527 of SEQ ID NO: 317135
ggcauauaucuugguggca

SEQ ID NO: 467134 - RNA, 19 nt, Artificial Sequence
  Description of Artificial Sequence: Synthetic oligonucleotide
  Antisense Strand to SEQ ID NO: 467133
ugccaccaagauauaugcc

SEQ ID NO: 467135 - RNA, 19 nt, Artificial Sequence
  Description of Artificial Sequence: Synthetic oligonucleotide
  Sense strand starting at position 2528 of SEQ ID NO: 317135
gcauauaucuugguggcaa

SEQ ID NO: 467136 - RNA, 19 nt, Artificial Sequence
  Description of Artificial Sequence: Synthetic oligonucleotide
  Antisense Strand to SEQ ID NO: 467135
uugccaccaagauauaugc

SEQ ID NO: 467137 - RNA, 19 nt, Artificial Sequence
  Description of Artificial Sequence: Synthetic oligonucleotide
  Sense strand starting at position 2629 of SEQ ID NO: 317135
uguguucuagaagauccua

SEQ ID NO: 467138 - RNA, 19 nt, Artificial Sequence
  Description of Artificial Sequence: Synthetic oligonucleotide
  Antisense Strand to SEQ ID NO: 467137
uaggaucuucuagaacaca

SEQ ID NO: 467139 - RNA, 19 nt, Artificial Sequence
  Description of Artificial Sequence: Synthetic oligonucleotide
  Sense strand starting at position 2634 of SEQ ID NO: 317135
ucuagaagauccuacagaa

SEQ ID NO: 467140 - RNA, 19 nt, Artificial Sequence
  Description of Artificial Sequence: Synthetic oligonucleotide
  Antisense Strand to SEQ ID NO: 467139
uucuguaggaucuucuaga

SEQ ID NO: 467141 - RNA, 19 nt, Artificial Sequence
  Description of Artificial Sequence: Synthetic oligonucleotide
  Sense strand starting at position 2650 of SEQ ID NO: 317135
gaaucuuuggccuguggga

SEQ ID NO: 467142 - RNA, 19 nt, Artificial Sequence
  Description of Artificial Sequence: Synthetic oligonucleotide
  Antisense Strand to SEQ ID NO: 467141
ucccacaggccaaagauuc

SEQ ID NO: 467143 - RNA, 19 nt, Artificial Sequence
  Description of Artificial Sequence: Synthetic oligonucleotide
  Sense strand starting at position 2739 of SEQ ID NO: 317135
ccucuuaucuugguuaaag

SEQ ID NO: 467144 - RNA, 19 nt, Artificial Sequence
  Description of Artificial Sequence: Synthetic oligonucleotide
  Antisense Strand to SEQ ID NO: 467143
cuuuaaccaagauaagagg

SEQ ID NO: 467145 - RNA, 19 nt, Artificial Sequence
  Description of Artificial Sequence: Synthetic oligonucleotide
  Sense strand starting at position 2740 of SEQ ID NO: 317135
cucuuaucuugguuaaagc

SEQ ID NO: 467146 - RNA, 19 nt, Artificial Sequence
  Description of Artificial Sequence: Synthetic oligonucleotide
  Antisense Strand to SEQ ID NO: 467145
gcuuuaaccaagauaagag

SEQ ID NO: 467147 - RNA, 19 nt, Artificial Sequence
  Description of Artificial Sequence: Synthetic oligonucleotide
  Sense strand starting at position 2741 of SEQ ID NO: 317135
ucuuaucuugguuaaagca

SEQ ID NO: 467148 - RNA, 19 nt, Artificial Sequence
  Description of Artificial Sequence: Synthetic oligonucleotide
  Antisense Strand to SEQ ID NO: 467147
ugcuuuaaccaagauaaga

SEQ ID NO: 467149 - RNA, 19 nt, Artificial Sequence
  Description of Artificial Sequence: Synthetic oligonucleotide
  Sense strand starting at position 3653 of SEQ ID NO: 317135
uacagcugccuugagauua

SEQ ID NO: 467150 - RNA, 19 nt, Artificial Sequence
  Description of Artificial Sequence: Synthetic oligonucleotide
  Antisense Strand to SEQ ID NO: 467149
uaaucucaaggcagcugua

SEQ ID NO: 467151 - RNA, 19 nt, Artificial Sequence
  Description of Artificial Sequence: Synthetic oligonucleotide
  Sense strand starting at position 3661 of SEQ ID NO: 317135
ccuugagauuaggaaugau

SEQ ID NO: 467152 - RNA, 19 nt, Artificial Sequence
  Description of Artificial Sequence: Synthetic oligonucleotide
  Antisense Strand to SEQ ID NO: 467151
aucauuccuaaucucaagg

SEQ ID NO: 467153 - RNA, 19 nt, Artificial Sequence
  Description of Artificial Sequence: Synthetic oligonucleotide
  Sense strand starting at position 3670 of SEQ ID NO: 317135
uaggaaugauguuucucau

SEQ ID NO: 467154 - RNA, 19 nt, Artificial Sequence
  Description of Artificial Sequence: Synthetic oligonucleotide
  Antisense Strand to SEQ ID NO: 467153
augagaaacaucauuccua

SEQ ID NO: 467155 - RNA, 19 nt, Artificial Sequence
  Description of Artificial Sequence: Synthetic oligonucleotide
  Sense strand starting at position 3936 of SEQ ID NO: 317135
aguguuaaaccagacuguu

SEQ ID NO: 467156 - RNA, 19 nt, Artificial Sequence
  Description of Artificial Sequence: Synthetic oligonucleotide
  Antisense Strand to SEQ ID NO: 467155
aacagucugguuuaacacu

SEQ ID NO: 467157 - RNA, 19 nt, Artificial Sequence
  Description of Artificial Sequence: Synthetic oligonucleotide
  Sense strand starting at position 3968 of SEQ ID NO: 317135
ggcuuauugagguaucauu

SEQ ID NO: 467158 - RNA, 19 nt, Artificial Sequence
  Description of Artificial Sequence: Synthetic oligonucleotide
  Antisense Strand to SEQ ID NO: 467157
aaugauaccucaauaagcc

SEQ ID NO: 467159 - RNA, 19 nt, Artificial Sequence
  Description of Artificial Sequence: Synthetic oligonucleotide
  Sense strand starting at position 1272 of SEQ ID NO: 317136
cgcagauuauauuuaggca

SEQ ID NO: 467160 - RNA, 19 nt, Artificial Sequence
  Description of Artificial Sequence: Synthetic oligonucleotide
  Antisense Strand to SEQ ID NO: 467159
ugccuaaauauaaucugcg

SEQ ID NO: 467161 - RNA, 19 nt, Artificial Sequence
  Description of Artificial Sequence: Synthetic oligonucleotide
  Sense strand starting at position 3118 of SEQ ID NO: 317136
ugcguugugcgguggaguu

SEQ ID NO: 467162 - RNA, 19 nt, Artificial Sequence
  Description of Artificial Sequence: Synthetic oligonucleotide
  Antisense Strand to SEQ ID NO: 467161
aacuccaccgcacaacgca

SEQ ID NO: 467163 - RNA, 19 nt, Artificial Sequence
  Description of Artificial Sequence: Synthetic oligonucleotide
  Sense strand starting at position 3458 of SEQ ID NO: 317136
gacucagguuggucugaau

SEQ ID NO: 467164 - RNA, 19 nt, Artificial Sequence
  Description of Artificial Sequence: Synthetic oligonucleotide
  Antisense Strand to SEQ ID NO: 467163
auucagaccaaccugaguc

SEQ ID NO: 467165 - RNA, 19 nt, Artificial Sequence
  Description of Artificial Sequence: Synthetic oligonucleotide
  Sense strand starting at position 3461 of SEQ ID NO: 317136
ucagguuggucugaaugca

SEQ ID NO: 467166 - RNA, 19 nt, Artificial Sequence
  Description of Artificial Sequence: Synthetic oligonucleotide
  Antisense Strand to SEQ ID NO: 467165
ugcauucagaccaaccuga

SEQ ID NO: 467167 - RNA, 19 nt, Artificial Sequence
  Description of Artificial Sequence: Synthetic oligonucleotide
  Sense strand starting at position 3473 of SEQ ID NO: 317136
gaaugcacgcgcucucauu

SEQ ID NO: 467168 - RNA, 19 nt, Artificial Sequence
  Description of Artificial Sequence: Synthetic oligonucleotide
  Antisense Strand to SEQ ID NO: 467167
aaugagagcgcgugcauuc

SEQ ID NO: 467169 - RNA, 19 nt, Artificial Sequence
  Description of Artificial Sequence: Synthetic oligonucleotide
  Sense strand starting at position 3570 of SEQ ID NO: 317136
gcauaagcuauugauuggu

SEQ ID NO: 467170 - RNA, 19 nt, Artificial Sequence
  Description of Artificial Sequence: Synthetic oligonucleotide
  Antisense Strand to SEQ ID NO: 467169
accaaucaauagcuuaugc

SEQ ID NO: 467171 - RNA, 19 nt, Artificial Sequence
  Description of Artificial Sequence: Synthetic oligonucleotide
  Sense strand starting at position 3573 of SEQ ID NO: 317136
uaagcuauugauuggugua

SEQ ID NO: 467172 - RNA, 19 nt, Artificial Sequence
  Description of Artificial Sequence: Synthetic oligonucleotide
  Antisense Strand to SEQ ID NO: 467171
uacaccaaucaauagcuua

SEQ ID NO: 467173 - RNA, 19 nt, Artificial Sequence
  Description of Artificial Sequence: Synthetic oligonucleotide
  Sense strand starting at position 3575 of SEQ ID NO: 317136
agcuauugauugguguaca

SEQ ID NO: 467174 - RNA, 19 nt, Artificial Sequence
  Description of Artificial Sequence: Synthetic oligonucleotide
  Antisense Strand to SEQ ID NO: 467173
uguacaccaaucaauagcu

SEQ ID NO: 467175 - RNA, 19 nt, Artificial Sequence
  Description of Artificial Sequence: Synthetic oligonucleotide
  Sense strand starting at position 3576 of SEQ ID NO: 317136
gcuauugauugguguacau

SEQ ID NO: 467176 - RNA, 19 nt, Artificial Sequence
  Description of Artificial Sequence: Synthetic oligonucleotide
  Antisense Strand to SEQ ID NO: 467175
auguacaccaaucaauagc

SEQ ID NO: 467177 - RNA, 19 nt, Artificial Sequence
  Description of Artificial Sequence: Synthetic oligonucleotide
  Sense strand starting at position 3578 of SEQ ID NO: 317136
uauugauugguguacauua

SEQ ID NO: 467178 - RNA, 19 nt, Artificial Sequence
  Description of Artificial Sequence: Synthetic oligonucleotide
  Antisense Strand to SEQ ID NO: 467177
uaauguacaccaaucaaua

SEQ ID NO: 467179 - RNA, 19 nt, Artificial Sequence
  Description of Artificial Sequence: Synthetic oligonucleotide
  Sense strand starting at position 3580 of SEQ ID NO: 317136
uugauugguguacauuauu

SEQ ID NO: 467180 - RNA, 19 nt, Artificial Sequence
  Description of Artificial Sequence: Synthetic oligonucleotide
  Antisense Strand to SEQ ID NO: 467179
aauaauguacaccaaucaa

SEQ ID NO: 467181 - RNA, 19 nt, Artificial Sequence
  Description of Artificial Sequence: Synthetic oligonucleotide
  Sense strand starting at position 3585 of SEQ ID NO: 317136
ugguguacauuauuuguca

SEQ ID NO: 467182 - RNA, 19 nt, Artificial Sequence
  Description of Artificial Sequence: Synthetic oligonucleotide
  Antisense Strand to SEQ ID NO: 467181
ugacaaauaauguacacca

SEQ ID NO: 467183 - RNA, 19 nt, Artificial Sequence
  Description of Artificial Sequence: Synthetic oligonucleotide
  Sense strand starting at position 3737 of SEQ ID NO: 317136
gugucucugggccagauaa

SEQ ID NO: 467184 - RNA, 19 nt, Artificial Sequence
  Description of Artificial Sequence: Synthetic oligonucleotide
  Antisense Strand to SEQ ID NO: 467183
uuaucuggcccagagacac

SEQ ID NO: 467185 - RNA, 19 nt, Artificial Sequence
  Description of Artificial Sequence: Synthetic oligonucleotide
  Sense strand starting at position 3739 of SEQ ID NO: 317136
gucucugggccagauaauc

SEQ ID NO: 467186 - RNA, 19 nt, Artificial Sequence
  Description of Artificial Sequence: Synthetic oligonucleotide
  Antisense Strand to SEQ ID NO: 467185
gauuaucuggcccagagac

SEQ ID NO: 467187 - RNA, 19 nt, Artificial Sequence
  Description of Artificial Sequence: Synthetic oligonucleotide
  Sense strand starting at position 3747 of SEQ ID NO: 317136
gccagauaaucuuugagaa

SEQ ID NO: 467188 - RNA, 19 nt, Artificial Sequence
  Description of Artificial Sequence: Synthetic oligonucleotide
  Antisense Strand to SEQ ID NO: 467187
uucucaaagauuaucuggc

SEQ ID NO: 467189 - RNA, 19 nt, Artificial Sequence
  Description of Artificial Sequence: Synthetic oligonucleotide
  Sense strand starting at position 3759 of SEQ ID NO: 317136
uugagaaucccacauagcu

SEQ ID NO: 467190 - RNA, 19 nt, Artificial Sequence
  Description of Artificial Sequence: Synthetic oligonucleotide
  Antisense Strand to SEQ ID NO: 467189
agcuaugugggauucucaa

SEQ ID NO: 467191 - RNA, 19 nt, Artificial Sequence
  Description of Artificial Sequence: Synthetic oligonucleotide
  Sense strand starting at position 3768 of SEQ ID NO: 317136
ccacauagcuccggcuauu

SEQ ID NO: 467192 - RNA, 19 nt, Artificial Sequence
  Description of Artificial Sequence: Synthetic oligonucleotide
  Antisense Strand to SEQ ID NO: 467191
aauagccggagcuaugugg

SEQ ID NO: 467193 - RNA, 19 nt, Artificial Sequence
  Description of Artificial Sequence: Synthetic oligonucleotide
  Sense strand starting at position 3792 of SEQ ID NO: 317136
uuucucauuucucguguuu

SEQ ID NO: 467194 - RNA, 19 nt, Artificial Sequence
  Description of Artificial Sequence: Synthetic oligonucleotide
  Antisense Strand to SEQ ID NO: 467193
aaacacgagaaaugagaaa

SEQ ID NO: 467195 - RNA, 19 nt, Artificial Sequence
  Description of Artificial Sequence: Synthetic oligonucleotide
  Sense strand starting at position 3794 of SEQ ID NO: 317136
ucucauuucucguguuuga

SEQ ID NO: 467196 - RNA, 19 nt, Artificial Sequence
  Description of Artificial Sequence: Synthetic oligonucleotide
  Antisense Strand to SEQ ID NO: 467195
ucaaacacgagaaaugaga

SEQ ID NO: 467197 - RNA, 19 nt, Artificial Sequence
  Description of Artificial Sequence: Synthetic oligonucleotide
  Sense strand starting at position 3797 of SEQ ID NO: 317136
cauuucucguguuugauca

SEQ ID NO: 467198 - RNA, 19 nt, Artificial Sequence
  Description of Artificial Sequence: Synthetic oligonucleotide
  Antisense Strand to SEQ ID NO: 467197
ugaucaaacacgagaaaug

SEQ ID NO: 467199 - RNA, 19 nt, Artificial Sequence
  Description of Artificial Sequence: Synthetic oligonucleotide
  Sense strand starting at position 3798 of SEQ ID NO: 317136
auuucucguguuugaucaa

SEQ ID NO: 467200 - RNA, 19 nt, Artificial Sequence
  Description of Artificial Sequence: Synthetic oligonucleotide
  Antisense Strand to SEQ ID NO: 467199
uugaucaaacacgagaaau

SEQ ID NO: 467201 - RNA, 19 nt, Artificial Sequence
  Description of Artificial Sequence: Synthetic oligonucleotide
  Sense strand starting at position 3799 of SEQ ID NO: 317136
uuucucguguuugaucaaa

SEQ ID NO: 467202 - RNA, 19 nt, Artificial Sequence
  Description of Artificial Sequence: Synthetic oligonucleotide
  Antisense Strand to SEQ ID NO: 467201
uuugaucaaacacgagaaa

SEQ ID NO: 467203 - RNA, 19 nt, Artificial Sequence
  Description of Artificial Sequence: Synthetic oligonucleotide
  Sense strand starting at position 3827 of SEQ ID NO: 317136
uucucaaagcagugaugau

SEQ ID NO: 467204 - RNA, 19 nt, Artificial Sequence
  Description of Artificial Sequence: Synthetic oligonucleotide
  Antisense Strand to SEQ ID NO: 467203
aucaucacugcuuugagaa

SEQ ID NO: 467205 - RNA, 19 nt, Artificial Sequence
  Description of Artificial Sequence: Synthetic oligonucleotide
  Sense strand starting at position 3834 of SEQ ID NO: 317136
agcagugaugaucgacauu

SEQ ID NO: 467206 - RNA, 19 nt, Artificial Sequence
  Description of Artificial Sequence: Synthetic oligonucleotide
  Antisense Strand to SEQ ID NO: 467205
aaugucgaucaucacugcu

SEQ ID NO: 467207 - RNA, 19 nt, Artificial Sequence
  Description of Artificial Sequence: Synthetic oligonucleotide
  Sense strand starting at position 3837 of SEQ ID NO: 317136
agugaugaucgacauucua

SEQ ID NO: 467208 - RNA, 19 nt, Artificial Sequence
  Description of Artificial Sequence: Synthetic oligonucleotide
  Antisense Strand to SEQ ID NO: 467207
uagaaugucgaucaucacu

SEQ ID NO: 467209 - RNA, 19 nt, Artificial Sequence
  Description of Artificial Sequence: Synthetic oligonucleotide
  Sense strand starting at position 3844 of SEQ ID NO: 317136
aucgacauucuagauguaa

SEQ ID NO: 467210 - RNA, 19 nt, Artificial Sequence
  Description of Artificial Sequence: Synthetic oligonucleotide
  Antisense Strand to SEQ ID NO: 467209
uuacaucuagaaugucgau

SEQ ID NO: 467211 - RNA, 19 nt, Artificial Sequence
  Description of Artificial Sequence: Synthetic oligonucleotide
  Sense strand starting at position 3846 of SEQ ID NO: 317136
cgacauucuagauguaagu

SEQ ID NO: 467212 - RNA, 19 nt, Artificial Sequence
  Description of Artificial Sequence: Synthetic oligonucleotide
  Antisense Strand to SEQ ID NO: 467211
acuuacaucuagaaugucg

SEQ ID NO: 467213 - RNA, 19 nt, Artificial Sequence
  Description of Artificial Sequence: Synthetic oligonucleotide
  Sense strand starting at position 3927 of SEQ ID NO: 317136
ugcggugggcgcuuaagaa

SEQ ID NO: 467214 - RNA, 19 nt, Artificial Sequence
  Description of Artificial Sequence: Synthetic oligonucleotide
  Antisense Strand to SEQ ID NO: 467213
uucuuaagcgcccaccgca

SEQ ID NO: 467215 - RNA, 19 nt, Artificial Sequence
  Description of Artificial Sequence: Synthetic oligonucleotide
  Sense strand starting at position 28 of SEQ ID NO: 317137
augcuaccuugguccauau

SEQ ID NO: 467216 - RNA, 19 nt, Artificial Sequence
  Description of Artificial Sequence: Synthetic oligonucleotide
  Antisense Strand to SEQ ID NO: 467215
auauggaccaagguagcau

SEQ ID NO: 467217 - RNA, 19 nt, Artificial Sequence
  Description of Artificial Sequence: Synthetic oligonucleotide
  Sense strand starting at position 38 of SEQ ID NO: 317137
gguccauauguauagcaaa

SEQ ID NO: 467218 - RNA, 19 nt, Artificial Sequence
  Description of Artificial Sequence: Synthetic oligonucleotide
  Antisense Strand to SEQ ID NO: 467217
uuugcuauacauauggacc

SEQ ID NO: 467219 - RNA, 19 nt, Artificial Sequence
  Description of Artificial Sequence: Synthetic oligonucleotide
  Sense strand starting at position 93 of SEQ ID NO: 317137
gaaagaagucuuugcuaag

SEQ ID NO: 467220 - RNA, 19 nt, Artificial Sequence
  Description of Artificial Sequence: Synthetic oligonucleotide
  Antisense Strand to SEQ ID NO: 467219
cuuagcaaagacuucuuuc

SEQ ID NO: 467221 - RNA, 19 nt, Artificial Sequence
  Description of Artificial Sequence: Synthetic oligonucleotide
  Sense strand starting at position 94 of SEQ ID NO: 317137
aaagaagucuuugcuaagu

SEQ ID NO: 467222 - RNA, 19 nt, Artificial Sequence
  Description of Artificial Sequence: Synthetic oligonucleotide
  Antisense Strand to SEQ ID NO: 467221
acuuagcaaagacuucuuu

SEQ ID NO: 467223 - RNA, 19 nt, Artificial Sequence
  Description of Artificial Sequence: Synthetic oligonucleotide
  Sense strand starting at position 176 of SEQ ID NO: 317137
cugguuuaaagaggucauu

SEQ ID NO: 467224 - RNA, 19 nt, Artificial Sequence
  Description of Artificial Sequence: Synthetic oligonucleotide
  Antisense Strand to SEQ ID NO: 467223
aaugaccucuuuaaaccag

SEQ ID NO: 467225 - RNA, 19 nt, Artificial Sequence
  Description of Artificial Sequence: Synthetic oligonucleotide
  Sense strand starting at position 665 of SEQ ID NO: 317137
ugaugaaagcacuagccau

SEQ ID NO: 467226 - RNA, 19 nt, Artificial Sequence
  Description of Artificial Sequence: Synthetic oligonucleotide
  Antisense Strand to SEQ ID NO: 467225
auggcuagugcuuucauca

SEQ ID NO: 467227 - RNA, 19 nt, Artificial Sequence
  Description of Artificial Sequence: Synthetic oligonucleotide
  Sense strand starting at position 747 of SEQ ID NO: 317137
gcaaucaauuugcaugaau

SEQ ID NO: 467228 - RNA, 19 nt, Artificial Sequence
  Description of Artificial Sequence: Synthetic oligonucleotide
  Antisense Strand to SEQ ID NO: 467227
auucaugcaaauugauugc

SEQ ID NO: 467229 - RNA, 19 nt, Artificial Sequence
  Description of Artificial Sequence: Synthetic oligonucleotide
  Sense strand starting at position 869 of SEQ ID NO: 317137
guaccaguacguuacaaau

SEQ ID NO: 467230 - RNA, 19 nt, Artificial Sequence
  Description of Artificial Sequence: Synthetic oligonucleotide
  Antisense Strand to SEQ ID NO: 467229
auuuguaacguacugguac

SEQ ID NO: 467231 - RNA, 19 nt, Artificial Sequence
  Description of Artificial Sequence: Synthetic oligonucleotide
  Sense strand starting at position 953 of SEQ ID NO: 317137
accagcaguuucuuuauga

SEQ ID NO: 467232 - RNA, 19 nt, Artificial Sequence
  Description of Artificial Sequence: Synthetic oligonucleotide
  Antisense Strand to SEQ ID NO: 467231
ucauaaagaaacugcuggu

SEQ ID NO: 467233 - RNA, 19 nt, Artificial Sequence
  Description of Artificial Sequence: Synthetic oligonucleotide
  Sense strand starting at position 954 of SEQ ID NO: 317137
ccagcaguuucuuuaugag

SEQ ID NO: 467234 - RNA, 19 nt, Artificial Sequence
  Description of Artificial Sequence: Synthetic oligonucleotide
  Antisense Strand to SEQ ID NO: 467233
cucauaaagaaacugcugg

SEQ ID NO: 467235 - RNA, 19 nt, Artificial Sequence
  Description of Artificial Sequence: Synthetic oligonucleotide
  Sense strand starting at position 1008 of SEQ ID NO: 317137
cugugauguuuacucacaa

SEQ ID NO: 467236 - RNA, 19 nt, Artificial Sequence
  Description of Artificial Sequence: Synthetic oligonucleotide
  Antisense Strand to SEQ ID NO: 467235
uugugaguaaacaucacag

SEQ ID NO: 467237 - RNA, 19 nt, Artificial Sequence
  Description of Artificial Sequence: Synthetic oligonucleotide
  Sense strand starting at position 1009 of SEQ ID NO: 317137
ugugauguuuacucacaau

SEQ ID NO: 467238 - RNA, 19 nt, Artificial Sequence
  Description of Artificial Sequence: Synthetic oligonucleotide
  Antisense Strand to SEQ ID NO: 467237
auugugaguaaacaucaca

SEQ ID NO: 467239 - RNA, 19 nt, Artificial Sequence
  Description of Artificial Sequence: Synthetic oligonucleotide
  Sense strand starting at position 1070 of SEQ ID NO: 317137
guucuauucuucucaaggu

SEQ ID NO: 467240 - RNA, 19 nt, Artificial Sequence
  Description of Artificial Sequence: Synthetic oligonucleotide
  Antisense Strand to SEQ ID NO: 467239
accuugagaagaauagaac

SEQ ID NO: 467241 - RNA, 19 nt, Artificial Sequence
  Description of Artificial Sequence: Synthetic oligonucleotide
  Sense strand starting at position 1192 of SEQ ID NO: 317137
guagaaucauuugauguuc

SEQ ID NO: 467242 - RNA, 19 nt, Artificial Sequence
  Description of Artificial Sequence: Synthetic oligonucleotide
  Antisense Strand to SEQ ID NO: 467241
gaacaucaaaugauucuac

SEQ ID NO: 467243 - RNA, 19 nt, Artificial Sequence
  Description of Artificial Sequence: Synthetic oligonucleotide
  Sense strand starting at position 1299 of SEQ ID NO: 317137
cucgguggucguaaauguu

SEQ ID NO: 467244 - RNA, 19 nt, Artificial Sequence
  Description of Artificial Sequence: Synthetic oligonucleotide
  Antisense Strand to SEQ ID NO: 467243
aacauuuacgaccaccgag

SEQ ID NO: 467245 - RNA, 19 nt, Artificial Sequence
  Description of Artificial Sequence: Synthetic oligonucleotide
  Sense strand starting at position 1460 of SEQ ID NO: 317137
ucggguaagucccugacuu

SEQ ID NO: 467246 - RNA, 19 nt, Artificial Sequence
  Description of Artificial Sequence: Synthetic oligonucleotide
  Antisense Strand to SEQ ID NO: 467245
aagucagggacuuacccga

SEQ ID NO: 467247 - RNA, 19 nt, Artificial Sequence
  Description of Artificial Sequence: Synthetic oligonucleotide
  Sense strand starting at position 1462 of SEQ ID NO: 317137
ggguaagucccugacuucu

SEQ ID NO: 467248 - RNA, 19 nt, Artificial Sequence
  Description of Artificial Sequence: Synthetic oligonucleotide
  Antisense Strand to SEQ ID NO: 467247
agaagucagggacuuaccc

SEQ ID NO: 467249 - RNA, 19 nt, Artificial Sequence
  Description of Artificial Sequence: Synthetic oligonucleotide
  Sense strand starting at position 1470 of SEQ ID NO: 317137
cccugacuucuccgaaccu

SEQ ID NO: 467250 - RNA, 19 nt, Artificial Sequence
  Description of Artificial Sequence: Synthetic oligonucleotide
  Antisense Strand to SEQ ID NO: 467249
agguucggagaagucaggg

SEQ ID NO: 467251 - RNA, 19 nt, Artificial Sequence
  Description of Artificial Sequence: Synthetic oligonucleotide
  Sense strand starting at position 1487 of SEQ ID NO: 317137
cucagaucccuaugaagug

SEQ ID NO: 467252 - RNA, 19 nt, Artificial Sequence
  Description of Artificial Sequence: Synthetic oligonucleotide
  Antisense Strand to SEQ ID NO: 467251
cacuucauagggaucugag

SEQ ID NO: 467253 - RNA, 19 nt, Artificial Sequence
  Description of Artificial Sequence: Synthetic oligonucleotide
  Sense strand starting at position 2195 of SEQ ID NO: 317137
gagaucugccgaggauaac

SEQ ID NO: 467254 - RNA, 19 nt, Artificial Sequence
  Description of Artificial Sequence: Synthetic oligonucleotide
  Antisense Strand to SEQ ID NO: 467253
guuauccucggcagaucuc

SEQ ID NO: 467255 - RNA, 19 nt, Artificial Sequence
  Description of Artificial Sequence: Synthetic oligonucleotide
  Sense strand starting at position 2493 of SEQ ID NO: 317137
gcugcugccguuucuagau

SEQ ID NO: 467256 - RNA, 19 nt, Artificial Sequence
  Description of Artificial Sequence: Synthetic oligonucleotide
  Antisense Strand to SEQ ID NO: 467255
aucuagaaacggcagcagc

SEQ ID NO: 467257 - RNA, 19 nt, Artificial Sequence
  Description of Artificial Sequence: Synthetic oligonucleotide
  Sense strand starting at position 2543 of SEQ ID NO: 317137
gcauaaggacaguguauua

SEQ ID NO: 467258 - RNA, 19 nt, Artificial Sequence
  Description of Artificial Sequence: Synthetic oligonucleotide
  Antisense Strand to SEQ ID NO: 467257
uaauacacuguccuuaugc

SEQ ID NO: 467259 - RNA, 19 nt, Artificial Sequence
  Description of Artificial Sequence: Synthetic oligonucleotide
  Sense strand starting at position 2586 of SEQ ID NO: 317137
ggucuuucggguagugguu

SEQ ID NO: 467260 - RNA, 19 nt, Artificial Sequence
  Description of Artificial Sequence: Synthetic oligonucleotide
  Antisense Strand to SEQ ID NO: 467259
aaccacuacccgaaagacc

SEQ ID NO: 467261 - RNA, 19 nt, Artificial Sequence
  Description of Artificial Sequence: Synthetic oligonucleotide
  Sense strand starting at position 2658 of SEQ ID NO: 317137
gacagaacuucuguuggau

SEQ ID NO: 467262 - RNA, 19 nt, Artificial Sequence
  Description of Artificial Sequence: Synthetic oligonucleotide
  Antisense Strand to SEQ ID NO: 467261
auccaacagaaguucuguc

SEQ ID NO: 467263 - RNA, 19 nt, Artificial Sequence
  Description of Artificial Sequence: Synthetic oligonucleotide
  Sense strand starting at position 2754 of SEQ ID NO: 317137
uugagcugguauucugaua

SEQ ID NO: 467264 - RNA, 19 nt, Artificial Sequence
  Description of Artificial Sequence: Synthetic oligonucleotide
  Antisense Strand to SEQ ID NO: 467263
uaucagaauaccagcucaa

SEQ ID NO: 467265 - RNA, 19 nt, Artificial Sequence
  Description of Artificial Sequence: Synthetic oligonucleotide
  Sense strand starting at position 2854 of SEQ ID NO: 317137
aaggaucuguaucagaaag

SEQ ID NO: 467266 - RNA, 19 nt, Artificial Sequence
  Description of Artificial Sequence: Synthetic oligonucleotide
  Antisense Strand to SEQ ID NO: 467265
cuuucugauacagauccuu

SEQ ID NO: 467267 - RNA, 19 nt, Artificial Sequence
  Description of Artificial Sequence: Synthetic oligonucleotide
  Sense strand starting at position 2903 of SEQ ID NO: 317137
gggagaucuuaucugcaua

SEQ ID NO: 467268 - RNA, 19 nt, Artificial Sequence
  Description of Artificial Sequence: Synthetic oligonucleotide
  Antisense Strand to SEQ ID NO: 467267
uaugcagauaagaucuccc

SEQ ID NO: 467269 - RNA, 19 nt, Artificial Sequence
  Description of Artificial Sequence: Synthetic oligonucleotide
  Sense strand starting at position 3008 of SEQ ID NO: 317137
ccauuucuugaguagcgua

SEQ ID NO: 467270 - RNA, 19 nt, Artificial Sequence
  Description of Artificial Sequence: Synthetic oligonucleotide
  Antisense Strand to SEQ ID NO: 467269
uacgcuacucaagaaaugg

SEQ ID NO: 467271 - RNA, 19 nt, Artificial Sequence
  Description of Artificial Sequence: Synthetic oligonucleotide
  Sense strand starting at position 3025 of SEQ ID NO: 317137
uaggaugcuguauaauauu

SEQ ID NO: 467272 - RNA, 19 nt, Artificial Sequence
  Description of Artificial Sequence: Synthetic oligonucleotide
  Antisense Strand to SEQ ID NO: 467271
aauauuauacagcauccua

SEQ ID NO: 467273 - RNA, 19 nt, Artificial Sequence
  Description of Artificial Sequence: Synthetic oligonucleotide
  Sense strand starting at position 3064 of SEQ ID NO: 317137
gacuccucugcguauguaa

SEQ ID NO: 467274 - RNA, 19 nt, Artificial Sequence
  Description of Artificial Sequence: Synthetic oligonucleotide
  Antisense Strand to SEQ ID NO: 467273
uuacauacgcagaggaguc

SEQ ID NO: 467275 - RNA, 19 nt, Artificial Sequence
  Description of Artificial Sequence: Synthetic oligonucleotide
  Sense strand starting at position 3072 of SEQ ID NO: 317137
ugcguauguaauuaaguac

SEQ ID NO: 467276 - RNA, 19 nt, Artificial Sequence
  Description of Artificial Sequence: Synthetic oligonucleotide
  Antisense Strand to SEQ ID NO: 467275
guacuuaauuacauacgca

SEQ ID NO: 467277 - RNA, 19 nt, Artificial Sequence
  Description of Artificial Sequence: Synthetic oligonucleotide
  Sense strand starting at position 3102 of SEQ ID NO: 317137
cuuguuaaugucuauguca

SEQ ID NO: 467278 - RNA, 19 nt, Artificial Sequence
  Description of Artificial Sequence: Synthetic oligonucleotide
  Antisense Strand to SEQ ID NO: 467277
ugacauagacauuaacaag

SEQ ID NO: 467279 - RNA, 19 nt, Artificial Sequence
  Description of Artificial Sequence: Synthetic oligonucleotide
  Sense strand starting at position 3545 of SEQ ID NO: 317137
ucguuuacugcucacaaac

SEQ ID NO: 467280 - RNA, 19 nt, Artificial Sequence
  Description of Artificial Sequence: Synthetic oligonucleotide
  Antisense Strand to SEQ ID NO: 467279
guuugugagcaguaaacga

SEQ ID NO: 467281 - RNA, 19 nt, Artificial Sequence
  Description of Artificial Sequence: Synthetic oligonucleotide
  Sense strand starting at position 3564 of SEQ ID NO: 317137
ccuguaggauaacuuugau

SEQ ID NO: 467282 - RNA, 19 nt, Artificial Sequence
  Description of Artificial Sequence: Synthetic oligonucleotide
  Antisense Strand to SEQ ID NO: 467281
aucaaaguuauccuacagg

SEQ ID NO: 467283 - RNA, 19 nt, Artificial Sequence
  Description of Artificial Sequence: Synthetic oligonucleotide
  Sense strand starting at position 3567 of SEQ ID NO: 317137
guaggauaacuuugaucuu

SEQ ID NO: 467284 - RNA, 19 nt, Artificial Sequence
  Description of Artificial Sequence: Synthetic oligonucleotide
  Antisense Strand to SEQ ID NO: 467283
aagaucaaaguuauccuac

SEQ ID NO: 467285 - RNA, 19 nt, Artificial Sequence
  Description of Artificial Sequence: Synthetic oligonucleotide
  Sense strand starting at position 3570 of SEQ ID NO: 317137
ggauaacuuugaucuucuu

SEQ ID NO: 467286 - RNA, 19 nt, Artificial Sequence
  Description of Artificial Sequence: Synthetic oligonucleotide
  Antisense Strand to SEQ ID NO: 467285
aagaagaucaaaguuaucc

SEQ ID NO: 467287 - RNA, 19 nt, Artificial Sequence
  Description of Artificial Sequence: Synthetic oligonucleotide
  Sense strand starting at position 3621 of SEQ ID NO: 317137
gcuauaguacuccauugua

SEQ ID NO: 467288 - RNA, 19 nt, Artificial Sequence
  Description of Artificial Sequence: Synthetic oligonucleotide
  Antisense Strand to SEQ ID NO: 467287
uacaauggaguacuauagc

SEQ ID NO: 467289 - RNA, 19 nt, Artificial Sequence
  Description of Artificial Sequence: Synthetic oligonucleotide
  Sense strand starting at position 3702 of SEQ ID NO: 317137
gcuaguuaagaauguggua

SEQ ID NO: 467290 - RNA, 19 nt, Artificial Sequence
  Description of Artificial Sequence: Synthetic oligonucleotide
  Antisense Strand to SEQ ID NO: 467289
uaccacauucuuaacuagc

SEQ ID NO: 467291 - RNA, 19 nt, Artificial Sequence
  Description of Artificial Sequence: Synthetic oligonucleotide
  Sense strand starting at position 3721 of SEQ ID NO: 317137
acauuuguguugcccauaa

SEQ ID NO: 467292 - RNA, 19 nt, Artificial Sequence
  Description of Artificial Sequence: Synthetic oligonucleotide
  Antisense Strand to SEQ ID NO: 467291
uuaugggcaacacaaaugu

SEQ ID NO: 467293 - RNA, 19 nt, Artificial Sequence
  Description of Artificial Sequence: Synthetic oligonucleotide
  Sense strand starting at position 3742 of SEQ ID NO: 317137
uugcuuugugacguuucua

SEQ ID NO: 467294 - RNA, 19 nt, Artificial Sequence
  Description of Artificial Sequence: Synthetic oligonucleotide
  Antisense Strand to SEQ ID NO: 467293
uagaaacgucacaaagcaa

SEQ ID NO: 467295 - RNA, 19 nt, Artificial Sequence
  Description of Artificial Sequence: Synthetic oligonucleotide
  Sense strand starting at position 1 of SEQ ID NO: 317138
gagauucccuccgucagaa

SEQ ID NO: 467296 - RNA, 19 nt, Artificial Sequence
  Description of Artificial Sequence: Synthetic oligonucleotide
  Antisense Strand to SEQ ID NO: 467295
uucugacggagggaaucuc

SEQ ID NO: 467297 - RNA, 19 nt, Artificial Sequence
  Description of Artificial Sequence: Synthetic oligonucleotide
  Sense strand starting at position 126 of SEQ ID NO: 317138
cuuugugauuuagcgggau

SEQ ID NO: 467298 - RNA, 19 nt, Artificial Sequence
  Description of Artificial Sequence: Synthetic oligonucleotide
  Antisense Strand to SEQ ID NO: 467297
aucccgcuaaaucacaaag

SEQ ID NO: 467299 - RNA, 19 nt, Artificial Sequence
  Description of Artificial Sequence: Synthetic oligonucleotide
  Sense strand starting at position 129 of SEQ ID NO: 317138
ugugauuuagcgggaucga

SEQ ID NO: 467300 - RNA, 19 nt, Artificial Sequence
  Description of Artificial Sequence: Synthetic oligonucleotide
  Antisense Strand to SEQ ID NO: 467299
ucgaucccgcuaaaucaca

SEQ ID NO: 467301 - RNA, 19 nt, Artificial Sequence
  Description of Artificial Sequence: Synthetic oligonucleotide
  Sense strand starting at position 138 of SEQ ID NO: 317138
gcgggaucgacagaugaga

SEQ ID NO: 467302 - RNA, 19 nt, Artificial Sequence
  Description of Artificial Sequence: Synthetic oligonucleotide
  Antisense Strand to SEQ ID NO: 467301
ucucaucugucgaucccgc

SEQ ID NO: 467303 - RNA, 19 nt, Artificial Sequence
  Description of Artificial Sequence: Synthetic oligonucleotide
  Sense strand starting at position 616 of SEQ ID NO: 317138
cggcgacuccgcucaguua

SEQ ID NO: 467304 - RNA, 19 nt, Artificial Sequence
  Description of Artificial Sequence: Synthetic oligonucleotide
  Antisense Strand to SEQ ID NO: 467303
uaacugagcggagucgccg

SEQ ID NO: 467305 - RNA, 19 nt, Artificial Sequence
  Description of Artificial Sequence: Synthetic oligonucleotide
  Sense strand starting at position 742 of SEQ ID NO: 317138
cucugcucuccggaagaaa

SEQ ID NO: 467306 - RNA, 19 nt, Artificial Sequence
  Description of Artificial Sequence: Synthetic oligonucleotide
  Antisense Strand to SEQ ID NO: 467305
uuucuuccggagagcagag

SEQ ID NO: 467307 - RNA, 19 nt, Artificial Sequence
  Description of Artificial Sequence: Synthetic oligonucleotide
  Sense strand starting at position 1060 of SEQ ID NO: 317138
aaaguaaguguccaggcua

SEQ ID NO: 467308 - RNA, 19 nt, Artificial Sequence
  Description of Artificial Sequence: Synthetic oligonucleotide
  Antisense Strand to SEQ ID NO: 467307
uagccuggacacuuacuuu

SEQ ID NO: 467309 - RNA, 19 nt, Artificial Sequence
  Description of Artificial Sequence: Synthetic oligonucleotide
  Sense strand starting at position 1073 of SEQ ID NO: 317138
aggcuaaguccgggauaaa

SEQ ID NO: 467310 - RNA, 19 nt, Artificial Sequence
  Description of Artificial Sequence: Synthetic oligonucleotide
  Antisense Strand to SEQ ID NO: 467309
uuuaucccggacuuagccu

SEQ ID NO: 467311 - RNA, 19 nt, Artificial Sequence
  Description of Artificial Sequence: Synthetic oligonucleotide
  Sense strand starting at position 1074 of SEQ ID NO: 317138
ggcuaaguccgggauaaag

SEQ ID NO: 467312 - RNA, 19 nt, Artificial Sequence
  Description of Artificial Sequence: Synthetic oligonucleotide
  Antisense Strand to SEQ ID NO: 467311
cuuuaucccggacuuagcc

SEQ ID NO: 467313 - RNA, 19 nt, Artificial Sequence
  Description of Artificial Sequence: Synthetic oligonucleotide
  Sense strand starting at position 1528 of SEQ ID NO: 317138
uguggugugcgaaauaguc

SEQ ID NO: 467314 - RNA, 19 nt, Artificial Sequence
  Description of Artificial Sequence: Synthetic oligonucleotide
  Antisense Strand to SEQ ID NO: 467313
gacuauuucgcacaccaca

SEQ ID NO: 467315 - RNA, 19 nt, Artificial Sequence
  Description of Artificial Sequence: Synthetic oligonucleotide
  Sense strand starting at position 2015 of SEQ ID NO: 317138
uguguguucgcucccgagu

SEQ ID NO: 467316 - RNA, 19 nt, Artificial Sequence
  Description of Artificial Sequence: Synthetic oligonucleotide
  Antisense Strand to SEQ ID NO: 467315
acucgggagcgaacacaca

SEQ ID NO: 467317 - RNA, 19 nt, Artificial Sequence
  Description of Artificial Sequence: Synthetic oligonucleotide
  Sense strand starting at position 2533 of SEQ ID NO: 317138
guguuaaauccagaagguu

SEQ ID NO: 467318 - RNA, 19 nt, Artificial Sequence
  Description of Artificial Sequence: Synthetic oligonucleotide
  Antisense Strand to SEQ ID NO: 467317
aaccuucuggauuuaacac

SEQ ID NO: 467319 - RNA, 19 nt, Artificial Sequence
  Description of Artificial Sequence: Synthetic oligonucleotide
  Sense strand starting at position 2750 of SEQ ID NO: 317138
gugugaagccauuaaggcu

SEQ ID NO: 467320 - RNA, 19 nt, Artificial Sequence
  Description of Artificial Sequence: Synthetic oligonucleotide
  Antisense Strand to SEQ ID NO: 467319
agccuuaauggcuucacac

SEQ ID NO: 467321 - RNA, 19 nt, Artificial Sequence
  Description of Artificial Sequence: Synthetic oligonucleotide
  Sense strand starting at position 2762 of SEQ ID NO: 317138
uaaggcugacuagguaauu

SEQ ID NO: 467322 - RNA, 19 nt, Artificial Sequence
  Description of Artificial Sequence: Synthetic oligonucleotide
  Antisense Strand to SEQ ID NO: 467321
aauuaccuagucagccuua

SEQ ID NO: 467323 - RNA, 19 nt, Artificial Sequence
  Description of Artificial Sequence: Synthetic oligonucleotide
  Sense strand starting at position 2763 of SEQ ID NO: 317138
aaggcugacuagguaauua

SEQ ID NO: 467324 - RNA, 19 nt, Artificial Sequence
  Description of Artificial Sequence: Synthetic oligonucleotide
  Antisense Strand to SEQ ID NO: 467323
uaauuaccuagucagccuu

SEQ ID NO: 467325 - RNA, 19 nt, Artificial Sequence
  Description of Artificial Sequence: Synthetic oligonucleotide
  Sense strand starting at position 2767 of SEQ ID NO: 317138
cugacuagguaauuaugau

SEQ ID NO: 467326 - RNA, 19 nt, Artificial Sequence
  Description of Artificial Sequence: Synthetic oligonucleotide
  Antisense Strand to SEQ ID NO: 467325
aucauaauuaccuagucag

SEQ ID NO: 467327 - RNA, 19 nt, Artificial Sequence
  Description of Artificial Sequence: Synthetic oligonucleotide
  Sense strand starting at position 2941 of SEQ ID NO: 317138
gauauagugucaguauuga

SEQ ID NO: 467328 - RNA, 19 nt, Artificial Sequence
  Description of Artificial Sequence: Synthetic oligonucleotide
  Antisense Strand to SEQ ID NO: 467327
ucaauacugacacuauauc

SEQ ID NO: 467329 - RNA, 19 nt, Artificial Sequence
  Description of Artificial Sequence: Synthetic oligonucleotide
  Sense strand starting at position 2971 of SEQ ID NO: 317138
cuguuauugccacaaugaa

SEQ ID NO: 467330 - RNA, 19 nt, Artificial Sequence
  Description of Artificial Sequence: Synthetic oligonucleotide
  Antisense Strand to SEQ ID NO: 467329
uucauuguggcaauaacag

SEQ ID NO: 467331 - RNA, 19 nt, Artificial Sequence
  Description of Artificial Sequence: Synthetic oligonucleotide
  Sense strand starting at position 3016 of SEQ ID NO: 317138
ccuuaucccggucauauua

SEQ ID NO: 467332 - RNA, 19 nt, Artificial Sequence
  Description of Artificial Sequence: Synthetic oligonucleotide
  Antisense Strand to SEQ ID NO: 467331
uaauaugaccgggauaagg

SEQ ID NO: 467333 - RNA, 19 nt, Artificial Sequence
  Description of Artificial Sequence: Synthetic oligonucleotide
  Sense strand starting at position 3054 of SEQ ID NO: 317138
cuaaacaguuggucacaga

SEQ ID NO: 467334 - RNA, 19 nt, Artificial Sequence
  Description of Artificial Sequence: Synthetic oligonucleotide
  Antisense Strand to SEQ ID NO: 467333
ucugugaccaacuguuuag

SEQ ID NO: 467335 - RNA, 19 nt, Artificial Sequence
  Description of Artificial Sequence: Synthetic oligonucleotide
  Sense strand starting at position 3143 of SEQ ID NO: 317138
aaccguuuacacgacauaa

SEQ ID NO: 467336 - RNA, 19 nt, Artificial Sequence
  Description of Artificial Sequence: Synthetic oligonucleotide
  Antisense Strand to SEQ ID NO: 467335
uuaugucguguaaacgguu

SEQ ID NO: 467337 - RNA, 19 nt, Artificial Sequence
  Description of Artificial Sequence: Synthetic oligonucleotide
  Sense strand starting at position 3291 of SEQ ID NO: 317138
agcagaucccugggucauu

SEQ ID NO: 467338 - RNA, 19 nt, Artificial Sequence
  Description of Artificial Sequence: Synthetic oligonucleotide
  Antisense Strand to SEQ ID NO: 467337
aaugacccagggaucugcu

SEQ ID NO: 467339 - RNA, 19 nt, Artificial Sequence
  Description of Artificial Sequence: Synthetic oligonucleotide
  Sense strand starting at position 3338 of SEQ ID NO: 317138
guguaccagguaugucuua

SEQ ID NO: 467340 - RNA, 19 nt, Artificial Sequence
  Description of Artificial Sequence: Synthetic oligonucleotide
  Antisense Strand to SEQ ID NO: 467339
uaagacauaccugguacac

SEQ ID NO: 467341 - RNA, 19 nt, Artificial Sequence
  Description of Artificial Sequence: Synthetic oligonucleotide
  Sense strand starting at position 3348 of SEQ ID NO: 317138
uaugucuuaugugcugaga

SEQ ID NO: 467342 - RNA, 19 nt, Artificial Sequence
  Description of Artificial Sequence: Synthetic oligonucleotide
  Antisense Strand to SEQ ID NO: 467341
ucucagcacauaagacaua

SEQ ID NO: 467343 - RNA, 19 nt, Artificial Sequence
  Description of Artificial Sequence: Synthetic oligonucleotide
  Sense strand starting at position 3359 of SEQ ID NO: 317138
ugcugagauuuagagguga

SEQ ID NO: 467344 - RNA, 19 nt, Artificial Sequence
  Description of Artificial Sequence: Synthetic oligonucleotide
  Antisense Strand to SEQ ID NO: 467343
ucaccucuaaaucucagca

SEQ ID NO: 467345 - RNA, 19 nt, Artificial Sequence
  Description of Artificial Sequence: Synthetic oligonucleotide
  Sense strand starting at position 3378 of SEQ ID NO: 317138
uggugcugccuuuaaggaa

SEQ ID NO: 467346 - RNA, 19 nt, Artificial Sequence
  Description of Artificial Sequence: Synthetic oligonucleotide
  Antisense Strand to SEQ ID NO: 467345
uuccuuaaaggcagcacca

SEQ ID NO: 467347 - RNA, 19 nt, Artificial Sequence
  Description of Artificial Sequence: Synthetic oligonucleotide
  Sense strand starting at position 3435 of SEQ ID NO: 317138
ugugauuagcacuauaaua

SEQ ID NO: 467348 - RNA, 19 nt, Artificial Sequence
  Description of Artificial Sequence: Synthetic oligonucleotide
  Antisense Strand to SEQ ID NO: 467347
uauuauagugcuaaucaca

SEQ ID NO: 467349 - RNA, 19 nt, Artificial Sequence
  Description of Artificial Sequence: Synthetic oligonucleotide
  Sense strand starting at position 3508 of SEQ ID NO: 317138
ucagaagcuucucuuggua

SEQ ID NO: 467350 - RNA, 19 nt, Artificial Sequence
  Description of Artificial Sequence: Synthetic oligonucleotide
  Antisense Strand to SEQ ID NO: 467349
uaccaagagaagcuucuga

SEQ ID NO: 467351 - RNA, 19 nt, Artificial Sequence
  Description of Artificial Sequence: Synthetic oligonucleotide
  Sense strand starting at position 3511 of SEQ ID NO: 317138
gaagcuucucuugguagag

SEQ ID NO: 467352 - RNA, 19 nt, Artificial Sequence
  Description of Artificial Sequence: Synthetic oligonucleotide
  Antisense Strand to SEQ ID NO: 467351
cucuaccaagagaagcuuc

SEQ ID NO: 467353 - RNA, 19 nt, Artificial Sequence
  Description of Artificial Sequence: Synthetic oligonucleotide
  Sense strand starting at position 3512 of SEQ ID NO: 317138
aagcuucucuugguagaga

SEQ ID NO: 467354 - RNA, 19 nt, Artificial Sequence
  Description of Artificial Sequence: Synthetic oligonucleotide
  Antisense Strand to SEQ ID NO: 467353
ucucuaccaagagaagcuu

SEQ ID NO: 467355 - RNA, 19 nt, Artificial Sequence
  Description of Artificial Sequence: Synthetic oligonucleotide
  Sense strand starting at position 3627 of SEQ ID NO: 317138
agguuaggaaagugucaaa

SEQ ID NO: 467356 - RNA, 19 nt, Artificial Sequence
  Description of Artificial Sequence: Synthetic oligonucleotide
  Antisense Strand to SEQ ID NO: 467355
uuugacacuuuccuaaccu

SEQ ID NO: 467357 - RNA, 19 nt, Artificial Sequence
  Description of Artificial Sequence: Synthetic oligonucleotide
  Sense strand starting at position 3651 of SEQ ID NO: 317138
ugguguguccuggaaacua

SEQ ID NO: 467358 - RNA, 19 nt, Artificial Sequence
  Description of Artificial Sequence: Synthetic oligonucleotide
  Antisense Strand to SEQ ID NO: 467357
uaguuuccaggacacacca

SEQ ID NO: 467359 - RNA, 19 nt, Artificial Sequence
  Description of Artificial Sequence: Synthetic oligonucleotide
  Sense strand starting at position 3685 of SEQ ID NO: 317138
cuagacugcaggugaagua

SEQ ID NO: 467360 - RNA, 19 nt, Artificial Sequence
  Description of Artificial Sequence: Synthetic oligonucleotide
  Antisense Strand to SEQ ID NO: 467359
uacuucaccugcagucuag

SEQ ID NO: 467361 - RNA, 19 nt, Artificial Sequence
  Description of Artificial Sequence: Synthetic oligonucleotide
  Sense strand starting at position 3721 of SEQ ID NO: 317138
caaggcucucuggguguaa

SEQ ID NO: 467362 - RNA, 19 nt, Artificial Sequence
  Description of Artificial Sequence: Synthetic oligonucleotide
  Antisense Strand to SEQ ID NO: 467361
uuacacccagagagccuug

SEQ ID NO: 467363 - RNA, 19 nt, Artificial Sequence
  Description of Artificial Sequence: Synthetic oligonucleotide
  Sense strand starting at position 3760 of SEQ ID NO: 317138
gguggugaguaguugggaa

SEQ ID NO: 467364 - RNA, 19 nt, Artificial Sequence
  Description of Artificial Sequence: Synthetic oligonucleotide
  Antisense Strand to SEQ ID NO: 467363
uucccaacuacucaccacc

SEQ ID NO: 467365 - RNA, 19 nt, Artificial Sequence
  Description of Artificial Sequence: Synthetic oligonucleotide
  Sense strand starting at position 3788 of SEQ ID NO: 317138
gguguuaagcuaggacaga

SEQ ID NO: 467366 - RNA, 19 nt, Artificial Sequence
  Description of Artificial Sequence: Synthetic oligonucleotide
  Antisense Strand to SEQ ID NO: 467365
ucuguccuagcuuaacacc

SEQ ID NO: 467367 - RNA, 19 nt, Artificial Sequence
  Description of Artificial Sequence: Synthetic oligonucleotide
  Sense strand starting at position 3806 of SEQ ID NO: 317138
auucuaagguuuguaagua

SEQ ID NO: 467368 - RNA, 19 nt, Artificial Sequence
  Description of Artificial Sequence: Synthetic oligonucleotide
  Antisense Strand to SEQ ID NO: 467367
uacuuacaaaccuuagaau

SEQ ID NO: 467369 - RNA, 19 nt, Artificial Sequence
  Description of Artificial Sequence: Synthetic oligonucleotide
  Sense strand starting at position 3845 of SEQ ID NO: 317138
gaagguuuccucugguuuc

SEQ ID NO: 467370 - RNA, 19 nt, Artificial Sequence
  Description of Artificial Sequence: Synthetic oligonucleotide
  Antisense Strand to SEQ ID NO: 467369
gaaaccagaggaaaccuuc

SEQ ID NO: 467371 - RNA, 19 nt, Artificial Sequence
  Description of Artificial Sequence: Synthetic oligonucleotide
  Sense strand starting at position 3884 of SEQ ID NO: 317138
gagagaucacagugagguu

SEQ ID NO: 467372 - RNA, 19 nt, Artificial Sequence
  Description of Artificial Sequence: Synthetic oligonucleotide
  Antisense Strand to SEQ ID NO: 467371
aaccucacugugaucucuc

SEQ ID NO: 467373 - RNA, 19 nt, Artificial Sequence
  Description of Artificial Sequence: Synthetic oligonucleotide
  Sense strand starting at position 3896 of SEQ ID NO: 317138
ugagguuauuuccagagga

SEQ ID NO: 467374 - RNA, 19 nt, Artificial Sequence
  Description of Artificial Sequence: Synthetic oligonucleotide
  Antisense Strand to SEQ ID NO: 467373
uccucuggaaauaaccuca

SEQ ID NO: 467375 - RNA, 19 nt, Artificial Sequence
  Description of Artificial Sequence: Synthetic oligonucleotide
  Sense strand starting at position 112 of SEQ ID NO: 317139
gaagucauauaaucagagu

SEQ ID NO: 467376 - RNA, 19 nt, Artificial Sequence
  Description of Artificial Sequence: Synthetic oligonucleotide
  Antisense Strand to SEQ ID NO: 467375
acucugauuauaugacuuc

SEQ ID NO: 467377 - RNA, 19 nt, Artificial Sequence
  Description of Artificial Sequence: Synthetic oligonucleotide
  Sense strand starting at position 191 of SEQ ID NO: 317139
gguagacaauuacauauuu

SEQ ID NO: 467378 - RNA, 19 nt, Artificial Sequence
  Description of Artificial Sequence: Synthetic oligonucleotide
  Antisense Strand to SEQ ID NO: 467377
aaauauguaauugucuacc

SEQ ID NO: 467379 - RNA, 19 nt, Artificial Sequence
  Description of Artificial Sequence: Synthetic oligonucleotide
  Sense strand starting at position 574 of SEQ ID NO: 317139
ccaucaagaugauaaagaa

SEQ ID NO: 467380 - RNA, 19 nt, Artificial Sequence
  Description of Artificial Sequence: Synthetic oligonucleotide
  Antisense Strand to SEQ ID NO: 467379
uucuuuaucaucuugaugg

SEQ ID NO: 467381 - RNA, 19 nt, Artificial Sequence
  Description of Artificial Sequence: Synthetic oligonucleotide
  Sense strand starting at position 615 of SEQ ID NO: 317139
gguagauacuguguuaacc

SEQ ID NO: 467382 - RNA, 19 nt, Artificial Sequence
  Description of Artificial Sequence: Synthetic oligonucleotide
  Antisense Strand to SEQ ID NO: 467381
gguuaacacaguaucuacc

SEQ ID NO: 467383 - RNA, 19 nt, Artificial Sequence
  Description of Artificial Sequence: Synthetic oligonucleotide
  Sense strand starting at position 661 of SEQ ID NO: 317139
aggcaagccucuuuauaug

SEQ ID NO: 467384 - RNA, 19 nt, Artificial Sequence
  Description of Artificial Sequence: Synthetic oligonucleotide
  Antisense Strand to SEQ ID NO: 467383
cauauaaagaggcuugccu

SEQ ID NO: 467385 - RNA, 19 nt, Artificial Sequence
  Description of Artificial Sequence: Synthetic oligonucleotide
  Sense strand starting at position 802 of SEQ ID NO: 317139
ucggauauucuagaguuuc

SEQ ID NO: 467386 - RNA, 19 nt, Artificial Sequence
  Description of Artificial Sequence: Synthetic oligonucleotide
  Antisense Strand to SEQ ID NO: 467385
gaaacucuagaauauccga

SEQ ID NO: 467387 - RNA, 19 nt, Artificial Sequence
  Description of Artificial Sequence: Synthetic oligonucleotide
  Sense strand starting at position 857 of SEQ ID NO: 317139
auugcucaguaguugauaa

SEQ ID NO: 467388 - RNA, 19 nt, Artificial Sequence
  Description of Artificial Sequence: Synthetic oligonucleotide
  Antisense Strand to SEQ ID NO: 467387
uuaucaacuacugagcaau

SEQ ID NO: 467389 - RNA, 19 nt, Artificial Sequence
  Description of Artificial Sequence: Synthetic oligonucleotide
  Sense strand starting at position 859 of SEQ ID NO: 317139
ugcucaguaguugauaaca

SEQ ID NO: 467390 - RNA, 19 nt, Artificial Sequence
  Description of Artificial Sequence: Synthetic oligonucleotide
  Antisense Strand to SEQ ID NO: 467389
uguuaucaacuacugagca

SEQ ID NO: 467391 - RNA, 19 nt, Artificial Sequence
  Description of Artificial Sequence: Synthetic oligonucleotide
  Sense strand starting at position 979 of SEQ ID NO: 317139
auguauuaagaauguagcu

SEQ ID NO: 467392 - RNA, 19 nt, Artificial Sequence
  Description of Artificial Sequence: Synthetic oligonucleotide
  Antisense Strand to SEQ ID NO: 467391
agcuacauucuuaauacau

SEQ ID NO: 467393 - RNA, 19 nt, Artificial Sequence
  Description of Artificial Sequence: Synthetic oligonucleotide
  Sense strand starting at position 981 of SEQ ID NO: 317139
guauuaagaauguagcugu

SEQ ID NO: 467394 - RNA, 19 nt, Artificial Sequence
  Description of Artificial Sequence: Synthetic oligonucleotide
  Antisense Strand to SEQ ID NO: 467393
acagcuacauucuuaauac

SEQ ID NO: 467395 - RNA, 19 nt, Artificial Sequence
  Description of Artificial Sequence: Synthetic oligonucleotide
  Sense strand starting at position 1000 of SEQ ID NO: 317139
uugcauugucuagaagggu

SEQ ID NO: 467396 - RNA, 19 nt, Artificial Sequence
  Description of Artificial Sequence: Synthetic oligonucleotide
  Antisense Strand to SEQ ID NO: 467395
acccuucuagacaaugcaa

SEQ ID NO: 467397 - RNA, 19 nt, Artificial Sequence
  Description of Artificial Sequence: Synthetic oligonucleotide
  Sense strand starting at position 1362 of SEQ ID NO: 317139
ugaggaucauuacugugua

SEQ ID NO: 467398 - RNA, 19 nt, Artificial Sequence
  Description of Artificial Sequence: Synthetic oligonucleotide
  Antisense Strand to SEQ ID NO: 467397
uacacaguaaugauccuca

SEQ ID NO: 467399 - RNA, 19 nt, Artificial Sequence
  Description of Artificial Sequence: Synthetic oligonucleotide
  Sense strand starting at position 1365 of SEQ ID NO: 317139
ggaucauuacuguguagau

SEQ ID NO: 467400 - RNA, 19 nt, Artificial Sequence
  Description of Artificial Sequence: Synthetic oligonucleotide
  Antisense Strand to SEQ ID NO: 467399
aucuacacaguaaugaucc

SEQ ID NO: 467401 - RNA, 19 nt, Artificial Sequence
  Description of Artificial Sequence: Synthetic oligonucleotide
  Sense strand starting at position 1366 of SEQ ID NO: 317139
gaucauuacuguguagaua

SEQ ID NO: 467402 - RNA, 19 nt, Artificial Sequence
  Description of Artificial Sequence: Synthetic oligonucleotide
  Antisense Strand to SEQ ID NO: 467401
uaucuacacaguaaugauc

SEQ ID NO: 467403 - RNA, 19 nt, Artificial Sequence
  Description of Artificial Sequence: Synthetic oligonucleotide
  Sense strand starting at position 1367 of SEQ ID NO: 317139
aucauuacuguguagauag

SEQ ID NO: 467404 - RNA, 19 nt, Artificial Sequence
  Description of Artificial Sequence: Synthetic oligonucleotide
  Antisense Strand to SEQ ID NO: 467403
cuaucuacacaguaaugau

SEQ ID NO: 467405 - RNA, 19 nt, Artificial Sequence
  Description of Artificial Sequence: Synthetic oligonucleotide
  Sense strand starting at position 1392 of SEQ ID NO: 317139
aguuuaaagucucugauau

SEQ ID NO: 467406 - RNA, 19 nt, Artificial Sequence
  Description of Artificial Sequence: Synthetic oligonucleotide
  Antisense Strand to SEQ ID NO: 467405
auaucagagacuuuaaacu

SEQ ID NO: 467407 - RNA, 19 nt, Artificial Sequence
  Description of Artificial Sequence: Synthetic oligonucleotide
  Sense strand starting at position 1393 of SEQ ID NO: 317139
guuuaaagucucugauauu

SEQ ID NO: 467408 - RNA, 19 nt, Artificial Sequence
  Description of Artificial Sequence: Synthetic oligonucleotide
  Antisense Strand to SEQ ID NO: 467407
aauaucagagacuuuaaac

SEQ ID NO: 467409 - RNA, 19 nt, Artificial Sequence
  Description of Artificial Sequence: Synthetic oligonucleotide
  Sense strand starting at position 1472 of SEQ ID NO: 317139
ucauuauaaguuggugaau

SEQ ID NO: 467410 - RNA, 19 nt, Artificial Sequence
  Description of Artificial Sequence: Synthetic oligonucleotide
  Antisense Strand to SEQ ID NO: 467409
auucaccaacuuauaauga

SEQ ID NO: 467411 - RNA, 19 nt, Artificial Sequence
  Description of Artificial Sequence: Synthetic oligonucleotide
  Sense strand starting at position 1473 of SEQ ID NO: 317139
cauuauaaguuggugaaua

SEQ ID NO: 467412 - RNA, 19 nt, Artificial Sequence
  Description of Artificial Sequence: Synthetic oligonucleotide
  Antisense Strand to SEQ ID NO: 467411
uauucaccaacuuauaaug

SEQ ID NO: 467413 - RNA, 19 nt, Artificial Sequence
  Description of Artificial Sequence: Synthetic oligonucleotide
  Sense strand starting at position 1475 of SEQ ID NO: 317139
uuauaaguuggugaauauc

SEQ ID NO: 467414 - RNA, 19 nt, Artificial Sequence
  Description of Artificial Sequence: Synthetic oligonucleotide
  Antisense Strand to SEQ ID NO: 467413
gauauucaccaacuuauaa

SEQ ID NO: 467415 - RNA, 19 nt, Artificial Sequence
  Description of Artificial Sequence: Synthetic oligonucleotide
  Sense strand starting at position 1478 of SEQ ID NO: 317139
uaaguuggugaauaucuua

SEQ ID NO: 467416 - RNA, 19 nt, Artificial Sequence
  Description of Artificial Sequence: Synthetic oligonucleotide
  Antisense Strand to SEQ ID NO: 467415
uaagauauucaccaacuua

SEQ ID NO: 467417 - RNA, 19 nt, Artificial Sequence
  Description of Artificial Sequence: Synthetic oligonucleotide
  Sense strand starting at position 1481 of SEQ ID NO: 317139
guuggugaauaucuuaaac

SEQ ID NO: 467418 - RNA, 19 nt, Artificial Sequence
  Description of Artificial Sequence: Synthetic oligonucleotide
  Antisense Strand to SEQ ID NO: 467417
guuuaagauauucaccaac

SEQ ID NO: 467419 - RNA, 19 nt, Artificial Sequence
  Description of Artificial Sequence: Synthetic oligonucleotide
  Sense strand starting at position 1706 of SEQ ID NO: 317139
uuaugagugaggcauuaau

SEQ ID NO: 467420 - RNA, 19 nt, Artificial Sequence
  Description of Artificial Sequence: Synthetic oligonucleotide
  Antisense Strand to SEQ ID NO: 467419
auuaaugccucacucauaa

SEQ ID NO: 467421 - RNA, 19 nt, Artificial Sequence
  Description of Artificial Sequence: Synthetic oligonucleotide
  Sense strand starting at position 1716 of SEQ ID NO: 317139
ggcauuaaugcacaguaua

SEQ ID NO: 467422 - RNA, 19 nt, Artificial Sequence
  Description of Artificial Sequence: Synthetic oligonucleotide
  Antisense Strand to SEQ ID NO: 467421
uauacugugcauuaaugcc

SEQ ID NO: 467423 - RNA, 19 nt, Artificial Sequence
  Description of Artificial Sequence: Synthetic oligonucleotide
  Sense strand starting at position 2031 of SEQ ID NO: 317139
gcuaacuaagcugaugaau

SEQ ID NO: 467424 - RNA, 19 nt, Artificial Sequence
  Description of Artificial Sequence: Synthetic oligonucleotide
  Antisense Strand to SEQ ID NO: 467423
auucaucagcuuaguuagc

SEQ ID NO: 467425 - RNA, 19 nt, Artificial Sequence
  Description of Artificial Sequence: Synthetic oligonucleotide
  Sense strand starting at position 2078 of SEQ ID NO: 317139
uuguaacguuccucaaaga

SEQ ID NO: 467426 - RNA, 19 nt, Artificial Sequence
  Description of Artificial Sequence: Synthetic oligonucleotide
  Antisense Strand to SEQ ID NO: 467425
ucuuugaggaacguuacaa

SEQ ID NO: 467427 - RNA, 19 nt, Artificial Sequence
  Description of Artificial Sequence: Synthetic oligonucleotide
  Sense strand starting at position 2079 of SEQ ID NO: 317139
uguaacguuccucaaagaa

SEQ ID NO: 467428 - RNA, 19 nt, Artificial Sequence
  Description of Artificial Sequence: Synthetic oligonucleotide
  Antisense Strand to SEQ ID NO: 467427
uucuuugaggaacguuaca

SEQ ID NO: 467429 - RNA, 19 nt, Artificial Sequence
  Description of Artificial Sequence: Synthetic oligonucleotide
  Sense strand starting at position 2118 of SEQ ID NO: 317139
ugacuagcggaagaguuaa

SEQ ID NO: 467430 - RNA, 19 nt, Artificial Sequence
  Description of Artificial Sequence: Synthetic oligonucleotide
  Antisense Strand to SEQ ID NO: 467429
uuaacucuuccgcuaguca

SEQ ID NO: 467431 - RNA, 19 nt, Artificial Sequence
  Description of Artificial Sequence: Synthetic oligonucleotide
  Sense strand starting at position 2331 of SEQ ID NO: 317139
gagaaacuugucuggucga

SEQ ID NO: 467432 - RNA, 19 nt, Artificial Sequence
  Description of Artificial Sequence: Synthetic oligonucleotide
  Antisense Strand to SEQ ID NO: 467431
ucgaccagacaaguuucuc

SEQ ID NO: 467433 - RNA, 19 nt, Artificial Sequence
  Description of Artificial Sequence: Synthetic oligonucleotide
  Sense strand starting at position 2334 of SEQ ID NO: 317139
aaacuugucuggucgagau

SEQ ID NO: 467434 - RNA, 19 nt, Artificial Sequence
  Description of Artificial Sequence: Synthetic oligonucleotide
  Antisense Strand to SEQ ID NO: 467433
aucucgaccagacaaguuu

SEQ ID NO: 467435 - RNA, 19 nt, Artificial Sequence
  Description of Artificial Sequence: Synthetic oligonucleotide
  Sense strand starting at position 2390 of SEQ ID NO: 317139
ggguuucugggcgaggaga

SEQ ID NO: 467436 - RNA, 19 nt, Artificial Sequence
  Description of Artificial Sequence: Synthetic oligonucleotide
  Antisense Strand to SEQ ID NO: 467435
ucuccucgcccagaaaccc

SEQ ID NO: 467437 - RNA, 19 nt, Artificial Sequence
  Description of Artificial Sequence: Synthetic oligonucleotide
  Sense strand starting at position 2415 of SEQ ID NO: 317139
ccguccuccauggagauua

SEQ ID NO: 467438 - RNA, 19 nt, Artificial Sequence
  Description of Artificial Sequence: Synthetic oligonucleotide
  Antisense Strand to SEQ ID NO: 467437
uaaucuccauggaggacgg

SEQ ID NO: 467439 - RNA, 19 nt, Artificial Sequence
  Description of Artificial Sequence: Synthetic oligonucleotide
  Sense strand starting at position 3189 of SEQ ID NO: 317139
ggauucaaggugugagguu

SEQ ID NO: 467440 - RNA, 19 nt, Artificial Sequence
  Description of Artificial Sequence: Synthetic oligonucleotide
  Antisense Strand to SEQ ID NO: 467439
aaccucacaccuugaaucc

SEQ ID NO: 467441 - RNA, 19 nt, Artificial Sequence
  Description of Artificial Sequence: Synthetic oligonucleotide
  Sense strand starting at position 3217 of SEQ ID NO: 317139
agaacuauaguuugauuag

SEQ ID NO: 467442 - RNA, 19 nt, Artificial Sequence
  Description of Artificial Sequence: Synthetic oligonucleotide
  Antisense Strand to SEQ ID NO: 467441
cuaaucaaacuauaguucu

SEQ ID NO: 467443 - RNA, 19 nt, Artificial Sequence
  Description of Artificial Sequence: Synthetic oligonucleotide
  Sense strand starting at position 3220 of SEQ ID NO: 317139
acuauaguuugauuagaag

SEQ ID NO: 467444 - RNA, 19 nt, Artificial Sequence
  Description of Artificial Sequence: Synthetic oligonucleotide
  Antisense Strand to SEQ ID NO: 467443
cuucuaaucaaacuauagu

SEQ ID NO: 467445 - RNA, 19 nt, Artificial Sequence
  Description of Artificial Sequence: Synthetic oligonucleotide
  Sense strand starting at position 3227 of SEQ ID NO: 317139
uuugauuagaagugugaau

SEQ ID NO: 467446 - RNA, 19 nt, Artificial Sequence
  Description of Artificial Sequence: Synthetic oligonucleotide
  Antisense Strand to SEQ ID NO: 467445
auucacacuucuaaucaaa

SEQ ID NO: 467447 - RNA, 19 nt, Artificial Sequence
  Description of Artificial Sequence: Synthetic oligonucleotide
  Sense strand starting at position 3234 of SEQ ID NO: 317139
agaagugugaaucgaauga

SEQ ID NO: 467448 - RNA, 19 nt, Artificial Sequence
  Description of Artificial Sequence: Synthetic oligonucleotide
  Antisense Strand to SEQ ID NO: 467447
ucauucgauucacacuucu

SEQ ID NO: 467449 - RNA, 19 nt, Artificial Sequence
  Description of Artificial Sequence: Synthetic oligonucleotide
  Sense strand starting at position 3238 of SEQ ID NO: 317139
gugugaaucgaaugauaua

SEQ ID NO: 467450 - RNA, 19 nt, Artificial Sequence
  Description of Artificial Sequence: Synthetic oligonucleotide
  Antisense Strand to SEQ ID NO: 467449
uauaucauucgauucacac

SEQ ID NO: 467451 - RNA, 19 nt, Artificial Sequence
  Description of Artificial Sequence: Synthetic oligonucleotide
  Sense strand starting at position 3626 of SEQ ID NO: 317139
ucuacuggacuuugcauaa

SEQ ID NO: 467452 - RNA, 19 nt, Artificial Sequence
  Description of Artificial Sequence: Synthetic oligonucleotide
  Antisense Strand to SEQ ID NO: 467451
uuaugcaaaguccaguaga

SEQ ID NO: 467453 - RNA, 19 nt, Artificial Sequence
  Description of Artificial Sequence: Synthetic oligonucleotide
  Sense strand starting at position 3756 of SEQ ID NO: 317139
cgagcuguagcugaaauaa

SEQ ID NO: 467454 - RNA, 19 nt, Artificial Sequence
  Description of Artificial Sequence: Synthetic oligonucleotide
  Antisense Strand to SEQ ID NO: 467453
uuauuucagcuacagcucg

SEQ ID NO: 467455 - RNA, 19 nt, Artificial Sequence
  Description of Artificial Sequence: Synthetic oligonucleotide
  Sense strand starting at position 255 of SEQ ID NO: 317140
cuaugugacacugggauau

SEQ ID NO: 467456 - RNA, 19 nt, Artificial Sequence
  Description of Artificial Sequence: Synthetic oligonucleotide
  Antisense Strand to SEQ ID NO: 467455
auaucccagugucacauag

SEQ ID NO: 467457 - RNA, 19 nt, Artificial Sequence
  Description of Artificial Sequence: Synthetic oligonucleotide
  Sense strand starting at position 458 of SEQ ID NO: 317140
cauguuguuggugagaaag

SEQ ID NO: 467458 - RNA, 19 nt, Artificial Sequence
  Description of Artificial Sequence: Synthetic oligonucleotide
  Antisense Strand to SEQ ID NO: 467457
cuuucucaccaacaacaug

SEQ ID NO: 467459 - RNA, 19 nt, Artificial Sequence
  Description of Artificial Sequence: Synthetic oligonucleotide
  Sense strand starting at position 518 of SEQ ID NO: 317140
guaucuugguaugcaauuu

SEQ ID NO: 467460 - RNA, 19 nt, Artificial Sequence
  Description of Artificial Sequence: Synthetic oligonucleotide
  Antisense Strand to SEQ ID NO: 467459
aaauugcauaccaagauac

SEQ ID NO: 467461 - RNA, 19 nt, Artificial Sequence
  Description of Artificial Sequence: Synthetic oligonucleotide
  Sense strand starting at position 549 of SEQ ID NO: 317140
uuaugaaacugugcaaaug

SEQ ID NO: 467462 - RNA, 19 nt, Artificial Sequence
  Description of Artificial Sequence: Synthetic oligonucleotide
  Antisense Strand to SEQ ID NO: 467461
cauuugcacaguuucauaa

SEQ ID NO: 467463 - RNA, 19 nt, Artificial Sequence
  Description of Artificial Sequence: Synthetic oligonucleotide
  Sense strand starting at position 600 of SEQ ID NO: 317140
aagcaaaggugaguuugaa

SEQ ID NO: 467464 - RNA, 19 nt, Artificial Sequence
  Description of Artificial Sequence: Synthetic oligonucleotide
  Antisense Strand to SEQ ID NO: 467463
uucaaacucaccuuugcuu

SEQ ID NO: 467465 - RNA, 19 nt, Artificial Sequence
  Description of Artificial Sequence: Synthetic oligonucleotide
  Sense strand starting at position 648 of SEQ ID NO: 317140
uuucuaaagcuguaugaga

SEQ ID NO: 467466 - RNA, 19 nt, Artificial Sequence
  Description of Artificial Sequence: Synthetic oligonucleotide
  Antisense Strand to SEQ ID NO: 467465
ucucauacagcuuuagaaa

SEQ ID NO: 467467 - RNA, 19 nt, Artificial Sequence
  Description of Artificial Sequence: Synthetic oligonucleotide
  Sense strand starting at position 650 of SEQ ID NO: 317140
ucuaaagcuguaugagaac

SEQ ID NO: 467468 - RNA, 19 nt, Artificial Sequence
  Description of Artificial Sequence: Synthetic oligonucleotide
  Antisense Strand to SEQ ID NO: 467467
guucucauacagcuuuaga

SEQ ID NO: 467469 - RNA, 19 nt, Artificial Sequence
  Description of Artificial Sequence: Synthetic oligonucleotide
  Sense strand starting at position 872 of SEQ ID NO: 317140
uauucugugcuugaggaaa

SEQ ID NO: 467470 - RNA, 19 nt, Artificial Sequence
  Description of Artificial Sequence: Synthetic oligonucleotide
  Antisense Strand to SEQ ID NO: 467469
uuuccucaagcacagaaua

SEQ ID NO: 467471 - RNA, 19 nt, Artificial Sequence
  Description of Artificial Sequence: Synthetic oligonucleotide
  Sense strand starting at position 925 of SEQ ID NO: 317140
ggaaacuaugcuuagggca

SEQ ID NO: 467472 - RNA, 19 nt, Artificial Sequence
  Description of Artificial Sequence: Synthetic oligonucleotide
  Antisense Strand to SEQ ID NO: 467471
ugcccuaagcauaguuucc

SEQ ID NO: 467473 - RNA, 19 nt, Artificial Sequence
  Description of Artificial Sequence: Synthetic oligonucleotide
  Sense strand starting at position 932 of SEQ ID NO: 317140
augcuuagggcauaugaca

SEQ ID NO: 467474 - RNA, 19 nt, Artificial Sequence
  Description of Artificial Sequence: Synthetic oligonucleotide
  Antisense Strand to SEQ ID NO: 467473
ugucauaugcccuaagcau

SEQ ID NO: 467475 - RNA, 19 nt, Artificial Sequence
  Description of Artificial Sequence: Synthetic oligonucleotide
  Sense strand starting at position 946 of SEQ ID NO: 317140
ugacauauauuguucuaag

SEQ ID NO: 467476 - RNA, 19 nt, Artificial Sequence
  Description of Artificial Sequence: Synthetic oligonucleotide
  Antisense Strand to SEQ ID NO: 467475
cuuagaacaauauauguca

SEQ ID NO: 467477 - RNA, 19 nt, Artificial Sequence
  Description of Artificial Sequence: Synthetic oligonucleotide
  Sense strand starting at position 1091 of SEQ ID NO: 317140
agagcaugccuauaaaucu

SEQ ID NO: 467478 - RNA, 19 nt, Artificial Sequence
  Description of Artificial Sequence: Synthetic oligonucleotide
  Antisense Strand to SEQ ID NO: 467477
agauuuauaggcaugcucu

SEQ ID NO: 467479 - RNA, 19 nt, Artificial Sequence
  Description of Artificial Sequence: Synthetic oligonucleotide
  Sense strand starting at position 1129 of SEQ ID NO: 317140
uucccaucuucgguaauuu

SEQ ID NO: 467480 - RNA, 19 nt, Artificial Sequence
  Description of Artificial Sequence: Synthetic oligonucleotide
  Antisense Strand to SEQ ID NO: 467479
aaauuaccgaagaugggaa

SEQ ID NO: 467481 - RNA, 19 nt, Artificial Sequence
  Description of Artificial Sequence: Synthetic oligonucleotide
  Sense strand starting at position 1162 of SEQ ID NO: 317140
caguaacacuuauuaggga

SEQ ID NO: 467482 - RNA, 19 nt, Artificial Sequence
  Description of Artificial Sequence: Synthetic oligonucleotide
  Antisense Strand to SEQ ID NO: 467481
ucccuaauaaguguuacug

SEQ ID NO: 467483 - RNA, 19 nt, Artificial Sequence
  Description of Artificial Sequence: Synthetic oligonucleotide
  Sense strand starting at position 1177 of SEQ ID NO: 317140
gggaaacauuuauaacccu

SEQ ID NO: 467484 - RNA, 19 nt, Artificial Sequence
  Description of Artificial Sequence: Synthetic oligonucleotide
  Antisense Strand to SEQ ID NO: 467483
aggguuauaaauguuuccc

SEQ ID NO: 467485 - RNA, 19 nt, Artificial Sequence
  Description of Artificial Sequence: Synthetic oligonucleotide
  Sense strand starting at position 1556 of SEQ ID NO: 317140
gcaguaacuuaccuagaga

SEQ ID NO: 467486 - RNA, 19 nt, Artificial Sequence
  Description of Artificial Sequence: Synthetic oligonucleotide
  Antisense Strand to SEQ ID NO: 467485
ucucuagguaaguuacugc

SEQ ID NO: 467487 - RNA, 19 nt, Artificial Sequence
  Description of Artificial Sequence: Synthetic oligonucleotide
  Sense strand starting at position 1602 of SEQ ID NO: 317140
acuugaauuuaucccgugu

SEQ ID NO: 467488 - RNA, 19 nt, Artificial Sequence
  Description of Artificial Sequence: Synthetic oligonucleotide
  Antisense Strand to SEQ ID NO: 467487
acacgggauaaauucaagu

SEQ ID NO: 467489 - RNA, 19 nt, Artificial Sequence
  Description of Artificial Sequence: Synthetic oligonucleotide
  Sense strand starting at position 1662 of SEQ ID NO: 317140
gguuaauuagaaggagcuu

SEQ ID NO: 467490 - RNA, 19 nt, Artificial Sequence
  Description of Artificial Sequence: Synthetic oligonucleotide
  Antisense Strand to SEQ ID NO: 467489
aagcuccuucuaauuaacc

SEQ ID NO: 467491 - RNA, 19 nt, Artificial Sequence
  Description of Artificial Sequence: Synthetic oligonucleotide
  Sense strand starting at position 1663 of SEQ ID NO: 317140
guuaauuagaaggagcuuu

SEQ ID NO: 467492 - RNA, 19 nt, Artificial Sequence
  Description of Artificial Sequence: Synthetic oligonucleotide
  Antisense Strand to SEQ ID NO: 467491
aaagcuccuucuaauuaac

SEQ ID NO: 467493 - RNA, 19 nt, Artificial Sequence
  Description of Artificial Sequence: Synthetic oligonucleotide
  Sense strand starting at position 1855 of SEQ ID NO: 317140
ccuucuuggacacgagaau

SEQ ID NO: 467494 - RNA, 19 nt, Artificial Sequence
  Description of Artificial Sequence: Synthetic oligonucleotide
  Antisense Strand to SEQ ID NO: 467493
auucucguguccaagaagg

SEQ ID NO: 467495 - RNA, 19 nt, Artificial Sequence
  Description of Artificial Sequence: Synthetic oligonucleotide
  Sense strand starting at position 2050 of SEQ ID NO: 317140
cggauuaugauuggcagaa

SEQ ID NO: 467496 - RNA, 19 nt, Artificial Sequence
  Description of Artificial Sequence: Synthetic oligonucleotide
  Antisense Strand to SEQ ID NO: 467495
uucugccaaucauaauccg

SEQ ID NO: 467497 - RNA, 19 nt, Artificial Sequence
  Description of Artificial Sequence: Synthetic oligonucleotide
  Sense strand starting at position 2220 of SEQ ID NO: 317140
auuagaugcuccuugaaga

SEQ ID NO: 467498 - RNA, 19 nt, Artificial Sequence
  Description of Artificial Sequence: Synthetic oligonucleotide
  Antisense Strand to SEQ ID NO: 467497
ucuucaaggagcaucuaau

SEQ ID NO: 467499 - RNA, 19 nt, Artificial Sequence
  Description of Artificial Sequence: Synthetic oligonucleotide
  Sense strand starting at position 2221 of SEQ ID NO: 317140
uuagaugcuccuugaagau

SEQ ID NO: 467500 - RNA, 19 nt, Artificial Sequence
  Description of Artificial Sequence: Synthetic oligonucleotide
  Antisense Strand to SEQ ID NO: 467499
aucuucaaggagcaucuaa

SEQ ID NO: 467501 - RNA, 19 nt, Artificial Sequence
  Description of Artificial Sequence: Synthetic oligonucleotide
  Sense strand starting at position 2276 of SEQ ID NO: 317140
uaugaaauuugaggauaga

SEQ ID NO: 467502 - RNA, 19 nt, Artificial Sequence
  Description of Artificial Sequence: Synthetic oligonucleotide
  Antisense Strand to SEQ ID NO: 467501
ucuauccucaaauuucaua

SEQ ID NO: 467503 - RNA, 19 nt, Artificial Sequence
  Description of Artificial Sequence: Synthetic oligonucleotide
  Sense strand starting at position 2316 of SEQ ID NO: 317140
acuguuccacgagauucua

SEQ ID NO: 467504 - RNA, 19 nt, Artificial Sequence
  Description of Artificial Sequence: Synthetic oligonucleotide
  Antisense Strand to SEQ ID NO: 467503
uagaaucucguggaacagu

SEQ ID NO: 467505 - RNA, 19 nt, Artificial Sequence
  Description of Artificial Sequence: Synthetic oligonucleotide
  Sense strand starting at position 2325 of SEQ ID NO: 317140
cgagauucuauuggacaaa

SEQ ID NO: 467506 - RNA, 19 nt, Artificial Sequence
  Description of Artificial Sequence: Synthetic oligonucleotide
  Antisense Strand to SEQ ID NO: 467505
uuuguccaauagaaucucg

SEQ ID NO: 467507 - RNA, 19 nt, Artificial Sequence
  Description of Artificial Sequence: Synthetic oligonucleotide
  Sense strand starting at position 2462 of SEQ ID NO: 317140
cuacauaguccugaaguua

SEQ ID NO: 467508 - RNA, 19 nt, Artificial Sequence
  Description of Artificial Sequence: Synthetic oligonucleotide
  Antisense Strand to SEQ ID NO: 467507
uaacuucaggacuauguag

SEQ ID NO: 467509 - RNA, 19 nt, Artificial Sequence
  Description of Artificial Sequence: Synthetic oligonucleotide
  Sense strand starting at position 2524 of SEQ ID NO: 317140
gaguaugugcgugugaauu

SEQ ID NO: 467510 - RNA, 19 nt, Artificial Sequence
  Description of Artificial Sequence: Synthetic oligonucleotide
  Antisense Strand to SEQ ID NO: 467509
aauucacacgcacauacuc

SEQ ID NO: 467511 - RNA, 19 nt, Artificial Sequence
  Description of Artificial Sequence: Synthetic oligonucleotide
  Sense strand starting at position 2537 of SEQ ID NO: 317140
ugaauuuauugugugcauu

SEQ ID NO: 467512 - RNA, 19 nt, Artificial Sequence
  Description of Artificial Sequence: Synthetic oligonucleotide
  Antisense Strand to SEQ ID NO: 467511
aaugcacacaauaaauuca

SEQ ID NO: 467513 - RNA, 19 nt, Artificial Sequence
  Description of Artificial Sequence: Synthetic oligonucleotide
  Sense strand starting at position 2538 of SEQ ID NO: 317140
gaauuuauugugugcauug

SEQ ID NO: 467514 - RNA, 19 nt, Artificial Sequence
  Description of Artificial Sequence: Synthetic oligonucleotide
  Antisense Strand to SEQ ID NO: 467513
caaugcacacaauaaauuc

SEQ ID NO: 467515 - RNA, 19 nt, Artificial Sequence
  Description of Artificial Sequence: Synthetic oligonucleotide
  Sense strand starting at position 2539 of SEQ ID NO: 317140
aauuuauugugugcauugu

SEQ ID NO: 467516 - RNA, 19 nt, Artificial Sequence
  Description of Artificial Sequence: Synthetic oligonucleotide
  Antisense Strand to SEQ ID NO: 467515
acaaugcacacaauaaauu

SEQ ID NO: 467517 - RNA, 19 nt, Artificial Sequence
  Description of Artificial Sequence: Synthetic oligonucleotide
  Sense strand starting at position 2630 of SEQ ID NO: 317140
guggcaauauaaguugaaa

SEQ ID NO: 467518 - RNA, 19 nt, Artificial Sequence
  Description of Artificial Sequence: Synthetic oligonucleotide
  Antisense Strand to SEQ ID NO: 467517
uuucaacuuauauugccac

SEQ ID NO: 467519 - RNA, 19 nt, Artificial Sequence
  Description of Artificial Sequence: Synthetic oligonucleotide
  Sense strand starting at position 2783 of SEQ ID NO: 317140
gguacuucuccucauucca

SEQ ID NO: 467520 - RNA, 19 nt, Artificial Sequence
  Description of Artificial Sequence: Synthetic oligonucleotide
  Antisense Strand to SEQ ID NO: 467519
uggaaugaggagaaguacc

SEQ ID NO: 467521 - RNA, 19 nt, Artificial Sequence
  Description of Artificial Sequence: Synthetic oligonucleotide
  Sense strand starting at position 2946 of SEQ ID NO: 317140
ccaaguccuccucagguau

SEQ ID NO: 467522 - RNA, 19 nt, Artificial Sequence
  Description of Artificial Sequence: Synthetic oligonucleotide
  Antisense Strand to SEQ ID NO: 467521
auaccugaggaggacuugg

SEQ ID NO: 467523 - RNA, 19 nt, Artificial Sequence
  Description of Artificial Sequence: Synthetic oligonucleotide
  Sense strand starting at position 2969 of SEQ ID NO: 317140
gugucuuugguuguacgua

SEQ ID NO: 467524 - RNA, 19 nt, Artificial Sequence
  Description of Artificial Sequence: Synthetic oligonucleotide
  Antisense Strand to SEQ ID NO: 467523
uacguacaaccaaagacac

SEQ ID NO: 467525 - RNA, 19 nt, Artificial Sequence
  Description of Artificial Sequence: Synthetic oligonucleotide
  Sense strand starting at position 2988 of SEQ ID NO: 317140
guaguuccacuugaaauac

SEQ ID NO: 467526 - RNA, 19 nt, Artificial Sequence
  Description of Artificial Sequence: Synthetic oligonucleotide
  Antisense Strand to SEQ ID NO: 467525
guauuucaaguggaacuac

SEQ ID NO: 467527 - RNA, 19 nt, Artificial Sequence
  Description of Artificial Sequence: Synthetic oligonucleotide
  Sense strand starting at position 3163 of SEQ ID NO: 317140
guuagcaagccauagacau

SEQ ID NO: 467528 - RNA, 19 nt, Artificial Sequence
  Description of Artificial Sequence: Synthetic oligonucleotide
  Antisense Strand to SEQ ID NO: 467527
augucuauggcuugcuaac

SEQ ID NO: 467529 - RNA, 19 nt, Artificial Sequence
  Description of Artificial Sequence: Synthetic oligonucleotide
  Sense strand starting at position 3515 of SEQ ID NO: 317140
aguagcaucaugggaaaca

SEQ ID NO: 467530 - RNA, 19 nt, Artificial Sequence
  Description of Artificial Sequence: Synthetic oligonucleotide
  Antisense Strand to SEQ ID NO: 467529
uguuucccaugaugcuacu

SEQ ID NO: 467531 - RNA, 19 nt, Artificial Sequence
  Description of Artificial Sequence: Synthetic oligonucleotide
  Sense strand starting at position 3795 of SEQ ID NO: 317140
gcaacacagugaucugaag

SEQ ID NO: 467532 - RNA, 19 nt, Artificial Sequence
  Description of Artificial Sequence: Synthetic oligonucleotide
  Antisense Strand to SEQ ID NO: 467531
cuucagaucacuguguugc

SEQ ID NO: 467533 - RNA, 19 nt, Artificial Sequence
  Description of Artificial Sequence: Synthetic oligonucleotide
  Sense strand starting at position 3878 of SEQ ID NO: 317140
gcugauauccauugaugau

SEQ ID NO: 467534 - RNA, 19 nt, Artificial Sequence
  Description of Artificial Sequence: Synthetic oligonucleotide
  Antisense Strand to SEQ ID NO: 467533
aucaucaauggauaucagc

SEQ ID NO: 467535 - RNA, 19 nt, Artificial Sequence
  Description of Artificial Sequence: Synthetic oligonucleotide
  Sense strand starting at position 165 of SEQ ID NO: 317141
gaauuaaaguuugcaaggu

SEQ ID NO: 467536 - RNA, 19 nt, Artificial Sequence
  Description of Artificial Sequence: Synthetic oligonucleotide
  Antisense Strand to SEQ ID NO: 467535
accuugcaaacuuuaauuc

SEQ ID NO: 467537 - RNA, 19 nt, Artificial Sequence
  Description of Artificial Sequence: Synthetic oligonucleotide
  Sense strand starting at position 169 of SEQ ID NO: 317141
uaaaguuugcaagguaaau

SEQ ID NO: 467538 - RNA, 19 nt, Artificial Sequence
  Description of Artificial Sequence: Synthetic oligonucleotide
  Antisense Strand to SEQ ID NO: 467537
auuuaccuugcaaacuuua

SEQ ID NO: 467539 - RNA, 19 nt, Artificial Sequence
  Description of Artificial Sequence: Synthetic oligonucleotide
  Sense strand starting at position 300 of SEQ ID NO: 317141
agcauauagccuuggauau

SEQ ID NO: 467540 - RNA, 19 nt, Artificial Sequence
  Description of Artificial Sequence: Synthetic oligonucleotide
  Antisense Strand to SEQ ID NO: 467539
auauccaaggcuauaugcu

SEQ ID NO: 467541 - RNA, 19 nt, Artificial Sequence
  Description of Artificial Sequence: Synthetic oligonucleotide
  Sense strand starting at position 301 of SEQ ID NO: 317141
gcauauagccuuggauaug

SEQ ID NO: 467542 - RNA, 19 nt, Artificial Sequence
  Description of Artificial Sequence: Synthetic oligonucleotide
  Antisense Strand to SEQ ID NO: 467541
cauauccaaggcuauaugc

SEQ ID NO: 467543 - RNA, 19 nt, Artificial Sequence
  Description of Artificial Sequence: Synthetic oligonucleotide
  Sense strand starting at position 304 of SEQ ID NO: 317141
uauagccuuggauauguua

SEQ ID NO: 467544 - RNA, 19 nt, Artificial Sequence
  Description of Artificial Sequence: Synthetic oligonucleotide
  Antisense Strand to SEQ ID NO: 467543
uaacauauccaaggcuaua

SEQ ID NO: 467545 - RNA, 19 nt, Artificial Sequence
  Description of Artificial Sequence: Synthetic oligonucleotide
  Sense strand starting at position 341 of SEQ ID NO: 317141
uguuacuuacaguauaacu

SEQ ID NO: 467546 - RNA, 19 nt, Artificial Sequence
  Description of Artificial Sequence: Synthetic oligonucleotide
  Antisense Strand to SEQ ID NO: 467545
aguuauacuguaaguaaca

SEQ ID NO: 467547 - RNA, 19 nt, Artificial Sequence
  Description of Artificial Sequence: Synthetic oligonucleotide
  Sense strand starting at position 382 of SEQ ID NO: 317141
aauuguggugaucagagua

SEQ ID NO: 467548 - RNA, 19 nt, Artificial Sequence
  Description of Artificial Sequence: Synthetic oligonucleotide
  Antisense Strand to SEQ ID NO: 467547
uacucugaucaccacaauu

SEQ ID NO: 467549 - RNA, 19 nt, Artificial Sequence
  Description of Artificial Sequence: Synthetic oligonucleotide
  Sense strand starting at position 446 of SEQ ID NO: 317141
guuaucuguaggugcauuu

SEQ ID NO: 467550 - RNA, 19 nt, Artificial Sequence
  Description of Artificial Sequence: Synthetic oligonucleotide
  Antisense Strand to SEQ ID NO: 467549
aaaugcaccuacagauaac

SEQ ID NO: 467551 - RNA, 19 nt, Artificial Sequence
  Description of Artificial Sequence: Synthetic oligonucleotide
  Sense strand starting at position 471 of SEQ ID NO: 317141
gcaaaugaaucaguuaaau

SEQ ID NO: 467552 - RNA, 19 nt, Artificial Sequence
  Description of Artificial Sequence: Synthetic oligonucleotide
  Antisense Strand to SEQ ID NO: 467551
auuuaacugauucauuugc

SEQ ID NO: 467553 - RNA, 19 nt, Artificial Sequence
  Description of Artificial Sequence: Synthetic oligonucleotide
  Sense strand starting at position 490 of SEQ ID NO: 317141
guugaaucagacuaguauu

SEQ ID NO: 467554 - RNA, 19 nt, Artificial Sequence
  Description of Artificial Sequence: Synthetic oligonucleotide
  Antisense Strand to SEQ ID NO: 467553
aauacuagucugauucaac

SEQ ID NO: 467555 - RNA, 19 nt, Artificial Sequence
  Description of Artificial Sequence: Synthetic oligonucleotide
  Sense strand starting at position 501 of SEQ ID NO: 317141
cuaguauuugccgagccuu

SEQ ID NO: 467556 - RNA, 19 nt, Artificial Sequence
  Description of Artificial Sequence: Synthetic oligonucleotide
  Antisense Strand to SEQ ID NO: 467555
aaggcucggcaaauacuag

SEQ ID NO: 467557 - RNA, 19 nt, Artificial Sequence
  Description of Artificial Sequence: Synthetic oligonucleotide
  Sense strand starting at position 524 of SEQ ID NO: 317141
auugccauuucuuugucau

SEQ ID NO: 467558 - RNA, 19 nt, Artificial Sequence
  Description of Artificial Sequence: Synthetic oligonucleotide
  Antisense Strand to SEQ ID NO: 467557
augacaaagaaauggcaau

SEQ ID NO: 467559 - RNA, 19 nt, Artificial Sequence
  Description of Artificial Sequence: Synthetic oligonucleotide
  Sense strand starting at position 525 of SEQ ID NO: 317141
uugccauuucuuugucauc

SEQ ID NO: 467560 - RNA, 19 nt, Artificial Sequence
  Description of Artificial Sequence: Synthetic oligonucleotide
  Antisense Strand to SEQ ID NO: 467559
gaugacaaagaaauggcaa

SEQ ID NO: 467561 - RNA, 19 nt, Artificial Sequence
  Description of Artificial Sequence: Synthetic oligonucleotide
  Sense strand starting at position 526 of SEQ ID NO: 317141
ugccauuucuuugucauca

SEQ ID NO: 467562 - RNA, 19 nt, Artificial Sequence
  Description of Artificial Sequence: Synthetic oligonucleotide
  Antisense Strand to SEQ ID NO: 467561
ugaugacaaagaaauggca

SEQ ID NO: 467563 - RNA, 19 nt, Artificial Sequence
  Description of Artificial Sequence: Synthetic oligonucleotide
  Sense strand starting at position 527 of SEQ ID NO: 317141
gccauuucuuugucaucac

SEQ ID NO: 467564 - RNA, 19 nt, Artificial Sequence
  Description of Artificial Sequence: Synthetic oligonucleotide
  Antisense Strand to SEQ ID NO: 467563
gugaugacaaagaaauggc

SEQ ID NO: 467565 - RNA, 19 nt, Artificial Sequence
  Description of Artificial Sequence: Synthetic oligonucleotide
  Sense strand starting at position 581 of SEQ ID NO: 317141
uggcucaucuaaucaggua

SEQ ID NO: 467566 - RNA, 19 nt, Artificial Sequence
  Description of Artificial Sequence: Synthetic oligonucleotide
  Antisense Strand to SEQ ID NO: 467565
uaccugauuagaugagcca

SEQ ID NO: 467567 - RNA, 19 nt, Artificial Sequence
  Description of Artificial Sequence: Synthetic oligonucleotide
  Sense strand starting at position 611 of SEQ ID NO: 317141
guggaagcuacugauuguu

SEQ ID NO: 467568 - RNA, 19 nt, Artificial Sequence
  Description of Artificial Sequence: Synthetic oligonucleotide
  Antisense Strand to SEQ ID NO: 467567
aacaaucaguagcuuccac

SEQ ID NO: 467569 - RNA, 19 nt, Artificial Sequence
  Description of Artificial Sequence: Synthetic oligonucleotide
  Sense strand starting at position 706 of SEQ ID NO: 317141
auaguauugcuguagggau

SEQ ID NO: 467570 - RNA, 19 nt, Artificial Sequence
  Description of Artificial Sequence: Synthetic oligonucleotide
  Antisense Strand to SEQ ID NO: 467569
aucccuacagcaauacuau

SEQ ID NO: 467571 - RNA, 19 nt, Artificial Sequence
  Description of Artificial Sequence: Synthetic oligonucleotide
  Sense strand starting at position 708 of SEQ ID NO: 317141
aguauugcuguagggauuu

SEQ ID NO: 467572 - RNA, 19 nt, Artificial Sequence
  Description of Artificial Sequence: Synthetic oligonucleotide
  Antisense Strand to SEQ ID NO: 467571
aaaucccuacagcaauacu

SEQ ID NO: 467573 - RNA, 19 nt, Artificial Sequence
  Description of Artificial Sequence: Synthetic oligonucleotide
  Sense strand starting at position 738 of SEQ ID NO: 317141
gccagaaauuuggauauga

SEQ ID NO: 467574 - RNA, 19 nt, Artificial Sequence
  Description of Artificial Sequence: Synthetic oligonucleotide
  Antisense Strand to SEQ ID NO: 467573
ucauauccaaauuucuggc

SEQ ID NO: 467575 - RNA, 19 nt, Artificial Sequence
  Description of Artificial Sequence: Synthetic oligonucleotide
  Sense strand starting at position 868 of SEQ ID NO: 317141
gguuauuacuaaguaacag

SEQ ID NO: 467576 - RNA, 19 nt, Artificial Sequence
  Description of Artificial Sequence: Synthetic oligonucleotide
  Antisense Strand to SEQ ID NO: 467575
cuguuacuuaguaauaacc

SEQ ID NO: 467577 - RNA, 19 nt, Artificial Sequence
  Description of Artificial Sequence: Synthetic oligonucleotide
  Sense strand starting at position 1119 of SEQ ID NO: 317141
ggaaacauguaucucaacu

SEQ ID NO: 467578 - RNA, 19 nt, Artificial Sequence
  Description of Artificial Sequence: Synthetic oligonucleotide
  Antisense Strand to SEQ ID NO: 467577
aguugagauacauguuucc

SEQ ID NO: 467579 - RNA, 19 nt, Artificial Sequence
  Description of Artificial Sequence: Synthetic oligonucleotide
  Sense strand starting at position 1262 of SEQ ID NO: 317141
aaaucaggauuuggaaaga

SEQ ID NO: 467580 - RNA, 19 nt, Artificial Sequence
  Description of Artificial Sequence: Synthetic oligonucleotide
  Antisense Strand to SEQ ID NO: 467579
ucuuuccaaauccugauuu

SEQ ID NO: 467581 - RNA, 19 nt, Artificial Sequence
  Description of Artificial Sequence: Synthetic oligonucleotide
  Sense strand starting at position 1307 of SEQ ID NO: 317141
uggcucauauaacuugaaa

SEQ ID NO: 467582 - RNA, 19 nt, Artificial Sequence
  Description of Artificial Sequence: Synthetic oligonucleotide
  Antisense Strand to SEQ ID NO: 467581
uuucaaguuauaugagcca

SEQ ID NO: 467583 - RNA, 19 nt, Artificial Sequence
  Description of Artificial Sequence: Synthetic oligonucleotide
  Sense strand starting at position 1441 of SEQ ID NO: 317141
aguaguucccucuaguauc

SEQ ID NO: 467584 - RNA, 19 nt, Artificial Sequence
  Description of Artificial Sequence: Synthetic oligonucleotide
  Antisense Strand to SEQ ID NO: 467583
gauacuagagggaacuacu

SEQ ID NO: 467585 - RNA, 19 nt, Artificial Sequence
  Description of Artificial Sequence: Synthetic oligonucleotide
  Sense strand starting at position 1504 of SEQ ID NO: 317141
gggaguucgagucacaaua

SEQ ID NO: 467586 - RNA, 19 nt, Artificial Sequence
  Description of Artificial Sequence: Synthetic oligonucleotide
  Antisense Strand to SEQ ID NO: 467585
uauugugacucgaacuccc

SEQ ID NO: 467587 - RNA, 19 nt, Artificial Sequence
  Description of Artificial Sequence: Synthetic oligonucleotide
  Sense strand starting at position 1581 of SEQ ID NO: 317141
gcuccaaggugacucauaa

SEQ ID NO: 467588 - RNA, 19 nt, Artificial Sequence
  Description of Artificial Sequence: Synthetic oligonucleotide
  Antisense Strand to SEQ ID NO: 467587
uuaugagucaccuuggagc

SEQ ID NO: 467589 - RNA, 19 nt, Artificial Sequence
  Description of Artificial Sequence: Synthetic oligonucleotide
  Sense strand starting at position 1626 of SEQ ID NO: 317141
uggccucaacaacgaaauu

SEQ ID NO: 467590 - RNA, 19 nt, Artificial Sequence
  Description of Artificial Sequence: Synthetic oligonucleotide
  Antisense Strand to SEQ ID NO: 467589
aauuucguuguugaggcca

SEQ ID NO: 467591 - RNA, 19 nt, Artificial Sequence
  Description of Artificial Sequence: Synthetic oligonucleotide
  Sense strand starting at position 1723 of SEQ ID NO: 317141
ggcugaucuuaagcaacau

SEQ ID NO: 467592 - RNA, 19 nt, Artificial Sequence
  Description of Artificial Sequence: Synthetic oligonucleotide
  Antisense Strand to SEQ ID NO: 467591
auguugcuuaagaucagcc

SEQ ID NO: 467593 - RNA, 19 nt, Artificial Sequence
  Description of Artificial Sequence: Synthetic oligonucleotide
  Sense strand starting at position 1957 of SEQ ID NO: 317141
gcacuuugggcucaaacga

SEQ ID NO: 467594 - RNA, 19 nt, Artificial Sequence
  Description of Artificial Sequence: Synthetic oligonucleotide
  Antisense Strand to SEQ ID NO: 467593
ucguuugagcccaaagugc

SEQ ID NO: 467595 - RNA, 19 nt, Artificial Sequence
  Description of Artificial Sequence: Synthetic oligonucleotide
  Sense strand starting at position 1965 of SEQ ID NO: 317141
ggcucaaacgaugaucaca

SEQ ID NO: 467596 - RNA, 19 nt, Artificial Sequence
  Description of Artificial Sequence: Synthetic oligonucleotide
  Antisense Strand to SEQ ID NO: 467595
ugugaucaucguuugagcc

SEQ ID NO: 467597 - RNA, 19 nt, Artificial Sequence
  Description of Artificial Sequence: Synthetic oligonucleotide
  Sense strand starting at position 1990 of SEQ ID NO: 317141
gcgagacucuuuccaagga

SEQ ID NO: 467598 - RNA, 19 nt, Artificial Sequence
  Description of Artificial Sequence: Synthetic oligonucleotide
  Antisense Strand to SEQ ID NO: 467597
uccuuggaaagagucucgc

SEQ ID NO: 467599 - RNA, 19 nt, Artificial Sequence
  Description of Artificial Sequence: Synthetic oligonucleotide
  Sense strand starting at position 3252 of SEQ ID NO: 317141
cguuguucucguuucugga

SEQ ID NO: 467600 - RNA, 19 nt, Artificial Sequence
  Description of Artificial Sequence: Synthetic oligonucleotide
  Antisense Strand to SEQ ID NO: 467599
uccagaaacgagaacaacg

SEQ ID NO: 467601 - RNA, 19 nt, Artificial Sequence
  Description of Artificial Sequence: Synthetic oligonucleotide
  Sense strand starting at position 3260 of SEQ ID NO: 317141
ucguuucuggaguagggau

SEQ ID NO: 467602 - RNA, 19 nt, Artificial Sequence
  Description of Artificial Sequence: Synthetic oligonucleotide
  Antisense Strand to SEQ ID NO: 467601
aucccuacuccagaaacga

SEQ ID NO: 467603 - RNA, 19 nt, Artificial Sequence
  Description of Artificial Sequence: Synthetic oligonucleotide
  Sense strand starting at position 3282 of SEQ ID NO: 317141
gcauuuauuucuuaguuuc

SEQ ID NO: 467604 - RNA, 19 nt, Artificial Sequence
  Description of Artificial Sequence: Synthetic oligonucleotide
  Antisense Strand to SEQ ID NO: 467603
gaaacuaagaaauaaaugc

SEQ ID NO: 467605 - RNA, 19 nt, Artificial Sequence
  Description of Artificial Sequence: Synthetic oligonucleotide
  Sense strand starting at position 3285 of SEQ ID NO: 317141
uuuauuucuuaguuuccga

SEQ ID NO: 467606 - RNA, 19 nt, Artificial Sequence
  Description of Artificial Sequence: Synthetic oligonucleotide
  Antisense Strand to SEQ ID NO: 467605
ucggaaacuaagaaauaaa

SEQ ID NO: 467607 - RNA, 19 nt, Artificial Sequence
  Description of Artificial Sequence: Synthetic oligonucleotide
  Sense strand starting at position 3384 of SEQ ID NO: 317141
uugagucuuuaguugaaac

SEQ ID NO: 467608 - RNA, 19 nt, Artificial Sequence
  Description of Artificial Sequence: Synthetic oligonucleotide
  Antisense Strand to SEQ ID NO: 467607
guuucaacuaaagacucaa

SEQ ID NO: 467609 - RNA, 19 nt, Artificial Sequence
  Description of Artificial Sequence: Synthetic oligonucleotide
  Sense strand starting at position 3386 of SEQ ID NO: 317141
gagucuuuaguugaaacgu

SEQ ID NO: 467610 - RNA, 19 nt, Artificial Sequence
  Description of Artificial Sequence: Synthetic oligonucleotide
  Antisense Strand to SEQ ID NO: 467609
acguuucaacuaaagacuc

SEQ ID NO: 467611 - RNA, 19 nt, Artificial Sequence
  Description of Artificial Sequence: Synthetic oligonucleotide
  Sense strand starting at position 3514 of SEQ ID NO: 317141
agacuuauucccuacgguu

SEQ ID NO: 467612 - RNA, 19 nt, Artificial Sequence
  Description of Artificial Sequence: Synthetic oligonucleotide
  Antisense Strand to SEQ ID NO: 467611
aaccguagggaauaagucu

SEQ ID NO: 467613 - RNA, 19 nt, Artificial Sequence
  Description of Artificial Sequence: Synthetic oligonucleotide
  Sense strand starting at position 3893 of SEQ ID NO: 317141
guccauaugcccuacagau

SEQ ID NO: 467614 - RNA, 19 nt, Artificial Sequence
  Description of Artificial Sequence: Synthetic oligonucleotide
  Antisense Strand to SEQ ID NO: 467613
aucuguagggcauauggac

SEQ ID NO: 467615 - RNA, 19 nt, Artificial Sequence
  Description of Artificial Sequence: Synthetic oligonucleotide
  Sense strand starting at position 62 of SEQ ID NO: 317142
gacuccuauucgguaugua

SEQ ID NO: 467616 - RNA, 19 nt, Artificial Sequence
  Description of Artificial Sequence: Synthetic oligonucleotide
  Antisense Strand to SEQ ID NO: 467615
uacauaccgaauaggaguc

SEQ ID NO: 467617 - RNA, 19 nt, Artificial Sequence
  Description of Artificial Sequence: Synthetic oligonucleotide
  Sense strand starting at position 100 of SEQ ID NO: 317142
aguaguucccucuaguauc

SEQ ID NO: 467618 - RNA, 19 nt, Artificial Sequence
  Description of Artificial Sequence: Synthetic oligonucleotide
  Antisense Strand to SEQ ID NO: 467617
gauacuagagggaacuacu

SEQ ID NO: 467619 - RNA, 19 nt, Artificial Sequence
  Description of Artificial Sequence: Synthetic oligonucleotide
  Sense strand starting at position 134 of SEQ ID NO: 317142
cuucuaagaucugagaauu

SEQ ID NO: 467620 - RNA, 19 nt, Artificial Sequence
  Description of Artificial Sequence: Synthetic oligonucleotide
  Antisense Strand to SEQ ID NO: 467619
aauucucagaucuuagaag

SEQ ID NO: 467621 - RNA, 19 nt, Artificial Sequence
  Description of Artificial Sequence: Synthetic oligonucleotide
  Sense strand starting at position 163 of SEQ ID NO: 317142
gggaguucgagucacaaua

SEQ ID NO: 467622 - RNA, 19 nt, Artificial Sequence
  Description of Artificial Sequence: Synthetic oligonucleotide
  Antisense Strand to SEQ ID NO: 467621
uauugugacucgaacuccc

SEQ ID NO: 467623 - RNA, 19 nt, Artificial Sequence
  Description of Artificial Sequence: Synthetic oligonucleotide
  Sense strand starting at position 208 of SEQ ID NO: 317142
aggguagucugucuuuaag

SEQ ID NO: 467624 - RNA, 19 nt, Artificial Sequence
  Description of Artificial Sequence: Synthetic oligonucleotide
  Antisense Strand to SEQ ID NO: 467623
cuuaaagacagacuacccu

SEQ ID NO: 467625 - RNA, 19 nt, Artificial Sequence
  Description of Artificial Sequence: Synthetic oligonucleotide
  Sense strand starting at position 211 of SEQ ID NO: 317142
guagucugucuuuaagucu

SEQ ID NO: 467626 - RNA, 19 nt, Artificial Sequence
  Description of Artificial Sequence: Synthetic oligonucleotide
  Antisense Strand to SEQ ID NO: 467625
agacuuaaagacagacuac

SEQ ID NO: 467627 - RNA, 19 nt, Artificial Sequence
  Description of Artificial Sequence: Synthetic oligonucleotide
  Sense strand starting at position 218 of SEQ ID NO: 317142
gucuuuaagucuccacuac

SEQ ID NO: 467628 - RNA, 19 nt, Artificial Sequence
  Description of Artificial Sequence: Synthetic oligonucleotide
  Antisense Strand to SEQ ID NO: 467627
guaguggagacuuaaagac

SEQ ID NO: 467629 - RNA, 19 nt, Artificial Sequence
  Description of Artificial Sequence: Synthetic oligonucleotide
  Sense strand starting at position 240 of SEQ ID NO: 317142
gcuccaaggugacucauaa

SEQ ID NO: 467630 - RNA, 19 nt, Artificial Sequence
  Description of Artificial Sequence: Synthetic oligonucleotide
  Antisense Strand to SEQ ID NO: 467629
uuaugagucaccuuggagc

SEQ ID NO: 467631 - RNA, 19 nt, Artificial Sequence
  Description of Artificial Sequence: Synthetic oligonucleotide
  Sense strand starting at position 266 of SEQ ID NO: 317142
ccgucaacucugcauuaua

SEQ ID NO: 467632 - RNA, 19 nt, Artificial Sequence
  Description of Artificial Sequence: Synthetic oligonucleotide
  Antisense Strand to SEQ ID NO: 467631
uauaaugcagaguugacgg

SEQ ID NO: 467633 - RNA, 19 nt, Artificial Sequence
  Description of Artificial Sequence: Synthetic oligonucleotide
  Sense strand starting at position 285 of SEQ ID NO: 317142
uggccucaacaacgaaauu

SEQ ID NO: 467634 - RNA, 19 nt, Artificial Sequence
  Description of Artificial Sequence: Synthetic oligonucleotide
  Antisense Strand to SEQ ID NO: 467633
aauuucguuguugaggcca

SEQ ID NO: 467635 - RNA, 19 nt, Artificial Sequence
  Description of Artificial Sequence: Synthetic oligonucleotide
  Sense strand starting at position 343 of SEQ ID NO: 317142
gcaaauaugucacuucgga

SEQ ID NO: 467636 - RNA, 19 nt, Artificial Sequence
  Description of Artificial Sequence: Synthetic oligonucleotide
  Antisense Strand to SEQ ID NO: 467635
uccgaagugacauauuugc

SEQ ID NO: 467637 - RNA, 19 nt, Artificial Sequence
  Description of Artificial Sequence: Synthetic oligonucleotide
  Sense strand starting at position 382 of SEQ ID NO: 317142
ggcugaucuuaagcaacau

SEQ ID NO: 467638 - RNA, 19 nt, Artificial Sequence
  Description of Artificial Sequence: Synthetic oligonucleotide
  Antisense Strand to SEQ ID NO: 467637
auguugcuuaagaucagcc

SEQ ID NO: 467639 - RNA, 19 nt, Artificial Sequence
  Description of Artificial Sequence: Synthetic oligonucleotide
  Sense strand starting at position 616 of SEQ ID NO: 317142
gcacuuugggcucaaacga

SEQ ID NO: 467640 - RNA, 19 nt, Artificial Sequence
  Description of Artificial Sequence: Synthetic oligonucleotide
  Antisense Strand to SEQ ID NO: 467639
ucguuugagcccaaagugc

SEQ ID NO: 467641 - RNA, 19 nt, Artificial Sequence
  Description of Artificial Sequence: Synthetic oligonucleotide
  Sense strand starting at position 624 of SEQ ID NO: 317142
ggcucaaacgaugaucaca

SEQ ID NO: 467642 - RNA, 19 nt, Artificial Sequence
  Description of Artificial Sequence: Synthetic oligonucleotide
  Antisense Strand to SEQ ID NO: 467641
ugugaucaucguuugagcc

SEQ ID NO: 467643 - RNA, 19 nt, Artificial Sequence
  Description of Artificial Sequence: Synthetic oligonucleotide
  Sense strand starting at position 647 of SEQ ID NO: 317142
gugcgagacucuuuccaag

SEQ ID NO: 467644 - RNA, 19 nt, Artificial Sequence
  Description of Artificial Sequence: Synthetic oligonucleotide
  Antisense Strand to SEQ ID NO: 467643
cuuggaaagagucucgcac

SEQ ID NO: 467645 - RNA, 19 nt, Artificial Sequence
  Description of Artificial Sequence: Synthetic oligonucleotide
  Sense strand starting at position 649 of SEQ ID NO: 317142
gcgagacucuuuccaagga

SEQ ID NO: 467646 - RNA, 19 nt, Artificial Sequence
  Description of Artificial Sequence: Synthetic oligonucleotide
  Antisense Strand to SEQ ID NO: 467645
uccuuggaaagagucucgc

SEQ ID NO: 467647 - RNA, 19 nt, Artificial Sequence
  Description of Artificial Sequence: Synthetic oligonucleotide
  Sense strand starting at position 1911 of SEQ ID NO: 317142
cguuguucucguuucugga

SEQ ID NO: 467648 - RNA, 19 nt, Artificial Sequence
  Description of Artificial Sequence: Synthetic oligonucleotide
  Antisense Strand to SEQ ID NO: 467647
uccagaaacgagaacaacg

SEQ ID NO: 467649 - RNA, 19 nt, Artificial Sequence
  Description of Artificial Sequence: Synthetic oligonucleotide
  Sense strand starting at position 1919 of SEQ ID NO: 317142
ucguuucuggaguagggau

SEQ ID NO: 467650 - RNA, 19 nt, Artificial Sequence
  Description of Artificial Sequence: Synthetic oligonucleotide
  Antisense Strand to SEQ ID NO: 467649
aucccuacuccagaaacga

SEQ ID NO: 467651 - RNA, 19 nt, Artificial Sequence
  Description of Artificial Sequence: Synthetic oligonucleotide
  Sense strand starting at position 1941 of SEQ ID NO: 317142
gcauuuauuucuuaguuuc

SEQ ID NO: 467652 - RNA, 19 nt, Artificial Sequence
  Description of Artificial Sequence: Synthetic oligonucleotide
  Antisense Strand to SEQ ID NO: 467651
gaaacuaagaaauaaaugc

SEQ ID NO: 467653 - RNA, 19 nt, Artificial Sequence
  Description of Artificial Sequence: Synthetic oligonucleotide
  Sense strand starting at position 1944 of SEQ ID NO: 317142
uuuauuucuuaguuuccga

SEQ ID NO: 467654 - RNA, 19 nt, Artificial Sequence
  Description of Artificial Sequence: Synthetic oligonucleotide
  Antisense Strand to SEQ ID NO: 467653
ucggaaacuaagaaauaaa

SEQ ID NO: 467655 - RNA, 19 nt, Artificial Sequence
  Description of Artificial Sequence: Synthetic oligonucleotide
  Sense strand starting at position 1952 of SEQ ID NO: 317142
uuaguuuccgagcgggaaa

SEQ ID NO: 467656 - RNA, 19 nt, Artificial Sequence
  Description of Artificial Sequence: Synthetic oligonucleotide
  Antisense Strand to SEQ ID NO: 467655
uuucccgcucggaaacuaa

SEQ ID NO: 467657 - RNA, 19 nt, Artificial Sequence
  Description of Artificial Sequence: Synthetic oligonucleotide
  Sense strand starting at position 2039 of SEQ ID NO: 317142
aaaguugagucuuuaguug

SEQ ID NO: 467658 - RNA, 19 nt, Artificial Sequence
  Description of Artificial Sequence: Synthetic oligonucleotide
  Antisense Strand to SEQ ID NO: 467657
caacuaaagacucaacuuu

SEQ ID NO: 467659 - RNA, 19 nt, Artificial Sequence
  Description of Artificial Sequence: Synthetic oligonucleotide
  Sense strand starting at position 2043 of SEQ ID NO: 317142
uugagucuuuaguugaaac

SEQ ID NO: 467660 - RNA, 19 nt, Artificial Sequence
  Description of Artificial Sequence: Synthetic oligonucleotide
  Antisense Strand to SEQ ID NO: 467659
guuucaacuaaagacucaa

SEQ ID NO: 467661 - RNA, 19 nt, Artificial Sequence
  Description of Artificial Sequence: Synthetic oligonucleotide
  Sense strand starting at position 2045 of SEQ ID NO: 317142
gagucuuuaguugaaacgu

SEQ ID NO: 467662 - RNA, 19 nt, Artificial Sequence
  Description of Artificial Sequence: Synthetic oligonucleotide
  Antisense Strand to SEQ ID NO: 467661
acguuucaacuaaagacuc

SEQ ID NO: 467663 - RNA, 19 nt, Artificial Sequence
  Description of Artificial Sequence: Synthetic oligonucleotide
  Sense strand starting at position 2172 of SEQ ID NO: 317142
cagacuuauucccuacggu

SEQ ID NO: 467664 - RNA, 19 nt, Artificial Sequence
  Description of Artificial Sequence: Synthetic oligonucleotide
  Antisense Strand to SEQ ID NO: 467663
accguagggaauaagucug

SEQ ID NO: 467665 - RNA, 19 nt, Artificial Sequence
  Description of Artificial Sequence: Synthetic oligonucleotide
  Sense strand starting at position 2173 of SEQ ID NO: 317142
agacuuauucccuacgguu

SEQ ID NO: 467666 - RNA, 19 nt, Artificial Sequence
  Description of Artificial Sequence: Synthetic oligonucleotide
  Antisense Strand to SEQ ID NO: 467665
aaccguagggaauaagucu

SEQ ID NO: 467667 - RNA, 19 nt, Artificial Sequence
  Description of Artificial Sequence: Synthetic oligonucleotide
  Sense strand starting at position 2233 of SEQ ID NO: 317142
ugauguuugcagggacugu

SEQ ID NO: 467668 - RNA, 19 nt, Artificial Sequence
  Description of Artificial Sequence: Synthetic oligonucleotide
  Antisense Strand to SEQ ID NO: 467667
acagucccugcaaacauca

SEQ ID NO: 467669 - RNA, 19 nt, Artificial Sequence
  Description of Artificial Sequence: Synthetic oligonucleotide
  Sense strand starting at position 2349 of SEQ ID NO: 317142
gcaaacguuuccuuaugau

SEQ ID NO: 467670 - RNA, 19 nt, Artificial Sequence
  Description of Artificial Sequence: Synthetic oligonucleotide
  Antisense Strand to SEQ ID NO: 467669
aucauaaggaaacguuugc

SEQ ID NO: 467671 - RNA, 19 nt, Artificial Sequence
  Description of Artificial Sequence: Synthetic oligonucleotide
  Sense strand starting at position 2552 of SEQ ID NO: 317142
guccauaugcccuacagau

SEQ ID NO: 467672 - RNA, 19 nt, Artificial Sequence
  Description of Artificial Sequence: Synthetic oligonucleotide
  Antisense Strand to SEQ ID NO: 467671
aucuguagggcauauggac

SEQ ID NO: 467673 - RNA, 19 nt, Artificial Sequence
  Description of Artificial Sequence: Synthetic oligonucleotide
  Sense strand starting at position 2731 of SEQ ID NO: 317142
gacuaauuggugugcaggu

SEQ ID NO: 467674 - RNA, 19 nt, Artificial Sequence
  Description of Artificial Sequence: Synthetic oligonucleotide
  Antisense Strand to SEQ ID NO: 467673
accugcacaccaauuaguc

SEQ ID NO: 467675 - RNA, 19 nt, Artificial Sequence
  Description of Artificial Sequence: Synthetic oligonucleotide
  Sense strand starting at position 2732 of SEQ ID NO: 317142
acuaauuggugugcaggua

SEQ ID NO: 467676 - RNA, 19 nt, Artificial Sequence
  Description of Artificial Sequence: Synthetic oligonucleotide
  Antisense Strand to SEQ ID NO: 467675
uaccugcacaccaauuagu

SEQ ID NO: 467677 - RNA, 19 nt, Artificial Sequence
  Description of Artificial Sequence: Synthetic oligonucleotide
  Sense strand starting at position 2753 of SEQ ID NO: 317142
acuguaacauaaguuuaga

SEQ ID NO: 467678 - RNA, 19 nt, Artificial Sequence
  Description of Artificial Sequence: Synthetic oligonucleotide
  Antisense Strand to SEQ ID NO: 467677
ucuaaacuuauguuacagu

SEQ ID NO: 467679 - RNA, 19 nt, Artificial Sequence
  Description of Artificial Sequence: Synthetic oligonucleotide
  Sense strand starting at position 2901 of SEQ ID NO: 317142
cccuauguauauguauaua

SEQ ID NO: 467680 - RNA, 19 nt, Artificial Sequence
  Description of Artificial Sequence: Synthetic oligonucleotide
  Antisense Strand to SEQ ID NO: 467679
uauauacauauacauaggg

SEQ ID NO: 467681 - RNA, 19 nt, Artificial Sequence
  Description of Artificial Sequence: Synthetic oligonucleotide
  Sense strand starting at position 2933 of SEQ ID NO: 317142
aaguaaguuguagauguaa

SEQ ID NO: 467682 - RNA, 19 nt, Artificial Sequence
  Description of Artificial Sequence: Synthetic oligonucleotide
  Antisense Strand to SEQ ID NO: 467681
uuacaucuacaacuuacuu

SEQ ID NO: 467683 - RNA, 19 nt, Artificial Sequence
  Description of Artificial Sequence: Synthetic oligonucleotide
  Sense strand starting at position 3285 of SEQ ID NO: 317142
cgucuuguauacuuauaac

SEQ ID NO: 467684 - RNA, 19 nt, Artificial Sequence
  Description of Artificial Sequence: Synthetic oligonucleotide
  Antisense Strand to SEQ ID NO: 467683
guuauaaguauacaagacg

SEQ ID NO: 467685 - RNA, 19 nt, Artificial Sequence
  Description of Artificial Sequence: Synthetic oligonucleotide
  Sense strand starting at position 3349 of SEQ ID NO: 317142
ucucaaguguuagcacuuu

SEQ ID NO: 467686 - RNA, 19 nt, Artificial Sequence
  Description of Artificial Sequence: Synthetic oligonucleotide
  Antisense Strand to SEQ ID NO: 467685
aaagugcuaacacuugaga

SEQ ID NO: 467687 - RNA, 19 nt, Artificial Sequence
  Description of Artificial Sequence: Synthetic oligonucleotide
  Sense strand starting at position 3736 of SEQ ID NO: 317142
ggaauaauacagugcacuu

SEQ ID NO: 467688 - RNA, 19 nt, Artificial Sequence
  Description of Artificial Sequence: Synthetic oligonucleotide
  Antisense Strand to SEQ ID NO: 467687
aagugcacuguauuauucc

SEQ ID NO: 467689 - RNA, 19 nt, Artificial Sequence
  Description of Artificial Sequence: Synthetic oligonucleotide
  Sense strand starting at position 3953 of SEQ ID NO: 317142
guuugagucccuuauguaa

SEQ ID NO: 467690 - RNA, 19 nt, Artificial Sequence
  Description of Artificial Sequence: Synthetic oligonucleotide
  Antisense Strand to SEQ ID NO: 467689
uuacauaagggacucaaac

SEQ ID NO: 467691 - RNA, 19 nt, Artificial Sequence
  Description of Artificial Sequence: Synthetic oligonucleotide
  Sense strand starting at position 3962 of SEQ ID NO: 317142
ccuuauguaaaguggugua

SEQ ID NO: 467692 - RNA, 19 nt, Artificial Sequence
  Description of Artificial Sequence: Synthetic oligonucleotide
  Antisense Strand to SEQ ID NO: 467691
uacaccacuuuacauaagg

SEQ ID NO: 467693 - RNA, 19 nt, Artificial Sequence
  Description of Artificial Sequence: Synthetic oligonucleotide
  Sense strand starting at position 3967 of SEQ ID NO: 317142
uguaaagugguguaguauu

SEQ ID NO: 467694 - RNA, 19 nt, Artificial Sequence
  Description of Artificial Sequence: Synthetic oligonucleotide
  Antisense Strand to SEQ ID NO: 467693
aauacuacaccacuuuaca

SEQ ID NO: 467695 - RNA, 19 nt, Artificial Sequence
  Description of Artificial Sequence: Synthetic oligonucleotide
  Sense strand starting at position 141 of SEQ ID NO: 317143
gaauuaaaguuugcaaggu

SEQ ID NO: 467696 - RNA, 19 nt, Artificial Sequence
  Description of Artificial Sequence: Synthetic oligonucleotide
  Antisense Strand to SEQ ID NO: 467695
accuugcaaacuuuaauuc

SEQ ID NO: 467697 - RNA, 19 nt, Artificial Sequence
  Description of Artificial Sequence: Synthetic oligonucleotide
  Sense strand starting at position 145 of SEQ ID NO: 317143
uaaaguuugcaagguaaau

SEQ ID NO: 467698 - RNA, 19 nt, Artificial Sequence
  Description of Artificial Sequence: Synthetic oligonucleotide
  Antisense Strand to SEQ ID NO: 467697
auuuaccuugcaaacuuua

SEQ ID NO: 467699 - RNA, 19 nt, Artificial Sequence
  Description of Artificial Sequence: Synthetic oligonucleotide
  Sense strand starting at position 276 of SEQ ID NO: 317143
agcauauagccuuggauau

SEQ ID NO: 467700 - RNA, 19 nt, Artificial Sequence
  Description of Artificial Sequence: Synthetic oligonucleotide
  Antisense Strand to SEQ ID NO: 467699
auauccaaggcuauaugcu

SEQ ID NO: 467701 - RNA, 19 nt, Artificial Sequence
  Description of Artificial Sequence: Synthetic oligonucleotide
  Sense strand starting at position 277 of SEQ ID NO: 317143
gcauauagccuuggauaug

SEQ ID NO: 467702 - RNA, 19 nt, Artificial Sequence
  Description of Artificial Sequence: Synthetic oligonucleotide
  Antisense Strand to SEQ ID NO: 467701
cauauccaaggcuauaugc

SEQ ID NO: 467703 - RNA, 19 nt, Artificial Sequence
  Description of Artificial Sequence: Synthetic oligonucleotide
  Sense strand starting at position 280 of SEQ ID NO: 317143
uauagccuuggauauguua

SEQ ID NO: 467704 - RNA, 19 nt, Artificial Sequence
  Description of Artificial Sequence: Synthetic oligonucleotide
  Antisense Strand to SEQ ID NO: 467703
uaacauauccaaggcuaua

SEQ ID NO: 467705 - RNA, 19 nt, Artificial Sequence
  Description of Artificial Sequence: Synthetic oligonucleotide
  Sense strand starting at position 317 of SEQ ID NO: 317143
uguuacuuacaguauaacu

SEQ ID NO: 467706 - RNA, 19 nt, Artificial Sequence
  Description of Artificial Sequence: Synthetic oligonucleotide
  Antisense Strand to SEQ ID NO: 467705
aguuauacuguaaguaaca

SEQ ID NO: 467707 - RNA, 19 nt, Artificial Sequence
  Description of Artificial Sequence: Synthetic oligonucleotide
  Sense strand starting at position 358 of SEQ ID NO: 317143
aauuguggugaucagagua

SEQ ID NO: 467708 - RNA, 19 nt, Artificial Sequence
  Description of Artificial Sequence: Synthetic oligonucleotide
  Antisense Strand to SEQ ID NO: 467707
uacucugaucaccacaauu

SEQ ID NO: 467709 - RNA, 19 nt, Artificial Sequence
  Description of Artificial Sequence: Synthetic oligonucleotide
  Sense strand starting at position 422 of SEQ ID NO: 317143
guuaucuguaggugcauuu

SEQ ID NO: 467710 - RNA, 19 nt, Artificial Sequence
  Description of Artificial Sequence: Synthetic oligonucleotide
  Antisense Strand to SEQ ID NO: 467709
aaaugcaccuacagauaac

SEQ ID NO: 467711 - RNA, 19 nt, Artificial Sequence
  Description of Artificial Sequence: Synthetic oligonucleotide
  Sense strand starting at position 447 of SEQ ID NO: 317143
gcaaaugaaucaguuaaau

SEQ ID NO: 467712 - RNA, 19 nt, Artificial Sequence
  Description of Artificial Sequence: Synthetic oligonucleotide
  Antisense Strand to SEQ ID NO: 467711
auuuaacugauucauuugc

SEQ ID NO: 467713 - RNA, 19 nt, Artificial Sequence
  Description of Artificial Sequence: Synthetic oligonucleotide
  Sense strand starting at position 466 of SEQ ID NO: 317143
guugaaucagacuaguauu

SEQ ID NO: 467714 - RNA, 19 nt, Artificial Sequence
  Description of Artificial Sequence: Synthetic oligonucleotide
  Antisense Strand to SEQ ID NO: 467713
aauacuagucugauucaac

SEQ ID NO: 467715 - RNA, 19 nt, Artificial Sequence
  Description of Artificial Sequence: Synthetic oligonucleotide
  Sense strand starting at position 477 of SEQ ID NO: 317143
cuaguauuugccgagccuu

SEQ ID NO: 467716 - RNA, 19 nt, Artificial Sequence
  Description of Artificial Sequence: Synthetic oligonucleotide
  Antisense Strand to SEQ ID NO: 467715
aaggcucggcaaauacuag

SEQ ID NO: 467717 - RNA, 19 nt, Artificial Sequence
  Description of Artificial Sequence: Synthetic oligonucleotide
  Sense strand starting at position 500 of SEQ ID NO: 317143
auugccauuucuuugucau

SEQ ID NO: 467718 - RNA, 19 nt, Artificial Sequence
  Description of Artificial Sequence: Synthetic oligonucleotide
  Antisense Strand to SEQ ID NO: 467717
augacaaagaaauggcaau

SEQ ID NO: 467719 - RNA, 19 nt, Artificial Sequence
  Description of Artificial Sequence: Synthetic oligonucleotide
  Sense strand starting at position 501 of SEQ ID NO: 317143
uugccauuucuuugucauc

SEQ ID NO: 467720 - RNA, 19 nt, Artificial Sequence
  Description of Artificial Sequence: Synthetic oligonucleotide
  Antisense Strand to SEQ ID NO: 467719
gaugacaaagaaauggcaa

SEQ ID NO: 467721 - RNA, 19 nt, Artificial Sequence
  Description of Artificial Sequence: Synthetic oligonucleotide
  Sense strand starting at position 502 of SEQ ID NO: 317143
ugccauuucuuugucauca

SEQ ID NO: 467722 - RNA, 19 nt, Artificial Sequence
  Description of Artificial Sequence: Synthetic oligonucleotide
  Antisense Strand to SEQ ID NO: 467721
ugaugacaaagaaauggca

SEQ ID NO: 467723 - RNA, 19 nt, Artificial Sequence
  Description of Artificial Sequence: Synthetic oligonucleotide
  Sense strand starting at position 503 of SEQ ID NO: 317143
gccauuucuuugucaucac

SEQ ID NO: 467724 - RNA, 19 nt, Artificial Sequence
  Description of Artificial Sequence: Synthetic oligonucleotide
  Antisense Strand to SEQ ID NO: 467723
gugaugacaaagaaauggc

SEQ ID NO: 467725 - RNA, 19 nt, Artificial Sequence
  Description of Artificial Sequence: Synthetic oligonucleotide
  Sense strand starting at position 557 of SEQ ID NO: 317143
uggcucaucuaaucaggua

SEQ ID NO: 467726 - RNA, 19 nt, Artificial Sequence
  Description of Artificial Sequence: Synthetic oligonucleotide
  Antisense Strand to SEQ ID NO: 467725
uaccugauuagaugagcca

SEQ ID NO: 467727 - RNA, 19 nt, Artificial Sequence
  Description of Artificial Sequence: Synthetic oligonucleotide
  Sense strand starting at position 587 of SEQ ID NO: 317143
guggaagcuacugauuguu

SEQ ID NO: 467728 - RNA, 19 nt, Artificial Sequence
  Description of Artificial Sequence: Synthetic oligonucleotide
  Antisense Strand to SEQ ID NO: 467727
aacaaucaguagcuuccac

SEQ ID NO: 467729 - RNA, 19 nt, Artificial Sequence
  Description of Artificial Sequence: Synthetic oligonucleotide
  Sense strand starting at position 682 of SEQ ID NO: 317143
auaguauugcuguagggau

SEQ ID NO: 467730 - RNA, 19 nt, Artificial Sequence
  Description of Artificial Sequence: Synthetic oligonucleotide
  Antisense Strand to SEQ ID NO: 467729
aucccuacagcaauacuau

SEQ ID NO: 467731 - RNA, 19 nt, Artificial Sequence
  Description of Artificial Sequence: Synthetic oligonucleotide
  Sense strand starting at position 684 of SEQ ID NO: 317143
aguauugcuguagggauuu

SEQ ID NO: 467732 - RNA, 19 nt, Artificial Sequence
  Description of Artificial Sequence: Synthetic oligonucleotide
  Antisense Strand to SEQ ID NO: 467731
aaaucccuacagcaauacu

SEQ ID NO: 467733 - RNA, 19 nt, Artificial Sequence
  Description of Artificial Sequence: Synthetic oligonucleotide
  Sense strand starting at position 714 of SEQ ID NO: 317143
gccagaaauuuggauauga

SEQ ID NO: 467734 - RNA, 19 nt, Artificial Sequence
  Description of Artificial Sequence: Synthetic oligonucleotide
  Antisense Strand to SEQ ID NO: 467733
ucauauccaaauuucuggc

SEQ ID NO: 467735 - RNA, 19 nt, Artificial Sequence
  Description of Artificial Sequence: Synthetic oligonucleotide
  Sense strand starting at position 844 of SEQ ID NO: 317143
gguuauuacuaaguaacag

SEQ ID NO: 467736 - RNA, 19 nt, Artificial Sequence
  Description of Artificial Sequence: Synthetic oligonucleotide
  Antisense Strand to SEQ ID NO: 467735
cuguuacuuaguaauaacc

SEQ ID NO: 467737 - RNA, 19 nt, Artificial Sequence
  Description of Artificial Sequence: Synthetic oligonucleotide
  Sense strand starting at position 1095 of SEQ ID NO: 317143
ggaaacauguaucucaacu

SEQ ID NO: 467738 - RNA, 19 nt, Artificial Sequence
  Description of Artificial Sequence: Synthetic oligonucleotide
  Antisense Strand to SEQ ID NO: 467737
aguugagauacauguuucc

SEQ ID NO: 467739 - RNA, 19 nt, Artificial Sequence
  Description of Artificial Sequence: Synthetic oligonucleotide
  Sense strand starting at position 1238 of SEQ ID NO: 317143
aaaucaggauuuggaaaga

SEQ ID NO: 467740 - RNA, 19 nt, Artificial Sequence
  Description of Artificial Sequence: Synthetic oligonucleotide
  Antisense Strand to SEQ ID NO: 467739
ucuuuccaaauccugauuu

SEQ ID NO: 467741 - RNA, 19 nt, Artificial Sequence
  Description of Artificial Sequence: Synthetic oligonucleotide
  Sense strand starting at position 1283 of SEQ ID NO: 317143
uggcucauauaacuugaaa

SEQ ID NO: 467742 - RNA, 19 nt, Artificial Sequence
  Description of Artificial Sequence: Synthetic oligonucleotide
  Antisense Strand to SEQ ID NO: 467741
uuucaaguuauaugagcca

SEQ ID NO: 467743 - RNA, 19 nt, Artificial Sequence
  Description of Artificial Sequence: Synthetic oligonucleotide
  Sense strand starting at position 1417 of SEQ ID NO: 317143
aguaguucccucuaguauc

SEQ ID NO: 467744 - RNA, 19 nt, Artificial Sequence
  Description of Artificial Sequence: Synthetic oligonucleotide
  Antisense Strand to SEQ ID NO: 467743
gauacuagagggaacuacu

SEQ ID NO: 467745 - RNA, 19 nt, Artificial Sequence
  Description of Artificial Sequence: Synthetic oligonucleotide
  Sense strand starting at position 1480 of SEQ ID NO: 317143
gggaguucgagucacaaua

SEQ ID NO: 467746 - RNA, 19 nt, Artificial Sequence
  Description of Artificial Sequence: Synthetic oligonucleotide
  Antisense Strand to SEQ ID NO: 467745
uauugugacucgaacuccc

SEQ ID NO: 467747 - RNA, 19 nt, Artificial Sequence
  Description of Artificial Sequence: Synthetic oligonucleotide
  Sense strand starting at position 1557 of SEQ ID NO: 317143
gcuccaaggugacucauaa

SEQ ID NO: 467748 - RNA, 19 nt, Artificial Sequence
  Description of Artificial Sequence: Synthetic oligonucleotide
  Antisense Strand to SEQ ID NO: 467747
uuaugagucaccuuggagc

SEQ ID NO: 467749 - RNA, 19 nt, Artificial Sequence
  Description of Artificial Sequence: Synthetic oligonucleotide
  Sense strand starting at position 1602 of SEQ ID NO: 317143
uggccucaacaacgaaauu

SEQ ID NO: 467750 - RNA, 19 nt, Artificial Sequence
  Description of Artificial Sequence: Synthetic oligonucleotide
  Antisense Strand to SEQ ID NO: 467749
aauuucguuguugaggcca

SEQ ID NO: 467751 - RNA, 19 nt, Artificial Sequence
  Description of Artificial Sequence: Synthetic oligonucleotide
  Sense strand starting at position 1699 of SEQ ID NO: 317143
ggcugaucuuaagcaacau

SEQ ID NO: 467752 - RNA, 19 nt, Artificial Sequence
  Description of Artificial Sequence: Synthetic oligonucleotide
  Antisense Strand to SEQ ID NO: 467751
auguugcuuaagaucagcc

SEQ ID NO: 467753 - RNA, 19 nt, Artificial Sequence
  Description of Artificial Sequence: Synthetic oligonucleotide
  Sense strand starting at position 1933 of SEQ ID NO: 317143
gcacuuugggcucaaacga

SEQ ID NO: 467754 - RNA, 19 nt, Artificial Sequence
  Description of Artificial Sequence: Synthetic oligonucleotide
  Antisense Strand to SEQ ID NO: 467753
ucguuugagcccaaagugc

SEQ ID NO: 467755 - RNA, 19 nt, Artificial Sequence
  Description of Artificial Sequence: Synthetic oligonucleotide
  Sense strand starting at position 1941 of SEQ ID NO: 317143
ggcucaaacgaugaucaca

SEQ ID NO: 467756 - RNA, 19 nt, Artificial Sequence
  Description of Artificial Sequence: Synthetic oligonucleotide
  Antisense Strand to SEQ ID NO: 467755
ugugaucaucguuugagcc

SEQ ID NO: 467757 - RNA, 19 nt, Artificial Sequence
  Description of Artificial Sequence: Synthetic oligonucleotide
  Sense strand starting at position 1966 of SEQ ID NO: 317143
gcgagacucuuuccaagga

SEQ ID NO: 467758 - RNA, 19 nt, Artificial Sequence
  Description of Artificial Sequence: Synthetic oligonucleotide
  Antisense Strand to SEQ ID NO: 467757
uccuuggaaagagucucgc

SEQ ID NO: 467759 - RNA, 19 nt, Artificial Sequence
  Description of Artificial Sequence: Synthetic oligonucleotide
  Sense strand starting at position 3228 of SEQ ID NO: 317143
cguuguucucguuucugga

SEQ ID NO: 467760 - RNA, 19 nt, Artificial Sequence
  Description of Artificial Sequence: Synthetic oligonucleotide
  Antisense Strand to SEQ ID NO: 467759
uccagaaacgagaacaacg

SEQ ID NO: 467761 - RNA, 19 nt, Artificial Sequence
  Description of Artificial Sequence: Synthetic oligonucleotide
  Sense strand starting at position 3236 of SEQ ID NO: 317143
ucguuucuggaguagggau

SEQ ID NO: 467762 - RNA, 19 nt, Artificial Sequence
  Description of Artificial Sequence: Synthetic oligonucleotide
  Antisense Strand to SEQ ID NO: 467761
aucccuacuccagaaacga

SEQ ID NO: 467763 - RNA, 19 nt, Artificial Sequence
  Description of Artificial Sequence: Synthetic oligonucleotide
  Sense strand starting at position 3258 of SEQ ID NO: 317143
gcauuuauuucuuaguuuc

SEQ ID NO: 467764 - RNA, 19 nt, Artificial Sequence
  Description of Artificial Sequence: Synthetic oligonucleotide
  Antisense Strand to SEQ ID NO: 467763
gaaacuaagaaauaaaugc

SEQ ID NO: 467765 - RNA, 19 nt, Artificial Sequence
  Description of Artificial Sequence: Synthetic oligonucleotide
  Sense strand starting at position 3261 of SEQ ID NO: 317143
uuuauuucuuaguuuccga

SEQ ID NO: 467766 - RNA, 19 nt, Artificial Sequence
  Description of Artificial Sequence: Synthetic oligonucleotide
  Antisense Strand to SEQ ID NO: 467765
ucggaaacuaagaaauaaa

SEQ ID NO: 467767 - RNA, 19 nt, Artificial Sequence
  Description of Artificial Sequence: Synthetic oligonucleotide
  Sense strand starting at position 3360 of SEQ ID NO: 317143
uugagucuuuaguugaaac

SEQ ID NO: 467768 - RNA, 19 nt, Artificial Sequence
  Description of Artificial Sequence: Synthetic oligonucleotide
  Antisense Strand to SEQ ID NO: 467767
guuucaacuaaagacucaa

SEQ ID NO: 467769 - RNA, 19 nt, Artificial Sequence
  Description of Artificial Sequence: Synthetic oligonucleotide
  Sense strand starting at position 3362 of SEQ ID NO: 317143
gagucuuuaguugaaacgu

SEQ ID NO: 467770 - RNA, 19 nt, Artificial Sequence
  Description of Artificial Sequence: Synthetic oligonucleotide
  Antisense Strand to SEQ ID NO: 467769
acguuucaacuaaagacuc

SEQ ID NO: 467771 - RNA, 19 nt, Artificial Sequence
  Description of Artificial Sequence: Synthetic oligonucleotide
  Sense strand starting at position 3490 of SEQ ID NO: 317143
agacuuauucccuacgguu

SEQ ID NO: 467772 - RNA, 19 nt, Artificial Sequence
  Description of Artificial Sequence: Synthetic oligonucleotide
  Antisense Strand to SEQ ID NO: 467771
aaccguagggaauaagucu

SEQ ID NO: 467773 - RNA, 19 nt, Artificial Sequence
  Description of Artificial Sequence: Synthetic oligonucleotide
  Sense strand starting at position 3869 of SEQ ID NO: 317143
guccauaugcccuacagau

SEQ ID NO: 467774 - RNA, 19 nt, Artificial Sequence
  Description of Artificial Sequence: Synthetic oligonucleotide
  Antisense Strand to SEQ ID NO: 467773
aucuguagggcauauggac

SEQ ID NO: 467775 - RNA, 19 nt, Artificial Sequence
  Description of Artificial Sequence: Synthetic oligonucleotide
  Sense strand starting at position 503 of SEQ ID NO: 317144
uaaagaaucguguaucucu

SEQ ID NO: 467776 - RNA, 19 nt, Artificial Sequence
  Description of Artificial Sequence: Synthetic oligonucleotide
  Antisense Strand to SEQ ID NO: 467775
agagauacacgauucuuua

SEQ ID NO: 467777 - RNA, 19 nt, Artificial Sequence
  Description of Artificial Sequence: Synthetic oligonucleotide
  Sense strand starting at position 958 of SEQ ID NO: 317144
auaagaagcuuugcagaag

SEQ ID NO: 467778 - RNA, 19 nt, Artificial Sequence
  Description of Artificial Sequence: Synthetic oligonucleotide
  Antisense Strand to SEQ ID NO: 467777
cuucugcaaagcuucuuau

SEQ ID NO: 467779 - RNA, 19 nt, Artificial Sequence
  Description of Artificial Sequence: Synthetic oligonucleotide
  Sense strand starting at position 981 of SEQ ID NO: 317144
ugaaauacagugcaauauu

SEQ ID NO: 467780 - RNA, 19 nt, Artificial Sequence
  Description of Artificial Sequence: Synthetic oligonucleotide
  Antisense Strand to SEQ ID NO: 467779
aauauugcacuguauuuca

SEQ ID NO: 467781 - RNA, 19 nt, Artificial Sequence
  Description of Artificial Sequence: Synthetic oligonucleotide
  Sense strand starting at position 997 of SEQ ID NO: 317144
auugcauguaggcaugaaa

SEQ ID NO: 467782 - RNA, 19 nt, Artificial Sequence
  Description of Artificial Sequence: Synthetic oligonucleotide
  Antisense Strand to SEQ ID NO: 467781
uuucaugccuacaugcaau

SEQ ID NO: 467783 - RNA, 19 nt, Artificial Sequence
  Description of Artificial Sequence: Synthetic oligonucleotide
  Sense strand starting at position 1000 of SEQ ID NO: 317144
gcauguaggcaugaaauac

SEQ ID NO: 467784 - RNA, 19 nt, Artificial Sequence
  Description of Artificial Sequence: Synthetic oligonucleotide
  Antisense Strand to SEQ ID NO: 467783
guauuucaugccuacaugc

SEQ ID NO: 467785 - RNA, 19 nt, Artificial Sequence
  Description of Artificial Sequence: Synthetic oligonucleotide
  Sense strand starting at position 1079 of SEQ ID NO: 317144
acaaguucuggccaaauga

SEQ ID NO: 467786 - RNA, 19 nt, Artificial Sequence
  Description of Artificial Sequence: Synthetic oligonucleotide
  Antisense Strand to SEQ ID NO: 467785
ucauuuggccagaacuugu

SEQ ID NO: 467787 - RNA, 19 nt, Artificial Sequence
  Description of Artificial Sequence: Synthetic oligonucleotide
  Sense strand starting at position 1101 of SEQ ID NO: 317144
ccacaucgucugcaaugaa

SEQ ID NO: 467788 - RNA, 19 nt, Artificial Sequence
  Description of Artificial Sequence: Synthetic oligonucleotide
  Antisense Strand to SEQ ID NO: 467787
uucauugcagacgaugugg

SEQ ID NO: 467789 - RNA, 19 nt, Artificial Sequence
  Description of Artificial Sequence: Synthetic oligonucleotide
  Sense strand starting at position 1203 of SEQ ID NO: 317144
ccuuaauuagauggcaaua

SEQ ID NO: 467790 - RNA, 19 nt, Artificial Sequence
  Description of Artificial Sequence: Synthetic oligonucleotide
  Antisense Strand to SEQ ID NO: 467789
uauugccaucuaauuaagg

SEQ ID NO: 467791 - RNA, 19 nt, Artificial Sequence
  Description of Artificial Sequence: Synthetic oligonucleotide
  Sense strand starting at position 1216 of SEQ ID NO: 317144
gcaauaugaaguugaguga

SEQ ID NO: 467792 - RNA, 19 nt, Artificial Sequence
  Description of Artificial Sequence: Synthetic oligonucleotide
  Antisense Strand to SEQ ID NO: 467791
ucacucaacuucauauugc

SEQ ID NO: 467793 - RNA, 19 nt, Artificial Sequence
  Description of Artificial Sequence: Synthetic oligonucleotide
  Sense strand starting at position 1220 of SEQ ID NO: 317144
uaugaaguugagugagaag

SEQ ID NO: 467794 - RNA, 19 nt, Artificial Sequence
  Description of Artificial Sequence: Synthetic oligonucleotide
  Antisense Strand to SEQ ID NO: 467793
cuucucacucaacuucaua

SEQ ID NO: 467795 - RNA, 19 nt, Artificial Sequence
  Description of Artificial Sequence: Synthetic oligonucleotide
  Sense strand starting at position 1285 of SEQ ID NO: 317144
gugauauacuuaccaauug

SEQ ID NO: 467796 - RNA, 19 nt, Artificial Sequence
  Description of Artificial Sequence: Synthetic oligonucleotide
  Antisense Strand to SEQ ID NO: 467795
caauugguaaguauaucac

SEQ ID NO: 467797 - RNA, 19 nt, Artificial Sequence
  Description of Artificial Sequence: Synthetic oligonucleotide
  Sense strand starting at position 1423 of SEQ ID NO: 317144
ugggaaaccauguguguau

SEQ ID NO: 467798 - RNA, 19 nt, Artificial Sequence
  Description of Artificial Sequence: Synthetic oligonucleotide
  Antisense Strand to SEQ ID NO: 467797
auacacacaugguuuccca

SEQ ID NO: 467799 - RNA, 19 nt, Artificial Sequence
  Description of Artificial Sequence: Synthetic oligonucleotide
  Sense strand starting at position 1425 of SEQ ID NO: 317144
ggaaaccauguguguauca

SEQ ID NO: 467800 - RNA, 19 nt, Artificial Sequence
  Description of Artificial Sequence: Synthetic oligonucleotide
  Antisense Strand to SEQ ID NO: 467799
ugauacacacaugguuucc

SEQ ID NO: 467801 - RNA, 19 nt, Artificial Sequence
  Description of Artificial Sequence: Synthetic oligonucleotide
  Sense strand starting at position 1426 of SEQ ID NO: 317144
gaaaccauguguguaucau

SEQ ID NO: 467802 - RNA, 19 nt, Artificial Sequence
  Description of Artificial Sequence: Synthetic oligonucleotide
  Antisense Strand to SEQ ID NO: 467801
augauacacacaugguuuc

SEQ ID NO: 467803 - RNA, 19 nt, Artificial Sequence
  Description of Artificial Sequence: Synthetic oligonucleotide
  Sense strand starting at position 1564 of SEQ ID NO: 317144
ccgacuucucccuacagua

SEQ ID NO: 467804 - RNA, 19 nt, Artificial Sequence
  Description of Artificial Sequence: Synthetic oligonucleotide
  Antisense Strand to SEQ ID NO: 467803
uacuguagggagaagucgg

SEQ ID NO: 467805 - RNA, 19 nt, Artificial Sequence
  Description of Artificial Sequence: Synthetic oligonucleotide
  Sense strand starting at position 1587 of SEQ ID NO: 317144
gacgauaaacucugugaaa

SEQ ID NO: 467806 - RNA, 19 nt, Artificial Sequence
  Description of Artificial Sequence: Synthetic oligonucleotide
  Antisense Strand to SEQ ID NO: 467805
uuucacagaguuuaucguc

SEQ ID NO: 467807 - RNA, 19 nt, Artificial Sequence
  Description of Artificial Sequence: Synthetic oligonucleotide
  Sense strand starting at position 1588 of SEQ ID NO: 317144
acgauaaacucugugaaag

SEQ ID NO: 467808 - RNA, 19 nt, Artificial Sequence
  Description of Artificial Sequence: Synthetic oligonucleotide
  Antisense Strand to SEQ ID NO: 467807
cuuucacagaguuuaucgu

SEQ ID NO: 467809 - RNA, 19 nt, Artificial Sequence
  Description of Artificial Sequence: Synthetic oligonucleotide
  Sense strand starting at position 1589 of SEQ ID NO: 317144
cgauaaacucugugaaagg

SEQ ID NO: 467810 - RNA, 19 nt, Artificial Sequence
  Description of Artificial Sequence: Synthetic oligonucleotide
  Antisense Strand to SEQ ID NO: 467809
ccuuucacagaguuuaucg

SEQ ID NO: 467811 - RNA, 19 nt, Artificial Sequence
  Description of Artificial Sequence: Synthetic oligonucleotide
  Sense strand starting at position 2190 of SEQ ID NO: 317144
cuuggaaagcucugaaugu

SEQ ID NO: 467812 - RNA, 19 nt, Artificial Sequence
  Description of Artificial Sequence: Synthetic oligonucleotide
  Antisense Strand to SEQ ID NO: 467811
acauucagagcuuuccaag

SEQ ID NO: 467813 - RNA, 19 nt, Artificial Sequence
  Description of Artificial Sequence: Synthetic oligonucleotide
  Sense strand starting at position 2241 of SEQ ID NO: 317144
uugagcuacuuaguauaca

SEQ ID NO: 467814 - RNA, 19 nt, Artificial Sequence
  Description of Artificial Sequence: Synthetic oligonucleotide
  Antisense Strand to SEQ ID NO: 467813
uguauacuaaguagcucaa

SEQ ID NO: 467815 - RNA, 19 nt, Artificial Sequence
  Description of Artificial Sequence: Synthetic oligonucleotide
  Sense strand starting at position 2268 of SEQ ID NO: 317144
cugaucugguccucuuaau

SEQ ID NO: 467816 - RNA, 19 nt, Artificial Sequence
  Description of Artificial Sequence: Synthetic oligonucleotide
  Antisense Strand to SEQ ID NO: 467815
auuaagaggaccagaucag

SEQ ID NO: 467817 - RNA, 19 nt, Artificial Sequence
  Description of Artificial Sequence: Synthetic oligonucleotide
  Sense strand starting at position 2460 of SEQ ID NO: 317144
uuaagugagcccuaccuaa

SEQ ID NO: 467818 - RNA, 19 nt, Artificial Sequence
  Description of Artificial Sequence: Synthetic oligonucleotide
  Antisense Strand to SEQ ID NO: 467817
uuagguagggcucacuuaa

SEQ ID NO: 467819 - RNA, 19 nt, Artificial Sequence
  Description of Artificial Sequence: Synthetic oligonucleotide
  Sense strand starting at position 2526 of SEQ ID NO: 317144
ugaaauugcuuuguuaaac

SEQ ID NO: 467820 - RNA, 19 nt, Artificial Sequence
  Description of Artificial Sequence: Synthetic oligonucleotide
  Antisense Strand to SEQ ID NO: 467819
guuuaacaaagcaauuuca

SEQ ID NO: 467821 - RNA, 19 nt, Artificial Sequence
  Description of Artificial Sequence: Synthetic oligonucleotide
  Sense strand starting at position 2534 of SEQ ID NO: 317144
cuuuguuaaacguagaggu

SEQ ID NO: 467822 - RNA, 19 nt, Artificial Sequence
  Description of Artificial Sequence: Synthetic oligonucleotide
  Antisense Strand to SEQ ID NO: 467821
accucuacguuuaacaaag

SEQ ID NO: 467823 - RNA, 19 nt, Artificial Sequence
  Description of Artificial Sequence: Synthetic oligonucleotide
  Sense strand starting at position 2536 of SEQ ID NO: 317144
uuguuaaacguagagguuu

SEQ ID NO: 467824 - RNA, 19 nt, Artificial Sequence
  Description of Artificial Sequence: Synthetic oligonucleotide
  Antisense Strand to SEQ ID NO: 467823
aaaccucuacguuuaacaa

SEQ ID NO: 467825 - RNA, 19 nt, Artificial Sequence
  Description of Artificial Sequence: Synthetic oligonucleotide
  Sense strand starting at position 2542 of SEQ ID NO: 317144
aacguagagguuuauauaa

SEQ ID NO: 467826 - RNA, 19 nt, Artificial Sequence
  Description of Artificial Sequence: Synthetic oligonucleotide
  Antisense Strand to SEQ ID NO: 467825
uuauauaaaccucuacguu

SEQ ID NO: 467827 - RNA, 19 nt, Artificial Sequence
  Description of Artificial Sequence: Synthetic oligonucleotide
  Sense strand starting at position 2635 of SEQ ID NO: 317144
ugaaguuuaugacuccaua

SEQ ID NO: 467828 - RNA, 19 nt, Artificial Sequence
  Description of Artificial Sequence: Synthetic oligonucleotide
  Antisense Strand to SEQ ID NO: 467827
uauggagucauaaacuuca

SEQ ID NO: 467829 - RNA, 19 nt, Artificial Sequence
  Description of Artificial Sequence: Synthetic oligonucleotide
  Sense strand starting at position 3128 of SEQ ID NO: 317144
ggagcaucuguauacuaga

SEQ ID NO: 467830 - RNA, 19 nt, Artificial Sequence
  Description of Artificial Sequence: Synthetic oligonucleotide
  Antisense Strand to SEQ ID NO: 467829
ucuaguauacagaugcucc

SEQ ID NO: 467831 - RNA, 19 nt, Artificial Sequence
  Description of Artificial Sequence: Synthetic oligonucleotide
  Sense strand starting at position 3133 of SEQ ID NO: 317144
aucuguauacuagagaguu

SEQ ID NO: 467832 - RNA, 19 nt, Artificial Sequence
  Description of Artificial Sequence: Synthetic oligonucleotide
  Antisense Strand to SEQ ID NO: 467831
aacucucuaguauacagau

SEQ ID NO: 467833 - RNA, 19 nt, Artificial Sequence
  Description of Artificial Sequence: Synthetic oligonucleotide
  Sense strand starting at position 3203 of SEQ ID NO: 317144
uuccuuugcagggagagau

SEQ ID NO: 467834 - RNA, 19 nt, Artificial Sequence
  Description of Artificial Sequence: Synthetic oligonucleotide
  Antisense Strand to SEQ ID NO: 467833
aucucucccugcaaaggaa

SEQ ID NO: 467835 - RNA, 19 nt, Artificial Sequence
  Description of Artificial Sequence: Synthetic oligonucleotide
  Sense strand starting at position 3290 of SEQ ID NO: 317144
aucucuguccuuugaugga

SEQ ID NO: 467836 - RNA, 19 nt, Artificial Sequence
  Description of Artificial Sequence: Synthetic oligonucleotide
  Antisense Strand to SEQ ID NO: 467835
uccaucaaaggacagagau

SEQ ID NO: 467837 - RNA, 19 nt, Artificial Sequence
  Description of Artificial Sequence: Synthetic oligonucleotide
  Sense strand starting at position 3294 of SEQ ID NO: 317144
cuguccuuugauggagaaa

SEQ ID NO: 467838 - RNA, 19 nt, Artificial Sequence
  Description of Artificial Sequence: Synthetic oligonucleotide
  Antisense Strand to SEQ ID NO: 467837
uuucuccaucaaaggacag

SEQ ID NO: 467839 - RNA, 19 nt, Artificial Sequence
  Description of Artificial Sequence: Synthetic oligonucleotide
  Sense strand starting at position 3335 of SEQ ID NO: 317144
uucagcguuguacuaguua

SEQ ID NO: 467840 - RNA, 19 nt, Artificial Sequence
  Description of Artificial Sequence: Synthetic oligonucleotide
  Antisense Strand to SEQ ID NO: 467839
uaacuaguacaacgcugaa

SEQ ID NO: 467841 - RNA, 19 nt, Artificial Sequence
  Description of Artificial Sequence: Synthetic oligonucleotide
  Sense strand starting at position 3340 of SEQ ID NO: 317144
cguuguacuaguuauuuau

SEQ ID NO: 467842 - RNA, 19 nt, Artificial Sequence
  Description of Artificial Sequence: Synthetic oligonucleotide
  Antisense Strand to SEQ ID NO: 467841
auaaauaacuaguacaacg

SEQ ID NO: 467843 - RNA, 19 nt, Artificial Sequence
  Description of Artificial Sequence: Synthetic oligonucleotide
  Sense strand starting at position 3525 of SEQ ID NO: 317144
auccacuuccgagaugagu

SEQ ID NO: 467844 - RNA, 19 nt, Artificial Sequence
  Description of Artificial Sequence: Synthetic oligonucleotide
  Antisense Strand to SEQ ID NO: 467843
acucaucucggaaguggau

SEQ ID NO: 467845 - RNA, 19 nt, Artificial Sequence
  Description of Artificial Sequence: Synthetic oligonucleotide
  Sense strand starting at position 3527 of SEQ ID NO: 317144
ccacuuccgagaugaguca

SEQ ID NO: 467846 - RNA, 19 nt, Artificial Sequence
  Description of Artificial Sequence: Synthetic oligonucleotide
  Antisense Strand to SEQ ID NO: 467845
ugacucaucucggaagugg

SEQ ID NO: 467847 - RNA, 19 nt, Artificial Sequence
  Description of Artificial Sequence: Synthetic oligonucleotide
  Sense strand starting at position 3601 of SEQ ID NO: 317144
gcagcucggcucuucuaau

SEQ ID NO: 467848 - RNA, 19 nt, Artificial Sequence
  Description of Artificial Sequence: Synthetic oligonucleotide
  Antisense Strand to SEQ ID NO: 467847
auuagaagagccgagcugc

SEQ ID NO: 467849 - RNA, 19 nt, Artificial Sequence
  Description of Artificial Sequence: Synthetic oligonucleotide
  Sense strand starting at position 3703 of SEQ ID NO: 317144
cuuaguuuacuaugguaac

SEQ ID NO: 467850 - RNA, 19 nt, Artificial Sequence
  Description of Artificial Sequence: Synthetic oligonucleotide
  Antisense Strand to SEQ ID NO: 467849
guuaccauaguaaacuaag

SEQ ID NO: 467851 - RNA, 19 nt, Artificial Sequence
  Description of Artificial Sequence: Synthetic oligonucleotide
  Sense strand starting at position 3743 of SEQ ID NO: 317144
agaagccagucauuaaaua

SEQ ID NO: 467852 - RNA, 19 nt, Artificial Sequence
  Description of Artificial Sequence: Synthetic oligonucleotide
  Antisense Strand to SEQ ID NO: 467851
uauuuaaugacuggcuucu

SEQ ID NO: 467853 - RNA, 19 nt, Artificial Sequence
  Description of Artificial Sequence: Synthetic oligonucleotide
  Sense strand starting at position 3920 of SEQ ID NO: 317144
gaucuuuaauuaguaagag

SEQ ID NO: 467854 - RNA, 19 nt, Artificial Sequence
  Description of Artificial Sequence: Synthetic oligonucleotide
  Antisense Strand to SEQ ID NO: 467853
cucuuacuaauuaaagauc

SEQ ID NO: 467855 - RNA, 19 nt, Artificial Sequence
  Description of Artificial Sequence: Synthetic oligonucleotide
  Sense strand starting at position 221 of SEQ ID NO: 317145
cgcuguaugcagcuacaau

SEQ ID NO: 467856 - RNA, 19 nt, Artificial Sequence
  Description of Artificial Sequence: Synthetic oligonucleotide
  Antisense Strand to SEQ ID NO: 467855
auuguagcugcauacagcg

SEQ ID NO: 467857 - RNA, 19 nt, Artificial Sequence
  Description of Artificial Sequence: Synthetic oligonucleotide
  Sense strand starting at position 360 of SEQ ID NO: 317145
uggaauuucuauuagacuu

SEQ ID NO: 467858 - RNA, 19 nt, Artificial Sequence
  Description of Artificial Sequence: Synthetic oligonucleotide
  Antisense Strand to SEQ ID NO: 467857
aagucuaauagaaauucca

SEQ ID NO: 467859 - RNA, 19 nt, Artificial Sequence
  Description of Artificial Sequence: Synthetic oligonucleotide
  Sense strand starting at position 540 of SEQ ID NO: 317145
cuuggaauacaaugucaau

SEQ ID NO: 467860 - RNA, 19 nt, Artificial Sequence
  Description of Artificial Sequence: Synthetic oligonucleotide
  Antisense Strand to SEQ ID NO: 467859
auugacauuguauuccaag

SEQ ID NO: 467861 - RNA, 19 nt, Artificial Sequence
  Description of Artificial Sequence: Synthetic oligonucleotide
  Sense strand starting at position 546 of SEQ ID NO: 317145
auacaaugucaauguacua

SEQ ID NO: 467862 - RNA, 19 nt, Artificial Sequence
  Description of Artificial Sequence: Synthetic oligonucleotide
  Antisense Strand to SEQ ID NO: 467861
uaguacauugacauuguau

SEQ ID NO: 467863 - RNA, 19 nt, Artificial Sequence
  Description of Artificial Sequence: Synthetic oligonucleotide
  Sense strand starting at position 579 of SEQ ID NO: 317145
aaagaacuucuguggucaa

SEQ ID NO: 467864 - RNA, 19 nt, Artificial Sequence
  Description of Artificial Sequence: Synthetic oligonucleotide
  Antisense Strand to SEQ ID NO: 467863
uugaccacagaaguucuuu

SEQ ID NO: 467865 - RNA, 19 nt, Artificial Sequence
  Description of Artificial Sequence: Synthetic oligonucleotide
  Sense strand starting at position 599 of SEQ ID NO: 317145
uccgacgaccuuuauuaaa

SEQ ID NO: 467866 - RNA, 19 nt, Artificial Sequence
  Description of Artificial Sequence: Synthetic oligonucleotide
  Antisense Strand to SEQ ID NO: 467865
uuuaauaaaggucgucgga

SEQ ID NO: 467867 - RNA, 19 nt, Artificial Sequence
  Description of Artificial Sequence: Synthetic oligonucleotide
  Sense strand starting at position 601 of SEQ ID NO: 317145
cgacgaccuuuauuaaauu

SEQ ID NO: 467868 - RNA, 19 nt, Artificial Sequence
  Description of Artificial Sequence: Synthetic oligonucleotide
  Antisense Strand to SEQ ID NO: 467867
aauuuaauaaaggucgucg

SEQ ID NO: 467869 - RNA, 19 nt, Artificial Sequence
  Description of Artificial Sequence: Synthetic oligonucleotide
  Sense strand starting at position 758 of SEQ ID NO: 317145
aggaguuacuucucuccaa

SEQ ID NO: 467870 - RNA, 19 nt, Artificial Sequence
  Description of Artificial Sequence: Synthetic oligonucleotide
  Antisense Strand to SEQ ID NO: 467869
uuggagagaaguaacuccu

SEQ ID NO: 467871 - RNA, 19 nt, Artificial Sequence
  Description of Artificial Sequence: Synthetic oligonucleotide
  Sense strand starting at position 759 of SEQ ID NO: 317145
ggaguuacuucucuccaaa

SEQ ID NO: 467872 - RNA, 19 nt, Artificial Sequence
  Description of Artificial Sequence: Synthetic oligonucleotide
  Antisense Strand to SEQ ID NO: 467871
uuuggagagaaguaacucc

SEQ ID NO: 467873 - RNA, 19 nt, Artificial Sequence
  Description of Artificial Sequence: Synthetic oligonucleotide
  Sense strand starting at position 1002 of SEQ ID NO: 317145
uauggaaacugugucaaau

SEQ ID NO: 467874 - RNA, 19 nt, Artificial Sequence
  Description of Artificial Sequence: Synthetic oligonucleotide
  Antisense Strand to SEQ ID NO: 467873
auuugacacaguuuccaua

SEQ ID NO: 467875 - RNA, 19 nt, Artificial Sequence
  Description of Artificial Sequence: Synthetic oligonucleotide
  Sense strand starting at position 1012 of SEQ ID NO: 317145
gugucaaaucauggaaaca

SEQ ID NO: 467876 - RNA, 19 nt, Artificial Sequence
  Description of Artificial Sequence: Synthetic oligonucleotide
  Antisense Strand to SEQ ID NO: 467875
uguuuccaugauuugacac

SEQ ID NO: 467877 - RNA, 19 nt, Artificial Sequence
  Description of Artificial Sequence: Synthetic oligonucleotide
  Sense strand starting at position 1095 of SEQ ID NO: 317145
ucaguaauuuaagauugga

SEQ ID NO: 467878 - RNA, 19 nt, Artificial Sequence
  Description of Artificial Sequence: Synthetic oligonucleotide
  Antisense Strand to SEQ ID NO: 467877
uccaaucuuaaauuacuga

SEQ ID NO: 467879 - RNA, 19 nt, Artificial Sequence
  Description of Artificial Sequence: Synthetic oligonucleotide
  Sense strand starting at position 1198 of SEQ ID NO: 317145
uaccguaauguccaagaau

SEQ ID NO: 467880 - RNA, 19 nt, Artificial Sequence
  Description of Artificial Sequence: Synthetic oligonucleotide
  Antisense Strand to SEQ ID NO: 467879
auucuuggacauuacggua

SEQ ID NO: 467881 - RNA, 19 nt, Artificial Sequence
  Description of Artificial Sequence: Synthetic oligonucleotide
  Sense strand starting at position 1223 of SEQ ID NO: 317145
guuaauacagagugucuua

SEQ ID NO: 467882 - RNA, 19 nt, Artificial Sequence
  Description of Artificial Sequence: Synthetic oligonucleotide
  Antisense Strand to SEQ ID NO: 467881
uaagacacucuguauuaac

SEQ ID NO: 467883 - RNA, 19 nt, Artificial Sequence
  Description of Artificial Sequence: Synthetic oligonucleotide
  Sense strand starting at position 1290 of SEQ ID NO: 317145
aagguaucuguguaaucuc

SEQ ID NO: 467884 - RNA, 19 nt, Artificial Sequence
  Description of Artificial Sequence: Synthetic oligonucleotide
  Antisense Strand to SEQ ID NO: 467883
gagauuacacagauaccuu

SEQ ID NO: 467885 - RNA, 19 nt, Artificial Sequence
  Description of Artificial Sequence: Synthetic oligonucleotide
  Sense strand starting at position 1299 of SEQ ID NO: 317145
guguaaucucaauauaagc

SEQ ID NO: 467886 - RNA, 19 nt, Artificial Sequence
  Description of Artificial Sequence: Synthetic oligonucleotide
  Antisense Strand to SEQ ID NO: 467885
gcuuauauugagauuacac

SEQ ID NO: 467887 - RNA, 19 nt, Artificial Sequence
  Description of Artificial Sequence: Synthetic oligonucleotide
  Sense strand starting at position 1611 of SEQ ID NO: 317145
guugauaccacggguuuga

SEQ ID NO: 467888 - RNA, 19 nt, Artificial Sequence
  Description of Artificial Sequence: Synthetic oligonucleotide
  Antisense Strand to SEQ ID NO: 467887
ucaaacccgugguaucaac

SEQ ID NO: 467889 - RNA, 19 nt, Artificial Sequence
  Description of Artificial Sequence: Synthetic oligonucleotide
  Sense strand starting at position 1655 of SEQ ID NO: 317145
guaagacaggucgacacua

SEQ ID NO: 467890 - RNA, 19 nt, Artificial Sequence
  Description of Artificial Sequence: Synthetic oligonucleotide
  Antisense Strand to SEQ ID NO: 467889
uagugucgaccugucuuac

SEQ ID NO: 467891 - RNA, 19 nt, Artificial Sequence
  Description of Artificial Sequence: Synthetic oligonucleotide
  Sense strand starting at position 2202 of SEQ ID NO: 317145
gcuguuaagagucaugcag

SEQ ID NO: 467892 - RNA, 19 nt, Artificial Sequence
  Description of Artificial Sequence: Synthetic oligonucleotide
  Antisense Strand to SEQ ID NO: 467891
cugcaugacucuuaacagc

SEQ ID NO: 467893 - RNA, 19 nt, Artificial Sequence
  Description of Artificial Sequence: Synthetic oligonucleotide
  Sense strand starting at position 2393 of SEQ ID NO: 317145
uuauaucuuggaugguuga

SEQ ID NO: 467894 - RNA, 19 nt, Artificial Sequence
  Description of Artificial Sequence: Synthetic oligonucleotide
  Antisense Strand to SEQ ID NO: 467893
ucaaccauccaagauauaa

SEQ ID NO: 467895 - RNA, 19 nt, Artificial Sequence
  Description of Artificial Sequence: Synthetic oligonucleotide
  Sense strand starting at position 2394 of SEQ ID NO: 317145
uauaucuuggaugguugaa

SEQ ID NO: 467896 - RNA, 19 nt, Artificial Sequence
  Description of Artificial Sequence: Synthetic oligonucleotide
  Antisense Strand to SEQ ID NO: 467895
uucaaccauccaagauaua

SEQ ID NO: 467897 - RNA, 19 nt, Artificial Sequence
  Description of Artificial Sequence: Synthetic oligonucleotide
  Sense strand starting at position 2413 of SEQ ID NO: 317145
acagaagaauguuuaaguc

SEQ ID NO: 467898 - RNA, 19 nt, Artificial Sequence
  Description of Artificial Sequence: Synthetic oligonucleotide
  Antisense Strand to SEQ ID NO: 467897
gacuuaaacauucuucugu

SEQ ID NO: 467899 - RNA, 19 nt, Artificial Sequence
  Description of Artificial Sequence: Synthetic oligonucleotide
  Sense strand starting at position 2417 of SEQ ID NO: 317145
aagaauguuuaagucuuga

SEQ ID NO: 467900 - RNA, 19 nt, Artificial Sequence
  Description of Artificial Sequence: Synthetic oligonucleotide
  Antisense Strand to SEQ ID NO: 467899
ucaagacuuaaacauucuu

SEQ ID NO: 467901 - RNA, 19 nt, Artificial Sequence
  Description of Artificial Sequence: Synthetic oligonucleotide
  Sense strand starting at position 2422 of SEQ ID NO: 317145
uguuuaagucuugagauau

SEQ ID NO: 467902 - RNA, 19 nt, Artificial Sequence
  Description of Artificial Sequence: Synthetic oligonucleotide
  Antisense Strand to SEQ ID NO: 467901
auaucucaagacuuaaaca

SEQ ID NO: 467903 - RNA, 19 nt, Artificial Sequence
  Description of Artificial Sequence: Synthetic oligonucleotide
  Sense strand starting at position 2508 of SEQ ID NO: 317145
uguugaaggguuuggaaau

SEQ ID NO: 467904 - RNA, 19 nt, Artificial Sequence
  Description of Artificial Sequence: Synthetic oligonucleotide
  Antisense Strand to SEQ ID NO: 467903
auuuccaaacccuucaaca

SEQ ID NO: 467905 - RNA, 19 nt, Artificial Sequence
  Description of Artificial Sequence: Synthetic oligonucleotide
  Sense strand starting at position 2521 of SEQ ID NO: 317145
ggaaauguacagcagucua

SEQ ID NO: 467906 - RNA, 19 nt, Artificial Sequence
  Description of Artificial Sequence: Synthetic oligonucleotide
  Antisense Strand to SEQ ID NO: 467905
uagacugcuguacauuucc

SEQ ID NO: 467907 - RNA, 19 nt, Artificial Sequence
  Description of Artificial Sequence: Synthetic oligonucleotide
  Sense strand starting at position 2529 of SEQ ID NO: 317145
acagcagucuaaguacauu

SEQ ID NO: 467908 - RNA, 19 nt, Artificial Sequence
  Description of Artificial Sequence: Synthetic oligonucleotide
  Antisense Strand to SEQ ID NO: 467907
aauguacuuagacugcugu

SEQ ID NO: 467909 - RNA, 19 nt, Artificial Sequence
  Description of Artificial Sequence: Synthetic oligonucleotide
  Sense strand starting at position 2642 of SEQ ID NO: 317145
gcaacuuuauuccuaggga

SEQ ID NO: 467910 - RNA, 19 nt, Artificial Sequence
  Description of Artificial Sequence: Synthetic oligonucleotide
  Antisense Strand to SEQ ID NO: 467909
ucccuaggaauaaaguugc

SEQ ID NO: 467911 - RNA, 19 nt, Artificial Sequence
  Description of Artificial Sequence: Synthetic oligonucleotide
  Sense strand starting at position 2645 of SEQ ID NO: 317145
acuuuauuccuagggacau

SEQ ID NO: 467912 - RNA, 19 nt, Artificial Sequence
  Description of Artificial Sequence: Synthetic oligonucleotide
  Antisense Strand to SEQ ID NO: 467911
augucccuaggaauaaagu

SEQ ID NO: 467913 - RNA, 19 nt, Artificial Sequence
  Description of Artificial Sequence: Synthetic oligonucleotide
  Sense strand starting at position 2675 of SEQ ID NO: 317145
ggcggcuuugccagacgau

SEQ ID NO: 467914 - RNA, 19 nt, Artificial Sequence
  Description of Artificial Sequence: Synthetic oligonucleotide
  Antisense Strand to SEQ ID NO: 467913
aucgucuggcaaagccgcc

SEQ ID NO: 467915 - RNA, 19 nt, Artificial Sequence
  Description of Artificial Sequence: Synthetic oligonucleotide
  Sense strand starting at position 2839 of SEQ ID NO: 317145
gaauuaucaugucugaaug

SEQ ID NO: 467916 - RNA, 19 nt, Artificial Sequence
  Description of Artificial Sequence: Synthetic oligonucleotide
  Antisense Strand to SEQ ID NO: 467915
cauucagacaugauaauuc

SEQ ID NO: 467917 - RNA, 19 nt, Artificial Sequence
  Description of Artificial Sequence: Synthetic oligonucleotide
  Sense strand starting at position 2901 of SEQ ID NO: 317145
agugaaauguugccaauua

SEQ ID NO: 467918 - RNA, 19 nt, Artificial Sequence
  Description of Artificial Sequence: Synthetic oligonucleotide
  Antisense Strand to SEQ ID NO: 467917
uaauuggcaacauuucacu

SEQ ID NO: 467919 - RNA, 19 nt, Artificial Sequence
  Description of Artificial Sequence: Synthetic oligonucleotide
  Sense strand starting at position 2941 of SEQ ID NO: 317145
ugcugcuuacaggaagaau

SEQ ID NO: 467920 - RNA, 19 nt, Artificial Sequence
  Description of Artificial Sequence: Synthetic oligonucleotide
  Antisense Strand to SEQ ID NO: 467919
auucuuccuguaagcagca

SEQ ID NO: 467921 - RNA, 19 nt, Artificial Sequence
  Description of Artificial Sequence: Synthetic oligonucleotide
  Sense strand starting at position 2954 of SEQ ID NO: 317145
aagaauggcuagucagcua

SEQ ID NO: 467922 - RNA, 19 nt, Artificial Sequence
  Description of Artificial Sequence: Synthetic oligonucleotide
  Antisense Strand to SEQ ID NO: 467921
uagcugacuagccauucuu

SEQ ID NO: 467923 - RNA, 19 nt, Artificial Sequence
  Description of Artificial Sequence: Synthetic oligonucleotide
  Sense strand starting at position 2979 of SEQ ID NO: 317145
uuagauaauucuuuaggcu

SEQ ID NO: 467924 - RNA, 19 nt, Artificial Sequence
  Description of Artificial Sequence: Synthetic oligonucleotide
  Antisense Strand to SEQ ID NO: 467923
agccuaaagaauuaucuaa

SEQ ID NO: 467925 - RNA, 19 nt, Artificial Sequence
  Description of Artificial Sequence: Synthetic oligonucleotide
  Sense strand starting at position 2986 of SEQ ID NO: 317145
auucuuuaggcucauguca

SEQ ID NO: 467926 - RNA, 19 nt, Artificial Sequence
  Description of Artificial Sequence: Synthetic oligonucleotide
  Antisense Strand to SEQ ID NO: 467925
ugacaugagccuaaagaau

SEQ ID NO: 467927 - RNA, 19 nt, Artificial Sequence
  Description of Artificial Sequence: Synthetic oligonucleotide
  Sense strand starting at position 3030 of SEQ ID NO: 317145
gcuacagucuuucuagaag

SEQ ID NO: 467928 - RNA, 19 nt, Artificial Sequence
  Description of Artificial Sequence: Synthetic oligonucleotide
  Antisense Strand to SEQ ID NO: 467927
cuucuagaaagacuguagc

SEQ ID NO: 467929 - RNA, 19 nt, Artificial Sequence
  Description of Artificial Sequence: Synthetic oligonucleotide
  Sense strand starting at position 3033 of SEQ ID NO: 317145
acagucuuucuagaaggua

SEQ ID NO: 467930 - RNA, 19 nt, Artificial Sequence
  Description of Artificial Sequence: Synthetic oligonucleotide
  Antisense Strand to SEQ ID NO: 467929
uaccuucuagaaagacugu

SEQ ID NO: 467931 - RNA, 19 nt, Artificial Sequence
  Description of Artificial Sequence: Synthetic oligonucleotide
  Sense strand starting at position 3122 of SEQ ID NO: 317145
aaggauaaccguuauuguu

SEQ ID NO: 467932 - RNA, 19 nt, Artificial Sequence
  Description of Artificial Sequence: Synthetic oligonucleotide
  Antisense Strand to SEQ ID NO: 467931
aacaauaacgguuauccuu

SEQ ID NO: 467933 - RNA, 19 nt, Artificial Sequence
  Description of Artificial Sequence: Synthetic oligonucleotide
  Sense strand starting at position 3538 of SEQ ID NO: 317145
ccacgaaaccaauguuaac

SEQ ID NO: 467934 - RNA, 19 nt, Artificial Sequence
  Description of Artificial Sequence: Synthetic oligonucleotide
  Antisense Strand to SEQ ID NO: 467933
guuaacauugguuucgugg

SEQ ID NO: 467935 - RNA, 19 nt, Artificial Sequence
  Description of Artificial Sequence: Synthetic oligonucleotide
  Sense strand starting at position 40 of SEQ ID NO: 317146
auuccacuccuagauguua

SEQ ID NO: 467936 - RNA, 19 nt, Artificial Sequence
  Description of Artificial Sequence: Synthetic oligonucleotide
  Antisense Strand to SEQ ID NO: 467935
uaacaucuaggaguggaau

SEQ ID NO: 467937 - RNA, 19 nt, Artificial Sequence
  Description of Artificial Sequence: Synthetic oligonucleotide
  Sense strand starting at position 89 of SEQ ID NO: 317146
cugaacauaugaccguaau

SEQ ID NO: 467938 - RNA, 19 nt, Artificial Sequence
  Description of Artificial Sequence: Synthetic oligonucleotide
  Antisense Strand to SEQ ID NO: 467937
auuacggucauauguucag

SEQ ID NO: 467939 - RNA, 19 nt, Artificial Sequence
  Description of Artificial Sequence: Synthetic oligonucleotide
  Sense strand starting at position 90 of SEQ ID NO: 317146
ugaacauaugaccguaaug

SEQ ID NO: 467940 - RNA, 19 nt, Artificial Sequence
  Description of Artificial Sequence: Synthetic oligonucleotide
  Antisense Strand to SEQ ID NO: 467939
cauuacggucauauguuca

SEQ ID NO: 467941 - RNA, 19 nt, Artificial Sequence
  Description of Artificial Sequence: Synthetic oligonucleotide
  Sense strand starting at position 92 of SEQ ID NO: 317146
aacauaugaccguaaugua

SEQ ID NO: 467942 - RNA, 19 nt, Artificial Sequence
  Description of Artificial Sequence: Synthetic oligonucleotide
  Antisense Strand to SEQ ID NO: 467941
uacauuacggucauauguu

SEQ ID NO: 467943 - RNA, 19 nt, Artificial Sequence
  Description of Artificial Sequence: Synthetic oligonucleotide
  Sense strand starting at position 104 of SEQ ID NO: 317146
uaauguaguaacgggauga

SEQ ID NO: 467944 - RNA, 19 nt, Artificial Sequence
  Description of Artificial Sequence: Synthetic oligonucleotide
  Antisense Strand to SEQ ID NO: 467943
ucaucccguuacuacauua

SEQ ID NO: 467945 - RNA, 19 nt, Artificial Sequence
  Description of Artificial Sequence: Synthetic oligonucleotide
  Sense strand starting at position 105 of SEQ ID NO: 317146
aauguaguaacgggaugau

SEQ ID NO: 467946 - RNA, 19 nt, Artificial Sequence
  Description of Artificial Sequence: Synthetic oligonucleotide
  Antisense Strand to SEQ ID NO: 467945
aucaucccguuacuacauu

SEQ ID NO: 467947 - RNA, 19 nt, Artificial Sequence
  Description of Artificial Sequence: Synthetic oligonucleotide
  Sense strand starting at position 178 of SEQ ID NO: 317146
cgugcucacagacaggaau

SEQ ID NO: 467948 - RNA, 19 nt, Artificial Sequence
  Description of Artificial Sequence: Synthetic oligonucleotide
  Antisense Strand to SEQ ID NO: 467947
auuccugucugugagcacg

SEQ ID NO: 467949 - RNA, 19 nt, Artificial Sequence
  Description of Artificial Sequence: Synthetic oligonucleotide
  Sense strand starting at position 424 of SEQ ID NO: 317146
ggaagaaggccgugauuac

SEQ ID NO: 467950 - RNA, 19 nt, Artificial Sequence
  Description of Artificial Sequence: Synthetic oligonucleotide
  Antisense Strand to SEQ ID NO: 467949
guaaucacggccuucuucc

SEQ ID NO: 467951 - RNA, 19 nt, Artificial Sequence
  Description of Artificial Sequence: Synthetic oligonucleotide
  Sense strand starting at position 480 of SEQ ID NO: 317146
ucuccaccuguguaaggau

SEQ ID NO: 467952 - RNA, 19 nt, Artificial Sequence
  Description of Artificial Sequence: Synthetic oligonucleotide
  Antisense Strand to SEQ ID NO: 467951
auccuuacacagguggaga

SEQ ID NO: 467953 - RNA, 19 nt, Artificial Sequence
  Description of Artificial Sequence: Synthetic oligonucleotide
  Sense strand starting at position 506 of SEQ ID NO: 317146
guggcucgcgaugcuauua

SEQ ID NO: 467954 - RNA, 19 nt, Artificial Sequence
  Description of Artificial Sequence: Synthetic oligonucleotide
  Antisense Strand to SEQ ID NO: 467953
uaauagcaucgcgagccac

SEQ ID NO: 467955 - RNA, 19 nt, Artificial Sequence
  Description of Artificial Sequence: Synthetic oligonucleotide
  Sense strand starting at position 669 of SEQ ID NO: 317146
ucgguuuauuucgcacgga

SEQ ID NO: 467956 - RNA, 19 nt, Artificial Sequence
  Description of Artificial Sequence: Synthetic oligonucleotide
  Antisense Strand to SEQ ID NO: 467955
uccgugcgaaauaaaccga

SEQ ID NO: 467957 - RNA, 19 nt, Artificial Sequence
  Description of Artificial Sequence: Synthetic oligonucleotide
  Sense strand starting at position 672 of SEQ ID NO: 317146
guuuauuucgcacggaaag

SEQ ID NO: 467958 - RNA, 19 nt, Artificial Sequence
  Description of Artificial Sequence: Synthetic oligonucleotide
  Antisense Strand to SEQ ID NO: 467957
cuuuccgugcgaaauaaac

SEQ ID NO: 467959 - RNA, 19 nt, Artificial Sequence
  Description of Artificial Sequence: Synthetic oligonucleotide
  Sense strand starting at position 682 of SEQ ID NO: 317146
cacggaaagcgauacaaua

SEQ ID NO: 467960 - RNA, 19 nt, Artificial Sequence
  Description of Artificial Sequence: Synthetic oligonucleotide
  Antisense Strand to SEQ ID NO: 467959
uauuguaucgcuuuccgug

SEQ ID NO: 467961 - RNA, 19 nt, Artificial Sequence
  Description of Artificial Sequence: Synthetic oligonucleotide
  Sense strand starting at position 684 of SEQ ID NO: 317146
cggaaagcgauacaauaua

SEQ ID NO: 467962 - RNA, 19 nt, Artificial Sequence
  Description of Artificial Sequence: Synthetic oligonucleotide
  Antisense Strand to SEQ ID NO: 467961
uauauuguaucgcuuuccg

SEQ ID NO: 467963 - RNA, 19 nt, Artificial Sequence
  Description of Artificial Sequence: Synthetic oligonucleotide
  Sense strand starting at position 808 of SEQ ID NO: 317146
gggucuuugcgaggugaga

SEQ ID NO: 467964 - RNA, 19 nt, Artificial Sequence
  Description of Artificial Sequence: Synthetic oligonucleotide
  Antisense Strand to SEQ ID NO: 467963
ucucaccucgcaaagaccc

SEQ ID NO: 467965 - RNA, 19 nt, Artificial Sequence
  Description of Artificial Sequence: Synthetic oligonucleotide
  Sense strand starting at position 810 of SEQ ID NO: 317146
gucuuugcgaggugagaac

SEQ ID NO: 467966 - RNA, 19 nt, Artificial Sequence
  Description of Artificial Sequence: Synthetic oligonucleotide
  Antisense Strand to SEQ ID NO: 467965
guucucaccucgcaaagac

SEQ ID NO: 467967 - RNA, 19 nt, Artificial Sequence
  Description of Artificial Sequence: Synthetic oligonucleotide
  Sense strand starting at position 1343 of SEQ ID NO: 317146
gagguauucggaggagcga

SEQ ID NO: 467968 - RNA, 19 nt, Artificial Sequence
  Description of Artificial Sequence: Synthetic oligonucleotide
  Antisense Strand to SEQ ID NO: 467967
ucgcuccuccgaauaccuc

SEQ ID NO: 467969 - RNA, 19 nt, Artificial Sequence
  Description of Artificial Sequence: Synthetic oligonucleotide
  Sense strand starting at position 1597 of SEQ ID NO: 317146
agacggauguugucgauga

SEQ ID NO: 467970 - RNA, 19 nt, Artificial Sequence
  Description of Artificial Sequence: Synthetic oligonucleotide
  Antisense Strand to SEQ ID NO: 467969
ucaucgacaacauccgucu

SEQ ID NO: 467971 - RNA, 19 nt, Artificial Sequence
  Description of Artificial Sequence: Synthetic oligonucleotide
  Sense strand starting at position 1912 of SEQ ID NO: 317146
cgcgucuucgggaagcuuu

SEQ ID NO: 467972 - RNA, 19 nt, Artificial Sequence
  Description of Artificial Sequence: Synthetic oligonucleotide
  Antisense Strand to SEQ ID NO: 467971
aaagcuucccgaagacgcg

SEQ ID NO: 467973 - RNA, 19 nt, Artificial Sequence
  Description of Artificial Sequence: Synthetic oligonucleotide
  Sense strand starting at position 2060 of SEQ ID NO: 317146
gcguauucgcgucuuggga

SEQ ID NO: 467974 - RNA, 19 nt, Artificial Sequence
  Description of Artificial Sequence: Synthetic oligonucleotide
  Antisense Strand to SEQ ID NO: 467973
ucccaagacgcgaauacgc

SEQ ID NO: 467975 - RNA, 19 nt, Artificial Sequence
  Description of Artificial Sequence: Synthetic oligonucleotide
  Sense strand starting at position 2895 of SEQ ID NO: 317146
gcuacaaaucagugcugga

SEQ ID NO: 467976 - RNA, 19 nt, Artificial Sequence
  Description of Artificial Sequence: Synthetic oligonucleotide
  Antisense Strand to SEQ ID NO: 467975
uccagcacugauuuguagc

SEQ ID NO: 467977 - RNA, 19 nt, Artificial Sequence
  Description of Artificial Sequence: Synthetic oligonucleotide
  Sense strand starting at position 2922 of SEQ ID NO: 317146
uuuguugauugcuuaaacu

SEQ ID NO: 467978 - RNA, 19 nt, Artificial Sequence
  Description of Artificial Sequence: Synthetic oligonucleotide
  Antisense Strand to SEQ ID NO: 467977
aguuuaagcaaucaacaaa

SEQ ID NO: 467979 - RNA, 19 nt, Artificial Sequence
  Description of Artificial Sequence: Synthetic oligonucleotide
  Sense strand starting at position 2940 of SEQ ID NO: 317146
ugaagaaagugauagagaa

SEQ ID NO: 467980 - RNA, 19 nt, Artificial Sequence
  Description of Artificial Sequence: Synthetic oligonucleotide
  Antisense Strand to SEQ ID NO: 467979
uucucuaucacuuucuuca

SEQ ID NO: 467981 - RNA, 19 nt, Artificial Sequence
  Description of Artificial Sequence: Synthetic oligonucleotide
  Sense strand starting at position 3087 of SEQ ID NO: 317146
uugacuaaugggugaaguu

SEQ ID NO: 467982 - RNA, 19 nt, Artificial Sequence
  Description of Artificial Sequence: Synthetic oligonucleotide
  Antisense Strand to SEQ ID NO: 467981
aacuucacccauuagucaa

SEQ ID NO: 467983 - RNA, 19 nt, Artificial Sequence
  Description of Artificial Sequence: Synthetic oligonucleotide
  Sense strand starting at position 3480 of SEQ ID NO: 317146
auaguuuaacaguggacga

SEQ ID NO: 467984 - RNA, 19 nt, Artificial Sequence
  Description of Artificial Sequence: Synthetic oligonucleotide
  Antisense Strand to SEQ ID NO: 467983
ucguccacuguuaaacuau

SEQ ID NO: 467985 - RNA, 19 nt, Artificial Sequence
  Description of Artificial Sequence: Synthetic oligonucleotide
  Sense strand starting at position 3504 of SEQ ID NO: 317146
caaauuuaguaugagaaga

SEQ ID NO: 467986 - RNA, 19 nt, Artificial Sequence
  Description of Artificial Sequence: Synthetic oligonucleotide
  Antisense Strand to SEQ ID NO: 467985
ucuucucauacuaaauuug

SEQ ID NO: 467987 - RNA, 19 nt, Artificial Sequence
  Description of Artificial Sequence: Synthetic oligonucleotide
  Sense strand starting at position 3506 of SEQ ID NO: 317146
aauuuaguaugagaagagu

SEQ ID NO: 467988 - RNA, 19 nt, Artificial Sequence
  Description of Artificial Sequence: Synthetic oligonucleotide
  Antisense Strand to SEQ ID NO: 467987
acucuucucauacuaaauu

SEQ ID NO: 467989 - RNA, 19 nt, Artificial Sequence
  Description of Artificial Sequence: Synthetic oligonucleotide
  Sense strand starting at position 3512 of SEQ ID NO: 317146
guaugagaagagugaaagu

SEQ ID NO: 467990 - RNA, 19 nt, Artificial Sequence
  Description of Artificial Sequence: Synthetic oligonucleotide
  Antisense Strand to SEQ ID NO: 467989
acuuucacucuucucauac

SEQ ID NO: 467991 - RNA, 19 nt, Artificial Sequence
  Description of Artificial Sequence: Synthetic oligonucleotide
  Sense strand starting at position 3542 of SEQ ID NO: 317146
gugaaaucaugauugaacc

SEQ ID NO: 467992 - RNA, 19 nt, Artificial Sequence
  Description of Artificial Sequence: Synthetic oligonucleotide
  Antisense Strand to SEQ ID NO: 467991
gguucaaucaugauuucac

SEQ ID NO: 467993 - RNA, 19 nt, Artificial Sequence
  Description of Artificial Sequence: Synthetic oligonucleotide
  Sense strand starting at position 3561 of SEQ ID NO: 317146
guaaacauuaguugguuga

SEQ ID NO: 467994 - RNA, 19 nt, Artificial Sequence
  Description of Artificial Sequence: Synthetic oligonucleotide
  Antisense Strand to SEQ ID NO: 467993
ucaaccaacuaauguuuac

SEQ ID NO: 467995 - RNA, 19 nt, Artificial Sequence
  Description of Artificial Sequence: Synthetic oligonucleotide
  Sense strand starting at position 3562 of SEQ ID NO: 317146
uaaacauuaguugguugaa

SEQ ID NO: 467996 - RNA, 19 nt, Artificial Sequence
  Description of Artificial Sequence: Synthetic oligonucleotide
  Antisense Strand to SEQ ID NO: 467995
uucaaccaacuaauguuua

SEQ ID NO: 467997 - RNA, 19 nt, Artificial Sequence
  Description of Artificial Sequence: Synthetic oligonucleotide
  Sense strand starting at position 3563 of SEQ ID NO: 317146
aaacauuaguugguugaaa

SEQ ID NO: 467998 - RNA, 19 nt, Artificial Sequence
  Description of Artificial Sequence: Synthetic oligonucleotide
  Antisense Strand to SEQ ID NO: 467997
uuucaaccaacuaauguuu

SEQ ID NO: 467999 - RNA, 19 nt, Artificial Sequence
  Description of Artificial Sequence: Synthetic oligonucleotide
  Sense strand starting at position 3564 of SEQ ID NO: 317146
aacauuaguugguugaaau

SEQ ID NO: 468000 - RNA, 19 nt, Artificial Sequence
  Description of Artificial Sequence: Synthetic oligonucleotide
  Antisense Strand to SEQ ID NO: 467999
auuucaaccaacuaauguu

SEQ ID NO: 468001 - RNA, 19 nt, Artificial Sequence
  Description of Artificial Sequence: Synthetic oligonucleotide
  Sense strand starting at position 3565 of SEQ ID NO: 317146
acauuaguugguugaaaug

SEQ ID NO: 468002 - RNA, 19 nt, Artificial Sequence
  Description of Artificial Sequence: Synthetic oligonucleotide
  Antisense Strand to SEQ ID NO: 468001
cauuucaaccaacuaaugu

SEQ ID NO: 468003 - RNA, 19 nt, Artificial Sequence
  Description of Artificial Sequence: Synthetic oligonucleotide
  Sense strand starting at position 3596 of SEQ ID NO: 317146
cacagaaaccugugugcaa

SEQ ID NO: 468004 - RNA, 19 nt, Artificial Sequence
  Description of Artificial Sequence: Synthetic oligonucleotide
  Antisense Strand to SEQ ID NO: 468003
uugcacacagguuucugug

SEQ ID NO: 468005 - RNA, 19 nt, Artificial Sequence
  Description of Artificial Sequence: Synthetic oligonucleotide
  Sense strand starting at position 3597 of SEQ ID NO: 317146
acagaaaccugugugcaaa

SEQ ID NO: 468006 - RNA, 19 nt, Artificial Sequence
  Description of Artificial Sequence: Synthetic oligonucleotide
  Antisense Strand to SEQ ID NO: 468005
uuugcacacagguuucugu

SEQ ID NO: 468007 - RNA, 19 nt, Artificial Sequence
  Description of Artificial Sequence: Synthetic oligonucleotide
  Sense strand starting at position 3682 of SEQ ID NO: 317146
cugucuguagcuuucugua

SEQ ID NO: 468008 - RNA, 19 nt, Artificial Sequence
  Description of Artificial Sequence: Synthetic oligonucleotide
  Antisense Strand to SEQ ID NO: 468007
uacagaaagcuacagacag

SEQ ID NO: 468009 - RNA, 19 nt, Artificial Sequence
  Description of Artificial Sequence: Synthetic oligonucleotide
  Sense strand starting at position 3687 of SEQ ID NO: 317146
uguagcuuucuguaggaua

SEQ ID NO: 468010 - RNA, 19 nt, Artificial Sequence
  Description of Artificial Sequence: Synthetic oligonucleotide
  Antisense Strand to SEQ ID NO: 468009
uauccuacagaaagcuaca

SEQ ID NO: 468011 - RNA, 19 nt, Artificial Sequence
  Description of Artificial Sequence: Synthetic oligonucleotide
  Sense strand starting at position 3721 of SEQ ID NO: 317146
uauacagugcuugaugcau

SEQ ID NO: 468012 - RNA, 19 nt, Artificial Sequence
  Description of Artificial Sequence: Synthetic oligonucleotide
  Antisense Strand to SEQ ID NO: 468011
augcaucaagcacuguaua

SEQ ID NO: 468013 - RNA, 19 nt, Artificial Sequence
  Description of Artificial Sequence: Synthetic oligonucleotide
  Sense strand starting at position 3871 of SEQ ID NO: 317146
cuuguaaaucgacgagaaa

SEQ ID NO: 468014 - RNA, 19 nt, Artificial Sequence
  Description of Artificial Sequence: Synthetic oligonucleotide
  Antisense Strand to SEQ ID NO: 468013
uuucucgucgauuuacaag

SEQ ID NO: 468015 - RNA, 19 nt, Artificial Sequence
  Description of Artificial Sequence: Synthetic oligonucleotide
  Sense strand starting at position 124 of SEQ ID NO: 317147
guccuucggcguuaaagag

SEQ ID NO: 468016 - RNA, 19 nt, Artificial Sequence
  Description of Artificial Sequence: Synthetic oligonucleotide
  Antisense Strand to SEQ ID NO: 468015
cucuuuaacgccgaaggac

SEQ ID NO: 468017 - RNA, 19 nt, Artificial Sequence
  Description of Artificial Sequence: Synthetic oligonucleotide
  Sense strand starting at position 154 of SEQ ID NO: 317147
gcgucaguccgcucugcaa

SEQ ID NO: 468018 - RNA, 19 nt, Artificial Sequence
  Description of Artificial Sequence: Synthetic oligonucleotide
  Antisense Strand to SEQ ID NO: 468017
uugcagagcggacugacgc

SEQ ID NO: 468019 - RNA, 19 nt, Artificial Sequence
  Description of Artificial Sequence: Synthetic oligonucleotide
  Sense strand starting at position 290 of SEQ ID NO: 317147
gcccgucugaaugaaggau

SEQ ID NO: 468020 - RNA, 19 nt, Artificial Sequence
  Description of Artificial Sequence: Synthetic oligonucleotide
  Antisense Strand to SEQ ID NO: 468019
auccuucauucagacgggc

SEQ ID NO: 468021 - RNA, 19 nt, Artificial Sequence
  Description of Artificial Sequence: Synthetic oligonucleotide
  Sense strand starting at position 476 of SEQ ID NO: 317147
auggcagcucuagauacaa

SEQ ID NO: 468022 - RNA, 19 nt, Artificial Sequence
  Description of Artificial Sequence: Synthetic oligonucleotide
  Antisense Strand to SEQ ID NO: 468021
uuguaucuagagcugccau

SEQ ID NO: 468023 - RNA, 19 nt, Artificial Sequence
  Description of Artificial Sequence: Synthetic oligonucleotide
  Sense strand starting at position 487 of SEQ ID NO: 317147
agauacaaucccuggcuau

SEQ ID NO: 468024 - RNA, 19 nt, Artificial Sequence
  Description of Artificial Sequence: Synthetic oligonucleotide
  Antisense Strand to SEQ ID NO: 468023
auagccagggauuguaucu

SEQ ID NO: 468025 - RNA, 19 nt, Artificial Sequence
  Description of Artificial Sequence: Synthetic oligonucleotide
  Sense strand starting at position 550 of SEQ ID NO: 317147
gccaauaguccaugucuga

SEQ ID NO: 468026 - RNA, 19 nt, Artificial Sequence
  Description of Artificial Sequence: Synthetic oligonucleotide
  Antisense Strand to SEQ ID NO: 468025
ucagacauggacuauuggc

SEQ ID NO: 468027 - RNA, 19 nt, Artificial Sequence
  Description of Artificial Sequence: Synthetic oligonucleotide
  Sense strand starting at position 730 of SEQ ID NO: 317147
gcaacacugccucggagaa

SEQ ID NO: 468028 - RNA, 19 nt, Artificial Sequence
  Description of Artificial Sequence: Synthetic oligonucleotide
  Antisense Strand to SEQ ID NO: 468027
uucuccgaggcaguguugc

SEQ ID NO: 468029 - RNA, 19 nt, Artificial Sequence
  Description of Artificial Sequence: Synthetic oligonucleotide
  Sense strand starting at position 808 of SEQ ID NO: 317147
cggugagugcccagaugua

SEQ ID NO: 468030 - RNA, 19 nt, Artificial Sequence
  Description of Artificial Sequence: Synthetic oligonucleotide
  Antisense Strand to SEQ ID NO: 468029
uacaucugggcacucaccg

SEQ ID NO: 468031 - RNA, 19 nt, Artificial Sequence
  Description of Artificial Sequence: Synthetic oligonucleotide
  Sense strand starting at position 1038 of SEQ ID NO: 317147
cgccguuugcaaucgugua

SEQ ID NO: 468032 - RNA, 19 nt, Artificial Sequence
  Description of Artificial Sequence: Synthetic oligonucleotide
  Antisense Strand to SEQ ID NO: 468031
uacacgauugcaaacggcg

SEQ ID NO: 468033 - RNA, 19 nt, Artificial Sequence
  Description of Artificial Sequence: Synthetic oligonucleotide
  Sense strand starting at position 1043 of SEQ ID NO: 317147
uuugcaaucguguaccaga

SEQ ID NO: 468034 - RNA, 19 nt, Artificial Sequence
  Description of Artificial Sequence: Synthetic oligonucleotide
  Antisense Strand to SEQ ID NO: 468033
ucugguacacgauugcaaa

SEQ ID NO: 468035 - RNA, 19 nt, Artificial Sequence
  Description of Artificial Sequence: Synthetic oligonucleotide
  Sense strand starting at position 1330 of SEQ ID NO: 317147
ggcagugagguguaaggaa

SEQ ID NO: 468036 - RNA, 19 nt, Artificial Sequence
  Description of Artificial Sequence: Synthetic oligonucleotide
  Antisense Strand to SEQ ID NO: 468035
uuccuuacaccucacugcc

SEQ ID NO: 468037 - RNA, 19 nt, Artificial Sequence
  Description of Artificial Sequence: Synthetic oligonucleotide
  Sense strand starting at position 1567 of SEQ ID NO: 317147
cggccuccgcgacaaagau

SEQ ID NO: 468038 - RNA, 19 nt, Artificial Sequence
  Description of Artificial Sequence: Synthetic oligonucleotide
  Antisense Strand to SEQ ID NO: 468037
aucuuugucgcggaggccg

SEQ ID NO: 468039 - RNA, 19 nt, Artificial Sequence
  Description of Artificial Sequence: Synthetic oligonucleotide
  Sense strand starting at position 1662 of SEQ ID NO: 317147
cucgaauacuuacuuaguu

SEQ ID NO: 468040 - RNA, 19 nt, Artificial Sequence
  Description of Artificial Sequence: Synthetic oligonucleotide
  Antisense Strand to SEQ ID NO: 468039
aacuaaguaaguauucgag

SEQ ID NO: 468041 - RNA, 19 nt, Artificial Sequence
  Description of Artificial Sequence: Synthetic oligonucleotide
  Sense strand starting at position 1670 of SEQ ID NO: 317147
cuuacuuaguuggcucuaa

SEQ ID NO: 468042 - RNA, 19 nt, Artificial Sequence
  Description of Artificial Sequence: Synthetic oligonucleotide
  Antisense Strand to SEQ ID NO: 468041
uuagagccaacuaaguaag

SEQ ID NO: 468043 - RNA, 19 nt, Artificial Sequence
  Description of Artificial Sequence: Synthetic oligonucleotide
  Sense strand starting at position 1674 of SEQ ID NO: 317147
cuuaguuggcucuaacugu

SEQ ID NO: 468044 - RNA, 19 nt, Artificial Sequence
  Description of Artificial Sequence: Synthetic oligonucleotide
  Antisense Strand to SEQ ID NO: 468043
acaguuagagccaacuaag

SEQ ID NO: 468045 - RNA, 19 nt, Artificial Sequence
  Description of Artificial Sequence: Synthetic oligonucleotide
  Sense strand starting at position 2007 of SEQ ID NO: 317147
gcacacgacucuccuuaaa

SEQ ID NO: 468046 - RNA, 19 nt, Artificial Sequence
  Description of Artificial Sequence: Synthetic oligonucleotide
  Antisense Strand to SEQ ID NO: 468045
uuuaaggagagucgugugc

SEQ ID NO: 468047 - RNA, 19 nt, Artificial Sequence
  Description of Artificial Sequence: Synthetic oligonucleotide
  Sense strand starting at position 2375 of SEQ ID NO: 317147
cgccgcuguccauugugau

SEQ ID NO: 468048 - RNA, 19 nt, Artificial Sequence
  Description of Artificial Sequence: Synthetic oligonucleotide
  Antisense Strand to SEQ ID NO: 468047
aucacaauggacagcggcg

SEQ ID NO: 468049 - RNA, 19 nt, Artificial Sequence
  Description of Artificial Sequence: Synthetic oligonucleotide
  Sense strand starting at position 2416 of SEQ ID NO: 317147
gcgugccgcuaauuuauua

SEQ ID NO: 468050 - RNA, 19 nt, Artificial Sequence
  Description of Artificial Sequence: Synthetic oligonucleotide
  Antisense Strand to SEQ ID NO: 468049
uaauaaauuagcggcacgc

SEQ ID NO: 468051 - RNA, 19 nt, Artificial Sequence
  Description of Artificial Sequence: Synthetic oligonucleotide
  Sense strand starting at position 2420 of SEQ ID NO: 317147
gccgcuaauuuauuaauga

SEQ ID NO: 468052 - RNA, 19 nt, Artificial Sequence
  Description of Artificial Sequence: Synthetic oligonucleotide
  Antisense Strand to SEQ ID NO: 468051
ucauuaauaaauuagcggc

SEQ ID NO: 468053 - RNA, 19 nt, Artificial Sequence
  Description of Artificial Sequence: Synthetic oligonucleotide
  Sense strand starting at position 2421 of SEQ ID NO: 317147
ccgcuaauuuauuaaugaa

SEQ ID NO: 468054 - RNA, 19 nt, Artificial Sequence
  Description of Artificial Sequence: Synthetic oligonucleotide
  Antisense Strand to SEQ ID NO: 468053
uucauuaauaaauuagcgg

SEQ ID NO: 468055 - RNA, 19 nt, Artificial Sequence
  Description of Artificial Sequence: Synthetic oligonucleotide
  Sense strand starting at position 2662 of SEQ ID NO: 317147
cuccuaacucccgggugau

SEQ ID NO: 468056 - RNA, 19 nt, Artificial Sequence
  Description of Artificial Sequence: Synthetic oligonucleotide
  Antisense Strand to SEQ ID NO: 468055
aucacccgggaguuaggag

SEQ ID NO: 468057 - RNA, 19 nt, Artificial Sequence
  Description of Artificial Sequence: Synthetic oligonucleotide
  Sense strand starting at position 3009 of SEQ ID NO: 317147
acauguuagagcugaaagg

SEQ ID NO: 468058 - RNA, 19 nt, Artificial Sequence
  Description of Artificial Sequence: Synthetic oligonucleotide
  Antisense Strand to SEQ ID NO: 468057
ccuuucagcucuaacaugu

SEQ ID NO: 468059 - RNA, 19 nt, Artificial Sequence
  Description of Artificial Sequence: Synthetic oligonucleotide
  Sense strand starting at position 3097 of SEQ ID NO: 317147
aguuuauagccuggaggga

SEQ ID NO: 468060 - RNA, 19 nt, Artificial Sequence
  Description of Artificial Sequence: Synthetic oligonucleotide
  Antisense Strand to SEQ ID NO: 468059
ucccuccaggcuauaaacu

SEQ ID NO: 468061 - RNA, 19 nt, Artificial Sequence
  Description of Artificial Sequence: Synthetic oligonucleotide
  Sense strand starting at position 3202 of SEQ ID NO: 317147
ugacauuucugugaccucu

SEQ ID NO: 468062 - RNA, 19 nt, Artificial Sequence
  Description of Artificial Sequence: Synthetic oligonucleotide
  Antisense Strand to SEQ ID NO: 468061
agaggucacagaaauguca

SEQ ID NO: 468063 - RNA, 19 nt, Artificial Sequence
  Description of Artificial Sequence: Synthetic oligonucleotide
  Sense strand starting at position 3317 of SEQ ID NO: 317147
ggaaacuuguucucaauug

SEQ ID NO: 468064 - RNA, 19 nt, Artificial Sequence
  Description of Artificial Sequence: Synthetic oligonucleotide
  Antisense Strand to SEQ ID NO: 468063
caauugagaacaaguuucc

SEQ ID NO: 468065 - RNA, 19 nt, Artificial Sequence
  Description of Artificial Sequence: Synthetic oligonucleotide
  Sense strand starting at position 3416 of SEQ ID NO: 317147
ggaguggcgucccuugaga

SEQ ID NO: 468066 - RNA, 19 nt, Artificial Sequence
  Description of Artificial Sequence: Synthetic oligonucleotide
  Antisense Strand to SEQ ID NO: 468065
ucucaagggacgccacucc

SEQ ID NO: 468067 - RNA, 19 nt, Artificial Sequence
  Description of Artificial Sequence: Synthetic oligonucleotide
  Sense strand starting at position 3443 of SEQ ID NO: 317147
gcaaauuaacuuuaggcaa

SEQ ID NO: 468068 - RNA, 19 nt, Artificial Sequence
  Description of Artificial Sequence: Synthetic oligonucleotide
  Antisense Strand to SEQ ID NO: 468067
uugccuaaaguuaauuugc

SEQ ID NO: 468069 - RNA, 19 nt, Artificial Sequence
  Description of Artificial Sequence: Synthetic oligonucleotide
  Sense strand starting at position 3472 of SEQ ID NO: 317147
gaguguuaggaguggaaga

SEQ ID NO: 468070 - RNA, 19 nt, Artificial Sequence
  Description of Artificial Sequence: Synthetic oligonucleotide
  Antisense Strand to SEQ ID NO: 468069
ucuuccacuccuaacacuc

SEQ ID NO: 468071 - RNA, 19 nt, Artificial Sequence
  Description of Artificial Sequence: Synthetic oligonucleotide
  Sense strand starting at position 3474 of SEQ ID NO: 317147
guguuaggaguggaagagu

SEQ ID NO: 468072 - RNA, 19 nt, Artificial Sequence
  Description of Artificial Sequence: Synthetic oligonucleotide
  Antisense Strand to SEQ ID NO: 468071
acucuuccacuccuaacac

SEQ ID NO: 468073 - RNA, 19 nt, Artificial Sequence
  Description of Artificial Sequence: Synthetic oligonucleotide
  Sense strand starting at position 3549 of SEQ ID NO: 317147
agaaacaagcuguauucca

SEQ ID NO: 468074 - RNA, 19 nt, Artificial Sequence
  Description of Artificial Sequence: Synthetic oligonucleotide
  Antisense Strand to SEQ ID NO: 468073
uggaauacagcuuguuucu

SEQ ID NO: 468075 - RNA, 19 nt, Artificial Sequence
  Description of Artificial Sequence: Synthetic oligonucleotide
  Sense strand starting at position 3576 of SEQ ID NO: 317147
gugguuaaauuagcuguua

SEQ ID NO: 468076 - RNA, 19 nt, Artificial Sequence
  Description of Artificial Sequence: Synthetic oligonucleotide
  Antisense Strand to SEQ ID NO: 468075
uaacagcuaauuuaaccac

SEQ ID NO: 468077 - RNA, 19 nt, Artificial Sequence
  Description of Artificial Sequence: Synthetic oligonucleotide
  Sense strand starting at position 3578 of SEQ ID NO: 317147
gguuaaauuagcuguuagu

SEQ ID NO: 468078 - RNA, 19 nt, Artificial Sequence
  Description of Artificial Sequence: Synthetic oligonucleotide
  Antisense Strand to SEQ ID NO: 468077
acuaacagcuaauuuaacc

SEQ ID NO: 468079 - RNA, 19 nt, Artificial Sequence
  Description of Artificial Sequence: Synthetic oligonucleotide
  Sense strand starting at position 3737 of SEQ ID NO: 317147
uccuucugucuuggaauua

SEQ ID NO: 468080 - RNA, 19 nt, Artificial Sequence
  Description of Artificial Sequence: Synthetic oligonucleotide
  Antisense Strand to SEQ ID NO: 468079
uaauuccaagacagaagga

SEQ ID NO: 468081 - RNA, 19 nt, Artificial Sequence
  Description of Artificial Sequence: Synthetic oligonucleotide
  Sense strand starting at position 3784 of SEQ ID NO: 317147
cucuuugauguuuguguuu

SEQ ID NO: 468082 - RNA, 19 nt, Artificial Sequence
  Description of Artificial Sequence: Synthetic oligonucleotide
  Antisense Strand to SEQ ID NO: 468081
aaacacaaacaucaaagag

SEQ ID NO: 468083 - RNA, 19 nt, Artificial Sequence
  Description of Artificial Sequence: Synthetic oligonucleotide
  Sense strand starting at position 3854 of SEQ ID NO: 317147
ccaguuuccuccucgacua

SEQ ID NO: 468084 - RNA, 19 nt, Artificial Sequence
  Description of Artificial Sequence: Synthetic oligonucleotide
  Antisense Strand to SEQ ID NO: 468083
uagucgaggaggaaacugg

SEQ ID NO: 468085 - RNA, 19 nt, Artificial Sequence
  Description of Artificial Sequence: Synthetic oligonucleotide
  Sense strand starting at position 3856 of SEQ ID NO: 317147
aguuuccuccucgacuauu

SEQ ID NO: 468086 - RNA, 19 nt, Artificial Sequence
  Description of Artificial Sequence: Synthetic oligonucleotide
  Antisense Strand to SEQ ID NO: 468085
aauagucgaggaggaaacu

SEQ ID NO: 468087 - RNA, 19 nt, Artificial Sequence
  Description of Artificial Sequence: Synthetic oligonucleotide
  Sense strand starting at position 3893 of SEQ ID NO: 317147
auguguuagaagugcagaa

SEQ ID NO: 468088 - RNA, 19 nt, Artificial Sequence
  Description of Artificial Sequence: Synthetic oligonucleotide
  Antisense Strand to SEQ ID NO: 468087
uucugcacuucuaacacau

SEQ ID NO: 468089 - RNA, 19 nt, Artificial Sequence
  Description of Artificial Sequence: Synthetic oligonucleotide
  Sense strand starting at position 3895 of SEQ ID NO: 317147
guguuagaagugcagaaau

SEQ ID NO: 468090 - RNA, 19 nt, Artificial Sequence
  Description of Artificial Sequence: Synthetic oligonucleotide
  Antisense Strand to SEQ ID NO: 468089
auuucugcacuucuaacac

SEQ ID NO: 468091 - RNA, 19 nt, Artificial Sequence
  Description of Artificial Sequence: Synthetic oligonucleotide
  Sense strand starting at position 3972 of SEQ ID NO: 317147
cucacauaucuuuggguuu

SEQ ID NO: 468092 - RNA, 19 nt, Artificial Sequence
  Description of Artificial Sequence: Synthetic oligonucleotide
  Antisense Strand to SEQ ID NO: 468091
aaacccaaagauaugugag

SEQ ID NO: 468093 - RNA, 19 nt, Artificial Sequence
  Description of Artificial Sequence: Synthetic oligonucleotide
  Sense strand starting at position 3983 of SEQ ID NO: 317147
uuggguuucugucuaucau

SEQ ID NO: 468094 - RNA, 19 nt, Artificial Sequence
  Description of Artificial Sequence: Synthetic oligonucleotide
  Antisense Strand to SEQ ID NO: 468093
augauagacagaaacccaa

SEQ ID NO: 468095 - RNA, 19 nt, Artificial Sequence
  Description of Artificial Sequence: Synthetic oligonucleotide
  Sense strand starting at position 8 of SEQ ID NO: 317148
uuaggaauugcagguguau

SEQ ID NO: 468096 - RNA, 19 nt, Artificial Sequence
  Description of Artificial Sequence: Synthetic oligonucleotide
  Antisense Strand to SEQ ID NO: 468095
auacaccugcaauuccuaa

SEQ ID NO: 468097 - RNA, 19 nt, Artificial Sequence
  Description of Artificial Sequence: Synthetic oligonucleotide
  Sense strand starting at position 10 of SEQ ID NO: 317148
aggaauugcagguguauca

SEQ ID NO: 468098 - RNA, 19 nt, Artificial Sequence
  Description of Artificial Sequence: Synthetic oligonucleotide
  Antisense Strand to SEQ ID NO: 468097
ugauacaccugcaauuccu

SEQ ID NO: 468099 - RNA, 19 nt, Artificial Sequence
  Description of Artificial Sequence: Synthetic oligonucleotide
  Sense strand starting at position 20 of SEQ ID NO: 317148
gguguaucaauauggauga

SEQ ID NO: 468100 - RNA, 19 nt, Artificial Sequence
  Description of Artificial Sequence: Synthetic oligonucleotide
  Antisense Strand to SEQ ID NO: 468099
ucauccauauugauacacc

SEQ ID NO: 468101 - RNA, 19 nt, Artificial Sequence
  Description of Artificial Sequence: Synthetic oligonucleotide
  Sense strand starting at position 52 of SEQ ID NO: 317148
ccaagucuccauuaaucgu

SEQ ID NO: 468102 - RNA, 19 nt, Artificial Sequence
  Description of Artificial Sequence: Synthetic oligonucleotide
  Antisense Strand to SEQ ID NO: 468101
acgauuaauggagacuugg

SEQ ID NO: 468103 - RNA, 19 nt, Artificial Sequence
  Description of Artificial Sequence: Synthetic oligonucleotide
  Sense strand starting at position 60 of SEQ ID NO: 317148
ccauuaaucguacauguuc

SEQ ID NO: 468104 - RNA, 19 nt, Artificial Sequence
  Description of Artificial Sequence: Synthetic oligonucleotide
  Antisense Strand to SEQ ID NO: 468103
gaacauguacgauuaaugg

SEQ ID NO: 468105 - RNA, 19 nt, Artificial Sequence
  Description of Artificial Sequence: Synthetic oligonucleotide
  Sense strand starting at position 337 of SEQ ID NO: 317148
aguuuaaacugcuugacaa

SEQ ID NO: 468106 - RNA, 19 nt, Artificial Sequence
  Description of Artificial Sequence: Synthetic oligonucleotide
  Antisense Strand to SEQ ID NO: 468105
uugucaagcaguuuaaacu

SEQ ID NO: 468107 - RNA, 19 nt, Artificial Sequence
  Description of Artificial Sequence: Synthetic oligonucleotide
  Sense strand starting at position 338 of SEQ ID NO: 317148
guuuaaacugcuugacaau

SEQ ID NO: 468108 - RNA, 19 nt, Artificial Sequence
  Description of Artificial Sequence: Synthetic oligonucleotide
  Antisense Strand to SEQ ID NO: 468107
auugucaagcaguuuaaac

SEQ ID NO: 468109 - RNA, 19 nt, Artificial Sequence
  Description of Artificial Sequence: Synthetic oligonucleotide
  Sense strand starting at position 427 of SEQ ID NO: 317148
agaucaccaguauguagaa

SEQ ID NO: 468110 - RNA, 19 nt, Artificial Sequence
  Description of Artificial Sequence: Synthetic oligonucleotide
  Antisense Strand to SEQ ID NO: 468109
uucuacauacuggugaucu

SEQ ID NO: 468111 - RNA, 19 nt, Artificial Sequence
  Description of Artificial Sequence: Synthetic oligonucleotide
  Sense strand starting at position 428 of SEQ ID NO: 317148
gaucaccaguauguagaau

SEQ ID NO: 468112 - RNA, 19 nt, Artificial Sequence
  Description of Artificial Sequence: Synthetic oligonucleotide
  Antisense Strand to SEQ ID NO: 468111
auucuacauacuggugauc

SEQ ID NO: 468113 - RNA, 19 nt, Artificial Sequence
  Description of Artificial Sequence: Synthetic oligonucleotide
  Sense strand starting at position 742 of SEQ ID NO: 317148
uuguuucagcggucaugca

SEQ ID NO: 468114 - RNA, 19 nt, Artificial Sequence
  Description of Artificial Sequence: Synthetic oligonucleotide
  Antisense Strand to SEQ ID NO: 468113
ugcaugaccgcugaaacaa

SEQ ID NO: 468115 - RNA, 19 nt, Artificial Sequence
  Description of Artificial Sequence: Synthetic oligonucleotide
  Sense strand starting at position 811 of SEQ ID NO: 317148
ugcucuaaguauccaggua

SEQ ID NO: 468116 - RNA, 19 nt, Artificial Sequence
  Description of Artificial Sequence: Synthetic oligonucleotide
  Antisense Strand to SEQ ID NO: 468115
uaccuggauacuuagagca

SEQ ID NO: 468117 - RNA, 19 nt, Artificial Sequence
  Description of Artificial Sequence: Synthetic oligonucleotide
  Sense strand starting at position 1126 of SEQ ID NO: 317148
ggugaaaucugguucugca

SEQ ID NO: 468118 - RNA, 19 nt, Artificial Sequence
  Description of Artificial Sequence: Synthetic oligonucleotide
  Antisense Strand to SEQ ID NO: 468117
ugcagaaccagauuucacc

SEQ ID NO: 468119 - RNA, 19 nt, Artificial Sequence
  Description of Artificial Sequence: Synthetic oligonucleotide
  Sense strand starting at position 1997 of SEQ ID NO: 317148
cucacuuccuggcuggaaa

SEQ ID NO: 468120 - RNA, 19 nt, Artificial Sequence
  Description of Artificial Sequence: Synthetic oligonucleotide
  Antisense Strand to SEQ ID NO: 468119
uuuccagccaggaagugag

SEQ ID NO: 468121 - RNA, 19 nt, Artificial Sequence
  Description of Artificial Sequence: Synthetic oligonucleotide
  Sense strand starting at position 1998 of SEQ ID NO: 317148
ucacuuccuggcuggaaau

SEQ ID NO: 468122 - RNA, 19 nt, Artificial Sequence
  Description of Artificial Sequence: Synthetic oligonucleotide
  Antisense Strand to SEQ ID NO: 468121
auuuccagccaggaaguga

SEQ ID NO: 468123 - RNA, 19 nt, Artificial Sequence
  Description of Artificial Sequence: Synthetic oligonucleotide
  Sense strand starting at position 2446 of SEQ ID NO: 317148
ccaagcaugccagauauaa

SEQ ID NO: 468124 - RNA, 19 nt, Artificial Sequence
  Description of Artificial Sequence: Synthetic oligonucleotide
  Antisense Strand to SEQ ID NO: 468123
uuauaucuggcaugcuugg

SEQ ID NO: 468125 - RNA, 19 nt, Artificial Sequence
  Description of Artificial Sequence: Synthetic oligonucleotide
  Sense strand starting at position 2471 of SEQ ID NO: 317148
agcucaucuguauauucca

SEQ ID NO: 468126 - RNA, 19 nt, Artificial Sequence
  Description of Artificial Sequence: Synthetic oligonucleotide
  Antisense Strand to SEQ ID NO: 468125
uggaauauacagaugagcu

SEQ ID NO: 468127 - RNA, 19 nt, Artificial Sequence
  Description of Artificial Sequence: Synthetic oligonucleotide
  Sense strand starting at position 2486 of SEQ ID NO: 317148
uccauuuaagcgugucuca

SEQ ID NO: 468128 - RNA, 19 nt, Artificial Sequence
  Description of Artificial Sequence: Synthetic oligonucleotide
  Antisense Strand to SEQ ID NO: 468127
ugagacacgcuuaaaugga

SEQ ID NO: 468129 - RNA, 19 nt, Artificial Sequence
  Description of Artificial Sequence: Synthetic oligonucleotide
  Sense strand starting at position 2489 of SEQ ID NO: 317148
auuuaagcgugucucaguu

SEQ ID NO: 468130 - RNA, 19 nt, Artificial Sequence
  Description of Artificial Sequence: Synthetic oligonucleotide
  Antisense Strand to SEQ ID NO: 468129
aacugagacacgcuuaaau

SEQ ID NO: 468131 - RNA, 19 nt, Artificial Sequence
  Description of Artificial Sequence: Synthetic oligonucleotide
  Sense strand starting at position 2554 of SEQ ID NO: 317148
acgacuugugcccaguaaa

SEQ ID NO: 468132 - RNA, 19 nt, Artificial Sequence
  Description of Artificial Sequence: Synthetic oligonucleotide
  Antisense Strand to SEQ ID NO: 468131
uuuacugggcacaagucgu

SEQ ID NO: 468133 - RNA, 19 nt, Artificial Sequence
  Description of Artificial Sequence: Synthetic oligonucleotide
  Sense strand starting at position 2557 of SEQ ID NO: 317148
acuugugcccaguaaagua

SEQ ID NO: 468134 - RNA, 19 nt, Artificial Sequence
  Description of Artificial Sequence: Synthetic oligonucleotide
  Antisense Strand to SEQ ID NO: 468133
uacuuuacugggcacaagu

SEQ ID NO: 468135 - RNA, 19 nt, Artificial Sequence
  Description of Artificial Sequence: Synthetic oligonucleotide
  Sense strand starting at position 2600 of SEQ ID NO: 317148
ggucuuaaaucuccugguu

SEQ ID NO: 468136 - RNA, 19 nt, Artificial Sequence
  Description of Artificial Sequence: Synthetic oligonucleotide
  Antisense Strand to SEQ ID NO: 468135
aaccaggagauuuaagacc

SEQ ID NO: 468137 - RNA, 19 nt, Artificial Sequence
  Description of Artificial Sequence: Synthetic oligonucleotide
  Sense strand starting at position 2620 of SEQ ID NO: 317148
uagagcaguuacucagaau

SEQ ID NO: 468138 - RNA, 19 nt, Artificial Sequence
  Description of Artificial Sequence: Synthetic oligonucleotide
  Antisense Strand to SEQ ID NO: 468137
auucugaguaacugcucua

SEQ ID NO: 468139 - RNA, 19 nt, Artificial Sequence
  Description of Artificial Sequence: Synthetic oligonucleotide
  Sense strand starting at position 2655 of SEQ ID NO: 317148
uuguuaggccuuuaugaua

SEQ ID NO: 468140 - RNA, 19 nt, Artificial Sequence
  Description of Artificial Sequence: Synthetic oligonucleotide
  Antisense Strand to SEQ ID NO: 468139
uaucauaaaggccuaacaa

SEQ ID NO: 468141 - RNA, 19 nt, Artificial Sequence
  Description of Artificial Sequence: Synthetic oligonucleotide
  Sense strand starting at position 2666 of SEQ ID NO: 317148
uuaugauaauuacugugga

SEQ ID NO: 468142 - RNA, 19 nt, Artificial Sequence
  Description of Artificial Sequence: Synthetic oligonucleotide
  Antisense Strand to SEQ ID NO: 468141
uccacaguaauuaucauaa

SEQ ID NO: 468143 - RNA, 19 nt, Artificial Sequence
  Description of Artificial Sequence: Synthetic oligonucleotide
  Sense strand starting at position 2669 of SEQ ID NO: 317148
ugauaauuacuguggauag

SEQ ID NO: 468144 - RNA, 19 nt, Artificial Sequence
  Description of Artificial Sequence: Synthetic oligonucleotide
  Antisense Strand to SEQ ID NO: 468143
cuauccacaguaauuauca

SEQ ID NO: 468145 - RNA, 19 nt, Artificial Sequence
  Description of Artificial Sequence: Synthetic oligonucleotide
  Sense strand starting at position 2688 of SEQ ID NO: 317148
aauuauagugaugguggua

SEQ ID NO: 468146 - RNA, 19 nt, Artificial Sequence
  Description of Artificial Sequence: Synthetic oligonucleotide
  Antisense Strand to SEQ ID NO: 468145
uaccaccaucacuauaauu

SEQ ID NO: 468147 - RNA, 19 nt, Artificial Sequence
  Description of Artificial Sequence: Synthetic oligonucleotide
  Sense strand starting at position 2826 of SEQ ID NO: 317148
gcaucugagcugcuuuagu

SEQ ID NO: 468148 - RNA, 19 nt, Artificial Sequence
  Description of Artificial Sequence: Synthetic oligonucleotide
  Antisense Strand to SEQ ID NO: 468147
acuaaagcagcucagaugc

SEQ ID NO: 468149 - RNA, 19 nt, Artificial Sequence
  Description of Artificial Sequence: Synthetic oligonucleotide
  Sense strand starting at position 2874 of SEQ ID NO: 317148
gauaccuucggguggauua

SEQ ID NO: 468150 - RNA, 19 nt, Artificial Sequence
  Description of Artificial Sequence: Synthetic oligonucleotide
  Antisense Strand to SEQ ID NO: 468149
uaauccacccgaagguauc

SEQ ID NO: 468151 - RNA, 19 nt, Artificial Sequence
  Description of Artificial Sequence: Synthetic oligonucleotide
  Sense strand starting at position 2904 of SEQ ID NO: 317148
aagaaagcuugagccgaaa

SEQ ID NO: 468152 - RNA, 19 nt, Artificial Sequence
  Description of Artificial Sequence: Synthetic oligonucleotide
  Antisense Strand to SEQ ID NO: 468151
uuucggcucaagcuuucuu

SEQ ID NO: 468153 - RNA, 19 nt, Artificial Sequence
  Description of Artificial Sequence: Synthetic oligonucleotide
  Sense strand starting at position 2907 of SEQ ID NO: 317148
aaagcuugagccgaaauau

SEQ ID NO: 468154 - RNA, 19 nt, Artificial Sequence
  Description of Artificial Sequence: Synthetic oligonucleotide
  Antisense Strand to SEQ ID NO: 468153
auauuucggcucaagcuuu

SEQ ID NO: 468155 - RNA, 19 nt, Artificial Sequence
  Description of Artificial Sequence: Synthetic oligonucleotide
  Sense strand starting at position 2967 of SEQ ID NO: 317148
acugaaagcuuagcuuuaa

SEQ ID NO: 468156 - RNA, 19 nt, Artificial Sequence
  Description of Artificial Sequence: Synthetic oligonucleotide
  Antisense Strand to SEQ ID NO: 468155
uuaaagcuaagcuuucagu

SEQ ID NO: 468157 - RNA, 19 nt, Artificial Sequence
  Description of Artificial Sequence: Synthetic oligonucleotide
  Sense strand starting at position 2968 of SEQ ID NO: 317148
cugaaagcuuagcuuuaaa

SEQ ID NO: 468158 - RNA, 19 nt, Artificial Sequence
  Description of Artificial Sequence: Synthetic oligonucleotide
  Antisense Strand to SEQ ID NO: 468157
uuuaaagcuaagcuuucag

SEQ ID NO: 468159 - RNA, 19 nt, Artificial Sequence
  Description of Artificial Sequence: Synthetic oligonucleotide
  Sense strand starting at position 3024 of SEQ ID NO: 317148
uggcauuuagauugcuuau

SEQ ID NO: 468160 - RNA, 19 nt, Artificial Sequence
  Description of Artificial Sequence: Synthetic oligonucleotide
  Antisense Strand to SEQ ID NO: 468159
auaagcaaucuaaaugcca

SEQ ID NO: 468161 - RNA, 19 nt, Artificial Sequence
  Description of Artificial Sequence: Synthetic oligonucleotide
  Sense strand starting at position 3176 of SEQ ID NO: 317148
cgauccauuugauugccua

SEQ ID NO: 468162 - RNA, 19 nt, Artificial Sequence
  Description of Artificial Sequence: Synthetic oligonucleotide
  Antisense Strand to SEQ ID NO: 468161
uaggcaaucaaauggaucg

SEQ ID NO: 468163 - RNA, 19 nt, Artificial Sequence
  Description of Artificial Sequence: Synthetic oligonucleotide
  Sense strand starting at position 3230 of SEQ ID NO: 317148
acagucgaccuuuaaguga

SEQ ID NO: 468164 - RNA, 19 nt, Artificial Sequence
  Description of Artificial Sequence: Synthetic oligonucleotide
  Antisense Strand to SEQ ID NO: 468163
ucacuuaaaggucgacugu

SEQ ID NO: 468165 - RNA, 19 nt, Artificial Sequence
  Description of Artificial Sequence: Synthetic oligonucleotide
  Sense strand starting at position 3267 of SEQ ID NO: 317148
ggcugagcagcuggaauuu

SEQ ID NO: 468166 - RNA, 19 nt, Artificial Sequence
  Description of Artificial Sequence: Synthetic oligonucleotide
  Antisense Strand to SEQ ID NO: 468165
aaauuccagcugcucagcc

SEQ ID NO: 468167 - RNA, 19 nt, Artificial Sequence
  Description of Artificial Sequence: Synthetic oligonucleotide
  Sense strand starting at position 3760 of SEQ ID NO: 317148
gugacauauuugggaguaa

SEQ ID NO: 468168 - RNA, 19 nt, Artificial Sequence
  Description of Artificial Sequence: Synthetic oligonucleotide
  Antisense Strand to SEQ ID NO: 468167
uuacucccaaauaugucac

SEQ ID NO: 468169 - RNA, 19 nt, Artificial Sequence
  Description of Artificial Sequence: Synthetic oligonucleotide
  Sense strand starting at position 3761 of SEQ ID NO: 317148
ugacauauuugggaguaaa

SEQ ID NO: 468170 - RNA, 19 nt, Artificial Sequence
  Description of Artificial Sequence: Synthetic oligonucleotide
  Antisense Strand to SEQ ID NO: 468169
uuuacucccaaauauguca

SEQ ID NO: 468171 - RNA, 19 nt, Artificial Sequence
  Description of Artificial Sequence: Synthetic oligonucleotide
  Sense strand starting at position 3781 of SEQ ID NO: 317148
aaugaagagcguuaauuac

SEQ ID NO: 468172 - RNA, 19 nt, Artificial Sequence
  Description of Artificial Sequence: Synthetic oligonucleotide
  Antisense Strand to SEQ ID NO: 468171
guaauuaacgcucuucauu

SEQ ID NO: 468173 - RNA, 19 nt, Artificial Sequence
  Description of Artificial Sequence: Synthetic oligonucleotide
  Sense strand starting at position 3934 of SEQ ID NO: 317148
gggaauuuauucugucaca

SEQ ID NO: 468174 - RNA, 19 nt, Artificial Sequence
  Description of Artificial Sequence: Synthetic oligonucleotide
  Antisense Strand to SEQ ID NO: 468173
ugugacagaauaaauuccc

SEQ ID NO: 468175 - RNA, 19 nt, Artificial Sequence
  Description of Artificial Sequence: Synthetic oligonucleotide
  Sense strand starting at position 417 of SEQ ID NO: 317149
ggccauuaacugcaugcua

SEQ ID NO: 468176 - RNA, 19 nt, Artificial Sequence
  Description of Artificial Sequence: Synthetic oligonucleotide
  Antisense Strand to SEQ ID NO: 468175
uagcaugcaguuaauggcc

SEQ ID NO: 468177 - RNA, 19 nt, Artificial Sequence
  Description of Artificial Sequence: Synthetic oligonucleotide
  Sense strand starting at position 645 of SEQ ID NO: 317149
ugauauaucggaggcaaca

SEQ ID NO: 468178 - RNA, 19 nt, Artificial Sequence
  Description of Artificial Sequence: Synthetic oligonucleotide
  Antisense Strand to SEQ ID NO: 468177
uguugccuccgauauauca

SEQ ID NO: 468179 - RNA, 19 nt, Artificial Sequence
  Description of Artificial Sequence: Synthetic oligonucleotide
  Sense strand starting at position 776 of SEQ ID NO: 317149
agguaaagaugacaaauga

SEQ ID NO: 468180 - RNA, 19 nt, Artificial Sequence
  Description of Artificial Sequence: Synthetic oligonucleotide
  Antisense Strand to SEQ ID NO: 468179
ucauuugucaucuuuaccu

SEQ ID NO: 468181 - RNA, 19 nt, Artificial Sequence
  Description of Artificial Sequence: Synthetic oligonucleotide
  Sense strand starting at position 852 of SEQ ID NO: 317149
ugggauuucugugacucag

SEQ ID NO: 468182 - RNA, 19 nt, Artificial Sequence
  Description of Artificial Sequence: Synthetic oligonucleotide
  Antisense Strand to SEQ ID NO: 468181
cugagucacagaaauccca

SEQ ID NO: 468183 - RNA, 19 nt, Artificial Sequence
  Description of Artificial Sequence: Synthetic oligonucleotide
  Sense strand starting at position 911 of SEQ ID NO: 317149
caagguuguuaaccagauu

SEQ ID NO: 468184 - RNA, 19 nt, Artificial Sequence
  Description of Artificial Sequence: Synthetic oligonucleotide
  Antisense Strand to SEQ ID NO: 468183
aaucugguuaacaaccuug

SEQ ID NO: 468185 - RNA, 19 nt, Artificial Sequence
  Description of Artificial Sequence: Synthetic oligonucleotide
  Sense strand starting at position 1118 of SEQ ID NO: 317149
auggaaaucuaccuagagu

SEQ ID NO: 468186 - RNA, 19 nt, Artificial Sequence
  Description of Artificial Sequence: Synthetic oligonucleotide
  Antisense Strand to SEQ ID NO: 468185
acucuagguagauuuccau

SEQ ID NO: 468187 - RNA, 19 nt, Artificial Sequence
  Description of Artificial Sequence: Synthetic oligonucleotide
  Sense strand starting at position 1167 of SEQ ID NO: 317149
agaagugggcccgauaaca

SEQ ID NO: 468188 - RNA, 19 nt, Artificial Sequence
  Description of Artificial Sequence: Synthetic oligonucleotide
  Antisense Strand to SEQ ID NO: 468187
uguuaucgggcccacuucu

SEQ ID NO: 468189 - RNA, 19 nt, Artificial Sequence
  Description of Artificial Sequence: Synthetic oligonucleotide
  Sense strand starting at position 1245 of SEQ ID NO: 317149
acuaguaacugccuuagga

SEQ ID NO: 468190 - RNA, 19 nt, Artificial Sequence
  Description of Artificial Sequence: Synthetic oligonucleotide
  Antisense Strand to SEQ ID NO: 468189
uccuaaggcaguuacuagu

SEQ ID NO: 468191 - RNA, 19 nt, Artificial Sequence
  Description of Artificial Sequence: Synthetic oligonucleotide
  Sense strand starting at position 2027 of SEQ ID NO: 317149
uuccuuauccgguaaagug

SEQ ID NO: 468192 - RNA, 19 nt, Artificial Sequence
  Description of Artificial Sequence: Synthetic oligonucleotide
  Antisense Strand to SEQ ID NO: 468191
cacuuuaccggauaaggaa

SEQ ID NO: 468193 - RNA, 19 nt, Artificial Sequence
  Description of Artificial Sequence: Synthetic oligonucleotide
  Sense strand starting at position 2223 of SEQ ID NO: 317149
gcaagacugcccuaaacuc

SEQ ID NO: 468194 - RNA, 19 nt, Artificial Sequence
  Description of Artificial Sequence: Synthetic oligonucleotide
  Antisense Strand to SEQ ID NO: 468193
gaguuuagggcagucuugc

SEQ ID NO: 468195 - RNA, 19 nt, Artificial Sequence
  Description of Artificial Sequence: Synthetic oligonucleotide
  Sense strand starting at position 2321 of SEQ ID NO: 317149
gaugacaggaggugucaau

SEQ ID NO: 468196 - RNA, 19 nt, Artificial Sequence
  Description of Artificial Sequence: Synthetic oligonucleotide
  Antisense Strand to SEQ ID NO: 468195
auugacaccuccugucauc

SEQ ID NO: 468197 - RNA, 19 nt, Artificial Sequence
  Description of Artificial Sequence: Synthetic oligonucleotide
  Sense strand starting at position 2402 of SEQ ID NO: 317149
ggagucagcguuccgaagu

SEQ ID NO: 468198 - RNA, 19 nt, Artificial Sequence
  Description of Artificial Sequence: Synthetic oligonucleotide
  Antisense Strand to SEQ ID NO: 468197
acuucggaacgcugacucc

SEQ ID NO: 468199 - RNA, 19 nt, Artificial Sequence
  Description of Artificial Sequence: Synthetic oligonucleotide
  Sense strand starting at position 2405 of SEQ ID NO: 317149
gucagcguuccgaaguaga

SEQ ID NO: 468200 - RNA, 19 nt, Artificial Sequence
  Description of Artificial Sequence: Synthetic oligonucleotide
  Antisense Strand to SEQ ID NO: 468199
ucuacuucggaacgcugac

SEQ ID NO: 468201 - RNA, 19 nt, Artificial Sequence
  Description of Artificial Sequence: Synthetic oligonucleotide
  Sense strand starting at position 2408 of SEQ ID NO: 317149
agcguuccgaaguagagau

SEQ ID NO: 468202 - RNA, 19 nt, Artificial Sequence
  Description of Artificial Sequence: Synthetic oligonucleotide
  Antisense Strand to SEQ ID NO: 468201
aucucuacuucggaacgcu

SEQ ID NO: 468203 - RNA, 19 nt, Artificial Sequence
  Description of Artificial Sequence: Synthetic oligonucleotide
  Sense strand starting at position 2484 of SEQ ID NO: 317149
uuucucauacaagguuaga

SEQ ID NO: 468204 - RNA, 19 nt, Artificial Sequence
  Description of Artificial Sequence: Synthetic oligonucleotide
  Antisense Strand to SEQ ID NO: 468203
ucuaaccuuguaugagaaa

SEQ ID NO: 468205 - RNA, 19 nt, Artificial Sequence
  Description of Artificial Sequence: Synthetic oligonucleotide
  Sense strand starting at position 2489 of SEQ ID NO: 317149
cauacaagguuagagaaua

SEQ ID NO: 468206 - RNA, 19 nt, Artificial Sequence
  Description of Artificial Sequence: Synthetic oligonucleotide
  Antisense Strand to SEQ ID NO: 468205
uauucucuaaccuuguaug

SEQ ID NO: 468207 - RNA, 19 nt, Artificial Sequence
  Description of Artificial Sequence: Synthetic oligonucleotide
  Sense strand starting at position 2497 of SEQ ID NO: 317149
guuagagaauaguuacaac

SEQ ID NO: 468208 - RNA, 19 nt, Artificial Sequence
  Description of Artificial Sequence: Synthetic oligonucleotide
  Antisense Strand to SEQ ID NO: 468207
guuguaacuauucucuaac

SEQ ID NO: 468209 - RNA, 19 nt, Artificial Sequence
  Description of Artificial Sequence: Synthetic oligonucleotide
  Sense strand starting at position 2500 of SEQ ID NO: 317149
agagaauaguuacaacaau

SEQ ID NO: 468210 - RNA, 19 nt, Artificial Sequence
  Description of Artificial Sequence: Synthetic oligonucleotide
  Antisense Strand to SEQ ID NO: 468209
auuguuguaacuauucucu

SEQ ID NO: 468211 - RNA, 19 nt, Artificial Sequence
  Description of Artificial Sequence: Synthetic oligonucleotide
  Sense strand starting at position 2521 of SEQ ID NO: 317149
gauuauagacaguguuucu

SEQ ID NO: 468212 - RNA, 19 nt, Artificial Sequence
  Description of Artificial Sequence: Synthetic oligonucleotide
  Antisense Strand to SEQ ID NO: 468211
agaaacacugucuauaauc

SEQ ID NO: 468213 - RNA, 19 nt, Artificial Sequence
  Description of Artificial Sequence: Synthetic oligonucleotide
  Sense strand starting at position 2614 of SEQ ID NO: 317149
agcagaaguuaaucuauaa

SEQ ID NO: 468214 - RNA, 19 nt, Artificial Sequence
  Description of Artificial Sequence: Synthetic oligonucleotide
  Antisense Strand to SEQ ID NO: 468213
uuauagauuaacuucugcu

SEQ ID NO: 468215 - RNA, 19 nt, Artificial Sequence
  Description of Artificial Sequence: Synthetic oligonucleotide
  Sense strand starting at position 2684 of SEQ ID NO: 317149
cuagccauuguauagaaca

SEQ ID NO: 468216 - RNA, 19 nt, Artificial Sequence
  Description of Artificial Sequence: Synthetic oligonucleotide
  Antisense Strand to SEQ ID NO: 468215
uguucuauacaauggcuag

SEQ ID NO: 468217 - RNA, 19 nt, Artificial Sequence
  Description of Artificial Sequence: Synthetic oligonucleotide
  Sense strand starting at position 2754 of SEQ ID NO: 317149
ccacguguaacucagauga

SEQ ID NO: 468218 - RNA, 19 nt, Artificial Sequence
  Description of Artificial Sequence: Synthetic oligonucleotide
  Antisense Strand to SEQ ID NO: 468217
ucaucugaguuacacgugg

SEQ ID NO: 468219 - RNA, 19 nt, Artificial Sequence
  Description of Artificial Sequence: Synthetic oligonucleotide
  Sense strand starting at position 2758 of SEQ ID NO: 317149
guguaacucagaugacagu

SEQ ID NO: 468220 - RNA, 19 nt, Artificial Sequence
  Description of Artificial Sequence: Synthetic oligonucleotide
  Antisense Strand to SEQ ID NO: 468219
acugucaucugaguuacac

SEQ ID NO: 468221 - RNA, 19 nt, Artificial Sequence
  Description of Artificial Sequence: Synthetic oligonucleotide
  Sense strand starting at position 2918 of SEQ ID NO: 317149
gggagaguugcaggaaagu

SEQ ID NO: 468222 - RNA, 19 nt, Artificial Sequence
  Description of Artificial Sequence: Synthetic oligonucleotide
  Antisense Strand to SEQ ID NO: 468221
acuuuccugcaacucuccc

SEQ ID NO: 468223 - RNA, 19 nt, Artificial Sequence
  Description of Artificial Sequence: Synthetic oligonucleotide
  Sense strand starting at position 2927 of SEQ ID NO: 317149
gcaggaaaguggcuugagu

SEQ ID NO: 468224 - RNA, 19 nt, Artificial Sequence
  Description of Artificial Sequence: Synthetic oligonucleotide
  Antisense Strand to SEQ ID NO: 468223
acucaagccacuuuccugc

SEQ ID NO: 468225 - RNA, 19 nt, Artificial Sequence
  Description of Artificial Sequence: Synthetic oligonucleotide
  Sense strand starting at position 2929 of SEQ ID NO: 317149
aggaaaguggcuugaguag

SEQ ID NO: 468226 - RNA, 19 nt, Artificial Sequence
  Description of Artificial Sequence: Synthetic oligonucleotide
  Antisense Strand to SEQ ID NO: 468225
cuacucaagccacuuuccu

SEQ ID NO: 468227 - RNA, 19 nt, Artificial Sequence
  Description of Artificial Sequence: Synthetic oligonucleotide
  Sense strand starting at position 3006 of SEQ ID NO: 317149
uugucauaguccuuuguag

SEQ ID NO: 468228 - RNA, 19 nt, Artificial Sequence
  Description of Artificial Sequence: Synthetic oligonucleotide
  Antisense Strand to SEQ ID NO: 468227
cuacaaaggacuaugacaa

SEQ ID NO: 468229 - RNA, 19 nt, Artificial Sequence
  Description of Artificial Sequence: Synthetic oligonucleotide
  Sense strand starting at position 3014 of SEQ ID NO: 317149
guccuuuguagugugcaau

SEQ ID NO: 468230 - RNA, 19 nt, Artificial Sequence
  Description of Artificial Sequence: Synthetic oligonucleotide
  Antisense Strand to SEQ ID NO: 468229
auugcacacuacaaaggac

SEQ ID NO: 468231 - RNA, 19 nt, Artificial Sequence
  Description of Artificial Sequence: Synthetic oligonucleotide
  Sense strand starting at position 3029 of SEQ ID NO: 317149
caaugagcuuucccuggga

SEQ ID NO: 468232 - RNA, 19 nt, Artificial Sequence
  Description of Artificial Sequence: Synthetic oligonucleotide
  Antisense Strand to SEQ ID NO: 468231
ucccagggaaagcucauug

SEQ ID NO: 468233 - RNA, 19 nt, Artificial Sequence
  Description of Artificial Sequence: Synthetic oligonucleotide
  Sense strand starting at position 3031 of SEQ ID NO: 317149
augagcuuucccugggaca

SEQ ID NO: 468234 - RNA, 19 nt, Artificial Sequence
  Description of Artificial Sequence: Synthetic oligonucleotide
  Antisense Strand to SEQ ID NO: 468233
ugucccagggaaagcucau

SEQ ID NO: 468235 - RNA, 19 nt, Artificial Sequence
  Description of Artificial Sequence: Synthetic oligonucleotide
  Sense strand starting at position 3032 of SEQ ID NO: 317149
ugagcuuucccugggacau

SEQ ID NO: 468236 - RNA, 19 nt, Artificial Sequence
  Description of Artificial Sequence: Synthetic oligonucleotide
  Antisense Strand to SEQ ID NO: 468235
augucccagggaaagcuca

SEQ ID NO: 468237 - RNA, 19 nt, Artificial Sequence
  Description of Artificial Sequence: Synthetic oligonucleotide
  Sense strand starting at position 3033 of SEQ ID NO: 317149
gagcuuucccugggacaug

SEQ ID NO: 468238 - RNA, 19 nt, Artificial Sequence
  Description of Artificial Sequence: Synthetic oligonucleotide
  Antisense Strand to SEQ ID NO: 468237
caugucccagggaaagcuc

SEQ ID NO: 468239 - RNA, 19 nt, Artificial Sequence
  Description of Artificial Sequence: Synthetic oligonucleotide
  Sense strand starting at position 3227 of SEQ ID NO: 317149
auugauggcuuauuguaca

SEQ ID NO: 468240 - RNA, 19 nt, Artificial Sequence
  Description of Artificial Sequence: Synthetic oligonucleotide
  Antisense Strand to SEQ ID NO: 468239
uguacaauaagccaucaau

SEQ ID NO: 468241 - RNA, 19 nt, Artificial Sequence
  Description of Artificial Sequence: Synthetic oligonucleotide
  Sense strand starting at position 3303 of SEQ ID NO: 317149
gauagcauuuauuagaugu

SEQ ID NO: 468242 - RNA, 19 nt, Artificial Sequence
  Description of Artificial Sequence: Synthetic oligonucleotide
  Antisense Strand to SEQ ID NO: 468241
acaucuaauaaaugcuauc

SEQ ID NO: 468243 - RNA, 19 nt, Artificial Sequence
  Description of Artificial Sequence: Synthetic oligonucleotide
  Sense strand starting at position 3317 of SEQ ID NO: 317149
gaugucaggcacuguuuaa

SEQ ID NO: 468244 - RNA, 19 nt, Artificial Sequence
  Description of Artificial Sequence: Synthetic oligonucleotide
  Antisense Strand to SEQ ID NO: 468243
uuaaacagugccugacauc

SEQ ID NO: 468245 - RNA, 19 nt, Artificial Sequence
  Description of Artificial Sequence: Synthetic oligonucleotide
  Sense strand starting at position 3434 of SEQ ID NO: 317149
gcaauuugcccuugaucau

SEQ ID NO: 468246 - RNA, 19 nt, Artificial Sequence
  Description of Artificial Sequence: Synthetic oligonucleotide
  Antisense Strand to SEQ ID NO: 468245
augaucaagggcaaauugc

SEQ ID NO: 468247 - RNA, 19 nt, Artificial Sequence
  Description of Artificial Sequence: Synthetic oligonucleotide
  Sense strand starting at position 3484 of SEQ ID NO: 317149
uccuaaguagucuaguauu

SEQ ID NO: 468248 - RNA, 19 nt, Artificial Sequence
  Description of Artificial Sequence: Synthetic oligonucleotide
  Antisense Strand to SEQ ID NO: 468247
aauacuagacuacuuagga

SEQ ID NO: 468249 - RNA, 19 nt, Artificial Sequence
  Description of Artificial Sequence: Synthetic oligonucleotide
  Sense strand starting at position 3897 of SEQ ID NO: 317149
cucugagaaugauauaacu

SEQ ID NO: 468250 - RNA, 19 nt, Artificial Sequence
  Description of Artificial Sequence: Synthetic oligonucleotide
  Antisense Strand to SEQ ID NO: 468249
aguuauaucauucucagag

SEQ ID NO: 468251 - RNA, 19 nt, Artificial Sequence
  Description of Artificial Sequence: Synthetic oligonucleotide
  Sense strand starting at position 3958 of SEQ ID NO: 317149
gcugcacuuguauaagaac

SEQ ID NO: 468252 - RNA, 19 nt, Artificial Sequence
  Description of Artificial Sequence: Synthetic oligonucleotide
  Antisense Strand to SEQ ID NO: 468251
guucuuauacaagugcagc

SEQ ID NO: 468253 - RNA, 19 nt, Artificial Sequence
  Description of Artificial Sequence: Synthetic oligonucleotide
  Sense strand starting at position 3967 of SEQ ID NO: 317149
guauaagaacuguaaguuu

SEQ ID NO: 468254 - RNA, 19 nt, Artificial Sequence
  Description of Artificial Sequence: Synthetic oligonucleotide
  Antisense Strand to SEQ ID NO: 468253
aaacuuacaguucuuauac

SEQ ID NO: 468255 - RNA, 19 nt, Artificial Sequence
  Description of Artificial Sequence: Synthetic oligonucleotide
  Sense strand starting at position 527 of SEQ ID NO: 317150
ggccauuaacugcaugcua

SEQ ID NO: 468256 - RNA, 19 nt, Artificial Sequence
  Description of Artificial Sequence: Synthetic oligonucleotide
  Antisense Strand to SEQ ID NO: 468255
uagcaugcaguuaauggcc

SEQ ID NO: 468257 - RNA, 19 nt, Artificial Sequence
  Description of Artificial Sequence: Synthetic oligonucleotide
  Sense strand starting at position 755 of SEQ ID NO: 317150
ugauauaucggaggcaaca

SEQ ID NO: 468258 - RNA, 19 nt, Artificial Sequence
  Description of Artificial Sequence: Synthetic oligonucleotide
  Antisense Strand to SEQ ID NO: 468257
uguugccuccgauauauca

SEQ ID NO: 468259 - RNA, 19 nt, Artificial Sequence
  Description of Artificial Sequence: Synthetic oligonucleotide
  Sense strand starting at position 886 of SEQ ID NO: 317150
agguaaagaugacaaauga

SEQ ID NO: 468260 - RNA, 19 nt, Artificial Sequence
  Description of Artificial Sequence: Synthetic oligonucleotide
  Antisense Strand to SEQ ID NO: 468259
ucauuugucaucuuuaccu

SEQ ID NO: 468261 - RNA, 19 nt, Artificial Sequence
  Description of Artificial Sequence: Synthetic oligonucleotide
  Sense strand starting at position 962 of SEQ ID NO: 317150
ugggauuucugugacucag

SEQ ID NO: 468262 - RNA, 19 nt, Artificial Sequence
  Description of Artificial Sequence: Synthetic oligonucleotide
  Antisense Strand to SEQ ID NO: 468261
cugagucacagaaauccca

SEQ ID NO: 468263 - RNA, 19 nt, Artificial Sequence
  Description of Artificial Sequence: Synthetic oligonucleotide
  Sense strand starting at position 1021 of SEQ ID NO: 317150
caagguuguuaaccagauu

SEQ ID NO: 468264 - RNA, 19 nt, Artificial Sequence
  Description of Artificial Sequence: Synthetic oligonucleotide
  Antisense Strand to SEQ ID NO: 468263
aaucugguuaacaaccuug

SEQ ID NO: 468265 - RNA, 19 nt, Artificial Sequence
  Description of Artificial Sequence: Synthetic oligonucleotide
  Sense strand starting at position 1228 of SEQ ID NO: 317150
auggaaaucuaccuagagu

SEQ ID NO: 468266 - RNA, 19 nt, Artificial Sequence
  Description of Artificial Sequence: Synthetic oligonucleotide
  Antisense Strand to SEQ ID NO: 468265
acucuagguagauuuccau

SEQ ID NO: 468267 - RNA, 19 nt, Artificial Sequence
  Description of Artificial Sequence: Synthetic oligonucleotide
  Sense strand starting at position 1277 of SEQ ID NO: 317150
agaagugggcccgauaaca

SEQ ID NO: 468268 - RNA, 19 nt, Artificial Sequence
  Description of Artificial Sequence: Synthetic oligonucleotide
  Antisense Strand to SEQ ID NO: 468267
uguuaucgggcccacuucu

SEQ ID NO: 468269 - RNA, 19 nt, Artificial Sequence
  Description of Artificial Sequence: Synthetic oligonucleotide
  Sense strand starting at position 1355 of SEQ ID NO: 317150
acuaguaacugccuuagga

SEQ ID NO: 468270 - RNA, 19 nt, Artificial Sequence
  Description of Artificial Sequence: Synthetic oligonucleotide
  Antisense Strand to SEQ ID NO: 468269
uccuaaggcaguuacuagu

SEQ ID NO: 468271 - RNA, 19 nt, Artificial Sequence
  Description of Artificial Sequence: Synthetic oligonucleotide
  Sense strand starting at position 2137 of SEQ ID NO: 317150
uuccuuauccgguaaagug

SEQ ID NO: 468272 - RNA, 19 nt, Artificial Sequence
  Description of Artificial Sequence: Synthetic oligonucleotide
  Antisense Strand to SEQ ID NO: 468271
cacuuuaccggauaaggaa

SEQ ID NO: 468273 - RNA, 19 nt, Artificial Sequence
  Description of Artificial Sequence: Synthetic oligonucleotide
  Sense strand starting at position 2333 of SEQ ID NO: 317150
gcaagacugcccuaaacuc

SEQ ID NO: 468274 - RNA, 19 nt, Artificial Sequence
  Description of Artificial Sequence: Synthetic oligonucleotide
  Antisense Strand to SEQ ID NO: 468273
gaguuuagggcagucuugc

SEQ ID NO: 468275 - RNA, 19 nt, Artificial Sequence
  Description of Artificial Sequence: Synthetic oligonucleotide
  Sense strand starting at position 2431 of SEQ ID NO: 317150
gaugacaggaggugucaau

SEQ ID NO: 468276 - RNA, 19 nt, Artificial Sequence
  Description of Artificial Sequence: Synthetic oligonucleotide
  Antisense Strand to SEQ ID NO: 468275
auugacaccuccugucauc

SEQ ID NO: 468277 - RNA, 19 nt, Artificial Sequence
  Description of Artificial Sequence: Synthetic oligonucleotide
  Sense strand starting at position 2512 of SEQ ID NO: 317150
ggagucagcguuccgaagu

SEQ ID NO: 468278 - RNA, 19 nt, Artificial Sequence
  Description of Artificial Sequence: Synthetic oligonucleotide
  Antisense Strand to SEQ ID NO: 468277
acuucggaacgcugacucc

SEQ ID NO: 468279 - RNA, 19 nt, Artificial Sequence
  Description of Artificial Sequence: Synthetic oligonucleotide
  Sense strand starting at position 2515 of SEQ ID NO: 317150
gucagcguuccgaaguaga

SEQ ID NO: 468280 - RNA, 19 nt, Artificial Sequence
  Description of Artificial Sequence: Synthetic oligonucleotide
  Antisense Strand to SEQ ID NO: 468279
ucuacuucggaacgcugac

SEQ ID NO: 468281 - RNA, 19 nt, Artificial Sequence
  Description of Artificial Sequence: Synthetic oligonucleotide
  Sense strand starting at position 2518 of SEQ ID NO: 317150
agcguuccgaaguagagau

SEQ ID NO: 468282 - RNA, 19 nt, Artificial Sequence
  Description of Artificial Sequence: Synthetic oligonucleotide
  Antisense Strand to SEQ ID NO: 468281
aucucuacuucggaacgcu

SEQ ID NO: 468283 - RNA, 19 nt, Artificial Sequence
  Description of Artificial Sequence: Synthetic oligonucleotide
  Sense strand starting at position 2594 of SEQ ID NO: 317150
uuucucauacaagguuaga

SEQ ID NO: 468284 - RNA, 19 nt, Artificial Sequence
  Description of Artificial Sequence: Synthetic oligonucleotide
  Antisense Strand to SEQ ID NO: 468283
ucuaaccuuguaugagaaa

SEQ ID NO: 468285 - RNA, 19 nt, Artificial Sequence
  Description of Artificial Sequence: Synthetic oligonucleotide
  Sense strand starting at position 2599 of SEQ ID NO: 317150
cauacaagguuagagaaua

SEQ ID NO: 468286 - RNA, 19 nt, Artificial Sequence
  Description of Artificial Sequence: Synthetic oligonucleotide
  Antisense Strand to SEQ ID NO: 468285
uauucucuaaccuuguaug

SEQ ID NO: 468287 - RNA, 19 nt, Artificial Sequence
  Description of Artificial Sequence: Synthetic oligonucleotide
  Sense strand starting at position 2607 of SEQ ID NO: 317150
guuagagaauaguuacaac

SEQ ID NO: 468288 - RNA, 19 nt, Artificial Sequence
  Description of Artificial Sequence: Synthetic oligonucleotide
  Antisense Strand to SEQ ID NO: 468287
guuguaacuauucucuaac

SEQ ID NO: 468289 - RNA, 19 nt, Artificial Sequence
  Description of Artificial Sequence: Synthetic oligonucleotide
  Sense strand starting at position 2610 of SEQ ID NO: 317150
agagaauaguuacaacaau

SEQ ID NO: 468290 - RNA, 19 nt, Artificial Sequence
  Description of Artificial Sequence: Synthetic oligonucleotide
  Antisense Strand to SEQ ID NO: 468289
auuguuguaacuauucucu

SEQ ID NO: 468291 - RNA, 19 nt, Artificial Sequence
  Description of Artificial Sequence: Synthetic oligonucleotide
  Sense strand starting at position 2631 of SEQ ID NO: 317150
gauuauagacaguguuucu

SEQ ID NO: 468292 - RNA, 19 nt, Artificial Sequence
  Description of Artificial Sequence: Synthetic oligonucleotide
  Antisense Strand to SEQ ID NO: 468291
agaaacacugucuauaauc

SEQ ID NO: 468293 - RNA, 19 nt, Artificial Sequence
  Description of Artificial Sequence: Synthetic oligonucleotide
  Sense strand starting at position 2724 of SEQ ID NO: 317150
agcagaaguuaaucuauaa

SEQ ID NO: 468294 - RNA, 19 nt, Artificial Sequence
  Description of Artificial Sequence: Synthetic oligonucleotide
  Antisense Strand to SEQ ID NO: 468293
uuauagauuaacuucugcu

SEQ ID NO: 468295 - RNA, 19 nt, Artificial Sequence
  Description of Artificial Sequence: Synthetic oligonucleotide
  Sense strand starting at position 2769 of SEQ ID NO: 317150
uguccuuaacuucguuuaa

SEQ ID NO: 468296 - RNA, 19 nt, Artificial Sequence
  Description of Artificial Sequence: Synthetic oligonucleotide
  Antisense Strand to SEQ ID NO: 468295
uuaaacgaaguuaaggaca

SEQ ID NO: 468297 - RNA, 19 nt, Artificial Sequence
  Description of Artificial Sequence: Synthetic oligonucleotide
  Sense strand starting at position 2770 of SEQ ID NO: 317150
guccuuaacuucguuuaau

SEQ ID NO: 468298 - RNA, 19 nt, Artificial Sequence
  Description of Artificial Sequence: Synthetic oligonucleotide
  Antisense Strand to SEQ ID NO: 468297
auuaaacgaaguuaaggac

SEQ ID NO: 468299 - RNA, 19 nt, Artificial Sequence
  Description of Artificial Sequence: Synthetic oligonucleotide
  Sense strand starting at position 2794 of SEQ ID NO: 317150
cuagccauuguauagaaca

SEQ ID NO: 468300 - RNA, 19 nt, Artificial Sequence
  Description of Artificial Sequence: Synthetic oligonucleotide
  Antisense Strand to SEQ ID NO: 468299
uguucuauacaauggcuag

SEQ ID NO: 468301 - RNA, 19 nt, Artificial Sequence
  Description of Artificial Sequence: Synthetic oligonucleotide
  Sense strand starting at position 2864 of SEQ ID NO: 317150
ccacguguaacucagauga

SEQ ID NO: 468302 - RNA, 19 nt, Artificial Sequence
  Description of Artificial Sequence: Synthetic oligonucleotide
  Antisense Strand to SEQ ID NO: 468301
ucaucugaguuacacgugg

SEQ ID NO: 468303 - RNA, 19 nt, Artificial Sequence
  Description of Artificial Sequence: Synthetic oligonucleotide
  Sense strand starting at position 2868 of SEQ ID NO: 317150
guguaacucagaugacagu

SEQ ID NO: 468304 - RNA, 19 nt, Artificial Sequence
  Description of Artificial Sequence: Synthetic oligonucleotide
  Antisense Strand to SEQ ID NO: 468303
acugucaucugaguuacac

SEQ ID NO: 468305 - RNA, 19 nt, Artificial Sequence
  Description of Artificial Sequence: Synthetic oligonucleotide
  Sense strand starting at position 3028 of SEQ ID NO: 317150
gggagaguugcaggaaagu

SEQ ID NO: 468306 - RNA, 19 nt, Artificial Sequence
  Description of Artificial Sequence: Synthetic oligonucleotide
  Antisense Strand to SEQ ID NO: 468305
acuuuccugcaacucuccc

SEQ ID NO: 468307 - RNA, 19 nt, Artificial Sequence
  Description of Artificial Sequence: Synthetic oligonucleotide
  Sense strand starting at position 3037 of SEQ ID NO: 317150
gcaggaaaguggcuugagu

SEQ ID NO: 468308 - RNA, 19 nt, Artificial Sequence
  Description of Artificial Sequence: Synthetic oligonucleotide
  Antisense Strand to SEQ ID NO: 468307
acucaagccacuuuccugc

SEQ ID NO: 468309 - RNA, 19 nt, Artificial Sequence
  Description of Artificial Sequence: Synthetic oligonucleotide
  Sense strand starting at position 3039 of SEQ ID NO: 317150
aggaaaguggcuugaguag

SEQ ID NO: 468310 - RNA, 19 nt, Artificial Sequence
  Description of Artificial Sequence: Synthetic oligonucleotide
  Antisense Strand to SEQ ID NO: 468309
cuacucaagccacuuuccu

SEQ ID NO: 468311 - RNA, 19 nt, Artificial Sequence
  Description of Artificial Sequence: Synthetic oligonucleotide
  Sense strand starting at position 3116 of SEQ ID NO: 317150
uugucauaguccuuuguag

SEQ ID NO: 468312 - RNA, 19 nt, Artificial Sequence
  Description of Artificial Sequence: Synthetic oligonucleotide
  Antisense Strand to SEQ ID NO: 468311
cuacaaaggacuaugacaa

SEQ ID NO: 468313 - RNA, 19 nt, Artificial Sequence
  Description of Artificial Sequence: Synthetic oligonucleotide
  Sense strand starting at position 3124 of SEQ ID NO: 317150
guccuuuguagugugcaau

SEQ ID NO: 468314 - RNA, 19 nt, Artificial Sequence
  Description of Artificial Sequence: Synthetic oligonucleotide
  Antisense Strand to SEQ ID NO: 468313
auugcacacuacaaaggac

SEQ ID NO: 468315 - RNA, 19 nt, Artificial Sequence
  Description of Artificial Sequence: Synthetic oligonucleotide
  Sense strand starting at position 3139 of SEQ ID NO: 317150
caaugagcuuucccuggga

SEQ ID NO: 468316 - RNA, 19 nt, Artificial Sequence
  Description of Artificial Sequence: Synthetic oligonucleotide
  Antisense Strand to SEQ ID NO: 468315
ucccagggaaagcucauug

SEQ ID NO: 468317 - RNA, 19 nt, Artificial Sequence
  Description of Artificial Sequence: Synthetic oligonucleotide
  Sense strand starting at position 3141 of SEQ ID NO: 317150
augagcuuucccugggaca

SEQ ID NO: 468318 - RNA, 19 nt, Artificial Sequence
  Description of Artificial Sequence: Synthetic oligonucleotide
  Antisense Strand to SEQ ID NO: 468317
ugucccagggaaagcucau

SEQ ID NO: 468319 - RNA, 19 nt, Artificial Sequence
  Description of Artificial Sequence: Synthetic oligonucleotide
  Sense strand starting at position 3142 of SEQ ID NO: 317150
ugagcuuucccugggacau

SEQ ID NO: 468320 - RNA, 19 nt, Artificial Sequence
  Description of Artificial Sequence: Synthetic oligonucleotide
  Antisense Strand to SEQ ID NO: 468319
augucccagggaaagcuca

SEQ ID NO: 468321 - RNA, 19 nt, Artificial Sequence
  Description of Artificial Sequence: Synthetic oligonucleotide
  Sense strand starting at position 3143 of SEQ ID NO: 317150
gagcuuucccugggacaug

SEQ ID NO: 468322 - RNA, 19 nt, Artificial Sequence
  Description of Artificial Sequence: Synthetic oligonucleotide
  Antisense Strand to SEQ ID NO: 468321
caugucccagggaaagcuc

SEQ ID NO: 468323 - RNA, 19 nt, Artificial Sequence
  Description of Artificial Sequence: Synthetic oligonucleotide
  Sense strand starting at position 3337 of SEQ ID NO: 317150
auugauggcuuauuguaca

SEQ ID NO: 468324 - RNA, 19 nt, Artificial Sequence
  Description of Artificial Sequence: Synthetic oligonucleotide
  Antisense Strand to SEQ ID NO: 468323
uguacaauaagccaucaau

SEQ ID NO: 468325 - RNA, 19 nt, Artificial Sequence
  Description of Artificial Sequence: Synthetic oligonucleotide
  Sense strand starting at position 3413 of SEQ ID NO: 317150
gauagcauuuauuagaugu

SEQ ID NO: 468326 - RNA, 19 nt, Artificial Sequence
  Description of Artificial Sequence: Synthetic oligonucleotide
  Antisense Strand to SEQ ID NO: 468325
acaucuaauaaaugcuauc

SEQ ID NO: 468327 - RNA, 19 nt, Artificial Sequence
  Description of Artificial Sequence: Synthetic oligonucleotide
  Sense strand starting at position 3427 of SEQ ID NO: 317150
gaugucaggcacuguuuaa

SEQ ID NO: 468328 - RNA, 19 nt, Artificial Sequence
  Description of Artificial Sequence: Synthetic oligonucleotide
  Antisense Strand to SEQ ID NO: 468327
uuaaacagugccugacauc

SEQ ID NO: 468329 - RNA, 19 nt, Artificial Sequence
  Description of Artificial Sequence: Synthetic oligonucleotide
  Sense strand starting at position 3483 of SEQ ID NO: 317150
caguaaccguguuuauuau

SEQ ID NO: 468330 - RNA, 19 nt, Artificial Sequence
  Description of Artificial Sequence: Synthetic oligonucleotide
  Antisense Strand to SEQ ID NO: 468329
auaauaaacacgguuacug

SEQ ID NO: 468331 - RNA, 19 nt, Artificial Sequence
  Description of Artificial Sequence: Synthetic oligonucleotide
  Sense strand starting at position 3544 of SEQ ID NO: 317150
gcaauuugcccuugaucau

SEQ ID NO: 468332 - RNA, 19 nt, Artificial Sequence
  Description of Artificial Sequence: Synthetic oligonucleotide
  Antisense Strand to SEQ ID NO: 468331
augaucaagggcaaauugc

SEQ ID NO: 468333 - RNA, 19 nt, Artificial Sequence
  Description of Artificial Sequence: Synthetic oligonucleotide
  Sense strand starting at position 3594 of SEQ ID NO: 317150
uccuaaguagucuaguauu

SEQ ID NO: 468334 - RNA, 19 nt, Artificial Sequence
  Description of Artificial Sequence: Synthetic oligonucleotide
  Antisense Strand to SEQ ID NO: 468333
aauacuagacuacuuagga

SEQ ID NO: 468335 - RNA, 19 nt, Artificial Sequence
  Description of Artificial Sequence: Synthetic oligonucleotide
  Sense strand starting at position 440 of SEQ ID NO: 317151
ggccauuaacugcaugcua

SEQ ID NO: 468336 - RNA, 19 nt, Artificial Sequence
  Description of Artificial Sequence: Synthetic oligonucleotide
  Antisense Strand to SEQ ID NO: 468335
uagcaugcaguuaauggcc

SEQ ID NO: 468337 - RNA, 19 nt, Artificial Sequence
  Description of Artificial Sequence: Synthetic oligonucleotide
  Sense strand starting at position 668 of SEQ ID NO: 317151
ugauauaucggaggcaaca

SEQ ID NO: 468338 - RNA, 19 nt, Artificial Sequence
  Description of Artificial Sequence: Synthetic oligonucleotide
  Antisense Strand to SEQ ID NO: 468337
uguugccuccgauauauca

SEQ ID NO: 468339 - RNA, 19 nt, Artificial Sequence
  Description of Artificial Sequence: Synthetic oligonucleotide
  Sense strand starting at position 799 of SEQ ID NO: 317151
agguaaagaugacaaauga

SEQ ID NO: 468340 - RNA, 19 nt, Artificial Sequence
  Description of Artificial Sequence: Synthetic oligonucleotide
  Antisense Strand to SEQ ID NO: 468339
ucauuugucaucuuuaccu

SEQ ID NO: 468341 - RNA, 19 nt, Artificial Sequence
  Description of Artificial Sequence: Synthetic oligonucleotide
  Sense strand starting at position 875 of SEQ ID NO: 317151
ugggauuucugugacucag

SEQ ID NO: 468342 - RNA, 19 nt, Artificial Sequence
  Description of Artificial Sequence: Synthetic oligonucleotide
  Antisense Strand to SEQ ID NO: 468341
cugagucacagaaauccca

SEQ ID NO: 468343 - RNA, 19 nt, Artificial Sequence
  Description of Artificial Sequence: Synthetic oligonucleotide
  Sense strand starting at position 934 of SEQ ID NO: 317151
caagguuguuaaccagauu

SEQ ID NO: 468344 - RNA, 19 nt, Artificial Sequence
  Description of Artificial Sequence: Synthetic oligonucleotide
  Antisense Strand to SEQ ID NO: 468343
aaucugguuaacaaccuug

SEQ ID NO: 468345 - RNA, 19 nt, Artificial Sequence
  Description of Artificial Sequence: Synthetic oligonucleotide
  Sense strand starting at position 1141 of SEQ ID NO: 317151
auggaaaucuaccuagagu

SEQ ID NO: 468346 - RNA, 19 nt, Artificial Sequence
  Description of Artificial Sequence: Synthetic oligonucleotide
  Antisense Strand to SEQ ID NO: 468345
acucuagguagauuuccau

SEQ ID NO: 468347 - RNA, 19 nt, Artificial Sequence
  Description of Artificial Sequence: Synthetic oligonucleotide
  Sense strand starting at position 1190 of SEQ ID NO: 317151
agaagugggcccgauaaca

SEQ ID NO: 468348 - RNA, 19 nt, Artificial Sequence
  Description of Artificial Sequence: Synthetic oligonucleotide
  Antisense Strand to SEQ ID NO: 468347
uguuaucgggcccacuucu

SEQ ID NO: 468349 - RNA, 19 nt, Artificial Sequence
  Description of Artificial Sequence: Synthetic oligonucleotide
  Sense strand starting at position 1268 of SEQ ID NO: 317151
acuaguaacugccuuagga

SEQ ID NO: 468350 - RNA, 19 nt, Artificial Sequence
  Description of Artificial Sequence: Synthetic oligonucleotide
  Antisense Strand to SEQ ID NO: 468349
uccuaaggcaguuacuagu

SEQ ID NO: 468351 - RNA, 19 nt, Artificial Sequence
  Description of Artificial Sequence: Synthetic oligonucleotide
  Sense strand starting at position 2050 of SEQ ID NO: 317151
uuccuuauccgguaaagug

SEQ ID NO: 468352 - RNA, 19 nt, Artificial Sequence
  Description of Artificial Sequence: Synthetic oligonucleotide
  Antisense Strand to SEQ ID NO: 468351
cacuuuaccggauaaggaa

SEQ ID NO: 468353 - RNA, 19 nt, Artificial Sequence
  Description of Artificial Sequence: Synthetic oligonucleotide
  Sense strand starting at position 2246 of SEQ ID NO: 317151
gcaagacugcccuaaacuc

SEQ ID NO: 468354 - RNA, 19 nt, Artificial Sequence
  Description of Artificial Sequence: Synthetic oligonucleotide
  Antisense Strand to SEQ ID NO: 468353
gaguuuagggcagucuugc

SEQ ID NO: 468355 - RNA, 19 nt, Artificial Sequence
  Description of Artificial Sequence: Synthetic oligonucleotide
  Sense strand starting at position 2344 of SEQ ID NO: 317151
gaugacaggaggugucaau

SEQ ID NO: 468356 - RNA, 19 nt, Artificial Sequence
  Description of Artificial Sequence: Synthetic oligonucleotide
  Antisense Strand to SEQ ID NO: 468355
auugacaccuccugucauc

SEQ ID NO: 468357 - RNA, 19 nt, Artificial Sequence
  Description of Artificial Sequence: Synthetic oligonucleotide
  Sense strand starting at position 2425 of SEQ ID NO: 317151
ggagucagcguuccgaagu

SEQ ID NO: 468358 - RNA, 19 nt, Artificial Sequence
  Description of Artificial Sequence: Synthetic oligonucleotide
  Antisense Strand to SEQ ID NO: 468357
acuucggaacgcugacucc

SEQ ID NO: 468359 - RNA, 19 nt, Artificial Sequence
  Description of Artificial Sequence: Synthetic oligonucleotide
  Sense strand starting at position 2428 of SEQ ID NO: 317151
gucagcguuccgaaguaga

SEQ ID NO: 468360 - RNA, 19 nt, Artificial Sequence
  Description of Artificial Sequence: Synthetic oligonucleotide
  Antisense Strand to SEQ ID NO: 468359
ucuacuucggaacgcugac

SEQ ID NO: 468361 - RNA, 19 nt, Artificial Sequence
  Description of Artificial Sequence: Synthetic oligonucleotide
  Sense strand starting at position 2431 of SEQ ID NO: 317151
agcguuccgaaguagagau

SEQ ID NO: 468362 - RNA, 19 nt, Artificial Sequence
  Description of Artificial Sequence: Synthetic oligonucleotide
  Antisense Strand to SEQ ID NO: 468361
aucucuacuucggaacgcu

SEQ ID NO: 468363 - RNA, 19 nt, Artificial Sequence
  Description of Artificial Sequence: Synthetic oligonucleotide
  Sense strand starting at position 2507 of SEQ ID NO: 317151
uuucucauacaagguuaga

SEQ ID NO: 468364 - RNA, 19 nt, Artificial Sequence
  Description of Artificial Sequence: Synthetic oligonucleotide
  Antisense Strand to SEQ ID NO: 468363
ucuaaccuuguaugagaaa

SEQ ID NO: 468365 - RNA, 19 nt, Artificial Sequence
  Description of Artificial Sequence: Synthetic oligonucleotide
  Sense strand starting at position 2512 of SEQ ID NO: 317151
cauacaagguuagagaaua

SEQ ID NO: 468366 - RNA, 19 nt, Artificial Sequence
  Description of Artificial Sequence: Synthetic oligonucleotide
  Antisense Strand to SEQ ID NO: 468365
uauucucuaaccuuguaug

SEQ ID NO: 468367 - RNA, 19 nt, Artificial Sequence
  Description of Artificial Sequence: Synthetic oligonucleotide
  Sense strand starting at position 2520 of SEQ ID NO: 317151
guuagagaauaguuacaac

SEQ ID NO: 468368 - RNA, 19 nt, Artificial Sequence
  Description of Artificial Sequence: Synthetic oligonucleotide
  Antisense Strand to SEQ ID NO: 468367
guuguaacuauucucuaac

SEQ ID NO: 468369 - RNA, 19 nt, Artificial Sequence
  Description of Artificial Sequence: Synthetic oligonucleotide
  Sense strand starting at position 2523 of SEQ ID NO: 317151
agagaauaguuacaacaau

SEQ ID NO: 468370 - RNA, 19 nt, Artificial Sequence
  Description of Artificial Sequence: Synthetic oligonucleotide
  Antisense Strand to SEQ ID NO: 468369
auuguuguaacuauucucu

SEQ ID NO: 468371 - RNA, 19 nt, Artificial Sequence
  Description of Artificial Sequence: Synthetic oligonucleotide
  Sense strand starting at position 2544 of SEQ ID NO: 317151
gauuauagacaguguuucu

SEQ ID NO: 468372 - RNA, 19 nt, Artificial Sequence
  Description of Artificial Sequence: Synthetic oligonucleotide
  Antisense Strand to SEQ ID NO: 468371
agaaacacugucuauaauc

SEQ ID NO: 468373 - RNA, 19 nt, Artificial Sequence
  Description of Artificial Sequence: Synthetic oligonucleotide
  Sense strand starting at position 2637 of SEQ ID NO: 317151
agcagaaguuaaucuauaa

SEQ ID NO: 468374 - RNA, 19 nt, Artificial Sequence
  Description of Artificial Sequence: Synthetic oligonucleotide
  Antisense Strand to SEQ ID NO: 468373
uuauagauuaacuucugcu

SEQ ID NO: 468375 - RNA, 19 nt, Artificial Sequence
  Description of Artificial Sequence: Synthetic oligonucleotide
  Sense strand starting at position 2683 of SEQ ID NO: 317151
guccuuaacuucguuuaau

SEQ ID NO: 468376 - RNA, 19 nt, Artificial Sequence
  Description of Artificial Sequence: Synthetic oligonucleotide
  Antisense Strand to SEQ ID NO: 468375
auuaaacgaaguuaaggac

SEQ ID NO: 468377 - RNA, 19 nt, Artificial Sequence
  Description of Artificial Sequence: Synthetic oligonucleotide
  Sense strand starting at position 2707 of SEQ ID NO: 317151
cuagccauuguauagaaca

SEQ ID NO: 468378 - RNA, 19 nt, Artificial Sequence
  Description of Artificial Sequence: Synthetic oligonucleotide
  Antisense Strand to SEQ ID NO: 468377
uguucuauacaauggcuag

SEQ ID NO: 468379 - RNA, 19 nt, Artificial Sequence
  Description of Artificial Sequence: Synthetic oligonucleotide
  Sense strand starting at position 2777 of SEQ ID NO: 317151
ccacguguaacucagauga

SEQ ID NO: 468380 - RNA, 19 nt, Artificial Sequence
  Description of Artificial Sequence: Synthetic oligonucleotide
  Antisense Strand to SEQ ID NO: 468379
ucaucugaguuacacgugg

SEQ ID NO: 468381 - RNA, 19 nt, Artificial Sequence
  Description of Artificial Sequence: Synthetic oligonucleotide
  Sense strand starting at position 2781 of SEQ ID NO: 317151
guguaacucagaugacagu

SEQ ID NO: 468382 - RNA, 19 nt, Artificial Sequence
  Description of Artificial Sequence: Synthetic oligonucleotide
  Antisense Strand to SEQ ID NO: 468381
acugucaucugaguuacac

SEQ ID NO: 468383 - RNA, 19 nt, Artificial Sequence
  Description of Artificial Sequence: Synthetic oligonucleotide
  Sense strand starting at position 2941 of SEQ ID NO: 317151
gggagaguugcaggaaagu

SEQ ID NO: 468384 - RNA, 19 nt, Artificial Sequence
  Description of Artificial Sequence: Synthetic oligonucleotide
  Antisense Strand to SEQ ID NO: 468383
acuuuccugcaacucuccc

SEQ ID NO: 468385 - RNA, 19 nt, Artificial Sequence
  Description of Artificial Sequence: Synthetic oligonucleotide
  Sense strand starting at position 2950 of SEQ ID NO: 317151
gcaggaaaguggcuugagu

SEQ ID NO: 468386 - RNA, 19 nt, Artificial Sequence
  Description of Artificial Sequence: Synthetic oligonucleotide
  Antisense Strand to SEQ ID NO: 468385
acucaagccacuuuccugc

SEQ ID NO: 468387 - RNA, 19 nt, Artificial Sequence
  Description of Artificial Sequence: Synthetic oligonucleotide
  Sense strand starting at position 2952 of SEQ ID NO: 317151
aggaaaguggcuugaguag

SEQ ID NO: 468388 - RNA, 19 nt, Artificial Sequence
  Description of Artificial Sequence: Synthetic oligonucleotide
  Antisense Strand to SEQ ID NO: 468387
cuacucaagccacuuuccu

SEQ ID NO: 468389 - RNA, 19 nt, Artificial Sequence
  Description of Artificial Sequence: Synthetic oligonucleotide
  Sense strand starting at position 3029 of SEQ ID NO: 317151
uugucauaguccuuuguag

SEQ ID NO: 468390 - RNA, 19 nt, Artificial Sequence
  Description of Artificial Sequence: Synthetic oligonucleotide
  Antisense Strand to SEQ ID NO: 468389
cuacaaaggacuaugacaa

SEQ ID NO: 468391 - RNA, 19 nt, Artificial Sequence
  Description of Artificial Sequence: Synthetic oligonucleotide
  Sense strand starting at position 3037 of SEQ ID NO: 317151
guccuuuguagugugcaau

SEQ ID NO: 468392 - RNA, 19 nt, Artificial Sequence
  Description of Artificial Sequence: Synthetic oligonucleotide
  Antisense Strand to SEQ ID NO: 468391
auugcacacuacaaaggac

SEQ ID NO: 468393 - RNA, 19 nt, Artificial Sequence
  Description of Artificial Sequence: Synthetic oligonucleotide
  Sense strand starting at position 3052 of SEQ ID NO: 317151
caaugagcuuucccuggga

SEQ ID NO: 468394 - RNA, 19 nt, Artificial Sequence
  Description of Artificial Sequence: Synthetic oligonucleotide
  Antisense Strand to SEQ ID NO: 468393
ucccagggaaagcucauug

SEQ ID NO: 468395 - RNA, 19 nt, Artificial Sequence
  Description of Artificial Sequence: Synthetic oligonucleotide
  Sense strand starting at position 3054 of SEQ ID NO: 317151
augagcuuucccugggaca

SEQ ID NO: 468396 - RNA, 19 nt, Artificial Sequence
  Description of Artificial Sequence: Synthetic oligonucleotide
  Antisense Strand to SEQ ID NO: 468395
ugucccagggaaagcucau

SEQ ID NO: 468397 - RNA, 19 nt, Artificial Sequence
  Description of Artificial Sequence: Synthetic oligonucleotide
  Sense strand starting at position 3055 of SEQ ID NO: 317151
ugagcuuucccugggacau

SEQ ID NO: 468398 - RNA, 19 nt, Artificial Sequence
  Description of Artificial Sequence: Synthetic oligonucleotide
  Antisense Strand to SEQ ID NO: 468397
augucccagggaaagcuca

SEQ ID NO: 468399 - RNA, 19 nt, Artificial Sequence
  Description of Artificial Sequence: Synthetic oligonucleotide
  Sense strand starting at position 3056 of SEQ ID NO: 317151
gagcuuucccugggacaug

SEQ ID NO: 468400 - RNA, 19 nt, Artificial Sequence
  Description of Artificial Sequence: Synthetic oligonucleotide
  Antisense Strand to SEQ ID NO: 468399
caugucccagggaaagcuc

SEQ ID NO: 468401 - RNA, 19 nt, Artificial Sequence
  Description of Artificial Sequence: Synthetic oligonucleotide
  Sense strand starting at position 3250 of SEQ ID NO: 317151
auugauggcuuauuguaca

SEQ ID NO: 468402 - RNA, 19 nt, Artificial Sequence
  Description of Artificial Sequence: Synthetic oligonucleotide
  Antisense Strand to SEQ ID NO: 468401
uguacaauaagccaucaau

SEQ ID NO: 468403 - RNA, 19 nt, Artificial Sequence
  Description of Artificial Sequence: Synthetic oligonucleotide
  Sense strand starting at position 3326 of SEQ ID NO: 317151
gauagcauuuauuagaugu

SEQ ID NO: 468404 - RNA, 19 nt, Artificial Sequence
  Description of Artificial Sequence: Synthetic oligonucleotide
  Antisense Strand to SEQ ID NO: 468403
acaucuaauaaaugcuauc

SEQ ID NO: 468405 - RNA, 19 nt, Artificial Sequence
  Description of Artificial Sequence: Synthetic oligonucleotide
  Sense strand starting at position 3340 of SEQ ID NO: 317151
gaugucaggcacuguuuaa

SEQ ID NO: 468406 - RNA, 19 nt, Artificial Sequence
  Description of Artificial Sequence: Synthetic oligonucleotide
  Antisense Strand to SEQ ID NO: 468405
uuaaacagugccugacauc

SEQ ID NO: 468407 - RNA, 19 nt, Artificial Sequence
  Description of Artificial Sequence: Synthetic oligonucleotide
  Sense strand starting at position 3457 of SEQ ID NO: 317151
gcaauuugcccuugaucau

SEQ ID NO: 468408 - RNA, 19 nt, Artificial Sequence
  Description of Artificial Sequence: Synthetic oligonucleotide
  Antisense Strand to SEQ ID NO: 468407
augaucaagggcaaauugc

SEQ ID NO: 468409 - RNA, 19 nt, Artificial Sequence
  Description of Artificial Sequence: Synthetic oligonucleotide
  Sense strand starting at position 3507 of SEQ ID NO: 317151
uccuaaguagucuaguauu

SEQ ID NO: 468410 - RNA, 19 nt, Artificial Sequence
  Description of Artificial Sequence: Synthetic oligonucleotide
  Antisense Strand to SEQ ID NO: 468409
aauacuagacuacuuagga

SEQ ID NO: 468411 - RNA, 19 nt, Artificial Sequence
  Description of Artificial Sequence: Synthetic oligonucleotide
  Sense strand starting at position 3920 of SEQ ID NO: 317151
cucugagaaugauauaacu

SEQ ID NO: 468412 - RNA, 19 nt, Artificial Sequence
  Description of Artificial Sequence: Synthetic oligonucleotide
  Antisense Strand to SEQ ID NO: 468411
aguuauaucauucucagag

SEQ ID NO: 468413 - RNA, 19 nt, Artificial Sequence
  Description of Artificial Sequence: Synthetic oligonucleotide
  Sense strand starting at position 3981 of SEQ ID NO: 317151
gcugcacuuguauaagaac

SEQ ID NO: 468414 - RNA, 19 nt, Artificial Sequence
  Description of Artificial Sequence: Synthetic oligonucleotide
  Antisense Strand to SEQ ID NO: 468413
guucuuauacaagugcagc

SEQ ID NO: 468415 - RNA, 19 nt, Artificial Sequence
  Description of Artificial Sequence: Synthetic oligonucleotide
  Sense strand starting at position 2 of SEQ ID NO: 317152
gcaggaaccuaguccuaga

SEQ ID NO: 468416 - RNA, 19 nt, Artificial Sequence
  Description of Artificial Sequence: Synthetic oligonucleotide
  Antisense Strand to SEQ ID NO: 468415
ucuaggacuagguuccugc

SEQ ID NO: 468417 - RNA, 19 nt, Artificial Sequence
  Description of Artificial Sequence: Synthetic oligonucleotide
  Sense strand starting at position 83 of SEQ ID NO: 317152
ugggacucuuguuauuuga

SEQ ID NO: 468418 - RNA, 19 nt, Artificial Sequence
  Description of Artificial Sequence: Synthetic oligonucleotide
  Antisense Strand to SEQ ID NO: 468417
ucaaauaacaagaguccca

SEQ ID NO: 468419 - RNA, 19 nt, Artificial Sequence
  Description of Artificial Sequence: Synthetic oligonucleotide
  Sense strand starting at position 124 of SEQ ID NO: 317152
cuuuguuuacuccauguca

SEQ ID NO: 468420 - RNA, 19 nt, Artificial Sequence
  Description of Artificial Sequence: Synthetic oligonucleotide
  Antisense Strand to SEQ ID NO: 468419
ugacauggaguaaacaaag

SEQ ID NO: 468421 - RNA, 19 nt, Artificial Sequence
  Description of Artificial Sequence: Synthetic oligonucleotide
  Sense strand starting at position 126 of SEQ ID NO: 317152
uuguuuacuccaugucaag

SEQ ID NO: 468422 - RNA, 19 nt, Artificial Sequence
  Description of Artificial Sequence: Synthetic oligonucleotide
  Antisense Strand to SEQ ID NO: 468421
cuugacauggaguaaacaa

SEQ ID NO: 468423 - RNA, 19 nt, Artificial Sequence
  Description of Artificial Sequence: Synthetic oligonucleotide
  Sense strand starting at position 145 of SEQ ID NO: 317152
cucugagugguguaguuca

SEQ ID NO: 468424 - RNA, 19 nt, Artificial Sequence
  Description of Artificial Sequence: Synthetic oligonucleotide
  Antisense Strand to SEQ ID NO: 468423
ugaacuacaccacucagag

SEQ ID NO: 468425 - RNA, 19 nt, Artificial Sequence
  Description of Artificial Sequence: Synthetic oligonucleotide
  Sense strand starting at position 239 of SEQ ID NO: 317152
gcucaaggaagcuaaguua

SEQ ID NO: 468426 - RNA, 19 nt, Artificial Sequence
  Description of Artificial Sequence: Synthetic oligonucleotide
  Antisense Strand to SEQ ID NO: 468425
uaacuuagcuuccuugagc

SEQ ID NO: 468427 - RNA, 19 nt, Artificial Sequence
  Description of Artificial Sequence: Synthetic oligonucleotide
  Sense strand starting at position 375 of SEQ ID NO: 317152
gguauuaagccuggagcuu

SEQ ID NO: 468428 - RNA, 19 nt, Artificial Sequence
  Description of Artificial Sequence: Synthetic oligonucleotide
  Antisense Strand to SEQ ID NO: 468427
aagcuccaggcuuaauacc

SEQ ID NO: 468429 - RNA, 19 nt, Artificial Sequence
  Description of Artificial Sequence: Synthetic oligonucleotide
  Sense strand starting at position 376 of SEQ ID NO: 317152
guauuaagccuggagcuua

SEQ ID NO: 468430 - RNA, 19 nt, Artificial Sequence
  Description of Artificial Sequence: Synthetic oligonucleotide
  Antisense Strand to SEQ ID NO: 468429
uaagcuccaggcuuaauac

SEQ ID NO: 468431 - RNA, 19 nt, Artificial Sequence
  Description of Artificial Sequence: Synthetic oligonucleotide
  Sense strand starting at position 388 of SEQ ID NO: 317152
gagcuuaaauguuucuugu

SEQ ID NO: 468432 - RNA, 19 nt, Artificial Sequence
  Description of Artificial Sequence: Synthetic oligonucleotide
  Antisense Strand to SEQ ID NO: 468431
acaagaaacauuuaagcuc

SEQ ID NO: 468433 - RNA, 19 nt, Artificial Sequence
  Description of Artificial Sequence: Synthetic oligonucleotide
  Sense strand starting at position 394 of SEQ ID NO: 317152
aaauguuucuuguuggaac

SEQ ID NO: 468434 - RNA, 19 nt, Artificial Sequence
  Description of Artificial Sequence: Synthetic oligonucleotide
  Antisense Strand to SEQ ID NO: 468433
guuccaacaagaaacauuu

SEQ ID NO: 468435 - RNA, 19 nt, Artificial Sequence
  Description of Artificial Sequence: Synthetic oligonucleotide
  Sense strand starting at position 405 of SEQ ID NO: 317152
guuggaacucaaugcauaa

SEQ ID NO: 468436 - RNA, 19 nt, Artificial Sequence
  Description of Artificial Sequence: Synthetic oligonucleotide
  Antisense Strand to SEQ ID NO: 468435
uuaugcauugaguuccaac

SEQ ID NO: 468437 - RNA, 19 nt, Artificial Sequence
  Description of Artificial Sequence: Synthetic oligonucleotide
  Sense strand starting at position 451 of SEQ ID NO: 317152
caaacaaguggguguaauu

SEQ ID NO: 468438 - RNA, 19 nt, Artificial Sequence
  Description of Artificial Sequence: Synthetic oligonucleotide
  Antisense Strand to SEQ ID NO: 468437
aauuacacccacuuguuug

SEQ ID NO: 468439 - RNA, 19 nt, Artificial Sequence
  Description of Artificial Sequence: Synthetic oligonucleotide
  Sense strand starting at position 484 of SEQ ID NO: 317152
acuuacagauccuugggua

SEQ ID NO: 468440 - RNA, 19 nt, Artificial Sequence
  Description of Artificial Sequence: Synthetic oligonucleotide
  Antisense Strand to SEQ ID NO: 468439
uacccaaggaucuguaagu

SEQ ID NO: 468441 - RNA, 19 nt, Artificial Sequence
  Description of Artificial Sequence: Synthetic oligonucleotide
  Sense strand starting at position 485 of SEQ ID NO: 317152
cuuacagauccuuggguaa

SEQ ID NO: 468442 - RNA, 19 nt, Artificial Sequence
  Description of Artificial Sequence: Synthetic oligonucleotide
  Antisense Strand to SEQ ID NO: 468441
uuacccaaggaucuguaag

SEQ ID NO: 468443 - RNA, 19 nt, Artificial Sequence
  Description of Artificial Sequence: Synthetic oligonucleotide
  Sense strand starting at position 488 of SEQ ID NO: 317152
acagauccuuggguaaaca

SEQ ID NO: 468444 - RNA, 19 nt, Artificial Sequence
  Description of Artificial Sequence: Synthetic oligonucleotide
  Antisense Strand to SEQ ID NO: 468443
uguuuacccaaggaucugu

SEQ ID NO: 468445 - RNA, 19 nt, Artificial Sequence
  Description of Artificial Sequence: Synthetic oligonucleotide
  Sense strand starting at position 515 of SEQ ID NO: 317152
uguguuaguaacugucaga

SEQ ID NO: 468446 - RNA, 19 nt, Artificial Sequence
  Description of Artificial Sequence: Synthetic oligonucleotide
  Antisense Strand to SEQ ID NO: 468445
ucugacaguuacuaacaca

SEQ ID NO: 468447 - RNA, 19 nt, Artificial Sequence
  Description of Artificial Sequence: Synthetic oligonucleotide
  Sense strand starting at position 528 of SEQ ID NO: 317152
gucagauuugcuggguuag

SEQ ID NO: 468448 - RNA, 19 nt, Artificial Sequence
  Description of Artificial Sequence: Synthetic oligonucleotide
  Antisense Strand to SEQ ID NO: 468447
cuaacccagcaaaucugac

SEQ ID NO: 468449 - RNA, 19 nt, Artificial Sequence
  Description of Artificial Sequence: Synthetic oligonucleotide
  Sense strand starting at position 573 of SEQ ID NO: 317152
ccugacucucuaggaaaua

SEQ ID NO: 468450 - RNA, 19 nt, Artificial Sequence
  Description of Artificial Sequence: Synthetic oligonucleotide
  Antisense Strand to SEQ ID NO: 468449
uauuuccuagagagucagg

SEQ ID NO: 468451 - RNA, 19 nt, Artificial Sequence
  Description of Artificial Sequence: Synthetic oligonucleotide
  Sense strand starting at position 584 of SEQ ID NO: 317152
aggaaauaauucuagauuc

SEQ ID NO: 468452 - RNA, 19 nt, Artificial Sequence
  Description of Artificial Sequence: Synthetic oligonucleotide
  Antisense Strand to SEQ ID NO: 468451
gaaucuagaauuauuuccu

SEQ ID NO: 468453 - RNA, 19 nt, Artificial Sequence
  Description of Artificial Sequence: Synthetic oligonucleotide
  Sense strand starting at position 871 of SEQ ID NO: 317152
ugcaaagguguauauguau

SEQ ID NO: 468454 - RNA, 19 nt, Artificial Sequence
  Description of Artificial Sequence: Synthetic oligonucleotide
  Antisense Strand to SEQ ID NO: 468453
auacauauacaccuuugca

SEQ ID NO: 468455 - RNA, 19 nt, Artificial Sequence
  Description of Artificial Sequence: Synthetic oligonucleotide
  Sense strand starting at position 1604 of SEQ ID NO: 317152
cgcagcacgcgguaauuua

SEQ ID NO: 468456 - RNA, 19 nt, Artificial Sequence
  Description of Artificial Sequence: Synthetic oligonucleotide
  Antisense Strand to SEQ ID NO: 468455
uaaauuaccgcgugcugcg

SEQ ID NO: 468457 - RNA, 19 nt, Artificial Sequence
  Description of Artificial Sequence: Synthetic oligonucleotide
  Sense strand starting at position 1766 of SEQ ID NO: 317152
gugaacgacuacguuuaga

SEQ ID NO: 468458 - RNA, 19 nt, Artificial Sequence
  Description of Artificial Sequence: Synthetic oligonucleotide
  Antisense Strand to SEQ ID NO: 468457
ucuaaacguagucguucac

SEQ ID NO: 468459 - RNA, 19 nt, Artificial Sequence
  Description of Artificial Sequence: Synthetic oligonucleotide
  Sense strand starting at position 2290 of SEQ ID NO: 317152
aagguaacuccgggaauug

SEQ ID NO: 468460 - RNA, 19 nt, Artificial Sequence
  Description of Artificial Sequence: Synthetic oligonucleotide
  Antisense Strand to SEQ ID NO: 468459
caauucccggaguuaccuu

SEQ ID NO: 468461 - RNA, 19 nt, Artificial Sequence
  Description of Artificial Sequence: Synthetic oligonucleotide
  Sense strand starting at position 2699 of SEQ ID NO: 317152
uguuuaugauauccuuguu

SEQ ID NO: 468462 - RNA, 19 nt, Artificial Sequence
  Description of Artificial Sequence: Synthetic oligonucleotide
  Antisense Strand to SEQ ID NO: 468461
aacaaggauaucauaaaca

SEQ ID NO: 468463 - RNA, 19 nt, Artificial Sequence
  Description of Artificial Sequence: Synthetic oligonucleotide
  Sense strand starting at position 2704 of SEQ ID NO: 317152
augauauccuuguuauacc

SEQ ID NO: 468464 - RNA, 19 nt, Artificial Sequence
  Description of Artificial Sequence: Synthetic oligonucleotide
  Antisense Strand to SEQ ID NO: 468463
gguauaacaaggauaucau

SEQ ID NO: 468465 - RNA, 19 nt, Artificial Sequence
  Description of Artificial Sequence: Synthetic oligonucleotide
  Sense strand starting at position 2767 of SEQ ID NO: 317152
ucuauuaacgcucaguuua

SEQ ID NO: 468466 - RNA, 19 nt, Artificial Sequence
  Description of Artificial Sequence: Synthetic oligonucleotide
  Antisense Strand to SEQ ID NO: 468465
uaaacugagcguuaauaga

SEQ ID NO: 468467 - RNA, 19 nt, Artificial Sequence
  Description of Artificial Sequence: Synthetic oligonucleotide
  Sense strand starting at position 2772 of SEQ ID NO: 317152
uaacgcucaguuuacagau

SEQ ID NO: 468468 - RNA, 19 nt, Artificial Sequence
  Description of Artificial Sequence: Synthetic oligonucleotide
  Antisense Strand to SEQ ID NO: 468467
aucuguaaacugagcguua

SEQ ID NO: 468469 - RNA, 19 nt, Artificial Sequence
  Description of Artificial Sequence: Synthetic oligonucleotide
  Sense strand starting at position 2937 of SEQ ID NO: 317152
cucucuugaguccacaagu

SEQ ID NO: 468470 - RNA, 19 nt, Artificial Sequence
  Description of Artificial Sequence: Synthetic oligonucleotide
  Antisense Strand to SEQ ID NO: 468469
acuuguggacucaagagag

SEQ ID NO: 468471 - RNA, 19 nt, Artificial Sequence
  Description of Artificial Sequence: Synthetic oligonucleotide
  Sense strand starting at position 3097 of SEQ ID NO: 317152
gugagacaugaucgaacca

SEQ ID NO: 468472 - RNA, 19 nt, Artificial Sequence
  Description of Artificial Sequence: Synthetic oligonucleotide
  Antisense Strand to SEQ ID NO: 468471
ugguucgaucaugucucac

SEQ ID NO: 468473 - RNA, 19 nt, Artificial Sequence
  Description of Artificial Sequence: Synthetic oligonucleotide
  Sense strand starting at position 3275 of SEQ ID NO: 317152
cagguagccuuuguucuaa

SEQ ID NO: 468474 - RNA, 19 nt, Artificial Sequence
  Description of Artificial Sequence: Synthetic oligonucleotide
  Antisense Strand to SEQ ID NO: 468473
uuagaacaaaggcuaccug

SEQ ID NO: 468475 - RNA, 19 nt, Artificial Sequence
  Description of Artificial Sequence: Synthetic oligonucleotide
  Sense strand starting at position 3286 of SEQ ID NO: 317152
uguucuaaguaggcaugaa

SEQ ID NO: 468476 - RNA, 19 nt, Artificial Sequence
  Description of Artificial Sequence: Synthetic oligonucleotide
  Antisense Strand to SEQ ID NO: 468475
uucaugccuacuuagaaca

SEQ ID NO: 468477 - RNA, 19 nt, Artificial Sequence
  Description of Artificial Sequence: Synthetic oligonucleotide
  Sense strand starting at position 3290 of SEQ ID NO: 317152
cuaaguaggcaugaacagu

SEQ ID NO: 468478 - RNA, 19 nt, Artificial Sequence
  Description of Artificial Sequence: Synthetic oligonucleotide
  Antisense Strand to SEQ ID NO: 468477
acuguucaugccuacuuag

SEQ ID NO: 468479 - RNA, 19 nt, Artificial Sequence
  Description of Artificial Sequence: Synthetic oligonucleotide
  Sense strand starting at position 3296 of SEQ ID NO: 317152
aggcaugaacagugcuauu

SEQ ID NO: 468480 - RNA, 19 nt, Artificial Sequence
  Description of Artificial Sequence: Synthetic oligonucleotide
  Antisense Strand to SEQ ID NO: 468479
aauagcacuguucaugccu

SEQ ID NO: 468481 - RNA, 19 nt, Artificial Sequence
  Description of Artificial Sequence: Synthetic oligonucleotide
  Sense strand starting at position 3365 of SEQ ID NO: 317152
uguucuuaggcggaugaga

SEQ ID NO: 468482 - RNA, 19 nt, Artificial Sequence
  Description of Artificial Sequence: Synthetic oligonucleotide
  Antisense Strand to SEQ ID NO: 468481
ucucauccgccuaagaaca

SEQ ID NO: 468483 - RNA, 19 nt, Artificial Sequence
  Description of Artificial Sequence: Synthetic oligonucleotide
  Sense strand starting at position 3367 of SEQ ID NO: 317152
uucuuaggcggaugagaga

SEQ ID NO: 468484 - RNA, 19 nt, Artificial Sequence
  Description of Artificial Sequence: Synthetic oligonucleotide
  Antisense Strand to SEQ ID NO: 468483
ucucucauccgccuaagaa

SEQ ID NO: 468485 - RNA, 19 nt, Artificial Sequence
  Description of Artificial Sequence: Synthetic oligonucleotide
  Sense strand starting at position 3444 of SEQ ID NO: 317152
auggaugacuuugcagaga

SEQ ID NO: 468486 - RNA, 19 nt, Artificial Sequence
  Description of Artificial Sequence: Synthetic oligonucleotide
  Antisense Strand to SEQ ID NO: 468485
ucucugcaaagucauccau

SEQ ID NO: 468487 - RNA, 19 nt, Artificial Sequence
  Description of Artificial Sequence: Synthetic oligonucleotide
  Sense strand starting at position 3494 of SEQ ID NO: 317152
guugaaagcgagggagauu

SEQ ID NO: 468488 - RNA, 19 nt, Artificial Sequence
  Description of Artificial Sequence: Synthetic oligonucleotide
  Antisense Strand to SEQ ID NO: 468487
aaucucccucgcuuucaac

SEQ ID NO: 468489 - RNA, 19 nt, Artificial Sequence
  Description of Artificial Sequence: Synthetic oligonucleotide
  Sense strand starting at position 3503 of SEQ ID NO: 317152
gagggagauuuaugccaau

SEQ ID NO: 468490 - RNA, 19 nt, Artificial Sequence
  Description of Artificial Sequence: Synthetic oligonucleotide
  Antisense Strand to SEQ ID NO: 468489
auuggcauaaaucucccuc

SEQ ID NO: 468491 - RNA, 19 nt, Artificial Sequence
  Description of Artificial Sequence: Synthetic oligonucleotide
  Sense strand starting at position 3952 of SEQ ID NO: 317152
auuaguaaugaugguaaac

SEQ ID NO: 468492 - RNA, 19 nt, Artificial Sequence
  Description of Artificial Sequence: Synthetic oligonucleotide
  Antisense Strand to SEQ ID NO: 468491
guuuaccaucauuacuaau

SEQ ID NO: 468493 - RNA, 19 nt, Artificial Sequence
  Description of Artificial Sequence: Synthetic oligonucleotide
  Sense strand starting at position 3961 of SEQ ID NO: 317152
gaugguaaacgugaucuau

SEQ ID NO: 468494 - RNA, 19 nt, Artificial Sequence
  Description of Artificial Sequence: Synthetic oligonucleotide
  Antisense Strand to SEQ ID NO: 468493
auagaucacguuuaccauc

SEQ ID NO: 468495 - RNA, 19 nt, Artificial Sequence
  Description of Artificial Sequence: Synthetic oligonucleotide
  Sense strand starting at position 256 of SEQ ID NO: 317153
ggccuaagucaggaggagu

SEQ ID NO: 468496 - RNA, 19 nt, Artificial Sequence
  Description of Artificial Sequence: Synthetic oligonucleotide
  Antisense Strand to SEQ ID NO: 468495
acuccuccugacuuaggcc

SEQ ID NO: 468497 - RNA, 19 nt, Artificial Sequence
  Description of Artificial Sequence: Synthetic oligonucleotide
  Sense strand starting at position 339 of SEQ ID NO: 317153
aaccgaaaucuccgguaag

SEQ ID NO: 468498 - RNA, 19 nt, Artificial Sequence
  Description of Artificial Sequence: Synthetic oligonucleotide
  Antisense Strand to SEQ ID NO: 468497
cuuaccggagauuucgguu

SEQ ID NO: 468499 - RNA, 19 nt, Artificial Sequence
  Description of Artificial Sequence: Synthetic oligonucleotide
  Sense strand starting at position 340 of SEQ ID NO: 317153
accgaaaucuccgguaaga

SEQ ID NO: 468500 - RNA, 19 nt, Artificial Sequence
  Description of Artificial Sequence: Synthetic oligonucleotide
  Antisense Strand to SEQ ID NO: 468499
ucuuaccggagauuucggu

SEQ ID NO: 468501 - RNA, 19 nt, Artificial Sequence
  Description of Artificial Sequence: Synthetic oligonucleotide
  Sense strand starting at position 342 of SEQ ID NO: 317153
cgaaaucuccgguaagaaa

SEQ ID NO: 468502 - RNA, 19 nt, Artificial Sequence
  Description of Artificial Sequence: Synthetic oligonucleotide
  Antisense Strand to SEQ ID NO: 468501
uuucuuaccggagauuucg

SEQ ID NO: 468503 - RNA, 19 nt, Artificial Sequence
  Description of Artificial Sequence: Synthetic oligonucleotide
  Sense strand starting at position 349 of SEQ ID NO: 317153
uccgguaagaaaugaccaa

SEQ ID NO: 468504 - RNA, 19 nt, Artificial Sequence
  Description of Artificial Sequence: Synthetic oligonucleotide
  Antisense Strand to SEQ ID NO: 468503
uuggucauuucuuaccgga

SEQ ID NO: 468505 - RNA, 19 nt, Artificial Sequence
  Description of Artificial Sequence: Synthetic oligonucleotide
  Sense strand starting at position 363 of SEQ ID NO: 317153
accaaucgcuccugucaga

SEQ ID NO: 468506 - RNA, 19 nt, Artificial Sequence
  Description of Artificial Sequence: Synthetic oligonucleotide
  Antisense Strand to SEQ ID NO: 468505
ucugacaggagcgauuggu

SEQ ID NO: 468507 - RNA, 19 nt, Artificial Sequence
  Description of Artificial Sequence: Synthetic oligonucleotide
  Sense strand starting at position 651 of SEQ ID NO: 317153
cggauuuguucgcccucca

SEQ ID NO: 468508 - RNA, 19 nt, Artificial Sequence
  Description of Artificial Sequence: Synthetic oligonucleotide
  Antisense Strand to SEQ ID NO: 468507
uggagggcgaacaaauccg

SEQ ID NO: 468509 - RNA, 19 nt, Artificial Sequence
  Description of Artificial Sequence: Synthetic oligonucleotide
  Sense strand starting at position 779 of SEQ ID NO: 317153
ucaguagggccggaaaguu

SEQ ID NO: 468510 - RNA, 19 nt, Artificial Sequence
  Description of Artificial Sequence: Synthetic oligonucleotide
  Antisense Strand to SEQ ID NO: 468509
aacuuuccggcccuacuga

SEQ ID NO: 468511 - RNA, 19 nt, Artificial Sequence
  Description of Artificial Sequence: Synthetic oligonucleotide
  Sense strand starting at position 838 of SEQ ID NO: 317153
gucgaaugcaauucgcgau

SEQ ID NO: 468512 - RNA, 19 nt, Artificial Sequence
  Description of Artificial Sequence: Synthetic oligonucleotide
  Antisense Strand to SEQ ID NO: 468511
aucgcgaauugcauucgac

SEQ ID NO: 468513 - RNA, 19 nt, Artificial Sequence
  Description of Artificial Sequence: Synthetic oligonucleotide
  Sense strand starting at position 841 of SEQ ID NO: 317153
gaaugcaauucgcgaucaa

SEQ ID NO: 468514 - RNA, 19 nt, Artificial Sequence
  Description of Artificial Sequence: Synthetic oligonucleotide
  Antisense Strand to SEQ ID NO: 468513
uugaucgcgaauugcauuc

SEQ ID NO: 468515 - RNA, 19 nt, Artificial Sequence
  Description of Artificial Sequence: Synthetic oligonucleotide
  Sense strand starting at position 842 of SEQ ID NO: 317153
aaugcaauucgcgaucaau

SEQ ID NO: 468516 - RNA, 19 nt, Artificial Sequence
  Description of Artificial Sequence: Synthetic oligonucleotide
  Antisense Strand to SEQ ID NO: 468515
auugaucgcgaauugcauu

SEQ ID NO: 468517 - RNA, 19 nt, Artificial Sequence
  Description of Artificial Sequence: Synthetic oligonucleotide
  Sense strand starting at position 892 of SEQ ID NO: 317153
ucgaguaauuauccgaauu

SEQ ID NO: 468518 - RNA, 19 nt, Artificial Sequence
  Description of Artificial Sequence: Synthetic oligonucleotide
  Antisense Strand to SEQ ID NO: 468517
aauucggauaauuacucga

SEQ ID NO: 468519 - RNA, 19 nt, Artificial Sequence
  Description of Artificial Sequence: Synthetic oligonucleotide
  Sense strand starting at position 937 of SEQ ID NO: 317153
gggaguuugcaaggugcuu

SEQ ID NO: 468520 - RNA, 19 nt, Artificial Sequence
  Description of Artificial Sequence: Synthetic oligonucleotide
  Antisense Strand to SEQ ID NO: 468519
aagcaccuugcaaacuccc

SEQ ID NO: 468521 - RNA, 19 nt, Artificial Sequence
  Description of Artificial Sequence: Synthetic oligonucleotide
  Sense strand starting at position 943 of SEQ ID NO: 317153
uugcaaggugcuugaaaga

SEQ ID NO: 468522 - RNA, 19 nt, Artificial Sequence
  Description of Artificial Sequence: Synthetic oligonucleotide
  Antisense Strand to SEQ ID NO: 468521
ucuuucaagcaccuugcaa

SEQ ID NO: 468523 - RNA, 19 nt, Artificial Sequence
  Description of Artificial Sequence: Synthetic oligonucleotide
  Sense strand starting at position 952 of SEQ ID NO: 317153
gcuugaaagagauaugcac

SEQ ID NO: 468524 - RNA, 19 nt, Artificial Sequence
  Description of Artificial Sequence: Synthetic oligonucleotide
  Antisense Strand to SEQ ID NO: 468523
gugcauaucucuuucaagc

SEQ ID NO: 468525 - RNA, 19 nt, Artificial Sequence
  Description of Artificial Sequence: Synthetic oligonucleotide
  Sense strand starting at position 960 of SEQ ID NO: 317153
gagauaugcacgcgccgua

SEQ ID NO: 468526 - RNA, 19 nt, Artificial Sequence
  Description of Artificial Sequence: Synthetic oligonucleotide
  Antisense Strand to SEQ ID NO: 468525
uacggcgcgugcauaucuc

SEQ ID NO: 468527 - RNA, 19 nt, Artificial Sequence
  Description of Artificial Sequence: Synthetic oligonucleotide
  Sense strand starting at position 973 of SEQ ID NO: 317153
gccguaaugggauaucgac

SEQ ID NO: 468528 - RNA, 19 nt, Artificial Sequence
  Description of Artificial Sequence: Synthetic oligonucleotide
  Antisense Strand to SEQ ID NO: 468527
gucgauaucccauuacggc

SEQ ID NO: 468529 - RNA, 19 nt, Artificial Sequence
  Description of Artificial Sequence: Synthetic oligonucleotide
  Sense strand starting at position 1104 of SEQ ID NO: 317153
ugucacaauuagucugauu

SEQ ID NO: 468530 - RNA, 19 nt, Artificial Sequence
  Description of Artificial Sequence: Synthetic oligonucleotide
  Antisense Strand to SEQ ID NO: 468529
aaucagacuaauugugaca

SEQ ID NO: 468531 - RNA, 19 nt, Artificial Sequence
  Description of Artificial Sequence: Synthetic oligonucleotide
  Sense strand starting at position 2287 of SEQ ID NO: 317153
gcgccuaauuggcugcgaa

SEQ ID NO: 468532 - RNA, 19 nt, Artificial Sequence
  Description of Artificial Sequence: Synthetic oligonucleotide
  Antisense Strand to SEQ ID NO: 468531
uucgcagccaauuaggcgc

SEQ ID NO: 468533 - RNA, 19 nt, Artificial Sequence
  Description of Artificial Sequence: Synthetic oligonucleotide
  Sense strand starting at position 2503 of SEQ ID NO: 317153
uuaaauaauugcgggauca

SEQ ID NO: 468534 - RNA, 19 nt, Artificial Sequence
  Description of Artificial Sequence: Synthetic oligonucleotide
  Antisense Strand to SEQ ID NO: 468533
ugaucccgcaauuauuuaa

SEQ ID NO: 468535 - RNA, 19 nt, Artificial Sequence
  Description of Artificial Sequence: Synthetic oligonucleotide
  Sense strand starting at position 2504 of SEQ ID NO: 317153
uaaauaauugcgggaucaa

SEQ ID NO: 468536 - RNA, 19 nt, Artificial Sequence
  Description of Artificial Sequence: Synthetic oligonucleotide
  Antisense Strand to SEQ ID NO: 468535
uugaucccgcaauuauuua

SEQ ID NO: 468537 - RNA, 19 nt, Artificial Sequence
  Description of Artificial Sequence: Synthetic oligonucleotide
  Sense strand starting at position 2570 of SEQ ID NO: 317153
ccaagaguuggcugggaca

SEQ ID NO: 468538 - RNA, 19 nt, Artificial Sequence
  Description of Artificial Sequence: Synthetic oligonucleotide
  Antisense Strand to SEQ ID NO: 468537
ugucccagccaacucuugg

SEQ ID NO: 468539 - RNA, 19 nt, Artificial Sequence
  Description of Artificial Sequence: Synthetic oligonucleotide
  Sense strand starting at position 2712 of SEQ ID NO: 317153
gagguucucacgcgcgauu

SEQ ID NO: 468540 - RNA, 19 nt, Artificial Sequence
  Description of Artificial Sequence: Synthetic oligonucleotide
  Antisense Strand to SEQ ID NO: 468539
aaucgcgcgugagaaccuc

SEQ ID NO: 468541 - RNA, 19 nt, Artificial Sequence
  Description of Artificial Sequence: Synthetic oligonucleotide
  Sense strand starting at position 2956 of SEQ ID NO: 317153
gcucauuagaaguggaauc

SEQ ID NO: 468542 - RNA, 19 nt, Artificial Sequence
  Description of Artificial Sequence: Synthetic oligonucleotide
  Antisense Strand to SEQ ID NO: 468541
gauuccacuucuaaugagc

SEQ ID NO: 468543 - RNA, 19 nt, Artificial Sequence
  Description of Artificial Sequence: Synthetic oligonucleotide
  Sense strand starting at position 3154 of SEQ ID NO: 317153
cgcggccugagucuuuauu

SEQ ID NO: 468544 - RNA, 19 nt, Artificial Sequence
  Description of Artificial Sequence: Synthetic oligonucleotide
  Antisense Strand to SEQ ID NO: 468543
aauaaagacucaggccgcg

SEQ ID NO: 468545 - RNA, 19 nt, Artificial Sequence
  Description of Artificial Sequence: Synthetic oligonucleotide
  Sense strand starting at position 3156 of SEQ ID NO: 317153
cggccugagucuuuauuug

SEQ ID NO: 468546 - RNA, 19 nt, Artificial Sequence
  Description of Artificial Sequence: Synthetic oligonucleotide
  Antisense Strand to SEQ ID NO: 468545
caaauaaagacucaggccg

SEQ ID NO: 468547 - RNA, 19 nt, Artificial Sequence
  Description of Artificial Sequence: Synthetic oligonucleotide
  Sense strand starting at position 3164 of SEQ ID NO: 317153
gucuuuauuuggguacguu

SEQ ID NO: 468548 - RNA, 19 nt, Artificial Sequence
  Description of Artificial Sequence: Synthetic oligonucleotide
  Antisense Strand to SEQ ID NO: 468547
aacguacccaaauaaagac

SEQ ID NO: 468549 - RNA, 19 nt, Artificial Sequence
  Description of Artificial Sequence: Synthetic oligonucleotide
  Sense strand starting at position 3165 of SEQ ID NO: 317153
ucuuuauuuggguacguuu

SEQ ID NO: 468550 - RNA, 19 nt, Artificial Sequence
  Description of Artificial Sequence: Synthetic oligonucleotide
  Antisense Strand to SEQ ID NO: 468549
aaacguacccaaauaaaga

SEQ ID NO: 468551 - RNA, 19 nt, Artificial Sequence
  Description of Artificial Sequence: Synthetic oligonucleotide
  Sense strand starting at position 3385 of SEQ ID NO: 317153
gcgcuucuucaggguguga

SEQ ID NO: 468552 - RNA, 19 nt, Artificial Sequence
  Description of Artificial Sequence: Synthetic oligonucleotide
  Antisense Strand to SEQ ID NO: 468551
ucacacccugaagaagcgc

SEQ ID NO: 468553 - RNA, 19 nt, Artificial Sequence
  Description of Artificial Sequence: Synthetic oligonucleotide
  Sense strand starting at position 3488 of SEQ ID NO: 317153
ugcaauuaccgcgggcaau

SEQ ID NO: 468554 - RNA, 19 nt, Artificial Sequence
  Description of Artificial Sequence: Synthetic oligonucleotide
  Antisense Strand to SEQ ID NO: 468553
auugcccgcgguaauugca

SEQ ID NO: 468555 - RNA, 19 nt, Artificial Sequence
  Description of Artificial Sequence: Synthetic oligonucleotide
  Sense strand starting at position 3500 of SEQ ID NO: 317153
gggcaaugauccuuuggaa

SEQ ID NO: 468556 - RNA, 19 nt, Artificial Sequence
  Description of Artificial Sequence: Synthetic oligonucleotide
  Antisense Strand to SEQ ID NO: 468555
uuccaaaggaucauugccc

SEQ ID NO: 468557 - RNA, 19 nt, Artificial Sequence
  Description of Artificial Sequence: Synthetic oligonucleotide
  Sense strand starting at position 3701 of SEQ ID NO: 317153
gcugguccaucccgagauu

SEQ ID NO: 468558 - RNA, 19 nt, Artificial Sequence
  Description of Artificial Sequence: Synthetic oligonucleotide
  Antisense Strand to SEQ ID NO: 468557
aaucucgggauggaccagc

SEQ ID NO: 468559 - RNA, 19 nt, Artificial Sequence
  Description of Artificial Sequence: Synthetic oligonucleotide
  Sense strand starting at position 3704 of SEQ ID NO: 317153
gguccaucccgagauucua

SEQ ID NO: 468560 - RNA, 19 nt, Artificial Sequence
  Description of Artificial Sequence: Synthetic oligonucleotide
  Antisense Strand to SEQ ID NO: 468559
uagaaucucgggauggacc

SEQ ID NO: 468561 - RNA, 19 nt, Artificial Sequence
  Description of Artificial Sequence: Synthetic oligonucleotide
  Sense strand starting at position 3712 of SEQ ID NO: 317153
ccgagauucuaaucagguc

SEQ ID NO: 468562 - RNA, 19 nt, Artificial Sequence
  Description of Artificial Sequence: Synthetic oligonucleotide
  Antisense Strand to SEQ ID NO: 468561
gaccugauuagaaucucgg

SEQ ID NO: 468563 - RNA, 19 nt, Artificial Sequence
  Description of Artificial Sequence: Synthetic oligonucleotide
  Sense strand starting at position 3750 of SEQ ID NO: 317153
uugccaggacuugauuauu

SEQ ID NO: 468564 - RNA, 19 nt, Artificial Sequence
  Description of Artificial Sequence: Synthetic oligonucleotide
  Antisense Strand to SEQ ID NO: 468563
aauaaucaaguccuggcaa

SEQ ID NO: 468565 - RNA, 19 nt, Artificial Sequence
  Description of Artificial Sequence: Synthetic oligonucleotide
  Sense strand starting at position 3755 of SEQ ID NO: 317153
aggacuugauuauucuuua

SEQ ID NO: 468566 - RNA, 19 nt, Artificial Sequence
  Description of Artificial Sequence: Synthetic oligonucleotide
  Antisense Strand to SEQ ID NO: 468565
uaaagaauaaucaaguccu

SEQ ID NO: 468567 - RNA, 19 nt, Artificial Sequence
  Description of Artificial Sequence: Synthetic oligonucleotide
  Sense strand starting at position 3756 of SEQ ID NO: 317153
ggacuugauuauucuuuau

SEQ ID NO: 468568 - RNA, 19 nt, Artificial Sequence
  Description of Artificial Sequence: Synthetic oligonucleotide
  Antisense Strand to SEQ ID NO: 468567
auaaagaauaaucaagucc

SEQ ID NO: 468569 - RNA, 19 nt, Artificial Sequence
  Description of Artificial Sequence: Synthetic oligonucleotide
  Sense strand starting at position 3809 of SEQ ID NO: 317153
uggguaaucucccaucgca

SEQ ID NO: 468570 - RNA, 19 nt, Artificial Sequence
  Description of Artificial Sequence: Synthetic oligonucleotide
  Antisense Strand to SEQ ID NO: 468569
ugcgaugggagauuaccca

SEQ ID NO: 468571 - RNA, 19 nt, Artificial Sequence
  Description of Artificial Sequence: Synthetic oligonucleotide
  Sense strand starting at position 3882 of SEQ ID NO: 317153
ccagcuaaauuuggauaua

SEQ ID NO: 468572 - RNA, 19 nt, Artificial Sequence
  Description of Artificial Sequence: Synthetic oligonucleotide
  Antisense Strand to SEQ ID NO: 468571
uauauccaaauuuagcugg

SEQ ID NO: 468573 - RNA, 19 nt, Artificial Sequence
  Description of Artificial Sequence: Synthetic oligonucleotide
  Sense strand starting at position 564 of SEQ ID NO: 317154
cugggauugcugugagaga

SEQ ID NO: 468574 - RNA, 19 nt, Artificial Sequence
  Description of Artificial Sequence: Synthetic oligonucleotide
  Antisense Strand to SEQ ID NO: 468573
ucucucacagcaaucccag

SEQ ID NO: 468575 - RNA, 19 nt, Artificial Sequence
  Description of Artificial Sequence: Synthetic oligonucleotide
  Sense strand starting at position 747 of SEQ ID NO: 317154
gugcuugaggccuacagaa

SEQ ID NO: 468576 - RNA, 19 nt, Artificial Sequence
  Description of Artificial Sequence: Synthetic oligonucleotide
  Antisense Strand to SEQ ID NO: 468575
uucuguaggccucaagcac

SEQ ID NO: 468577 - RNA, 19 nt, Artificial Sequence
  Description of Artificial Sequence: Synthetic oligonucleotide
  Sense strand starting at position 762 of SEQ ID NO: 317154
agaagcuuguacccaacua

SEQ ID NO: 468578 - RNA, 19 nt, Artificial Sequence
  Description of Artificial Sequence: Synthetic oligonucleotide
  Antisense Strand to SEQ ID NO: 468577
uaguuggguacaagcuucu

SEQ ID NO: 468579 - RNA, 19 nt, Artificial Sequence
  Description of Artificial Sequence: Synthetic oligonucleotide
  Sense strand starting at position 946 of SEQ ID NO: 317154
gcucuaguucugcagauuc

SEQ ID NO: 468580 - RNA, 19 nt, Artificial Sequence
  Description of Artificial Sequence: Synthetic oligonucleotide
  Antisense Strand to SEQ ID NO: 468579
gaaucugcagaacuagagc

SEQ ID NO: 468581 - RNA, 19 nt, Artificial Sequence
  Description of Artificial Sequence: Synthetic oligonucleotide
  Sense strand starting at position 1285 of SEQ ID NO: 317154
ggcucaguucccgaaguga

SEQ ID NO: 468582 - RNA, 19 nt, Artificial Sequence
  Description of Artificial Sequence: Synthetic oligonucleotide
  Antisense Strand to SEQ ID NO: 468581
ucacuucgggaacugagcc

SEQ ID NO: 468583 - RNA, 19 nt, Artificial Sequence
  Description of Artificial Sequence: Synthetic oligonucleotide
  Sense strand starting at position 1289 of SEQ ID NO: 317154
caguucccgaagugauaga

SEQ ID NO: 468584 - RNA, 19 nt, Artificial Sequence
  Description of Artificial Sequence: Synthetic oligonucleotide
  Antisense Strand to SEQ ID NO: 468583
ucuaucacuucgggaacug

SEQ ID NO: 468585 - RNA, 19 nt, Artificial Sequence
  Description of Artificial Sequence: Synthetic oligonucleotide
  Sense strand starting at position 1857 of SEQ ID NO: 317154
uccucuuucuuguugagga

SEQ ID NO: 468586 - RNA, 19 nt, Artificial Sequence
  Description of Artificial Sequence: Synthetic oligonucleotide
  Antisense Strand to SEQ ID NO: 468585
uccucaacaagaaagagga

SEQ ID NO: 468587 - RNA, 19 nt, Artificial Sequence
  Description of Artificial Sequence: Synthetic oligonucleotide
  Sense strand starting at position 2189 of SEQ ID NO: 317154
uggauuaucucaucgcuuc

SEQ ID NO: 468588 - RNA, 19 nt, Artificial Sequence
  Description of Artificial Sequence: Synthetic oligonucleotide
  Antisense Strand to SEQ ID NO: 468587
gaagcgaugagauaaucca

SEQ ID NO: 468589 - RNA, 19 nt, Artificial Sequence
  Description of Artificial Sequence: Synthetic oligonucleotide
  Sense strand starting at position 2190 of SEQ ID NO: 317154
ggauuaucucaucgcuucu

SEQ ID NO: 468590 - RNA, 19 nt, Artificial Sequence
  Description of Artificial Sequence: Synthetic oligonucleotide
  Antisense Strand to SEQ ID NO: 468589
agaagcgaugagauaaucc

SEQ ID NO: 468591 - RNA, 19 nt, Artificial Sequence
  Description of Artificial Sequence: Synthetic oligonucleotide
  Sense strand starting at position 2567 of SEQ ID NO: 317154
ugucauuccucacugcuga

SEQ ID NO: 468592 - RNA, 19 nt, Artificial Sequence
  Description of Artificial Sequence: Synthetic oligonucleotide
  Antisense Strand to SEQ ID NO: 468591
ucagcagugaggaaugaca

SEQ ID NO: 468593 - RNA, 19 nt, Artificial Sequence
  Description of Artificial Sequence: Synthetic oligonucleotide
  Sense strand starting at position 2663 of SEQ ID NO: 317154
cgacguugacuuuaacaga

SEQ ID NO: 468594 - RNA, 19 nt, Artificial Sequence
  Description of Artificial Sequence: Synthetic oligonucleotide
  Antisense Strand to SEQ ID NO: 468593
ucuguuaaagucaacgucg

SEQ ID NO: 468595 - RNA, 19 nt, Artificial Sequence
  Description of Artificial Sequence: Synthetic oligonucleotide
  Sense strand starting at position 2707 of SEQ ID NO: 317154
aagacagggucugacuuaa

SEQ ID NO: 468596 - RNA, 19 nt, Artificial Sequence
  Description of Artificial Sequence: Synthetic oligonucleotide
  Antisense Strand to SEQ ID NO: 468595
uuaagucagacccugucuu

SEQ ID NO: 468597 - RNA, 19 nt, Artificial Sequence
  Description of Artificial Sequence: Synthetic oligonucleotide
  Sense strand starting at position 2796 of SEQ ID NO: 317154
guuucuuaccucugcagau

SEQ ID NO: 468598 - RNA, 19 nt, Artificial Sequence
  Description of Artificial Sequence: Synthetic oligonucleotide
  Antisense Strand to SEQ ID NO: 468597
aucugcagagguaagaaac

SEQ ID NO: 468599 - RNA, 19 nt, Artificial Sequence
  Description of Artificial Sequence: Synthetic oligonucleotide
  Sense strand starting at position 2825 of SEQ ID NO: 317154
auuccagcgcuuuaacaga

SEQ ID NO: 468600 - RNA, 19 nt, Artificial Sequence
  Description of Artificial Sequence: Synthetic oligonucleotide
  Antisense Strand to SEQ ID NO: 468599
ucuguuaaagcgcuggaau

SEQ ID NO: 468601 - RNA, 19 nt, Artificial Sequence
  Description of Artificial Sequence: Synthetic oligonucleotide
  Sense strand starting at position 2845 of SEQ ID NO: 317154
cacugauacuaaguugagu

SEQ ID NO: 468602 - RNA, 19 nt, Artificial Sequence
  Description of Artificial Sequence: Synthetic oligonucleotide
  Antisense Strand to SEQ ID NO: 468601
acucaacuuaguaucagug

SEQ ID NO: 468603 - RNA, 19 nt, Artificial Sequence
  Description of Artificial Sequence: Synthetic oligonucleotide
  Sense strand starting at position 2850 of SEQ ID NO: 317154
auacuaaguugagucaaau

SEQ ID NO: 468604 - RNA, 19 nt, Artificial Sequence
  Description of Artificial Sequence: Synthetic oligonucleotide
  Antisense Strand to SEQ ID NO: 468603
auuugacucaacuuaguau

SEQ ID NO: 468605 - RNA, 19 nt, Artificial Sequence
  Description of Artificial Sequence: Synthetic oligonucleotide
  Sense strand starting at position 2860 of SEQ ID NO: 317154
gagucaaaucugcggagaa

SEQ ID NO: 468606 - RNA, 19 nt, Artificial Sequence
  Description of Artificial Sequence: Synthetic oligonucleotide
  Antisense Strand to SEQ ID NO: 468605
uucuccgcagauuugacuc

SEQ ID NO: 468607 - RNA, 19 nt, Artificial Sequence
  Description of Artificial Sequence: Synthetic oligonucleotide
  Sense strand starting at position 2914 of SEQ ID NO: 317154
uaguuucuguucucuagga

SEQ ID NO: 468608 - RNA, 19 nt, Artificial Sequence
  Description of Artificial Sequence: Synthetic oligonucleotide
  Antisense Strand to SEQ ID NO: 468607
uccuagagaacagaaacua

SEQ ID NO: 468609 - RNA, 19 nt, Artificial Sequence
  Description of Artificial Sequence: Synthetic oligonucleotide
  Sense strand starting at position 2915 of SEQ ID NO: 317154
aguuucuguucucuaggaa

SEQ ID NO: 468610 - RNA, 19 nt, Artificial Sequence
  Description of Artificial Sequence: Synthetic oligonucleotide
  Antisense Strand to SEQ ID NO: 468609
uuccuagagaacagaaacu

SEQ ID NO: 468611 - RNA, 19 nt, Artificial Sequence
  Description of Artificial Sequence: Synthetic oligonucleotide
  Sense strand starting at position 2916 of SEQ ID NO: 317154
guuucuguucucuaggaag

SEQ ID NO: 468612 - RNA, 19 nt, Artificial Sequence
  Description of Artificial Sequence: Synthetic oligonucleotide
  Antisense Strand to SEQ ID NO: 468611
cuuccuagagaacagaaac

SEQ ID NO: 468613 - RNA, 19 nt, Artificial Sequence
  Description of Artificial Sequence: Synthetic oligonucleotide
  Sense strand starting at position 2918 of SEQ ID NO: 317154
uucuguucucuaggaagga

SEQ ID NO: 468614 - RNA, 19 nt, Artificial Sequence
  Description of Artificial Sequence: Synthetic oligonucleotide
  Antisense Strand to SEQ ID NO: 468613
uccuuccuagagaacagaa

SEQ ID NO: 468615 - RNA, 19 nt, Artificial Sequence
  Description of Artificial Sequence: Synthetic oligonucleotide
  Sense strand starting at position 2922 of SEQ ID NO: 317154
guucucuaggaaggauuau

SEQ ID NO: 468616 - RNA, 19 nt, Artificial Sequence
  Description of Artificial Sequence: Synthetic oligonucleotide
  Antisense Strand to SEQ ID NO: 468615
auaauccuuccuagagaac

SEQ ID NO: 468617 - RNA, 19 nt, Artificial Sequence
  Description of Artificial Sequence: Synthetic oligonucleotide
  Sense strand starting at position 3005 of SEQ ID NO: 317154
augcucuuugcugaaauga

SEQ ID NO: 468618 - RNA, 19 nt, Artificial Sequence
  Description of Artificial Sequence: Synthetic oligonucleotide
  Antisense Strand to SEQ ID NO: 468617
ucauuucagcaaagagcau

SEQ ID NO: 468619 - RNA, 19 nt, Artificial Sequence
  Description of Artificial Sequence: Synthetic oligonucleotide
  Sense strand starting at position 3013 of SEQ ID NO: 317154
ugcugaaaugaucaguuaa

SEQ ID NO: 468620 - RNA, 19 nt, Artificial Sequence
  Description of Artificial Sequence: Synthetic oligonucleotide
  Antisense Strand to SEQ ID NO: 468619
uuaacugaucauuucagca

SEQ ID NO: 468621 - RNA, 19 nt, Artificial Sequence
  Description of Artificial Sequence: Synthetic oligonucleotide
  Sense strand starting at position 3015 of SEQ ID NO: 317154
cugaaaugaucaguuaauu

SEQ ID NO: 468622 - RNA, 19 nt, Artificial Sequence
  Description of Artificial Sequence: Synthetic oligonucleotide
  Antisense Strand to SEQ ID NO: 468621
aauuaacugaucauuucag

SEQ ID NO: 468623 - RNA, 19 nt, Artificial Sequence
  Description of Artificial Sequence: Synthetic oligonucleotide
  Sense strand starting at position 3059 of SEQ ID NO: 317154
uuccucgucgucuuugauu

SEQ ID NO: 468624 - RNA, 19 nt, Artificial Sequence
  Description of Artificial Sequence: Synthetic oligonucleotide
  Antisense Strand to SEQ ID NO: 468623
aaucaaagacgacgaggaa

SEQ ID NO: 468625 - RNA, 19 nt, Artificial Sequence
  Description of Artificial Sequence: Synthetic oligonucleotide
  Sense strand starting at position 3064 of SEQ ID NO: 317154
cgucgucuuugauuugauu

SEQ ID NO: 468626 - RNA, 19 nt, Artificial Sequence
  Description of Artificial Sequence: Synthetic oligonucleotide
  Antisense Strand to SEQ ID NO: 468625
aaucaaaucaaagacgacg

SEQ ID NO: 468627 - RNA, 19 nt, Artificial Sequence
  Description of Artificial Sequence: Synthetic oligonucleotide
  Sense strand starting at position 3194 of SEQ ID NO: 317154
gcagaccaauauugaauuu

SEQ ID NO: 468628 - RNA, 19 nt, Artificial Sequence
  Description of Artificial Sequence: Synthetic oligonucleotide
  Antisense Strand to SEQ ID NO: 468627
aaauucaauauuggucugc

SEQ ID NO: 468629 - RNA, 19 nt, Artificial Sequence
  Description of Artificial Sequence: Synthetic oligonucleotide
  Sense strand starting at position 3211 of SEQ ID NO: 317154
uuaauuggaguuuguuaag

SEQ ID NO: 468630 - RNA, 19 nt, Artificial Sequence
  Description of Artificial Sequence: Synthetic oligonucleotide
  Antisense Strand to SEQ ID NO: 468629
cuuaacaaacuccaauuaa

SEQ ID NO: 468631 - RNA, 19 nt, Artificial Sequence
  Description of Artificial Sequence: Synthetic oligonucleotide
  Sense strand starting at position 3281 of SEQ ID NO: 317154
ucuuacuugugaguugaau

SEQ ID NO: 468632 - RNA, 19 nt, Artificial Sequence
  Description of Artificial Sequence: Synthetic oligonucleotide
  Antisense Strand to SEQ ID NO: 468631
auucaacucacaaguaaga

SEQ ID NO: 468633 - RNA, 19 nt, Artificial Sequence
  Description of Artificial Sequence: Synthetic oligonucleotide
  Sense strand starting at position 3312 of SEQ ID NO: 317154
agauauguuuguuugcuua

SEQ ID NO: 468634 - RNA, 19 nt, Artificial Sequence
  Description of Artificial Sequence: Synthetic oligonucleotide
  Antisense Strand to SEQ ID NO: 468633
uaagcaaacaaacauaucu

SEQ ID NO: 468635 - RNA, 19 nt, Artificial Sequence
  Description of Artificial Sequence: Synthetic oligonucleotide
  Sense strand starting at position 3314 of SEQ ID NO: 317154
auauguuuguuugcuuaga

SEQ ID NO: 468636 - RNA, 19 nt, Artificial Sequence
  Description of Artificial Sequence: Synthetic oligonucleotide
  Antisense Strand to SEQ ID NO: 468635
ucuaagcaaacaaacauau

SEQ ID NO: 468637 - RNA, 19 nt, Artificial Sequence
  Description of Artificial Sequence: Synthetic oligonucleotide
  Sense strand starting at position 3316 of SEQ ID NO: 317154
auguuuguuugcuuagaag

SEQ ID NO: 468638 - RNA, 19 nt, Artificial Sequence
  Description of Artificial Sequence: Synthetic oligonucleotide
  Antisense Strand to SEQ ID NO: 468637
cuucuaagcaaacaaacau

SEQ ID NO: 468639 - RNA, 19 nt, Artificial Sequence
  Description of Artificial Sequence: Synthetic oligonucleotide
  Sense strand starting at position 3443 of SEQ ID NO: 317154
acaaauauuguggguauau

SEQ ID NO: 468640 - RNA, 19 nt, Artificial Sequence
  Description of Artificial Sequence: Synthetic oligonucleotide
  Antisense Strand to SEQ ID NO: 468639
auauacccacaauauuugu

SEQ ID NO: 468641 - RNA, 19 nt, Artificial Sequence
  Description of Artificial Sequence: Synthetic oligonucleotide
  Sense strand starting at position 3444 of SEQ ID NO: 317154
caaauauuguggguauaua

SEQ ID NO: 468642 - RNA, 19 nt, Artificial Sequence
  Description of Artificial Sequence: Synthetic oligonucleotide
  Antisense Strand to SEQ ID NO: 468641
uauauacccacaauauuug

SEQ ID NO: 468643 - RNA, 19 nt, Artificial Sequence
  Description of Artificial Sequence: Synthetic oligonucleotide
  Sense strand starting at position 3736 of SEQ ID NO: 317154
ucagucucagaaugagguu

SEQ ID NO: 468644 - RNA, 19 nt, Artificial Sequence
  Description of Artificial Sequence: Synthetic oligonucleotide
  Antisense Strand to SEQ ID NO: 468643
aaccucauucugagacuga

SEQ ID NO: 468645 - RNA, 19 nt, Artificial Sequence
  Description of Artificial Sequence: Synthetic oligonucleotide
  Sense strand starting at position 3787 of SEQ ID NO: 317154
acaugaugcuuucuugcuu

SEQ ID NO: 468646 - RNA, 19 nt, Artificial Sequence
  Description of Artificial Sequence: Synthetic oligonucleotide
  Antisense Strand to SEQ ID NO: 468645
aagcaagaaagcaucaugu

SEQ ID NO: 468647 - RNA, 19 nt, Artificial Sequence
  Description of Artificial Sequence: Synthetic oligonucleotide
  Sense strand starting at position 3899 of SEQ ID NO: 317154
ccauuuaaauuugguguca

SEQ ID NO: 468648 - RNA, 19 nt, Artificial Sequence
  Description of Artificial Sequence: Synthetic oligonucleotide
  Antisense Strand to SEQ ID NO: 468647
ugacaccaaauuuaaaugg

SEQ ID NO: 468649 - RNA, 19 nt, Artificial Sequence
  Description of Artificial Sequence: Synthetic oligonucleotide
  Sense strand starting at position 3901 of SEQ ID NO: 317154
auuuaaauuuggugucagu

SEQ ID NO: 468650 - RNA, 19 nt, Artificial Sequence
  Description of Artificial Sequence: Synthetic oligonucleotide
  Antisense Strand to SEQ ID NO: 468649
acugacaccaaauuuaaau

SEQ ID NO: 468651 - RNA, 19 nt, Artificial Sequence
  Description of Artificial Sequence: Synthetic oligonucleotide
  Sense strand starting at position 3949 of SEQ ID NO: 317154
acagcagaaugcuuacagu

SEQ ID NO: 468652 - RNA, 19 nt, Artificial Sequence
  Description of Artificial Sequence: Synthetic oligonucleotide
  Antisense Strand to SEQ ID NO: 468651
acuguaagcauucugcugu

SEQ ID NO: 468653 - RNA, 19 nt, Artificial Sequence
  Description of Artificial Sequence: Synthetic oligonucleotide
  Sense strand starting at position 167 of SEQ ID NO: 317155
cccuaauacggccaucaaa

SEQ ID NO: 468654 - RNA, 19 nt, Artificial Sequence
  Description of Artificial Sequence: Synthetic oligonucleotide
  Antisense Strand to SEQ ID NO: 468653
uuugauggccguauuaggg

SEQ ID NO: 468655 - RNA, 19 nt, Artificial Sequence
  Description of Artificial Sequence: Synthetic oligonucleotide
  Sense strand starting at position 316 of SEQ ID NO: 317155
uccggagacuuggaagaaa

SEQ ID NO: 468656 - RNA, 19 nt, Artificial Sequence
  Description of Artificial Sequence: Synthetic oligonucleotide
  Antisense Strand to SEQ ID NO: 468655
uuucuuccaagucuccgga

SEQ ID NO: 468657 - RNA, 19 nt, Artificial Sequence
  Description of Artificial Sequence: Synthetic oligonucleotide
  Sense strand starting at position 327 of SEQ ID NO: 317155
ggaagaaacuucggagacu

SEQ ID NO: 468658 - RNA, 19 nt, Artificial Sequence
  Description of Artificial Sequence: Synthetic oligonucleotide
  Antisense Strand to SEQ ID NO: 468657
agucuccgaaguuucuucc

SEQ ID NO: 468659 - RNA, 19 nt, Artificial Sequence
  Description of Artificial Sequence: Synthetic oligonucleotide
  Sense strand starting at position 356 of SEQ ID NO: 317155
cgaagaacugagcgagaaa

SEQ ID NO: 468660 - RNA, 19 nt, Artificial Sequence
  Description of Artificial Sequence: Synthetic oligonucleotide
  Antisense Strand to SEQ ID NO: 468659
uuucucgcucaguucuucg

SEQ ID NO: 468661 - RNA, 19 nt, Artificial Sequence
  Description of Artificial Sequence: Synthetic oligonucleotide
  Sense strand starting at position 446 of SEQ ID NO: 317155
cgaagacuagcgugaucuu

SEQ ID NO: 468662 - RNA, 19 nt, Artificial Sequence
  Description of Artificial Sequence: Synthetic oligonucleotide
  Antisense Strand to SEQ ID NO: 468661
aagaucacgcuagucuucg

SEQ ID NO: 468663 - RNA, 19 nt, Artificial Sequence
  Description of Artificial Sequence: Synthetic oligonucleotide
  Sense strand starting at position 472 of SEQ ID NO: 317155
cucaguuugccucaagcaa

SEQ ID NO: 468664 - RNA, 19 nt, Artificial Sequence
  Description of Artificial Sequence: Synthetic oligonucleotide
  Antisense Strand to SEQ ID NO: 468663
uugcuugaggcaaacugag

SEQ ID NO: 468665 - RNA, 19 nt, Artificial Sequence
  Description of Artificial Sequence: Synthetic oligonucleotide
  Sense strand starting at position 490 of SEQ ID NO: 317155
aggucuuugcgggauggua

SEQ ID NO: 468666 - RNA, 19 nt, Artificial Sequence
  Description of Artificial Sequence: Synthetic oligonucleotide
  Antisense Strand to SEQ ID NO: 468665
uaccaucccgcaaagaccu

SEQ ID NO: 468667 - RNA, 19 nt, Artificial Sequence
  Description of Artificial Sequence: Synthetic oligonucleotide
  Sense strand starting at position 492 of SEQ ID NO: 317155
gucuuugcgggaugguaca

SEQ ID NO: 468668 - RNA, 19 nt, Artificial Sequence
  Description of Artificial Sequence: Synthetic oligonucleotide
  Antisense Strand to SEQ ID NO: 468667
uguaccaucccgcaaagac

SEQ ID NO: 468669 - RNA, 19 nt, Artificial Sequence
  Description of Artificial Sequence: Synthetic oligonucleotide
  Sense strand starting at position 781 of SEQ ID NO: 317155
cggagacgugcaugcaaau

SEQ ID NO: 468670 - RNA, 19 nt, Artificial Sequence
  Description of Artificial Sequence: Synthetic oligonucleotide
  Antisense Strand to SEQ ID NO: 468669
auuugcaugcacgucuccg

SEQ ID NO: 468671 - RNA, 19 nt, Artificial Sequence
  Description of Artificial Sequence: Synthetic oligonucleotide
  Sense strand starting at position 841 of SEQ ID NO: 317155
ccucacugcuucgaagaga

SEQ ID NO: 468672 - RNA, 19 nt, Artificial Sequence
  Description of Artificial Sequence: Synthetic oligonucleotide
  Antisense Strand to SEQ ID NO: 468671
ucucuucgaagcagugagg

SEQ ID NO: 468673 - RNA, 19 nt, Artificial Sequence
  Description of Artificial Sequence: Synthetic oligonucleotide
  Sense strand starting at position 1190 of SEQ ID NO: 317155
gugauuccggcgcugucaa

SEQ ID NO: 468674 - RNA, 19 nt, Artificial Sequence
  Description of Artificial Sequence: Synthetic oligonucleotide
  Antisense Strand to SEQ ID NO: 468673
uugacagcgccggaaucac

SEQ ID NO: 468675 - RNA, 19 nt, Artificial Sequence
  Description of Artificial Sequence: Synthetic oligonucleotide
  Sense strand starting at position 1191 of SEQ ID NO: 317155
ugauuccggcgcugucaaa

SEQ ID NO: 468676 - RNA, 19 nt, Artificial Sequence
  Description of Artificial Sequence: Synthetic oligonucleotide
  Antisense Strand to SEQ ID NO: 468675
uuugacagcgccggaauca

SEQ ID NO: 468677 - RNA, 19 nt, Artificial Sequence
  Description of Artificial Sequence: Synthetic oligonucleotide
  Sense strand starting at position 2150 of SEQ ID NO: 317155
gggaguugcucgccuagcu

SEQ ID NO: 468678 - RNA, 19 nt, Artificial Sequence
  Description of Artificial Sequence: Synthetic oligonucleotide
  Antisense Strand to SEQ ID NO: 468677
agcuaggcgagcaacuccc

SEQ ID NO: 468679 - RNA, 19 nt, Artificial Sequence
  Description of Artificial Sequence: Synthetic oligonucleotide
  Sense strand starting at position 2204 of SEQ ID NO: 317155
gcggcagcucgccgagaaa

SEQ ID NO: 468680 - RNA, 19 nt, Artificial Sequence
  Description of Artificial Sequence: Synthetic oligonucleotide
  Antisense Strand to SEQ ID NO: 468679
uuucucggcgagcugccgc

SEQ ID NO: 468681 - RNA, 19 nt, Artificial Sequence
  Description of Artificial Sequence: Synthetic oligonucleotide
  Sense strand starting at position 2259 of SEQ ID NO: 317155
ccgcgaguccuagauucga

SEQ ID NO: 468682 - RNA, 19 nt, Artificial Sequence
  Description of Artificial Sequence: Synthetic oligonucleotide
  Antisense Strand to SEQ ID NO: 468681
ucgaaucuaggacucgcgg

SEQ ID NO: 468683 - RNA, 19 nt, Artificial Sequence
  Description of Artificial Sequence: Synthetic oligonucleotide
  Sense strand starting at position 2270 of SEQ ID NO: 317155
agauucgaucccuggcuau

SEQ ID NO: 468684 - RNA, 19 nt, Artificial Sequence
  Description of Artificial Sequence: Synthetic oligonucleotide
  Antisense Strand to SEQ ID NO: 468683
auagccagggaucgaaucu

SEQ ID NO: 468685 - RNA, 19 nt, Artificial Sequence
  Description of Artificial Sequence: Synthetic oligonucleotide
  Sense strand starting at position 2379 of SEQ ID NO: 317155
uccggagaguuuguagcaa

SEQ ID NO: 468686 - RNA, 19 nt, Artificial Sequence
  Description of Artificial Sequence: Synthetic oligonucleotide
  Antisense Strand to SEQ ID NO: 468685
uugcuacaaacucuccgga

SEQ ID NO: 468687 - RNA, 19 nt, Artificial Sequence
  Description of Artificial Sequence: Synthetic oligonucleotide
  Sense strand starting at position 2381 of SEQ ID NO: 317155
cggagaguuuguagcaaag

SEQ ID NO: 468688 - RNA, 19 nt, Artificial Sequence
  Description of Artificial Sequence: Synthetic oligonucleotide
  Antisense Strand to SEQ ID NO: 468687
cuuugcuacaaacucuccg

SEQ ID NO: 468689 - RNA, 19 nt, Artificial Sequence
  Description of Artificial Sequence: Synthetic oligonucleotide
  Sense strand starting at position 2383 of SEQ ID NO: 317155
gagaguuuguagcaaaguu

SEQ ID NO: 468690 - RNA, 19 nt, Artificial Sequence
  Description of Artificial Sequence: Synthetic oligonucleotide
  Antisense Strand to SEQ ID NO: 468689
aacuuugcuacaaacucuc

SEQ ID NO: 468691 - RNA, 19 nt, Artificial Sequence
  Description of Artificial Sequence: Synthetic oligonucleotide
  Sense strand starting at position 2393 of SEQ ID NO: 317155
agcaaaguuaguugccgaa

SEQ ID NO: 468692 - RNA, 19 nt, Artificial Sequence
  Description of Artificial Sequence: Synthetic oligonucleotide
  Antisense Strand to SEQ ID NO: 468691
uucggcaacuaacuuugcu

SEQ ID NO: 468693 - RNA, 19 nt, Artificial Sequence
  Description of Artificial Sequence: Synthetic oligonucleotide
  Sense strand starting at position 2395 of SEQ ID NO: 317155
caaaguuaguugccgaauc

SEQ ID NO: 468694 - RNA, 19 nt, Artificial Sequence
  Description of Artificial Sequence: Synthetic oligonucleotide
  Antisense Strand to SEQ ID NO: 468693
gauucggcaacuaacuuug

SEQ ID NO: 468695 - RNA, 19 nt, Artificial Sequence
  Description of Artificial Sequence: Synthetic oligonucleotide
  Sense strand starting at position 2495 of SEQ ID NO: 317155
cucugaucuuacugggaug

SEQ ID NO: 468696 - RNA, 19 nt, Artificial Sequence
  Description of Artificial Sequence: Synthetic oligonucleotide
  Antisense Strand to SEQ ID NO: 468695
caucccaguaagaucagag

SEQ ID NO: 468697 - RNA, 19 nt, Artificial Sequence
  Description of Artificial Sequence: Synthetic oligonucleotide
  Sense strand starting at position 2719 of SEQ ID NO: 317155
gggcacuggaguugcaaua

SEQ ID NO: 468698 - RNA, 19 nt, Artificial Sequence
  Description of Artificial Sequence: Synthetic oligonucleotide
  Antisense Strand to SEQ ID NO: 468697
uauugcaacuccagugccc

SEQ ID NO: 468699 - RNA, 19 nt, Artificial Sequence
  Description of Artificial Sequence: Synthetic oligonucleotide
  Sense strand starting at position 2935 of SEQ ID NO: 317155
aggcuucggucuucuaagu

SEQ ID NO: 468700 - RNA, 19 nt, Artificial Sequence
  Description of Artificial Sequence: Synthetic oligonucleotide
  Antisense Strand to SEQ ID NO: 468699
acuuagaagaccgaagccu

SEQ ID NO: 468701 - RNA, 19 nt, Artificial Sequence
  Description of Artificial Sequence: Synthetic oligonucleotide
  Sense strand starting at position 3037 of SEQ ID NO: 317155
agaugaagcucucaaaggu

SEQ ID NO: 468702 - RNA, 19 nt, Artificial Sequence
  Description of Artificial Sequence: Synthetic oligonucleotide
  Antisense Strand to SEQ ID NO: 468701
accuuugagagcuucaucu

SEQ ID NO: 468703 - RNA, 19 nt, Artificial Sequence
  Description of Artificial Sequence: Synthetic oligonucleotide
  Sense strand starting at position 3617 of SEQ ID NO: 317155
caagucuggucccuuguaa

SEQ ID NO: 468704 - RNA, 19 nt, Artificial Sequence
  Description of Artificial Sequence: Synthetic oligonucleotide
  Antisense Strand to SEQ ID NO: 468703
uuacaagggaccagacuug

SEQ ID NO: 468705 - RNA, 19 nt, Artificial Sequence
  Description of Artificial Sequence: Synthetic oligonucleotide
  Sense strand starting at position 3713 of SEQ ID NO: 317155
ugggcucucccagaauugu

SEQ ID NO: 468706 - RNA, 19 nt, Artificial Sequence
  Description of Artificial Sequence: Synthetic oligonucleotide
  Antisense Strand to SEQ ID NO: 468705
acaauucugggagagccca

SEQ ID NO: 468707 - RNA, 19 nt, Artificial Sequence
  Description of Artificial Sequence: Synthetic oligonucleotide
  Sense strand starting at position 3719 of SEQ ID NO: 317155
cucccagaauuguguaaau

SEQ ID NO: 468708 - RNA, 19 nt, Artificial Sequence
  Description of Artificial Sequence: Synthetic oligonucleotide
  Antisense Strand to SEQ ID NO: 468707
auuuacacaauucugggag

SEQ ID NO: 468709 - RNA, 19 nt, Artificial Sequence
  Description of Artificial Sequence: Synthetic oligonucleotide
  Sense strand starting at position 3721 of SEQ ID NO: 317155
cccagaauuguguaaauua

SEQ ID NO: 468710 - RNA, 19 nt, Artificial Sequence
  Description of Artificial Sequence: Synthetic oligonucleotide
  Antisense Strand to SEQ ID NO: 468709
uaauuuacacaauucuggg

SEQ ID NO: 468711 - RNA, 19 nt, Artificial Sequence
  Description of Artificial Sequence: Synthetic oligonucleotide
  Sense strand starting at position 3750 of SEQ ID NO: 317155
ccuuaagccuuauagaugu

SEQ ID NO: 468712 - RNA, 19 nt, Artificial Sequence
  Description of Artificial Sequence: Synthetic oligonucleotide
  Antisense Strand to SEQ ID NO: 468711
acaucuauaaggcuuaagg

SEQ ID NO: 468713 - RNA, 19 nt, Artificial Sequence
  Description of Artificial Sequence: Synthetic oligonucleotide
  Sense strand starting at position 3786 of SEQ ID NO: 317155
gccaaaggaucguccucuu

SEQ ID NO: 468714 - RNA, 19 nt, Artificial Sequence
  Description of Artificial Sequence: Synthetic oligonucleotide
  Antisense Strand to SEQ ID NO: 468713
aagaggacgauccuuuggc

SEQ ID NO: 468715 - RNA, 19 nt, Artificial Sequence
  Description of Artificial Sequence: Synthetic oligonucleotide
  Sense strand starting at position 3789 of SEQ ID NO: 317155
aaaggaucguccucuucca

SEQ ID NO: 468716 - RNA, 19 nt, Artificial Sequence
  Description of Artificial Sequence: Synthetic oligonucleotide
  Antisense Strand to SEQ ID NO: 468715
uggaagaggacgauccuuu

SEQ ID NO: 468717 - RNA, 19 nt, Artificial Sequence
  Description of Artificial Sequence: Synthetic oligonucleotide
  Sense strand starting at position 3921 of SEQ ID NO: 317155
guuacucaauucgcugaaa

SEQ ID NO: 468718 - RNA, 19 nt, Artificial Sequence
  Description of Artificial Sequence: Synthetic oligonucleotide
  Antisense Strand to SEQ ID NO: 468717
uuucagcgaauugaguaac

SEQ ID NO: 468719 - RNA, 19 nt, Artificial Sequence
  Description of Artificial Sequence: Synthetic oligonucleotide
  Sense strand starting at position 3943 of SEQ ID NO: 317155
gaauccguuuaauaggaau

SEQ ID NO: 468720 - RNA, 19 nt, Artificial Sequence
  Description of Artificial Sequence: Synthetic oligonucleotide
  Antisense Strand to SEQ ID NO: 468719
auuccuauuaaacggauuc

SEQ ID NO: 468721 - RNA, 19 nt, Artificial Sequence
  Description of Artificial Sequence: Synthetic oligonucleotide
  Sense strand starting at position 3946 of SEQ ID NO: 317155
uccguuuaauaggaauauu

SEQ ID NO: 468722 - RNA, 19 nt, Artificial Sequence
  Description of Artificial Sequence: Synthetic oligonucleotide
  Antisense Strand to SEQ ID NO: 468721
aauauuccuauuaaacgga

SEQ ID NO: 468723 - RNA, 19 nt, Artificial Sequence
  Description of Artificial Sequence: Synthetic oligonucleotide
  Sense strand starting at position 3960 of SEQ ID NO: 317155
auauuuaucugucagauga

SEQ ID NO: 468724 - RNA, 19 nt, Artificial Sequence
  Description of Artificial Sequence: Synthetic oligonucleotide
  Antisense Strand to SEQ ID NO: 468723
ucaucugacagauaaauau

SEQ ID NO: 468725 - RNA, 19 nt, Artificial Sequence
  Description of Artificial Sequence: Synthetic oligonucleotide
  Sense strand starting at position 3962 of SEQ ID NO: 317155
auuuaucugucagaugaug

SEQ ID NO: 468726 - RNA, 19 nt, Artificial Sequence
  Description of Artificial Sequence: Synthetic oligonucleotide
  Antisense Strand to SEQ ID NO: 468725
caucaucugacagauaaau

SEQ ID NO: 468727 - RNA, 19 nt, Artificial Sequence
  Description of Artificial Sequence: Synthetic oligonucleotide
  Sense strand starting at position 3973 of SEQ ID NO: 317155
agaugauguuuauaccuga

SEQ ID NO: 468728 - RNA, 19 nt, Artificial Sequence
  Description of Artificial Sequence: Synthetic oligonucleotide
  Antisense Strand to SEQ ID NO: 468727
ucagguauaaacaucaucu

SEQ ID NO: 468729 - RNA, 19 nt, Artificial Sequence
  Description of Artificial Sequence: Synthetic oligonucleotide
  Sense strand starting at position 3976 of SEQ ID NO: 317155
ugauguuuauaccugagaa

SEQ ID NO: 468730 - RNA, 19 nt, Artificial Sequence
  Description of Artificial Sequence: Synthetic oligonucleotide
  Antisense Strand to SEQ ID NO: 468729
uucucagguauaaacauca

SEQ ID NO: 468731 - RNA, 19 nt, Artificial Sequence
  Description of Artificial Sequence: Synthetic oligonucleotide
  Sense strand starting at position 3980 of SEQ ID NO: 317155
guuuauaccugagaacagu

SEQ ID NO: 468732 - RNA, 19 nt, Artificial Sequence
  Description of Artificial Sequence: Synthetic oligonucleotide
  Antisense Strand to SEQ ID NO: 468731
acuguucucagguauaaac

SEQ ID NO: 468733 - RNA, 19 nt, Artificial Sequence
  Description of Artificial Sequence: Synthetic oligonucleotide
  Sense strand starting at position 112 of SEQ ID NO: 317156
uguuuaugagacgauuggu

SEQ ID NO: 468734 - RNA, 19 nt, Artificial Sequence
  Description of Artificial Sequence: Synthetic oligonucleotide
  Antisense Strand to SEQ ID NO: 468733
accaaucgucucauaaaca

SEQ ID NO: 468735 - RNA, 19 nt, Artificial Sequence
  Description of Artificial Sequence: Synthetic oligonucleotide
  Sense strand starting at position 115 of SEQ ID NO: 317156
uuaugagacgauugguaug

SEQ ID NO: 468736 - RNA, 19 nt, Artificial Sequence
  Description of Artificial Sequence: Synthetic oligonucleotide
  Antisense Strand to SEQ ID NO: 468735
cauaccaaucgucucauaa

SEQ ID NO: 468737 - RNA, 19 nt, Artificial Sequence
  Description of Artificial Sequence: Synthetic oligonucleotide
  Sense strand starting at position 125 of SEQ ID NO: 317156
auugguaugucagcagaua

SEQ ID NO: 468738 - RNA, 19 nt, Artificial Sequence
  Description of Artificial Sequence: Synthetic oligonucleotide
  Antisense Strand to SEQ ID NO: 468737
uaucugcugacauaccaau

SEQ ID NO: 468739 - RNA, 19 nt, Artificial Sequence
  Description of Artificial Sequence: Synthetic oligonucleotide
  Sense strand starting at position 126 of SEQ ID NO: 317156
uugguaugucagcagauau

SEQ ID NO: 468740 - RNA, 19 nt, Artificial Sequence
  Description of Artificial Sequence: Synthetic oligonucleotide
  Antisense Strand to SEQ ID NO: 468739
auaucugcugacauaccaa

SEQ ID NO: 468741 - RNA, 19 nt, Artificial Sequence
  Description of Artificial Sequence: Synthetic oligonucleotide
  Sense strand starting at position 218 of SEQ ID NO: 317156
ucaacagcagucugaaauu

SEQ ID NO: 468742 - RNA, 19 nt, Artificial Sequence
  Description of Artificial Sequence: Synthetic oligonucleotide
  Antisense Strand to SEQ ID NO: 468741
aauuucagacugcuguuga

SEQ ID NO: 468743 - RNA, 19 nt, Artificial Sequence
  Description of Artificial Sequence: Synthetic oligonucleotide
  Sense strand starting at position 250 of SEQ ID NO: 317156
caaggcaguuaucucugau

SEQ ID NO: 468744 - RNA, 19 nt, Artificial Sequence
  Description of Artificial Sequence: Synthetic oligonucleotide
  Antisense Strand to SEQ ID NO: 468743
aucagagauaacugccuug

SEQ ID NO: 468745 - RNA, 19 nt, Artificial Sequence
  Description of Artificial Sequence: Synthetic oligonucleotide
  Sense strand starting at position 483 of SEQ ID NO: 317156
uggcuauguggagaagguu

SEQ ID NO: 468746 - RNA, 19 nt, Artificial Sequence
  Description of Artificial Sequence: Synthetic oligonucleotide
  Antisense Strand to SEQ ID NO: 468745
aaccuucuccacauagcca

SEQ ID NO: 468747 - RNA, 19 nt, Artificial Sequence
  Description of Artificial Sequence: Synthetic oligonucleotide
  Sense strand starting at position 607 of SEQ ID NO: 317156
ccuccaaugccucaggaaa

SEQ ID NO: 468748 - RNA, 19 nt, Artificial Sequence
  Description of Artificial Sequence: Synthetic oligonucleotide
  Antisense Strand to SEQ ID NO: 468747
uuuccugaggcauuggagg

SEQ ID NO: 468749 - RNA, 19 nt, Artificial Sequence
  Description of Artificial Sequence: Synthetic oligonucleotide
  Sense strand starting at position 706 of SEQ ID NO: 317156
cuaauugagggcuggacua

SEQ ID NO: 468750 - RNA, 19 nt, Artificial Sequence
  Description of Artificial Sequence: Synthetic oligonucleotide
  Antisense Strand to SEQ ID NO: 468749
uaguccagcccucaauuag

SEQ ID NO: 468751 - RNA, 19 nt, Artificial Sequence
  Description of Artificial Sequence: Synthetic oligonucleotide
  Sense strand starting at position 757 of SEQ ID NO: 317156
cguucugaacaaugacaca

SEQ ID NO: 468752 - RNA, 19 nt, Artificial Sequence
  Description of Artificial Sequence: Synthetic oligonucleotide
  Antisense Strand to SEQ ID NO: 468751
ugugucauuguucagaacg

SEQ ID NO: 468753 - RNA, 19 nt, Artificial Sequence
  Description of Artificial Sequence: Synthetic oligonucleotide
  Sense strand starting at position 931 of SEQ ID NO: 317156
agcuguaacccuuagagaa

SEQ ID NO: 468754 - RNA, 19 nt, Artificial Sequence
  Description of Artificial Sequence: Synthetic oligonucleotide
  Antisense Strand to SEQ ID NO: 468753
uucucuaaggguuacagcu

SEQ ID NO: 468755 - RNA, 19 nt, Artificial Sequence
  Description of Artificial Sequence: Synthetic oligonucleotide
  Sense strand starting at position 1026 of SEQ ID NO: 317156
gaccuugcguuuccuauuu

SEQ ID NO: 468756 - RNA, 19 nt, Artificial Sequence
  Description of Artificial Sequence: Synthetic oligonucleotide
  Antisense Strand to SEQ ID NO: 468755
aaauaggaaacgcaagguc

SEQ ID NO: 468757 - RNA, 19 nt, Artificial Sequence
  Description of Artificial Sequence: Synthetic oligonucleotide
  Sense strand starting at position 1063 of SEQ ID NO: 317156
ucagcaugucccuauuguu

SEQ ID NO: 468758 - RNA, 19 nt, Artificial Sequence
  Description of Artificial Sequence: Synthetic oligonucleotide
  Antisense Strand to SEQ ID NO: 468757
aacaauagggacaugcuga

SEQ ID NO: 468759 - RNA, 19 nt, Artificial Sequence
  Description of Artificial Sequence: Synthetic oligonucleotide
  Sense strand starting at position 1068 of SEQ ID NO: 317156
augucccuauuguuaucaa

SEQ ID NO: 468760 - RNA, 19 nt, Artificial Sequence
  Description of Artificial Sequence: Synthetic oligonucleotide
  Antisense Strand to SEQ ID NO: 468759
uugauaacaauagggacau

SEQ ID NO: 468761 - RNA, 19 nt, Artificial Sequence
  Description of Artificial Sequence: Synthetic oligonucleotide
  Sense strand starting at position 1152 of SEQ ID NO: 317156
cuccgacuuuaugugauga

SEQ ID NO: 468762 - RNA, 19 nt, Artificial Sequence
  Description of Artificial Sequence: Synthetic oligonucleotide
  Antisense Strand to SEQ ID NO: 468761
ucaucacauaaagucggag

SEQ ID NO: 468763 - RNA, 19 nt, Artificial Sequence
  Description of Artificial Sequence: Synthetic oligonucleotide
  Sense strand starting at position 1168 of SEQ ID NO: 317156
ugagaaguucucuauuccu

SEQ ID NO: 468764 - RNA, 19 nt, Artificial Sequence
  Description of Artificial Sequence: Synthetic oligonucleotide
  Antisense Strand to SEQ ID NO: 468763
aggaauagagaacuucuca

SEQ ID NO: 468765 - RNA, 19 nt, Artificial Sequence
  Description of Artificial Sequence: Synthetic oligonucleotide
  Sense strand starting at position 1275 of SEQ ID NO: 317156
agguuuaucucagcauaac

SEQ ID NO: 468766 - RNA, 19 nt, Artificial Sequence
  Description of Artificial Sequence: Synthetic oligonucleotide
  Antisense Strand to SEQ ID NO: 468765
guuaugcugagauaaaccu

SEQ ID NO: 468767 - RNA, 19 nt, Artificial Sequence
  Description of Artificial Sequence: Synthetic oligonucleotide
  Sense strand starting at position 1276 of SEQ ID NO: 317156
gguuuaucucagcauaaca

SEQ ID NO: 468768 - RNA, 19 nt, Artificial Sequence
  Description of Artificial Sequence: Synthetic oligonucleotide
  Antisense Strand to SEQ ID NO: 468767
uguuaugcugagauaaacc

SEQ ID NO: 468769 - RNA, 19 nt, Artificial Sequence
  Description of Artificial Sequence: Synthetic oligonucleotide
  Sense strand starting at position 1355 of SEQ ID NO: 317156
guaucaaacucacucuugu

SEQ ID NO: 468770 - RNA, 19 nt, Artificial Sequence
  Description of Artificial Sequence: Synthetic oligonucleotide
  Antisense Strand to SEQ ID NO: 468769
acaagagugaguuugauac

SEQ ID NO: 468771 - RNA, 19 nt, Artificial Sequence
  Description of Artificial Sequence: Synthetic oligonucleotide
  Sense strand starting at position 2170 of SEQ ID NO: 317156
gaguuucugacccgaguac

SEQ ID NO: 468772 - RNA, 19 nt, Artificial Sequence
  Description of Artificial Sequence: Synthetic oligonucleotide
  Antisense Strand to SEQ ID NO: 468771
guacucgggucagaaacuc

SEQ ID NO: 468773 - RNA, 19 nt, Artificial Sequence
  Description of Artificial Sequence: Synthetic oligonucleotide
  Sense strand starting at position 2453 of SEQ ID NO: 317156
gcgcaaugccuggugcaua

SEQ ID NO: 468774 - RNA, 19 nt, Artificial Sequence
  Description of Artificial Sequence: Synthetic oligonucleotide
  Antisense Strand to SEQ ID NO: 468773
uaugcaccaggcauugcgc

SEQ ID NO: 468775 - RNA, 19 nt, Artificial Sequence
  Description of Artificial Sequence: Synthetic oligonucleotide
  Sense strand starting at position 2490 of SEQ ID NO: 317156
aacugugauguugaugcua

SEQ ID NO: 468776 - RNA, 19 nt, Artificial Sequence
  Description of Artificial Sequence: Synthetic oligonucleotide
  Antisense Strand to SEQ ID NO: 468775
uagcaucaacaucacaguu

SEQ ID NO: 468777 - RNA, 19 nt, Artificial Sequence
  Description of Artificial Sequence: Synthetic oligonucleotide
  Sense strand starting at position 2683 of SEQ ID NO: 317156
cuaugcauuucugcugcua

SEQ ID NO: 468778 - RNA, 19 nt, Artificial Sequence
  Description of Artificial Sequence: Synthetic oligonucleotide
  Antisense Strand to SEQ ID NO: 468777
uagcagcagaaaugcauag

SEQ ID NO: 468779 - RNA, 19 nt, Artificial Sequence
  Description of Artificial Sequence: Synthetic oligonucleotide
  Sense strand starting at position 2910 of SEQ ID NO: 317156
agguuuguuccauagcuaa

SEQ ID NO: 468780 - RNA, 19 nt, Artificial Sequence
  Description of Artificial Sequence: Synthetic oligonucleotide
  Antisense Strand to SEQ ID NO: 468779
uuagcuauggaacaaaccu

SEQ ID NO: 468781 - RNA, 19 nt, Artificial Sequence
  Description of Artificial Sequence: Synthetic oligonucleotide
  Sense strand starting at position 2961 of SEQ ID NO: 317156
acccgucagcuaggaauua

SEQ ID NO: 468782 - RNA, 19 nt, Artificial Sequence
  Description of Artificial Sequence: Synthetic oligonucleotide
  Antisense Strand to SEQ ID NO: 468781
uaauuccuagcugacgggu

SEQ ID NO: 468783 - RNA, 19 nt, Artificial Sequence
  Description of Artificial Sequence: Synthetic oligonucleotide
  Sense strand starting at position 3215 of SEQ ID NO: 317156
auggcaucucugggaugua

SEQ ID NO: 468784 - RNA, 19 nt, Artificial Sequence
  Description of Artificial Sequence: Synthetic oligonucleotide
  Antisense Strand to SEQ ID NO: 468783
uacaucccagagaugccau

SEQ ID NO: 468785 - RNA, 19 nt, Artificial Sequence
  Description of Artificial Sequence: Synthetic oligonucleotide
  Sense strand starting at position 3284 of SEQ ID NO: 317156
caaggcugucagcauguaa

SEQ ID NO: 468786 - RNA, 19 nt, Artificial Sequence
  Description of Artificial Sequence: Synthetic oligonucleotide
  Antisense Strand to SEQ ID NO: 468785
uuacaugcugacagccuug

SEQ ID NO: 468787 - RNA, 19 nt, Artificial Sequence
  Description of Artificial Sequence: Synthetic oligonucleotide
  Sense strand starting at position 3288 of SEQ ID NO: 317156
gcugucagcauguaaggaa

SEQ ID NO: 468788 - RNA, 19 nt, Artificial Sequence
  Description of Artificial Sequence: Synthetic oligonucleotide
  Antisense Strand to SEQ ID NO: 468787
uuccuuacaugcugacagc

SEQ ID NO: 468789 - RNA, 19 nt, Artificial Sequence
  Description of Artificial Sequence: Synthetic oligonucleotide
  Sense strand starting at position 3418 of SEQ ID NO: 317156
aagauuuagugacaguuac

SEQ ID NO: 468790 - RNA, 19 nt, Artificial Sequence
  Description of Artificial Sequence: Synthetic oligonucleotide
  Antisense Strand to SEQ ID NO: 468789
guaacugucacuaaaucuu

SEQ ID NO: 468791 - RNA, 19 nt, Artificial Sequence
  Description of Artificial Sequence: Synthetic oligonucleotide
  Sense strand starting at position 3432 of SEQ ID NO: 317156
guuacaauuugguaaagga

SEQ ID NO: 468792 - RNA, 19 nt, Artificial Sequence
  Description of Artificial Sequence: Synthetic oligonucleotide
  Antisense Strand to SEQ ID NO: 468791
uccuuuaccaaauuguaac

SEQ ID NO: 468793 - RNA, 19 nt, Artificial Sequence
  Description of Artificial Sequence: Synthetic oligonucleotide
  Sense strand starting at position 3472 of SEQ ID NO: 317156
gcugaauuacaaggcagau

SEQ ID NO: 468794 - RNA, 19 nt, Artificial Sequence
  Description of Artificial Sequence: Synthetic oligonucleotide
  Antisense Strand to SEQ ID NO: 468793
aucugccuuguaauucagc

SEQ ID NO: 468795 - RNA, 19 nt, Artificial Sequence
  Description of Artificial Sequence: Synthetic oligonucleotide
  Sense strand starting at position 3492 of SEQ ID NO: 317156
gggauagugcucugucaga

SEQ ID NO: 468796 - RNA, 19 nt, Artificial Sequence
  Description of Artificial Sequence: Synthetic oligonucleotide
  Antisense Strand to SEQ ID NO: 468795
ucugacagagcacuauccc

SEQ ID NO: 468797 - RNA, 19 nt, Artificial Sequence
  Description of Artificial Sequence: Synthetic oligonucleotide
  Sense strand starting at position 3666 of SEQ ID NO: 317156
agguucuuguacuuugauu

SEQ ID NO: 468798 - RNA, 19 nt, Artificial Sequence
  Description of Artificial Sequence: Synthetic oligonucleotide
  Antisense Strand to SEQ ID NO: 468797
aaucaaaguacaagaaccu

SEQ ID NO: 468799 - RNA, 19 nt, Artificial Sequence
  Description of Artificial Sequence: Synthetic oligonucleotide
  Sense strand starting at position 3668 of SEQ ID NO: 317156
guucuuguacuuugauuua

SEQ ID NO: 468800 - RNA, 19 nt, Artificial Sequence
  Description of Artificial Sequence: Synthetic oligonucleotide
  Antisense Strand to SEQ ID NO: 468799
uaaaucaaaguacaagaac

SEQ ID NO: 468801 - RNA, 19 nt, Artificial Sequence
  Description of Artificial Sequence: Synthetic oligonucleotide
  Sense strand starting at position 3845 of SEQ ID NO: 317156
cagugugagagugaaaugu

SEQ ID NO: 468802 - RNA, 19 nt, Artificial Sequence
  Description of Artificial Sequence: Synthetic oligonucleotide
  Antisense Strand to SEQ ID NO: 468801
acauuucacucucacacug

SEQ ID NO: 468803 - RNA, 19 nt, Artificial Sequence
  Description of Artificial Sequence: Synthetic oligonucleotide
  Sense strand starting at position 3847 of SEQ ID NO: 317156
gugugagagugaaauguca

SEQ ID NO: 468804 - RNA, 19 nt, Artificial Sequence
  Description of Artificial Sequence: Synthetic oligonucleotide
  Antisense Strand to SEQ ID NO: 468803
ugacauuucacucucacac

SEQ ID NO: 468805 - RNA, 19 nt, Artificial Sequence
  Description of Artificial Sequence: Synthetic oligonucleotide
  Sense strand starting at position 3854 of SEQ ID NO: 317156
agugaaaugucagccagag

SEQ ID NO: 468806 - RNA, 19 nt, Artificial Sequence
  Description of Artificial Sequence: Synthetic oligonucleotide
  Antisense Strand to SEQ ID NO: 468805
cucuggcugacauuucacu

SEQ ID NO: 468807 - RNA, 19 nt, Artificial Sequence
  Description of Artificial Sequence: Synthetic oligonucleotide
  Sense strand starting at position 3856 of SEQ ID NO: 317156
ugaaaugucagccagagca

SEQ ID NO: 468808 - RNA, 19 nt, Artificial Sequence
  Description of Artificial Sequence: Synthetic oligonucleotide
  Antisense Strand to SEQ ID NO: 468807
ugcucuggcugacauuuca

SEQ ID NO: 468809 - RNA, 19 nt, Artificial Sequence
  Description of Artificial Sequence: Synthetic oligonucleotide
  Sense strand starting at position 3858 of SEQ ID NO: 317156
aaaugucagccagagcaga

SEQ ID NO: 468810 - RNA, 19 nt, Artificial Sequence
  Description of Artificial Sequence: Synthetic oligonucleotide
  Antisense Strand to SEQ ID NO: 468809
ucugcucuggcugacauuu

SEQ ID NO: 468811 - RNA, 19 nt, Artificial Sequence
  Description of Artificial Sequence: Synthetic oligonucleotide
  Sense strand starting at position 3976 of SEQ ID NO: 317156
gaaccaggcugcuuggaau

SEQ ID NO: 468812 - RNA, 19 nt, Artificial Sequence
  Description of Artificial Sequence: Synthetic oligonucleotide
  Antisense Strand to SEQ ID NO: 468811
auuccaagcagccugguuc

SEQ ID NO: 468813 - RNA, 19 nt, Artificial Sequence
  Description of Artificial Sequence: Synthetic oligonucleotide
  Sense strand starting at position 445 of SEQ ID NO: 317157
gcacacuuucuggaacaau

SEQ ID NO: 468814 - RNA, 19 nt, Artificial Sequence
  Description of Artificial Sequence: Synthetic oligonucleotide
  Antisense Strand to SEQ ID NO: 468813
auuguuccagaaagugugc

SEQ ID NO: 468815 - RNA, 19 nt, Artificial Sequence
  Description of Artificial Sequence: Synthetic oligonucleotide
  Sense strand starting at position 529 of SEQ ID NO: 317157
agugcuuagugacugggaa

SEQ ID NO: 468816 - RNA, 19 nt, Artificial Sequence
  Description of Artificial Sequence: Synthetic oligonucleotide
  Antisense Strand to SEQ ID NO: 468815
uucccagucacuaagcacu

SEQ ID NO: 468817 - RNA, 19 nt, Artificial Sequence
  Description of Artificial Sequence: Synthetic oligonucleotide
  Sense strand starting at position 531 of SEQ ID NO: 317157
ugcuuagugacugggaaca

SEQ ID NO: 468818 - RNA, 19 nt, Artificial Sequence
  Description of Artificial Sequence: Synthetic oligonucleotide
  Antisense Strand to SEQ ID NO: 468817
uguucccagucacuaagca

SEQ ID NO: 468819 - RNA, 19 nt, Artificial Sequence
  Description of Artificial Sequence: Synthetic oligonucleotide
  Sense strand starting at position 533 of SEQ ID NO: 317157
cuuagugacugggaacaga

SEQ ID NO: 468820 - RNA, 19 nt, Artificial Sequence
  Description of Artificial Sequence: Synthetic oligonucleotide
  Antisense Strand to SEQ ID NO: 468819
ucuguucccagucacuaag

SEQ ID NO: 468821 - RNA, 19 nt, Artificial Sequence
  Description of Artificial Sequence: Synthetic oligonucleotide
  Sense strand starting at position 549 of SEQ ID NO: 317157
agagacgugcuccauaaac

SEQ ID NO: 468822 - RNA, 19 nt, Artificial Sequence
  Description of Artificial Sequence: Synthetic oligonucleotide
  Antisense Strand to SEQ ID NO: 468821
guuuauggagcacgucucu

SEQ ID NO: 468823 - RNA, 19 nt, Artificial Sequence
  Description of Artificial Sequence: Synthetic oligonucleotide
  Sense strand starting at position 551 of SEQ ID NO: 317157
agacgugcuccauaaacac

SEQ ID NO: 468824 - RNA, 19 nt, Artificial Sequence
  Description of Artificial Sequence: Synthetic oligonucleotide
  Antisense Strand to SEQ ID NO: 468823
guguuuauggagcacgucu

SEQ ID NO: 468825 - RNA, 19 nt, Artificial Sequence
  Description of Artificial Sequence: Synthetic oligonucleotide
  Sense strand starting at position 845 of SEQ ID NO: 317157
acuccaggagcguguuaaa

SEQ ID NO: 468826 - RNA, 19 nt, Artificial Sequence
  Description of Artificial Sequence: Synthetic oligonucleotide
  Antisense Strand to SEQ ID NO: 468825
uuuaacacgcuccuggagu

SEQ ID NO: 468827 - RNA, 19 nt, Artificial Sequence
  Description of Artificial Sequence: Synthetic oligonucleotide
  Sense strand starting at position 854 of SEQ ID NO: 317157
gcguguuaaagagagugga

SEQ ID NO: 468828 - RNA, 19 nt, Artificial Sequence
  Description of Artificial Sequence: Synthetic oligonucleotide
  Antisense Strand to SEQ ID NO: 468827
uccacucucuuuaacacgc

SEQ ID NO: 468829 - RNA, 19 nt, Artificial Sequence
  Description of Artificial Sequence: Synthetic oligonucleotide
  Sense strand starting at position 1691 of SEQ ID NO: 317157
ggauguacuccgggaacag

SEQ ID NO: 468830 - RNA, 19 nt, Artificial Sequence
  Description of Artificial Sequence: Synthetic oligonucleotide
  Antisense Strand to SEQ ID NO: 468829
cuguucccggaguacaucc

SEQ ID NO: 468831 - RNA, 19 nt, Artificial Sequence
  Description of Artificial Sequence: Synthetic oligonucleotide
  Sense strand starting at position 2043 of SEQ ID NO: 317157
gcgucuaaucccgucaguu

SEQ ID NO: 468832 - RNA, 19 nt, Artificial Sequence
  Description of Artificial Sequence: Synthetic oligonucleotide
  Antisense Strand to SEQ ID NO: 468831
aacugacgggauuagacgc

SEQ ID NO: 468833 - RNA, 19 nt, Artificial Sequence
  Description of Artificial Sequence: Synthetic oligonucleotide
  Sense strand starting at position 2044 of SEQ ID NO: 317157
cgucuaaucccgucaguuc

SEQ ID NO: 468834 - RNA, 19 nt, Artificial Sequence
  Description of Artificial Sequence: Synthetic oligonucleotide
  Antisense Strand to SEQ ID NO: 468833
gaacugacgggauuagacg

SEQ ID NO: 468835 - RNA, 19 nt, Artificial Sequence
  Description of Artificial Sequence: Synthetic oligonucleotide
  Sense strand starting at position 2045 of SEQ ID NO: 317157
gucuaaucccgucaguucu

SEQ ID NO: 468836 - RNA, 19 nt, Artificial Sequence
  Description of Artificial Sequence: Synthetic oligonucleotide
  Antisense Strand to SEQ ID NO: 468835
agaacugacgggauuagac

SEQ ID NO: 468837 - RNA, 19 nt, Artificial Sequence
  Description of Artificial Sequence: Synthetic oligonucleotide
  Sense strand starting at position 2055 of SEQ ID NO: 317157
gucaguucucgcgauuuaa

SEQ ID NO: 468838 - RNA, 19 nt, Artificial Sequence
  Description of Artificial Sequence: Synthetic oligonucleotide
  Antisense Strand to SEQ ID NO: 468837
uuaaaucgcgagaacugac

SEQ ID NO: 468839 - RNA, 19 nt, Artificial Sequence
  Description of Artificial Sequence: Synthetic oligonucleotide
  Sense strand starting at position 2067 of SEQ ID NO: 317157
gauuuaagcucugagacug

SEQ ID NO: 468840 - RNA, 19 nt, Artificial Sequence
  Description of Artificial Sequence: Synthetic oligonucleotide
  Antisense Strand to SEQ ID NO: 468839
cagucucagagcuuaaauc

SEQ ID NO: 468841 - RNA, 19 nt, Artificial Sequence
  Description of Artificial Sequence: Synthetic oligonucleotide
  Sense strand starting at position 2199 of SEQ ID NO: 317157
acaagccgcccuuaauaaa

SEQ ID NO: 468842 - RNA, 19 nt, Artificial Sequence
  Description of Artificial Sequence: Synthetic oligonucleotide
  Antisense Strand to SEQ ID NO: 468841
uuuauuaagggcggcuugu

SEQ ID NO: 468843 - RNA, 19 nt, Artificial Sequence
  Description of Artificial Sequence: Synthetic oligonucleotide
  Sense strand starting at position 2704 of SEQ ID NO: 317157
ggugacccuugccuguaau

SEQ ID NO: 468844 - RNA, 19 nt, Artificial Sequence
  Description of Artificial Sequence: Synthetic oligonucleotide
  Antisense Strand to SEQ ID NO: 468843
auuacaggcaagggucacc

SEQ ID NO: 468845 - RNA, 19 nt, Artificial Sequence
  Description of Artificial Sequence: Synthetic oligonucleotide
  Sense strand starting at position 2979 of SEQ ID NO: 317157
ggugucguuauuugugcaa

SEQ ID NO: 468846 - RNA, 19 nt, Artificial Sequence
  Description of Artificial Sequence: Synthetic oligonucleotide
  Antisense Strand to SEQ ID NO: 468845
uugcacaaauaacgacacc

SEQ ID NO: 468847 - RNA, 19 nt, Artificial Sequence
  Description of Artificial Sequence: Synthetic oligonucleotide
  Sense strand starting at position 2982 of SEQ ID NO: 317157
gucguuauuugugcaacaa

SEQ ID NO: 468848 - RNA, 19 nt, Artificial Sequence
  Description of Artificial Sequence: Synthetic oligonucleotide
  Antisense Strand to SEQ ID NO: 468847
uuguugcacaaauaacgac

SEQ ID NO: 468849 - RNA, 19 nt, Artificial Sequence
  Description of Artificial Sequence: Synthetic oligonucleotide
  Sense strand starting at position 2983 of SEQ ID NO: 317157
ucguuauuugugcaacaac

SEQ ID NO: 468850 - RNA, 19 nt, Artificial Sequence
  Description of Artificial Sequence: Synthetic oligonucleotide
  Antisense Strand to SEQ ID NO: 468849
guuguugcacaaauaacga

SEQ ID NO: 468851 - RNA, 19 nt, Artificial Sequence
  Description of Artificial Sequence: Synthetic oligonucleotide
  Sense strand starting at position 3095 of SEQ ID NO: 317157
acaauuuacgcgugugcaa

SEQ ID NO: 468852 - RNA, 19 nt, Artificial Sequence
  Description of Artificial Sequence: Synthetic oligonucleotide
  Antisense Strand to SEQ ID NO: 468851
uugcacacgcguaaauugu

SEQ ID NO: 468853 - RNA, 19 nt, Artificial Sequence
  Description of Artificial Sequence: Synthetic oligonucleotide
  Sense strand starting at position 3203 of SEQ ID NO: 317157
cgugguauucugggaacgu

SEQ ID NO: 468854 - RNA, 19 nt, Artificial Sequence
  Description of Artificial Sequence: Synthetic oligonucleotide
  Antisense Strand to SEQ ID NO: 468853
acguucccagaauaccacg

SEQ ID NO: 468855 - RNA, 19 nt, Artificial Sequence
  Description of Artificial Sequence: Synthetic oligonucleotide
  Sense strand starting at position 3229 of SEQ ID NO: 317157
ggaaguuacuucgucuuua

SEQ ID NO: 468856 - RNA, 19 nt, Artificial Sequence
  Description of Artificial Sequence: Synthetic oligonucleotide
  Antisense Strand to SEQ ID NO: 468855
uaaagacgaaguaacuucc

SEQ ID NO: 468857 - RNA, 19 nt, Artificial Sequence
  Description of Artificial Sequence: Synthetic oligonucleotide
  Sense strand starting at position 3230 of SEQ ID NO: 317157
gaaguuacuucgucuuuag

SEQ ID NO: 468858 - RNA, 19 nt, Artificial Sequence
  Description of Artificial Sequence: Synthetic oligonucleotide
  Antisense Strand to SEQ ID NO: 468857
cuaaagacgaaguaacuuc

SEQ ID NO: 468859 - RNA, 19 nt, Artificial Sequence
  Description of Artificial Sequence: Synthetic oligonucleotide
  Sense strand starting at position 3566 of SEQ ID NO: 317157
gcacuuucucguuccguua

SEQ ID NO: 468860 - RNA, 19 nt, Artificial Sequence
  Description of Artificial Sequence: Synthetic oligonucleotide
  Antisense Strand to SEQ ID NO: 468859
uaacggaacgagaaagugc

SEQ ID NO: 468861 - RNA, 19 nt, Artificial Sequence
  Description of Artificial Sequence: Synthetic oligonucleotide
  Sense strand starting at position 3570 of SEQ ID NO: 317157
uuucucguuccguuagauc

SEQ ID NO: 468862 - RNA, 19 nt, Artificial Sequence
  Description of Artificial Sequence: Synthetic oligonucleotide
  Antisense Strand to SEQ ID NO: 468861
gaucuaacggaacgagaaa

SEQ ID NO: 468863 - RNA, 19 nt, Artificial Sequence
  Description of Artificial Sequence: Synthetic oligonucleotide
  Sense strand starting at position 3595 of SEQ ID NO: 317157
ucguuuccuguggugaagu

SEQ ID NO: 468864 - RNA, 19 nt, Artificial Sequence
  Description of Artificial Sequence: Synthetic oligonucleotide
  Antisense Strand to SEQ ID NO: 468863
acuucaccacaggaaacga

SEQ ID NO: 468865 - RNA, 19 nt, Artificial Sequence
  Description of Artificial Sequence: Synthetic oligonucleotide
  Sense strand starting at position 3606 of SEQ ID NO: 317157
ggugaaguagcgugcagaa

SEQ ID NO: 468866 - RNA, 19 nt, Artificial Sequence
  Description of Artificial Sequence: Synthetic oligonucleotide
  Antisense Strand to SEQ ID NO: 468865
uucugcacgcuacuucacc

SEQ ID NO: 468867 - RNA, 19 nt, Artificial Sequence
  Description of Artificial Sequence: Synthetic oligonucleotide
  Sense strand starting at position 3695 of SEQ ID NO: 317157
cgacuuaacgaauagcuca

SEQ ID NO: 468868 - RNA, 19 nt, Artificial Sequence
  Description of Artificial Sequence: Synthetic oligonucleotide
  Antisense Strand to SEQ ID NO: 468867
ugagcuauucguuaagucg

SEQ ID NO: 468869 - RNA, 19 nt, Artificial Sequence
  Description of Artificial Sequence: Synthetic oligonucleotide
  Sense strand starting at position 3744 of SEQ ID NO: 317157
guggaagguccuggaaaua

SEQ ID NO: 468870 - RNA, 19 nt, Artificial Sequence
  Description of Artificial Sequence: Synthetic oligonucleotide
  Antisense Strand to SEQ ID NO: 468869
uauuuccaggaccuuccac

SEQ ID NO: 468871 - RNA, 19 nt, Artificial Sequence
  Description of Artificial Sequence: Synthetic oligonucleotide
  Sense strand starting at position 3806 of SEQ ID NO: 317157
cucgguuuagucugacauu

SEQ ID NO: 468872 - RNA, 19 nt, Artificial Sequence
  Description of Artificial Sequence: Synthetic oligonucleotide
  Antisense Strand to SEQ ID NO: 468871
aaugucagacuaaaccgag

SEQ ID NO: 468873 - RNA, 19 nt, Artificial Sequence
  Description of Artificial Sequence: Synthetic oligonucleotide
  Sense strand starting at position 3807 of SEQ ID NO: 317157
ucgguuuagucugacauuu

SEQ ID NO: 468874 - RNA, 19 nt, Artificial Sequence
  Description of Artificial Sequence: Synthetic oligonucleotide
  Antisense Strand to SEQ ID NO: 468873
aaaugucagacuaaaccga

SEQ ID NO: 468875 - RNA, 19 nt, Artificial Sequence
  Description of Artificial Sequence: Synthetic oligonucleotide
  Sense strand starting at position 3809 of SEQ ID NO: 317157
gguuuagucugacauuucu

SEQ ID NO: 468876 - RNA, 19 nt, Artificial Sequence
  Description of Artificial Sequence: Synthetic oligonucleotide
  Antisense Strand to SEQ ID NO: 468875
agaaaugucagacuaaacc

SEQ ID NO: 468877 - RNA, 19 nt, Artificial Sequence
  Description of Artificial Sequence: Synthetic oligonucleotide
  Sense strand starting at position 3831 of SEQ ID NO: 317157
uacuguuuguaagucaaag

SEQ ID NO: 468878 - RNA, 19 nt, Artificial Sequence
  Description of Artificial Sequence: Synthetic oligonucleotide
  Antisense Strand to SEQ ID NO: 468877
cuuugacuuacaaacagua

SEQ ID NO: 468879 - RNA, 19 nt, Artificial Sequence
  Description of Artificial Sequence: Synthetic oligonucleotide
  Sense strand starting at position 3833 of SEQ ID NO: 317157
cuguuuguaagucaaagua

SEQ ID NO: 468880 - RNA, 19 nt, Artificial Sequence
  Description of Artificial Sequence: Synthetic oligonucleotide
  Antisense Strand to SEQ ID NO: 468879
uacuuugacuuacaaacag

SEQ ID NO: 468881 - RNA, 19 nt, Artificial Sequence
  Description of Artificial Sequence: Synthetic oligonucleotide
  Sense strand starting at position 3848 of SEQ ID NO: 317157
aguaaauugucuuaaagga

SEQ ID NO: 468882 - RNA, 19 nt, Artificial Sequence
  Description of Artificial Sequence: Synthetic oligonucleotide
  Antisense Strand to SEQ ID NO: 468881
uccuuuaagacaauuuacu

SEQ ID NO: 468883 - RNA, 19 nt, Artificial Sequence
  Description of Artificial Sequence: Synthetic oligonucleotide
  Sense strand starting at position 3855 of SEQ ID NO: 317157
ugucuuaaaggaugacuuu

SEQ ID NO: 468884 - RNA, 19 nt, Artificial Sequence
  Description of Artificial Sequence: Synthetic oligonucleotide
  Antisense Strand to SEQ ID NO: 468883
aaagucauccuuuaagaca

SEQ ID NO: 468885 - RNA, 19 nt, Artificial Sequence
  Description of Artificial Sequence: Synthetic oligonucleotide
  Sense strand starting at position 3892 of SEQ ID NO: 317157
augucacaguucucagaug

SEQ ID NO: 468886 - RNA, 19 nt, Artificial Sequence
  Description of Artificial Sequence: Synthetic oligonucleotide
  Antisense Strand to SEQ ID NO: 468885
caucugagaacugugacau

SEQ ID NO: 468887 - RNA, 19 nt, Artificial Sequence
  Description of Artificial Sequence: Synthetic oligonucleotide
  Sense strand starting at position 3898 of SEQ ID NO: 317157
caguucucagaugauaugu

SEQ ID NO: 468888 - RNA, 19 nt, Artificial Sequence
  Description of Artificial Sequence: Synthetic oligonucleotide
  Antisense Strand to SEQ ID NO: 468887
acauaucaucugagaacug

SEQ ID NO: 468889 - RNA, 19 nt, Artificial Sequence
  Description of Artificial Sequence: Synthetic oligonucleotide
  Sense strand starting at position 3903 of SEQ ID NO: 317157
cucagaugauauguauucu

SEQ ID NO: 468890 - RNA, 19 nt, Artificial Sequence
  Description of Artificial Sequence: Synthetic oligonucleotide
  Antisense Strand to SEQ ID NO: 468889
agaauacauaucaucugag

SEQ ID NO: 468891 - RNA, 19 nt, Artificial Sequence
  Description of Artificial Sequence: Synthetic oligonucleotide
  Sense strand starting at position 3950 of SEQ ID NO: 317157
uuuguuugcgcauauggaa

SEQ ID NO: 468892 - RNA, 19 nt, Artificial Sequence
  Description of Artificial Sequence: Synthetic oligonucleotide
  Antisense Strand to SEQ ID NO: 468891
uuccauaugcgcaaacaaa

SEQ ID NO: 468893 - RNA, 19 nt, Artificial Sequence
  Description of Artificial Sequence: Synthetic oligonucleotide
  Sense strand starting at position 53 of SEQ ID NO: 317158
guuaucaagcuuggaguca

SEQ ID NO: 468894 - RNA, 19 nt, Artificial Sequence
  Description of Artificial Sequence: Synthetic oligonucleotide
  Antisense Strand to SEQ ID NO: 468893
ugacuccaagcuugauaac

SEQ ID NO: 468895 - RNA, 19 nt, Artificial Sequence
  Description of Artificial Sequence: Synthetic oligonucleotide
  Sense strand starting at position 395 of SEQ ID NO: 317158
ggagguggaucugcucaau

SEQ ID NO: 468896 - RNA, 19 nt, Artificial Sequence
  Description of Artificial Sequence: Synthetic oligonucleotide
  Antisense Strand to SEQ ID NO: 468895
auugagcagauccaccucc

SEQ ID NO: 468897 - RNA, 19 nt, Artificial Sequence
  Description of Artificial Sequence: Synthetic oligonucleotide
  Sense strand starting at position 406 of SEQ ID NO: 317158
ugcucaauaccagaaguuu

SEQ ID NO: 468898 - RNA, 19 nt, Artificial Sequence
  Description of Artificial Sequence: Synthetic oligonucleotide
  Antisense Strand to SEQ ID NO: 468897
aaacuucugguauugagca

SEQ ID NO: 468899 - RNA, 19 nt, Artificial Sequence
  Description of Artificial Sequence: Synthetic oligonucleotide
  Sense strand starting at position 412 of SEQ ID NO: 317158
auaccagaaguuugagcaa

SEQ ID NO: 468900 - RNA, 19 nt, Artificial Sequence
  Description of Artificial Sequence: Synthetic oligonucleotide
  Antisense Strand to SEQ ID NO: 468899
uugcucaaacuucugguau

SEQ ID NO: 468901 - RNA, 19 nt, Artificial Sequence
  Description of Artificial Sequence: Synthetic oligonucleotide
  Sense strand starting at position 424 of SEQ ID NO: 317158
ugagcaaccuguccuauuu

SEQ ID NO: 468902 - RNA, 19 nt, Artificial Sequence
  Description of Artificial Sequence: Synthetic oligonucleotide
  Antisense Strand to SEQ ID NO: 468901
aaauaggacagguugcuca

SEQ ID NO: 468903 - RNA, 19 nt, Artificial Sequence
  Description of Artificial Sequence: Synthetic oligonucleotide
  Sense strand starting at position 715 of SEQ ID NO: 317158
ggcuucaguggugaagaca

SEQ ID NO: 468904 - RNA, 19 nt, Artificial Sequence
  Description of Artificial Sequence: Synthetic oligonucleotide
  Antisense Strand to SEQ ID NO: 468903
ugucuucaccacugaagcc

SEQ ID NO: 468905 - RNA, 19 nt, Artificial Sequence
  Description of Artificial Sequence: Synthetic oligonucleotide
  Sense strand starting at position 729 of SEQ ID NO: 317158
agacaaaugugucucuucu

SEQ ID NO: 468906 - RNA, 19 nt, Artificial Sequence
  Description of Artificial Sequence: Synthetic oligonucleotide
  Antisense Strand to SEQ ID NO: 468905
agaagagacacauuugucu

SEQ ID NO: 468907 - RNA, 19 nt, Artificial Sequence
  Description of Artificial Sequence: Synthetic oligonucleotide
  Sense strand starting at position 799 of SEQ ID NO: 317158
gggacuccuaucgaaguca

SEQ ID NO: 468908 - RNA, 19 nt, Artificial Sequence
  Description of Artificial Sequence: Synthetic oligonucleotide
  Antisense Strand to SEQ ID NO: 468907
ugacuucgauaggaguccc

SEQ ID NO: 468909 - RNA, 19 nt, Artificial Sequence
  Description of Artificial Sequence: Synthetic oligonucleotide
  Sense strand starting at position 856 of SEQ ID NO: 317158
cgucuucgcgcaguaagga

SEQ ID NO: 468910 - RNA, 19 nt, Artificial Sequence
  Description of Artificial Sequence: Synthetic oligonucleotide
  Antisense Strand to SEQ ID NO: 468909
uccuuacugcgcgaagacg

SEQ ID NO: 468911 - RNA, 19 nt, Artificial Sequence
  Description of Artificial Sequence: Synthetic oligonucleotide
  Sense strand starting at position 861 of SEQ ID NO: 317158
ucgcgcaguaaggauaaua

SEQ ID NO: 468912 - RNA, 19 nt, Artificial Sequence
  Description of Artificial Sequence: Synthetic oligonucleotide
  Antisense Strand to SEQ ID NO: 468911
uauuauccuuacugcgcga

SEQ ID NO: 468913 - RNA, 19 nt, Artificial Sequence
  Description of Artificial Sequence: Synthetic oligonucleotide
  Sense strand starting at position 1017 of SEQ ID NO: 317158
gcaagaaggcuuuguagau

SEQ ID NO: 468914 - RNA, 19 nt, Artificial Sequence
  Description of Artificial Sequence: Synthetic oligonucleotide
  Antisense Strand to SEQ ID NO: 468913
aucuacaaagccuucuugc

SEQ ID NO: 468915 - RNA, 19 nt, Artificial Sequence
  Description of Artificial Sequence: Synthetic oligonucleotide
  Sense strand starting at position 1018 of SEQ ID NO: 317158
caagaaggcuuuguagaua

SEQ ID NO: 468916 - RNA, 19 nt, Artificial Sequence
  Description of Artificial Sequence: Synthetic oligonucleotide
  Antisense Strand to SEQ ID NO: 468915
uaucuacaaagccuucuug

SEQ ID NO: 468917 - RNA, 19 nt, Artificial Sequence
  Description of Artificial Sequence: Synthetic oligonucleotide
  Sense strand starting at position 1023 of SEQ ID NO: 317158
aggcuuuguagauauugaa

SEQ ID NO: 468918 - RNA, 19 nt, Artificial Sequence
  Description of Artificial Sequence: Synthetic oligonucleotide
  Antisense Strand to SEQ ID NO: 468917
uucaauaucuacaaagccu

SEQ ID NO: 468919 - RNA, 19 nt, Artificial Sequence
  Description of Artificial Sequence: Synthetic oligonucleotide
  Sense strand starting at position 1131 of SEQ ID NO: 317158
aauguauguuccucaguga

SEQ ID NO: 468920 - RNA, 19 nt, Artificial Sequence
  Description of Artificial Sequence: Synthetic oligonucleotide
  Antisense Strand to SEQ ID NO: 468919
ucacugaggaacauacauu

SEQ ID NO: 468921 - RNA, 19 nt, Artificial Sequence
  Description of Artificial Sequence: Synthetic oligonucleotide
  Sense strand starting at position 1132 of SEQ ID NO: 317158
auguauguuccucagugaa

SEQ ID NO: 468922 - RNA, 19 nt, Artificial Sequence
  Description of Artificial Sequence: Synthetic oligonucleotide
  Antisense Strand to SEQ ID NO: 468921
uucacugaggaacauacau

SEQ ID NO: 468923 - RNA, 19 nt, Artificial Sequence
  Description of Artificial Sequence: Synthetic oligonucleotide
  Sense strand starting at position 1184 of SEQ ID NO: 317158
agcaaugaguuuccauaga

SEQ ID NO: 468924 - RNA, 19 nt, Artificial Sequence
  Description of Artificial Sequence: Synthetic oligonucleotide
  Antisense Strand to SEQ ID NO: 468923
ucuauggaaacucauugcu

SEQ ID NO: 468925 - RNA, 19 nt, Artificial Sequence
  Description of Artificial Sequence: Synthetic oligonucleotide
  Sense strand starting at position 1199 of SEQ ID NO: 317158
uagaguuacuucccaagga

SEQ ID NO: 468926 - RNA, 19 nt, Artificial Sequence
  Description of Artificial Sequence: Synthetic oligonucleotide
  Antisense Strand to SEQ ID NO: 468925
uccuugggaaguaacucua

SEQ ID NO: 468927 - RNA, 19 nt, Artificial Sequence
  Description of Artificial Sequence: Synthetic oligonucleotide
  Sense strand starting at position 1203 of SEQ ID NO: 317158
guuacuucccaaggaacaa

SEQ ID NO: 468928 - RNA, 19 nt, Artificial Sequence
  Description of Artificial Sequence: Synthetic oligonucleotide
  Antisense Strand to SEQ ID NO: 468927
uuguuccuugggaaguaac

SEQ ID NO: 468929 - RNA, 19 nt, Artificial Sequence
  Description of Artificial Sequence: Synthetic oligonucleotide
  Sense strand starting at position 1387 of SEQ ID NO: 317158
ggaggagucgccgaaauaa

SEQ ID NO: 468930 - RNA, 19 nt, Artificial Sequence
  Description of Artificial Sequence: Synthetic oligonucleotide
  Antisense Strand to SEQ ID NO: 468929
uuauuucggcgacuccucc

SEQ ID NO: 468931 - RNA, 19 nt, Artificial Sequence
  Description of Artificial Sequence: Synthetic oligonucleotide
  Sense strand starting at position 1469 of SEQ ID NO: 317158
aggcuuucggacuaucaag

SEQ ID NO: 468932 - RNA, 19 nt, Artificial Sequence
  Description of Artificial Sequence: Synthetic oligonucleotide
  Antisense Strand to SEQ ID NO: 468931
cuugauaguccgaaagccu

SEQ ID NO: 468933 - RNA, 19 nt, Artificial Sequence
  Description of Artificial Sequence: Synthetic oligonucleotide
  Sense strand starting at position 1689 of SEQ ID NO: 317158
uggaacuucugccuguuaa

SEQ ID NO: 468934 - RNA, 19 nt, Artificial Sequence
  Description of Artificial Sequence: Synthetic oligonucleotide
  Antisense Strand to SEQ ID NO: 468933
uuaacaggcagaaguucca

SEQ ID NO: 468935 - RNA, 19 nt, Artificial Sequence
  Description of Artificial Sequence: Synthetic oligonucleotide
  Sense strand starting at position 1690 of SEQ ID NO: 317158
ggaacuucugccuguuaac

SEQ ID NO: 468936 - RNA, 19 nt, Artificial Sequence
  Description of Artificial Sequence: Synthetic oligonucleotide
  Antisense Strand to SEQ ID NO: 468935
guuaacaggcagaaguucc

SEQ ID NO: 468937 - RNA, 19 nt, Artificial Sequence
  Description of Artificial Sequence: Synthetic oligonucleotide
  Sense strand starting at position 1902 of SEQ ID NO: 317158
cuuccucgucucgcgagaa

SEQ ID NO: 468938 - RNA, 19 nt, Artificial Sequence
  Description of Artificial Sequence: Synthetic oligonucleotide
  Antisense Strand to SEQ ID NO: 468937
uucucgcgagacgaggaag

SEQ ID NO: 468939 - RNA, 19 nt, Artificial Sequence
  Description of Artificial Sequence: Synthetic oligonucleotide
  Sense strand starting at position 1932 of SEQ ID NO: 317158
cuccgacucgcgagaagua

SEQ ID NO: 468940 - RNA, 19 nt, Artificial Sequence
  Description of Artificial Sequence: Synthetic oligonucleotide
  Antisense Strand to SEQ ID NO: 468939
uacuucucgcgagucggag

SEQ ID NO: 468941 - RNA, 19 nt, Artificial Sequence
  Description of Artificial Sequence: Synthetic oligonucleotide
  Sense strand starting at position 1933 of SEQ ID NO: 317158
uccgacucgcgagaaguaa

SEQ ID NO: 468942 - RNA, 19 nt, Artificial Sequence
  Description of Artificial Sequence: Synthetic oligonucleotide
  Antisense Strand to SEQ ID NO: 468941
uuacuucucgcgagucgga

SEQ ID NO: 468943 - RNA, 19 nt, Artificial Sequence
  Description of Artificial Sequence: Synthetic oligonucleotide
  Sense strand starting at position 2049 of SEQ ID NO: 317158
gggccuucugggagcugua

SEQ ID NO: 468944 - RNA, 19 nt, Artificial Sequence
  Description of Artificial Sequence: Synthetic oligonucleotide
  Antisense Strand to SEQ ID NO: 468943
uacagcucccagaaggccc

SEQ ID NO: 468945 - RNA, 19 nt, Artificial Sequence
  Description of Artificial Sequence: Synthetic oligonucleotide
  Sense strand starting at position 2854 of SEQ ID NO: 317158
cugcgcuuugcucuucuua

SEQ ID NO: 468946 - RNA, 19 nt, Artificial Sequence
  Description of Artificial Sequence: Synthetic oligonucleotide
  Antisense Strand to SEQ ID NO: 468945
uaagaagagcaaagcgcag

SEQ ID NO: 468947 - RNA, 19 nt, Artificial Sequence
  Description of Artificial Sequence: Synthetic oligonucleotide
  Sense strand starting at position 3032 of SEQ ID NO: 317158
ggaacuacucugggcgaga

SEQ ID NO: 468948 - RNA, 19 nt, Artificial Sequence
  Description of Artificial Sequence: Synthetic oligonucleotide
  Antisense Strand to SEQ ID NO: 468947
ucucgcccagaguaguucc

SEQ ID NO: 468949 - RNA, 19 nt, Artificial Sequence
  Description of Artificial Sequence: Synthetic oligonucleotide
  Sense strand starting at position 3033 of SEQ ID NO: 317158
gaacuacucugggcgagaa

SEQ ID NO: 468950 - RNA, 19 nt, Artificial Sequence
  Description of Artificial Sequence: Synthetic oligonucleotide
  Antisense Strand to SEQ ID NO: 468949
uucucgcccagaguaguuc

SEQ ID NO: 468951 - RNA, 19 nt, Artificial Sequence
  Description of Artificial Sequence: Synthetic oligonucleotide
  Sense strand starting at position 3065 of SEQ ID NO: 317158
auuguagggcaauguuauu

SEQ ID NO: 468952 - RNA, 19 nt, Artificial Sequence
  Description of Artificial Sequence: Synthetic oligonucleotide
  Antisense Strand to SEQ ID NO: 468951
aauaacauugcccuacaau

SEQ ID NO: 468953 - RNA, 19 nt, Artificial Sequence
  Description of Artificial Sequence: Synthetic oligonucleotide
  Sense strand starting at position 3148 of SEQ ID NO: 317158
gcacgacguggucacagau

SEQ ID NO: 468954 - RNA, 19 nt, Artificial Sequence
  Description of Artificial Sequence: Synthetic oligonucleotide
  Antisense Strand to SEQ ID NO: 468953
aucugugaccacgucgugc

SEQ ID NO: 468955 - RNA, 19 nt, Artificial Sequence
  Description of Artificial Sequence: Synthetic oligonucleotide
  Sense strand starting at position 3154 of SEQ ID NO: 317158
cguggucacagauggacaa

SEQ ID NO: 468956 - RNA, 19 nt, Artificial Sequence
  Description of Artificial Sequence: Synthetic oligonucleotide
  Antisense Strand to SEQ ID NO: 468955
uuguccaucugugaccacg

SEQ ID NO: 468957 - RNA, 19 nt, Artificial Sequence
  Description of Artificial Sequence: Synthetic oligonucleotide
  Sense strand starting at position 3347 of SEQ ID NO: 317158
uaaggacaguuauaagaua

SEQ ID NO: 468958 - RNA, 19 nt, Artificial Sequence
  Description of Artificial Sequence: Synthetic oligonucleotide
  Antisense Strand to SEQ ID NO: 468957
uaucuuauaacuguccuua

SEQ ID NO: 468959 - RNA, 19 nt, Artificial Sequence
  Description of Artificial Sequence: Synthetic oligonucleotide
  Sense strand starting at position 3376 of SEQ ID NO: 317158
guuugagaagucgaaucca

SEQ ID NO: 468960 - RNA, 19 nt, Artificial Sequence
  Description of Artificial Sequence: Synthetic oligonucleotide
  Antisense Strand to SEQ ID NO: 468959
uggauucgacuucucaaac

SEQ ID NO: 468961 - RNA, 19 nt, Artificial Sequence
  Description of Artificial Sequence: Synthetic oligonucleotide
  Sense strand starting at position 3453 of SEQ ID NO: 317158
ggacaaauaucuguguuua

SEQ ID NO: 468962 - RNA, 19 nt, Artificial Sequence
  Description of Artificial Sequence: Synthetic oligonucleotide
  Antisense Strand to SEQ ID NO: 468961
uaaacacagauauuugucc

SEQ ID NO: 468963 - RNA, 19 nt, Artificial Sequence
  Description of Artificial Sequence: Synthetic oligonucleotide
  Sense strand starting at position 3454 of SEQ ID NO: 317158
gacaaauaucuguguuuag

SEQ ID NO: 468964 - RNA, 19 nt, Artificial Sequence
  Description of Artificial Sequence: Synthetic oligonucleotide
  Antisense Strand to SEQ ID NO: 468963
cuaaacacagauauuuguc

SEQ ID NO: 468965 - RNA, 19 nt, Artificial Sequence
  Description of Artificial Sequence: Synthetic oligonucleotide
  Sense strand starting at position 3681 of SEQ ID NO: 317158
uggugcguaccuuaacaua

SEQ ID NO: 468966 - RNA, 19 nt, Artificial Sequence
  Description of Artificial Sequence: Synthetic oligonucleotide
  Antisense Strand to SEQ ID NO: 468965
uauguuaagguacgcacca

SEQ ID NO: 468967 - RNA, 19 nt, Artificial Sequence
  Description of Artificial Sequence: Synthetic oligonucleotide
  Sense strand starting at position 3943 of SEQ ID NO: 317158
ccucuauuuccuugcguga

SEQ ID NO: 468968 - RNA, 19 nt, Artificial Sequence
  Description of Artificial Sequence: Synthetic oligonucleotide
  Antisense Strand to SEQ ID NO: 468967
ucacgcaaggaaauagagg

SEQ ID NO: 468969 - RNA, 19 nt, Artificial Sequence
  Description of Artificial Sequence: Synthetic oligonucleotide
  Sense strand starting at position 3947 of SEQ ID NO: 317158
uauuuccuugcgugaugga

SEQ ID NO: 468970 - RNA, 19 nt, Artificial Sequence
  Description of Artificial Sequence: Synthetic oligonucleotide
  Antisense Strand to SEQ ID NO: 468969
uccaucacgcaaggaaaua

SEQ ID NO: 468971 - RNA, 19 nt, Artificial Sequence
  Description of Artificial Sequence: Synthetic oligonucleotide
  Sense strand starting at position 3979 of SEQ ID NO: 317158
gacugugcuccaggacagu

SEQ ID NO: 468972 - RNA, 19 nt, Artificial Sequence
  Description of Artificial Sequence: Synthetic oligonucleotide
  Antisense Strand to SEQ ID NO: 468971
acuguccuggagcacaguc

SEQ ID NO: 468973 - RNA, 19 nt, Artificial Sequence
  Description of Artificial Sequence: Synthetic oligonucleotide
  Sense strand starting at position 37 of SEQ ID NO: 317159
ggguaauggguucaacugu

SEQ ID NO: 468974 - RNA, 19 nt, Artificial Sequence
  Description of Artificial Sequence: Synthetic oligonucleotide
  Antisense Strand to SEQ ID NO: 468973
acaguugaacccauuaccc

SEQ ID NO: 468975 - RNA, 19 nt, Artificial Sequence
  Description of Artificial Sequence: Synthetic oligonucleotide
  Sense strand starting at position 640 of SEQ ID NO: 317159
uggacaaauuggucaguga

SEQ ID NO: 468976 - RNA, 19 nt, Artificial Sequence
  Description of Artificial Sequence: Synthetic oligonucleotide
  Antisense Strand to SEQ ID NO: 468975
ucacugaccaauuugucca

SEQ ID NO: 468977 - RNA, 19 nt, Artificial Sequence
  Description of Artificial Sequence: Synthetic oligonucleotide
  Sense strand starting at position 643 of SEQ ID NO: 317159
acaaauuggucagugaaac

SEQ ID NO: 468978 - RNA, 19 nt, Artificial Sequence
  Description of Artificial Sequence: Synthetic oligonucleotide
  Antisense Strand to SEQ ID NO: 468977
guuucacugaccaauuugu

SEQ ID NO: 468979 - RNA, 19 nt, Artificial Sequence
  Description of Artificial Sequence: Synthetic oligonucleotide
  Sense strand starting at position 644 of SEQ ID NO: 317159
caaauuggucagugaaaca

SEQ ID NO: 468980 - RNA, 19 nt, Artificial Sequence
  Description of Artificial Sequence: Synthetic oligonucleotide
  Antisense Strand to SEQ ID NO: 468979
uguuucacugaccaauuug

SEQ ID NO: 468981 - RNA, 19 nt, Artificial Sequence
  Description of Artificial Sequence: Synthetic oligonucleotide
  Sense strand starting at position 761 of SEQ ID NO: 317159
agcuguuuggaagaaguga

SEQ ID NO: 468982 - RNA, 19 nt, Artificial Sequence
  Description of Artificial Sequence: Synthetic oligonucleotide
  Antisense Strand to SEQ ID NO: 468981
ucacuucuuccaaacagcu

SEQ ID NO: 468983 - RNA, 19 nt, Artificial Sequence
  Description of Artificial Sequence: Synthetic oligonucleotide
  Sense strand starting at position 791 of SEQ ID NO: 317159
cuauuuauggcauguguuu

SEQ ID NO: 468984 - RNA, 19 nt, Artificial Sequence
  Description of Artificial Sequence: Synthetic oligonucleotide
  Antisense Strand to SEQ ID NO: 468983
aaacacaugccauaaauag

SEQ ID NO: 468985 - RNA, 19 nt, Artificial Sequence
  Description of Artificial Sequence: Synthetic oligonucleotide
  Sense strand starting at position 880 of SEQ ID NO: 317159
agacuacaugucuaaugca

SEQ ID NO: 468986 - RNA, 19 nt, Artificial Sequence
  Description of Artificial Sequence: Synthetic oligonucleotide
  Antisense Strand to SEQ ID NO: 468985
ugcauuagacauguagucu

SEQ ID NO: 468987 - RNA, 19 nt, Artificial Sequence
  Description of Artificial Sequence: Synthetic oligonucleotide
  Sense strand starting at position 888 of SEQ ID NO: 317159
ugucuaaugcagcaauaag

SEQ ID NO: 468988 - RNA, 19 nt, Artificial Sequence
  Description of Artificial Sequence: Synthetic oligonucleotide
  Antisense Strand to SEQ ID NO: 468987
cuuauugcugcauuagaca

SEQ ID NO: 468989 - RNA, 19 nt, Artificial Sequence
  Description of Artificial Sequence: Synthetic oligonucleotide
  Sense strand starting at position 1238 of SEQ ID NO: 317159
caccuauugcuguaaggac

SEQ ID NO: 468990 - RNA, 19 nt, Artificial Sequence
  Description of Artificial Sequence: Synthetic oligonucleotide
  Antisense Strand to SEQ ID NO: 468989
guccuuacagcaauaggug

SEQ ID NO: 468991 - RNA, 19 nt, Artificial Sequence
  Description of Artificial Sequence: Synthetic oligonucleotide
  Sense strand starting at position 1246 of SEQ ID NO: 317159
gcuguaaggacaugaguaa

SEQ ID NO: 468992 - RNA, 19 nt, Artificial Sequence
  Description of Artificial Sequence: Synthetic oligonucleotide
  Antisense Strand to SEQ ID NO: 468991
uuacucauguccuuacagc

SEQ ID NO: 468993 - RNA, 19 nt, Artificial Sequence
  Description of Artificial Sequence: Synthetic oligonucleotide
  Sense strand starting at position 1260 of SEQ ID NO: 317159
aguaaagaacagugucaua

SEQ ID NO: 468994 - RNA, 19 nt, Artificial Sequence
  Description of Artificial Sequence: Synthetic oligonucleotide
  Antisense Strand to SEQ ID NO: 468993
uaugacacuguucuuuacu

SEQ ID NO: 468995 - RNA, 19 nt, Artificial Sequence
  Description of Artificial Sequence: Synthetic oligonucleotide
  Sense strand starting at position 1359 of SEQ ID NO: 317159
cucuuuaaaccuggagaua

SEQ ID NO: 468996 - RNA, 19 nt, Artificial Sequence
  Description of Artificial Sequence: Synthetic oligonucleotide
  Antisense Strand to SEQ ID NO: 468995
uaucuccagguuuaaagag

SEQ ID NO: 468997 - RNA, 19 nt, Artificial Sequence
  Description of Artificial Sequence: Synthetic oligonucleotide
  Sense strand starting at position 1457 of SEQ ID NO: 317159
agugaauguuuaucaagaa

SEQ ID NO: 468998 - RNA, 19 nt, Artificial Sequence
  Description of Artificial Sequence: Synthetic oligonucleotide
  Antisense Strand to SEQ ID NO: 468997
uucuugauaaacauucacu

SEQ ID NO: 468999 - RNA, 19 nt, Artificial Sequence
  Description of Artificial Sequence: Synthetic oligonucleotide
  Sense strand starting at position 1503 of SEQ ID NO: 317159
uccauaucacgguauauua

SEQ ID NO: 469000 - RNA, 19 nt, Artificial Sequence
  Description of Artificial Sequence: Synthetic oligonucleotide
  Antisense Strand to SEQ ID NO: 468999
uaauauaccgugauaugga

SEQ ID NO: 469001 - RNA, 19 nt, Artificial Sequence
  Description of Artificial Sequence: Synthetic oligonucleotide
  Sense strand starting at position 1576 of SEQ ID NO: 317159
ccacaaggucaucaugagu

SEQ ID NO: 469002 - RNA, 19 nt, Artificial Sequence
  Description of Artificial Sequence: Synthetic oligonucleotide
  Antisense Strand to SEQ ID NO: 469001
acucaugaugaccuugugg

SEQ ID NO: 469003 - RNA, 19 nt, Artificial Sequence
  Description of Artificial Sequence: Synthetic oligonucleotide
  Sense strand starting at position 1581 of SEQ ID NO: 317159
aggucaucaugaguuagaa

SEQ ID NO: 469004 - RNA, 19 nt, Artificial Sequence
  Description of Artificial Sequence: Synthetic oligonucleotide
  Antisense Strand to SEQ ID NO: 469003
uucuaacucaugaugaccu

SEQ ID NO: 469005 - RNA, 19 nt, Artificial Sequence
  Description of Artificial Sequence: Synthetic oligonucleotide
  Sense strand starting at position 1647 of SEQ ID NO: 317159
gaguguauauaugugaaug

SEQ ID NO: 469006 - RNA, 19 nt, Artificial Sequence
  Description of Artificial Sequence: Synthetic oligonucleotide
  Antisense Strand to SEQ ID NO: 469005
cauucacauauauacacuc

SEQ ID NO: 469007 - RNA, 19 nt, Artificial Sequence
  Description of Artificial Sequence: Synthetic oligonucleotide
  Sense strand starting at position 1652 of SEQ ID NO: 317159
uauauaugugaauggguau

SEQ ID NO: 469008 - RNA, 19 nt, Artificial Sequence
  Description of Artificial Sequence: Synthetic oligonucleotide
  Antisense Strand to SEQ ID NO: 469007
auacccauucacauauaua

SEQ ID NO: 469009 - RNA, 19 nt, Artificial Sequence
  Description of Artificial Sequence: Synthetic oligonucleotide
  Sense strand starting at position 1653 of SEQ ID NO: 317159
auauaugugaauggguaua

SEQ ID NO: 469010 - RNA, 19 nt, Artificial Sequence
  Description of Artificial Sequence: Synthetic oligonucleotide
  Antisense Strand to SEQ ID NO: 469009
uauacccauucacauauau

SEQ ID NO: 469011 - RNA, 19 nt, Artificial Sequence
  Description of Artificial Sequence: Synthetic oligonucleotide
  Sense strand starting at position 1658 of SEQ ID NO: 317159
ugugaauggguauaagagu

SEQ ID NO: 469012 - RNA, 19 nt, Artificial Sequence
  Description of Artificial Sequence: Synthetic oligonucleotide
  Antisense Strand to SEQ ID NO: 469011
acucuuauacccauucaca

SEQ ID NO: 469013 - RNA, 19 nt, Artificial Sequence
  Description of Artificial Sequence: Synthetic oligonucleotide
  Sense strand starting at position 1707 of SEQ ID NO: 317159
uaagauugguuaccuguaa

SEQ ID NO: 469014 - RNA, 19 nt, Artificial Sequence
  Description of Artificial Sequence: Synthetic oligonucleotide
  Antisense Strand to SEQ ID NO: 469013
uuacagguaaccaaucuua

SEQ ID NO: 469015 - RNA, 19 nt, Artificial Sequence
  Description of Artificial Sequence: Synthetic oligonucleotide
  Sense strand starting at position 1708 of SEQ ID NO: 317159
aagauugguuaccuguaau

SEQ ID NO: 469016 - RNA, 19 nt, Artificial Sequence
  Description of Artificial Sequence: Synthetic oligonucleotide
  Antisense Strand to SEQ ID NO: 469015
auuacagguaaccaaucuu

SEQ ID NO: 469017 - RNA, 19 nt, Artificial Sequence
  Description of Artificial Sequence: Synthetic oligonucleotide
  Sense strand starting at position 1711 of SEQ ID NO: 317159
auugguuaccuguaauaug

SEQ ID NO: 469018 - RNA, 19 nt, Artificial Sequence
  Description of Artificial Sequence: Synthetic oligonucleotide
  Antisense Strand to SEQ ID NO: 469017
cauauuacagguaaccaau

SEQ ID NO: 469019 - RNA, 19 nt, Artificial Sequence
  Description of Artificial Sequence: Synthetic oligonucleotide
  Sense strand starting at position 2375 of SEQ ID NO: 317159
uggcuaauguaacuuuaau

SEQ ID NO: 469020 - RNA, 19 nt, Artificial Sequence
  Description of Artificial Sequence: Synthetic oligonucleotide
  Antisense Strand to SEQ ID NO: 469019
auuaaaguuacauuagcca

SEQ ID NO: 469021 - RNA, 19 nt, Artificial Sequence
  Description of Artificial Sequence: Synthetic oligonucleotide
  Sense strand starting at position 2482 of SEQ ID NO: 317159
augcaaccugaauguauau

SEQ ID NO: 469022 - RNA, 19 nt, Artificial Sequence
  Description of Artificial Sequence: Synthetic oligonucleotide
  Antisense Strand to SEQ ID NO: 469021
auauacauucagguugcau

SEQ ID NO: 469023 - RNA, 19 nt, Artificial Sequence
  Description of Artificial Sequence: Synthetic oligonucleotide
  Sense strand starting at position 2613 of SEQ ID NO: 317159
gaaugauaagguugaaguu

SEQ ID NO: 469024 - RNA, 19 nt, Artificial Sequence
  Description of Artificial Sequence: Synthetic oligonucleotide
  Antisense Strand to SEQ ID NO: 469023
aacuucaaccuuaucauuc

SEQ ID NO: 469025 - RNA, 19 nt, Artificial Sequence
  Description of Artificial Sequence: Synthetic oligonucleotide
  Sense strand starting at position 2664 of SEQ ID NO: 317159
aggauaaucuaauagggaa

SEQ ID NO: 469026 - RNA, 19 nt, Artificial Sequence
  Description of Artificial Sequence: Synthetic oligonucleotide
  Antisense Strand to SEQ ID NO: 469025
uucccuauuagauuauccu

SEQ ID NO: 469027 - RNA, 19 nt, Artificial Sequence
  Description of Artificial Sequence: Synthetic oligonucleotide
  Sense strand starting at position 2896 of SEQ ID NO: 317159
uacugugaggacuaguagu

SEQ ID NO: 469028 - RNA, 19 nt, Artificial Sequence
  Description of Artificial Sequence: Synthetic oligonucleotide
  Antisense Strand to SEQ ID NO: 469027
acuacuaguccucacagua

SEQ ID NO: 469029 - RNA, 19 nt, Artificial Sequence
  Description of Artificial Sequence: Synthetic oligonucleotide
  Sense strand starting at position 2904 of SEQ ID NO: 317159
ggacuaguaguguggagaa

SEQ ID NO: 469030 - RNA, 19 nt, Artificial Sequence
  Description of Artificial Sequence: Synthetic oligonucleotide
  Antisense Strand to SEQ ID NO: 469029
uucuccacacuacuagucc

SEQ ID NO: 469031 - RNA, 19 nt, Artificial Sequence
  Description of Artificial Sequence: Synthetic oligonucleotide
  Sense strand starting at position 2969 of SEQ ID NO: 317159
agcucugagacucacgauu

SEQ ID NO: 469032 - RNA, 19 nt, Artificial Sequence
  Description of Artificial Sequence: Synthetic oligonucleotide
  Antisense Strand to SEQ ID NO: 469031
aaucgugagucucagagcu

SEQ ID NO: 469033 - RNA, 19 nt, Artificial Sequence
  Description of Artificial Sequence: Synthetic oligonucleotide
  Sense strand starting at position 3019 of SEQ ID NO: 317159
uguaauugagaaugagcuu

SEQ ID NO: 469034 - RNA, 19 nt, Artificial Sequence
  Description of Artificial Sequence: Synthetic oligonucleotide
  Antisense Strand to SEQ ID NO: 469033
aagcucauucucaauuaca

SEQ ID NO: 469035 - RNA, 19 nt, Artificial Sequence
  Description of Artificial Sequence: Synthetic oligonucleotide
  Sense strand starting at position 3025 of SEQ ID NO: 317159
ugagaaugagcuuggcaug

SEQ ID NO: 469036 - RNA, 19 nt, Artificial Sequence
  Description of Artificial Sequence: Synthetic oligonucleotide
  Antisense Strand to SEQ ID NO: 469035
caugccaagcucauucuca

SEQ ID NO: 469037 - RNA, 19 nt, Artificial Sequence
  Description of Artificial Sequence: Synthetic oligonucleotide
  Sense strand starting at position 3037 of SEQ ID NO: 317159
uggcauguucaagacucga

SEQ ID NO: 469038 - RNA, 19 nt, Artificial Sequence
  Description of Artificial Sequence: Synthetic oligonucleotide
  Antisense Strand to SEQ ID NO: 469037
ucgagucuugaacaugcca

SEQ ID NO: 469039 - RNA, 19 nt, Artificial Sequence
  Description of Artificial Sequence: Synthetic oligonucleotide
  Sense strand starting at position 3047 of SEQ ID NO: 317159
aagacucgagggugucaaa

SEQ ID NO: 469040 - RNA, 19 nt, Artificial Sequence
  Description of Artificial Sequence: Synthetic oligonucleotide
  Antisense Strand to SEQ ID NO: 469039
uuugacacccucgagucuu

SEQ ID NO: 469041 - RNA, 19 nt, Artificial Sequence
  Description of Artificial Sequence: Synthetic oligonucleotide
  Sense strand starting at position 3107 of SEQ ID NO: 317159
acuguaaggcuuuggauac

SEQ ID NO: 469042 - RNA, 19 nt, Artificial Sequence
  Description of Artificial Sequence: Synthetic oligonucleotide
  Antisense Strand to SEQ ID NO: 469041
guauccaaagccuuacagu

SEQ ID NO: 469043 - RNA, 19 nt, Artificial Sequence
  Description of Artificial Sequence: Synthetic oligonucleotide
  Sense strand starting at position 3144 of SEQ ID NO: 317159
gcacuaauucuguagguaa

SEQ ID NO: 469044 - RNA, 19 nt, Artificial Sequence
  Description of Artificial Sequence: Synthetic oligonucleotide
  Antisense Strand to SEQ ID NO: 469043
uuaccuacagaauuagugc

SEQ ID NO: 469045 - RNA, 19 nt, Artificial Sequence
  Description of Artificial Sequence: Synthetic oligonucleotide
  Sense strand starting at position 3146 of SEQ ID NO: 317159
acuaauucuguagguaaac

SEQ ID NO: 469046 - RNA, 19 nt, Artificial Sequence
  Description of Artificial Sequence: Synthetic oligonucleotide
  Antisense Strand to SEQ ID NO: 469045
guuuaccuacagaauuagu

SEQ ID NO: 469047 - RNA, 19 nt, Artificial Sequence
  Description of Artificial Sequence: Synthetic oligonucleotide
  Sense strand starting at position 3147 of SEQ ID NO: 317159
cuaauucuguagguaaaca

SEQ ID NO: 469048 - RNA, 19 nt, Artificial Sequence
  Description of Artificial Sequence: Synthetic oligonucleotide
  Antisense Strand to SEQ ID NO: 469047
uguuuaccuacagaauuag

SEQ ID NO: 469049 - RNA, 19 nt, Artificial Sequence
  Description of Artificial Sequence: Synthetic oligonucleotide
  Sense strand starting at position 3218 of SEQ ID NO: 317159
ucaggauauuggucaagcu

SEQ ID NO: 469050 - RNA, 19 nt, Artificial Sequence
  Description of Artificial Sequence: Synthetic oligonucleotide
  Antisense Strand to SEQ ID NO: 469049
agcuugaccaauauccuga

SEQ ID NO: 469051 - RNA, 19 nt, Artificial Sequence
  Description of Artificial Sequence: Synthetic oligonucleotide
  Sense strand starting at position 3846 of SEQ ID NO: 317159
uugcuagaacuacagguau

SEQ ID NO: 469052 - RNA, 19 nt, Artificial Sequence
  Description of Artificial Sequence: Synthetic oligonucleotide
  Antisense Strand to SEQ ID NO: 469051
auaccuguaguucuagcaa

SEQ ID NO: 469053 - RNA, 19 nt, Artificial Sequence
  Description of Artificial Sequence: Synthetic oligonucleotide
  Sense strand starting at position 13 of SEQ ID NO: 317160
gagaguauuggugagcagu

SEQ ID NO: 469054 - RNA, 19 nt, Artificial Sequence
  Description of Artificial Sequence: Synthetic oligonucleotide
  Antisense Strand to SEQ ID NO: 469053
acugcucaccaauacucuc

SEQ ID NO: 469055 - RNA, 19 nt, Artificial Sequence
  Description of Artificial Sequence: Synthetic oligonucleotide
  Sense strand starting at position 19 of SEQ ID NO: 317160
auuggugagcaguaugauu

SEQ ID NO: 469056 - RNA, 19 nt, Artificial Sequence
  Description of Artificial Sequence: Synthetic oligonucleotide
  Antisense Strand to SEQ ID NO: 469055
aaucauacugcucaccaau

SEQ ID NO: 469057 - RNA, 19 nt, Artificial Sequence
  Description of Artificial Sequence: Synthetic oligonucleotide
  Sense strand starting at position 28 of SEQ ID NO: 317160
caguaugauuuauaggaac

SEQ ID NO: 469058 - RNA, 19 nt, Artificial Sequence
  Description of Artificial Sequence: Synthetic oligonucleotide
  Antisense Strand to SEQ ID NO: 469057
guuccuauaaaucauacug

SEQ ID NO: 469059 - RNA, 19 nt, Artificial Sequence
  Description of Artificial Sequence: Synthetic oligonucleotide
  Sense strand starting at position 225 of SEQ ID NO: 317160
aagaaaucauggcuaguag

SEQ ID NO: 469060 - RNA, 19 nt, Artificial Sequence
  Description of Artificial Sequence: Synthetic oligonucleotide
  Antisense Strand to SEQ ID NO: 469059
cuacuagccaugauuucuu

SEQ ID NO: 469061 - RNA, 19 nt, Artificial Sequence
  Description of Artificial Sequence: Synthetic oligonucleotide
  Sense strand starting at position 514 of SEQ ID NO: 317160
ugccauucuguugaugaua

SEQ ID NO: 469062 - RNA, 19 nt, Artificial Sequence
  Description of Artificial Sequence: Synthetic oligonucleotide
  Antisense Strand to SEQ ID NO: 469061
uaucaucaacagaauggca

SEQ ID NO: 469063 - RNA, 19 nt, Artificial Sequence
  Description of Artificial Sequence: Synthetic oligonucleotide
  Sense strand starting at position 723 of SEQ ID NO: 317160
gaaaguuauuuggauguga

SEQ ID NO: 469064 - RNA, 19 nt, Artificial Sequence
  Description of Artificial Sequence: Synthetic oligonucleotide
  Antisense Strand to SEQ ID NO: 469063
ucacauccaaauaacuuuc

SEQ ID NO: 469065 - RNA, 19 nt, Artificial Sequence
  Description of Artificial Sequence: Synthetic oligonucleotide
  Sense strand starting at position 728 of SEQ ID NO: 317160
uuauuuggaugugaaugga

SEQ ID NO: 469066 - RNA, 19 nt, Artificial Sequence
  Description of Artificial Sequence: Synthetic oligonucleotide
  Antisense Strand to SEQ ID NO: 469065
uccauucacauccaaauaa

SEQ ID NO: 469067 - RNA, 19 nt, Artificial Sequence
  Description of Artificial Sequence: Synthetic oligonucleotide
  Sense strand starting at position 731 of SEQ ID NO: 317160
uuuggaugugaauggaauu

SEQ ID NO: 469068 - RNA, 19 nt, Artificial Sequence
  Description of Artificial Sequence: Synthetic oligonucleotide
  Antisense Strand to SEQ ID NO: 469067
aauuccauucacauccaaa

SEQ ID NO: 469069 - RNA, 19 nt, Artificial Sequence
  Description of Artificial Sequence: Synthetic oligonucleotide
  Sense strand starting at position 1051 of SEQ ID NO: 317160
aaugguauugucuggaaac

SEQ ID NO: 469070 - RNA, 19 nt, Artificial Sequence
  Description of Artificial Sequence: Synthetic oligonucleotide
  Antisense Strand to SEQ ID NO: 469069
guuuccagacaauaccauu

SEQ ID NO: 469071 - RNA, 19 nt, Artificial Sequence
  Description of Artificial Sequence: Synthetic oligonucleotide
  Sense strand starting at position 1396 of SEQ ID NO: 317160
ccaucuguggugcagacau

SEQ ID NO: 469072 - RNA, 19 nt, Artificial Sequence
  Description of Artificial Sequence: Synthetic oligonucleotide
  Antisense Strand to SEQ ID NO: 469071
augucugcaccacagaugg

SEQ ID NO: 469073 - RNA, 19 nt, Artificial Sequence
  Description of Artificial Sequence: Synthetic oligonucleotide
  Sense strand starting at position 2074 of SEQ ID NO: 317160
aucaguaaguaaucugaga

SEQ ID NO: 469074 - RNA, 19 nt, Artificial Sequence
  Description of Artificial Sequence: Synthetic oligonucleotide
  Antisense Strand to SEQ ID NO: 469073
ucucagauuacuuacugau

SEQ ID NO: 469075 - RNA, 19 nt, Artificial Sequence
  Description of Artificial Sequence: Synthetic oligonucleotide
  Sense strand starting at position 2157 of SEQ ID NO: 317160
gugagcuaucaucaucuuu

SEQ ID NO: 469076 - RNA, 19 nt, Artificial Sequence
  Description of Artificial Sequence: Synthetic oligonucleotide
  Antisense Strand to SEQ ID NO: 469075
aaagaugaugauagcucac

SEQ ID NO: 469077 - RNA, 19 nt, Artificial Sequence
  Description of Artificial Sequence: Synthetic oligonucleotide
  Sense strand starting at position 2425 of SEQ ID NO: 317160
uggauuaacuuagagauuu

SEQ ID NO: 469078 - RNA, 19 nt, Artificial Sequence
  Description of Artificial Sequence: Synthetic oligonucleotide
  Antisense Strand to SEQ ID NO: 469077
aaaucucuaaguuaaucca

SEQ ID NO: 469079 - RNA, 19 nt, Artificial Sequence
  Description of Artificial Sequence: Synthetic oligonucleotide
  Sense strand starting at position 2461 of SEQ ID NO: 317160
gggauaauuaaaggugcuu

SEQ ID NO: 469080 - RNA, 19 nt, Artificial Sequence
  Description of Artificial Sequence: Synthetic oligonucleotide
  Antisense Strand to SEQ ID NO: 469079
aagcaccuuuaauuauccc

SEQ ID NO: 469081 - RNA, 19 nt, Artificial Sequence
  Description of Artificial Sequence: Synthetic oligonucleotide
  Sense strand starting at position 2472 of SEQ ID NO: 317160
aggugcuuuaagcaugaga

SEQ ID NO: 469082 - RNA, 19 nt, Artificial Sequence
  Description of Artificial Sequence: Synthetic oligonucleotide
  Antisense Strand to SEQ ID NO: 469081
ucucaugcuuaaagcaccu

SEQ ID NO: 469083 - RNA, 19 nt, Artificial Sequence
  Description of Artificial Sequence: Synthetic oligonucleotide
  Sense strand starting at position 2474 of SEQ ID NO: 317160
gugcuuuaagcaugagaaa

SEQ ID NO: 469084 - RNA, 19 nt, Artificial Sequence
  Description of Artificial Sequence: Synthetic oligonucleotide
  Antisense Strand to SEQ ID NO: 469083
uuucucaugcuuaaagcac

SEQ ID NO: 469085 - RNA, 19 nt, Artificial Sequence
  Description of Artificial Sequence: Synthetic oligonucleotide
  Sense strand starting at position 2475 of SEQ ID NO: 317160
ugcuuuaagcaugagaaac

SEQ ID NO: 469086 - RNA, 19 nt, Artificial Sequence
  Description of Artificial Sequence: Synthetic oligonucleotide
  Antisense Strand to SEQ ID NO: 469085
guuucucaugcuuaaagca

SEQ ID NO: 469087 - RNA, 19 nt, Artificial Sequence
  Description of Artificial Sequence: Synthetic oligonucleotide
  Sense strand starting at position 2513 of SEQ ID NO: 317160
ccuaauccucacgauagca

SEQ ID NO: 469088 - RNA, 19 nt, Artificial Sequence
  Description of Artificial Sequence: Synthetic oligonucleotide
  Antisense Strand to SEQ ID NO: 469087
ugcuaucgugaggauuagg

SEQ ID NO: 469089 - RNA, 19 nt, Artificial Sequence
  Description of Artificial Sequence: Synthetic oligonucleotide
  Sense strand starting at position 2523 of SEQ ID NO: 317160
acgauagcacucuagguuu

SEQ ID NO: 469090 - RNA, 19 nt, Artificial Sequence
  Description of Artificial Sequence: Synthetic oligonucleotide
  Antisense Strand to SEQ ID NO: 469089
aaaccuagagugcuaucgu

SEQ ID NO: 469091 - RNA, 19 nt, Artificial Sequence
  Description of Artificial Sequence: Synthetic oligonucleotide
  Sense strand starting at position 2530 of SEQ ID NO: 317160
cacucuagguuugugaaga

SEQ ID NO: 469092 - RNA, 19 nt, Artificial Sequence
  Description of Artificial Sequence: Synthetic oligonucleotide
  Antisense Strand to SEQ ID NO: 469091
ucuucacaaaccuagagug

SEQ ID NO: 469093 - RNA, 19 nt, Artificial Sequence
  Description of Artificial Sequence: Synthetic oligonucleotide
  Sense strand starting at position 2535 of SEQ ID NO: 317160
uagguuugugaagaguuga

SEQ ID NO: 469094 - RNA, 19 nt, Artificial Sequence
  Description of Artificial Sequence: Synthetic oligonucleotide
  Antisense Strand to SEQ ID NO: 469093
ucaacucuucacaaaccua

SEQ ID NO: 469095 - RNA, 19 nt, Artificial Sequence
  Description of Artificial Sequence: Synthetic oligonucleotide
  Sense strand starting at position 2591 of SEQ ID NO: 317160
uuuagugacuugucuaaga

SEQ ID NO: 469096 - RNA, 19 nt, Artificial Sequence
  Description of Artificial Sequence: Synthetic oligonucleotide
  Antisense Strand to SEQ ID NO: 469095
ucuuagacaagucacuaaa

SEQ ID NO: 469097 - RNA, 19 nt, Artificial Sequence
  Description of Artificial Sequence: Synthetic oligonucleotide
  Sense strand starting at position 2593 of SEQ ID NO: 317160
uagugacuugucuaagauu

SEQ ID NO: 469098 - RNA, 19 nt, Artificial Sequence
  Description of Artificial Sequence: Synthetic oligonucleotide
  Antisense Strand to SEQ ID NO: 469097
aaucuuagacaagucacua

SEQ ID NO: 469099 - RNA, 19 nt, Artificial Sequence
  Description of Artificial Sequence: Synthetic oligonucleotide
  Sense strand starting at position 2605 of SEQ ID NO: 317160
uaagauuacagagguggua

SEQ ID NO: 469100 - RNA, 19 nt, Artificial Sequence
  Description of Artificial Sequence: Synthetic oligonucleotide
  Antisense Strand to SEQ ID NO: 469099
uaccaccucuguaaucuua

SEQ ID NO: 469101 - RNA, 19 nt, Artificial Sequence
  Description of Artificial Sequence: Synthetic oligonucleotide
  Sense strand starting at position 2607 of SEQ ID NO: 317160
agauuacagaggugguauu

SEQ ID NO: 469102 - RNA, 19 nt, Artificial Sequence
  Description of Artificial Sequence: Synthetic oligonucleotide
  Antisense Strand to SEQ ID NO: 469101
aauaccaccucuguaaucu

SEQ ID NO: 469103 - RNA, 19 nt, Artificial Sequence
  Description of Artificial Sequence: Synthetic oligonucleotide
  Sense strand starting at position 2748 of SEQ ID NO: 317160
aggauuccuuggucuugga

SEQ ID NO: 469104 - RNA, 19 nt, Artificial Sequence
  Description of Artificial Sequence: Synthetic oligonucleotide
  Antisense Strand to SEQ ID NO: 469103
uccaagaccaaggaauccu

SEQ ID NO: 469105 - RNA, 19 nt, Artificial Sequence
  Description of Artificial Sequence: Synthetic oligonucleotide
  Sense strand starting at position 2752 of SEQ ID NO: 317160
uuccuuggucuuggauuaa

SEQ ID NO: 469106 - RNA, 19 nt, Artificial Sequence
  Description of Artificial Sequence: Synthetic oligonucleotide
  Antisense Strand to SEQ ID NO: 469105
uuaauccaagaccaaggaa

SEQ ID NO: 469107 - RNA, 19 nt, Artificial Sequence
  Description of Artificial Sequence: Synthetic oligonucleotide
  Sense strand starting at position 2756 of SEQ ID NO: 317160
uuggucuuggauuaaaguu

SEQ ID NO: 469108 - RNA, 19 nt, Artificial Sequence
  Description of Artificial Sequence: Synthetic oligonucleotide
  Antisense Strand to SEQ ID NO: 469107
aacuuuaauccaagaccaa

SEQ ID NO: 469109 - RNA, 19 nt, Artificial Sequence
  Description of Artificial Sequence: Synthetic oligonucleotide
  Sense strand starting at position 2762 of SEQ ID NO: 317160
uuggauuaaaguugcagau

SEQ ID NO: 469110 - RNA, 19 nt, Artificial Sequence
  Description of Artificial Sequence: Synthetic oligonucleotide
  Antisense Strand to SEQ ID NO: 469109
aucugcaacuuuaauccaa

SEQ ID NO: 469111 - RNA, 19 nt, Artificial Sequence
  Description of Artificial Sequence: Synthetic oligonucleotide
  Sense strand starting at position 2764 of SEQ ID NO: 317160
ggauuaaaguugcagauuu

SEQ ID NO: 469112 - RNA, 19 nt, Artificial Sequence
  Description of Artificial Sequence: Synthetic oligonucleotide
  Antisense Strand to SEQ ID NO: 469111
aaaucugcaacuuuaaucc

SEQ ID NO: 469113 - RNA, 19 nt, Artificial Sequence
  Description of Artificial Sequence: Synthetic oligonucleotide
  Sense strand starting at position 2808 of SEQ ID NO: 317160
guguuuaaugacuaaauug

SEQ ID NO: 469114 - RNA, 19 nt, Artificial Sequence
  Description of Artificial Sequence: Synthetic oligonucleotide
  Antisense Strand to SEQ ID NO: 469113
caauuuagucauuaaacac

SEQ ID NO: 469115 - RNA, 19 nt, Artificial Sequence
  Description of Artificial Sequence: Synthetic oligonucleotide
  Sense strand starting at position 2827 of SEQ ID NO: 317160
aggcguauuucucccaaga

SEQ ID NO: 469116 - RNA, 19 nt, Artificial Sequence
  Description of Artificial Sequence: Synthetic oligonucleotide
  Antisense Strand to SEQ ID NO: 469115
ucuugggagaaauacgccu

SEQ ID NO: 469117 - RNA, 19 nt, Artificial Sequence
  Description of Artificial Sequence: Synthetic oligonucleotide
  Sense strand starting at position 2863 of SEQ ID NO: 317160
uaaggauacuggucccacu

SEQ ID NO: 469118 - RNA, 19 nt, Artificial Sequence
  Description of Artificial Sequence: Synthetic oligonucleotide
  Antisense Strand to SEQ ID NO: 469117
agugggaccaguauccuua

SEQ ID NO: 469119 - RNA, 19 nt, Artificial Sequence
  Description of Artificial Sequence: Synthetic oligonucleotide
  Sense strand starting at position 2874 of SEQ ID NO: 317160
gucccacuucucuaaaguu

SEQ ID NO: 469120 - RNA, 19 nt, Artificial Sequence
  Description of Artificial Sequence: Synthetic oligonucleotide
  Antisense Strand to SEQ ID NO: 469119
aacuuuagagaagugggac

SEQ ID NO: 469121 - RNA, 19 nt, Artificial Sequence
  Description of Artificial Sequence: Synthetic oligonucleotide
  Sense strand starting at position 2883 of SEQ ID NO: 317160
cucuaaaguuuaucaggau

SEQ ID NO: 469122 - RNA, 19 nt, Artificial Sequence
  Description of Artificial Sequence: Synthetic oligonucleotide
  Antisense Strand to SEQ ID NO: 469121
auccugauaaacuuuagag

SEQ ID NO: 469123 - RNA, 19 nt, Artificial Sequence
  Description of Artificial Sequence: Synthetic oligonucleotide
  Sense strand starting at position 2971 of SEQ ID NO: 317160
auaauaaguuaguugggua

SEQ ID NO: 469124 - RNA, 19 nt, Artificial Sequence
  Description of Artificial Sequence: Synthetic oligonucleotide
  Antisense Strand to SEQ ID NO: 469123
uacccaacuaacuuauuau

SEQ ID NO: 469125 - RNA, 19 nt, Artificial Sequence
  Description of Artificial Sequence: Synthetic oligonucleotide
  Sense strand starting at position 3374 of SEQ ID NO: 317160
gcaccuuucccugaguacu

SEQ ID NO: 469126 - RNA, 19 nt, Artificial Sequence
  Description of Artificial Sequence: Synthetic oligonucleotide
  Antisense Strand to SEQ ID NO: 469125
aguacucagggaaaggugc

SEQ ID NO: 469127 - RNA, 19 nt, Artificial Sequence
  Description of Artificial Sequence: Synthetic oligonucleotide
  Sense strand starting at position 3388 of SEQ ID NO: 317160
guacuucuccuguaaacac

SEQ ID NO: 469128 - RNA, 19 nt, Artificial Sequence
  Description of Artificial Sequence: Synthetic oligonucleotide
  Antisense Strand to SEQ ID NO: 469127
guguuuacaggagaaguac

SEQ ID NO: 469129 - RNA, 19 nt, Artificial Sequence
  Description of Artificial Sequence: Synthetic oligonucleotide
  Sense strand starting at position 3467 of SEQ ID NO: 317160
aauagaggagcuugucuuu

SEQ ID NO: 469130 - RNA, 19 nt, Artificial Sequence
  Description of Artificial Sequence: Synthetic oligonucleotide
  Antisense Strand to SEQ ID NO: 469129
aaagacaagcuccucuauu

SEQ ID NO: 469131 - RNA, 19 nt, Artificial Sequence
  Description of Artificial Sequence: Synthetic oligonucleotide
  Sense strand starting at position 3824 of SEQ ID NO: 317160
ucaguacuuccauguugag

SEQ ID NO: 469132 - RNA, 19 nt, Artificial Sequence
  Description of Artificial Sequence: Synthetic oligonucleotide
  Antisense Strand to SEQ ID NO: 469131
cucaacauggaaguacuga

SEQ ID NO: 469133 - RNA, 19 nt, Artificial Sequence
  Description of Artificial Sequence: Synthetic oligonucleotide
  Sense strand starting at position 131 of SEQ ID NO: 317161
gaguuuaaaguguagcuga

SEQ ID NO: 469134 - RNA, 19 nt, Artificial Sequence
  Description of Artificial Sequence: Synthetic oligonucleotide
  Antisense Strand to SEQ ID NO: 469133
ucagcuacacuuuaaacuc

SEQ ID NO: 469135 - RNA, 19 nt, Artificial Sequence
  Description of Artificial Sequence: Synthetic oligonucleotide
  Sense strand starting at position 136 of SEQ ID NO: 317161
uaaaguguagcugauaucu

SEQ ID NO: 469136 - RNA, 19 nt, Artificial Sequence
  Description of Artificial Sequence: Synthetic oligonucleotide
  Antisense Strand to SEQ ID NO: 469135
agauaucagcuacacuuua

SEQ ID NO: 469137 - RNA, 19 nt, Artificial Sequence
  Description of Artificial Sequence: Synthetic oligonucleotide
  Sense strand starting at position 171 of SEQ ID NO: 317161
uugaaacgugcuuagauca

SEQ ID NO: 469138 - RNA, 19 nt, Artificial Sequence
  Description of Artificial Sequence: Synthetic oligonucleotide
  Antisense Strand to SEQ ID NO: 469137
ugaucuaagcacguuucaa

SEQ ID NO: 469139 - RNA, 19 nt, Artificial Sequence
  Description of Artificial Sequence: Synthetic oligonucleotide
  Sense strand starting at position 176 of SEQ ID NO: 317161
acgugcuuagaucaacaau

SEQ ID NO: 469140 - RNA, 19 nt, Artificial Sequence
  Description of Artificial Sequence: Synthetic oligonucleotide
  Antisense Strand to SEQ ID NO: 469139
auuguugaucuaagcacgu

SEQ ID NO: 469141 - RNA, 19 nt, Artificial Sequence
  Description of Artificial Sequence: Synthetic oligonucleotide
  Sense strand starting at position 216 of SEQ ID NO: 317161
uguaaauaaugccuaaaga

SEQ ID NO: 469142 - RNA, 19 nt, Artificial Sequence
  Description of Artificial Sequence: Synthetic oligonucleotide
  Antisense Strand to SEQ ID NO: 469141
ucuuuaggcauuauuuaca

SEQ ID NO: 469143 - RNA, 19 nt, Artificial Sequence
  Description of Artificial Sequence: Synthetic oligonucleotide
  Sense strand starting at position 264 of SEQ ID NO: 317161
cugauuacacguugacaca

SEQ ID NO: 469144 - RNA, 19 nt, Artificial Sequence
  Description of Artificial Sequence: Synthetic oligonucleotide
  Antisense Strand to SEQ ID NO: 469143
ugugucaacguguaaucag

SEQ ID NO: 469145 - RNA, 19 nt, Artificial Sequence
  Description of Artificial Sequence: Synthetic oligonucleotide
  Sense strand starting at position 265 of SEQ ID NO: 317161
ugauuacacguugacacau

SEQ ID NO: 469146 - RNA, 19 nt, Artificial Sequence
  Description of Artificial Sequence: Synthetic oligonucleotide
  Antisense Strand to SEQ ID NO: 469145
augugucaacguguaauca

SEQ ID NO: 469147 - RNA, 19 nt, Artificial Sequence
  Description of Artificial Sequence: Synthetic oligonucleotide
  Sense strand starting at position 441 of SEQ ID NO: 317161
caaauaugugugcaagaaa

SEQ ID NO: 469148 - RNA, 19 nt, Artificial Sequence
  Description of Artificial Sequence: Synthetic oligonucleotide
  Antisense Strand to SEQ ID NO: 469147
uuucuugcacacauauuug

SEQ ID NO: 469149 - RNA, 19 nt, Artificial Sequence
  Description of Artificial Sequence: Synthetic oligonucleotide
  Sense strand starting at position 734 of SEQ ID NO: 317161
uggaauugauucguuccaa

SEQ ID NO: 469150 - RNA, 19 nt, Artificial Sequence
  Description of Artificial Sequence: Synthetic oligonucleotide
  Antisense Strand to SEQ ID NO: 469149
uuggaacgaaucaauucca

SEQ ID NO: 469151 - RNA, 19 nt, Artificial Sequence
  Description of Artificial Sequence: Synthetic oligonucleotide
  Sense strand starting at position 735 of SEQ ID NO: 317161
ggaauugauucguuccaag

SEQ ID NO: 469152 - RNA, 19 nt, Artificial Sequence
  Description of Artificial Sequence: Synthetic oligonucleotide
  Antisense Strand to SEQ ID NO: 469151
cuuggaacgaaucaauucc

SEQ ID NO: 469153 - RNA, 19 nt, Artificial Sequence
  Description of Artificial Sequence: Synthetic oligonucleotide
  Sense strand starting at position 774 of SEQ ID NO: 317161
ggcaucuuucuuuaggacu

SEQ ID NO: 469154 - RNA, 19 nt, Artificial Sequence
  Description of Artificial Sequence: Synthetic oligonucleotide
  Antisense Strand to SEQ ID NO: 469153
aguccuaaagaaagaugcc

SEQ ID NO: 469155 - RNA, 19 nt, Artificial Sequence
  Description of Artificial Sequence: Synthetic oligonucleotide
  Sense strand starting at position 914 of SEQ ID NO: 317161
ucuguaauugcacagaggu

SEQ ID NO: 469156 - RNA, 19 nt, Artificial Sequence
  Description of Artificial Sequence: Synthetic oligonucleotide
  Antisense Strand to SEQ ID NO: 469155
accucugugcaauuacaga

SEQ ID NO: 469157 - RNA, 19 nt, Artificial Sequence
  Description of Artificial Sequence: Synthetic oligonucleotide
  Sense strand starting at position 916 of SEQ ID NO: 317161
uguaauugcacagagguga

SEQ ID NO: 469158 - RNA, 19 nt, Artificial Sequence
  Description of Artificial Sequence: Synthetic oligonucleotide
  Antisense Strand to SEQ ID NO: 469157
ucaccucugugcaauuaca

SEQ ID NO: 469159 - RNA, 19 nt, Artificial Sequence
  Description of Artificial Sequence: Synthetic oligonucleotide
  Sense strand starting at position 1099 of SEQ ID NO: 317161
cagugugugcgcucucaca

SEQ ID NO: 469160 - RNA, 19 nt, Artificial Sequence
  Description of Artificial Sequence: Synthetic oligonucleotide
  Antisense Strand to SEQ ID NO: 469159
ugugagagcgcacacacug

SEQ ID NO: 469161 - RNA, 19 nt, Artificial Sequence
  Description of Artificial Sequence: Synthetic oligonucleotide
  Sense strand starting at position 1101 of SEQ ID NO: 317161
gugugugcgcucucacaca

SEQ ID NO: 469162 - RNA, 19 nt, Artificial Sequence
  Description of Artificial Sequence: Synthetic oligonucleotide
  Antisense Strand to SEQ ID NO: 469161
ugugugagagcgcacacac

SEQ ID NO: 469163 - RNA, 19 nt, Artificial Sequence
  Description of Artificial Sequence: Synthetic oligonucleotide
  Sense strand starting at position 1352 of SEQ ID NO: 317161
gggaguuucccggguaagg

SEQ ID NO: 469164 - RNA, 19 nt, Artificial Sequence
  Description of Artificial Sequence: Synthetic oligonucleotide
  Antisense Strand to SEQ ID NO: 469163
ccuuacccgggaaacuccc

SEQ ID NO: 469165 - RNA, 19 nt, Artificial Sequence
  Description of Artificial Sequence: Synthetic oligonucleotide
  Sense strand starting at position 1354 of SEQ ID NO: 317161
gaguuucccggguaaggga

SEQ ID NO: 469166 - RNA, 19 nt, Artificial Sequence
  Description of Artificial Sequence: Synthetic oligonucleotide
  Antisense Strand to SEQ ID NO: 469165
ucccuuacccgggaaacuc

SEQ ID NO: 469167 - RNA, 19 nt, Artificial Sequence
  Description of Artificial Sequence: Synthetic oligonucleotide
  Sense strand starting at position 1656 of SEQ ID NO: 317161
caagacagugagugugaaa

SEQ ID NO: 469168 - RNA, 19 nt, Artificial Sequence
  Description of Artificial Sequence: Synthetic oligonucleotide
  Antisense Strand to SEQ ID NO: 469167
uuucacacucacugucuug

SEQ ID NO: 469169 - RNA, 19 nt, Artificial Sequence
  Description of Artificial Sequence: Synthetic oligonucleotide
  Sense strand starting at position 2427 of SEQ ID NO: 317161
cugagcagugucugcauuu

SEQ ID NO: 469170 - RNA, 19 nt, Artificial Sequence
  Description of Artificial Sequence: Synthetic oligonucleotide
  Antisense Strand to SEQ ID NO: 469169
aaaugcagacacugcucag

SEQ ID NO: 469171 - RNA, 19 nt, Artificial Sequence
  Description of Artificial Sequence: Synthetic oligonucleotide
  Sense strand starting at position 2428 of SEQ ID NO: 317161
ugagcagugucugcauuua

SEQ ID NO: 469172 - RNA, 19 nt, Artificial Sequence
  Description of Artificial Sequence: Synthetic oligonucleotide
  Antisense Strand to SEQ ID NO: 469171
uaaaugcagacacugcuca

SEQ ID NO: 469173 - RNA, 19 nt, Artificial Sequence
  Description of Artificial Sequence: Synthetic oligonucleotide
  Sense strand starting at position 2458 of SEQ ID NO: 317161
gcacgacuuggacaaauua

SEQ ID NO: 469174 - RNA, 19 nt, Artificial Sequence
  Description of Artificial Sequence: Synthetic oligonucleotide
  Antisense Strand to SEQ ID NO: 469173
uaauuuguccaagucgugc

SEQ ID NO: 469175 - RNA, 19 nt, Artificial Sequence
  Description of Artificial Sequence: Synthetic oligonucleotide
  Sense strand starting at position 2467 of SEQ ID NO: 317161
ggacaaauuagcgaaggca

SEQ ID NO: 469176 - RNA, 19 nt, Artificial Sequence
  Description of Artificial Sequence: Synthetic oligonucleotide
  Antisense Strand to SEQ ID NO: 469175
ugccuucgcuaauuugucc

SEQ ID NO: 469177 - RNA, 19 nt, Artificial Sequence
  Description of Artificial Sequence: Synthetic oligonucleotide
  Sense strand starting at position 2481 of SEQ ID NO: 317161
aggcaaacucugggaguuu

SEQ ID NO: 469178 - RNA, 19 nt, Artificial Sequence
  Description of Artificial Sequence: Synthetic oligonucleotide
  Antisense Strand to SEQ ID NO: 469177
aaacucccagaguuugccu

SEQ ID NO: 469179 - RNA, 19 nt, Artificial Sequence
  Description of Artificial Sequence: Synthetic oligonucleotide
  Sense strand starting at position 2511 of SEQ ID NO: 317161
agaguuggcaaaggcauau

SEQ ID NO: 469180 - RNA, 19 nt, Artificial Sequence
  Description of Artificial Sequence: Synthetic oligonucleotide
  Antisense Strand to SEQ ID NO: 469179
auaugccuuugccaacucu

SEQ ID NO: 469181 - RNA, 19 nt, Artificial Sequence
  Description of Artificial Sequence: Synthetic oligonucleotide
  Sense strand starting at position 2760 of SEQ ID NO: 317161
ucaguuguugcagaguaaa

SEQ ID NO: 469182 - RNA, 19 nt, Artificial Sequence
  Description of Artificial Sequence: Synthetic oligonucleotide
  Antisense Strand to SEQ ID NO: 469181
uuuacucugcaacaacuga

SEQ ID NO: 469183 - RNA, 19 nt, Artificial Sequence
  Description of Artificial Sequence: Synthetic oligonucleotide
  Sense strand starting at position 2830 of SEQ ID NO: 317161
uguacaugagcccaaucaa

SEQ ID NO: 469184 - RNA, 19 nt, Artificial Sequence
  Description of Artificial Sequence: Synthetic oligonucleotide
  Antisense Strand to SEQ ID NO: 469183
uugauugggcucauguaca

SEQ ID NO: 469185 - RNA, 19 nt, Artificial Sequence
  Description of Artificial Sequence: Synthetic oligonucleotide
  Sense strand starting at position 2862 of SEQ ID NO: 317161
ccaaccuuaccucgaauga

SEQ ID NO: 469186 - RNA, 19 nt, Artificial Sequence
  Description of Artificial Sequence: Synthetic oligonucleotide
  Antisense Strand to SEQ ID NO: 469185
ucauucgagguaagguugg

SEQ ID NO: 469187 - RNA, 19 nt, Artificial Sequence
  Description of Artificial Sequence: Synthetic oligonucleotide
  Sense strand starting at position 3139 of SEQ ID NO: 317161
ugcaaauaucuacauggca

SEQ ID NO: 469188 - RNA, 19 nt, Artificial Sequence
  Description of Artificial Sequence: Synthetic oligonucleotide
  Antisense Strand to SEQ ID NO: 469187
ugccauguagauauuugca

SEQ ID NO: 469189 - RNA, 19 nt, Artificial Sequence
  Description of Artificial Sequence: Synthetic oligonucleotide
  Sense strand starting at position 3190 of SEQ ID NO: 317161
ugucacaccucuuugaaga

SEQ ID NO: 469190 - RNA, 19 nt, Artificial Sequence
  Description of Artificial Sequence: Synthetic oligonucleotide
  Antisense Strand to SEQ ID NO: 469189
ucuucaaagaggugugaca

SEQ ID NO: 469191 - RNA, 19 nt, Artificial Sequence
  Description of Artificial Sequence: Synthetic oligonucleotide
  Sense strand starting at position 3191 of SEQ ID NO: 317161
gucacaccucuuugaagag

SEQ ID NO: 469192 - RNA, 19 nt, Artificial Sequence
  Description of Artificial Sequence: Synthetic oligonucleotide
  Antisense Strand to SEQ ID NO: 469191
cucuucaaagaggugugac

SEQ ID NO: 469193 - RNA, 19 nt, Artificial Sequence
  Description of Artificial Sequence: Synthetic oligonucleotide
  Sense strand starting at position 3200 of SEQ ID NO: 317161
cuuugaagaggccagucau

SEQ ID NO: 469194 - RNA, 19 nt, Artificial Sequence
  Description of Artificial Sequence: Synthetic oligonucleotide
  Antisense Strand to SEQ ID NO: 469193
augacuggccucuucaaag

SEQ ID NO: 469195 - RNA, 19 nt, Artificial Sequence
  Description of Artificial Sequence: Synthetic oligonucleotide
  Sense strand starting at position 3210 of SEQ ID NO: 317161
gccagucaugaccauccua

SEQ ID NO: 469196 - RNA, 19 nt, Artificial Sequence
  Description of Artificial Sequence: Synthetic oligonucleotide
  Antisense Strand to SEQ ID NO: 469195
uaggauggucaugacuggc

SEQ ID NO: 469197 - RNA, 19 nt, Artificial Sequence
  Description of Artificial Sequence: Synthetic oligonucleotide
  Sense strand starting at position 3518 of SEQ ID NO: 317161
auggaaaguucugugguag

SEQ ID NO: 469198 - RNA, 19 nt, Artificial Sequence
  Description of Artificial Sequence: Synthetic oligonucleotide
  Antisense Strand to SEQ ID NO: 469197
cuaccacagaacuuuccau

SEQ ID NO: 469199 - RNA, 19 nt, Artificial Sequence
  Description of Artificial Sequence: Synthetic oligonucleotide
  Sense strand starting at position 3519 of SEQ ID NO: 317161
uggaaaguucugugguagg

SEQ ID NO: 469200 - RNA, 19 nt, Artificial Sequence
  Description of Artificial Sequence: Synthetic oligonucleotide
  Antisense Strand to SEQ ID NO: 469199
ccuaccacagaacuuucca

SEQ ID NO: 469201 - RNA, 19 nt, Artificial Sequence
  Description of Artificial Sequence: Synthetic oligonucleotide
  Sense strand starting at position 3530 of SEQ ID NO: 317161
gugguagggugauucacua

SEQ ID NO: 469202 - RNA, 19 nt, Artificial Sequence
  Description of Artificial Sequence: Synthetic oligonucleotide
  Antisense Strand to SEQ ID NO: 469201
uagugaaucacccuaccac

SEQ ID NO: 469203 - RNA, 19 nt, Artificial Sequence
  Description of Artificial Sequence: Synthetic oligonucleotide
  Sense strand starting at position 3623 of SEQ ID NO: 317161
gcucuuugauuucuaaguu

SEQ ID NO: 469204 - RNA, 19 nt, Artificial Sequence
  Description of Artificial Sequence: Synthetic oligonucleotide
  Antisense Strand to SEQ ID NO: 469203
aacuuagaaaucaaagagc

SEQ ID NO: 469205 - RNA, 19 nt, Artificial Sequence
  Description of Artificial Sequence: Synthetic oligonucleotide
  Sense strand starting at position 3698 of SEQ ID NO: 317161
ucaggcuugggacauuauu

SEQ ID NO: 469206 - RNA, 19 nt, Artificial Sequence
  Description of Artificial Sequence: Synthetic oligonucleotide
  Antisense Strand to SEQ ID NO: 469205
aauaaugucccaagccuga

SEQ ID NO: 469207 - RNA, 19 nt, Artificial Sequence
  Description of Artificial Sequence: Synthetic oligonucleotide
  Sense strand starting at position 3891 of SEQ ID NO: 317161
ggguuagauuuacaaauaa

SEQ ID NO: 469208 - RNA, 19 nt, Artificial Sequence
  Description of Artificial Sequence: Synthetic oligonucleotide
  Antisense Strand to SEQ ID NO: 469207
uuauuuguaaaucuaaccc

SEQ ID NO: 469209 - RNA, 19 nt, Artificial Sequence
  Description of Artificial Sequence: Synthetic oligonucleotide
  Sense strand starting at position 3916 of SEQ ID NO: 317161
cugugugcaauggaugauu

SEQ ID NO: 469210 - RNA, 19 nt, Artificial Sequence
  Description of Artificial Sequence: Synthetic oligonucleotide
  Antisense Strand to SEQ ID NO: 469209
aaucauccauugcacacag

SEQ ID NO: 469211 - RNA, 19 nt, Artificial Sequence
  Description of Artificial Sequence: Synthetic oligonucleotide
  Sense strand starting at position 3924 of SEQ ID NO: 317161
aauggaugauuagagagaa

SEQ ID NO: 469212 - RNA, 19 nt, Artificial Sequence
  Description of Artificial Sequence: Synthetic oligonucleotide
  Antisense Strand to SEQ ID NO: 469211
uucucucuaaucauccauu

SEQ ID NO: 469213 - RNA, 19 nt, Artificial Sequence
  Description of Artificial Sequence: Synthetic oligonucleotide
  Sense strand starting at position 103 of SEQ ID NO: 317162
aaagaaaugucagccuugu

SEQ ID NO: 469214 - RNA, 19 nt, Artificial Sequence
  Description of Artificial Sequence: Synthetic oligonucleotide
  Antisense Strand to SEQ ID NO: 469213
acaaggcugacauuucuuu

SEQ ID NO: 469215 - RNA, 19 nt, Artificial Sequence
  Description of Artificial Sequence: Synthetic oligonucleotide
  Sense strand starting at position 209 of SEQ ID NO: 317162
acagacugcugccuuaaga

SEQ ID NO: 469216 - RNA, 19 nt, Artificial Sequence
  Description of Artificial Sequence: Synthetic oligonucleotide
  Antisense Strand to SEQ ID NO: 469215
ucuuaaggcagcagucugu

SEQ ID NO: 469217 - RNA, 19 nt, Artificial Sequence
  Description of Artificial Sequence: Synthetic oligonucleotide
  Sense strand starting at position 241 of SEQ ID NO: 317162
uaaaguaguagucacggaa

SEQ ID NO: 469218 - RNA, 19 nt, Artificial Sequence
  Description of Artificial Sequence: Synthetic oligonucleotide
  Antisense Strand to SEQ ID NO: 469217
uuccgugacuacuacuuua

SEQ ID NO: 469219 - RNA, 19 nt, Artificial Sequence
  Description of Artificial Sequence: Synthetic oligonucleotide
  Sense strand starting at position 244 of SEQ ID NO: 317162
aguaguagucacggaagag

SEQ ID NO: 469220 - RNA, 19 nt, Artificial Sequence
  Description of Artificial Sequence: Synthetic oligonucleotide
  Antisense Strand to SEQ ID NO: 469219
cucuuccgugacuacuacu

SEQ ID NO: 469221 - RNA, 19 nt, Artificial Sequence
  Description of Artificial Sequence: Synthetic oligonucleotide
  Sense strand starting at position 427 of SEQ ID NO: 317162
gcccgucaugcuuucucau

SEQ ID NO: 469222 - RNA, 19 nt, Artificial Sequence
  Description of Artificial Sequence: Synthetic oligonucleotide
  Antisense Strand to SEQ ID NO: 469221
augagaaagcaugacgggc

SEQ ID NO: 469223 - RNA, 19 nt, Artificial Sequence
  Description of Artificial Sequence: Synthetic oligonucleotide
  Sense strand starting at position 547 of SEQ ID NO: 317162
uccugugcuccagaaguua

SEQ ID NO: 469224 - RNA, 19 nt, Artificial Sequence
  Description of Artificial Sequence: Synthetic oligonucleotide
  Antisense Strand to SEQ ID NO: 469223
uaacuucuggagcacagga

SEQ ID NO: 469225 - RNA, 19 nt, Artificial Sequence
  Description of Artificial Sequence: Synthetic oligonucleotide
  Sense strand starting at position 744 of SEQ ID NO: 317162
ccuuucuaccagugauaag

SEQ ID NO: 469226 - RNA, 19 nt, Artificial Sequence
  Description of Artificial Sequence: Synthetic oligonucleotide
  Antisense Strand to SEQ ID NO: 469225
cuuaucacugguagaaagg

SEQ ID NO: 469227 - RNA, 19 nt, Artificial Sequence
  Description of Artificial Sequence: Synthetic oligonucleotide
  Sense strand starting at position 755 of SEQ ID NO: 317162
gugauaagagacuggcaaa

SEQ ID NO: 469228 - RNA, 19 nt, Artificial Sequence
  Description of Artificial Sequence: Synthetic oligonucleotide
  Antisense Strand to SEQ ID NO: 469227
uuugccagucucuuaucac

SEQ ID NO: 469229 - RNA, 19 nt, Artificial Sequence
  Description of Artificial Sequence: Synthetic oligonucleotide
  Sense strand starting at position 982 of SEQ ID NO: 317162
gcuaaagaguucccugauu

SEQ ID NO: 469230 - RNA, 19 nt, Artificial Sequence
  Description of Artificial Sequence: Synthetic oligonucleotide
  Antisense Strand to SEQ ID NO: 469229
aaucagggaacucuuuagc

SEQ ID NO: 469231 - RNA, 19 nt, Artificial Sequence
  Description of Artificial Sequence: Synthetic oligonucleotide
  Sense strand starting at position 984 of SEQ ID NO: 317162
uaaagaguucccugauuag

SEQ ID NO: 469232 - RNA, 19 nt, Artificial Sequence
  Description of Artificial Sequence: Synthetic oligonucleotide
  Antisense Strand to SEQ ID NO: 469231
cuaaucagggaacucuuua

SEQ ID NO: 469233 - RNA, 19 nt, Artificial Sequence
  Description of Artificial Sequence: Synthetic oligonucleotide
  Sense strand starting at position 987 of SEQ ID NO: 317162
agaguucccugauuagaac

SEQ ID NO: 469234 - RNA, 19 nt, Artificial Sequence
  Description of Artificial Sequence: Synthetic oligonucleotide
  Antisense Strand to SEQ ID NO: 469233
guucuaaucagggaacucu

SEQ ID NO: 469235 - RNA, 19 nt, Artificial Sequence
  Description of Artificial Sequence: Synthetic oligonucleotide
  Sense strand starting at position 996 of SEQ ID NO: 317162
ugauuagaacuccgaugau

SEQ ID NO: 469236 - RNA, 19 nt, Artificial Sequence
  Description of Artificial Sequence: Synthetic oligonucleotide
  Antisense Strand to SEQ ID NO: 469235
aucaucggaguucuaauca

SEQ ID NO: 469237 - RNA, 19 nt, Artificial Sequence
  Description of Artificial Sequence: Synthetic oligonucleotide
  Sense strand starting at position 999 of SEQ ID NO: 317162
uuagaacuccgaugauuaa

SEQ ID NO: 469238 - RNA, 19 nt, Artificial Sequence
  Description of Artificial Sequence: Synthetic oligonucleotide
  Antisense Strand to SEQ ID NO: 469237
uuaaucaucggaguucuaa

SEQ ID NO: 469239 - RNA, 19 nt, Artificial Sequence
  Description of Artificial Sequence: Synthetic oligonucleotide
  Sense strand starting at position 1301 of SEQ ID NO: 317162
gcucaagacacguaaggaa

SEQ ID NO: 469240 - RNA, 19 nt, Artificial Sequence
  Description of Artificial Sequence: Synthetic oligonucleotide
  Antisense Strand to SEQ ID NO: 469239
uuccuuacgugucuugagc

SEQ ID NO: 469241 - RNA, 19 nt, Artificial Sequence
  Description of Artificial Sequence: Synthetic oligonucleotide
  Sense strand starting at position 1627 of SEQ ID NO: 317162
ucaccuugucaaugagaga

SEQ ID NO: 469242 - RNA, 19 nt, Artificial Sequence
  Description of Artificial Sequence: Synthetic oligonucleotide
  Antisense Strand to SEQ ID NO: 469241
ucucucauugacaagguga

SEQ ID NO: 469243 - RNA, 19 nt, Artificial Sequence
  Description of Artificial Sequence: Synthetic oligonucleotide
  Sense strand starting at position 1630 of SEQ ID NO: 317162
ccuugucaaugagagauuu

SEQ ID NO: 469244 - RNA, 19 nt, Artificial Sequence
  Description of Artificial Sequence: Synthetic oligonucleotide
  Antisense Strand to SEQ ID NO: 469243
aaaucucucauugacaagg

SEQ ID NO: 469245 - RNA, 19 nt, Artificial Sequence
  Description of Artificial Sequence: Synthetic oligonucleotide
  Sense strand starting at position 1649 of SEQ ID NO: 317162
cgcagaagucucuggaaag

SEQ ID NO: 469246 - RNA, 19 nt, Artificial Sequence
  Description of Artificial Sequence: Synthetic oligonucleotide
  Antisense Strand to SEQ ID NO: 469245
cuuuccagagacuucugcg

SEQ ID NO: 469247 - RNA, 19 nt, Artificial Sequence
  Description of Artificial Sequence: Synthetic oligonucleotide
  Sense strand starting at position 1760 of SEQ ID NO: 317162
ggaagauccgcugguauuu

SEQ ID NO: 469248 - RNA, 19 nt, Artificial Sequence
  Description of Artificial Sequence: Synthetic oligonucleotide
  Antisense Strand to SEQ ID NO: 469247
aaauaccagcggaucuucc

SEQ ID NO: 469249 - RNA, 19 nt, Artificial Sequence
  Description of Artificial Sequence: Synthetic oligonucleotide
  Sense strand starting at position 1932 of SEQ ID NO: 317162
ggaagcauugccuaggaau

SEQ ID NO: 469250 - RNA, 19 nt, Artificial Sequence
  Description of Artificial Sequence: Synthetic oligonucleotide
  Antisense Strand to SEQ ID NO: 469249
auuccuaggcaaugcuucc

SEQ ID NO: 469251 - RNA, 19 nt, Artificial Sequence
  Description of Artificial Sequence: Synthetic oligonucleotide
  Sense strand starting at position 2202 of SEQ ID NO: 317162
acaugaaauucgccacaau

SEQ ID NO: 469252 - RNA, 19 nt, Artificial Sequence
  Description of Artificial Sequence: Synthetic oligonucleotide
  Antisense Strand to SEQ ID NO: 469251
auuguggcgaauuucaugu

SEQ ID NO: 469253 - RNA, 19 nt, Artificial Sequence
  Description of Artificial Sequence: Synthetic oligonucleotide
  Sense strand starting at position 2205 of SEQ ID NO: 317162
ugaaauucgccacaauaau

SEQ ID NO: 469254 - RNA, 19 nt, Artificial Sequence
  Description of Artificial Sequence: Synthetic oligonucleotide
  Antisense Strand to SEQ ID NO: 469253
auuauuguggcgaauuuca

SEQ ID NO: 469255 - RNA, 19 nt, Artificial Sequence
  Description of Artificial Sequence: Synthetic oligonucleotide
  Sense strand starting at position 2495 of SEQ ID NO: 317162
ugauuaguacuacaguacu

SEQ ID NO: 469256 - RNA, 19 nt, Artificial Sequence
  Description of Artificial Sequence: Synthetic oligonucleotide
  Antisense Strand to SEQ ID NO: 469255
aguacuguaguacuaauca

SEQ ID NO: 469257 - RNA, 19 nt, Artificial Sequence
  Description of Artificial Sequence: Synthetic oligonucleotide
  Sense strand starting at position 2627 of SEQ ID NO: 317162
accugauucuauucuaguu

SEQ ID NO: 469258 - RNA, 19 nt, Artificial Sequence
  Description of Artificial Sequence: Synthetic oligonucleotide
  Antisense Strand to SEQ ID NO: 469257
aacuagaauagaaucaggu

SEQ ID NO: 469259 - RNA, 19 nt, Artificial Sequence
  Description of Artificial Sequence: Synthetic oligonucleotide
  Sense strand starting at position 2781 of SEQ ID NO: 317162
gggcacugcccagagaauu

SEQ ID NO: 469260 - RNA, 19 nt, Artificial Sequence
  Description of Artificial Sequence: Synthetic oligonucleotide
  Antisense Strand to SEQ ID NO: 469259
aauucucugggcagugccc

SEQ ID NO: 469261 - RNA, 19 nt, Artificial Sequence
  Description of Artificial Sequence: Synthetic oligonucleotide
  Sense strand starting at position 2920 of SEQ ID NO: 317162
ucugauuguuaggcugaau

SEQ ID NO: 469262 - RNA, 19 nt, Artificial Sequence
  Description of Artificial Sequence: Synthetic oligonucleotide
  Antisense Strand to SEQ ID NO: 469261
auucagccuaacaaucaga

SEQ ID NO: 469263 - RNA, 19 nt, Artificial Sequence
  Description of Artificial Sequence: Synthetic oligonucleotide
  Sense strand starting at position 2987 of SEQ ID NO: 317162
acacaaucucuggauguuu

SEQ ID NO: 469264 - RNA, 19 nt, Artificial Sequence
  Description of Artificial Sequence: Synthetic oligonucleotide
  Antisense Strand to SEQ ID NO: 469263
aaacauccagagauugugu

SEQ ID NO: 469265 - RNA, 19 nt, Artificial Sequence
  Description of Artificial Sequence: Synthetic oligonucleotide
  Sense strand starting at position 3056 of SEQ ID NO: 317162
uuggaaaggcauuguaauu

SEQ ID NO: 469266 - RNA, 19 nt, Artificial Sequence
  Description of Artificial Sequence: Synthetic oligonucleotide
  Antisense Strand to SEQ ID NO: 469265
aauuacaaugccuuuccaa

SEQ ID NO: 469267 - RNA, 19 nt, Artificial Sequence
  Description of Artificial Sequence: Synthetic oligonucleotide
  Sense strand starting at position 3086 of SEQ ID NO: 317162
ugucaugauuauguaauga

SEQ ID NO: 469268 - RNA, 19 nt, Artificial Sequence
  Description of Artificial Sequence: Synthetic oligonucleotide
  Antisense Strand to SEQ ID NO: 469267
ucauuacauaaucaugaca

SEQ ID NO: 469269 - RNA, 19 nt, Artificial Sequence
  Description of Artificial Sequence: Synthetic oligonucleotide
  Sense strand starting at position 3107 of SEQ ID NO: 317162
guacuauuaguguauaaca

SEQ ID NO: 469270 - RNA, 19 nt, Artificial Sequence
  Description of Artificial Sequence: Synthetic oligonucleotide
  Antisense Strand to SEQ ID NO: 469269
uguuauacacuaauaguac

SEQ ID NO: 469271 - RNA, 19 nt, Artificial Sequence
  Description of Artificial Sequence: Synthetic oligonucleotide
  Sense strand starting at position 3350 of SEQ ID NO: 317162
gucacauucuguucuuaga

SEQ ID NO: 469272 - RNA, 19 nt, Artificial Sequence
  Description of Artificial Sequence: Synthetic oligonucleotide
  Antisense Strand to SEQ ID NO: 469271
ucuaagaacagaaugugac

SEQ ID NO: 469273 - RNA, 19 nt, Artificial Sequence
  Description of Artificial Sequence: Synthetic oligonucleotide
  Sense strand starting at position 3359 of SEQ ID NO: 317162
uguucuuagaaggaaguuu

SEQ ID NO: 469274 - RNA, 19 nt, Artificial Sequence
  Description of Artificial Sequence: Synthetic oligonucleotide
  Antisense Strand to SEQ ID NO: 469273
aaacuuccuucuaagaaca

SEQ ID NO: 469275 - RNA, 19 nt, Artificial Sequence
  Description of Artificial Sequence: Synthetic oligonucleotide
  Sense strand starting at position 3410 of SEQ ID NO: 317162
uuuagccugcuauaagaau

SEQ ID NO: 469276 - RNA, 19 nt, Artificial Sequence
  Description of Artificial Sequence: Synthetic oligonucleotide
  Antisense Strand to SEQ ID NO: 469275
auucuuauagcaggcuaaa

SEQ ID NO: 469277 - RNA, 19 nt, Artificial Sequence
  Description of Artificial Sequence: Synthetic oligonucleotide
  Sense strand starting at position 3512 of SEQ ID NO: 317162
agaauauaauuuggacuca

SEQ ID NO: 469278 - RNA, 19 nt, Artificial Sequence
  Description of Artificial Sequence: Synthetic oligonucleotide
  Antisense Strand to SEQ ID NO: 469277
ugaguccaaauuauauucu

SEQ ID NO: 469279 - RNA, 19 nt, Artificial Sequence
  Description of Artificial Sequence: Synthetic oligonucleotide
  Sense strand starting at position 3590 of SEQ ID NO: 317162
gaacuauuauggccauugu

SEQ ID NO: 469280 - RNA, 19 nt, Artificial Sequence
  Description of Artificial Sequence: Synthetic oligonucleotide
  Antisense Strand to SEQ ID NO: 469279
acaauggccauaauaguuc

SEQ ID NO: 469281 - RNA, 19 nt, Artificial Sequence
  Description of Artificial Sequence: Synthetic oligonucleotide
  Sense strand starting at position 3640 of SEQ ID NO: 317162
aaguguucucccuaaggaa

SEQ ID NO: 469282 - RNA, 19 nt, Artificial Sequence
  Description of Artificial Sequence: Synthetic oligonucleotide
  Antisense Strand to SEQ ID NO: 469281
uuccuuagggagaacacuu

SEQ ID NO: 469283 - RNA, 19 nt, Artificial Sequence
  Description of Artificial Sequence: Synthetic oligonucleotide
  Sense strand starting at position 3666 of SEQ ID NO: 317162
gaaacugcauucuugaguu

SEQ ID NO: 469284 - RNA, 19 nt, Artificial Sequence
  Description of Artificial Sequence: Synthetic oligonucleotide
  Antisense Strand to SEQ ID NO: 469283
aacucaagaaugcaguuuc

SEQ ID NO: 469285 - RNA, 19 nt, Artificial Sequence
  Description of Artificial Sequence: Synthetic oligonucleotide
  Sense strand starting at position 3705 of SEQ ID NO: 317162
uuugaaagaucauuggucu

SEQ ID NO: 469286 - RNA, 19 nt, Artificial Sequence
  Description of Artificial Sequence: Synthetic oligonucleotide
  Antisense Strand to SEQ ID NO: 469285
agaccaaugaucuuucaaa

SEQ ID NO: 469287 - RNA, 19 nt, Artificial Sequence
  Description of Artificial Sequence: Synthetic oligonucleotide
  Sense strand starting at position 3706 of SEQ ID NO: 317162
uugaaagaucauuggucuc

SEQ ID NO: 469288 - RNA, 19 nt, Artificial Sequence
  Description of Artificial Sequence: Synthetic oligonucleotide
  Antisense Strand to SEQ ID NO: 469287
gagaccaaugaucuuucaa

SEQ ID NO: 469289 - RNA, 19 nt, Artificial Sequence
  Description of Artificial Sequence: Synthetic oligonucleotide
  Sense strand starting at position 3708 of SEQ ID NO: 317162
gaaagaucauuggucucaa

SEQ ID NO: 469290 - RNA, 19 nt, Artificial Sequence
  Description of Artificial Sequence: Synthetic oligonucleotide
  Antisense Strand to SEQ ID NO: 469289
uugagaccaaugaucuuuc

SEQ ID NO: 469291 - RNA, 19 nt, Artificial Sequence
  Description of Artificial Sequence: Synthetic oligonucleotide
  Sense strand starting at position 3709 of SEQ ID NO: 317162
aaagaucauuggucucaag

SEQ ID NO: 469292 - RNA, 19 nt, Artificial Sequence
  Description of Artificial Sequence: Synthetic oligonucleotide
  Antisense Strand to SEQ ID NO: 469291
cuugagaccaaugaucuuu

SEQ ID NO: 469293 - RNA, 19 nt, Artificial Sequence
  Description of Artificial Sequence: Synthetic oligonucleotide
  Sense strand starting at position 159 of SEQ ID NO: 317163
ggagguuauaccugacuaa

SEQ ID NO: 469294 - RNA, 19 nt, Artificial Sequence
  Description of Artificial Sequence: Synthetic oligonucleotide
  Antisense Strand to SEQ ID NO: 469293
uuagucagguauaaccucc

SEQ ID NO: 469295 - RNA, 19 nt, Artificial Sequence
  Description of Artificial Sequence: Synthetic oligonucleotide
  Sense strand starting at position 162 of SEQ ID NO: 317163
gguuauaccugacuaaauu

SEQ ID NO: 469296 - RNA, 19 nt, Artificial Sequence
  Description of Artificial Sequence: Synthetic oligonucleotide
  Antisense Strand to SEQ ID NO: 469295
aauuuagucagguauaacc

SEQ ID NO: 469297 - RNA, 19 nt, Artificial Sequence
  Description of Artificial Sequence: Synthetic oligonucleotide
  Sense strand starting at position 186 of SEQ ID NO: 317163
gaagcaugagauugaaggu

SEQ ID NO: 469298 - RNA, 19 nt, Artificial Sequence
  Description of Artificial Sequence: Synthetic oligonucleotide
  Antisense Strand to SEQ ID NO: 469297
accuucaaucucaugcuuc

SEQ ID NO: 469299 - RNA, 19 nt, Artificial Sequence
  Description of Artificial Sequence: Synthetic oligonucleotide
  Sense strand starting at position 291 of SEQ ID NO: 317163
uuacaacuucucuguagga

SEQ ID NO: 469300 - RNA, 19 nt, Artificial Sequence
  Description of Artificial Sequence: Synthetic oligonucleotide
  Antisense Strand to SEQ ID NO: 469299
uccuacagagaaguuguaa

SEQ ID NO: 469301 - RNA, 19 nt, Artificial Sequence
  Description of Artificial Sequence: Synthetic oligonucleotide
  Sense strand starting at position 305 of SEQ ID NO: 317163
uaggaaugguuguugaucu

SEQ ID NO: 469302 - RNA, 19 nt, Artificial Sequence
  Description of Artificial Sequence: Synthetic oligonucleotide
  Antisense Strand to SEQ ID NO: 469301
agaucaacaaccauuccua

SEQ ID NO: 469303 - RNA, 19 nt, Artificial Sequence
  Description of Artificial Sequence: Synthetic oligonucleotide
  Sense strand starting at position 309 of SEQ ID NO: 317163
aaugguuguugaucuacaa

SEQ ID NO: 469304 - RNA, 19 nt, Artificial Sequence
  Description of Artificial Sequence: Synthetic oligonucleotide
  Antisense Strand to SEQ ID NO: 469303
uuguagaucaacaaccauu

SEQ ID NO: 469305 - RNA, 19 nt, Artificial Sequence
  Description of Artificial Sequence: Synthetic oligonucleotide
  Sense strand starting at position 615 of SEQ ID NO: 317163
cuuagaaacuuugucauag

SEQ ID NO: 469306 - RNA, 19 nt, Artificial Sequence
  Description of Artificial Sequence: Synthetic oligonucleotide
  Antisense Strand to SEQ ID NO: 469305
cuaugacaaaguuucuaag

SEQ ID NO: 469307 - RNA, 19 nt, Artificial Sequence
  Description of Artificial Sequence: Synthetic oligonucleotide
  Sense strand starting at position 714 of SEQ ID NO: 317163
uuauuugagucagagacca

SEQ ID NO: 469308 - RNA, 19 nt, Artificial Sequence
  Description of Artificial Sequence: Synthetic oligonucleotide
  Antisense Strand to SEQ ID NO: 469307
uggucucugacucaaauaa

SEQ ID NO: 469309 - RNA, 19 nt, Artificial Sequence
  Description of Artificial Sequence: Synthetic oligonucleotide
  Sense strand starting at position 791 of SEQ ID NO: 317163
acagguuggccuuaguaaa

SEQ ID NO: 469310 - RNA, 19 nt, Artificial Sequence
  Description of Artificial Sequence: Synthetic oligonucleotide
  Antisense Strand to SEQ ID NO: 469309
uuuacuaaggccaaccugu

SEQ ID NO: 469311 - RNA, 19 nt, Artificial Sequence
  Description of Artificial Sequence: Synthetic oligonucleotide
  Sense strand starting at position 826 of SEQ ID NO: 317163
agcacaaugucuuccagaa

SEQ ID NO: 469312 - RNA, 19 nt, Artificial Sequence
  Description of Artificial Sequence: Synthetic oligonucleotide
  Antisense Strand to SEQ ID NO: 469311
uucuggaagacauugugcu

SEQ ID NO: 469313 - RNA, 19 nt, Artificial Sequence
  Description of Artificial Sequence: Synthetic oligonucleotide
  Sense strand starting at position 978 of SEQ ID NO: 317163
agacaugauuguuuggcua

SEQ ID NO: 469314 - RNA, 19 nt, Artificial Sequence
  Description of Artificial Sequence: Synthetic oligonucleotide
  Antisense Strand to SEQ ID NO: 469313
uagccaaacaaucaugucu

SEQ ID NO: 469315 - RNA, 19 nt, Artificial Sequence
  Description of Artificial Sequence: Synthetic oligonucleotide
  Sense strand starting at position 989 of SEQ ID NO: 317163
uuuggcuaaucaguagaaa

SEQ ID NO: 469316 - RNA, 19 nt, Artificial Sequence
  Description of Artificial Sequence: Synthetic oligonucleotide
  Antisense Strand to SEQ ID NO: 469315
uuucuacugauuagccaaa

SEQ ID NO: 469317 - RNA, 19 nt, Artificial Sequence
  Description of Artificial Sequence: Synthetic oligonucleotide
  Sense strand starting at position 992 of SEQ ID NO: 317163
ggcuaaucaguagaaaguu

SEQ ID NO: 469318 - RNA, 19 nt, Artificial Sequence
  Description of Artificial Sequence: Synthetic oligonucleotide
  Antisense Strand to SEQ ID NO: 469317
aacuuucuacugauuagcc

SEQ ID NO: 469319 - RNA, 19 nt, Artificial Sequence
  Description of Artificial Sequence: Synthetic oligonucleotide
  Sense strand starting at position 1034 of SEQ ID NO: 317163
ggaagccuuucuuuggaaa

SEQ ID NO: 469320 - RNA, 19 nt, Artificial Sequence
  Description of Artificial Sequence: Synthetic oligonucleotide
  Antisense Strand to SEQ ID NO: 469319
uuuccaaagaaaggcuucc

SEQ ID NO: 469321 - RNA, 19 nt, Artificial Sequence
  Description of Artificial Sequence: Synthetic oligonucleotide
  Sense strand starting at position 1080 of SEQ ID NO: 317163
uuuaaaugauguguaccua

SEQ ID NO: 469322 - RNA, 19 nt, Artificial Sequence
  Description of Artificial Sequence: Synthetic oligonucleotide
  Antisense Strand to SEQ ID NO: 469321
uagguacacaucauuuaaa

SEQ ID NO: 469323 - RNA, 19 nt, Artificial Sequence
  Description of Artificial Sequence: Synthetic oligonucleotide
  Sense strand starting at position 1081 of SEQ ID NO: 317163
uuaaaugauguguaccuau

SEQ ID NO: 469324 - RNA, 19 nt, Artificial Sequence
  Description of Artificial Sequence: Synthetic oligonucleotide
  Antisense Strand to SEQ ID NO: 469323
auagguacacaucauuuaa

SEQ ID NO: 469325 - RNA, 19 nt, Artificial Sequence
  Description of Artificial Sequence: Synthetic oligonucleotide
  Sense strand starting at position 1185 of SEQ ID NO: 317163
ugagcaaacgcuuaaauga

SEQ ID NO: 469326 - RNA, 19 nt, Artificial Sequence
  Description of Artificial Sequence: Synthetic oligonucleotide
  Antisense Strand to SEQ ID NO: 469325
ucauuuaagcguuugcuca

SEQ ID NO: 469327 - RNA, 19 nt, Artificial Sequence
  Description of Artificial Sequence: Synthetic oligonucleotide
  Sense strand starting at position 1292 of SEQ ID NO: 317163
acaacuuacuguucuggaa

SEQ ID NO: 469328 - RNA, 19 nt, Artificial Sequence
  Description of Artificial Sequence: Synthetic oligonucleotide
  Antisense Strand to SEQ ID NO: 469327
uuccagaacaguaaguugu

SEQ ID NO: 469329 - RNA, 19 nt, Artificial Sequence
  Description of Artificial Sequence: Synthetic oligonucleotide
  Sense strand starting at position 1519 of SEQ ID NO: 317163
ucuuguucccaggagguga

SEQ ID NO: 469330 - RNA, 19 nt, Artificial Sequence
  Description of Artificial Sequence: Synthetic oligonucleotide
  Antisense Strand to SEQ ID NO: 469329
ucaccuccugggaacaaga

SEQ ID NO: 469331 - RNA, 19 nt, Artificial Sequence
  Description of Artificial Sequence: Synthetic oligonucleotide
  Sense strand starting at position 2665 of SEQ ID NO: 317163
gacaguuuauaaguugagu

SEQ ID NO: 469332 - RNA, 19 nt, Artificial Sequence
  Description of Artificial Sequence: Synthetic oligonucleotide
  Antisense Strand to SEQ ID NO: 469331
acucaacuuauaaacuguc

SEQ ID NO: 469333 - RNA, 19 nt, Artificial Sequence
  Description of Artificial Sequence: Synthetic oligonucleotide
  Sense strand starting at position 2668 of SEQ ID NO: 317163
aguuuauaaguugaguagu

SEQ ID NO: 469334 - RNA, 19 nt, Artificial Sequence
  Description of Artificial Sequence: Synthetic oligonucleotide
  Antisense Strand to SEQ ID NO: 469333
acuacucaacuuauaaacu

SEQ ID NO: 469335 - RNA, 19 nt, Artificial Sequence
  Description of Artificial Sequence: Synthetic oligonucleotide
  Sense strand starting at position 2706 of SEQ ID NO: 317163
ccaggaaccuguguaguga

SEQ ID NO: 469336 - RNA, 19 nt, Artificial Sequence
  Description of Artificial Sequence: Synthetic oligonucleotide
  Antisense Strand to SEQ ID NO: 469335
ucacuacacagguuccugg

SEQ ID NO: 469337 - RNA, 19 nt, Artificial Sequence
  Description of Artificial Sequence: Synthetic oligonucleotide
  Sense strand starting at position 2768 of SEQ ID NO: 317163
agcuaugggacacgaauaa

SEQ ID NO: 469338 - RNA, 19 nt, Artificial Sequence
  Description of Artificial Sequence: Synthetic oligonucleotide
  Antisense Strand to SEQ ID NO: 469337
uuauucgugucccauagcu

SEQ ID NO: 469339 - RNA, 19 nt, Artificial Sequence
  Description of Artificial Sequence: Synthetic oligonucleotide
  Sense strand starting at position 2948 of SEQ ID NO: 317163
gcuggauuaguggguagga

SEQ ID NO: 469340 - RNA, 19 nt, Artificial Sequence
  Description of Artificial Sequence: Synthetic oligonucleotide
  Antisense Strand to SEQ ID NO: 469339
uccuacccacuaauccagc

SEQ ID NO: 469341 - RNA, 19 nt, Artificial Sequence
  Description of Artificial Sequence: Synthetic oligonucleotide
  Sense strand starting at position 3004 of SEQ ID NO: 317163
gcgucuauuuccucgggau

SEQ ID NO: 469342 - RNA, 19 nt, Artificial Sequence
  Description of Artificial Sequence: Synthetic oligonucleotide
  Antisense Strand to SEQ ID NO: 469341
aucccgaggaaauagacgc

SEQ ID NO: 469343 - RNA, 19 nt, Artificial Sequence
  Description of Artificial Sequence: Synthetic oligonucleotide
  Sense strand starting at position 3005 of SEQ ID NO: 317163
cgucuauuuccucgggauu

SEQ ID NO: 469344 - RNA, 19 nt, Artificial Sequence
  Description of Artificial Sequence: Synthetic oligonucleotide
  Antisense Strand to SEQ ID NO: 469343
aaucccgaggaaauagacg

SEQ ID NO: 469345 - RNA, 19 nt, Artificial Sequence
  Description of Artificial Sequence: Synthetic oligonucleotide
  Sense strand starting at position 3006 of SEQ ID NO: 317163
gucuauuuccucgggauuc

SEQ ID NO: 469346 - RNA, 19 nt, Artificial Sequence
  Description of Artificial Sequence: Synthetic oligonucleotide
  Antisense Strand to SEQ ID NO: 469345
gaaucccgaggaaauagac

SEQ ID NO: 469347 - RNA, 19 nt, Artificial Sequence
  Description of Artificial Sequence: Synthetic oligonucleotide
  Sense strand starting at position 3179 of SEQ ID NO: 317163
ggaggcuuugcacacauua

SEQ ID NO: 469348 - RNA, 19 nt, Artificial Sequence
  Description of Artificial Sequence: Synthetic oligonucleotide
  Antisense Strand to SEQ ID NO: 469347
uaaugugugcaaagccucc

SEQ ID NO: 469349 - RNA, 19 nt, Artificial Sequence
  Description of Artificial Sequence: Synthetic oligonucleotide
  Sense strand starting at position 3241 of SEQ ID NO: 317163
acuggugugcuuggaauuu

SEQ ID NO: 469350 - RNA, 19 nt, Artificial Sequence
  Description of Artificial Sequence: Synthetic oligonucleotide
  Antisense Strand to SEQ ID NO: 469349
aaauuccaagcacaccagu

SEQ ID NO: 469351 - RNA, 19 nt, Artificial Sequence
  Description of Artificial Sequence: Synthetic oligonucleotide
  Sense strand starting at position 3252 of SEQ ID NO: 317163
uggaauuucucugaaauau

SEQ ID NO: 469352 - RNA, 19 nt, Artificial Sequence
  Description of Artificial Sequence: Synthetic oligonucleotide
  Antisense Strand to SEQ ID NO: 469351
auauuucagagaaauucca

SEQ ID NO: 469353 - RNA, 19 nt, Artificial Sequence
  Description of Artificial Sequence: Synthetic oligonucleotide
  Sense strand starting at position 3293 of SEQ ID NO: 317163
auuagauuccgcuacucua

SEQ ID NO: 469354 - RNA, 19 nt, Artificial Sequence
  Description of Artificial Sequence: Synthetic oligonucleotide
  Antisense Strand to SEQ ID NO: 469353
uagaguagcggaaucuaau

SEQ ID NO: 469355 - RNA, 19 nt, Artificial Sequence
  Description of Artificial Sequence: Synthetic oligonucleotide
  Sense strand starting at position 3453 of SEQ ID NO: 317163
uuuacaguguaaccugaaa

SEQ ID NO: 469356 - RNA, 19 nt, Artificial Sequence
  Description of Artificial Sequence: Synthetic oligonucleotide
  Antisense Strand to SEQ ID NO: 469355
uuucagguuacacuguaaa

SEQ ID NO: 469357 - RNA, 19 nt, Artificial Sequence
  Description of Artificial Sequence: Synthetic oligonucleotide
  Sense strand starting at position 3491 of SEQ ID NO: 317163
gaauuaugcccacaggagu

SEQ ID NO: 469358 - RNA, 19 nt, Artificial Sequence
  Description of Artificial Sequence: Synthetic oligonucleotide
  Antisense Strand to SEQ ID NO: 469357
acuccugugggcauaauuc

SEQ ID NO: 469359 - RNA, 19 nt, Artificial Sequence
  Description of Artificial Sequence: Synthetic oligonucleotide
  Sense strand starting at position 3579 of SEQ ID NO: 317163
ggaaauauuuaacauguuc

SEQ ID NO: 469360 - RNA, 19 nt, Artificial Sequence
  Description of Artificial Sequence: Synthetic oligonucleotide
  Antisense Strand to SEQ ID NO: 469359
gaacauguuaaauauuucc

SEQ ID NO: 469361 - RNA, 19 nt, Artificial Sequence
  Description of Artificial Sequence: Synthetic oligonucleotide
  Sense strand starting at position 3719 of SEQ ID NO: 317163
ucaauauaucugcauuggu

SEQ ID NO: 469362 - RNA, 19 nt, Artificial Sequence
  Description of Artificial Sequence: Synthetic oligonucleotide
  Antisense Strand to SEQ ID NO: 469361
accaaugcagauauauuga

SEQ ID NO: 469363 - RNA, 19 nt, Artificial Sequence
  Description of Artificial Sequence: Synthetic oligonucleotide
  Sense strand starting at position 3722 of SEQ ID NO: 317163
auauaucugcauuggugaa

SEQ ID NO: 469364 - RNA, 19 nt, Artificial Sequence
  Description of Artificial Sequence: Synthetic oligonucleotide
  Antisense Strand to SEQ ID NO: 469363
uucaccaaugcagauauau

SEQ ID NO: 469365 - RNA, 19 nt, Artificial Sequence
  Description of Artificial Sequence: Synthetic oligonucleotide
  Sense strand starting at position 3724 of SEQ ID NO: 317163
auaucugcauuggugaaga

SEQ ID NO: 469366 - RNA, 19 nt, Artificial Sequence
  Description of Artificial Sequence: Synthetic oligonucleotide
  Antisense Strand to SEQ ID NO: 469365
ucuucaccaaugcagauau

SEQ ID NO: 469367 - RNA, 19 nt, Artificial Sequence
  Description of Artificial Sequence: Synthetic oligonucleotide
  Sense strand starting at position 3726 of SEQ ID NO: 317163
aucugcauuggugaagaau

SEQ ID NO: 469368 - RNA, 19 nt, Artificial Sequence
  Description of Artificial Sequence: Synthetic oligonucleotide
  Antisense Strand to SEQ ID NO: 469367
auucuucaccaaugcagau

SEQ ID NO: 469369 - RNA, 19 nt, Artificial Sequence
  Description of Artificial Sequence: Synthetic oligonucleotide
  Sense strand starting at position 3850 of SEQ ID NO: 317163
uagagcaauugcuuuggaa

SEQ ID NO: 469370 - RNA, 19 nt, Artificial Sequence
  Description of Artificial Sequence: Synthetic oligonucleotide
  Antisense Strand to SEQ ID NO: 469369
uuccaaagcaauugcucua

SEQ ID NO: 469371 - RNA, 19 nt, Artificial Sequence
  Description of Artificial Sequence: Synthetic oligonucleotide
  Sense strand starting at position 3884 of SEQ ID NO: 317163
acugacauugauugcacaa

SEQ ID NO: 469372 - RNA, 19 nt, Artificial Sequence
  Description of Artificial Sequence: Synthetic oligonucleotide
  Antisense Strand to SEQ ID NO: 469371
uugugcaaucaaugucagu

SEQ ID NO: 469373 - RNA, 19 nt, Artificial Sequence
  Description of Artificial Sequence: Synthetic oligonucleotide
  Sense strand starting at position 221 of SEQ ID NO: 317164
gcagaccuacaauggaaau

SEQ ID NO: 469374 - RNA, 19 nt, Artificial Sequence
  Description of Artificial Sequence: Synthetic oligonucleotide
  Antisense Strand to SEQ ID NO: 469373
auuuccauuguaggucugc

SEQ ID NO: 469375 - RNA, 19 nt, Artificial Sequence
  Description of Artificial Sequence: Synthetic oligonucleotide
  Sense strand starting at position 254 of SEQ ID NO: 317164
guguuauuacgagugcugu

SEQ ID NO: 469376 - RNA, 19 nt, Artificial Sequence
  Description of Artificial Sequence: Synthetic oligonucleotide
  Antisense Strand to SEQ ID NO: 469375
acagcacucguaauaacac

SEQ ID NO: 469377 - RNA, 19 nt, Artificial Sequence
  Description of Artificial Sequence: Synthetic oligonucleotide
  Sense strand starting at position 260 of SEQ ID NO: 317164
uuacgagugcuguacauuu

SEQ ID NO: 469378 - RNA, 19 nt, Artificial Sequence
  Description of Artificial Sequence: Synthetic oligonucleotide
  Antisense Strand to SEQ ID NO: 469377
aaauguacagcacucguaa

SEQ ID NO: 469379 - RNA, 19 nt, Artificial Sequence
  Description of Artificial Sequence: Synthetic oligonucleotide
  Sense strand starting at position 316 of SEQ ID NO: 317164
auaugugaaucuucugaaa

SEQ ID NO: 469380 - RNA, 19 nt, Artificial Sequence
  Description of Artificial Sequence: Synthetic oligonucleotide
  Antisense Strand to SEQ ID NO: 469379
uuucagaagauucacauau

SEQ ID NO: 469381 - RNA, 19 nt, Artificial Sequence
  Description of Artificial Sequence: Synthetic oligonucleotide
  Sense strand starting at position 474 of SEQ ID NO: 317164
uguaucucccaccaucaga

SEQ ID NO: 469382 - RNA, 19 nt, Artificial Sequence
  Description of Artificial Sequence: Synthetic oligonucleotide
  Antisense Strand to SEQ ID NO: 469381
ucugauggugggagauaca

SEQ ID NO: 469383 - RNA, 19 nt, Artificial Sequence
  Description of Artificial Sequence: Synthetic oligonucleotide
  Sense strand starting at position 592 of SEQ ID NO: 317164
uuuaaagguuuacuggaau

SEQ ID NO: 469384 - RNA, 19 nt, Artificial Sequence
  Description of Artificial Sequence: Synthetic oligonucleotide
  Antisense Strand to SEQ ID NO: 469383
auuccaguaaaccuuuaaa

SEQ ID NO: 469385 - RNA, 19 nt, Artificial Sequence
  Description of Artificial Sequence: Synthetic oligonucleotide
  Sense strand starting at position 682 of SEQ ID NO: 317164
gaaaguagauaguucucaa

SEQ ID NO: 469386 - RNA, 19 nt, Artificial Sequence
  Description of Artificial Sequence: Synthetic oligonucleotide
  Antisense Strand to SEQ ID NO: 469385
uugagaacuaucuacuuuc

SEQ ID NO: 469387 - RNA, 19 nt, Artificial Sequence
  Description of Artificial Sequence: Synthetic oligonucleotide
  Sense strand starting at position 685 of SEQ ID NO: 317164
aguagauaguucucaagaa

SEQ ID NO: 469388 - RNA, 19 nt, Artificial Sequence
  Description of Artificial Sequence: Synthetic oligonucleotide
  Antisense Strand to SEQ ID NO: 469387
uucuugagaacuaucuacu

SEQ ID NO: 469389 - RNA, 19 nt, Artificial Sequence
  Description of Artificial Sequence: Synthetic oligonucleotide
  Sense strand starting at position 763 of SEQ ID NO: 317164
uaagguuucuuuguuugaa

SEQ ID NO: 469390 - RNA, 19 nt, Artificial Sequence
  Description of Artificial Sequence: Synthetic oligonucleotide
  Antisense Strand to SEQ ID NO: 469389
uucaaacaaagaaaccuua

SEQ ID NO: 469391 - RNA, 19 nt, Artificial Sequence
  Description of Artificial Sequence: Synthetic oligonucleotide
  Sense strand starting at position 764 of SEQ ID NO: 317164
aagguuucuuuguuugaau

SEQ ID NO: 469392 - RNA, 19 nt, Artificial Sequence
  Description of Artificial Sequence: Synthetic oligonucleotide
  Antisense Strand to SEQ ID NO: 469391
auucaaacaaagaaaccuu

SEQ ID NO: 469393 - RNA, 19 nt, Artificial Sequence
  Description of Artificial Sequence: Synthetic oligonucleotide
  Sense strand starting at position 765 of SEQ ID NO: 317164
agguuucuuuguuugaaua

SEQ ID NO: 469394 - RNA, 19 nt, Artificial Sequence
  Description of Artificial Sequence: Synthetic oligonucleotide
  Antisense Strand to SEQ ID NO: 469393
uauucaaacaaagaaaccu

SEQ ID NO: 469395 - RNA, 19 nt, Artificial Sequence
  Description of Artificial Sequence: Synthetic oligonucleotide
  Sense strand starting at position 916 of SEQ ID NO: 317164
guggaacagcagcaugauu

SEQ ID NO: 469396 - RNA, 19 nt, Artificial Sequence
  Description of Artificial Sequence: Synthetic oligonucleotide
  Antisense Strand to SEQ ID NO: 469395
aaucaugcugcuguuccac

SEQ ID NO: 469397 - RNA, 19 nt, Artificial Sequence
  Description of Artificial Sequence: Synthetic oligonucleotide
  Sense strand starting at position 1073 of SEQ ID NO: 317164
aguuucucuucccuugaga

SEQ ID NO: 469398 - RNA, 19 nt, Artificial Sequence
  Description of Artificial Sequence: Synthetic oligonucleotide
  Antisense Strand to SEQ ID NO: 469397
ucucaagggaagagaaacu

SEQ ID NO: 469399 - RNA, 19 nt, Artificial Sequence
  Description of Artificial Sequence: Synthetic oligonucleotide
  Sense strand starting at position 1132 of SEQ ID NO: 317164
cugaaagagccuuaggcua

SEQ ID NO: 469400 - RNA, 19 nt, Artificial Sequence
  Description of Artificial Sequence: Synthetic oligonucleotide
  Antisense Strand to SEQ ID NO: 469399
uagccuaaggcucuuucag

SEQ ID NO: 469401 - RNA, 19 nt, Artificial Sequence
  Description of Artificial Sequence: Synthetic oligonucleotide
  Sense strand starting at position 1178 of SEQ ID NO: 317164
uuggcuuugguccaacaca

SEQ ID NO: 469402 - RNA, 19 nt, Artificial Sequence
  Description of Artificial Sequence: Synthetic oligonucleotide
  Antisense Strand to SEQ ID NO: 469401
uguguuggaccaaagccaa

SEQ ID NO: 469403 - RNA, 19 nt, Artificial Sequence
  Description of Artificial Sequence: Synthetic oligonucleotide
  Sense strand starting at position 1220 of SEQ ID NO: 317164
uaacuaaaggucugugaac

SEQ ID NO: 469404 - RNA, 19 nt, Artificial Sequence
  Description of Artificial Sequence: Synthetic oligonucleotide
  Antisense Strand to SEQ ID NO: 469403
guucacagaccuuuaguua

SEQ ID NO: 469405 - RNA, 19 nt, Artificial Sequence
  Description of Artificial Sequence: Synthetic oligonucleotide
  Sense strand starting at position 1221 of SEQ ID NO: 317164
aacuaaaggucugugaacu

SEQ ID NO: 469406 - RNA, 19 nt, Artificial Sequence
  Description of Artificial Sequence: Synthetic oligonucleotide
  Antisense Strand to SEQ ID NO: 469405
aguucacagaccuuuaguu

SEQ ID NO: 469407 - RNA, 19 nt, Artificial Sequence
  Description of Artificial Sequence: Synthetic oligonucleotide
  Sense strand starting at position 1222 of SEQ ID NO: 317164
acuaaaggucugugaacuu

SEQ ID NO: 469408 - RNA, 19 nt, Artificial Sequence
  Description of Artificial Sequence: Synthetic oligonucleotide
  Antisense Strand to SEQ ID NO: 469407
aaguucacagaccuuuagu

SEQ ID NO: 469409 - RNA, 19 nt, Artificial Sequence
  Description of Artificial Sequence: Synthetic oligonucleotide
  Sense strand starting at position 1268 of SEQ ID NO: 317164
ucgaguucuauggauguuu

SEQ ID NO: 469410 - RNA, 19 nt, Artificial Sequence
  Description of Artificial Sequence: Synthetic oligonucleotide
  Antisense Strand to SEQ ID NO: 469409
aaacauccauagaacucga

SEQ ID NO: 469411 - RNA, 19 nt, Artificial Sequence
  Description of Artificial Sequence: Synthetic oligonucleotide
  Sense strand starting at position 2086 of SEQ ID NO: 317164
ucgagaacacgugacuguu

SEQ ID NO: 469412 - RNA, 19 nt, Artificial Sequence
  Description of Artificial Sequence: Synthetic oligonucleotide
  Antisense Strand to SEQ ID NO: 469411
aacagucacguguucucga

SEQ ID NO: 469413 - RNA, 19 nt, Artificial Sequence
  Description of Artificial Sequence: Synthetic oligonucleotide
  Sense strand starting at position 2275 of SEQ ID NO: 317164
aguuaacuugaugggcaaa

SEQ ID NO: 469414 - RNA, 19 nt, Artificial Sequence
  Description of Artificial Sequence: Synthetic oligonucleotide
  Antisense Strand to SEQ ID NO: 469413
uuugcccaucaaguuaacu

SEQ ID NO: 469415 - RNA, 19 nt, Artificial Sequence
  Description of Artificial Sequence: Synthetic oligonucleotide
  Sense strand starting at position 2276 of SEQ ID NO: 317164
guuaacuugaugggcaaau

SEQ ID NO: 469416 - RNA, 19 nt, Artificial Sequence
  Description of Artificial Sequence: Synthetic oligonucleotide
  Antisense Strand to SEQ ID NO: 469415
auuugcccaucaaguuaac

SEQ ID NO: 469417 - RNA, 19 nt, Artificial Sequence
  Description of Artificial Sequence: Synthetic oligonucleotide
  Sense strand starting at position 2325 of SEQ ID NO: 317164
uguagugaacucugagaag

SEQ ID NO: 469418 - RNA, 19 nt, Artificial Sequence
  Description of Artificial Sequence: Synthetic oligonucleotide
  Antisense Strand to SEQ ID NO: 469417
cuucucagaguucacuaca

SEQ ID NO: 469419 - RNA, 19 nt, Artificial Sequence
  Description of Artificial Sequence: Synthetic oligonucleotide
  Sense strand starting at position 2345 of SEQ ID NO: 317164
cuuggacuggugugaggau

SEQ ID NO: 469420 - RNA, 19 nt, Artificial Sequence
  Description of Artificial Sequence: Synthetic oligonucleotide
  Antisense Strand to SEQ ID NO: 469419
auccucacaccaguccaag

SEQ ID NO: 469421 - RNA, 19 nt, Artificial Sequence
  Description of Artificial Sequence: Synthetic oligonucleotide
  Sense strand starting at position 2379 of SEQ ID NO: 317164
uucuuaguauuccugagaa

SEQ ID NO: 469422 - RNA, 19 nt, Artificial Sequence
  Description of Artificial Sequence: Synthetic oligonucleotide
  Antisense Strand to SEQ ID NO: 469421
uucucaggaauacuaagaa

SEQ ID NO: 469423 - RNA, 19 nt, Artificial Sequence
  Description of Artificial Sequence: Synthetic oligonucleotide
  Sense strand starting at position 2448 of SEQ ID NO: 317164
gggugguguggugauagaa

SEQ ID NO: 469424 - RNA, 19 nt, Artificial Sequence
  Description of Artificial Sequence: Synthetic oligonucleotide
  Antisense Strand to SEQ ID NO: 469423
uucuaucaccacaccaccc

SEQ ID NO: 469425 - RNA, 19 nt, Artificial Sequence
  Description of Artificial Sequence: Synthetic oligonucleotide
  Sense strand starting at position 2577 of SEQ ID NO: 317164
cgguaaugagcccagcaga

SEQ ID NO: 469426 - RNA, 19 nt, Artificial Sequence
  Description of Artificial Sequence: Synthetic oligonucleotide
  Antisense Strand to SEQ ID NO: 469425
ucugcugggcucauuaccg

SEQ ID NO: 469427 - RNA, 19 nt, Artificial Sequence
  Description of Artificial Sequence: Synthetic oligonucleotide
  Sense strand starting at position 2736 of SEQ ID NO: 317164
cgaauugucacagguuaaa

SEQ ID NO: 469428 - RNA, 19 nt, Artificial Sequence
  Description of Artificial Sequence: Synthetic oligonucleotide
  Antisense Strand to SEQ ID NO: 469427
uuuaaccugugacaauucg

SEQ ID NO: 469429 - RNA, 19 nt, Artificial Sequence
  Description of Artificial Sequence: Synthetic oligonucleotide
  Sense strand starting at position 3035 of SEQ ID NO: 317164
auagcuuuaccaugagaaa

SEQ ID NO: 469430 - RNA, 19 nt, Artificial Sequence
  Description of Artificial Sequence: Synthetic oligonucleotide
  Antisense Strand to SEQ ID NO: 469429
uuucucaugguaaagcuau

SEQ ID NO: 469431 - RNA, 19 nt, Artificial Sequence
  Description of Artificial Sequence: Synthetic oligonucleotide
  Sense strand starting at position 3047 of SEQ ID NO: 317164
ugagaaaggguguaguuau

SEQ ID NO: 469432 - RNA, 19 nt, Artificial Sequence
  Description of Artificial Sequence: Synthetic oligonucleotide
  Antisense Strand to SEQ ID NO: 469431
auaacuacacccuuucuca

SEQ ID NO: 469433 - RNA, 19 nt, Artificial Sequence
  Description of Artificial Sequence: Synthetic oligonucleotide
  Sense strand starting at position 3160 of SEQ ID NO: 317164
ggagcaaugugacuuguaa

SEQ ID NO: 469434 - RNA, 19 nt, Artificial Sequence
  Description of Artificial Sequence: Synthetic oligonucleotide
  Antisense Strand to SEQ ID NO: 469433
uuacaagucacauugcucc

SEQ ID NO: 469435 - RNA, 19 nt, Artificial Sequence
  Description of Artificial Sequence: Synthetic oligonucleotide
  Sense strand starting at position 3192 of SEQ ID NO: 317164
ggcagacaucacuguuaca

SEQ ID NO: 469436 - RNA, 19 nt, Artificial Sequence
  Description of Artificial Sequence: Synthetic oligonucleotide
  Antisense Strand to SEQ ID NO: 469435
uguaacagugaugucugcc

SEQ ID NO: 469437 - RNA, 19 nt, Artificial Sequence
  Description of Artificial Sequence: Synthetic oligonucleotide
  Sense strand starting at position 3301 of SEQ ID NO: 317164
gucaaagagucauccaaga

SEQ ID NO: 469438 - RNA, 19 nt, Artificial Sequence
  Description of Artificial Sequence: Synthetic oligonucleotide
  Antisense Strand to SEQ ID NO: 469437
ucuuggaugacucuuugac

SEQ ID NO: 469439 - RNA, 19 nt, Artificial Sequence
  Description of Artificial Sequence: Synthetic oligonucleotide
  Sense strand starting at position 3306 of SEQ ID NO: 317164
agagucauccaagagcuuu

SEQ ID NO: 469440 - RNA, 19 nt, Artificial Sequence
  Description of Artificial Sequence: Synthetic oligonucleotide
  Antisense Strand to SEQ ID NO: 469439
aaagcucuuggaugacucu

SEQ ID NO: 469441 - RNA, 19 nt, Artificial Sequence
  Description of Artificial Sequence: Synthetic oligonucleotide
  Sense strand starting at position 3357 of SEQ ID NO: 317164
auucuucuguguguuauuu

SEQ ID NO: 469442 - RNA, 19 nt, Artificial Sequence
  Description of Artificial Sequence: Synthetic oligonucleotide
  Antisense Strand to SEQ ID NO: 469441
aaauaacacacagaagaau

SEQ ID NO: 469443 - RNA, 19 nt, Artificial Sequence
  Description of Artificial Sequence: Synthetic oligonucleotide
  Sense strand starting at position 3361 of SEQ ID NO: 317164
uucuguguguuauuucuga

SEQ ID NO: 469444 - RNA, 19 nt, Artificial Sequence
  Description of Artificial Sequence: Synthetic oligonucleotide
  Antisense Strand to SEQ ID NO: 469443
ucagaaauaacacacagaa

SEQ ID NO: 469445 - RNA, 19 nt, Artificial Sequence
  Description of Artificial Sequence: Synthetic oligonucleotide
  Sense strand starting at position 3578 of SEQ ID NO: 317164
ccaucucuugcacagucau

SEQ ID NO: 469446 - RNA, 19 nt, Artificial Sequence
  Description of Artificial Sequence: Synthetic oligonucleotide
  Antisense Strand to SEQ ID NO: 469445
augacugugcaagagaugg

SEQ ID NO: 469447 - RNA, 19 nt, Artificial Sequence
  Description of Artificial Sequence: Synthetic oligonucleotide
  Sense strand starting at position 3773 of SEQ ID NO: 317164
aagucacuguuauuagagu

SEQ ID NO: 469448 - RNA, 19 nt, Artificial Sequence
  Description of Artificial Sequence: Synthetic oligonucleotide
  Antisense Strand to SEQ ID NO: 469447
acucuaauaacagugacuu

SEQ ID NO: 469449 - RNA, 19 nt, Artificial Sequence
  Description of Artificial Sequence: Synthetic oligonucleotide
  Sense strand starting at position 3779 of SEQ ID NO: 317164
cuguuauuagaguauugaa

SEQ ID NO: 469450 - RNA, 19 nt, Artificial Sequence
  Description of Artificial Sequence: Synthetic oligonucleotide
  Antisense Strand to SEQ ID NO: 469449
uucaauacucuaauaacag

SEQ ID NO: 469451 - RNA, 19 nt, Artificial Sequence
  Description of Artificial Sequence: Synthetic oligonucleotide
  Sense strand starting at position 3895 of SEQ ID NO: 317164
guuggcauuucuucuuuaa

SEQ ID NO: 469452 - RNA, 19 nt, Artificial Sequence
  Description of Artificial Sequence: Synthetic oligonucleotide
  Antisense Strand to SEQ ID NO: 469451
uuaaagaagaaaugccaac

SEQ ID NO: 469453 - RNA, 19 nt, Artificial Sequence
  Description of Artificial Sequence: Synthetic oligonucleotide
  Sense strand starting at position 37 of SEQ ID NO: 317165
agauucucuuaggacaaau

SEQ ID NO: 469454 - RNA, 19 nt, Artificial Sequence
  Description of Artificial Sequence: Synthetic oligonucleotide
  Antisense Strand to SEQ ID NO: 469453
auuuguccuaagagaaucu

SEQ ID NO: 469455 - RNA, 19 nt, Artificial Sequence
  Description of Artificial Sequence: Synthetic oligonucleotide
  Sense strand starting at position 228 of SEQ ID NO: 317165
uuuacagucuguguuaaau

SEQ ID NO: 469456 - RNA, 19 nt, Artificial Sequence
  Description of Artificial Sequence: Synthetic oligonucleotide
  Antisense Strand to SEQ ID NO: 469455
auuuaacacagacuguaaa

SEQ ID NO: 469457 - RNA, 19 nt, Artificial Sequence
  Description of Artificial Sequence: Synthetic oligonucleotide
  Sense strand starting at position 276 of SEQ ID NO: 317165
cgggaauauuaacaaagau

SEQ ID NO: 469458 - RNA, 19 nt, Artificial Sequence
  Description of Artificial Sequence: Synthetic oligonucleotide
  Antisense Strand to SEQ ID NO: 469457
aucuuuguuaauauucccg

SEQ ID NO: 469459 - RNA, 19 nt, Artificial Sequence
  Description of Artificial Sequence: Synthetic oligonucleotide
  Sense strand starting at position 351 of SEQ ID NO: 317165
ccaaucucaucaugaugga

SEQ ID NO: 469460 - RNA, 19 nt, Artificial Sequence
  Description of Artificial Sequence: Synthetic oligonucleotide
  Antisense Strand to SEQ ID NO: 469459
uccaucaugaugagauugg

SEQ ID NO: 469461 - RNA, 19 nt, Artificial Sequence
  Description of Artificial Sequence: Synthetic oligonucleotide
  Sense strand starting at position 354 of SEQ ID NO: 317165
aucucaucaugauggaaau

SEQ ID NO: 469462 - RNA, 19 nt, Artificial Sequence
  Description of Artificial Sequence: Synthetic oligonucleotide
  Antisense Strand to SEQ ID NO: 469461
auuuccaucaugaugagau

SEQ ID NO: 469463 - RNA, 19 nt, Artificial Sequence
  Description of Artificial Sequence: Synthetic oligonucleotide
  Sense strand starting at position 405 of SEQ ID NO: 317165
acuauaagauggcacuuua

SEQ ID NO: 469464 - RNA, 19 nt, Artificial Sequence
  Description of Artificial Sequence: Synthetic oligonucleotide
  Antisense Strand to SEQ ID NO: 469463
uaaagugccaucuuauagu

SEQ ID NO: 469465 - RNA, 19 nt, Artificial Sequence
  Description of Artificial Sequence: Synthetic oligonucleotide
  Sense strand starting at position 457 of SEQ ID NO: 317165
uagacugcauaguuguaaa

SEQ ID NO: 469466 - RNA, 19 nt, Artificial Sequence
  Description of Artificial Sequence: Synthetic oligonucleotide
  Antisense Strand to SEQ ID NO: 469465
uuuacaacuaugcagucua

SEQ ID NO: 469467 - RNA, 19 nt, Artificial Sequence
  Description of Artificial Sequence: Synthetic oligonucleotide
  Sense strand starting at position 545 of SEQ ID NO: 317165
ugagguaaaugauagaaau

SEQ ID NO: 469468 - RNA, 19 nt, Artificial Sequence
  Description of Artificial Sequence: Synthetic oligonucleotide
  Antisense Strand to SEQ ID NO: 469467
auuucuaucauuuaccuca

SEQ ID NO: 469469 - RNA, 19 nt, Artificial Sequence
  Description of Artificial Sequence: Synthetic oligonucleotide
  Sense strand starting at position 556 of SEQ ID NO: 317165
auagaaaucugcccaaggu

SEQ ID NO: 469470 - RNA, 19 nt, Artificial Sequence
  Description of Artificial Sequence: Synthetic oligonucleotide
  Antisense Strand to SEQ ID NO: 469469
accuugggcagauuucuau

SEQ ID NO: 469471 - RNA, 19 nt, Artificial Sequence
  Description of Artificial Sequence: Synthetic oligonucleotide
  Sense strand starting at position 557 of SEQ ID NO: 317165
uagaaaucugcccaagguc

SEQ ID NO: 469472 - RNA, 19 nt, Artificial Sequence
  Description of Artificial Sequence: Synthetic oligonucleotide
  Antisense Strand to SEQ ID NO: 469471
gaccuugggcagauuucua

SEQ ID NO: 469473 - RNA, 19 nt, Artificial Sequence
  Description of Artificial Sequence: Synthetic oligonucleotide
  Sense strand starting at position 680 of SEQ ID NO: 317165
cuaugccucccuuaaagga

SEQ ID NO: 469474 - RNA, 19 nt, Artificial Sequence
  Description of Artificial Sequence: Synthetic oligonucleotide
  Antisense Strand to SEQ ID NO: 469473
uccuuuaagggaggcauag

SEQ ID NO: 469475 - RNA, 19 nt, Artificial Sequence
  Description of Artificial Sequence: Synthetic oligonucleotide
  Sense strand starting at position 815 of SEQ ID NO: 317165
ugcuguuaucauuacuaug

SEQ ID NO: 469476 - RNA, 19 nt, Artificial Sequence
  Description of Artificial Sequence: Synthetic oligonucleotide
  Antisense Strand to SEQ ID NO: 469475
cauaguaaugauaacagca

SEQ ID NO: 469477 - RNA, 19 nt, Artificial Sequence
  Description of Artificial Sequence: Synthetic oligonucleotide
  Sense strand starting at position 887 of SEQ ID NO: 317165
gcaauuuggugccuuuaaa

SEQ ID NO: 469478 - RNA, 19 nt, Artificial Sequence
  Description of Artificial Sequence: Synthetic oligonucleotide
  Antisense Strand to SEQ ID NO: 469477
uuuaaaggcaccaaauugc

SEQ ID NO: 469479 - RNA, 19 nt, Artificial Sequence
  Description of Artificial Sequence: Synthetic oligonucleotide
  Sense strand starting at position 1053 of SEQ ID NO: 317165
ucaguagcagaguaaggau

SEQ ID NO: 469480 - RNA, 19 nt, Artificial Sequence
  Description of Artificial Sequence: Synthetic oligonucleotide
  Antisense Strand to SEQ ID NO: 469479
auccuuacucugcuacuga

SEQ ID NO: 469481 - RNA, 19 nt, Artificial Sequence
  Description of Artificial Sequence: Synthetic oligonucleotide
  Sense strand starting at position 1209 of SEQ ID NO: 317165
caggaucuauuaggaucua

SEQ ID NO: 469482 - RNA, 19 nt, Artificial Sequence
  Description of Artificial Sequence: Synthetic oligonucleotide
  Antisense Strand to SEQ ID NO: 469481
uagauccuaauagauccug

SEQ ID NO: 469483 - RNA, 19 nt, Artificial Sequence
  Description of Artificial Sequence: Synthetic oligonucleotide
  Sense strand starting at position 1210 of SEQ ID NO: 317165
aggaucuauuaggaucuau

SEQ ID NO: 469484 - RNA, 19 nt, Artificial Sequence
  Description of Artificial Sequence: Synthetic oligonucleotide
  Antisense Strand to SEQ ID NO: 469483
auagauccuaauagauccu

SEQ ID NO: 469485 - RNA, 19 nt, Artificial Sequence
  Description of Artificial Sequence: Synthetic oligonucleotide
  Sense strand starting at position 1254 of SEQ ID NO: 317165
uacaccuccggcugagauu

SEQ ID NO: 469486 - RNA, 19 nt, Artificial Sequence
  Description of Artificial Sequence: Synthetic oligonucleotide
  Antisense Strand to SEQ ID NO: 469485
aaucucagccggaggugua

SEQ ID NO: 469487 - RNA, 19 nt, Artificial Sequence
  Description of Artificial Sequence: Synthetic oligonucleotide
  Sense strand starting at position 1277 of SEQ ID NO: 317165
agcguccgcaauugauaaa

SEQ ID NO: 469488 - RNA, 19 nt, Artificial Sequence
  Description of Artificial Sequence: Synthetic oligonucleotide
  Antisense Strand to SEQ ID NO: 469487
uuuaucaauugcggacgcu

SEQ ID NO: 469489 - RNA, 19 nt, Artificial Sequence
  Description of Artificial Sequence: Synthetic oligonucleotide
  Sense strand starting at position 1411 of SEQ ID NO: 317165
cugcuaguuagagggcauu

SEQ ID NO: 469490 - RNA, 19 nt, Artificial Sequence
  Description of Artificial Sequence: Synthetic oligonucleotide
  Antisense Strand to SEQ ID NO: 469489
aaugcccucuaacuagcag

SEQ ID NO: 469491 - RNA, 19 nt, Artificial Sequence
  Description of Artificial Sequence: Synthetic oligonucleotide
  Sense strand starting at position 1552 of SEQ ID NO: 317165
gccacuucucccugcaaag

SEQ ID NO: 469492 - RNA, 19 nt, Artificial Sequence
  Description of Artificial Sequence: Synthetic oligonucleotide
  Antisense Strand to SEQ ID NO: 469491
cuuugcagggagaaguggc

SEQ ID NO: 469493 - RNA, 19 nt, Artificial Sequence
  Description of Artificial Sequence: Synthetic oligonucleotide
  Sense strand starting at position 2006 of SEQ ID NO: 317165
cgggucacauguccagaua

SEQ ID NO: 469494 - RNA, 19 nt, Artificial Sequence
  Description of Artificial Sequence: Synthetic oligonucleotide
  Antisense Strand to SEQ ID NO: 469493
uaucuggacaugugacccg

SEQ ID NO: 469495 - RNA, 19 nt, Artificial Sequence
  Description of Artificial Sequence: Synthetic oligonucleotide
  Sense strand starting at position 2059 of SEQ ID NO: 317165
uccuauuggcccgaagaga

SEQ ID NO: 469496 - RNA, 19 nt, Artificial Sequence
  Description of Artificial Sequence: Synthetic oligonucleotide
  Antisense Strand to SEQ ID NO: 469495
ucucuucgggccaauagga

SEQ ID NO: 469497 - RNA, 19 nt, Artificial Sequence
  Description of Artificial Sequence: Synthetic oligonucleotide
  Sense strand starting at position 2105 of SEQ ID NO: 317165
gcgggcuucuuauuggaca

SEQ ID NO: 469498 - RNA, 19 nt, Artificial Sequence
  Description of Artificial Sequence: Synthetic oligonucleotide
  Antisense Strand to SEQ ID NO: 469497
uguccaauaagaagcccgc

SEQ ID NO: 469499 - RNA, 19 nt, Artificial Sequence
  Description of Artificial Sequence: Synthetic oligonucleotide
  Sense strand starting at position 2107 of SEQ ID NO: 317165
gggcuucuuauuggacaau

SEQ ID NO: 469500 - RNA, 19 nt, Artificial Sequence
  Description of Artificial Sequence: Synthetic oligonucleotide
  Antisense Strand to SEQ ID NO: 469499
auuguccaauaagaagccc

SEQ ID NO: 469501 - RNA, 19 nt, Artificial Sequence
  Description of Artificial Sequence: Synthetic oligonucleotide
  Sense strand starting at position 2147 of SEQ ID NO: 317165
gggcgacaugacugauaca

SEQ ID NO: 469502 - RNA, 19 nt, Artificial Sequence
  Description of Artificial Sequence: Synthetic oligonucleotide
  Antisense Strand to SEQ ID NO: 469501
uguaucagucaugucgccc

SEQ ID NO: 469503 - RNA, 19 nt, Artificial Sequence
  Description of Artificial Sequence: Synthetic oligonucleotide
  Sense strand starting at position 2150 of SEQ ID NO: 317165
cgacaugacugauacaaag

SEQ ID NO: 469504 - RNA, 19 nt, Artificial Sequence
  Description of Artificial Sequence: Synthetic oligonucleotide
  Antisense Strand to SEQ ID NO: 469503
cuuuguaucagucaugucg

SEQ ID NO: 469505 - RNA, 19 nt, Artificial Sequence
  Description of Artificial Sequence: Synthetic oligonucleotide
  Sense strand starting at position 2607 of SEQ ID NO: 317165
cgaucacguucacucgauu

SEQ ID NO: 469506 - RNA, 19 nt, Artificial Sequence
  Description of Artificial Sequence: Synthetic oligonucleotide
  Antisense Strand to SEQ ID NO: 469505
aaucgagugaacgugaucg

SEQ ID NO: 469507 - RNA, 19 nt, Artificial Sequence
  Description of Artificial Sequence: Synthetic oligonucleotide
  Sense strand starting at position 2810 of SEQ ID NO: 317165
uguacuuacuacuuuagua

SEQ ID NO: 469508 - RNA, 19 nt, Artificial Sequence
  Description of Artificial Sequence: Synthetic oligonucleotide
  Antisense Strand to SEQ ID NO: 469507
uacuaaaguaguaaguaca

SEQ ID NO: 469509 - RNA, 19 nt, Artificial Sequence
  Description of Artificial Sequence: Synthetic oligonucleotide
  Sense strand starting at position 2815 of SEQ ID NO: 317165
uuacuacuuuaguauugga

SEQ ID NO: 469510 - RNA, 19 nt, Artificial Sequence
  Description of Artificial Sequence: Synthetic oligonucleotide
  Antisense Strand to SEQ ID NO: 469509
uccaauacuaaaguaguaa

SEQ ID NO: 469511 - RNA, 19 nt, Artificial Sequence
  Description of Artificial Sequence: Synthetic oligonucleotide
  Sense strand starting at position 2818 of SEQ ID NO: 317165
cuacuuuaguauuggauuu

SEQ ID NO: 469512 - RNA, 19 nt, Artificial Sequence
  Description of Artificial Sequence: Synthetic oligonucleotide
  Antisense Strand to SEQ ID NO: 469511
aaauccaauacuaaaguag

SEQ ID NO: 469513 - RNA, 19 nt, Artificial Sequence
  Description of Artificial Sequence: Synthetic oligonucleotide
  Sense strand starting at position 2859 of SEQ ID NO: 317165
caagcuuaccaucgaggau

SEQ ID NO: 469514 - RNA, 19 nt, Artificial Sequence
  Description of Artificial Sequence: Synthetic oligonucleotide
  Antisense Strand to SEQ ID NO: 469513
auccucgaugguaagcuug

SEQ ID NO: 469515 - RNA, 19 nt, Artificial Sequence
  Description of Artificial Sequence: Synthetic oligonucleotide
  Sense strand starting at position 2862 of SEQ ID NO: 317165
gcuuaccaucgaggauauu

SEQ ID NO: 469516 - RNA, 19 nt, Artificial Sequence
  Description of Artificial Sequence: Synthetic oligonucleotide
  Antisense Strand to SEQ ID NO: 469515
aauauccucgaugguaagc

SEQ ID NO: 469517 - RNA, 19 nt, Artificial Sequence
  Description of Artificial Sequence: Synthetic oligonucleotide
  Sense strand starting at position 2965 of SEQ ID NO: 317165
aucgguugucugcaugaag

SEQ ID NO: 469518 - RNA, 19 nt, Artificial Sequence
  Description of Artificial Sequence: Synthetic oligonucleotide
  Antisense Strand to SEQ ID NO: 469517
cuucaugcagacaaccgau

SEQ ID NO: 469519 - RNA, 19 nt, Artificial Sequence
  Description of Artificial Sequence: Synthetic oligonucleotide
  Sense strand starting at position 3077 of SEQ ID NO: 317165
uuugauuucuaaggacuuu

SEQ ID NO: 469520 - RNA, 19 nt, Artificial Sequence
  Description of Artificial Sequence: Synthetic oligonucleotide
  Antisense Strand to SEQ ID NO: 469519
aaaguccuuagaaaucaaa

SEQ ID NO: 469521 - RNA, 19 nt, Artificial Sequence
  Description of Artificial Sequence: Synthetic oligonucleotide
  Sense strand starting at position 3143 of SEQ ID NO: 317165
gucagcaucagugacguau

SEQ ID NO: 469522 - RNA, 19 nt, Artificial Sequence
  Description of Artificial Sequence: Synthetic oligonucleotide
  Antisense Strand to SEQ ID NO: 469521
auacgucacugaugcugac

SEQ ID NO: 469523 - RNA, 19 nt, Artificial Sequence
  Description of Artificial Sequence: Synthetic oligonucleotide
  Sense strand starting at position 3147 of SEQ ID NO: 317165
gcaucagugacguauacac

SEQ ID NO: 469524 - RNA, 19 nt, Artificial Sequence
  Description of Artificial Sequence: Synthetic oligonucleotide
  Antisense Strand to SEQ ID NO: 469523
guguauacgucacugaugc

SEQ ID NO: 469525 - RNA, 19 nt, Artificial Sequence
  Description of Artificial Sequence: Synthetic oligonucleotide
  Sense strand starting at position 3316 of SEQ ID NO: 317165
uuaguuaagcuccgggauu

SEQ ID NO: 469526 - RNA, 19 nt, Artificial Sequence
  Description of Artificial Sequence: Synthetic oligonucleotide
  Antisense Strand to SEQ ID NO: 469525
aaucccggagcuuaacuaa

SEQ ID NO: 469527 - RNA, 19 nt, Artificial Sequence
  Description of Artificial Sequence: Synthetic oligonucleotide
  Sense strand starting at position 3665 of SEQ ID NO: 317165
gcaagcguugccgaauuau

SEQ ID NO: 469528 - RNA, 19 nt, Artificial Sequence
  Description of Artificial Sequence: Synthetic oligonucleotide
  Antisense Strand to SEQ ID NO: 469527
auaauucggcaacgcuugc

SEQ ID NO: 469529 - RNA, 19 nt, Artificial Sequence
  Description of Artificial Sequence: Synthetic oligonucleotide
  Sense strand starting at position 3668 of SEQ ID NO: 317165
agcguugccgaauuauuca

SEQ ID NO: 469530 - RNA, 19 nt, Artificial Sequence
  Description of Artificial Sequence: Synthetic oligonucleotide
  Antisense Strand to SEQ ID NO: 469529
ugaauaauucggcaacgcu

SEQ ID NO: 469531 - RNA, 19 nt, Artificial Sequence
  Description of Artificial Sequence: Synthetic oligonucleotide
  Sense strand starting at position 3693 of SEQ ID NO: 317165
aaggaauggacgugucucu

SEQ ID NO: 469532 - RNA, 19 nt, Artificial Sequence
  Description of Artificial Sequence: Synthetic oligonucleotide
  Antisense Strand to SEQ ID NO: 469531
agagacacguccauuccuu

SEQ ID NO: 469533 - RNA, 19 nt, Artificial Sequence
  Description of Artificial Sequence: Synthetic oligonucleotide
  Sense strand starting at position 221 of SEQ ID NO: 317166
ggaugaggcucccaggaaa

SEQ ID NO: 469534 - RNA, 19 nt, Artificial Sequence
  Description of Artificial Sequence: Synthetic oligonucleotide
  Antisense Strand to SEQ ID NO: 469533
uuuccugggagccucaucc

SEQ ID NO: 469535 - RNA, 19 nt, Artificial Sequence
  Description of Artificial Sequence: Synthetic oligonucleotide
  Sense strand starting at position 278 of SEQ ID NO: 317166
ggacgagaauaucaucuaa

SEQ ID NO: 469536 - RNA, 19 nt, Artificial Sequence
  Description of Artificial Sequence: Synthetic oligonucleotide
  Antisense Strand to SEQ ID NO: 469535
uuagaugauauucucgucc

SEQ ID NO: 469537 - RNA, 19 nt, Artificial Sequence
  Description of Artificial Sequence: Synthetic oligonucleotide
  Sense strand starting at position 822 of SEQ ID NO: 317166
cggguggugcuguguauuu

SEQ ID NO: 469538 - RNA, 19 nt, Artificial Sequence
  Description of Artificial Sequence: Synthetic oligonucleotide
  Antisense Strand to SEQ ID NO: 469537
aaauacacagcaccacccg

SEQ ID NO: 469539 - RNA, 19 nt, Artificial Sequence
  Description of Artificial Sequence: Synthetic oligonucleotide
  Sense strand starting at position 827 of SEQ ID NO: 317166
ggugcuguguauuucuaga

SEQ ID NO: 469540 - RNA, 19 nt, Artificial Sequence
  Description of Artificial Sequence: Synthetic oligonucleotide
  Antisense Strand to SEQ ID NO: 469539
ucuagaaauacacagcacc

SEQ ID NO: 469541 - RNA, 19 nt, Artificial Sequence
  Description of Artificial Sequence: Synthetic oligonucleotide
  Sense strand starting at position 1507 of SEQ ID NO: 317166
ggcgcuuagaaaggagaaa

SEQ ID NO: 469542 - RNA, 19 nt, Artificial Sequence
  Description of Artificial Sequence: Synthetic oligonucleotide
  Antisense Strand to SEQ ID NO: 469541
uuucuccuuucuaagcgcc

SEQ ID NO: 469543 - RNA, 19 nt, Artificial Sequence
  Description of Artificial Sequence: Synthetic oligonucleotide
  Sense strand starting at position 2381 of SEQ ID NO: 317166
ccaucagccgucugagaau

SEQ ID NO: 469544 - RNA, 19 nt, Artificial Sequence
  Description of Artificial Sequence: Synthetic oligonucleotide
  Antisense Strand to SEQ ID NO: 469543
auucucagacggcugaugg

SEQ ID NO: 469545 - RNA, 19 nt, Artificial Sequence
  Description of Artificial Sequence: Synthetic oligonucleotide
  Sense strand starting at position 2390 of SEQ ID NO: 317166
gucugagaauccugggaau

SEQ ID NO: 469546 - RNA, 19 nt, Artificial Sequence
  Description of Artificial Sequence: Synthetic oligonucleotide
  Antisense Strand to SEQ ID NO: 469545
auucccaggauucucagac

SEQ ID NO: 469547 - RNA, 19 nt, Artificial Sequence
  Description of Artificial Sequence: Synthetic oligonucleotide
  Sense strand starting at position 2393 of SEQ ID NO: 317166
ugagaauccugggaauaag

SEQ ID NO: 469548 - RNA, 19 nt, Artificial Sequence
  Description of Artificial Sequence: Synthetic oligonucleotide
  Antisense Strand to SEQ ID NO: 469547
cuuauucccaggauucuca

SEQ ID NO: 469549 - RNA, 19 nt, Artificial Sequence
  Description of Artificial Sequence: Synthetic oligonucleotide
  Sense strand starting at position 2504 of SEQ ID NO: 317166
agccgucuuugacagguga

SEQ ID NO: 469550 - RNA, 19 nt, Artificial Sequence
  Description of Artificial Sequence: Synthetic oligonucleotide
  Antisense Strand to SEQ ID NO: 469549
ucaccugucaaagacggcu

SEQ ID NO: 469551 - RNA, 19 nt, Artificial Sequence
  Description of Artificial Sequence: Synthetic oligonucleotide
  Sense strand starting at position 2508 of SEQ ID NO: 317166
gucuuugacaggugaccua

SEQ ID NO: 469552 - RNA, 19 nt, Artificial Sequence
  Description of Artificial Sequence: Synthetic oligonucleotide
  Antisense Strand to SEQ ID NO: 469551
uaggucaccugucaaagac

SEQ ID NO: 469553 - RNA, 19 nt, Artificial Sequence
  Description of Artificial Sequence: Synthetic oligonucleotide
  Sense strand starting at position 2523 of SEQ ID NO: 317166
ccuaguggguaucucguaa

SEQ ID NO: 469554 - RNA, 19 nt, Artificial Sequence
  Description of Artificial Sequence: Synthetic oligonucleotide
  Antisense Strand to SEQ ID NO: 469553
uuacgagauacccacuagg

SEQ ID NO: 469555 - RNA, 19 nt, Artificial Sequence
  Description of Artificial Sequence: Synthetic oligonucleotide
  Sense strand starting at position 2765 of SEQ ID NO: 317166
ucagaaaucugcccaggca

SEQ ID NO: 469556 - RNA, 19 nt, Artificial Sequence
  Description of Artificial Sequence: Synthetic oligonucleotide
  Antisense Strand to SEQ ID NO: 469555
ugccugggcagauuucuga

SEQ ID NO: 469557 - RNA, 19 nt, Artificial Sequence
  Description of Artificial Sequence: Synthetic oligonucleotide
  Sense strand starting at position 2777 of SEQ ID NO: 317166
ccaggcaucugccaugaga

SEQ ID NO: 469558 - RNA, 19 nt, Artificial Sequence
  Description of Artificial Sequence: Synthetic oligonucleotide
  Antisense Strand to SEQ ID NO: 469557
ucucauggcagaugccugg

SEQ ID NO: 469559 - RNA, 19 nt, Artificial Sequence
  Description of Artificial Sequence: Synthetic oligonucleotide
  Sense strand starting at position 2779 of SEQ ID NO: 317166
aggcaucugccaugagagu

SEQ ID NO: 469560 - RNA, 19 nt, Artificial Sequence
  Description of Artificial Sequence: Synthetic oligonucleotide
  Antisense Strand to SEQ ID NO: 469559
acucucauggcagaugccu

SEQ ID NO: 469561 - RNA, 19 nt, Artificial Sequence
  Description of Artificial Sequence: Synthetic oligonucleotide
  Sense strand starting at position 2799 of SEQ ID NO: 317166
acccacuggucaggagaaa

SEQ ID NO: 469562 - RNA, 19 nt, Artificial Sequence
  Description of Artificial Sequence: Synthetic oligonucleotide
  Antisense Strand to SEQ ID NO: 469561
uuucuccugaccagugggu

SEQ ID NO: 469563 - RNA, 19 nt, Artificial Sequence
  Description of Artificial Sequence: Synthetic oligonucleotide
  Sense strand starting at position 2811 of SEQ ID NO: 317166
ggagaaacccuuugggcuu

SEQ ID NO: 469564 - RNA, 19 nt, Artificial Sequence
  Description of Artificial Sequence: Synthetic oligonucleotide
  Antisense Strand to SEQ ID NO: 469563
aagcccaaaggguuucucc

SEQ ID NO: 469565 - RNA, 19 nt, Artificial Sequence
  Description of Artificial Sequence: Synthetic oligonucleotide
  Sense strand starting at position 2812 of SEQ ID NO: 317166
gagaaacccuuugggcuua

SEQ ID NO: 469566 - RNA, 19 nt, Artificial Sequence
  Description of Artificial Sequence: Synthetic oligonucleotide
  Antisense Strand to SEQ ID NO: 469565
uaagcccaaaggguuucuc

SEQ ID NO: 469567 - RNA, 19 nt, Artificial Sequence
  Description of Artificial Sequence: Synthetic oligonucleotide
  Sense strand starting at position 2817 of SEQ ID NO: 317166
acccuuugggcuuaagcaa

SEQ ID NO: 469568 - RNA, 19 nt, Artificial Sequence
  Description of Artificial Sequence: Synthetic oligonucleotide
  Antisense Strand to SEQ ID NO: 469567
uugcuuaagcccaaagggu

SEQ ID NO: 469569 - RNA, 19 nt, Artificial Sequence
  Description of Artificial Sequence: Synthetic oligonucleotide
  Sense strand starting at position 2824 of SEQ ID NO: 317166
gggcuuaagcaaggaaaug

SEQ ID NO: 469570 - RNA, 19 nt, Artificial Sequence
  Description of Artificial Sequence: Synthetic oligonucleotide
  Antisense Strand to SEQ ID NO: 469569
cauuuccuugcuuaagccc

SEQ ID NO: 469571 - RNA, 19 nt, Artificial Sequence
  Description of Artificial Sequence: Synthetic oligonucleotide
  Sense strand starting at position 3011 of SEQ ID NO: 317166
cuuagagacucugucaacu

SEQ ID NO: 469572 - RNA, 19 nt, Artificial Sequence
  Description of Artificial Sequence: Synthetic oligonucleotide
  Antisense Strand to SEQ ID NO: 469571
aguugacagagucucuaag

SEQ ID NO: 469573 - RNA, 19 nt, Artificial Sequence
  Description of Artificial Sequence: Synthetic oligonucleotide
  Sense strand starting at position 3013 of SEQ ID NO: 317166
uagagacucugucaacuga

SEQ ID NO: 469574 - RNA, 19 nt, Artificial Sequence
  Description of Artificial Sequence: Synthetic oligonucleotide
  Antisense Strand to SEQ ID NO: 469573
ucaguugacagagucucua

SEQ ID NO: 469575 - RNA, 19 nt, Artificial Sequence
  Description of Artificial Sequence: Synthetic oligonucleotide
  Sense strand starting at position 3141 of SEQ ID NO: 317166
ggucauugggacuguuuca

SEQ ID NO: 469576 - RNA, 19 nt, Artificial Sequence
  Description of Artificial Sequence: Synthetic oligonucleotide
  Antisense Strand to SEQ ID NO: 469575
ugaaacagucccaaugacc

SEQ ID NO: 469577 - RNA, 19 nt, Artificial Sequence
  Description of Artificial Sequence: Synthetic oligonucleotide
  Sense strand starting at position 3269 of SEQ ID NO: 317166
agucuuugcugggagcagu

SEQ ID NO: 469578 - RNA, 19 nt, Artificial Sequence
  Description of Artificial Sequence: Synthetic oligonucleotide
  Antisense Strand to SEQ ID NO: 469577
acugcucccagcaaagacu

SEQ ID NO: 469579 - RNA, 19 nt, Artificial Sequence
  Description of Artificial Sequence: Synthetic oligonucleotide
  Sense strand starting at position 3334 of SEQ ID NO: 317166
uccagagacuguggguaaa

SEQ ID NO: 469580 - RNA, 19 nt, Artificial Sequence
  Description of Artificial Sequence: Synthetic oligonucleotide
  Antisense Strand to SEQ ID NO: 469579
uuuacccacagucucugga

SEQ ID NO: 469581 - RNA, 19 nt, Artificial Sequence
  Description of Artificial Sequence: Synthetic oligonucleotide
  Sense strand starting at position 3344 of SEQ ID NO: 317166
guggguaaagacuguggau

SEQ ID NO: 469582 - RNA, 19 nt, Artificial Sequence
  Description of Artificial Sequence: Synthetic oligonucleotide
  Antisense Strand to SEQ ID NO: 469581
auccacagucuuuacccac

SEQ ID NO: 469583 - RNA, 19 nt, Artificial Sequence
  Description of Artificial Sequence: Synthetic oligonucleotide
  Sense strand starting at position 3346 of SEQ ID NO: 317166
ggguaaagacuguggauaa

SEQ ID NO: 469584 - RNA, 19 nt, Artificial Sequence
  Description of Artificial Sequence: Synthetic oligonucleotide
  Antisense Strand to SEQ ID NO: 469583
uuauccacagucuuuaccc

SEQ ID NO: 469585 - RNA, 19 nt, Artificial Sequence
  Description of Artificial Sequence: Synthetic oligonucleotide
  Sense strand starting at position 3347 of SEQ ID NO: 317166
gguaaagacuguggauaaa

SEQ ID NO: 469586 - RNA, 19 nt, Artificial Sequence
  Description of Artificial Sequence: Synthetic oligonucleotide
  Antisense Strand to SEQ ID NO: 469585
uuuauccacagucuuuacc

SEQ ID NO: 469587 - RNA, 19 nt, Artificial Sequence
  Description of Artificial Sequence: Synthetic oligonucleotide
  Sense strand starting at position 3360 of SEQ ID NO: 317166
gauaaagcuuccuacaggu

SEQ ID NO: 469588 - RNA, 19 nt, Artificial Sequence
  Description of Artificial Sequence: Synthetic oligonucleotide
  Antisense Strand to SEQ ID NO: 469587
accuguaggaagcuuuauc

SEQ ID NO: 469589 - RNA, 19 nt, Artificial Sequence
  Description of Artificial Sequence: Synthetic oligonucleotide
  Sense strand starting at position 3406 of SEQ ID NO: 317166
gaaggcauuccagguagga

SEQ ID NO: 469590 - RNA, 19 nt, Artificial Sequence
  Description of Artificial Sequence: Synthetic oligonucleotide
  Antisense Strand to SEQ ID NO: 469589
uccuaccuggaaugccuuc

SEQ ID NO: 469591 - RNA, 19 nt, Artificial Sequence
  Description of Artificial Sequence: Synthetic oligonucleotide
  Sense strand starting at position 3426 of SEQ ID NO: 317166
aacagaauguguuaagaca

SEQ ID NO: 469592 - RNA, 19 nt, Artificial Sequence
  Description of Artificial Sequence: Synthetic oligonucleotide
  Antisense Strand to SEQ ID NO: 469591
ugucuuaacacauucuguu

SEQ ID NO: 469593 - RNA, 19 nt, Artificial Sequence
  Description of Artificial Sequence: Synthetic oligonucleotide
  Sense strand starting at position 3434 of SEQ ID NO: 317166
guguuaagacaguauauga

SEQ ID NO: 469594 - RNA, 19 nt, Artificial Sequence
  Description of Artificial Sequence: Synthetic oligonucleotide
  Antisense Strand to SEQ ID NO: 469593
ucauauacugucuuaacac

SEQ ID NO: 469595 - RNA, 19 nt, Artificial Sequence
  Description of Artificial Sequence: Synthetic oligonucleotide
  Sense strand starting at position 3447 of SEQ ID NO: 317166
auaugagcuuccugccacu

SEQ ID NO: 469596 - RNA, 19 nt, Artificial Sequence
  Description of Artificial Sequence: Synthetic oligonucleotide
  Antisense Strand to SEQ ID NO: 469595
aguggcaggaagcucauau

SEQ ID NO: 469597 - RNA, 19 nt, Artificial Sequence
  Description of Artificial Sequence: Synthetic oligonucleotide
  Sense strand starting at position 3616 of SEQ ID NO: 317166
ccagacauucuuugacugu

SEQ ID NO: 469598 - RNA, 19 nt, Artificial Sequence
  Description of Artificial Sequence: Synthetic oligonucleotide
  Antisense Strand to SEQ ID NO: 469597
acagucaaagaaugucugg

SEQ ID NO: 469599 - RNA, 19 nt, Artificial Sequence
  Description of Artificial Sequence: Synthetic oligonucleotide
  Sense strand starting at position 3711 of SEQ ID NO: 317166
ggacacucaucauaggauu

SEQ ID NO: 469600 - RNA, 19 nt, Artificial Sequence
  Description of Artificial Sequence: Synthetic oligonucleotide
  Antisense Strand to SEQ ID NO: 469599
aauccuaugaugagugucc

SEQ ID NO: 469601 - RNA, 19 nt, Artificial Sequence
  Description of Artificial Sequence: Synthetic oligonucleotide
  Sense strand starting at position 3849 of SEQ ID NO: 317166
ggguuagcauguggacaua

SEQ ID NO: 469602 - RNA, 19 nt, Artificial Sequence
  Description of Artificial Sequence: Synthetic oligonucleotide
  Antisense Strand to SEQ ID NO: 469601
uauguccacaugcuaaccc

SEQ ID NO: 469603 - RNA, 19 nt, Artificial Sequence
  Description of Artificial Sequence: Synthetic oligonucleotide
  Sense strand starting at position 3900 of SEQ ID NO: 317166
gcauuaagcuugcaagggu

SEQ ID NO: 469604 - RNA, 19 nt, Artificial Sequence
  Description of Artificial Sequence: Synthetic oligonucleotide
  Antisense Strand to SEQ ID NO: 469603
acccuugcaagcuuaaugc

SEQ ID NO: 469605 - RNA, 19 nt, Artificial Sequence
  Description of Artificial Sequence: Synthetic oligonucleotide
  Sense strand starting at position 3909 of SEQ ID NO: 317166
uugcaaggguguggugauu

SEQ ID NO: 469606 - RNA, 19 nt, Artificial Sequence
  Description of Artificial Sequence: Synthetic oligonucleotide
  Antisense Strand to SEQ ID NO: 469605
aaucaccacacccuugcaa

SEQ ID NO: 469607 - RNA, 19 nt, Artificial Sequence
  Description of Artificial Sequence: Synthetic oligonucleotide
  Sense strand starting at position 3956 of SEQ ID NO: 317166
ggcagaaauuagguugaag

SEQ ID NO: 469608 - RNA, 19 nt, Artificial Sequence
  Description of Artificial Sequence: Synthetic oligonucleotide
  Antisense Strand to SEQ ID NO: 469607
cuucaaccuaauuucugcc

SEQ ID NO: 469609 - RNA, 19 nt, Artificial Sequence
  Description of Artificial Sequence: Synthetic oligonucleotide
  Sense strand starting at position 320 of SEQ ID NO: 317167
aaagcacuuccgggaauua

SEQ ID NO: 469610 - RNA, 19 nt, Artificial Sequence
  Description of Artificial Sequence: Synthetic oligonucleotide
  Antisense Strand to SEQ ID NO: 469609
uaauucccggaagugcuuu

SEQ ID NO: 469611 - RNA, 19 nt, Artificial Sequence
  Description of Artificial Sequence: Synthetic oligonucleotide
  Sense strand starting at position 321 of SEQ ID NO: 317167
aagcacuuccgggaauuau

SEQ ID NO: 469612 - RNA, 19 nt, Artificial Sequence
  Description of Artificial Sequence: Synthetic oligonucleotide
  Antisense Strand to SEQ ID NO: 469611
auaauucccggaagugcuu

SEQ ID NO: 469613 - RNA, 19 nt, Artificial Sequence
  Description of Artificial Sequence: Synthetic oligonucleotide
  Sense strand starting at position 329 of SEQ ID NO: 317167
ccgggaauuauucguggcu

SEQ ID NO: 469614 - RNA, 19 nt, Artificial Sequence
  Description of Artificial Sequence: Synthetic oligonucleotide
  Antisense Strand to SEQ ID NO: 469613
agccacgaauaauucccgg

SEQ ID NO: 469615 - RNA, 19 nt, Artificial Sequence
  Description of Artificial Sequence: Synthetic oligonucleotide
  Sense strand starting at position 331 of SEQ ID NO: 317167
gggaauuauucguggcugu

SEQ ID NO: 469616 - RNA, 19 nt, Artificial Sequence
  Description of Artificial Sequence: Synthetic oligonucleotide
  Antisense Strand to SEQ ID NO: 469615
acagccacgaauaauuccc

SEQ ID NO: 469617 - RNA, 19 nt, Artificial Sequence
  Description of Artificial Sequence: Synthetic oligonucleotide
  Sense strand starting at position 332 of SEQ ID NO: 317167
ggaauuauucguggcugug

SEQ ID NO: 469618 - RNA, 19 nt, Artificial Sequence
  Description of Artificial Sequence: Synthetic oligonucleotide
  Antisense Strand to SEQ ID NO: 469617
cacagccacgaauaauucc

SEQ ID NO: 469619 - RNA, 19 nt, Artificial Sequence
  Description of Artificial Sequence: Synthetic oligonucleotide
  Sense strand starting at position 366 of SEQ ID NO: 317167
cagcaagaugcugagagua

SEQ ID NO: 469620 - RNA, 19 nt, Artificial Sequence
  Description of Artificial Sequence: Synthetic oligonucleotide
  Antisense Strand to SEQ ID NO: 469619
uacucucagcaucuugcug

SEQ ID NO: 469621 - RNA, 19 nt, Artificial Sequence
  Description of Artificial Sequence: Synthetic oligonucleotide
  Sense strand starting at position 368 of SEQ ID NO: 317167
gcaagaugcugagaguaga

SEQ ID NO: 469622 - RNA, 19 nt, Artificial Sequence
  Description of Artificial Sequence: Synthetic oligonucleotide
  Antisense Strand to SEQ ID NO: 469621
ucuacucucagcaucuugc

SEQ ID NO: 469623 - RNA, 19 nt, Artificial Sequence
  Description of Artificial Sequence: Synthetic oligonucleotide
  Sense strand starting at position 387 of SEQ ID NO: 317167
ugcugugucuauggucuua

SEQ ID NO: 469624 - RNA, 19 nt, Artificial Sequence
  Description of Artificial Sequence: Synthetic oligonucleotide
  Antisense Strand to SEQ ID NO: 469623
uaagaccauagacacagca

SEQ ID NO: 469625 - RNA, 19 nt, Artificial Sequence
  Description of Artificial Sequence: Synthetic oligonucleotide
  Sense strand starting at position 389 of SEQ ID NO: 317167
cugugucuauggucuuaga

SEQ ID NO: 469626 - RNA, 19 nt, Artificial Sequence
  Description of Artificial Sequence: Synthetic oligonucleotide
  Antisense Strand to SEQ ID NO: 469625
ucuaagaccauagacacag

SEQ ID NO: 469627 - RNA, 19 nt, Artificial Sequence
  Description of Artificial Sequence: Synthetic oligonucleotide
  Sense strand starting at position 392 of SEQ ID NO: 317167
ugucuauggucuuagaugu

SEQ ID NO: 469628 - RNA, 19 nt, Artificial Sequence
  Description of Artificial Sequence: Synthetic oligonucleotide
  Antisense Strand to SEQ ID NO: 469627
acaucuaagaccauagaca

SEQ ID NO: 469629 - RNA, 19 nt, Artificial Sequence
  Description of Artificial Sequence: Synthetic oligonucleotide
  Sense strand starting at position 420 of SEQ ID NO: 317167
aguacaauugccuagacau

SEQ ID NO: 469630 - RNA, 19 nt, Artificial Sequence
  Description of Artificial Sequence: Synthetic oligonucleotide
  Antisense Strand to SEQ ID NO: 469629
augucuaggcaauuguacu

SEQ ID NO: 469631 - RNA, 19 nt, Artificial Sequence
  Description of Artificial Sequence: Synthetic oligonucleotide
  Sense strand starting at position 462 of SEQ ID NO: 317167
aguguuaacucuuggaaau

SEQ ID NO: 469632 - RNA, 19 nt, Artificial Sequence
  Description of Artificial Sequence: Synthetic oligonucleotide
  Antisense Strand to SEQ ID NO: 469631
auuuccaagaguuaacacu

SEQ ID NO: 469633 - RNA, 19 nt, Artificial Sequence
  Description of Artificial Sequence: Synthetic oligonucleotide
  Sense strand starting at position 463 of SEQ ID NO: 317167
guguuaacucuuggaaaua

SEQ ID NO: 469634 - RNA, 19 nt, Artificial Sequence
  Description of Artificial Sequence: Synthetic oligonucleotide
  Antisense Strand to SEQ ID NO: 469633
uauuuccaagaguuaacac

SEQ ID NO: 469635 - RNA, 19 nt, Artificial Sequence
  Description of Artificial Sequence: Synthetic oligonucleotide
  Sense strand starting at position 464 of SEQ ID NO: 317167
uguuaacucuuggaaauau

SEQ ID NO: 469636 - RNA, 19 nt, Artificial Sequence
  Description of Artificial Sequence: Synthetic oligonucleotide
  Antisense Strand to SEQ ID NO: 469635
auauuuccaagaguuaaca

SEQ ID NO: 469637 - RNA, 19 nt, Artificial Sequence
  Description of Artificial Sequence: Synthetic oligonucleotide
  Sense strand starting at position 617 of SEQ ID NO: 317167
gggcacuuauuuggagauu

SEQ ID NO: 469638 - RNA, 19 nt, Artificial Sequence
  Description of Artificial Sequence: Synthetic oligonucleotide
  Antisense Strand to SEQ ID NO: 469637
aaucuccaaauaagugccc

SEQ ID NO: 469639 - RNA, 19 nt, Artificial Sequence
  Description of Artificial Sequence: Synthetic oligonucleotide
  Sense strand starting at position 928 of SEQ ID NO: 317167
ggaugaggcucccaggaaa

SEQ ID NO: 469640 - RNA, 19 nt, Artificial Sequence
  Description of Artificial Sequence: Synthetic oligonucleotide
  Antisense Strand to SEQ ID NO: 469639
uuuccugggagccucaucc

SEQ ID NO: 469641 - RNA, 19 nt, Artificial Sequence
  Description of Artificial Sequence: Synthetic oligonucleotide
  Sense strand starting at position 985 of SEQ ID NO: 317167
ggacgagaauaucaucuaa

SEQ ID NO: 469642 - RNA, 19 nt, Artificial Sequence
  Description of Artificial Sequence: Synthetic oligonucleotide
  Antisense Strand to SEQ ID NO: 469641
uuagaugauauucucgucc

SEQ ID NO: 469643 - RNA, 19 nt, Artificial Sequence
  Description of Artificial Sequence: Synthetic oligonucleotide
  Sense strand starting at position 1529 of SEQ ID NO: 317167
cggguggugcuguguauuu

SEQ ID NO: 469644 - RNA, 19 nt, Artificial Sequence
  Description of Artificial Sequence: Synthetic oligonucleotide
  Antisense Strand to SEQ ID NO: 469643
aaauacacagcaccacccg

SEQ ID NO: 469645 - RNA, 19 nt, Artificial Sequence
  Description of Artificial Sequence: Synthetic oligonucleotide
  Sense strand starting at position 1534 of SEQ ID NO: 317167
ggugcuguguauuucuaga

SEQ ID NO: 469646 - RNA, 19 nt, Artificial Sequence
  Description of Artificial Sequence: Synthetic oligonucleotide
  Antisense Strand to SEQ ID NO: 469645
ucuagaaauacacagcacc

SEQ ID NO: 469647 - RNA, 19 nt, Artificial Sequence
  Description of Artificial Sequence: Synthetic oligonucleotide
  Sense strand starting at position 2214 of SEQ ID NO: 317167
ggcgcuuagaaaggagaaa

SEQ ID NO: 469648 - RNA, 19 nt, Artificial Sequence
  Description of Artificial Sequence: Synthetic oligonucleotide
  Antisense Strand to SEQ ID NO: 469647
uuucuccuuucuaagcgcc

SEQ ID NO: 469649 - RNA, 19 nt, Artificial Sequence
  Description of Artificial Sequence: Synthetic oligonucleotide
  Sense strand starting at position 3088 of SEQ ID NO: 317167
ccaucagccgucugagaau

SEQ ID NO: 469650 - RNA, 19 nt, Artificial Sequence
  Description of Artificial Sequence: Synthetic oligonucleotide
  Antisense Strand to SEQ ID NO: 469649
auucucagacggcugaugg

SEQ ID NO: 469651 - RNA, 19 nt, Artificial Sequence
  Description of Artificial Sequence: Synthetic oligonucleotide
  Sense strand starting at position 3097 of SEQ ID NO: 317167
gucugagaauccugggaau

SEQ ID NO: 469652 - RNA, 19 nt, Artificial Sequence
  Description of Artificial Sequence: Synthetic oligonucleotide
  Antisense Strand to SEQ ID NO: 469651
auucccaggauucucagac

SEQ ID NO: 469653 - RNA, 19 nt, Artificial Sequence
  Description of Artificial Sequence: Synthetic oligonucleotide
  Sense strand starting at position 3100 of SEQ ID NO: 317167
ugagaauccugggaauaag

SEQ ID NO: 469654 - RNA, 19 nt, Artificial Sequence
  Description of Artificial Sequence: Synthetic oligonucleotide
  Antisense Strand to SEQ ID NO: 469653
cuuauucccaggauucuca

SEQ ID NO: 469655 - RNA, 19 nt, Artificial Sequence
  Description of Artificial Sequence: Synthetic oligonucleotide
  Sense strand starting at position 3211 of SEQ ID NO: 317167
agccgucuuugacagguga

SEQ ID NO: 469656 - RNA, 19 nt, Artificial Sequence
  Description of Artificial Sequence: Synthetic oligonucleotide
  Antisense Strand to SEQ ID NO: 469655
ucaccugucaaagacggcu

SEQ ID NO: 469657 - RNA, 19 nt, Artificial Sequence
  Description of Artificial Sequence: Synthetic oligonucleotide
  Sense strand starting at position 3215 of SEQ ID NO: 317167
gucuuugacaggugaccua

SEQ ID NO: 469658 - RNA, 19 nt, Artificial Sequence
  Description of Artificial Sequence: Synthetic oligonucleotide
  Antisense Strand to SEQ ID NO: 469657
uaggucaccugucaaagac

SEQ ID NO: 469659 - RNA, 19 nt, Artificial Sequence
  Description of Artificial Sequence: Synthetic oligonucleotide
  Sense strand starting at position 3230 of SEQ ID NO: 317167
ccuaguggguaucucguaa

SEQ ID NO: 469660 - RNA, 19 nt, Artificial Sequence
  Description of Artificial Sequence: Synthetic oligonucleotide
  Antisense Strand to SEQ ID NO: 469659
uuacgagauacccacuagg

SEQ ID NO: 469661 - RNA, 19 nt, Artificial Sequence
  Description of Artificial Sequence: Synthetic oligonucleotide
  Sense strand starting at position 3472 of SEQ ID NO: 317167
ucagaaaucugcccaggca

SEQ ID NO: 469662 - RNA, 19 nt, Artificial Sequence
  Description of Artificial Sequence: Synthetic oligonucleotide
  Antisense Strand to SEQ ID NO: 469661
ugccugggcagauuucuga

SEQ ID NO: 469663 - RNA, 19 nt, Artificial Sequence
  Description of Artificial Sequence: Synthetic oligonucleotide
  Sense strand starting at position 3484 of SEQ ID NO: 317167
ccaggcaucugccaugaga

SEQ ID NO: 469664 - RNA, 19 nt, Artificial Sequence
  Description of Artificial Sequence: Synthetic oligonucleotide
  Antisense Strand to SEQ ID NO: 469663
ucucauggcagaugccugg

SEQ ID NO: 469665 - RNA, 19 nt, Artificial Sequence
  Description of Artificial Sequence: Synthetic oligonucleotide
  Sense strand starting at position 3486 of SEQ ID NO: 317167
aggcaucugccaugagagu

SEQ ID NO: 469666 - RNA, 19 nt, Artificial Sequence
  Description of Artificial Sequence: Synthetic oligonucleotide
  Antisense Strand to SEQ ID NO: 469665
acucucauggcagaugccu

SEQ ID NO: 469667 - RNA, 19 nt, Artificial Sequence
  Description of Artificial Sequence: Synthetic oligonucleotide
  Sense strand starting at position 3506 of SEQ ID NO: 317167
acccacuggucaggagaaa

SEQ ID NO: 469668 - RNA, 19 nt, Artificial Sequence
  Description of Artificial Sequence: Synthetic oligonucleotide
  Antisense Strand to SEQ ID NO: 469667
uuucuccugaccagugggu

SEQ ID NO: 469669 - RNA, 19 nt, Artificial Sequence
  Description of Artificial Sequence: Synthetic oligonucleotide
  Sense strand starting at position 3518 of SEQ ID NO: 317167
ggagaaacccuuugggcuu

SEQ ID NO: 469670 - RNA, 19 nt, Artificial Sequence
  Description of Artificial Sequence: Synthetic oligonucleotide
  Antisense Strand to SEQ ID NO: 469669
aagcccaaaggguuucucc

SEQ ID NO: 469671 - RNA, 19 nt, Artificial Sequence
  Description of Artificial Sequence: Synthetic oligonucleotide
  Sense strand starting at position 3519 of SEQ ID NO: 317167
gagaaacccuuugggcuua

SEQ ID NO: 469672 - RNA, 19 nt, Artificial Sequence
  Description of Artificial Sequence: Synthetic oligonucleotide
  Antisense Strand to SEQ ID NO: 469671
uaagcccaaaggguuucuc

SEQ ID NO: 469673 - RNA, 19 nt, Artificial Sequence
  Description of Artificial Sequence: Synthetic oligonucleotide
  Sense strand starting at position 3524 of SEQ ID NO: 317167
acccuuugggcuuaagcaa

SEQ ID NO: 469674 - RNA, 19 nt, Artificial Sequence
  Description of Artificial Sequence: Synthetic oligonucleotide
  Antisense Strand to SEQ ID NO: 469673
uugcuuaagcccaaagggu

SEQ ID NO: 469675 - RNA, 19 nt, Artificial Sequence
  Description of Artificial Sequence: Synthetic oligonucleotide
  Sense strand starting at position 3531 of SEQ ID NO: 317167
gggcuuaagcaaggaaaug

SEQ ID NO: 469676 - RNA, 19 nt, Artificial Sequence
  Description of Artificial Sequence: Synthetic oligonucleotide
  Antisense Strand to SEQ ID NO: 469675
cauuuccuugcuuaagccc

SEQ ID NO: 469677 - RNA, 19 nt, Artificial Sequence
  Description of Artificial Sequence: Synthetic oligonucleotide
  Sense strand starting at position 3718 of SEQ ID NO: 317167
cuuagagacucugucaacu

SEQ ID NO: 469678 - RNA, 19 nt, Artificial Sequence
  Description of Artificial Sequence: Synthetic oligonucleotide
  Antisense Strand to SEQ ID NO: 469677
aguugacagagucucuaag

SEQ ID NO: 469679 - RNA, 19 nt, Artificial Sequence
  Description of Artificial Sequence: Synthetic oligonucleotide
  Sense strand starting at position 3720 of SEQ ID NO: 317167
uagagacucugucaacuga

SEQ ID NO: 469680 - RNA, 19 nt, Artificial Sequence
  Description of Artificial Sequence: Synthetic oligonucleotide
  Antisense Strand to SEQ ID NO: 469679
ucaguugacagagucucua

SEQ ID NO: 469681 - RNA, 19 nt, Artificial Sequence
  Description of Artificial Sequence: Synthetic oligonucleotide
  Sense strand starting at position 3848 of SEQ ID NO: 317167
ggucauugggacuguuuca

SEQ ID NO: 469682 - RNA, 19 nt, Artificial Sequence
  Description of Artificial Sequence: Synthetic oligonucleotide
  Antisense Strand to SEQ ID NO: 469681
ugaaacagucccaaugacc

SEQ ID NO: 469683 - RNA, 19 nt, Artificial Sequence
  Description of Artificial Sequence: Synthetic oligonucleotide
  Sense strand starting at position 3976 of SEQ ID NO: 317167
agucuuugcugggagcagu

SEQ ID NO: 469684 - RNA, 19 nt, Artificial Sequence
  Description of Artificial Sequence: Synthetic oligonucleotide
  Antisense Strand to SEQ ID NO: 469683
acugcucccagcaaagacu

SEQ ID NO: 469685 - RNA, 19 nt, Artificial Sequence
  Description of Artificial Sequence: Synthetic oligonucleotide
  Sense strand starting at position 184 of SEQ ID NO: 317168
gccucagauugauaacuaa

SEQ ID NO: 469686 - RNA, 19 nt, Artificial Sequence
  Description of Artificial Sequence: Synthetic oligonucleotide
  Antisense Strand to SEQ ID NO: 469685
uuaguuaucaaucugaggc

SEQ ID NO: 469687 - RNA, 19 nt, Artificial Sequence
  Description of Artificial Sequence: Synthetic oligonucleotide
  Sense strand starting at position 213 of SEQ ID NO: 317168
gucucaaacccugaaagca

SEQ ID NO: 469688 - RNA, 19 nt, Artificial Sequence
  Description of Artificial Sequence: Synthetic oligonucleotide
  Antisense Strand to SEQ ID NO: 469687
ugcuuucaggguuugagac

SEQ ID NO: 469689 - RNA, 19 nt, Artificial Sequence
  Description of Artificial Sequence: Synthetic oligonucleotide
  Sense strand starting at position 274 of SEQ ID NO: 317168
aaagcuaguggcuaugaau

SEQ ID NO: 469690 - RNA, 19 nt, Artificial Sequence
  Description of Artificial Sequence: Synthetic oligonucleotide
  Antisense Strand to SEQ ID NO: 469689
auucauagccacuagcuuu

SEQ ID NO: 469691 - RNA, 19 nt, Artificial Sequence
  Description of Artificial Sequence: Synthetic oligonucleotide
  Sense strand starting at position 280 of SEQ ID NO: 317168
aguggcuaugaaugggaua

SEQ ID NO: 469692 - RNA, 19 nt, Artificial Sequence
  Description of Artificial Sequence: Synthetic oligonucleotide
  Antisense Strand to SEQ ID NO: 469691
uaucccauucauagccacu

SEQ ID NO: 469693 - RNA, 19 nt, Artificial Sequence
  Description of Artificial Sequence: Synthetic oligonucleotide
  Sense strand starting at position 282 of SEQ ID NO: 317168
uggcuaugaaugggauagu

SEQ ID NO: 469694 - RNA, 19 nt, Artificial Sequence
  Description of Artificial Sequence: Synthetic oligonucleotide
  Antisense Strand to SEQ ID NO: 469693
acuaucccauucauagcca

SEQ ID NO: 469695 - RNA, 19 nt, Artificial Sequence
  Description of Artificial Sequence: Synthetic oligonucleotide
  Sense strand starting at position 408 of SEQ ID NO: 317168
ugugaaagcucauaaacua

SEQ ID NO: 469696 - RNA, 19 nt, Artificial Sequence
  Description of Artificial Sequence: Synthetic oligonucleotide
  Antisense Strand to SEQ ID NO: 469695
uaguuuaugagcuuucaca

SEQ ID NO: 469697 - RNA, 19 nt, Artificial Sequence
  Description of Artificial Sequence: Synthetic oligonucleotide
  Sense strand starting at position 584 of SEQ ID NO: 317168
cccuaagucuacgagggaa

SEQ ID NO: 469698 - RNA, 19 nt, Artificial Sequence
  Description of Artificial Sequence: Synthetic oligonucleotide
  Antisense Strand to SEQ ID NO: 469697
uucccucguagacuuaggg

SEQ ID NO: 469699 - RNA, 19 nt, Artificial Sequence
  Description of Artificial Sequence: Synthetic oligonucleotide
  Sense strand starting at position 634 of SEQ ID NO: 317168
ggaauaaauuguuuccuug

SEQ ID NO: 469700 - RNA, 19 nt, Artificial Sequence
  Description of Artificial Sequence: Synthetic oligonucleotide
  Antisense Strand to SEQ ID NO: 469699
caaggaaacaauuuauucc

SEQ ID NO: 469701 - RNA, 19 nt, Artificial Sequence
  Description of Artificial Sequence: Synthetic oligonucleotide
  Sense strand starting at position 641 of SEQ ID NO: 317168
auuguuuccuuguugaaug

SEQ ID NO: 469702 - RNA, 19 nt, Artificial Sequence
  Description of Artificial Sequence: Synthetic oligonucleotide
  Antisense Strand to SEQ ID NO: 469701
cauucaacaaggaaacaau

SEQ ID NO: 469703 - RNA, 19 nt, Artificial Sequence
  Description of Artificial Sequence: Synthetic oligonucleotide
  Sense strand starting at position 657 of SEQ ID NO: 317168
auguaaugaccgcgcacua

SEQ ID NO: 469704 - RNA, 19 nt, Artificial Sequence
  Description of Artificial Sequence: Synthetic oligonucleotide
  Antisense Strand to SEQ ID NO: 469703
uagugcgcggucauuacau

SEQ ID NO: 469705 - RNA, 19 nt, Artificial Sequence
  Description of Artificial Sequence: Synthetic oligonucleotide
  Sense strand starting at position 712 of SEQ ID NO: 317168
cugcaauccugggcuggaa

SEQ ID NO: 469706 - RNA, 19 nt, Artificial Sequence
  Description of Artificial Sequence: Synthetic oligonucleotide
  Antisense Strand to SEQ ID NO: 469705
uuccagcccaggauugcag

SEQ ID NO: 469707 - RNA, 19 nt, Artificial Sequence
  Description of Artificial Sequence: Synthetic oligonucleotide
  Sense strand starting at position 875 of SEQ ID NO: 317168
uaguguugaucuuccagac

SEQ ID NO: 469708 - RNA, 19 nt, Artificial Sequence
  Description of Artificial Sequence: Synthetic oligonucleotide
  Antisense Strand to SEQ ID NO: 469707
gucuggaagaucaacacua

SEQ ID NO: 469709 - RNA, 19 nt, Artificial Sequence
  Description of Artificial Sequence: Synthetic oligonucleotide
  Sense strand starting at position 1284 of SEQ ID NO: 317168
gcagcauggucucugugaa

SEQ ID NO: 469710 - RNA, 19 nt, Artificial Sequence
  Description of Artificial Sequence: Synthetic oligonucleotide
  Antisense Strand to SEQ ID NO: 469709
uucacagagaccaugcugc

SEQ ID NO: 469711 - RNA, 19 nt, Artificial Sequence
  Description of Artificial Sequence: Synthetic oligonucleotide
  Sense strand starting at position 1288 of SEQ ID NO: 317168
cauggucucugugaagaga

SEQ ID NO: 469712 - RNA, 19 nt, Artificial Sequence
  Description of Artificial Sequence: Synthetic oligonucleotide
  Antisense Strand to SEQ ID NO: 469711
ucucuucacagagaccaug

SEQ ID NO: 469713 - RNA, 19 nt, Artificial Sequence
  Description of Artificial Sequence: Synthetic oligonucleotide
  Sense strand starting at position 1303 of SEQ ID NO: 317168
gagagaaggugauugcagu

SEQ ID NO: 469714 - RNA, 19 nt, Artificial Sequence
  Description of Artificial Sequence: Synthetic oligonucleotide
  Antisense Strand to SEQ ID NO: 469713
acugcaaucaccuucucuc

SEQ ID NO: 469715 - RNA, 19 nt, Artificial Sequence
  Description of Artificial Sequence: Synthetic oligonucleotide
  Sense strand starting at position 1304 of SEQ ID NO: 317168
agagaaggugauugcagua

SEQ ID NO: 469716 - RNA, 19 nt, Artificial Sequence
  Description of Artificial Sequence: Synthetic oligonucleotide
  Antisense Strand to SEQ ID NO: 469715
uacugcaaucaccuucucu

SEQ ID NO: 469717 - RNA, 19 nt, Artificial Sequence
  Description of Artificial Sequence: Synthetic oligonucleotide
  Sense strand starting at position 1309 of SEQ ID NO: 317168
aggugauugcaguaaauca

SEQ ID NO: 469718 - RNA, 19 nt, Artificial Sequence
  Description of Artificial Sequence: Synthetic oligonucleotide
  Antisense Strand to SEQ ID NO: 469717
ugauuuacugcaaucaccu

SEQ ID NO: 469719 - RNA, 19 nt, Artificial Sequence
  Description of Artificial Sequence: Synthetic oligonucleotide
  Sense strand starting at position 2017 of SEQ ID NO: 317168
cgggauuuggcgggugcua

SEQ ID NO: 469720 - RNA, 19 nt, Artificial Sequence
  Description of Artificial Sequence: Synthetic oligonucleotide
  Antisense Strand to SEQ ID NO: 469719
uagcacccgccaaaucccg

SEQ ID NO: 469721 - RNA, 19 nt, Artificial Sequence
  Description of Artificial Sequence: Synthetic oligonucleotide
  Sense strand starting at position 2145 of SEQ ID NO: 317168
gugcccuuggcuuuguuua

SEQ ID NO: 469722 - RNA, 19 nt, Artificial Sequence
  Description of Artificial Sequence: Synthetic oligonucleotide
  Antisense Strand to SEQ ID NO: 469721
uaaacaaagccaagggcac

SEQ ID NO: 469723 - RNA, 19 nt, Artificial Sequence
  Description of Artificial Sequence: Synthetic oligonucleotide
  Sense strand starting at position 2147 of SEQ ID NO: 317168
gcccuuggcuuuguuuaua

SEQ ID NO: 469724 - RNA, 19 nt, Artificial Sequence
  Description of Artificial Sequence: Synthetic oligonucleotide
  Antisense Strand to SEQ ID NO: 469723
uauaaacaaagccaagggc

SEQ ID NO: 469725 - RNA, 19 nt, Artificial Sequence
  Description of Artificial Sequence: Synthetic oligonucleotide
  Sense strand starting at position 2225 of SEQ ID NO: 317168
uccugaagucccuguuaaa

SEQ ID NO: 469726 - RNA, 19 nt, Artificial Sequence
  Description of Artificial Sequence: Synthetic oligonucleotide
  Antisense Strand to SEQ ID NO: 469725
uuuaacagggacuucagga

SEQ ID NO: 469727 - RNA, 19 nt, Artificial Sequence
  Description of Artificial Sequence: Synthetic oligonucleotide
  Sense strand starting at position 2472 of SEQ ID NO: 317168
caccguguugaucaaguua

SEQ ID NO: 469728 - RNA, 19 nt, Artificial Sequence
  Description of Artificial Sequence: Synthetic oligonucleotide
  Antisense Strand to SEQ ID NO: 469727
uaacuugaucaacacggug

SEQ ID NO: 469729 - RNA, 19 nt, Artificial Sequence
  Description of Artificial Sequence: Synthetic oligonucleotide
  Sense strand starting at position 2480 of SEQ ID NO: 317168
ugaucaaguuagucucgaa

SEQ ID NO: 469730 - RNA, 19 nt, Artificial Sequence
  Description of Artificial Sequence: Synthetic oligonucleotide
  Antisense Strand to SEQ ID NO: 469729
uucgagacuaacuugauca

SEQ ID NO: 469731 - RNA, 19 nt, Artificial Sequence
  Description of Artificial Sequence: Synthetic oligonucleotide
  Sense strand starting at position 2597 of SEQ ID NO: 317168
gagacaggguucccauuau

SEQ ID NO: 469732 - RNA, 19 nt, Artificial Sequence
  Description of Artificial Sequence: Synthetic oligonucleotide
  Antisense Strand to SEQ ID NO: 469731
auaaugggaacccugucuc

SEQ ID NO: 469733 - RNA, 19 nt, Artificial Sequence
  Description of Artificial Sequence: Synthetic oligonucleotide
  Sense strand starting at position 2874 of SEQ ID NO: 317168
ugccuuuccuccuuaggga

SEQ ID NO: 469734 - RNA, 19 nt, Artificial Sequence
  Description of Artificial Sequence: Synthetic oligonucleotide
  Antisense Strand to SEQ ID NO: 469733
ucccuaaggaggaaaggca

SEQ ID NO: 469735 - RNA, 19 nt, Artificial Sequence
  Description of Artificial Sequence: Synthetic oligonucleotide
  Sense strand starting at position 2875 of SEQ ID NO: 317168
gccuuuccuccuuagggau

SEQ ID NO: 469736 - RNA, 19 nt, Artificial Sequence
  Description of Artificial Sequence: Synthetic oligonucleotide
  Antisense Strand to SEQ ID NO: 469735
aucccuaaggaggaaaggc

SEQ ID NO: 469737 - RNA, 19 nt, Artificial Sequence
  Description of Artificial Sequence: Synthetic oligonucleotide
  Sense strand starting at position 2990 of SEQ ID NO: 317168
cugaaaggugcacauauca

SEQ ID NO: 469738 - RNA, 19 nt, Artificial Sequence
  Description of Artificial Sequence: Synthetic oligonucleotide
  Antisense Strand to SEQ ID NO: 469737
ugauaugugcaccuuucag

SEQ ID NO: 469739 - RNA, 19 nt, Artificial Sequence
  Description of Artificial Sequence: Synthetic oligonucleotide
  Sense strand starting at position 3054 of SEQ ID NO: 317168
aaccaagaggcugguaaau

SEQ ID NO: 469740 - RNA, 19 nt, Artificial Sequence
  Description of Artificial Sequence: Synthetic oligonucleotide
  Antisense Strand to SEQ ID NO: 469739
auuuaccagccucuugguu

SEQ ID NO: 469741 - RNA, 19 nt, Artificial Sequence
  Description of Artificial Sequence: Synthetic oligonucleotide
  Sense strand starting at position 3065 of SEQ ID NO: 317168
ugguaaauguguccagcua

SEQ ID NO: 469742 - RNA, 19 nt, Artificial Sequence
  Description of Artificial Sequence: Synthetic oligonucleotide
  Antisense Strand to SEQ ID NO: 469741
uagcuggacacauuuacca

SEQ ID NO: 469743 - RNA, 19 nt, Artificial Sequence
  Description of Artificial Sequence: Synthetic oligonucleotide
  Sense strand starting at position 3066 of SEQ ID NO: 317168
gguaaauguguccagcuaa

SEQ ID NO: 469744 - RNA, 19 nt, Artificial Sequence
  Description of Artificial Sequence: Synthetic oligonucleotide
  Antisense Strand to SEQ ID NO: 469743
uuagcuggacacauuuacc

SEQ ID NO: 469745 - RNA, 19 nt, Artificial Sequence
  Description of Artificial Sequence: Synthetic oligonucleotide
  Sense strand starting at position 3091 of SEQ ID NO: 317168
gggaacuauuacuguagaa

SEQ ID NO: 469746 - RNA, 19 nt, Artificial Sequence
  Description of Artificial Sequence: Synthetic oligonucleotide
  Antisense Strand to SEQ ID NO: 469745
uucuacaguaauaguuccc

SEQ ID NO: 469747 - RNA, 19 nt, Artificial Sequence
  Description of Artificial Sequence: Synthetic oligonucleotide
  Sense strand starting at position 3200 of SEQ ID NO: 317168
cccggaauacguuaaacau

SEQ ID NO: 469748 - RNA, 19 nt, Artificial Sequence
  Description of Artificial Sequence: Synthetic oligonucleotide
  Antisense Strand to SEQ ID NO: 469747
auguuuaacguauuccggg

SEQ ID NO: 469749 - RNA, 19 nt, Artificial Sequence
  Description of Artificial Sequence: Synthetic oligonucleotide
  Sense strand starting at position 3210 of SEQ ID NO: 317168
guuaaacauuccguaacau

SEQ ID NO: 469750 - RNA, 19 nt, Artificial Sequence
  Description of Artificial Sequence: Synthetic oligonucleotide
  Antisense Strand to SEQ ID NO: 469749
auguuacggaauguuuaac

SEQ ID NO: 469751 - RNA, 19 nt, Artificial Sequence
  Description of Artificial Sequence: Synthetic oligonucleotide
  Sense strand starting at position 3715 of SEQ ID NO: 317168
guuauaaagauucguguac

SEQ ID NO: 469752 - RNA, 19 nt, Artificial Sequence
  Description of Artificial Sequence: Synthetic oligonucleotide
  Antisense Strand to SEQ ID NO: 469751
guacacgaaucuuuauaac

SEQ ID NO: 469753 - RNA, 19 nt, Artificial Sequence
  Description of Artificial Sequence: Synthetic oligonucleotide
  Sense strand starting at position 3716 of SEQ ID NO: 317168
uuauaaagauucguguaca

SEQ ID NO: 469754 - RNA, 19 nt, Artificial Sequence
  Description of Artificial Sequence: Synthetic oligonucleotide
  Antisense Strand to SEQ ID NO: 469753
uguacacgaaucuuuauaa

SEQ ID NO: 469755 - RNA, 19 nt, Artificial Sequence
  Description of Artificial Sequence: Synthetic oligonucleotide
  Sense strand starting at position 3719 of SEQ ID NO: 317168
uaaagauucguguacauac

SEQ ID NO: 469756 - RNA, 19 nt, Artificial Sequence
  Description of Artificial Sequence: Synthetic oligonucleotide
  Antisense Strand to SEQ ID NO: 469755
guauguacacgaaucuuua

SEQ ID NO: 469757 - RNA, 19 nt, Artificial Sequence
  Description of Artificial Sequence: Synthetic oligonucleotide
  Sense strand starting at position 3904 of SEQ ID NO: 317168
uauggaaggugucuuagag

SEQ ID NO: 469758 - RNA, 19 nt, Artificial Sequence
  Description of Artificial Sequence: Synthetic oligonucleotide
  Antisense Strand to SEQ ID NO: 469757
cucuaagacaccuuccaua

SEQ ID NO: 469759 - RNA, 19 nt, Artificial Sequence
  Description of Artificial Sequence: Synthetic oligonucleotide
  Sense strand starting at position 3910 of SEQ ID NO: 317168
aggugucuuagaggucaug

SEQ ID NO: 469760 - RNA, 19 nt, Artificial Sequence
  Description of Artificial Sequence: Synthetic oligonucleotide
  Antisense Strand to SEQ ID NO: 469759
caugaccucuaagacaccu

SEQ ID NO: 469761 - RNA, 19 nt, Artificial Sequence
  Description of Artificial Sequence: Synthetic oligonucleotide
  Sense strand starting at position 3913 of SEQ ID NO: 317168
ugucuuagaggucaugaua

SEQ ID NO: 469762 - RNA, 19 nt, Artificial Sequence
  Description of Artificial Sequence: Synthetic oligonucleotide
  Antisense Strand to SEQ ID NO: 469761
uaucaugaccucuaagaca

SEQ ID NO: 469763 - RNA, 19 nt, Artificial Sequence
  Description of Artificial Sequence: Synthetic oligonucleotide
  Sense strand starting at position 3969 of SEQ ID NO: 317168
ggcaauagcuagcuauaaa

SEQ ID NO: 469764 - RNA, 19 nt, Artificial Sequence
  Description of Artificial Sequence: Synthetic oligonucleotide
  Antisense Strand to SEQ ID NO: 469763
uuuauagcuagcuauugcc

SEQ ID NO: 469765 - RNA, 19 nt, Artificial Sequence
  Description of Artificial Sequence: Synthetic oligonucleotide
  Sense strand starting at position 93 of SEQ ID NO: 317169
gucauugauaaguaucagu

SEQ ID NO: 469766 - RNA, 19 nt, Artificial Sequence
  Description of Artificial Sequence: Synthetic oligonucleotide
  Antisense Strand to SEQ ID NO: 469765
acugauacuuaucaaugac

SEQ ID NO: 469767 - RNA, 19 nt, Artificial Sequence
  Description of Artificial Sequence: Synthetic oligonucleotide
  Sense strand starting at position 98 of SEQ ID NO: 317169
ugauaaguaucagugggua

SEQ ID NO: 469768 - RNA, 19 nt, Artificial Sequence
  Description of Artificial Sequence: Synthetic oligonucleotide
  Antisense Strand to SEQ ID NO: 469767
uacccacugauacuuauca

SEQ ID NO: 469769 - RNA, 19 nt, Artificial Sequence
  Description of Artificial Sequence: Synthetic oligonucleotide
  Sense strand starting at position 100 of SEQ ID NO: 317169
auaaguaucaguggguaca

SEQ ID NO: 469770 - RNA, 19 nt, Artificial Sequence
  Description of Artificial Sequence: Synthetic oligonucleotide
  Antisense Strand to SEQ ID NO: 469769
uguacccacugauacuuau

SEQ ID NO: 469771 - RNA, 19 nt, Artificial Sequence
  Description of Artificial Sequence: Synthetic oligonucleotide
  Sense strand starting at position 101 of SEQ ID NO: 317169
uaaguaucaguggguacaa

SEQ ID NO: 469772 - RNA, 19 nt, Artificial Sequence
  Description of Artificial Sequence: Synthetic oligonucleotide
  Antisense Strand to SEQ ID NO: 469771
uuguacccacugauacuua

SEQ ID NO: 469773 - RNA, 19 nt, Artificial Sequence
  Description of Artificial Sequence: Synthetic oligonucleotide
  Sense strand starting at position 152 of SEQ ID NO: 317169
acgauugauucuccuauua

SEQ ID NO: 469774 - RNA, 19 nt, Artificial Sequence
  Description of Artificial Sequence: Synthetic oligonucleotide
  Antisense Strand to SEQ ID NO: 469773
uaauaggagaaucaaucgu

SEQ ID NO: 469775 - RNA, 19 nt, Artificial Sequence
  Description of Artificial Sequence: Synthetic oligonucleotide
  Sense strand starting at position 240 of SEQ ID NO: 317169
agguaagaagucugggaau

SEQ ID NO: 469776 - RNA, 19 nt, Artificial Sequence
  Description of Artificial Sequence: Synthetic oligonucleotide
  Antisense Strand to SEQ ID NO: 469775
auucccagacuucuuaccu

SEQ ID NO: 469777 - RNA, 19 nt, Artificial Sequence
  Description of Artificial Sequence: Synthetic oligonucleotide
  Sense strand starting at position 242 of SEQ ID NO: 317169
guaagaagucugggaauga

SEQ ID NO: 469778 - RNA, 19 nt, Artificial Sequence
  Description of Artificial Sequence: Synthetic oligonucleotide
  Antisense Strand to SEQ ID NO: 469777
ucauucccagacuucuuac

SEQ ID NO: 469779 - RNA, 19 nt, Artificial Sequence
  Description of Artificial Sequence: Synthetic oligonucleotide
  Sense strand starting at position 347 of SEQ ID NO: 317169
gaguuuccagugugagaga

SEQ ID NO: 469780 - RNA, 19 nt, Artificial Sequence
  Description of Artificial Sequence: Synthetic oligonucleotide
  Antisense Strand to SEQ ID NO: 469779
ucucucacacuggaaacuc

SEQ ID NO: 469781 - RNA, 19 nt, Artificial Sequence
  Description of Artificial Sequence: Synthetic oligonucleotide
  Sense strand starting at position 376 of SEQ ID NO: 317169
guugaauuugcaugcuaug

SEQ ID NO: 469782 - RNA, 19 nt, Artificial Sequence
  Description of Artificial Sequence: Synthetic oligonucleotide
  Antisense Strand to SEQ ID NO: 469781
cauagcaugcaaauucaac

SEQ ID NO: 469783 - RNA, 19 nt, Artificial Sequence
  Description of Artificial Sequence: Synthetic oligonucleotide
  Sense strand starting at position 495 of SEQ ID NO: 317169
uaucauugggcucaagguu

SEQ ID NO: 469784 - RNA, 19 nt, Artificial Sequence
  Description of Artificial Sequence: Synthetic oligonucleotide
  Antisense Strand to SEQ ID NO: 469783
aaccuugagcccaaugaua

SEQ ID NO: 469785 - RNA, 19 nt, Artificial Sequence
  Description of Artificial Sequence: Synthetic oligonucleotide
  Sense strand starting at position 563 of SEQ ID NO: 317169
gucccugguuaaucauaaa

SEQ ID NO: 469786 - RNA, 19 nt, Artificial Sequence
  Description of Artificial Sequence: Synthetic oligonucleotide
  Antisense Strand to SEQ ID NO: 469785
uuuaugauuaaccagggac

SEQ ID NO: 469787 - RNA, 19 nt, Artificial Sequence
  Description of Artificial Sequence: Synthetic oligonucleotide
  Sense strand starting at position 660 of SEQ ID NO: 317169
accucucugguuuaguauu

SEQ ID NO: 469788 - RNA, 19 nt, Artificial Sequence
  Description of Artificial Sequence: Synthetic oligonucleotide
  Antisense Strand to SEQ ID NO: 469787
aauacuaaaccagagaggu

SEQ ID NO: 469789 - RNA, 19 nt, Artificial Sequence
  Description of Artificial Sequence: Synthetic oligonucleotide
  Sense strand starting at position 821 of SEQ ID NO: 317169
gagacaccguuucuagaaa

SEQ ID NO: 469790 - RNA, 19 nt, Artificial Sequence
  Description of Artificial Sequence: Synthetic oligonucleotide
  Antisense Strand to SEQ ID NO: 469789
uuucuagaaacggugucuc

SEQ ID NO: 469791 - RNA, 19 nt, Artificial Sequence
  Description of Artificial Sequence: Synthetic oligonucleotide
  Sense strand starting at position 1039 of SEQ ID NO: 317169
gaguaacuggauuaugguu

SEQ ID NO: 469792 - RNA, 19 nt, Artificial Sequence
  Description of Artificial Sequence: Synthetic oligonucleotide
  Antisense Strand to SEQ ID NO: 469791
aaccauaauccaguuacuc

SEQ ID NO: 469793 - RNA, 19 nt, Artificial Sequence
  Description of Artificial Sequence: Synthetic oligonucleotide
  Sense strand starting at position 1044 of SEQ ID NO: 317169
acuggauuaugguugaaug

SEQ ID NO: 469794 - RNA, 19 nt, Artificial Sequence
  Description of Artificial Sequence: Synthetic oligonucleotide
  Antisense Strand to SEQ ID NO: 469793
cauucaaccauaauccagu

SEQ ID NO: 469795 - RNA, 19 nt, Artificial Sequence
  Description of Artificial Sequence: Synthetic oligonucleotide
  Sense strand starting at position 1065 of SEQ ID NO: 317169
uguggugaugaguaucuca

SEQ ID NO: 469796 - RNA, 19 nt, Artificial Sequence
  Description of Artificial Sequence: Synthetic oligonucleotide
  Antisense Strand to SEQ ID NO: 469795
ugagauacucaucaccaca

SEQ ID NO: 469797 - RNA, 19 nt, Artificial Sequence
  Description of Artificial Sequence: Synthetic oligonucleotide
  Sense strand starting at position 1213 of SEQ ID NO: 317169
guccaccacccguauuaga

SEQ ID NO: 469798 - RNA, 19 nt, Artificial Sequence
  Description of Artificial Sequence: Synthetic oligonucleotide
  Antisense Strand to SEQ ID NO: 469797
ucuaauacgggugguggac

SEQ ID NO: 469799 - RNA, 19 nt, Artificial Sequence
  Description of Artificial Sequence: Synthetic oligonucleotide
  Sense strand starting at position 1221 of SEQ ID NO: 317169
cccguauuagaauguaaga

SEQ ID NO: 469800 - RNA, 19 nt, Artificial Sequence
  Description of Artificial Sequence: Synthetic oligonucleotide
  Antisense Strand to SEQ ID NO: 469799
ucuuacauucuaauacggg

SEQ ID NO: 469801 - RNA, 19 nt, Artificial Sequence
  Description of Artificial Sequence: Synthetic oligonucleotide
  Sense strand starting at position 1223 of SEQ ID NO: 317169
cguauuagaauguaagagu

SEQ ID NO: 469802 - RNA, 19 nt, Artificial Sequence
  Description of Artificial Sequence: Synthetic oligonucleotide
  Antisense Strand to SEQ ID NO: 469801
acucuuacauucuaauacg

SEQ ID NO: 469803 - RNA, 19 nt, Artificial Sequence
  Description of Artificial Sequence: Synthetic oligonucleotide
  Sense strand starting at position 1392 of SEQ ID NO: 317169
ucaguaauuccaggaguuc

SEQ ID NO: 469804 - RNA, 19 nt, Artificial Sequence
  Description of Artificial Sequence: Synthetic oligonucleotide
  Antisense Strand to SEQ ID NO: 469803
gaacuccuggaauuacuga

SEQ ID NO: 469805 - RNA, 19 nt, Artificial Sequence
  Description of Artificial Sequence: Synthetic oligonucleotide
  Sense strand starting at position 1393 of SEQ ID NO: 317169
caguaauuccaggaguucu

SEQ ID NO: 469806 - RNA, 19 nt, Artificial Sequence
  Description of Artificial Sequence: Synthetic oligonucleotide
  Antisense Strand to SEQ ID NO: 469805
agaacuccuggaauuacug

SEQ ID NO: 469807 - RNA, 19 nt, Artificial Sequence
  Description of Artificial Sequence: Synthetic oligonucleotide
  Sense strand starting at position 2701 of SEQ ID NO: 317169
uaaagaauuccggguggga

SEQ ID NO: 469808 - RNA, 19 nt, Artificial Sequence
  Description of Artificial Sequence: Synthetic oligonucleotide
  Antisense Strand to SEQ ID NO: 469807
ucccacccggaauucuuua

SEQ ID NO: 469809 - RNA, 19 nt, Artificial Sequence
  Description of Artificial Sequence: Synthetic oligonucleotide
  Sense strand starting at position 2703 of SEQ ID NO: 317169
aagaauuccgggugggaga

SEQ ID NO: 469810 - RNA, 19 nt, Artificial Sequence
  Description of Artificial Sequence: Synthetic oligonucleotide
  Antisense Strand to SEQ ID NO: 469809
ucucccacccggaauucuu

SEQ ID NO: 469811 - RNA, 19 nt, Artificial Sequence
  Description of Artificial Sequence: Synthetic oligonucleotide
  Sense strand starting at position 2825 of SEQ ID NO: 317169
cacagaagcguguaagacu

SEQ ID NO: 469812 - RNA, 19 nt, Artificial Sequence
  Description of Artificial Sequence: Synthetic oligonucleotide
  Antisense Strand to SEQ ID NO: 469811
agucuuacacgcuucugug

SEQ ID NO: 469813 - RNA, 19 nt, Artificial Sequence
  Description of Artificial Sequence: Synthetic oligonucleotide
  Sense strand starting at position 2836 of SEQ ID NO: 317169
guaagacuucuguauguaa

SEQ ID NO: 469814 - RNA, 19 nt, Artificial Sequence
  Description of Artificial Sequence: Synthetic oligonucleotide
  Antisense Strand to SEQ ID NO: 469813
uuacauacagaagucuuac

SEQ ID NO: 469815 - RNA, 19 nt, Artificial Sequence
  Description of Artificial Sequence: Synthetic oligonucleotide
  Sense strand starting at position 2838 of SEQ ID NO: 317169
aagacuucuguauguaaga

SEQ ID NO: 469816 - RNA, 19 nt, Artificial Sequence
  Description of Artificial Sequence: Synthetic oligonucleotide
  Antisense Strand to SEQ ID NO: 469815
ucuuacauacagaagucuu

SEQ ID NO: 469817 - RNA, 19 nt, Artificial Sequence
  Description of Artificial Sequence: Synthetic oligonucleotide
  Sense strand starting at position 2839 of SEQ ID NO: 317169
agacuucuguauguaagaa

SEQ ID NO: 469818 - RNA, 19 nt, Artificial Sequence
  Description of Artificial Sequence: Synthetic oligonucleotide
  Antisense Strand to SEQ ID NO: 469817
uucuuacauacagaagucu

SEQ ID NO: 469819 - RNA, 19 nt, Artificial Sequence
  Description of Artificial Sequence: Synthetic oligonucleotide
  Sense strand starting at position 2847 of SEQ ID NO: 317169
guauguaagaagcaugcaa

SEQ ID NO: 469820 - RNA, 19 nt, Artificial Sequence
  Description of Artificial Sequence: Synthetic oligonucleotide
  Antisense Strand to SEQ ID NO: 469819
uugcaugcuucuuacauac

SEQ ID NO: 469821 - RNA, 19 nt, Artificial Sequence
  Description of Artificial Sequence: Synthetic oligonucleotide
  Sense strand starting at position 2876 of SEQ ID NO: 317169
gccugcacuggagaaguua

SEQ ID NO: 469822 - RNA, 19 nt, Artificial Sequence
  Description of Artificial Sequence: Synthetic oligonucleotide
  Antisense Strand to SEQ ID NO: 469821
uaacuucuccagugcaggc

SEQ ID NO: 469823 - RNA, 19 nt, Artificial Sequence
  Description of Artificial Sequence: Synthetic oligonucleotide
  Sense strand starting at position 2884 of SEQ ID NO: 317169
uggagaaguuaggcugaaa

SEQ ID NO: 469824 - RNA, 19 nt, Artificial Sequence
  Description of Artificial Sequence: Synthetic oligonucleotide
  Antisense Strand to SEQ ID NO: 469823
uuucagccuaacuucucca

SEQ ID NO: 469825 - RNA, 19 nt, Artificial Sequence
  Description of Artificial Sequence: Synthetic oligonucleotide
  Sense strand starting at position 2968 of SEQ ID NO: 317169
cgcuuugucucauuuaaca

SEQ ID NO: 469826 - RNA, 19 nt, Artificial Sequence
  Description of Artificial Sequence: Synthetic oligonucleotide
  Antisense Strand to SEQ ID NO: 469825
uguuaaaugagacaaagcg

SEQ ID NO: 469827 - RNA, 19 nt, Artificial Sequence
  Description of Artificial Sequence: Synthetic oligonucleotide
  Sense strand starting at position 3024 of SEQ ID NO: 317169
gcgaacaugggauacuuau

SEQ ID NO: 469828 - RNA, 19 nt, Artificial Sequence
  Description of Artificial Sequence: Synthetic oligonucleotide
  Antisense Strand to SEQ ID NO: 469827
auaaguaucccauguucgc

SEQ ID NO: 469829 - RNA, 19 nt, Artificial Sequence
  Description of Artificial Sequence: Synthetic oligonucleotide
  Sense strand starting at position 3088 of SEQ ID NO: 317169
gccuuuaggagugaugaua

SEQ ID NO: 469830 - RNA, 19 nt, Artificial Sequence
  Description of Artificial Sequence: Synthetic oligonucleotide
  Antisense Strand to SEQ ID NO: 469829
uaucaucacuccuaaaggc

SEQ ID NO: 469831 - RNA, 19 nt, Artificial Sequence
  Description of Artificial Sequence: Synthetic oligonucleotide
  Sense strand starting at position 3210 of SEQ ID NO: 317169
gugaccgauggguauagua

SEQ ID NO: 469832 - RNA, 19 nt, Artificial Sequence
  Description of Artificial Sequence: Synthetic oligonucleotide
  Antisense Strand to SEQ ID NO: 469831
uacuauacccaucggucac

SEQ ID NO: 469833 - RNA, 19 nt, Artificial Sequence
  Description of Artificial Sequence: Synthetic oligonucleotide
  Sense strand starting at position 3212 of SEQ ID NO: 317169
gaccgauggguauaguaau

SEQ ID NO: 469834 - RNA, 19 nt, Artificial Sequence
  Description of Artificial Sequence: Synthetic oligonucleotide
  Antisense Strand to SEQ ID NO: 469833
auuacuauacccaucgguc

SEQ ID NO: 469835 - RNA, 19 nt, Artificial Sequence
  Description of Artificial Sequence: Synthetic oligonucleotide
  Sense strand starting at position 3219 of SEQ ID NO: 317169
ggguauaguaaugacaguu

SEQ ID NO: 469836 - RNA, 19 nt, Artificial Sequence
  Description of Artificial Sequence: Synthetic oligonucleotide
  Antisense Strand to SEQ ID NO: 469835
aacugucauuacuauaccc

SEQ ID NO: 469837 - RNA, 19 nt, Artificial Sequence
  Description of Artificial Sequence: Synthetic oligonucleotide
  Sense strand starting at position 3250 of SEQ ID NO: 317169
gaaaguuaacgugauucca

SEQ ID NO: 469838 - RNA, 19 nt, Artificial Sequence
  Description of Artificial Sequence: Synthetic oligonucleotide
  Antisense Strand to SEQ ID NO: 469837
uggaaucacguuaacuuuc

SEQ ID NO: 469839 - RNA, 19 nt, Artificial Sequence
  Description of Artificial Sequence: Synthetic oligonucleotide
  Sense strand starting at position 3343 of SEQ ID NO: 317169
gaugacagcuccuuugauu

SEQ ID NO: 469840 - RNA, 19 nt, Artificial Sequence
  Description of Artificial Sequence: Synthetic oligonucleotide
  Antisense Strand to SEQ ID NO: 469839
aaucaaaggagcugucauc

SEQ ID NO: 469841 - RNA, 19 nt, Artificial Sequence
  Description of Artificial Sequence: Synthetic oligonucleotide
  Sense strand starting at position 3815 of SEQ ID NO: 317169
guugauaaaccuuacguga

SEQ ID NO: 469842 - RNA, 19 nt, Artificial Sequence
  Description of Artificial Sequence: Synthetic oligonucleotide
  Antisense Strand to SEQ ID NO: 469841
ucacguaagguuuaucaac

SEQ ID NO: 469843 - RNA, 19 nt, Artificial Sequence
  Description of Artificial Sequence: Synthetic oligonucleotide
  Sense strand starting at position 3845 of SEQ ID NO: 317169
uuugguauuguugaccauu

SEQ ID NO: 469844 - RNA, 19 nt, Artificial Sequence
  Description of Artificial Sequence: Synthetic oligonucleotide
  Antisense Strand to SEQ ID NO: 469843
aauggucaacaauaccaaa

SEQ ID NO: 469845 - RNA, 19 nt, Artificial Sequence
  Description of Artificial Sequence: Synthetic oligonucleotide
  Sense strand starting at position 97 of SEQ ID NO: 317170
uaucauugggcucaagguu

SEQ ID NO: 469846 - RNA, 19 nt, Artificial Sequence
  Description of Artificial Sequence: Synthetic oligonucleotide
  Antisense Strand to SEQ ID NO: 469845
aaccuugagcccaaugaua

SEQ ID NO: 469847 - RNA, 19 nt, Artificial Sequence
  Description of Artificial Sequence: Synthetic oligonucleotide
  Sense strand starting at position 165 of SEQ ID NO: 317170
gucccugguuaaucauaaa

SEQ ID NO: 469848 - RNA, 19 nt, Artificial Sequence
  Description of Artificial Sequence: Synthetic oligonucleotide
  Antisense Strand to SEQ ID NO: 469847
uuuaugauuaaccagggac

SEQ ID NO: 469849 - RNA, 19 nt, Artificial Sequence
  Description of Artificial Sequence: Synthetic oligonucleotide
  Sense strand starting at position 206 of SEQ ID NO: 317170
ccaguucucgcugagacag

SEQ ID NO: 469850 - RNA, 19 nt, Artificial Sequence
  Description of Artificial Sequence: Synthetic oligonucleotide
  Antisense Strand to SEQ ID NO: 469849
cugucucagcgagaacugg

SEQ ID NO: 469851 - RNA, 19 nt, Artificial Sequence
  Description of Artificial Sequence: Synthetic oligonucleotide
  Sense strand starting at position 262 of SEQ ID NO: 317170
accucucugguuuaguauu

SEQ ID NO: 469852 - RNA, 19 nt, Artificial Sequence
  Description of Artificial Sequence: Synthetic oligonucleotide
  Antisense Strand to SEQ ID NO: 469851
aauacuaaaccagagaggu

SEQ ID NO: 469853 - RNA, 19 nt, Artificial Sequence
  Description of Artificial Sequence: Synthetic oligonucleotide
  Sense strand starting at position 423 of SEQ ID NO: 317170
gagacaccguuucuagaaa

SEQ ID NO: 469854 - RNA, 19 nt, Artificial Sequence
  Description of Artificial Sequence: Synthetic oligonucleotide
  Antisense Strand to SEQ ID NO: 469853
uuucuagaaacggugucuc

SEQ ID NO: 469855 - RNA, 19 nt, Artificial Sequence
  Description of Artificial Sequence: Synthetic oligonucleotide
  Sense strand starting at position 641 of SEQ ID NO: 317170
gaguaacuggauuaugguu

SEQ ID NO: 469856 - RNA, 19 nt, Artificial Sequence
  Description of Artificial Sequence: Synthetic oligonucleotide
  Antisense Strand to SEQ ID NO: 469855
aaccauaauccaguuacuc

SEQ ID NO: 469857 - RNA, 19 nt, Artificial Sequence
  Description of Artificial Sequence: Synthetic oligonucleotide
  Sense strand starting at position 646 of SEQ ID NO: 317170
acuggauuaugguugaaug

SEQ ID NO: 469858 - RNA, 19 nt, Artificial Sequence
  Description of Artificial Sequence: Synthetic oligonucleotide
  Antisense Strand to SEQ ID NO: 469857
cauucaaccauaauccagu

SEQ ID NO: 469859 - RNA, 19 nt, Artificial Sequence
  Description of Artificial Sequence: Synthetic oligonucleotide
  Sense strand starting at position 667 of SEQ ID NO: 317170
uguggugaugaguaucuca

SEQ ID NO: 469860 - RNA, 19 nt, Artificial Sequence
  Description of Artificial Sequence: Synthetic oligonucleotide
  Antisense Strand to SEQ ID NO: 469859
ugagauacucaucaccaca

SEQ ID NO: 469861 - RNA, 19 nt, Artificial Sequence
  Description of Artificial Sequence: Synthetic oligonucleotide
  Sense strand starting at position 815 of SEQ ID NO: 317170
guccaccacccguauuaga

SEQ ID NO: 469862 - RNA, 19 nt, Artificial Sequence
  Description of Artificial Sequence: Synthetic oligonucleotide
  Antisense Strand to SEQ ID NO: 469861
ucuaauacgggugguggac

SEQ ID NO: 469863 - RNA, 19 nt, Artificial Sequence
  Description of Artificial Sequence: Synthetic oligonucleotide
  Sense strand starting at position 823 of SEQ ID NO: 317170
cccguauuagaauguaaga

SEQ ID NO: 469864 - RNA, 19 nt, Artificial Sequence
  Description of Artificial Sequence: Synthetic oligonucleotide
  Antisense Strand to SEQ ID NO: 469863
ucuuacauucuaauacggg

SEQ ID NO: 469865 - RNA, 19 nt, Artificial Sequence
  Description of Artificial Sequence: Synthetic oligonucleotide
  Sense strand starting at position 825 of SEQ ID NO: 317170
cguauuagaauguaagagu

SEQ ID NO: 469866 - RNA, 19 nt, Artificial Sequence
  Description of Artificial Sequence: Synthetic oligonucleotide
  Antisense Strand to SEQ ID NO: 469865
acucuuacauucuaauacg

SEQ ID NO: 469867 - RNA, 19 nt, Artificial Sequence
  Description of Artificial Sequence: Synthetic oligonucleotide
  Sense strand starting at position 994 of SEQ ID NO: 317170
ucaguaauuccaggaguuc

SEQ ID NO: 469868 - RNA, 19 nt, Artificial Sequence
  Description of Artificial Sequence: Synthetic oligonucleotide
  Antisense Strand to SEQ ID NO: 469867
gaacuccuggaauuacuga

SEQ ID NO: 469869 - RNA, 19 nt, Artificial Sequence
  Description of Artificial Sequence: Synthetic oligonucleotide
  Sense strand starting at position 995 of SEQ ID NO: 317170
caguaauuccaggaguucu

SEQ ID NO: 469870 - RNA, 19 nt, Artificial Sequence
  Description of Artificial Sequence: Synthetic oligonucleotide
  Antisense Strand to SEQ ID NO: 469869
agaacuccuggaauuacug

SEQ ID NO: 469871 - RNA, 19 nt, Artificial Sequence
  Description of Artificial Sequence: Synthetic oligonucleotide
  Sense strand starting at position 2303 of SEQ ID NO: 317170
uaaagaauuccggguggga

SEQ ID NO: 469872 - RNA, 19 nt, Artificial Sequence
  Description of Artificial Sequence: Synthetic oligonucleotide
  Antisense Strand to SEQ ID NO: 469871
ucccacccggaauucuuua

SEQ ID NO: 469873 - RNA, 19 nt, Artificial Sequence
  Description of Artificial Sequence: Synthetic oligonucleotide
  Sense strand starting at position 2305 of SEQ ID NO: 317170
aagaauuccgggugggaga

SEQ ID NO: 469874 - RNA, 19 nt, Artificial Sequence
  Description of Artificial Sequence: Synthetic oligonucleotide
  Antisense Strand to SEQ ID NO: 469873
ucucccacccggaauucuu

SEQ ID NO: 469875 - RNA, 19 nt, Artificial Sequence
  Description of Artificial Sequence: Synthetic oligonucleotide
  Sense strand starting at position 2353 of SEQ ID NO: 317170
gcgggagacucagugauac

SEQ ID NO: 469876 - RNA, 19 nt, Artificial Sequence
  Description of Artificial Sequence: Synthetic oligonucleotide
  Antisense Strand to SEQ ID NO: 469875
guaucacugagucucccgc

SEQ ID NO: 469877 - RNA, 19 nt, Artificial Sequence
  Description of Artificial Sequence: Synthetic oligonucleotide
  Sense strand starting at position 2427 of SEQ ID NO: 317170
cacagaagcguguaagacu

SEQ ID NO: 469878 - RNA, 19 nt, Artificial Sequence
  Description of Artificial Sequence: Synthetic oligonucleotide
  Antisense Strand to SEQ ID NO: 469877
agucuuacacgcuucugug

SEQ ID NO: 469879 - RNA, 19 nt, Artificial Sequence
  Description of Artificial Sequence: Synthetic oligonucleotide
  Sense strand starting at position 2438 of SEQ ID NO: 317170
guaagacuucuguauguaa

SEQ ID NO: 469880 - RNA, 19 nt, Artificial Sequence
  Description of Artificial Sequence: Synthetic oligonucleotide
  Antisense Strand to SEQ ID NO: 469879
uuacauacagaagucuuac

SEQ ID NO: 469881 - RNA, 19 nt, Artificial Sequence
  Description of Artificial Sequence: Synthetic oligonucleotide
  Sense strand starting at position 2440 of SEQ ID NO: 317170
aagacuucuguauguaaga

SEQ ID NO: 469882 - RNA, 19 nt, Artificial Sequence
  Description of Artificial Sequence: Synthetic oligonucleotide
  Antisense Strand to SEQ ID NO: 469881
ucuuacauacagaagucuu

SEQ ID NO: 469883 - RNA, 19 nt, Artificial Sequence
  Description of Artificial Sequence: Synthetic oligonucleotide
  Sense strand starting at position 2441 of SEQ ID NO: 317170
agacuucuguauguaagaa

SEQ ID NO: 469884 - RNA, 19 nt, Artificial Sequence
  Description of Artificial Sequence: Synthetic oligonucleotide
  Antisense Strand to SEQ ID NO: 469883
uucuuacauacagaagucu

SEQ ID NO: 469885 - RNA, 19 nt, Artificial Sequence
  Description of Artificial Sequence: Synthetic oligonucleotide
  Sense strand starting at position 2449 of SEQ ID NO: 317170
guauguaagaagcaugcaa

SEQ ID NO: 469886 - RNA, 19 nt, Artificial Sequence
  Description of Artificial Sequence: Synthetic oligonucleotide
  Antisense Strand to SEQ ID NO: 469885
uugcaugcuucuuacauac

SEQ ID NO: 469887 - RNA, 19 nt, Artificial Sequence
  Description of Artificial Sequence: Synthetic oligonucleotide
  Sense strand starting at position 2478 of SEQ ID NO: 317170
gccugcacuggagaaguua

SEQ ID NO: 469888 - RNA, 19 nt, Artificial Sequence
  Description of Artificial Sequence: Synthetic oligonucleotide
  Antisense Strand to SEQ ID NO: 469887
uaacuucuccagugcaggc

SEQ ID NO: 469889 - RNA, 19 nt, Artificial Sequence
  Description of Artificial Sequence: Synthetic oligonucleotide
  Sense strand starting at position 2486 of SEQ ID NO: 317170
uggagaaguuaggcugaaa

SEQ ID NO: 469890 - RNA, 19 nt, Artificial Sequence
  Description of Artificial Sequence: Synthetic oligonucleotide
  Antisense Strand to SEQ ID NO: 469889
uuucagccuaacuucucca

SEQ ID NO: 469891 - RNA, 19 nt, Artificial Sequence
  Description of Artificial Sequence: Synthetic oligonucleotide
  Sense strand starting at position 2570 of SEQ ID NO: 317170
cgcuuugucucauuuaaca

SEQ ID NO: 469892 - RNA, 19 nt, Artificial Sequence
  Description of Artificial Sequence: Synthetic oligonucleotide
  Antisense Strand to SEQ ID NO: 469891
uguuaaaugagacaaagcg

SEQ ID NO: 469893 - RNA, 19 nt, Artificial Sequence
  Description of Artificial Sequence: Synthetic oligonucleotide
  Sense strand starting at position 2626 of SEQ ID NO: 317170
gcgaacaugggauacuuau

SEQ ID NO: 469894 - RNA, 19 nt, Artificial Sequence
  Description of Artificial Sequence: Synthetic oligonucleotide
  Antisense Strand to SEQ ID NO: 469893
auaaguaucccauguucgc

SEQ ID NO: 469895 - RNA, 19 nt, Artificial Sequence
  Description of Artificial Sequence: Synthetic oligonucleotide
  Sense strand starting at position 2683 of SEQ ID NO: 317170
ucacucugccuuuaggagu

SEQ ID NO: 469896 - RNA, 19 nt, Artificial Sequence
  Description of Artificial Sequence: Synthetic oligonucleotide
  Antisense Strand to SEQ ID NO: 469895
acuccuaaaggcagaguga

SEQ ID NO: 469897 - RNA, 19 nt, Artificial Sequence
  Description of Artificial Sequence: Synthetic oligonucleotide
  Sense strand starting at position 2690 of SEQ ID NO: 317170
gccuuuaggagugaugaua

SEQ ID NO: 469898 - RNA, 19 nt, Artificial Sequence
  Description of Artificial Sequence: Synthetic oligonucleotide
  Antisense Strand to SEQ ID NO: 469897
uaucaucacuccuaaaggc

SEQ ID NO: 469899 - RNA, 19 nt, Artificial Sequence
  Description of Artificial Sequence: Synthetic oligonucleotide
  Sense strand starting at position 2812 of SEQ ID NO: 317170
gugaccgauggguauagua

SEQ ID NO: 469900 - RNA, 19 nt, Artificial Sequence
  Description of Artificial Sequence: Synthetic oligonucleotide
  Antisense Strand to SEQ ID NO: 469899
uacuauacccaucggucac

SEQ ID NO: 469901 - RNA, 19 nt, Artificial Sequence
  Description of Artificial Sequence: Synthetic oligonucleotide
  Sense strand starting at position 2814 of SEQ ID NO: 317170
gaccgauggguauaguaau

SEQ ID NO: 469902 - RNA, 19 nt, Artificial Sequence
  Description of Artificial Sequence: Synthetic oligonucleotide
  Antisense Strand to SEQ ID NO: 469901
auuacuauacccaucgguc

SEQ ID NO: 469903 - RNA, 19 nt, Artificial Sequence
  Description of Artificial Sequence: Synthetic oligonucleotide
  Sense strand starting at position 2821 of SEQ ID NO: 317170
ggguauaguaaugacaguu

SEQ ID NO: 469904 - RNA, 19 nt, Artificial Sequence
  Description of Artificial Sequence: Synthetic oligonucleotide
  Antisense Strand to SEQ ID NO: 469903
aacugucauuacuauaccc

SEQ ID NO: 469905 - RNA, 19 nt, Artificial Sequence
  Description of Artificial Sequence: Synthetic oligonucleotide
  Sense strand starting at position 2852 of SEQ ID NO: 317170
gaaaguuaacgugauucca

SEQ ID NO: 469906 - RNA, 19 nt, Artificial Sequence
  Description of Artificial Sequence: Synthetic oligonucleotide
  Antisense Strand to SEQ ID NO: 469905
uggaaucacguuaacuuuc

SEQ ID NO: 469907 - RNA, 19 nt, Artificial Sequence
  Description of Artificial Sequence: Synthetic oligonucleotide
  Sense strand starting at position 2945 of SEQ ID NO: 317170
gaugacagcuccuuugauu

SEQ ID NO: 469908 - RNA, 19 nt, Artificial Sequence
  Description of Artificial Sequence: Synthetic oligonucleotide
  Antisense Strand to SEQ ID NO: 469907
aaucaaaggagcugucauc

SEQ ID NO: 469909 - RNA, 19 nt, Artificial Sequence
  Description of Artificial Sequence: Synthetic oligonucleotide
  Sense strand starting at position 3417 of SEQ ID NO: 317170
guugauaaaccuuacguga

SEQ ID NO: 469910 - RNA, 19 nt, Artificial Sequence
  Description of Artificial Sequence: Synthetic oligonucleotide
  Antisense Strand to SEQ ID NO: 469909
ucacguaagguuuaucaac

SEQ ID NO: 469911 - RNA, 19 nt, Artificial Sequence
  Description of Artificial Sequence: Synthetic oligonucleotide
  Sense strand starting at position 3447 of SEQ ID NO: 317170
uuugguauuguugaccauu

SEQ ID NO: 469912 - RNA, 19 nt, Artificial Sequence
  Description of Artificial Sequence: Synthetic oligonucleotide
  Antisense Strand to SEQ ID NO: 469911
aauggucaacaauaccaaa

SEQ ID NO: 469913 - RNA, 19 nt, Artificial Sequence
  Description of Artificial Sequence: Synthetic oligonucleotide
  Sense strand starting at position 3772 of SEQ ID NO: 317170
cucuguggugaagacuuua

SEQ ID NO: 469914 - RNA, 19 nt, Artificial Sequence
  Description of Artificial Sequence: Synthetic oligonucleotide
  Antisense Strand to SEQ ID NO: 469913
uaaagucuucaccacagag

SEQ ID NO: 469915 - RNA, 19 nt, Artificial Sequence
  Description of Artificial Sequence: Synthetic oligonucleotide
  Sense strand starting at position 3880 of SEQ ID NO: 317170
augugaaauuacucuguaa

SEQ ID NO: 469916 - RNA, 19 nt, Artificial Sequence
  Description of Artificial Sequence: Synthetic oligonucleotide
  Antisense Strand to SEQ ID NO: 469915
uuacagaguaauuucacau

SEQ ID NO: 469917 - RNA, 19 nt, Artificial Sequence
  Description of Artificial Sequence: Synthetic oligonucleotide
  Sense strand starting at position 3882 of SEQ ID NO: 317170
gugaaauuacucuguaaau

SEQ ID NO: 469918 - RNA, 19 nt, Artificial Sequence
  Description of Artificial Sequence: Synthetic oligonucleotide
  Antisense Strand to SEQ ID NO: 469917
auuuacagaguaauuucac

SEQ ID NO: 469919 - RNA, 19 nt, Artificial Sequence
  Description of Artificial Sequence: Synthetic oligonucleotide
  Sense strand starting at position 3962 of SEQ ID NO: 317170
aucguugugggucauauuu

SEQ ID NO: 469920 - RNA, 19 nt, Artificial Sequence
  Description of Artificial Sequence: Synthetic oligonucleotide
  Antisense Strand to SEQ ID NO: 469919
aaauaugacccacaacgau

SEQ ID NO: 469921 - RNA, 19 nt, Artificial Sequence
  Description of Artificial Sequence: Synthetic oligonucleotide
  Sense strand starting at position 3979 of SEQ ID NO: 317170
uuugaauagcacuguacaa

SEQ ID NO: 469922 - RNA, 19 nt, Artificial Sequence
  Description of Artificial Sequence: Synthetic oligonucleotide
  Antisense Strand to SEQ ID NO: 469921
uuguacagugcuauucaaa

SEQ ID NO: 469923 - RNA, 19 nt, Artificial Sequence
  Description of Artificial Sequence: Synthetic oligonucleotide
  Sense strand starting at position 3981 of SEQ ID NO: 317170
ugaauagcacuguacaaua

SEQ ID NO: 469924 - RNA, 19 nt, Artificial Sequence
  Description of Artificial Sequence: Synthetic oligonucleotide
  Antisense Strand to SEQ ID NO: 469923
uauuguacagugcuauuca

SEQ ID NO: 469925 - RNA, 19 nt, Artificial Sequence
  Description of Artificial Sequence: Synthetic oligonucleotide
  Sense strand starting at position 480 of SEQ ID NO: 317171
auaguuauguuugucucca

SEQ ID NO: 469926 - RNA, 19 nt, Artificial Sequence
  Description of Artificial Sequence: Synthetic oligonucleotide
  Antisense Strand to SEQ ID NO: 469925
uggagacaaacauaacuau

SEQ ID NO: 469927 - RNA, 19 nt, Artificial Sequence
  Description of Artificial Sequence: Synthetic oligonucleotide
  Sense strand starting at position 482 of SEQ ID NO: 317171
aguuauguuugucuccaag

SEQ ID NO: 469928 - RNA, 19 nt, Artificial Sequence
  Description of Artificial Sequence: Synthetic oligonucleotide
  Antisense Strand to SEQ ID NO: 469927
cuuggagacaaacauaacu

SEQ ID NO: 469929 - RNA, 19 nt, Artificial Sequence
  Description of Artificial Sequence: Synthetic oligonucleotide
  Sense strand starting at position 484 of SEQ ID NO: 317171
uuauguuugucuccaagau

SEQ ID NO: 469930 - RNA, 19 nt, Artificial Sequence
  Description of Artificial Sequence: Synthetic oligonucleotide
  Antisense Strand to SEQ ID NO: 469929
aucuuggagacaaacauaa

SEQ ID NO: 469931 - RNA, 19 nt, Artificial Sequence
  Description of Artificial Sequence: Synthetic oligonucleotide
  Sense strand starting at position 572 of SEQ ID NO: 317171
gcagaaacuuaggcuuaau

SEQ ID NO: 469932 - RNA, 19 nt, Artificial Sequence
  Description of Artificial Sequence: Synthetic oligonucleotide
  Antisense Strand to SEQ ID NO: 469931
auuaagccuaaguuucugc

SEQ ID NO: 469933 - RNA, 19 nt, Artificial Sequence
  Description of Artificial Sequence: Synthetic oligonucleotide
  Sense strand starting at position 620 of SEQ ID NO: 317171
cagcuauacucagcagaga

SEQ ID NO: 469934 - RNA, 19 nt, Artificial Sequence
  Description of Artificial Sequence: Synthetic oligonucleotide
  Antisense Strand to SEQ ID NO: 469933
ucucugcugaguauagcug

SEQ ID NO: 469935 - RNA, 19 nt, Artificial Sequence
  Description of Artificial Sequence: Synthetic oligonucleotide
  Sense strand starting at position 621 of SEQ ID NO: 317171
agcuauacucagcagagaa

SEQ ID NO: 469936 - RNA, 19 nt, Artificial Sequence
  Description of Artificial Sequence: Synthetic oligonucleotide
  Antisense Strand to SEQ ID NO: 469935
uucucugcugaguauagcu

SEQ ID NO: 469937 - RNA, 19 nt, Artificial Sequence
  Description of Artificial Sequence: Synthetic oligonucleotide
  Sense strand starting at position 623 of SEQ ID NO: 317171
cuauacucagcagagaagu

SEQ ID NO: 469938 - RNA, 19 nt, Artificial Sequence
  Description of Artificial Sequence: Synthetic oligonucleotide
  Antisense Strand to SEQ ID NO: 469937
acuucucugcugaguauag

SEQ ID NO: 469939 - RNA, 19 nt, Artificial Sequence
  Description of Artificial Sequence: Synthetic oligonucleotide
  Sense strand starting at position 633 of SEQ ID NO: 317171
cagagaaguugcuccacca

SEQ ID NO: 469940 - RNA, 19 nt, Artificial Sequence
  Description of Artificial Sequence: Synthetic oligonucleotide
  Antisense Strand to SEQ ID NO: 469939
ugguggagcaacuucucug

SEQ ID NO: 469941 - RNA, 19 nt, Artificial Sequence
  Description of Artificial Sequence: Synthetic oligonucleotide
  Sense strand starting at position 837 of SEQ ID NO: 317171
cccaucacauguucgagaa

SEQ ID NO: 469942 - RNA, 19 nt, Artificial Sequence
  Description of Artificial Sequence: Synthetic oligonucleotide
  Antisense Strand to SEQ ID NO: 469941
uucucgaacaugugauggg

SEQ ID NO: 469943 - RNA, 19 nt, Artificial Sequence
  Description of Artificial Sequence: Synthetic oligonucleotide
  Sense strand starting at position 838 of SEQ ID NO: 317171
ccaucacauguucgagaaa

SEQ ID NO: 469944 - RNA, 19 nt, Artificial Sequence
  Description of Artificial Sequence: Synthetic oligonucleotide
  Antisense Strand to SEQ ID NO: 469943
uuucucgaacaugugaugg

SEQ ID NO: 469945 - RNA, 19 nt, Artificial Sequence
  Description of Artificial Sequence: Synthetic oligonucleotide
  Sense strand starting at position 1003 of SEQ ID NO: 317171
aggacccuguguuuacuaa

SEQ ID NO: 469946 - RNA, 19 nt, Artificial Sequence
  Description of Artificial Sequence: Synthetic oligonucleotide
  Antisense Strand to SEQ ID NO: 469945
uuaguaaacacaggguccu

SEQ ID NO: 469947 - RNA, 19 nt, Artificial Sequence
  Description of Artificial Sequence: Synthetic oligonucleotide
  Sense strand starting at position 1010 of SEQ ID NO: 317171
uguguuuacuaacucaaag

SEQ ID NO: 469948 - RNA, 19 nt, Artificial Sequence
  Description of Artificial Sequence: Synthetic oligonucleotide
  Antisense Strand to SEQ ID NO: 469947
cuuugaguuaguaaacaca

SEQ ID NO: 469949 - RNA, 19 nt, Artificial Sequence
  Description of Artificial Sequence: Synthetic oligonucleotide
  Sense strand starting at position 1061 of SEQ ID NO: 317171
ggcaguguaagacaccaua

SEQ ID NO: 469950 - RNA, 19 nt, Artificial Sequence
  Description of Artificial Sequence: Synthetic oligonucleotide
  Antisense Strand to SEQ ID NO: 469949
uauggugucuuacacugcc

SEQ ID NO: 469951 - RNA, 19 nt, Artificial Sequence
  Description of Artificial Sequence: Synthetic oligonucleotide
  Sense strand starting at position 2106 of SEQ ID NO: 317171
aagaaagugucagaggaaa

SEQ ID NO: 469952 - RNA, 19 nt, Artificial Sequence
  Description of Artificial Sequence: Synthetic oligonucleotide
  Antisense Strand to SEQ ID NO: 469951
uuuccucugacacuuucuu

SEQ ID NO: 469953 - RNA, 19 nt, Artificial Sequence
  Description of Artificial Sequence: Synthetic oligonucleotide
  Sense strand starting at position 2155 of SEQ ID NO: 317171
gggaauaagugggaaagaa

SEQ ID NO: 469954 - RNA, 19 nt, Artificial Sequence
  Description of Artificial Sequence: Synthetic oligonucleotide
  Antisense Strand to SEQ ID NO: 469953
uucuuucccacuuauuccc

SEQ ID NO: 469955 - RNA, 19 nt, Artificial Sequence
  Description of Artificial Sequence: Synthetic oligonucleotide
  Sense strand starting at position 2527 of SEQ ID NO: 317171
gggaguaaguuguugcgga

SEQ ID NO: 469956 - RNA, 19 nt, Artificial Sequence
  Description of Artificial Sequence: Synthetic oligonucleotide
  Antisense Strand to SEQ ID NO: 469955
uccgcaacaacuuacuccc

SEQ ID NO: 469957 - RNA, 19 nt, Artificial Sequence
  Description of Artificial Sequence: Synthetic oligonucleotide
  Sense strand starting at position 2571 of SEQ ID NO: 317171
ugaauaauacuucguuaug

SEQ ID NO: 469958 - RNA, 19 nt, Artificial Sequence
  Description of Artificial Sequence: Synthetic oligonucleotide
  Antisense Strand to SEQ ID NO: 469957
cauaacgaaguauuauuca

SEQ ID NO: 469959 - RNA, 19 nt, Artificial Sequence
  Description of Artificial Sequence: Synthetic oligonucleotide
  Sense strand starting at position 2572 of SEQ ID NO: 317171
gaauaauacuucguuaugg

SEQ ID NO: 469960 - RNA, 19 nt, Artificial Sequence
  Description of Artificial Sequence: Synthetic oligonucleotide
  Antisense Strand to SEQ ID NO: 469959
ccauaacgaaguauuauuc

SEQ ID NO: 469961 - RNA, 19 nt, Artificial Sequence
  Description of Artificial Sequence: Synthetic oligonucleotide
  Sense strand starting at position 2574 of SEQ ID NO: 317171
auaauacuucguuauggga

SEQ ID NO: 469962 - RNA, 19 nt, Artificial Sequence
  Description of Artificial Sequence: Synthetic oligonucleotide
  Antisense Strand to SEQ ID NO: 469961
ucccauaacgaaguauuau

SEQ ID NO: 469963 - RNA, 19 nt, Artificial Sequence
  Description of Artificial Sequence: Synthetic oligonucleotide
  Sense strand starting at position 3179 of SEQ ID NO: 317171
aguuguggcccuuggaaac

SEQ ID NO: 469964 - RNA, 19 nt, Artificial Sequence
  Description of Artificial Sequence: Synthetic oligonucleotide
  Antisense Strand to SEQ ID NO: 469963
guuuccaagggccacaacu

SEQ ID NO: 469965 - RNA, 19 nt, Artificial Sequence
  Description of Artificial Sequence: Synthetic oligonucleotide
  Sense strand starting at position 3333 of SEQ ID NO: 317171
uccaaagcagcuuguaauc

SEQ ID NO: 469966 - RNA, 19 nt, Artificial Sequence
  Description of Artificial Sequence: Synthetic oligonucleotide
  Antisense Strand to SEQ ID NO: 469965
gauuacaagcugcuuugga

SEQ ID NO: 469967 - RNA, 19 nt, Artificial Sequence
  Description of Artificial Sequence: Synthetic oligonucleotide
  Sense strand starting at position 3372 of SEQ ID NO: 317171
agcuuauugauguggcaac

SEQ ID NO: 469968 - RNA, 19 nt, Artificial Sequence
  Description of Artificial Sequence: Synthetic oligonucleotide
  Antisense Strand to SEQ ID NO: 469967
guugccacaucaauaagcu

SEQ ID NO: 469969 - RNA, 19 nt, Artificial Sequence
  Description of Artificial Sequence: Synthetic oligonucleotide
  Sense strand starting at position 3515 of SEQ ID NO: 317171
ugcagaacucucgacaggu

SEQ ID NO: 469970 - RNA, 19 nt, Artificial Sequence
  Description of Artificial Sequence: Synthetic oligonucleotide
  Antisense Strand to SEQ ID NO: 469969
accugucgagaguucugca

SEQ ID NO: 469971 - RNA, 19 nt, Artificial Sequence
  Description of Artificial Sequence: Synthetic oligonucleotide
  Sense strand starting at position 3517 of SEQ ID NO: 317171
cagaacucucgacagguau

SEQ ID NO: 469972 - RNA, 19 nt, Artificial Sequence
  Description of Artificial Sequence: Synthetic oligonucleotide
  Antisense Strand to SEQ ID NO: 469971
auaccugucgagaguucug

SEQ ID NO: 469973 - RNA, 19 nt, Artificial Sequence
  Description of Artificial Sequence: Synthetic oligonucleotide
  Sense strand starting at position 3664 of SEQ ID NO: 317171
uguccaccuuuguuacaau

SEQ ID NO: 469974 - RNA, 19 nt, Artificial Sequence
  Description of Artificial Sequence: Synthetic oligonucleotide
  Antisense Strand to SEQ ID NO: 469973
auuguaacaaagguggaca

SEQ ID NO: 469975 - RNA, 19 nt, Artificial Sequence
  Description of Artificial Sequence: Synthetic oligonucleotide
  Sense strand starting at position 3711 of SEQ ID NO: 317171
ggaguugacugauacaaag

SEQ ID NO: 469976 - RNA, 19 nt, Artificial Sequence
  Description of Artificial Sequence: Synthetic oligonucleotide
  Antisense Strand to SEQ ID NO: 469975
cuuuguaucagucaacucc

SEQ ID NO: 469977 - RNA, 19 nt, Artificial Sequence
  Description of Artificial Sequence: Synthetic oligonucleotide
  Sense strand starting at position 3721 of SEQ ID NO: 317171
gauacaaaguuguaaagaa

SEQ ID NO: 469978 - RNA, 19 nt, Artificial Sequence
  Description of Artificial Sequence: Synthetic oligonucleotide
  Antisense Strand to SEQ ID NO: 469977
uucuuuacaacuuuguauc

SEQ ID NO: 469979 - RNA, 19 nt, Artificial Sequence
  Description of Artificial Sequence: Synthetic oligonucleotide
  Sense strand starting at position 3731 of SEQ ID NO: 317171
uguaaagaauuacugguuu

SEQ ID NO: 469980 - RNA, 19 nt, Artificial Sequence
  Description of Artificial Sequence: Synthetic oligonucleotide
  Antisense Strand to SEQ ID NO: 469979
aaaccaguaauucuuuaca

SEQ ID NO: 469981 - RNA, 19 nt, Artificial Sequence
  Description of Artificial Sequence: Synthetic oligonucleotide
  Sense strand starting at position 3735 of SEQ ID NO: 317171
aagaauuacugguuuguag

SEQ ID NO: 469982 - RNA, 19 nt, Artificial Sequence
  Description of Artificial Sequence: Synthetic oligonucleotide
  Antisense Strand to SEQ ID NO: 469981
cuacaaaccaguaauucuu

SEQ ID NO: 469983 - RNA, 19 nt, Artificial Sequence
  Description of Artificial Sequence: Synthetic oligonucleotide
  Sense strand starting at position 3737 of SEQ ID NO: 317171
gaauuacugguuuguagaa

SEQ ID NO: 469984 - RNA, 19 nt, Artificial Sequence
  Description of Artificial Sequence: Synthetic oligonucleotide
  Antisense Strand to SEQ ID NO: 469983
uucuacaaaccaguaauuc

SEQ ID NO: 469985 - RNA, 19 nt, Artificial Sequence
  Description of Artificial Sequence: Synthetic oligonucleotide
  Sense strand starting at position 3738 of SEQ ID NO: 317171
aauuacugguuuguagaaa

SEQ ID NO: 469986 - RNA, 19 nt, Artificial Sequence
  Description of Artificial Sequence: Synthetic oligonucleotide
  Antisense Strand to SEQ ID NO: 469985
uuucuacaaaccaguaauu

SEQ ID NO: 469987 - RNA, 19 nt, Artificial Sequence
  Description of Artificial Sequence: Synthetic oligonucleotide
  Sense strand starting at position 3752 of SEQ ID NO: 317171
agaaauaguauugguuagu

SEQ ID NO: 469988 - RNA, 19 nt, Artificial Sequence
  Description of Artificial Sequence: Synthetic oligonucleotide
  Antisense Strand to SEQ ID NO: 469987
acuaaccaauacuauuucu

SEQ ID NO: 469989 - RNA, 19 nt, Artificial Sequence
  Description of Artificial Sequence: Synthetic oligonucleotide
  Sense strand starting at position 3753 of SEQ ID NO: 317171
gaaauaguauugguuagug

SEQ ID NO: 469990 - RNA, 19 nt, Artificial Sequence
  Description of Artificial Sequence: Synthetic oligonucleotide
  Antisense Strand to SEQ ID NO: 469989
cacuaaccaauacuauuuc

SEQ ID NO: 469991 - RNA, 19 nt, Artificial Sequence
  Description of Artificial Sequence: Synthetic oligonucleotide
  Sense strand starting at position 3768 of SEQ ID NO: 317171
agugguuggcuauacguua

SEQ ID NO: 469992 - RNA, 19 nt, Artificial Sequence
  Description of Artificial Sequence: Synthetic oligonucleotide
  Antisense Strand to SEQ ID NO: 469991
uaacguauagccaaccacu

SEQ ID NO: 469993 - RNA, 19 nt, Artificial Sequence
  Description of Artificial Sequence: Synthetic oligonucleotide
  Sense strand starting at position 3798 of SEQ ID NO: 317171
gcgaguuacaguguccagu

SEQ ID NO: 469994 - RNA, 19 nt, Artificial Sequence
  Description of Artificial Sequence: Synthetic oligonucleotide
  Antisense Strand to SEQ ID NO: 469993
acuggacacuguaacucgc

SEQ ID NO: 469995 - RNA, 19 nt, Artificial Sequence
  Description of Artificial Sequence: Synthetic oligonucleotide
  Sense strand starting at position 3850 of SEQ ID NO: 317171
ggcuauaguaagcaguuua

SEQ ID NO: 469996 - RNA, 19 nt, Artificial Sequence
  Description of Artificial Sequence: Synthetic oligonucleotide
  Antisense Strand to SEQ ID NO: 469995
uaaacugcuuacuauagcc

SEQ ID NO: 469997 - RNA, 19 nt, Artificial Sequence
  Description of Artificial Sequence: Synthetic oligonucleotide
  Sense strand starting at position 3903 of SEQ ID NO: 317171
uguaauugcugucucauuu

SEQ ID NO: 469998 - RNA, 19 nt, Artificial Sequence
  Description of Artificial Sequence: Synthetic oligonucleotide
  Antisense Strand to SEQ ID NO: 469997
aaaugagacagcaauuaca

SEQ ID NO: 469999 - RNA, 19 nt, Artificial Sequence
  Description of Artificial Sequence: Synthetic oligonucleotide
  Sense strand starting at position 3927 of SEQ ID NO: 317171
ucucucugggccugguaau

SEQ ID NO: 470000 - RNA, 19 nt, Artificial Sequence
  Description of Artificial Sequence: Synthetic oligonucleotide
  Antisense Strand to SEQ ID NO: 469999
auuaccaggcccagagaga

SEQ ID NO: 470001 - RNA, 19 nt, Artificial Sequence
  Description of Artificial Sequence: Synthetic oligonucleotide
  Sense strand starting at position 3928 of SEQ ID NO: 317171
cucucugggccugguaauu

SEQ ID NO: 470002 - RNA, 19 nt, Artificial Sequence
  Description of Artificial Sequence: Synthetic oligonucleotide
  Antisense Strand to SEQ ID NO: 470001
aauuaccaggcccagagag

SEQ ID NO: 470003 - RNA, 19 nt, Artificial Sequence
  Description of Artificial Sequence: Synthetic oligonucleotide
  Sense strand starting at position 3980 of SEQ ID NO: 317171
uuucucggcacugagagau

SEQ ID NO: 470004 - RNA, 19 nt, Artificial Sequence
  Description of Artificial Sequence: Synthetic oligonucleotide
  Antisense Strand to SEQ ID NO: 470003
aucucucagugccgagaaa

SEQ ID NO: 470005 - RNA, 19 nt, Artificial Sequence
  Description of Artificial Sequence: Synthetic oligonucleotide
  Sense strand starting at position 501 of SEQ ID NO: 317172
auaguuauguuugucucca

SEQ ID NO: 470006 - RNA, 19 nt, Artificial Sequence
  Description of Artificial Sequence: Synthetic oligonucleotide
  Antisense Strand to SEQ ID NO: 470005
uggagacaaacauaacuau

SEQ ID NO: 470007 - RNA, 19 nt, Artificial Sequence
  Description of Artificial Sequence: Synthetic oligonucleotide
  Sense strand starting at position 503 of SEQ ID NO: 317172
aguuauguuugucuccaag

SEQ ID NO: 470008 - RNA, 19 nt, Artificial Sequence
  Description of Artificial Sequence: Synthetic oligonucleotide
  Antisense Strand to SEQ ID NO: 470007
cuuggagacaaacauaacu

SEQ ID NO: 470009 - RNA, 19 nt, Artificial Sequence
  Description of Artificial Sequence: Synthetic oligonucleotide
  Sense strand starting at position 505 of SEQ ID NO: 317172
uuauguuugucuccaagau

SEQ ID NO: 470010 - RNA, 19 nt, Artificial Sequence
  Description of Artificial Sequence: Synthetic oligonucleotide
  Antisense Strand to SEQ ID NO: 470009
aucuuggagacaaacauaa

SEQ ID NO: 470011 - RNA, 19 nt, Artificial Sequence
  Description of Artificial Sequence: Synthetic oligonucleotide
  Sense strand starting at position 593 of SEQ ID NO: 317172
gcagaaacuuaggcuuaau

SEQ ID NO: 470012 - RNA, 19 nt, Artificial Sequence
  Description of Artificial Sequence: Synthetic oligonucleotide
  Antisense Strand to SEQ ID NO: 470011
auuaagccuaaguuucugc

SEQ ID NO: 470013 - RNA, 19 nt, Artificial Sequence
  Description of Artificial Sequence: Synthetic oligonucleotide
  Sense strand starting at position 641 of SEQ ID NO: 317172
cagcuauacucagcagaga

SEQ ID NO: 470014 - RNA, 19 nt, Artificial Sequence
  Description of Artificial Sequence: Synthetic oligonucleotide
  Antisense Strand to SEQ ID NO: 470013
ucucugcugaguauagcug

SEQ ID NO: 470015 - RNA, 19 nt, Artificial Sequence
  Description of Artificial Sequence: Synthetic oligonucleotide
  Sense strand starting at position 642 of SEQ ID NO: 317172
agcuauacucagcagagaa

SEQ ID NO: 470016 - RNA, 19 nt, Artificial Sequence
  Description of Artificial Sequence: Synthetic oligonucleotide
  Antisense Strand to SEQ ID NO: 470015
uucucugcugaguauagcu

SEQ ID NO: 470017 - RNA, 19 nt, Artificial Sequence
  Description of Artificial Sequence: Synthetic oligonucleotide
  Sense strand starting at position 644 of SEQ ID NO: 317172
cuauacucagcagagaagu

SEQ ID NO: 470018 - RNA, 19 nt, Artificial Sequence
  Description of Artificial Sequence: Synthetic oligonucleotide
  Antisense Strand to SEQ ID NO: 470017
acuucucugcugaguauag

SEQ ID NO: 470019 - RNA, 19 nt, Artificial Sequence
  Description of Artificial Sequence: Synthetic oligonucleotide
  Sense strand starting at position 654 of SEQ ID NO: 317172
cagagaaguugcuccacca

SEQ ID NO: 470020 - RNA, 19 nt, Artificial Sequence
  Description of Artificial Sequence: Synthetic oligonucleotide
  Antisense Strand to SEQ ID NO: 470019
ugguggagcaacuucucug

SEQ ID NO: 470021 - RNA, 19 nt, Artificial Sequence
  Description of Artificial Sequence: Synthetic oligonucleotide
  Sense strand starting at position 858 of SEQ ID NO: 317172
cccaucacauguucgagaa

SEQ ID NO: 470022 - RNA, 19 nt, Artificial Sequence
  Description of Artificial Sequence: Synthetic oligonucleotide
  Antisense Strand to SEQ ID NO: 470021
uucucgaacaugugauggg

SEQ ID NO: 470023 - RNA, 19 nt, Artificial Sequence
  Description of Artificial Sequence: Synthetic oligonucleotide
  Sense strand starting at position 859 of SEQ ID NO: 317172
ccaucacauguucgagaaa

SEQ ID NO: 470024 - RNA, 19 nt, Artificial Sequence
  Description of Artificial Sequence: Synthetic oligonucleotide
  Antisense Strand to SEQ ID NO: 470023
uuucucgaacaugugaugg

SEQ ID NO: 470025 - RNA, 19 nt, Artificial Sequence
  Description of Artificial Sequence: Synthetic oligonucleotide
  Sense strand starting at position 1024 of SEQ ID NO: 317172
aggacccuguguuuacuaa

SEQ ID NO: 470026 - RNA, 19 nt, Artificial Sequence
  Description of Artificial Sequence: Synthetic oligonucleotide
  Antisense Strand to SEQ ID NO: 470025
uuaguaaacacaggguccu

SEQ ID NO: 470027 - RNA, 19 nt, Artificial Sequence
  Description of Artificial Sequence: Synthetic oligonucleotide
  Sense strand starting at position 1031 of SEQ ID NO: 317172
uguguuuacuaacucaaag

SEQ ID NO: 470028 - RNA, 19 nt, Artificial Sequence
  Description of Artificial Sequence: Synthetic oligonucleotide
  Antisense Strand to SEQ ID NO: 470027
cuuugaguuaguaaacaca

SEQ ID NO: 470029 - RNA, 19 nt, Artificial Sequence
  Description of Artificial Sequence: Synthetic oligonucleotide
  Sense strand starting at position 1082 of SEQ ID NO: 317172
ggcaguguaagacaccaua

SEQ ID NO: 470030 - RNA, 19 nt, Artificial Sequence
  Description of Artificial Sequence: Synthetic oligonucleotide
  Antisense Strand to SEQ ID NO: 470029
uauggugucuuacacugcc

SEQ ID NO: 470031 - RNA, 19 nt, Artificial Sequence
  Description of Artificial Sequence: Synthetic oligonucleotide
  Sense strand starting at position 1143 of SEQ ID NO: 317172
ggagguagauaguaaauau

SEQ ID NO: 470032 - RNA, 19 nt, Artificial Sequence
  Description of Artificial Sequence: Synthetic oligonucleotide
  Antisense Strand to SEQ ID NO: 470031
auauuuacuaucuaccucc

SEQ ID NO: 470033 - RNA, 19 nt, Artificial Sequence
  Description of Artificial Sequence: Synthetic oligonucleotide
  Sense strand starting at position 2127 of SEQ ID NO: 317172
aagaaagugucagaggaaa

SEQ ID NO: 470034 - RNA, 19 nt, Artificial Sequence
  Description of Artificial Sequence: Synthetic oligonucleotide
  Antisense Strand to SEQ ID NO: 470033
uuuccucugacacuuucuu

SEQ ID NO: 470035 - RNA, 19 nt, Artificial Sequence
  Description of Artificial Sequence: Synthetic oligonucleotide
  Sense strand starting at position 2176 of SEQ ID NO: 317172
gggaauaagugggaaagaa

SEQ ID NO: 470036 - RNA, 19 nt, Artificial Sequence
  Description of Artificial Sequence: Synthetic oligonucleotide
  Antisense Strand to SEQ ID NO: 470035
uucuuucccacuuauuccc

SEQ ID NO: 470037 - RNA, 19 nt, Artificial Sequence
  Description of Artificial Sequence: Synthetic oligonucleotide
  Sense strand starting at position 2548 of SEQ ID NO: 317172
gggaguaaguuguugcgga

SEQ ID NO: 470038 - RNA, 19 nt, Artificial Sequence
  Description of Artificial Sequence: Synthetic oligonucleotide
  Antisense Strand to SEQ ID NO: 470037
uccgcaacaacuuacuccc

SEQ ID NO: 470039 - RNA, 19 nt, Artificial Sequence
  Description of Artificial Sequence: Synthetic oligonucleotide
  Sense strand starting at position 2592 of SEQ ID NO: 317172
ugaauaauacuucguuaug

SEQ ID NO: 470040 - RNA, 19 nt, Artificial Sequence
  Description of Artificial Sequence: Synthetic oligonucleotide
  Antisense Strand to SEQ ID NO: 470039
cauaacgaaguauuauuca

SEQ ID NO: 470041 - RNA, 19 nt, Artificial Sequence
  Description of Artificial Sequence: Synthetic oligonucleotide
  Sense strand starting at position 2593 of SEQ ID NO: 317172
gaauaauacuucguuaugg

SEQ ID NO: 470042 - RNA, 19 nt, Artificial Sequence
  Description of Artificial Sequence: Synthetic oligonucleotide
  Antisense Strand to SEQ ID NO: 470041
ccauaacgaaguauuauuc

SEQ ID NO: 470043 - RNA, 19 nt, Artificial Sequence
  Description of Artificial Sequence: Synthetic oligonucleotide
  Sense strand starting at position 2595 of SEQ ID NO: 317172
auaauacuucguuauggga

SEQ ID NO: 470044 - RNA, 19 nt, Artificial Sequence
  Description of Artificial Sequence: Synthetic oligonucleotide
  Antisense Strand to SEQ ID NO: 470043
ucccauaacgaaguauuau

SEQ ID NO: 470045 - RNA, 19 nt, Artificial Sequence
  Description of Artificial Sequence: Synthetic oligonucleotide
  Sense strand starting at position 3200 of SEQ ID NO: 317172
aguuguggcccuuggaaac

SEQ ID NO: 470046 - RNA, 19 nt, Artificial Sequence
  Description of Artificial Sequence: Synthetic oligonucleotide
  Antisense Strand to SEQ ID NO: 470045
guuuccaagggccacaacu

SEQ ID NO: 470047 - RNA, 19 nt, Artificial Sequence
  Description of Artificial Sequence: Synthetic oligonucleotide
  Sense strand starting at position 3354 of SEQ ID NO: 317172
uccaaagcagcuuguaauc

SEQ ID NO: 470048 - RNA, 19 nt, Artificial Sequence
  Description of Artificial Sequence: Synthetic oligonucleotide
  Antisense Strand to SEQ ID NO: 470047
gauuacaagcugcuuugga

SEQ ID NO: 470049 - RNA, 19 nt, Artificial Sequence
  Description of Artificial Sequence: Synthetic oligonucleotide
  Sense strand starting at position 3393 of SEQ ID NO: 317172
agcuuauugauguggcaac

SEQ ID NO: 470050 - RNA, 19 nt, Artificial Sequence
  Description of Artificial Sequence: Synthetic oligonucleotide
  Antisense Strand to SEQ ID NO: 470049
guugccacaucaauaagcu

SEQ ID NO: 470051 - RNA, 19 nt, Artificial Sequence
  Description of Artificial Sequence: Synthetic oligonucleotide
  Sense strand starting at position 3536 of SEQ ID NO: 317172
ugcagaacucucgacaggu

SEQ ID NO: 470052 - RNA, 19 nt, Artificial Sequence
  Description of Artificial Sequence: Synthetic oligonucleotide
  Antisense Strand to SEQ ID NO: 470051
accugucgagaguucugca

SEQ ID NO: 470053 - RNA, 19 nt, Artificial Sequence
  Description of Artificial Sequence: Synthetic oligonucleotide
  Sense strand starting at position 3538 of SEQ ID NO: 317172
cagaacucucgacagguau

SEQ ID NO: 470054 - RNA, 19 nt, Artificial Sequence
  Description of Artificial Sequence: Synthetic oligonucleotide
  Antisense Strand to SEQ ID NO: 470053
auaccugucgagaguucug

SEQ ID NO: 470055 - RNA, 19 nt, Artificial Sequence
  Description of Artificial Sequence: Synthetic oligonucleotide
  Sense strand starting at position 3685 of SEQ ID NO: 317172
uguccaccuuuguuacaau

SEQ ID NO: 470056 - RNA, 19 nt, Artificial Sequence
  Description of Artificial Sequence: Synthetic oligonucleotide
  Antisense Strand to SEQ ID NO: 470055
auuguaacaaagguggaca

SEQ ID NO: 470057 - RNA, 19 nt, Artificial Sequence
  Description of Artificial Sequence: Synthetic oligonucleotide
  Sense strand starting at position 3732 of SEQ ID NO: 317172
ggaguugacugauacaaag

SEQ ID NO: 470058 - RNA, 19 nt, Artificial Sequence
  Description of Artificial Sequence: Synthetic oligonucleotide
  Antisense Strand to SEQ ID NO: 470057
cuuuguaucagucaacucc

SEQ ID NO: 470059 - RNA, 19 nt, Artificial Sequence
  Description of Artificial Sequence: Synthetic oligonucleotide
  Sense strand starting at position 3742 of SEQ ID NO: 317172
gauacaaaguuguaaagaa

SEQ ID NO: 470060 - RNA, 19 nt, Artificial Sequence
  Description of Artificial Sequence: Synthetic oligonucleotide
  Antisense Strand to SEQ ID NO: 470059
uucuuuacaacuuuguauc

SEQ ID NO: 470061 - RNA, 19 nt, Artificial Sequence
  Description of Artificial Sequence: Synthetic oligonucleotide
  Sense strand starting at position 3752 of SEQ ID NO: 317172
uguaaagaauuacugguuu

SEQ ID NO: 470062 - RNA, 19 nt, Artificial Sequence
  Description of Artificial Sequence: Synthetic oligonucleotide
  Antisense Strand to SEQ ID NO: 470061
aaaccaguaauucuuuaca

SEQ ID NO: 470063 - RNA, 19 nt, Artificial Sequence
  Description of Artificial Sequence: Synthetic oligonucleotide
  Sense strand starting at position 3756 of SEQ ID NO: 317172
aagaauuacugguuuguag

SEQ ID NO: 470064 - RNA, 19 nt, Artificial Sequence
  Description of Artificial Sequence: Synthetic oligonucleotide
  Antisense Strand to SEQ ID NO: 470063
cuacaaaccaguaauucuu

SEQ ID NO: 470065 - RNA, 19 nt, Artificial Sequence
  Description of Artificial Sequence: Synthetic oligonucleotide
  Sense strand starting at position 3758 of SEQ ID NO: 317172
gaauuacugguuuguagaa

SEQ ID NO: 470066 - RNA, 19 nt, Artificial Sequence
  Description of Artificial Sequence: Synthetic oligonucleotide
  Antisense Strand to SEQ ID NO: 470065
uucuacaaaccaguaauuc

SEQ ID NO: 470067 - RNA, 19 nt, Artificial Sequence
  Description of Artificial Sequence: Synthetic oligonucleotide
  Sense strand starting at position 3759 of SEQ ID NO: 317172
aauuacugguuuguagaaa

SEQ ID NO: 470068 - RNA, 19 nt, Artificial Sequence
  Description of Artificial Sequence: Synthetic oligonucleotide
  Antisense Strand to SEQ ID NO: 470067
uuucuacaaaccaguaauu

SEQ ID NO: 470069 - RNA, 19 nt, Artificial Sequence
  Description of Artificial Sequence: Synthetic oligonucleotide
  Sense strand starting at position 3773 of SEQ ID NO: 317172
agaaauaguauugguuagu

SEQ ID NO: 470070 - RNA, 19 nt, Artificial Sequence
  Description of Artificial Sequence: Synthetic oligonucleotide
  Antisense Strand to SEQ ID NO: 470069
acuaaccaauacuauuucu

SEQ ID NO: 470071 - RNA, 19 nt, Artificial Sequence
  Description of Artificial Sequence: Synthetic oligonucleotide
  Sense strand starting at position 3774 of SEQ ID NO: 317172
gaaauaguauugguuagug

SEQ ID NO: 470072 - RNA, 19 nt, Artificial Sequence
  Description of Artificial Sequence: Synthetic oligonucleotide
  Antisense Strand to SEQ ID NO: 470071
cacuaaccaauacuauuuc

SEQ ID NO: 470073 - RNA, 19 nt, Artificial Sequence
  Description of Artificial Sequence: Synthetic oligonucleotide
  Sense strand starting at position 3789 of SEQ ID NO: 317172
agugguuggcuauacguua

SEQ ID NO: 470074 - RNA, 19 nt, Artificial Sequence
  Description of Artificial Sequence: Synthetic oligonucleotide
  Antisense Strand to SEQ ID NO: 470073
uaacguauagccaaccacu

SEQ ID NO: 470075 - RNA, 19 nt, Artificial Sequence
  Description of Artificial Sequence: Synthetic oligonucleotide
  Sense strand starting at position 3819 of SEQ ID NO: 317172
gcgaguuacaguguccagu

SEQ ID NO: 470076 - RNA, 19 nt, Artificial Sequence
  Description of Artificial Sequence: Synthetic oligonucleotide
  Antisense Strand to SEQ ID NO: 470075
acuggacacuguaacucgc

SEQ ID NO: 470077 - RNA, 19 nt, Artificial Sequence
  Description of Artificial Sequence: Synthetic oligonucleotide
  Sense strand starting at position 3871 of SEQ ID NO: 317172
ggcuauaguaagcaguuua

SEQ ID NO: 470078 - RNA, 19 nt, Artificial Sequence
  Description of Artificial Sequence: Synthetic oligonucleotide
  Antisense Strand to SEQ ID NO: 470077
uaaacugcuuacuauagcc

SEQ ID NO: 470079 - RNA, 19 nt, Artificial Sequence
  Description of Artificial Sequence: Synthetic oligonucleotide
  Sense strand starting at position 3924 of SEQ ID NO: 317172
uguaauugcugucucauuu

SEQ ID NO: 470080 - RNA, 19 nt, Artificial Sequence
  Description of Artificial Sequence: Synthetic oligonucleotide
  Antisense Strand to SEQ ID NO: 470079
aaaugagacagcaauuaca

SEQ ID NO: 470081 - RNA, 19 nt, Artificial Sequence
  Description of Artificial Sequence: Synthetic oligonucleotide
  Sense strand starting at position 3948 of SEQ ID NO: 317172
ucucucugggccugguaau

SEQ ID NO: 470082 - RNA, 19 nt, Artificial Sequence
  Description of Artificial Sequence: Synthetic oligonucleotide
  Antisense Strand to SEQ ID NO: 470081
auuaccaggcccagagaga

SEQ ID NO: 470083 - RNA, 19 nt, Artificial Sequence
  Description of Artificial Sequence: Synthetic oligonucleotide
  Sense strand starting at position 3949 of SEQ ID NO: 317172
cucucugggccugguaauu

SEQ ID NO: 470084 - RNA, 19 nt, Artificial Sequence
  Description of Artificial Sequence: Synthetic oligonucleotide
  Antisense Strand to SEQ ID NO: 470083
aauuaccaggcccagagag

SEQ ID NO: 470085 - RNA, 19 nt, Artificial Sequence
  Description of Artificial Sequence: Synthetic oligonucleotide
  Sense strand starting at position 1 of SEQ ID NO: 317173
ugauaaucacauugcagua

SEQ ID NO: 470086 - RNA, 19 nt, Artificial Sequence
  Description of Artificial Sequence: Synthetic oligonucleotide
  Antisense Strand to SEQ ID NO: 470085
uacugcaaugugauuauca

SEQ ID NO: 470087 - RNA, 19 nt, Artificial Sequence
  Description of Artificial Sequence: Synthetic oligonucleotide
  Sense strand starting at position 13 of SEQ ID NO: 317173
ugcaguaaccagugaauga

SEQ ID NO: 470088 - RNA, 19 nt, Artificial Sequence
  Description of Artificial Sequence: Synthetic oligonucleotide
  Antisense Strand to SEQ ID NO: 470087
ucauucacugguuacugca

SEQ ID NO: 470089 - RNA, 19 nt, Artificial Sequence
  Description of Artificial Sequence: Synthetic oligonucleotide
  Sense strand starting at position 14 of SEQ ID NO: 317173
gcaguaaccagugaaugaa

SEQ ID NO: 470090 - RNA, 19 nt, Artificial Sequence
  Description of Artificial Sequence: Synthetic oligonucleotide
  Antisense Strand to SEQ ID NO: 470089
uucauucacugguuacugc

SEQ ID NO: 470091 - RNA, 19 nt, Artificial Sequence
  Description of Artificial Sequence: Synthetic oligonucleotide
  Sense strand starting at position 17 of SEQ ID NO: 317173
guaaccagugaaugaacaa

SEQ ID NO: 470092 - RNA, 19 nt, Artificial Sequence
  Description of Artificial Sequence: Synthetic oligonucleotide
  Antisense Strand to SEQ ID NO: 470091
uuguucauucacugguuac

SEQ ID NO: 470093 - RNA, 19 nt, Artificial Sequence
  Description of Artificial Sequence: Synthetic oligonucleotide
  Sense strand starting at position 104 of SEQ ID NO: 317173
gcacaagaggcauaacgua

SEQ ID NO: 470094 - RNA, 19 nt, Artificial Sequence
  Description of Artificial Sequence: Synthetic oligonucleotide
  Antisense Strand to SEQ ID NO: 470093
uacguuaugccucuugugc

SEQ ID NO: 470095 - RNA, 19 nt, Artificial Sequence
  Description of Artificial Sequence: Synthetic oligonucleotide
  Sense strand starting at position 180 of SEQ ID NO: 317173
agugucacuauguaaagua

SEQ ID NO: 470096 - RNA, 19 nt, Artificial Sequence
  Description of Artificial Sequence: Synthetic oligonucleotide
  Antisense Strand to SEQ ID NO: 470095
uacuuuacauagugacacu

SEQ ID NO: 470097 - RNA, 19 nt, Artificial Sequence
  Description of Artificial Sequence: Synthetic oligonucleotide
  Sense strand starting at position 247 of SEQ ID NO: 317173
ucuaaugagcugcaaacaa

SEQ ID NO: 470098 - RNA, 19 nt, Artificial Sequence
  Description of Artificial Sequence: Synthetic oligonucleotide
  Antisense Strand to SEQ ID NO: 470097
uuguuugcagcucauuaga

SEQ ID NO: 470099 - RNA, 19 nt, Artificial Sequence
  Description of Artificial Sequence: Synthetic oligonucleotide
  Sense strand starting at position 264 of SEQ ID NO: 317173
aacccacgugcauaugaaa

SEQ ID NO: 470100 - RNA, 19 nt, Artificial Sequence
  Description of Artificial Sequence: Synthetic oligonucleotide
  Antisense Strand to SEQ ID NO: 470099
uuucauaugcacguggguu

SEQ ID NO: 470101 - RNA, 19 nt, Artificial Sequence
  Description of Artificial Sequence: Synthetic oligonucleotide
  Sense strand starting at position 328 of SEQ ID NO: 317173
uuuagaauucgaugcuaua

SEQ ID NO: 470102 - RNA, 19 nt, Artificial Sequence
  Description of Artificial Sequence: Synthetic oligonucleotide
  Antisense Strand to SEQ ID NO: 470101
uauagcaucgaauucuaaa

SEQ ID NO: 470103 - RNA, 19 nt, Artificial Sequence
  Description of Artificial Sequence: Synthetic oligonucleotide
  Sense strand starting at position 455 of SEQ ID NO: 317173
uccuaaucugcugaguuga

SEQ ID NO: 470104 - RNA, 19 nt, Artificial Sequence
  Description of Artificial Sequence: Synthetic oligonucleotide
  Antisense Strand to SEQ ID NO: 470103
ucaacucagcagauuagga

SEQ ID NO: 470105 - RNA, 19 nt, Artificial Sequence
  Description of Artificial Sequence: Synthetic oligonucleotide
  Sense strand starting at position 521 of SEQ ID NO: 317173
cagguuacugcuguucgua

SEQ ID NO: 470106 - RNA, 19 nt, Artificial Sequence
  Description of Artificial Sequence: Synthetic oligonucleotide
  Antisense Strand to SEQ ID NO: 470105
uacgaacagcaguaaccug

SEQ ID NO: 470107 - RNA, 19 nt, Artificial Sequence
  Description of Artificial Sequence: Synthetic oligonucleotide
  Sense strand starting at position 522 of SEQ ID NO: 317173
agguuacugcuguucguau

SEQ ID NO: 470108 - RNA, 19 nt, Artificial Sequence
  Description of Artificial Sequence: Synthetic oligonucleotide
  Antisense Strand to SEQ ID NO: 470107
auacgaacagcaguaaccu

SEQ ID NO: 470109 - RNA, 19 nt, Artificial Sequence
  Description of Artificial Sequence: Synthetic oligonucleotide
  Sense strand starting at position 544 of SEQ ID NO: 317173
acuuguuucucuuuggaaa

SEQ ID NO: 470110 - RNA, 19 nt, Artificial Sequence
  Description of Artificial Sequence: Synthetic oligonucleotide
  Antisense Strand to SEQ ID NO: 470109
uuuccaaagagaaacaagu

SEQ ID NO: 470111 - RNA, 19 nt, Artificial Sequence
  Description of Artificial Sequence: Synthetic oligonucleotide
  Sense strand starting at position 545 of SEQ ID NO: 317173
cuuguuucucuuuggaaac

SEQ ID NO: 470112 - RNA, 19 nt, Artificial Sequence
  Description of Artificial Sequence: Synthetic oligonucleotide
  Antisense Strand to SEQ ID NO: 470111
guuuccaaagagaaacaag

SEQ ID NO: 470113 - RNA, 19 nt, Artificial Sequence
  Description of Artificial Sequence: Synthetic oligonucleotide
  Sense strand starting at position 658 of SEQ ID NO: 317173
gugaguuuauacuuuggaa

SEQ ID NO: 470114 - RNA, 19 nt, Artificial Sequence
  Description of Artificial Sequence: Synthetic oligonucleotide
  Antisense Strand to SEQ ID NO: 470113
uuccaaaguauaaacucac

SEQ ID NO: 470115 - RNA, 19 nt, Artificial Sequence
  Description of Artificial Sequence: Synthetic oligonucleotide
  Sense strand starting at position 660 of SEQ ID NO: 317173
gaguuuauacuuuggaagu

SEQ ID NO: 470116 - RNA, 19 nt, Artificial Sequence
  Description of Artificial Sequence: Synthetic oligonucleotide
  Antisense Strand to SEQ ID NO: 470115
acuuccaaaguauaaacuc

SEQ ID NO: 470117 - RNA, 19 nt, Artificial Sequence
  Description of Artificial Sequence: Synthetic oligonucleotide
  Sense strand starting at position 724 of SEQ ID NO: 317173
gcuuaucauuuggaagaua

SEQ ID NO: 470118 - RNA, 19 nt, Artificial Sequence
  Description of Artificial Sequence: Synthetic oligonucleotide
  Antisense Strand to SEQ ID NO: 470117
uaucuuccaaaugauaagc

SEQ ID NO: 470119 - RNA, 19 nt, Artificial Sequence
  Description of Artificial Sequence: Synthetic oligonucleotide
  Sense strand starting at position 744 of SEQ ID NO: 317173
gugcacauuuaauaaagga

SEQ ID NO: 470120 - RNA, 19 nt, Artificial Sequence
  Description of Artificial Sequence: Synthetic oligonucleotide
  Antisense Strand to SEQ ID NO: 470119
uccuuuauuaaaugugcac

SEQ ID NO: 470121 - RNA, 19 nt, Artificial Sequence
  Description of Artificial Sequence: Synthetic oligonucleotide
  Sense strand starting at position 1052 of SEQ ID NO: 317173
auuagcaguuaauccgaaa

SEQ ID NO: 470122 - RNA, 19 nt, Artificial Sequence
  Description of Artificial Sequence: Synthetic oligonucleotide
  Antisense Strand to SEQ ID NO: 470121
uuucggauuaacugcuaau

SEQ ID NO: 470123 - RNA, 19 nt, Artificial Sequence
  Description of Artificial Sequence: Synthetic oligonucleotide
  Sense strand starting at position 1192 of SEQ ID NO: 317173
agauaaggauuagaagaau

SEQ ID NO: 470124 - RNA, 19 nt, Artificial Sequence
  Description of Artificial Sequence: Synthetic oligonucleotide
  Antisense Strand to SEQ ID NO: 470123
auucuucuaauccuuaucu

SEQ ID NO: 470125 - RNA, 19 nt, Artificial Sequence
  Description of Artificial Sequence: Synthetic oligonucleotide
  Sense strand starting at position 1204 of SEQ ID NO: 317173
gaagaaucagcaggagguu

SEQ ID NO: 470126 - RNA, 19 nt, Artificial Sequence
  Description of Artificial Sequence: Synthetic oligonucleotide
  Antisense Strand to SEQ ID NO: 470125
aaccuccugcugauucuuc

SEQ ID NO: 470127 - RNA, 19 nt, Artificial Sequence
  Description of Artificial Sequence: Synthetic oligonucleotide
  Sense strand starting at position 2146 of SEQ ID NO: 317173
uagggagguucuuugggaa

SEQ ID NO: 470128 - RNA, 19 nt, Artificial Sequence
  Description of Artificial Sequence: Synthetic oligonucleotide
  Antisense Strand to SEQ ID NO: 470127
uucccaaagaaccucccua

SEQ ID NO: 470129 - RNA, 19 nt, Artificial Sequence
  Description of Artificial Sequence: Synthetic oligonucleotide
  Sense strand starting at position 2202 of SEQ ID NO: 317173
gcgguagacagcuagaauu

SEQ ID NO: 470130 - RNA, 19 nt, Artificial Sequence
  Description of Artificial Sequence: Synthetic oligonucleotide
  Antisense Strand to SEQ ID NO: 470129
aauucuagcugucuaccgc

SEQ ID NO: 470131 - RNA, 19 nt, Artificial Sequence
  Description of Artificial Sequence: Synthetic oligonucleotide
  Sense strand starting at position 2374 of SEQ ID NO: 317173
gaggaugcacguuggaaga

SEQ ID NO: 470132 - RNA, 19 nt, Artificial Sequence
  Description of Artificial Sequence: Synthetic oligonucleotide
  Antisense Strand to SEQ ID NO: 470131
ucuuccaacgugcauccuc

SEQ ID NO: 470133 - RNA, 19 nt, Artificial Sequence
  Description of Artificial Sequence: Synthetic oligonucleotide
  Sense strand starting at position 2393 of SEQ ID NO: 317173
aaugaaagcgaauggaauu

SEQ ID NO: 470134 - RNA, 19 nt, Artificial Sequence
  Description of Artificial Sequence: Synthetic oligonucleotide
  Antisense Strand to SEQ ID NO: 470133
aauuccauucgcuuucauu

SEQ ID NO: 470135 - RNA, 19 nt, Artificial Sequence
  Description of Artificial Sequence: Synthetic oligonucleotide
  Sense strand starting at position 2546 of SEQ ID NO: 317173
cuguuuacagaguaaauac

SEQ ID NO: 470136 - RNA, 19 nt, Artificial Sequence
  Description of Artificial Sequence: Synthetic oligonucleotide
  Antisense Strand to SEQ ID NO: 470135
guauuuacucuguaaacag

SEQ ID NO: 470137 - RNA, 19 nt, Artificial Sequence
  Description of Artificial Sequence: Synthetic oligonucleotide
  Sense strand starting at position 2702 of SEQ ID NO: 317173
agaauugagguuuggaguu

SEQ ID NO: 470138 - RNA, 19 nt, Artificial Sequence
  Description of Artificial Sequence: Synthetic oligonucleotide
  Antisense Strand to SEQ ID NO: 470137
aacuccaaaccucaauucu

SEQ ID NO: 470139 - RNA, 19 nt, Artificial Sequence
  Description of Artificial Sequence: Synthetic oligonucleotide
  Sense strand starting at position 2708 of SEQ ID NO: 317173
gagguuuggaguuguuaag

SEQ ID NO: 470140 - RNA, 19 nt, Artificial Sequence
  Description of Artificial Sequence: Synthetic oligonucleotide
  Antisense Strand to SEQ ID NO: 470139
cuuaacaacuccaaaccuc

SEQ ID NO: 470141 - RNA, 19 nt, Artificial Sequence
  Description of Artificial Sequence: Synthetic oligonucleotide
  Sense strand starting at position 3056 of SEQ ID NO: 317173
uacaucuggcaguggaauu

SEQ ID NO: 470142 - RNA, 19 nt, Artificial Sequence
  Description of Artificial Sequence: Synthetic oligonucleotide
  Antisense Strand to SEQ ID NO: 470141
aauuccacugccagaugua

SEQ ID NO: 470143 - RNA, 19 nt, Artificial Sequence
  Description of Artificial Sequence: Synthetic oligonucleotide
  Sense strand starting at position 3057 of SEQ ID NO: 317173
acaucuggcaguggaauua

SEQ ID NO: 470144 - RNA, 19 nt, Artificial Sequence
  Description of Artificial Sequence: Synthetic oligonucleotide
  Antisense Strand to SEQ ID NO: 470143
uaauuccacugccagaugu

SEQ ID NO: 470145 - RNA, 19 nt, Artificial Sequence
  Description of Artificial Sequence: Synthetic oligonucleotide
  Sense strand starting at position 3090 of SEQ ID NO: 317173
agagauacuuaagaaauag

SEQ ID NO: 470146 - RNA, 19 nt, Artificial Sequence
  Description of Artificial Sequence: Synthetic oligonucleotide
  Antisense Strand to SEQ ID NO: 470145
cuauuucuuaaguaucucu

SEQ ID NO: 470147 - RNA, 19 nt, Artificial Sequence
  Description of Artificial Sequence: Synthetic oligonucleotide
  Sense strand starting at position 3110 of SEQ ID NO: 317173
auauaugagacucguagua

SEQ ID NO: 470148 - RNA, 19 nt, Artificial Sequence
  Description of Artificial Sequence: Synthetic oligonucleotide
  Antisense Strand to SEQ ID NO: 470147
uacuacgagucucauauau

SEQ ID NO: 470149 - RNA, 19 nt, Artificial Sequence
  Description of Artificial Sequence: Synthetic oligonucleotide
  Sense strand starting at position 3206 of SEQ ID NO: 317173
gucugacuccuacaaacug

SEQ ID NO: 470150 - RNA, 19 nt, Artificial Sequence
  Description of Artificial Sequence: Synthetic oligonucleotide
  Antisense Strand to SEQ ID NO: 470149
caguuuguaggagucagac

SEQ ID NO: 470151 - RNA, 19 nt, Artificial Sequence
  Description of Artificial Sequence: Synthetic oligonucleotide
  Sense strand starting at position 3306 of SEQ ID NO: 317173
guauauauuccauaagugc

SEQ ID NO: 470152 - RNA, 19 nt, Artificial Sequence
  Description of Artificial Sequence: Synthetic oligonucleotide
  Antisense Strand to SEQ ID NO: 470151
gcacuuauggaauauauac

SEQ ID NO: 470153 - RNA, 19 nt, Artificial Sequence
  Description of Artificial Sequence: Synthetic oligonucleotide
  Sense strand starting at position 3315 of SEQ ID NO: 317173
ccauaagugcaagaaccau

SEQ ID NO: 470154 - RNA, 19 nt, Artificial Sequence
  Description of Artificial Sequence: Synthetic oligonucleotide
  Antisense Strand to SEQ ID NO: 470153
augguucuugcacuuaugg

SEQ ID NO: 470155 - RNA, 19 nt, Artificial Sequence
  Description of Artificial Sequence: Synthetic oligonucleotide
  Sense strand starting at position 3510 of SEQ ID NO: 317173
ggcuuaggauggcuuugaa

SEQ ID NO: 470156 - RNA, 19 nt, Artificial Sequence
  Description of Artificial Sequence: Synthetic oligonucleotide
  Antisense Strand to SEQ ID NO: 470155
uucaaagccauccuaagcc

SEQ ID NO: 470157 - RNA, 19 nt, Artificial Sequence
  Description of Artificial Sequence: Synthetic oligonucleotide
  Sense strand starting at position 3546 of SEQ ID NO: 317173
ucguaaacuuuauugaaac

SEQ ID NO: 470158 - RNA, 19 nt, Artificial Sequence
  Description of Artificial Sequence: Synthetic oligonucleotide
  Antisense Strand to SEQ ID NO: 470157
guuucaauaaaguuuacga

SEQ ID NO: 470159 - RNA, 19 nt, Artificial Sequence
  Description of Artificial Sequence: Synthetic oligonucleotide
  Sense strand starting at position 3902 of SEQ ID NO: 317173
cugccagaagcucaggaau

SEQ ID NO: 470160 - RNA, 19 nt, Artificial Sequence
  Description of Artificial Sequence: Synthetic oligonucleotide
  Antisense Strand to SEQ ID NO: 470159
auuccugagcuucuggcag

SEQ ID NO: 470161 - RNA, 19 nt, Artificial Sequence
  Description of Artificial Sequence: Synthetic oligonucleotide
  Sense strand starting at position 3922 of SEQ ID NO: 317173
ggagauaucacguaucuuc

SEQ ID NO: 470162 - RNA, 19 nt, Artificial Sequence
  Description of Artificial Sequence: Synthetic oligonucleotide
  Antisense Strand to SEQ ID NO: 470161
gaagauacgugauaucucc

SEQ ID NO: 470163 - RNA, 19 nt, Artificial Sequence
  Description of Artificial Sequence: Synthetic oligonucleotide
  Sense strand starting at position 3970 of SEQ ID NO: 317173
agaggaacugguugaaagu

SEQ ID NO: 470164 - RNA, 19 nt, Artificial Sequence
  Description of Artificial Sequence: Synthetic oligonucleotide
  Antisense Strand to SEQ ID NO: 470163
acuuucaaccaguuccucu

SEQ ID NO: 470165 - RNA, 19 nt, Artificial Sequence
  Description of Artificial Sequence: Synthetic oligonucleotide
  Sense strand starting at position 38 of SEQ ID NO: 317174
uaggguuaaucugugcuaa

SEQ ID NO: 470166 - RNA, 19 nt, Artificial Sequence
  Description of Artificial Sequence: Synthetic oligonucleotide
  Antisense Strand to SEQ ID NO: 470165
uuagcacagauuaacccua

SEQ ID NO: 470167 - RNA, 19 nt, Artificial Sequence
  Description of Artificial Sequence: Synthetic oligonucleotide
  Sense strand starting at position 39 of SEQ ID NO: 317174
aggguuaaucugugcuaaa

SEQ ID NO: 470168 - RNA, 19 nt, Artificial Sequence
  Description of Artificial Sequence: Synthetic oligonucleotide
  Antisense Strand to SEQ ID NO: 470167
uuuagcacagauuaacccu

SEQ ID NO: 470169 - RNA, 19 nt, Artificial Sequence
  Description of Artificial Sequence: Synthetic oligonucleotide
  Sense strand starting at position 40 of SEQ ID NO: 317174
ggguuaaucugugcuaaag

SEQ ID NO: 470170 - RNA, 19 nt, Artificial Sequence
  Description of Artificial Sequence: Synthetic oligonucleotide
  Antisense Strand to SEQ ID NO: 470169
cuuuagcacagauuaaccc

SEQ ID NO: 470171 - RNA, 19 nt, Artificial Sequence
  Description of Artificial Sequence: Synthetic oligonucleotide
  Sense strand starting at position 67 of SEQ ID NO: 317174
cgaagaaacuaggaaauuu

SEQ ID NO: 470172 - RNA, 19 nt, Artificial Sequence
  Description of Artificial Sequence: Synthetic oligonucleotide
  Antisense Strand to SEQ ID NO: 470171
aaauuuccuaguuucuucg

SEQ ID NO: 470173 - RNA, 19 nt, Artificial Sequence
  Description of Artificial Sequence: Synthetic oligonucleotide
  Sense strand starting at position 115 of SEQ ID NO: 317174
ugacauuaaccuugaguac

SEQ ID NO: 470174 - RNA, 19 nt, Artificial Sequence
  Description of Artificial Sequence: Synthetic oligonucleotide
  Antisense Strand to SEQ ID NO: 470173
guacucaagguuaauguca

SEQ ID NO: 470175 - RNA, 19 nt, Artificial Sequence
  Description of Artificial Sequence: Synthetic oligonucleotide
  Sense strand starting at position 226 of SEQ ID NO: 317174
gcagaauucuuauuguauu

SEQ ID NO: 470176 - RNA, 19 nt, Artificial Sequence
  Description of Artificial Sequence: Synthetic oligonucleotide
  Antisense Strand to SEQ ID NO: 470175
aauacaauaagaauucugc

SEQ ID NO: 470177 - RNA, 19 nt, Artificial Sequence
  Description of Artificial Sequence: Synthetic oligonucleotide
  Sense strand starting at position 436 of SEQ ID NO: 317174
cgcagauugccuuaaauag

SEQ ID NO: 470178 - RNA, 19 nt, Artificial Sequence
  Description of Artificial Sequence: Synthetic oligonucleotide
  Antisense Strand to SEQ ID NO: 470177
cuauuuaaggcaaucugcg

SEQ ID NO: 470179 - RNA, 19 nt, Artificial Sequence
  Description of Artificial Sequence: Synthetic oligonucleotide
  Sense strand starting at position 506 of SEQ ID NO: 317174
agacgacaucuuugagaua

SEQ ID NO: 470180 - RNA, 19 nt, Artificial Sequence
  Description of Artificial Sequence: Synthetic oligonucleotide
  Antisense Strand to SEQ ID NO: 470179
uaucucaaagaugucgucu

SEQ ID NO: 470181 - RNA, 19 nt, Artificial Sequence
  Description of Artificial Sequence: Synthetic oligonucleotide
  Sense strand starting at position 564 of SEQ ID NO: 317174
ccuuaaguucuuugaaagu

SEQ ID NO: 470182 - RNA, 19 nt, Artificial Sequence
  Description of Artificial Sequence: Synthetic oligonucleotide
  Antisense Strand to SEQ ID NO: 470181
acuuucaaagaacuuaagg

SEQ ID NO: 470183 - RNA, 19 nt, Artificial Sequence
  Description of Artificial Sequence: Synthetic oligonucleotide
  Sense strand starting at position 695 of SEQ ID NO: 317174
auguaagcuuuaccucaga

SEQ ID NO: 470184 - RNA, 19 nt, Artificial Sequence
  Description of Artificial Sequence: Synthetic oligonucleotide
  Antisense Strand to SEQ ID NO: 470183
ucugagguaaagcuuacau

SEQ ID NO: 470185 - RNA, 19 nt, Artificial Sequence
  Description of Artificial Sequence: Synthetic oligonucleotide
  Sense strand starting at position 829 of SEQ ID NO: 317174
auccaaugaucguuugaau

SEQ ID NO: 470186 - RNA, 19 nt, Artificial Sequence
  Description of Artificial Sequence: Synthetic oligonucleotide
  Antisense Strand to SEQ ID NO: 470185
auucaaacgaucauuggau

SEQ ID NO: 470187 - RNA, 19 nt, Artificial Sequence
  Description of Artificial Sequence: Synthetic oligonucleotide
  Sense strand starting at position 873 of SEQ ID NO: 317174
cgacucaaggcuuguuaga

SEQ ID NO: 470188 - RNA, 19 nt, Artificial Sequence
  Description of Artificial Sequence: Synthetic oligonucleotide
  Antisense Strand to SEQ ID NO: 470187
ucuaacaagccuugagucg

SEQ ID NO: 470189 - RNA, 19 nt, Artificial Sequence
  Description of Artificial Sequence: Synthetic oligonucleotide
  Sense strand starting at position 875 of SEQ ID NO: 317174
acucaaggcuuguuagagu

SEQ ID NO: 470190 - RNA, 19 nt, Artificial Sequence
  Description of Artificial Sequence: Synthetic oligonucleotide
  Antisense Strand to SEQ ID NO: 470189
acucuaacaagccuugagu

SEQ ID NO: 470191 - RNA, 19 nt, Artificial Sequence
  Description of Artificial Sequence: Synthetic oligonucleotide
  Sense strand starting at position 1115 of SEQ ID NO: 317174
caaccucugugguugugaa

SEQ ID NO: 470192 - RNA, 19 nt, Artificial Sequence
  Description of Artificial Sequence: Synthetic oligonucleotide
  Antisense Strand to SEQ ID NO: 470191
uucacaaccacagagguug

SEQ ID NO: 470193 - RNA, 19 nt, Artificial Sequence
  Description of Artificial Sequence: Synthetic oligonucleotide
  Sense strand starting at position 1116 of SEQ ID NO: 317174
aaccucugugguugugaau

SEQ ID NO: 470194 - RNA, 19 nt, Artificial Sequence
  Description of Artificial Sequence: Synthetic oligonucleotide
  Antisense Strand to SEQ ID NO: 470193
auucacaaccacagagguu

SEQ ID NO: 470195 - RNA, 19 nt, Artificial Sequence
  Description of Artificial Sequence: Synthetic oligonucleotide
  Sense strand starting at position 1184 of SEQ ID NO: 317174
gcaggaacaugacugagua

SEQ ID NO: 470196 - RNA, 19 nt, Artificial Sequence
  Description of Artificial Sequence: Synthetic oligonucleotide
  Antisense Strand to SEQ ID NO: 470195
uacucagucauguuccugc

SEQ ID NO: 470197 - RNA, 19 nt, Artificial Sequence
  Description of Artificial Sequence: Synthetic oligonucleotide
  Sense strand starting at position 1194 of SEQ ID NO: 317174
gacugaguaggccaaguuu

SEQ ID NO: 470198 - RNA, 19 nt, Artificial Sequence
  Description of Artificial Sequence: Synthetic oligonucleotide
  Antisense Strand to SEQ ID NO: 470197
aaacuuggccuacucaguc

SEQ ID NO: 470199 - RNA, 19 nt, Artificial Sequence
  Description of Artificial Sequence: Synthetic oligonucleotide
  Sense strand starting at position 1331 of SEQ ID NO: 317174
gucugcuuggccucugcaa

SEQ ID NO: 470200 - RNA, 19 nt, Artificial Sequence
  Description of Artificial Sequence: Synthetic oligonucleotide
  Antisense Strand to SEQ ID NO: 470199
uugcagaggccaagcagac

SEQ ID NO: 470201 - RNA, 19 nt, Artificial Sequence
  Description of Artificial Sequence: Synthetic oligonucleotide
  Sense strand starting at position 1370 of SEQ ID NO: 317174
ggaggagagucucaaggaa

SEQ ID NO: 470202 - RNA, 19 nt, Artificial Sequence
  Description of Artificial Sequence: Synthetic oligonucleotide
  Antisense Strand to SEQ ID NO: 470201
uuccuugagacucuccucc

SEQ ID NO: 470203 - RNA, 19 nt, Artificial Sequence
  Description of Artificial Sequence: Synthetic oligonucleotide
  Sense strand starting at position 1470 of SEQ ID NO: 317174
uuguguuugcggucaucuc

SEQ ID NO: 470204 - RNA, 19 nt, Artificial Sequence
  Description of Artificial Sequence: Synthetic oligonucleotide
  Antisense Strand to SEQ ID NO: 470203
gagaugaccgcaaacacaa

SEQ ID NO: 470205 - RNA, 19 nt, Artificial Sequence
  Description of Artificial Sequence: Synthetic oligonucleotide
  Sense strand starting at position 1588 of SEQ ID NO: 317174
cuuggauguuucuuggauu

SEQ ID NO: 470206 - RNA, 19 nt, Artificial Sequence
  Description of Artificial Sequence: Synthetic oligonucleotide
  Antisense Strand to SEQ ID NO: 470205
aauccaagaaacauccaag

SEQ ID NO: 470207 - RNA, 19 nt, Artificial Sequence
  Description of Artificial Sequence: Synthetic oligonucleotide
  Sense strand starting at position 1631 of SEQ ID NO: 317174
gagaauggguguccuaaua

SEQ ID NO: 470208 - RNA, 19 nt, Artificial Sequence
  Description of Artificial Sequence: Synthetic oligonucleotide
  Antisense Strand to SEQ ID NO: 470207
uauuaggacacccauucuc

SEQ ID NO: 470209 - RNA, 19 nt, Artificial Sequence
  Description of Artificial Sequence: Synthetic oligonucleotide
  Sense strand starting at position 1728 of SEQ ID NO: 317174
acggcuuuagcuggaggaa

SEQ ID NO: 470210 - RNA, 19 nt, Artificial Sequence
  Description of Artificial Sequence: Synthetic oligonucleotide
  Antisense Strand to SEQ ID NO: 470209
uuccuccagcuaaagccgu

SEQ ID NO: 470211 - RNA, 19 nt, Artificial Sequence
  Description of Artificial Sequence: Synthetic oligonucleotide
  Sense strand starting at position 2660 of SEQ ID NO: 317174
ucacacaagcccugagaau

SEQ ID NO: 470212 - RNA, 19 nt, Artificial Sequence
  Description of Artificial Sequence: Synthetic oligonucleotide
  Antisense Strand to SEQ ID NO: 470211
auucucagggcuuguguga

SEQ ID NO: 470213 - RNA, 19 nt, Artificial Sequence
  Description of Artificial Sequence: Synthetic oligonucleotide
  Sense strand starting at position 2729 of SEQ ID NO: 317174
ggaauccagccucaaaguu

SEQ ID NO: 470214 - RNA, 19 nt, Artificial Sequence
  Description of Artificial Sequence: Synthetic oligonucleotide
  Antisense Strand to SEQ ID NO: 470213
aacuuugaggcuggauucc

SEQ ID NO: 470215 - RNA, 19 nt, Artificial Sequence
  Description of Artificial Sequence: Synthetic oligonucleotide
  Sense strand starting at position 2766 of SEQ ID NO: 317174
gccagacccggagaguuua

SEQ ID NO: 470216 - RNA, 19 nt, Artificial Sequence
  Description of Artificial Sequence: Synthetic oligonucleotide
  Antisense Strand to SEQ ID NO: 470215
uaaacucuccgggucuggc

SEQ ID NO: 470217 - RNA, 19 nt, Artificial Sequence
  Description of Artificial Sequence: Synthetic oligonucleotide
  Sense strand starting at position 2779 of SEQ ID NO: 317174
aguuuaaagcaucaagucu

SEQ ID NO: 470218 - RNA, 19 nt, Artificial Sequence
  Description of Artificial Sequence: Synthetic oligonucleotide
  Antisense Strand to SEQ ID NO: 470217
agacuugaugcuuuaaacu

SEQ ID NO: 470219 - RNA, 19 nt, Artificial Sequence
  Description of Artificial Sequence: Synthetic oligonucleotide
  Sense strand starting at position 2786 of SEQ ID NO: 317174
agcaucaagucuccagauu

SEQ ID NO: 470220 - RNA, 19 nt, Artificial Sequence
  Description of Artificial Sequence: Synthetic oligonucleotide
  Antisense Strand to SEQ ID NO: 470219
aaucuggagacuugaugcu

SEQ ID NO: 470221 - RNA, 19 nt, Artificial Sequence
  Description of Artificial Sequence: Synthetic oligonucleotide
  Sense strand starting at position 2787 of SEQ ID NO: 317174
gcaucaagucuccagauug

SEQ ID NO: 470222 - RNA, 19 nt, Artificial Sequence
  Description of Artificial Sequence: Synthetic oligonucleotide
  Antisense Strand to SEQ ID NO: 470221
caaucuggagacuugaugc

SEQ ID NO: 470223 - RNA, 19 nt, Artificial Sequence
  Description of Artificial Sequence: Synthetic oligonucleotide
  Sense strand starting at position 3467 of SEQ ID NO: 317174
ggaaauacugcauaagcca

SEQ ID NO: 470224 - RNA, 19 nt, Artificial Sequence
  Description of Artificial Sequence: Synthetic oligonucleotide
  Antisense Strand to SEQ ID NO: 470223
uggcuuaugcaguauuucc

SEQ ID NO: 470225 - RNA, 19 nt, Artificial Sequence
  Description of Artificial Sequence: Synthetic oligonucleotide
  Sense strand starting at position 3567 of SEQ ID NO: 317174
uuaauugcaguuuagucaa

SEQ ID NO: 470226 - RNA, 19 nt, Artificial Sequence
  Description of Artificial Sequence: Synthetic oligonucleotide
  Antisense Strand to SEQ ID NO: 470225
uugacuaaacugcaauuaa

SEQ ID NO: 470227 - RNA, 19 nt, Artificial Sequence
  Description of Artificial Sequence: Synthetic oligonucleotide
  Sense strand starting at position 3570 of SEQ ID NO: 317174
auugcaguuuagucaauaa

SEQ ID NO: 470228 - RNA, 19 nt, Artificial Sequence
  Description of Artificial Sequence: Synthetic oligonucleotide
  Antisense Strand to SEQ ID NO: 470227
uuauugacuaaacugcaau

SEQ ID NO: 470229 - RNA, 19 nt, Artificial Sequence
  Description of Artificial Sequence: Synthetic oligonucleotide
  Sense strand starting at position 3794 of SEQ ID NO: 317174
agugaaguccuaugcacug

SEQ ID NO: 470230 - RNA, 19 nt, Artificial Sequence
  Description of Artificial Sequence: Synthetic oligonucleotide
  Antisense Strand to SEQ ID NO: 470229
cagugcauaggacuucacu

SEQ ID NO: 470231 - RNA, 19 nt, Artificial Sequence
  Description of Artificial Sequence: Synthetic oligonucleotide
  Sense strand starting at position 3858 of SEQ ID NO: 317174
ggguaaccucuuuggaaga

SEQ ID NO: 470232 - RNA, 19 nt, Artificial Sequence
  Description of Artificial Sequence: Synthetic oligonucleotide
  Antisense Strand to SEQ ID NO: 470231
ucuuccaaagagguuaccc

SEQ ID NO: 470233 - RNA, 19 nt, Artificial Sequence
  Description of Artificial Sequence: Synthetic oligonucleotide
  Sense strand starting at position 3874 of SEQ ID NO: 317174
agaauugggucucuagguu

SEQ ID NO: 470234 - RNA, 19 nt, Artificial Sequence
  Description of Artificial Sequence: Synthetic oligonucleotide
  Antisense Strand to SEQ ID NO: 470233
aaccuagagacccaauucu

SEQ ID NO: 470235 - RNA, 19 nt, Artificial Sequence
  Description of Artificial Sequence: Synthetic oligonucleotide
  Sense strand starting at position 3940 of SEQ ID NO: 317174
aguucuuacuuugugauaa

SEQ ID NO: 470236 - RNA, 19 nt, Artificial Sequence
  Description of Artificial Sequence: Synthetic oligonucleotide
  Antisense Strand to SEQ ID NO: 470235
uuaucacaaaguaagaacu

SEQ ID NO: 470237 - RNA, 19 nt, Artificial Sequence
  Description of Artificial Sequence: Synthetic oligonucleotide
  Sense strand starting at position 3944 of SEQ ID NO: 317174
cuuacuuugugauaauuug

SEQ ID NO: 470238 - RNA, 19 nt, Artificial Sequence
  Description of Artificial Sequence: Synthetic oligonucleotide
  Antisense Strand to SEQ ID NO: 470237
caaauuaucacaaaguaag

SEQ ID NO: 470239 - RNA, 19 nt, Artificial Sequence
  Description of Artificial Sequence: Synthetic oligonucleotide
  Sense strand starting at position 3950 of SEQ ID NO: 317174
uugugauaauuugaugcaa

SEQ ID NO: 470240 - RNA, 19 nt, Artificial Sequence
  Description of Artificial Sequence: Synthetic oligonucleotide
  Antisense Strand to SEQ ID NO: 470239
uugcaucaaauuaucacaa

SEQ ID NO: 470241 - RNA, 19 nt, Artificial Sequence
  Description of Artificial Sequence: Synthetic oligonucleotide
  Sense strand starting at position 3961 of SEQ ID NO: 317174
ugaugcaacccguaaagaa

SEQ ID NO: 470242 - RNA, 19 nt, Artificial Sequence
  Description of Artificial Sequence: Synthetic oligonucleotide
  Antisense Strand to SEQ ID NO: 470241
uucuuuacggguugcauca

SEQ ID NO: 470243 - RNA, 19 nt, Artificial Sequence
  Description of Artificial Sequence: Synthetic oligonucleotide
  Sense strand starting at position 3981 of SEQ ID NO: 317174
gcuugaacauacccaguua

SEQ ID NO: 470244 - RNA, 19 nt, Artificial Sequence
  Description of Artificial Sequence: Synthetic oligonucleotide
  Antisense Strand to SEQ ID NO: 470243
uaacuggguauguucaagc

SEQ ID NO: 470245 - RNA, 19 nt, Artificial Sequence
  Description of Artificial Sequence: Synthetic oligonucleotide
  Sense strand starting at position 365 of SEQ ID NO: 317175
ugggacuccuuauccaaau

SEQ ID NO: 470246 - RNA, 19 nt, Artificial Sequence
  Description of Artificial Sequence: Synthetic oligonucleotide
  Antisense Strand to SEQ ID NO: 470245
auuuggauaaggaguccca

SEQ ID NO: 470247 - RNA, 19 nt, Artificial Sequence
  Description of Artificial Sequence: Synthetic oligonucleotide
  Sense strand starting at position 366 of SEQ ID NO: 317175
gggacuccuuauccaaaug

SEQ ID NO: 470248 - RNA, 19 nt, Artificial Sequence
  Description of Artificial Sequence: Synthetic oligonucleotide
  Antisense Strand to SEQ ID NO: 470247
cauuuggauaaggaguccc

SEQ ID NO: 470249 - RNA, 19 nt, Artificial Sequence
  Description of Artificial Sequence: Synthetic oligonucleotide
  Sense strand starting at position 663 of SEQ ID NO: 317175
aguaaaucaagacguauga

SEQ ID NO: 470250 - RNA, 19 nt, Artificial Sequence
  Description of Artificial Sequence: Synthetic oligonucleotide
  Antisense Strand to SEQ ID NO: 470249
ucauacgucuugauuuacu

SEQ ID NO: 470251 - RNA, 19 nt, Artificial Sequence
  Description of Artificial Sequence: Synthetic oligonucleotide
  Sense strand starting at position 667 of SEQ ID NO: 317175
aaucaagacguaugauaua

SEQ ID NO: 470252 - RNA, 19 nt, Artificial Sequence
  Description of Artificial Sequence: Synthetic oligonucleotide
  Antisense Strand to SEQ ID NO: 470251
uauaucauacgucuugauu

SEQ ID NO: 470253 - RNA, 19 nt, Artificial Sequence
  Description of Artificial Sequence: Synthetic oligonucleotide
  Sense strand starting at position 746 of SEQ ID NO: 317175
uuacguacuccacauguaa

SEQ ID NO: 470254 - RNA, 19 nt, Artificial Sequence
  Description of Artificial Sequence: Synthetic oligonucleotide
  Antisense Strand to SEQ ID NO: 470253
uuacauguggaguacguaa

SEQ ID NO: 470255 - RNA, 19 nt, Artificial Sequence
  Description of Artificial Sequence: Synthetic oligonucleotide
  Sense strand starting at position 793 of SEQ ID NO: 317175
cugauuaauuuggaacuca

SEQ ID NO: 470256 - RNA, 19 nt, Artificial Sequence
  Description of Artificial Sequence: Synthetic oligonucleotide
  Antisense Strand to SEQ ID NO: 470255
ugaguuccaaauuaaucag

SEQ ID NO: 470257 - RNA, 19 nt, Artificial Sequence
  Description of Artificial Sequence: Synthetic oligonucleotide
  Sense strand starting at position 819 of SEQ ID NO: 317175
gguuaagucccuuaauuga

SEQ ID NO: 470258 - RNA, 19 nt, Artificial Sequence
  Description of Artificial Sequence: Synthetic oligonucleotide
  Antisense Strand to SEQ ID NO: 470257
ucaauuaagggacuuaacc

SEQ ID NO: 470259 - RNA, 19 nt, Artificial Sequence
  Description of Artificial Sequence: Synthetic oligonucleotide
  Sense strand starting at position 919 of SEQ ID NO: 317175
ggaaguggguucuuucaca

SEQ ID NO: 470260 - RNA, 19 nt, Artificial Sequence
  Description of Artificial Sequence: Synthetic oligonucleotide
  Antisense Strand to SEQ ID NO: 470259
ugugaaagaacccacuucc

SEQ ID NO: 470261 - RNA, 19 nt, Artificial Sequence
  Description of Artificial Sequence: Synthetic oligonucleotide
  Sense strand starting at position 956 of SEQ ID NO: 317175
ucucgaaucuaugcccaau

SEQ ID NO: 470262 - RNA, 19 nt, Artificial Sequence
  Description of Artificial Sequence: Synthetic oligonucleotide
  Antisense Strand to SEQ ID NO: 470261
auugggcauagauucgaga

SEQ ID NO: 470263 - RNA, 19 nt, Artificial Sequence
  Description of Artificial Sequence: Synthetic oligonucleotide
  Sense strand starting at position 958 of SEQ ID NO: 317175
ucgaaucuaugcccaauga

SEQ ID NO: 470264 - RNA, 19 nt, Artificial Sequence
  Description of Artificial Sequence: Synthetic oligonucleotide
  Antisense Strand to SEQ ID NO: 470263
ucauugggcauagauucga

SEQ ID NO: 470265 - RNA, 19 nt, Artificial Sequence
  Description of Artificial Sequence: Synthetic oligonucleotide
  Sense strand starting at position 959 of SEQ ID NO: 317175
cgaaucuaugcccaaugau

SEQ ID NO: 470266 - RNA, 19 nt, Artificial Sequence
  Description of Artificial Sequence: Synthetic oligonucleotide
  Antisense Strand to SEQ ID NO: 470265
aucauugggcauagauucg

SEQ ID NO: 470267 - RNA, 19 nt, Artificial Sequence
  Description of Artificial Sequence: Synthetic oligonucleotide
  Sense strand starting at position 1017 of SEQ ID NO: 317175
agucauuucugagcuucca

SEQ ID NO: 470268 - RNA, 19 nt, Artificial Sequence
  Description of Artificial Sequence: Synthetic oligonucleotide
  Antisense Strand to SEQ ID NO: 470267
uggaagcucagaaaugacu

SEQ ID NO: 470269 - RNA, 19 nt, Artificial Sequence
  Description of Artificial Sequence: Synthetic oligonucleotide
  Sense strand starting at position 1311 of SEQ ID NO: 317175
gugggaucaugauuauucu

SEQ ID NO: 470270 - RNA, 19 nt, Artificial Sequence
  Description of Artificial Sequence: Synthetic oligonucleotide
  Antisense Strand to SEQ ID NO: 470269
agaauaaucaugaucccac

SEQ ID NO: 470271 - RNA, 19 nt, Artificial Sequence
  Description of Artificial Sequence: Synthetic oligonucleotide
  Sense strand starting at position 1314 of SEQ ID NO: 317175
ggaucaugauuauucucau

SEQ ID NO: 470272 - RNA, 19 nt, Artificial Sequence
  Description of Artificial Sequence: Synthetic oligonucleotide
  Antisense Strand to SEQ ID NO: 470271
augagaauaaucaugaucc

SEQ ID NO: 470273 - RNA, 19 nt, Artificial Sequence
  Description of Artificial Sequence: Synthetic oligonucleotide
  Sense strand starting at position 1522 of SEQ ID NO: 317175
acccuacaaccguaugaga

SEQ ID NO: 470274 - RNA, 19 nt, Artificial Sequence
  Description of Artificial Sequence: Synthetic oligonucleotide
  Antisense Strand to SEQ ID NO: 470273
ucucauacgguuguagggu

SEQ ID NO: 470275 - RNA, 19 nt, Artificial Sequence
  Description of Artificial Sequence: Synthetic oligonucleotide
  Sense strand starting at position 1524 of SEQ ID NO: 317175
ccuacaaccguaugagaaa

SEQ ID NO: 470276 - RNA, 19 nt, Artificial Sequence
  Description of Artificial Sequence: Synthetic oligonucleotide
  Antisense Strand to SEQ ID NO: 470275
uuucucauacgguuguagg

SEQ ID NO: 470277 - RNA, 19 nt, Artificial Sequence
  Description of Artificial Sequence: Synthetic oligonucleotide
  Sense strand starting at position 1568 of SEQ ID NO: 317175
acggcauccuuccuagaaa

SEQ ID NO: 470278 - RNA, 19 nt, Artificial Sequence
  Description of Artificial Sequence: Synthetic oligonucleotide
  Antisense Strand to SEQ ID NO: 470277
uuucuaggaaggaugccgu

SEQ ID NO: 470279 - RNA, 19 nt, Artificial Sequence
  Description of Artificial Sequence: Synthetic oligonucleotide
  Sense strand starting at position 1616 of SEQ ID NO: 317175
cgcuuaagacaauaccauu

SEQ ID NO: 470280 - RNA, 19 nt, Artificial Sequence
  Description of Artificial Sequence: Synthetic oligonucleotide
  Antisense Strand to SEQ ID NO: 470279
aaugguauugucuuaagcg

SEQ ID NO: 470281 - RNA, 19 nt, Artificial Sequence
  Description of Artificial Sequence: Synthetic oligonucleotide
  Sense strand starting at position 2518 of SEQ ID NO: 317175
ggcuaaguaguagaaagua

SEQ ID NO: 470282 - RNA, 19 nt, Artificial Sequence
  Description of Artificial Sequence: Synthetic oligonucleotide
  Antisense Strand to SEQ ID NO: 470281
uacuuucuacuacuuagcc

SEQ ID NO: 470283 - RNA, 19 nt, Artificial Sequence
  Description of Artificial Sequence: Synthetic oligonucleotide
  Sense strand starting at position 2666 of SEQ ID NO: 317175
uacauauaggguuguuaga

SEQ ID NO: 470284 - RNA, 19 nt, Artificial Sequence
  Description of Artificial Sequence: Synthetic oligonucleotide
  Antisense Strand to SEQ ID NO: 470283
ucuaacaacccuauaugua

SEQ ID NO: 470285 - RNA, 19 nt, Artificial Sequence
  Description of Artificial Sequence: Synthetic oligonucleotide
  Sense strand starting at position 2668 of SEQ ID NO: 317175
cauauaggguuguuagaau

SEQ ID NO: 470286 - RNA, 19 nt, Artificial Sequence
  Description of Artificial Sequence: Synthetic oligonucleotide
  Antisense Strand to SEQ ID NO: 470285
auucuaacaacccuauaug

SEQ ID NO: 470287 - RNA, 19 nt, Artificial Sequence
  Description of Artificial Sequence: Synthetic oligonucleotide
  Sense strand starting at position 2814 of SEQ ID NO: 317175
gugccauguacugcaaguu

SEQ ID NO: 470288 - RNA, 19 nt, Artificial Sequence
  Description of Artificial Sequence: Synthetic oligonucleotide
  Antisense Strand to SEQ ID NO: 470287
aacuugcaguacauggcac

SEQ ID NO: 470289 - RNA, 19 nt, Artificial Sequence
  Description of Artificial Sequence: Synthetic oligonucleotide
  Sense strand starting at position 2822 of SEQ ID NO: 317175
uacugcaaguuauuaguga

SEQ ID NO: 470290 - RNA, 19 nt, Artificial Sequence
  Description of Artificial Sequence: Synthetic oligonucleotide
  Antisense Strand to SEQ ID NO: 470289
ucacuaauaacuugcagua

SEQ ID NO: 470291 - RNA, 19 nt, Artificial Sequence
  Description of Artificial Sequence: Synthetic oligonucleotide
  Sense strand starting at position 2829 of SEQ ID NO: 317175
aguuauuagugacuaaaca

SEQ ID NO: 470292 - RNA, 19 nt, Artificial Sequence
  Description of Artificial Sequence: Synthetic oligonucleotide
  Antisense Strand to SEQ ID NO: 470291
uguuuagucacuaauaacu

SEQ ID NO: 470293 - RNA, 19 nt, Artificial Sequence
  Description of Artificial Sequence: Synthetic oligonucleotide
  Sense strand starting at position 3087 of SEQ ID NO: 317175
gcgucacuuucuucuauuu

SEQ ID NO: 470294 - RNA, 19 nt, Artificial Sequence
  Description of Artificial Sequence: Synthetic oligonucleotide
  Antisense Strand to SEQ ID NO: 470293
aaauagaagaaagugacgc

SEQ ID NO: 470295 - RNA, 19 nt, Artificial Sequence
  Description of Artificial Sequence: Synthetic oligonucleotide
  Sense strand starting at position 3243 of SEQ ID NO: 317175
ugugaugccuucccugaaa

SEQ ID NO: 470296 - RNA, 19 nt, Artificial Sequence
  Description of Artificial Sequence: Synthetic oligonucleotide
  Antisense Strand to SEQ ID NO: 470295
uuucagggaaggcaucaca

SEQ ID NO: 470297 - RNA, 19 nt, Artificial Sequence
  Description of Artificial Sequence: Synthetic oligonucleotide
  Sense strand starting at position 3245 of SEQ ID NO: 317175
ugaugccuucccugaaaua

SEQ ID NO: 470298 - RNA, 19 nt, Artificial Sequence
  Description of Artificial Sequence: Synthetic oligonucleotide
  Antisense Strand to SEQ ID NO: 470297
uauuucagggaaggcauca

SEQ ID NO: 470299 - RNA, 19 nt, Artificial Sequence
  Description of Artificial Sequence: Synthetic oligonucleotide
  Sense strand starting at position 3396 of SEQ ID NO: 317175
cagagauguuggcuuguaa

SEQ ID NO: 470300 - RNA, 19 nt, Artificial Sequence
  Description of Artificial Sequence: Synthetic oligonucleotide
  Antisense Strand to SEQ ID NO: 470299
uuacaagccaacaucucug

SEQ ID NO: 470301 - RNA, 19 nt, Artificial Sequence
  Description of Artificial Sequence: Synthetic oligonucleotide
  Sense strand starting at position 3408 of SEQ ID NO: 317175
cuuguaagucuuuauagaa

SEQ ID NO: 470302 - RNA, 19 nt, Artificial Sequence
  Description of Artificial Sequence: Synthetic oligonucleotide
  Antisense Strand to SEQ ID NO: 470301
uucuauaaagacuuacaag

SEQ ID NO: 470303 - RNA, 19 nt, Artificial Sequence
  Description of Artificial Sequence: Synthetic oligonucleotide
  Sense strand starting at position 3439 of SEQ ID NO: 317175
cugagauaaucaguauuag

SEQ ID NO: 470304 - RNA, 19 nt, Artificial Sequence
  Description of Artificial Sequence: Synthetic oligonucleotide
  Antisense Strand to SEQ ID NO: 470303
cuaauacugauuaucucag

SEQ ID NO: 470305 - RNA, 19 nt, Artificial Sequence
  Description of Artificial Sequence: Synthetic oligonucleotide
  Sense strand starting at position 3538 of SEQ ID NO: 317175
agaccacuguucuuccaga

SEQ ID NO: 470306 - RNA, 19 nt, Artificial Sequence
  Description of Artificial Sequence: Synthetic oligonucleotide
  Antisense Strand to SEQ ID NO: 470305
ucuggaagaacaguggucu

SEQ ID NO: 470307 - RNA, 19 nt, Artificial Sequence
  Description of Artificial Sequence: Synthetic oligonucleotide
  Sense strand starting at position 3587 of SEQ ID NO: 317175
aguugaugucaccacauca

SEQ ID NO: 470308 - RNA, 19 nt, Artificial Sequence
  Description of Artificial Sequence: Synthetic oligonucleotide
  Antisense Strand to SEQ ID NO: 470307
ugauguggugacaucaacu

SEQ ID NO: 470309 - RNA, 19 nt, Artificial Sequence
  Description of Artificial Sequence: Synthetic oligonucleotide
  Sense strand starting at position 3643 of SEQ ID NO: 317175
ccagucacucuccauguua

SEQ ID NO: 470310 - RNA, 19 nt, Artificial Sequence
  Description of Artificial Sequence: Synthetic oligonucleotide
  Antisense Strand to SEQ ID NO: 470309
uaacauggagagugacugg

SEQ ID NO: 470311 - RNA, 19 nt, Artificial Sequence
  Description of Artificial Sequence: Synthetic oligonucleotide
  Sense strand starting at position 3702 of SEQ ID NO: 317175
caaugauuuguuuguguau

SEQ ID NO: 470312 - RNA, 19 nt, Artificial Sequence
  Description of Artificial Sequence: Synthetic oligonucleotide
  Antisense Strand to SEQ ID NO: 470311
auacacaaacaaaucauug

SEQ ID NO: 470313 - RNA, 19 nt, Artificial Sequence
  Description of Artificial Sequence: Synthetic oligonucleotide
  Sense strand starting at position 3747 of SEQ ID NO: 317175
gacaguaggagccguauuu

SEQ ID NO: 470314 - RNA, 19 nt, Artificial Sequence
  Description of Artificial Sequence: Synthetic oligonucleotide
  Antisense Strand to SEQ ID NO: 470313
aaauacggcuccuacuguc

SEQ ID NO: 470315 - RNA, 19 nt, Artificial Sequence
  Description of Artificial Sequence: Synthetic oligonucleotide
  Sense strand starting at position 3757 of SEQ ID NO: 317175
gccguauuugccuagcauc

SEQ ID NO: 470316 - RNA, 19 nt, Artificial Sequence
  Description of Artificial Sequence: Synthetic oligonucleotide
  Antisense Strand to SEQ ID NO: 470315
gaugcuaggcaaauacggc

SEQ ID NO: 470317 - RNA, 19 nt, Artificial Sequence
  Description of Artificial Sequence: Synthetic oligonucleotide
  Sense strand starting at position 3775 of SEQ ID NO: 317175
cagugauuggcacaugauc

SEQ ID NO: 470318 - RNA, 19 nt, Artificial Sequence
  Description of Artificial Sequence: Synthetic oligonucleotide
  Antisense Strand to SEQ ID NO: 470317
gaucaugugccaaucacug

SEQ ID NO: 470319 - RNA, 19 nt, Artificial Sequence
  Description of Artificial Sequence: Synthetic oligonucleotide
  Sense strand starting at position 3777 of SEQ ID NO: 317175
gugauuggcacaugaucau

SEQ ID NO: 470320 - RNA, 19 nt, Artificial Sequence
  Description of Artificial Sequence: Synthetic oligonucleotide
  Antisense Strand to SEQ ID NO: 470319
augaucaugugccaaucac

SEQ ID NO: 470321 - RNA, 19 nt, Artificial Sequence
  Description of Artificial Sequence: Synthetic oligonucleotide
  Sense strand starting at position 3910 of SEQ ID NO: 317175
aagacauucuaggugguga

SEQ ID NO: 470322 - RNA, 19 nt, Artificial Sequence
  Description of Artificial Sequence: Synthetic oligonucleotide
  Antisense Strand to SEQ ID NO: 470321
ucaccaccuagaaugucuu

SEQ ID NO: 470323 - RNA, 19 nt, Artificial Sequence
  Description of Artificial Sequence: Synthetic oligonucleotide
  Sense strand starting at position 3983 of SEQ ID NO: 317175
cucuauugucuagaccgua

SEQ ID NO: 470324 - RNA, 19 nt, Artificial Sequence
  Description of Artificial Sequence: Synthetic oligonucleotide
  Antisense Strand to SEQ ID NO: 470323
uacggucuagacaauagag

SEQ ID NO: 470325 - RNA, 19 nt, Artificial Sequence
  Description of Artificial Sequence: Synthetic oligonucleotide
  Sense strand starting at position 181 of SEQ ID NO: 317176
ugggacuccuuauccaaau

SEQ ID NO: 470326 - RNA, 19 nt, Artificial Sequence
  Description of Artificial Sequence: Synthetic oligonucleotide
  Antisense Strand to SEQ ID NO: 470325
auuuggauaaggaguccca

SEQ ID NO: 470327 - RNA, 19 nt, Artificial Sequence
  Description of Artificial Sequence: Synthetic oligonucleotide
  Sense strand starting at position 182 of SEQ ID NO: 317176
gggacuccuuauccaaaug

SEQ ID NO: 470328 - RNA, 19 nt, Artificial Sequence
  Description of Artificial Sequence: Synthetic oligonucleotide
  Antisense Strand to SEQ ID NO: 470327
cauuuggauaaggaguccc

SEQ ID NO: 470329 - RNA, 19 nt, Artificial Sequence
  Description of Artificial Sequence: Synthetic oligonucleotide
  Sense strand starting at position 479 of SEQ ID NO: 317176
aguaaaucaagacguauga

SEQ ID NO: 470330 - RNA, 19 nt, Artificial Sequence
  Description of Artificial Sequence: Synthetic oligonucleotide
  Antisense Strand to SEQ ID NO: 470329
ucauacgucuugauuuacu

SEQ ID NO: 470331 - RNA, 19 nt, Artificial Sequence
  Description of Artificial Sequence: Synthetic oligonucleotide
  Sense strand starting at position 483 of SEQ ID NO: 317176
aaucaagacguaugauaua

SEQ ID NO: 470332 - RNA, 19 nt, Artificial Sequence
  Description of Artificial Sequence: Synthetic oligonucleotide
  Antisense Strand to SEQ ID NO: 470331
uauaucauacgucuugauu

SEQ ID NO: 470333 - RNA, 19 nt, Artificial Sequence
  Description of Artificial Sequence: Synthetic oligonucleotide
  Sense strand starting at position 562 of SEQ ID NO: 317176
uuacguacuccacauguaa

SEQ ID NO: 470334 - RNA, 19 nt, Artificial Sequence
  Description of Artificial Sequence: Synthetic oligonucleotide
  Antisense Strand to SEQ ID NO: 470333
uuacauguggaguacguaa

SEQ ID NO: 470335 - RNA, 19 nt, Artificial Sequence
  Description of Artificial Sequence: Synthetic oligonucleotide
  Sense strand starting at position 609 of SEQ ID NO: 317176
cugauuaauuuggaacuca

SEQ ID NO: 470336 - RNA, 19 nt, Artificial Sequence
  Description of Artificial Sequence: Synthetic oligonucleotide
  Antisense Strand to SEQ ID NO: 470335
ugaguuccaaauuaaucag

SEQ ID NO: 470337 - RNA, 19 nt, Artificial Sequence
  Description of Artificial Sequence: Synthetic oligonucleotide
  Sense strand starting at position 635 of SEQ ID NO: 317176
gguuaagucccuuaauuga

SEQ ID NO: 470338 - RNA, 19 nt, Artificial Sequence
  Description of Artificial Sequence: Synthetic oligonucleotide
  Antisense Strand to SEQ ID NO: 470337
ucaauuaagggacuuaacc

SEQ ID NO: 470339 - RNA, 19 nt, Artificial Sequence
  Description of Artificial Sequence: Synthetic oligonucleotide
  Sense strand starting at position 735 of SEQ ID NO: 317176
ggaaguggguucuuucaca

SEQ ID NO: 470340 - RNA, 19 nt, Artificial Sequence
  Description of Artificial Sequence: Synthetic oligonucleotide
  Antisense Strand to SEQ ID NO: 470339
ugugaaagaacccacuucc

SEQ ID NO: 470341 - RNA, 19 nt, Artificial Sequence
  Description of Artificial Sequence: Synthetic oligonucleotide
  Sense strand starting at position 774 of SEQ ID NO: 317176
ucgaaucuaugcccaauga

SEQ ID NO: 470342 - RNA, 19 nt, Artificial Sequence
  Description of Artificial Sequence: Synthetic oligonucleotide
  Antisense Strand to SEQ ID NO: 470341
ucauugggcauagauucga

SEQ ID NO: 470343 - RNA, 19 nt, Artificial Sequence
  Description of Artificial Sequence: Synthetic oligonucleotide
  Sense strand starting at position 775 of SEQ ID NO: 317176
cgaaucuaugcccaaugau

SEQ ID NO: 470344 - RNA, 19 nt, Artificial Sequence
  Description of Artificial Sequence: Synthetic oligonucleotide
  Antisense Strand to SEQ ID NO: 470343
aucauugggcauagauucg

SEQ ID NO: 470345 - RNA, 19 nt, Artificial Sequence
  Description of Artificial Sequence: Synthetic oligonucleotide
  Sense strand starting at position 833 of SEQ ID NO: 317176
agucauuucugagcuucca

SEQ ID NO: 470346 - RNA, 19 nt, Artificial Sequence
  Description of Artificial Sequence: Synthetic oligonucleotide
  Antisense Strand to SEQ ID NO: 470345
uggaagcucagaaaugacu

SEQ ID NO: 470347 - RNA, 19 nt, Artificial Sequence
  Description of Artificial Sequence: Synthetic oligonucleotide
  Sense strand starting at position 1127 of SEQ ID NO: 317176
gugggaucaugauuauucu

SEQ ID NO: 470348 - RNA, 19 nt, Artificial Sequence
  Description of Artificial Sequence: Synthetic oligonucleotide
  Antisense Strand to SEQ ID NO: 470347
agaauaaucaugaucccac

SEQ ID NO: 470349 - RNA, 19 nt, Artificial Sequence
  Description of Artificial Sequence: Synthetic oligonucleotide
  Sense strand starting at position 1130 of SEQ ID NO: 317176
ggaucaugauuauucucau

SEQ ID NO: 470350 - RNA, 19 nt, Artificial Sequence
  Description of Artificial Sequence: Synthetic oligonucleotide
  Antisense Strand to SEQ ID NO: 470349
augagaauaaucaugaucc

SEQ ID NO: 470351 - RNA, 19 nt, Artificial Sequence
  Description of Artificial Sequence: Synthetic oligonucleotide
  Sense strand starting at position 1338 of SEQ ID NO: 317176
acccuacaaccguaugaga

SEQ ID NO: 470352 - RNA, 19 nt, Artificial Sequence
  Description of Artificial Sequence: Synthetic oligonucleotide
  Antisense Strand to SEQ ID NO: 470351
ucucauacgguuguagggu

SEQ ID NO: 470353 - RNA, 19 nt, Artificial Sequence
  Description of Artificial Sequence: Synthetic oligonucleotide
  Sense strand starting at position 1340 of SEQ ID NO: 317176
ccuacaaccguaugagaaa

SEQ ID NO: 470354 - RNA, 19 nt, Artificial Sequence
  Description of Artificial Sequence: Synthetic oligonucleotide
  Antisense Strand to SEQ ID NO: 470353
uuucucauacgguuguagg

SEQ ID NO: 470355 - RNA, 19 nt, Artificial Sequence
  Description of Artificial Sequence: Synthetic oligonucleotide
  Sense strand starting at position 1384 of SEQ ID NO: 317176
acggcauccuuccuagaaa

SEQ ID NO: 470356 - RNA, 19 nt, Artificial Sequence
  Description of Artificial Sequence: Synthetic oligonucleotide
  Antisense Strand to SEQ ID NO: 470355
uuucuaggaaggaugccgu

SEQ ID NO: 470357 - RNA, 19 nt, Artificial Sequence
  Description of Artificial Sequence: Synthetic oligonucleotide
  Sense strand starting at position 1432 of SEQ ID NO: 317176
cgcuuaagacaauaccauu

SEQ ID NO: 470358 - RNA, 19 nt, Artificial Sequence
  Description of Artificial Sequence: Synthetic oligonucleotide
  Antisense Strand to SEQ ID NO: 470357
aaugguauugucuuaagcg

SEQ ID NO: 470359 - RNA, 19 nt, Artificial Sequence
  Description of Artificial Sequence: Synthetic oligonucleotide
  Sense strand starting at position 2334 of SEQ ID NO: 317176
ggcuaaguaguagaaagua

SEQ ID NO: 470360 - RNA, 19 nt, Artificial Sequence
  Description of Artificial Sequence: Synthetic oligonucleotide
  Antisense Strand to SEQ ID NO: 470359
uacuuucuacuacuuagcc

SEQ ID NO: 470361 - RNA, 19 nt, Artificial Sequence
  Description of Artificial Sequence: Synthetic oligonucleotide
  Sense strand starting at position 2482 of SEQ ID NO: 317176
uacauauaggguuguuaga

SEQ ID NO: 470362 - RNA, 19 nt, Artificial Sequence
  Description of Artificial Sequence: Synthetic oligonucleotide
  Antisense Strand to SEQ ID NO: 470361
ucuaacaacccuauaugua

SEQ ID NO: 470363 - RNA, 19 nt, Artificial Sequence
  Description of Artificial Sequence: Synthetic oligonucleotide
  Sense strand starting at position 2484 of SEQ ID NO: 317176
cauauaggguuguuagaau

SEQ ID NO: 470364 - RNA, 19 nt, Artificial Sequence
  Description of Artificial Sequence: Synthetic oligonucleotide
  Antisense Strand to SEQ ID NO: 470363
auucuaacaacccuauaug

SEQ ID NO: 470365 - RNA, 19 nt, Artificial Sequence
  Description of Artificial Sequence: Synthetic oligonucleotide
  Sense strand starting at position 2630 of SEQ ID NO: 317176
gugccauguacugcaaguu

SEQ ID NO: 470366 - RNA, 19 nt, Artificial Sequence
  Description of Artificial Sequence: Synthetic oligonucleotide
  Antisense Strand to SEQ ID NO: 470365
aacuugcaguacauggcac

SEQ ID NO: 470367 - RNA, 19 nt, Artificial Sequence
  Description of Artificial Sequence: Synthetic oligonucleotide
  Sense strand starting at position 2638 of SEQ ID NO: 317176
uacugcaaguuauuaguga

SEQ ID NO: 470368 - RNA, 19 nt, Artificial Sequence
  Description of Artificial Sequence: Synthetic oligonucleotide
  Antisense Strand to SEQ ID NO: 470367
ucacuaauaacuugcagua

SEQ ID NO: 470369 - RNA, 19 nt, Artificial Sequence
  Description of Artificial Sequence: Synthetic oligonucleotide
  Sense strand starting at position 2645 of SEQ ID NO: 317176
aguuauuagugacuaaaca

SEQ ID NO: 470370 - RNA, 19 nt, Artificial Sequence
  Description of Artificial Sequence: Synthetic oligonucleotide
  Antisense Strand to SEQ ID NO: 470369
uguuuagucacuaauaacu

SEQ ID NO: 470371 - RNA, 19 nt, Artificial Sequence
  Description of Artificial Sequence: Synthetic oligonucleotide
  Sense strand starting at position 2903 of SEQ ID NO: 317176
gcgucacuuucuucuauuu

SEQ ID NO: 470372 - RNA, 19 nt, Artificial Sequence
  Description of Artificial Sequence: Synthetic oligonucleotide
  Antisense Strand to SEQ ID NO: 470371
aaauagaagaaagugacgc

SEQ ID NO: 470373 - RNA, 19 nt, Artificial Sequence
  Description of Artificial Sequence: Synthetic oligonucleotide
  Sense strand starting at position 3059 of SEQ ID NO: 317176
ugugaugccuucccugaaa

SEQ ID NO: 470374 - RNA, 19 nt, Artificial Sequence
  Description of Artificial Sequence: Synthetic oligonucleotide
  Antisense Strand to SEQ ID NO: 470373
uuucagggaaggcaucaca

SEQ ID NO: 470375 - RNA, 19 nt, Artificial Sequence
  Description of Artificial Sequence: Synthetic oligonucleotide
  Sense strand starting at position 3061 of SEQ ID NO: 317176
ugaugccuucccugaaaua

SEQ ID NO: 470376 - RNA, 19 nt, Artificial Sequence
  Description of Artificial Sequence: Synthetic oligonucleotide
  Antisense Strand to SEQ ID NO: 470375
uauuucagggaaggcauca

SEQ ID NO: 470377 - RNA, 19 nt, Artificial Sequence
  Description of Artificial Sequence: Synthetic oligonucleotide
  Sense strand starting at position 3212 of SEQ ID NO: 317176
cagagauguuggcuuguaa

SEQ ID NO: 470378 - RNA, 19 nt, Artificial Sequence
  Description of Artificial Sequence: Synthetic oligonucleotide
  Antisense Strand to SEQ ID NO: 470377
uuacaagccaacaucucug

SEQ ID NO: 470379 - RNA, 19 nt, Artificial Sequence
  Description of Artificial Sequence: Synthetic oligonucleotide
  Sense strand starting at position 3224 of SEQ ID NO: 317176
cuuguaagucuuuauagaa

SEQ ID NO: 470380 - RNA, 19 nt, Artificial Sequence
  Description of Artificial Sequence: Synthetic oligonucleotide
  Antisense Strand to SEQ ID NO: 470379
uucuauaaagacuuacaag

SEQ ID NO: 470381 - RNA, 19 nt, Artificial Sequence
  Description of Artificial Sequence: Synthetic oligonucleotide
  Sense strand starting at position 3255 of SEQ ID NO: 317176
cugagauaaucaguauuag

SEQ ID NO: 470382 - RNA, 19 nt, Artificial Sequence
  Description of Artificial Sequence: Synthetic oligonucleotide
  Antisense Strand to SEQ ID NO: 470381
cuaauacugauuaucucag

SEQ ID NO: 470383 - RNA, 19 nt, Artificial Sequence
  Description of Artificial Sequence: Synthetic oligonucleotide
  Sense strand starting at position 3354 of SEQ ID NO: 317176
agaccacuguucuuccaga

SEQ ID NO: 470384 - RNA, 19 nt, Artificial Sequence
  Description of Artificial Sequence: Synthetic oligonucleotide
  Antisense Strand to SEQ ID NO: 470383
ucuggaagaacaguggucu

SEQ ID NO: 470385 - RNA, 19 nt, Artificial Sequence
  Description of Artificial Sequence: Synthetic oligonucleotide
  Sense strand starting at position 3403 of SEQ ID NO: 317176
aguugaugucaccacauca

SEQ ID NO: 470386 - RNA, 19 nt, Artificial Sequence
  Description of Artificial Sequence: Synthetic oligonucleotide
  Antisense Strand to SEQ ID NO: 470385
ugauguggugacaucaacu

SEQ ID NO: 470387 - RNA, 19 nt, Artificial Sequence
  Description of Artificial Sequence: Synthetic oligonucleotide
  Sense strand starting at position 3459 of SEQ ID NO: 317176
ccagucacucuccauguua

SEQ ID NO: 470388 - RNA, 19 nt, Artificial Sequence
  Description of Artificial Sequence: Synthetic oligonucleotide
  Antisense Strand to SEQ ID NO: 470387
uaacauggagagugacugg

SEQ ID NO: 470389 - RNA, 19 nt, Artificial Sequence
  Description of Artificial Sequence: Synthetic oligonucleotide
  Sense strand starting at position 3518 of SEQ ID NO: 317176
caaugauuuguuuguguau

SEQ ID NO: 470390 - RNA, 19 nt, Artificial Sequence
  Description of Artificial Sequence: Synthetic oligonucleotide
  Antisense Strand to SEQ ID NO: 470389
auacacaaacaaaucauug

SEQ ID NO: 470391 - RNA, 19 nt, Artificial Sequence
  Description of Artificial Sequence: Synthetic oligonucleotide
  Sense strand starting at position 3563 of SEQ ID NO: 317176
gacaguaggagccguauuu

SEQ ID NO: 470392 - RNA, 19 nt, Artificial Sequence
  Description of Artificial Sequence: Synthetic oligonucleotide
  Antisense Strand to SEQ ID NO: 470391
aaauacggcuccuacuguc

SEQ ID NO: 470393 - RNA, 19 nt, Artificial Sequence
  Description of Artificial Sequence: Synthetic oligonucleotide
  Sense strand starting at position 3573 of SEQ ID NO: 317176
gccguauuugccuagcauc

SEQ ID NO: 470394 - RNA, 19 nt, Artificial Sequence
  Description of Artificial Sequence: Synthetic oligonucleotide
  Antisense Strand to SEQ ID NO: 470393
gaugcuaggcaaauacggc

SEQ ID NO: 470395 - RNA, 19 nt, Artificial Sequence
  Description of Artificial Sequence: Synthetic oligonucleotide
  Sense strand starting at position 3591 of SEQ ID NO: 317176
cagugauuggcacaugauc

SEQ ID NO: 470396 - RNA, 19 nt, Artificial Sequence
  Description of Artificial Sequence: Synthetic oligonucleotide
  Antisense Strand to SEQ ID NO: 470395
gaucaugugccaaucacug

SEQ ID NO: 470397 - RNA, 19 nt, Artificial Sequence
  Description of Artificial Sequence: Synthetic oligonucleotide
  Sense strand starting at position 3593 of SEQ ID NO: 317176
gugauuggcacaugaucau

SEQ ID NO: 470398 - RNA, 19 nt, Artificial Sequence
  Description of Artificial Sequence: Synthetic oligonucleotide
  Antisense Strand to SEQ ID NO: 470397
augaucaugugccaaucac

SEQ ID NO: 470399 - RNA, 19 nt, Artificial Sequence
  Description of Artificial Sequence: Synthetic oligonucleotide
  Sense strand starting at position 3726 of SEQ ID NO: 317176
aagacauucuaggugguga

SEQ ID NO: 470400 - RNA, 19 nt, Artificial Sequence
  Description of Artificial Sequence: Synthetic oligonucleotide
  Antisense Strand to SEQ ID NO: 470399
ucaccaccuagaaugucuu

SEQ ID NO: 470401 - RNA, 19 nt, Artificial Sequence
  Description of Artificial Sequence: Synthetic oligonucleotide
  Sense strand starting at position 3799 of SEQ ID NO: 317176
cucuauugucuagaccgua

SEQ ID NO: 470402 - RNA, 19 nt, Artificial Sequence
  Description of Artificial Sequence: Synthetic oligonucleotide
  Antisense Strand to SEQ ID NO: 470401
uacggucuagacaauagag

SEQ ID NO: 470403 - RNA, 19 nt, Artificial Sequence
  Description of Artificial Sequence: Synthetic oligonucleotide
  Sense strand starting at position 3804 of SEQ ID NO: 317176
uugucuagaccguaguaca

SEQ ID NO: 470404 - RNA, 19 nt, Artificial Sequence
  Description of Artificial Sequence: Synthetic oligonucleotide
  Antisense Strand to SEQ ID NO: 470403
uguacuacggucuagacaa

SEQ ID NO: 470405 - RNA, 19 nt, Artificial Sequence
  Description of Artificial Sequence: Synthetic oligonucleotide
  Sense strand starting at position 444 of SEQ ID NO: 317177
ugggacuccuuauccaaau

SEQ ID NO: 470406 - RNA, 19 nt, Artificial Sequence
  Description of Artificial Sequence: Synthetic oligonucleotide
  Antisense Strand to SEQ ID NO: 470405
auuuggauaaggaguccca

SEQ ID NO: 470407 - RNA, 19 nt, Artificial Sequence
  Description of Artificial Sequence: Synthetic oligonucleotide
  Sense strand starting at position 445 of SEQ ID NO: 317177
gggacuccuuauccaaaug

SEQ ID NO: 470408 - RNA, 19 nt, Artificial Sequence
  Description of Artificial Sequence: Synthetic oligonucleotide
  Antisense Strand to SEQ ID NO: 470407
cauuuggauaaggaguccc

SEQ ID NO: 470409 - RNA, 19 nt, Artificial Sequence
  Description of Artificial Sequence: Synthetic oligonucleotide
  Sense strand starting at position 742 of SEQ ID NO: 317177
aguaaaucaagacguauga

SEQ ID NO: 470410 - RNA, 19 nt, Artificial Sequence
  Description of Artificial Sequence: Synthetic oligonucleotide
  Antisense Strand to SEQ ID NO: 470409
ucauacgucuugauuuacu

SEQ ID NO: 470411 - RNA, 19 nt, Artificial Sequence
  Description of Artificial Sequence: Synthetic oligonucleotide
  Sense strand starting at position 746 of SEQ ID NO: 317177
aaucaagacguaugauaua

SEQ ID NO: 470412 - RNA, 19 nt, Artificial Sequence
  Description of Artificial Sequence: Synthetic oligonucleotide
  Antisense Strand to SEQ ID NO: 470411
uauaucauacgucuugauu

SEQ ID NO: 470413 - RNA, 19 nt, Artificial Sequence
  Description of Artificial Sequence: Synthetic oligonucleotide
  Sense strand starting at position 825 of SEQ ID NO: 317177
uuacguacuccacauguaa

SEQ ID NO: 470414 - RNA, 19 nt, Artificial Sequence
  Description of Artificial Sequence: Synthetic oligonucleotide
  Antisense Strand to SEQ ID NO: 470413
uuacauguggaguacguaa

SEQ ID NO: 470415 - RNA, 19 nt, Artificial Sequence
  Description of Artificial Sequence: Synthetic oligonucleotide
  Sense strand starting at position 872 of SEQ ID NO: 317177
cugauuaauuuggaacuca

SEQ ID NO: 470416 - RNA, 19 nt, Artificial Sequence
  Description of Artificial Sequence: Synthetic oligonucleotide
  Antisense Strand to SEQ ID NO: 470415
ugaguuccaaauuaaucag

SEQ ID NO: 470417 - RNA, 19 nt, Artificial Sequence
  Description of Artificial Sequence: Synthetic oligonucleotide
  Sense strand starting at position 898 of SEQ ID NO: 317177
gguuaagucccuuaauuga

SEQ ID NO: 470418 - RNA, 19 nt, Artificial Sequence
  Description of Artificial Sequence: Synthetic oligonucleotide
  Antisense Strand to SEQ ID NO: 470417
ucaauuaagggacuuaacc

SEQ ID NO: 470419 - RNA, 19 nt, Artificial Sequence
  Description of Artificial Sequence: Synthetic oligonucleotide
  Sense strand starting at position 998 of SEQ ID NO: 317177
ggaaguggguucuuucaca

SEQ ID NO: 470420 - RNA, 19 nt, Artificial Sequence
  Description of Artificial Sequence: Synthetic oligonucleotide
  Antisense Strand to SEQ ID NO: 470419
ugugaaagaacccacuucc

SEQ ID NO: 470421 - RNA, 19 nt, Artificial Sequence
  Description of Artificial Sequence: Synthetic oligonucleotide
  Sense strand starting at position 1035 of SEQ ID NO: 317177
ucucgaaucuaugcccaau

SEQ ID NO: 470422 - RNA, 19 nt, Artificial Sequence
  Description of Artificial Sequence: Synthetic oligonucleotide
  Antisense Strand to SEQ ID NO: 470421
auugggcauagauucgaga

SEQ ID NO: 470423 - RNA, 19 nt, Artificial Sequence
  Description of Artificial Sequence: Synthetic oligonucleotide
  Sense strand starting at position 1037 of SEQ ID NO: 317177
ucgaaucuaugcccaauga

SEQ ID NO: 470424 - RNA, 19 nt, Artificial Sequence
  Description of Artificial Sequence: Synthetic oligonucleotide
  Antisense Strand to SEQ ID NO: 470423
ucauugggcauagauucga

SEQ ID NO: 470425 - RNA, 19 nt, Artificial Sequence
  Description of Artificial Sequence: Synthetic oligonucleotide
  Sense strand starting at position 1038 of SEQ ID NO: 317177
cgaaucuaugcccaaugau

SEQ ID NO: 470426 - RNA, 19 nt, Artificial Sequence
  Description of Artificial Sequence: Synthetic oligonucleotide
  Antisense Strand to SEQ ID NO: 470425
aucauugggcauagauucg

SEQ ID NO: 470427 - RNA, 19 nt, Artificial Sequence
  Description of Artificial Sequence: Synthetic oligonucleotide
  Sense strand starting at position 1096 of SEQ ID NO: 317177
agucauuucugagcuucca

SEQ ID NO: 470428 - RNA, 19 nt, Artificial Sequence
  Description of Artificial Sequence: Synthetic oligonucleotide
  Antisense Strand to SEQ ID NO: 470427
uggaagcucagaaaugacu

SEQ ID NO: 470429 - RNA, 19 nt, Artificial Sequence
  Description of Artificial Sequence: Synthetic oligonucleotide
  Sense strand starting at position 1390 of SEQ ID NO: 317177
gugggaucaugauuauucu

SEQ ID NO: 470430 - RNA, 19 nt, Artificial Sequence
  Description of Artificial Sequence: Synthetic oligonucleotide
  Antisense Strand to SEQ ID NO: 470429
agaauaaucaugaucccac

SEQ ID NO: 470431 - RNA, 19 nt, Artificial Sequence
  Description of Artificial Sequence: Synthetic oligonucleotide
  Sense strand starting at position 1393 of SEQ ID NO: 317177
ggaucaugauuauucucau

SEQ ID NO: 470432 - RNA, 19 nt, Artificial Sequence
  Description of Artificial Sequence: Synthetic oligonucleotide
  Antisense Strand to SEQ ID NO: 470431
augagaauaaucaugaucc

SEQ ID NO: 470433 - RNA, 19 nt, Artificial Sequence
  Description of Artificial Sequence: Synthetic oligonucleotide
  Sense strand starting at position 1601 of SEQ ID NO: 317177
acccuacaaccguaugaga

SEQ ID NO: 470434 - RNA, 19 nt, Artificial Sequence
  Description of Artificial Sequence: Synthetic oligonucleotide
  Antisense Strand to SEQ ID NO: 470433
ucucauacgguuguagggu

SEQ ID NO: 470435 - RNA, 19 nt, Artificial Sequence
  Description of Artificial Sequence: Synthetic oligonucleotide
  Sense strand starting at position 1603 of SEQ ID NO: 317177
ccuacaaccguaugagaaa

SEQ ID NO: 470436 - RNA, 19 nt, Artificial Sequence
  Description of Artificial Sequence: Synthetic oligonucleotide
  Antisense Strand to SEQ ID NO: 470435
uuucucauacgguuguagg

SEQ ID NO: 470437 - RNA, 19 nt, Artificial Sequence
  Description of Artificial Sequence: Synthetic oligonucleotide
  Sense strand starting at position 1647 of SEQ ID NO: 317177
acggcauccuuccuagaaa

SEQ ID NO: 470438 - RNA, 19 nt, Artificial Sequence
  Description of Artificial Sequence: Synthetic oligonucleotide
  Antisense Strand to SEQ ID NO: 470437
uuucuaggaaggaugccgu

SEQ ID NO: 470439 - RNA, 19 nt, Artificial Sequence
  Description of Artificial Sequence: Synthetic oligonucleotide
  Sense strand starting at position 1695 of SEQ ID NO: 317177
cgcuuaagacaauaccauu

SEQ ID NO: 470440 - RNA, 19 nt, Artificial Sequence
  Description of Artificial Sequence: Synthetic oligonucleotide
  Antisense Strand to SEQ ID NO: 470439
aaugguauugucuuaagcg

SEQ ID NO: 470441 - RNA, 19 nt, Artificial Sequence
  Description of Artificial Sequence: Synthetic oligonucleotide
  Sense strand starting at position 2597 of SEQ ID NO: 317177
ggcuaaguaguagaaagua

SEQ ID NO: 470442 - RNA, 19 nt, Artificial Sequence
  Description of Artificial Sequence: Synthetic oligonucleotide
  Antisense Strand to SEQ ID NO: 470441
uacuuucuacuacuuagcc

SEQ ID NO: 470443 - RNA, 19 nt, Artificial Sequence
  Description of Artificial Sequence: Synthetic oligonucleotide
  Sense strand starting at position 2745 of SEQ ID NO: 317177
uacauauaggguuguuaga

SEQ ID NO: 470444 - RNA, 19 nt, Artificial Sequence
  Description of Artificial Sequence: Synthetic oligonucleotide
  Antisense Strand to SEQ ID NO: 470443
ucuaacaacccuauaugua

SEQ ID NO: 470445 - RNA, 19 nt, Artificial Sequence
  Description of Artificial Sequence: Synthetic oligonucleotide
  Sense strand starting at position 2747 of SEQ ID NO: 317177
cauauaggguuguuagaau

SEQ ID NO: 470446 - RNA, 19 nt, Artificial Sequence
  Description of Artificial Sequence: Synthetic oligonucleotide
  Antisense Strand to SEQ ID NO: 470445
auucuaacaacccuauaug

SEQ ID NO: 470447 - RNA, 19 nt, Artificial Sequence
  Description of Artificial Sequence: Synthetic oligonucleotide
  Sense strand starting at position 2893 of SEQ ID NO: 317177
gugccauguacugcaaguu

SEQ ID NO: 470448 - RNA, 19 nt, Artificial Sequence
  Description of Artificial Sequence: Synthetic oligonucleotide
  Antisense Strand to SEQ ID NO: 470447
aacuugcaguacauggcac

SEQ ID NO: 470449 - RNA, 19 nt, Artificial Sequence
  Description of Artificial Sequence: Synthetic oligonucleotide
  Sense strand starting at position 2901 of SEQ ID NO: 317177
uacugcaaguuauuaguga

SEQ ID NO: 470450 - RNA, 19 nt, Artificial Sequence
  Description of Artificial Sequence: Synthetic oligonucleotide
  Antisense Strand to SEQ ID NO: 470449
ucacuaauaacuugcagua

SEQ ID NO: 470451 - RNA, 19 nt, Artificial Sequence
  Description of Artificial Sequence: Synthetic oligonucleotide
  Sense strand starting at position 2908 of SEQ ID NO: 317177
aguuauuagugacuaaaca

SEQ ID NO: 470452 - RNA, 19 nt, Artificial Sequence
  Description of Artificial Sequence: Synthetic oligonucleotide
  Antisense Strand to SEQ ID NO: 470451
uguuuagucacuaauaacu

SEQ ID NO: 470453 - RNA, 19 nt, Artificial Sequence
  Description of Artificial Sequence: Synthetic oligonucleotide
  Sense strand starting at position 3109 of SEQ ID NO: 317177
ccagucaugcaccgaauau

SEQ ID NO: 470454 - RNA, 19 nt, Artificial Sequence
  Description of Artificial Sequence: Synthetic oligonucleotide
  Antisense Strand to SEQ ID NO: 470453
auauucggugcaugacugg

SEQ ID NO: 470455 - RNA, 19 nt, Artificial Sequence
  Description of Artificial Sequence: Synthetic oligonucleotide
  Sense strand starting at position 3166 of SEQ ID NO: 317177
gcgucacuuucuucuauuu

SEQ ID NO: 470456 - RNA, 19 nt, Artificial Sequence
  Description of Artificial Sequence: Synthetic oligonucleotide
  Antisense Strand to SEQ ID NO: 470455
aaauagaagaaagugacgc

SEQ ID NO: 470457 - RNA, 19 nt, Artificial Sequence
  Description of Artificial Sequence: Synthetic oligonucleotide
  Sense strand starting at position 3322 of SEQ ID NO: 317177
ugugaugccuucccugaaa

SEQ ID NO: 470458 - RNA, 19 nt, Artificial Sequence
  Description of Artificial Sequence: Synthetic oligonucleotide
  Antisense Strand to SEQ ID NO: 470457
uuucagggaaggcaucaca

SEQ ID NO: 470459 - RNA, 19 nt, Artificial Sequence
  Description of Artificial Sequence: Synthetic oligonucleotide
  Sense strand starting at position 3324 of SEQ ID NO: 317177
ugaugccuucccugaaaua

SEQ ID NO: 470460 - RNA, 19 nt, Artificial Sequence
  Description of Artificial Sequence: Synthetic oligonucleotide
  Antisense Strand to SEQ ID NO: 470459
uauuucagggaaggcauca

SEQ ID NO: 470461 - RNA, 19 nt, Artificial Sequence
  Description of Artificial Sequence: Synthetic oligonucleotide
  Sense strand starting at position 3475 of SEQ ID NO: 317177
cagagauguuggcuuguaa

SEQ ID NO: 470462 - RNA, 19 nt, Artificial Sequence
  Description of Artificial Sequence: Synthetic oligonucleotide
  Antisense Strand to SEQ ID NO: 470461
uuacaagccaacaucucug

SEQ ID NO: 470463 - RNA, 19 nt, Artificial Sequence
  Description of Artificial Sequence: Synthetic oligonucleotide
  Sense strand starting at position 3486 of SEQ ID NO: 317177
gcuuguaagucuuuauaga

SEQ ID NO: 470464 - RNA, 19 nt, Artificial Sequence
  Description of Artificial Sequence: Synthetic oligonucleotide
  Antisense Strand to SEQ ID NO: 470463
ucuauaaagacuuacaagc

SEQ ID NO: 470465 - RNA, 19 nt, Artificial Sequence
  Description of Artificial Sequence: Synthetic oligonucleotide
  Sense strand starting at position 3487 of SEQ ID NO: 317177
cuuguaagucuuuauagaa

SEQ ID NO: 470466 - RNA, 19 nt, Artificial Sequence
  Description of Artificial Sequence: Synthetic oligonucleotide
  Antisense Strand to SEQ ID NO: 470465
uucuauaaagacuuacaag

SEQ ID NO: 470467 - RNA, 19 nt, Artificial Sequence
  Description of Artificial Sequence: Synthetic oligonucleotide
  Sense strand starting at position 3518 of SEQ ID NO: 317177
cugagauaaucaguauuag

SEQ ID NO: 470468 - RNA, 19 nt, Artificial Sequence
  Description of Artificial Sequence: Synthetic oligonucleotide
  Antisense Strand to SEQ ID NO: 470467
cuaauacugauuaucucag

SEQ ID NO: 470469 - RNA, 19 nt, Artificial Sequence
  Description of Artificial Sequence: Synthetic oligonucleotide
  Sense strand starting at position 3617 of SEQ ID NO: 317177
agaccacuguucuuccaga

SEQ ID NO: 470470 - RNA, 19 nt, Artificial Sequence
  Description of Artificial Sequence: Synthetic oligonucleotide
  Antisense Strand to SEQ ID NO: 470469
ucuggaagaacaguggucu

SEQ ID NO: 470471 - RNA, 19 nt, Artificial Sequence
  Description of Artificial Sequence: Synthetic oligonucleotide
  Sense strand starting at position 3666 of SEQ ID NO: 317177
aguugaugucaccacauca

SEQ ID NO: 470472 - RNA, 19 nt, Artificial Sequence
  Description of Artificial Sequence: Synthetic oligonucleotide
  Antisense Strand to SEQ ID NO: 470471
ugauguggugacaucaacu

SEQ ID NO: 470473 - RNA, 19 nt, Artificial Sequence
  Description of Artificial Sequence: Synthetic oligonucleotide
  Sense strand starting at position 3722 of SEQ ID NO: 317177
ccagucacucuccauguua

SEQ ID NO: 470474 - RNA, 19 nt, Artificial Sequence
  Description of Artificial Sequence: Synthetic oligonucleotide
  Antisense Strand to SEQ ID NO: 470473
uaacauggagagugacugg

SEQ ID NO: 470475 - RNA, 19 nt, Artificial Sequence
  Description of Artificial Sequence: Synthetic oligonucleotide
  Sense strand starting at position 3781 of SEQ ID NO: 317177
caaugauuuguuuguguau

SEQ ID NO: 470476 - RNA, 19 nt, Artificial Sequence
  Description of Artificial Sequence: Synthetic oligonucleotide
  Antisense Strand to SEQ ID NO: 470475
auacacaaacaaaucauug

SEQ ID NO: 470477 - RNA, 19 nt, Artificial Sequence
  Description of Artificial Sequence: Synthetic oligonucleotide
  Sense strand starting at position 3826 of SEQ ID NO: 317177
gacaguaggagccguauuu

SEQ ID NO: 470478 - RNA, 19 nt, Artificial Sequence
  Description of Artificial Sequence: Synthetic oligonucleotide
  Antisense Strand to SEQ ID NO: 470477
aaauacggcuccuacuguc

SEQ ID NO: 470479 - RNA, 19 nt, Artificial Sequence
  Description of Artificial Sequence: Synthetic oligonucleotide
  Sense strand starting at position 3836 of SEQ ID NO: 317177
gccguauuugccuagcauc

SEQ ID NO: 470480 - RNA, 19 nt, Artificial Sequence
  Description of Artificial Sequence: Synthetic oligonucleotide
  Antisense Strand to SEQ ID NO: 470479
gaugcuaggcaaauacggc

SEQ ID NO: 470481 - RNA, 19 nt, Artificial Sequence
  Description of Artificial Sequence: Synthetic oligonucleotide
  Sense strand starting at position 3854 of SEQ ID NO: 317177
cagugauuggcacaugauc

SEQ ID NO: 470482 - RNA, 19 nt, Artificial Sequence
  Description of Artificial Sequence: Synthetic oligonucleotide
  Antisense Strand to SEQ ID NO: 470481
gaucaugugccaaucacug

SEQ ID NO: 470483 - RNA, 19 nt, Artificial Sequence
  Description of Artificial Sequence: Synthetic oligonucleotide
  Sense strand starting at position 3856 of SEQ ID NO: 317177
gugauuggcacaugaucau

SEQ ID NO: 470484 - RNA, 19 nt, Artificial Sequence
  Description of Artificial Sequence: Synthetic oligonucleotide
  Antisense Strand to SEQ ID NO: 470483
augaucaugugccaaucac

SEQ ID NO: 470485 - RNA, 19 nt, Artificial Sequence
  Description of Artificial Sequence: Synthetic oligonucleotide
  Sense strand starting at position 58 of SEQ ID NO: 317178
caagaucaccgcugugaag

SEQ ID NO: 470486 - RNA, 19 nt, Artificial Sequence
  Description of Artificial Sequence: Synthetic oligonucleotide
  Antisense Strand to SEQ ID NO: 470485
cuucacagcggugaucuug

SEQ ID NO: 470487 - RNA, 19 nt, Artificial Sequence
  Description of Artificial Sequence: Synthetic oligonucleotide
  Sense strand starting at position 222 of SEQ ID NO: 317178
ggaucuguggaggguagau

SEQ ID NO: 470488 - RNA, 19 nt, Artificial Sequence
  Description of Artificial Sequence: Synthetic oligonucleotide
  Antisense Strand to SEQ ID NO: 470487
aucuacccuccacagaucc

SEQ ID NO: 470489 - RNA, 19 nt, Artificial Sequence
  Description of Artificial Sequence: Synthetic oligonucleotide
  Sense strand starting at position 323 of SEQ ID NO: 317178
gugggaauuuagcaucuuu

SEQ ID NO: 470490 - RNA, 19 nt, Artificial Sequence
  Description of Artificial Sequence: Synthetic oligonucleotide
  Antisense Strand to SEQ ID NO: 470489
aaagaugcuaaauucccac

SEQ ID NO: 470491 - RNA, 19 nt, Artificial Sequence
  Description of Artificial Sequence: Synthetic oligonucleotide
  Sense strand starting at position 332 of SEQ ID NO: 317178
uagcaucuuugauagagau

SEQ ID NO: 470492 - RNA, 19 nt, Artificial Sequence
  Description of Artificial Sequence: Synthetic oligonucleotide
  Antisense Strand to SEQ ID NO: 470491
aucucuaucaaagaugcua

SEQ ID NO: 470493 - RNA, 19 nt, Artificial Sequence
  Description of Artificial Sequence: Synthetic oligonucleotide
  Sense strand starting at position 354 of SEQ ID NO: 317178
aaauuuggguuuggaaaug

SEQ ID NO: 470494 - RNA, 19 nt, Artificial Sequence
  Description of Artificial Sequence: Synthetic oligonucleotide
  Antisense Strand to SEQ ID NO: 470493
cauuuccaaacccaaauuu

SEQ ID NO: 470495 - RNA, 19 nt, Artificial Sequence
  Description of Artificial Sequence: Synthetic oligonucleotide
  Sense strand starting at position 359 of SEQ ID NO: 317178
uggguuuggaaauguugga

SEQ ID NO: 470496 - RNA, 19 nt, Artificial Sequence
  Description of Artificial Sequence: Synthetic oligonucleotide
  Antisense Strand to SEQ ID NO: 470495
uccaacauuuccaaaccca

SEQ ID NO: 470497 - RNA, 19 nt, Artificial Sequence
  Description of Artificial Sequence: Synthetic oligonucleotide
  Sense strand starting at position 401 of SEQ ID NO: 317178
aguggaauuagccacuguu

SEQ ID NO: 470498 - RNA, 19 nt, Artificial Sequence
  Description of Artificial Sequence: Synthetic oligonucleotide
  Antisense Strand to SEQ ID NO: 470497
aacaguggcuaauuccacu

SEQ ID NO: 470499 - RNA, 19 nt, Artificial Sequence
  Description of Artificial Sequence: Synthetic oligonucleotide
  Sense strand starting at position 404 of SEQ ID NO: 317178
ggaauuagccacuguuaau

SEQ ID NO: 470500 - RNA, 19 nt, Artificial Sequence
  Description of Artificial Sequence: Synthetic oligonucleotide
  Antisense Strand to SEQ ID NO: 470499
auuaacaguggcuaauucc

SEQ ID NO: 470501 - RNA, 19 nt, Artificial Sequence
  Description of Artificial Sequence: Synthetic oligonucleotide
  Sense strand starting at position 415 of SEQ ID NO: 317178
cuguuaauauuugacgauu

SEQ ID NO: 470502 - RNA, 19 nt, Artificial Sequence
  Description of Artificial Sequence: Synthetic oligonucleotide
  Antisense Strand to SEQ ID NO: 470501
aaucgucaaauauuaacag

SEQ ID NO: 470503 - RNA, 19 nt, Artificial Sequence
  Description of Artificial Sequence: Synthetic oligonucleotide
  Sense strand starting at position 417 of SEQ ID NO: 317178
guuaauauuugacgauuug

SEQ ID NO: 470504 - RNA, 19 nt, Artificial Sequence
  Description of Artificial Sequence: Synthetic oligonucleotide
  Antisense Strand to SEQ ID NO: 470503
caaaucgucaaauauuaac

SEQ ID NO: 470505 - RNA, 19 nt, Artificial Sequence
  Description of Artificial Sequence: Synthetic oligonucleotide
  Sense strand starting at position 460 of SEQ ID NO: 317178
aggcuagagagaugaaguu

SEQ ID NO: 470506 - RNA, 19 nt, Artificial Sequence
  Description of Artificial Sequence: Synthetic oligonucleotide
  Antisense Strand to SEQ ID NO: 470505
aacuucaucucucuagccu

SEQ ID NO: 470507 - RNA, 19 nt, Artificial Sequence
  Description of Artificial Sequence: Synthetic oligonucleotide
  Sense strand starting at position 483 of SEQ ID NO: 317178
gcugccaucauagagauga

SEQ ID NO: 470508 - RNA, 19 nt, Artificial Sequence
  Description of Artificial Sequence: Synthetic oligonucleotide
  Antisense Strand to SEQ ID NO: 470507
ucaucucuaugauggcagc

SEQ ID NO: 470509 - RNA, 19 nt, Artificial Sequence
  Description of Artificial Sequence: Synthetic oligonucleotide
  Sense strand starting at position 502 of SEQ ID NO: 317178
gaguuaaagcagggaacuu

SEQ ID NO: 470510 - RNA, 19 nt, Artificial Sequence
  Description of Artificial Sequence: Synthetic oligonucleotide
  Antisense Strand to SEQ ID NO: 470509
aaguucccugcuuuaacuc

SEQ ID NO: 470511 - RNA, 19 nt, Artificial Sequence
  Description of Artificial Sequence: Synthetic oligonucleotide
  Sense strand starting at position 512 of SEQ ID NO: 317178
agggaacuuuaauaaaugu

SEQ ID NO: 470512 - RNA, 19 nt, Artificial Sequence
  Description of Artificial Sequence: Synthetic oligonucleotide
  Antisense Strand to SEQ ID NO: 470511
acauuuauuaaaguucccu

SEQ ID NO: 470513 - RNA, 19 nt, Artificial Sequence
  Description of Artificial Sequence: Synthetic oligonucleotide
  Sense strand starting at position 619 of SEQ ID NO: 317178
ggaaaugacugagaaggaa

SEQ ID NO: 470514 - RNA, 19 nt, Artificial Sequence
  Description of Artificial Sequence: Synthetic oligonucleotide
  Antisense Strand to SEQ ID NO: 470513
uuccuucucagucauuucc

SEQ ID NO: 470515 - RNA, 19 nt, Artificial Sequence
  Description of Artificial Sequence: Synthetic oligonucleotide
  Sense strand starting at position 689 of SEQ ID NO: 317178
accaucacauggcuuagaa

SEQ ID NO: 470516 - RNA, 19 nt, Artificial Sequence
  Description of Artificial Sequence: Synthetic oligonucleotide
  Antisense Strand to SEQ ID NO: 470515
uucuaagccaugugauggu

SEQ ID NO: 470517 - RNA, 19 nt, Artificial Sequence
  Description of Artificial Sequence: Synthetic oligonucleotide
  Sense strand starting at position 722 of SEQ ID NO: 317178
uuuggcaaugauggacaua

SEQ ID NO: 470518 - RNA, 19 nt, Artificial Sequence
  Description of Artificial Sequence: Synthetic oligonucleotide
  Antisense Strand to SEQ ID NO: 470517
uauguccaucauugccaaa

SEQ ID NO: 470519 - RNA, 19 nt, Artificial Sequence
  Description of Artificial Sequence: Synthetic oligonucleotide
  Sense strand starting at position 853 of SEQ ID NO: 317178
uucuguuuccuacaucagu

SEQ ID NO: 470520 - RNA, 19 nt, Artificial Sequence
  Description of Artificial Sequence: Synthetic oligonucleotide
  Antisense Strand to SEQ ID NO: 470519
acugauguaggaaacagaa

SEQ ID NO: 470521 - RNA, 19 nt, Artificial Sequence
  Description of Artificial Sequence: Synthetic oligonucleotide
  Sense strand starting at position 870 of SEQ ID NO: 317178
guuacuaaacuuugaggca

SEQ ID NO: 470522 - RNA, 19 nt, Artificial Sequence
  Description of Artificial Sequence: Synthetic oligonucleotide
  Antisense Strand to SEQ ID NO: 470521
ugccucaaaguuuaguaac

SEQ ID NO: 470523 - RNA, 19 nt, Artificial Sequence
  Description of Artificial Sequence: Synthetic oligonucleotide
  Sense strand starting at position 873 of SEQ ID NO: 317178
acuaaacuuugaggcauuu

SEQ ID NO: 470524 - RNA, 19 nt, Artificial Sequence
  Description of Artificial Sequence: Synthetic oligonucleotide
  Antisense Strand to SEQ ID NO: 470523
aaaugccucaaaguuuagu

SEQ ID NO: 470525 - RNA, 19 nt, Artificial Sequence
  Description of Artificial Sequence: Synthetic oligonucleotide
  Sense strand starting at position 930 of SEQ ID NO: 317178
aggugucuaaugugauuac

SEQ ID NO: 470526 - RNA, 19 nt, Artificial Sequence
  Description of Artificial Sequence: Synthetic oligonucleotide
  Antisense Strand to SEQ ID NO: 470525
guaaucacauuagacaccu

SEQ ID NO: 470527 - RNA, 19 nt, Artificial Sequence
  Description of Artificial Sequence: Synthetic oligonucleotide
  Sense strand starting at position 1029 of SEQ ID NO: 317178
aucccuuuggugcaaauga

SEQ ID NO: 470528 - RNA, 19 nt, Artificial Sequence
  Description of Artificial Sequence: Synthetic oligonucleotide
  Antisense Strand to SEQ ID NO: 470527
ucauuugcaccaaagggau

SEQ ID NO: 470529 - RNA, 19 nt, Artificial Sequence
  Description of Artificial Sequence: Synthetic oligonucleotide
  Sense strand starting at position 1077 of SEQ ID NO: 317178
acuguuaauugggcauaau

SEQ ID NO: 470530 - RNA, 19 nt, Artificial Sequence
  Description of Artificial Sequence: Synthetic oligonucleotide
  Antisense Strand to SEQ ID NO: 470529
auuaugcccaauuaacagu

SEQ ID NO: 470531 - RNA, 19 nt, Artificial Sequence
  Description of Artificial Sequence: Synthetic oligonucleotide
  Sense strand starting at position 1078 of SEQ ID NO: 317178
cuguuaauugggcauaaug

SEQ ID NO: 470532 - RNA, 19 nt, Artificial Sequence
  Description of Artificial Sequence: Synthetic oligonucleotide
  Antisense Strand to SEQ ID NO: 470531
cauuaugcccaauuaacag

SEQ ID NO: 470533 - RNA, 19 nt, Artificial Sequence
  Description of Artificial Sequence: Synthetic oligonucleotide
  Sense strand starting at position 1114 of SEQ ID NO: 317178
gggcucuugcaggaaugaa

SEQ ID NO: 470534 - RNA, 19 nt, Artificial Sequence
  Description of Artificial Sequence: Synthetic oligonucleotide
  Antisense Strand to SEQ ID NO: 470533
uucauuccugcaagagccc

SEQ ID NO: 470535 - RNA, 19 nt, Artificial Sequence
  Description of Artificial Sequence: Synthetic oligonucleotide
  Sense strand starting at position 1150 of SEQ ID NO: 317178
ggaugagggauacguccau

SEQ ID NO: 470536 - RNA, 19 nt, Artificial Sequence
  Description of Artificial Sequence: Synthetic oligonucleotide
  Antisense Strand to SEQ ID NO: 470535
auggacguaucccucaucc

SEQ ID NO: 470537 - RNA, 19 nt, Artificial Sequence
  Description of Artificial Sequence: Synthetic oligonucleotide
  Sense strand starting at position 1232 of SEQ ID NO: 317178
uuagauuaucuuugcuuag

SEQ ID NO: 470538 - RNA, 19 nt, Artificial Sequence
  Description of Artificial Sequence: Synthetic oligonucleotide
  Antisense Strand to SEQ ID NO: 470537
cuaagcaaagauaaucuaa

SEQ ID NO: 470539 - RNA, 19 nt, Artificial Sequence
  Description of Artificial Sequence: Synthetic oligonucleotide
  Sense strand starting at position 2147 of SEQ ID NO: 317178
guuccuuugugccuuccaa

SEQ ID NO: 470540 - RNA, 19 nt, Artificial Sequence
  Description of Artificial Sequence: Synthetic oligonucleotide
  Antisense Strand to SEQ ID NO: 470539
uuggaaggcacaaaggaac

SEQ ID NO: 470541 - RNA, 19 nt, Artificial Sequence
  Description of Artificial Sequence: Synthetic oligonucleotide
  Sense strand starting at position 2303 of SEQ ID NO: 317178
ggucaucugaguugugcag

SEQ ID NO: 470542 - RNA, 19 nt, Artificial Sequence
  Description of Artificial Sequence: Synthetic oligonucleotide
  Antisense Strand to SEQ ID NO: 470541
cugcacaacucagaugacc

SEQ ID NO: 470543 - RNA, 19 nt, Artificial Sequence
  Description of Artificial Sequence: Synthetic oligonucleotide
  Sense strand starting at position 2437 of SEQ ID NO: 317178
gagggaagccuuugacaug

SEQ ID NO: 470544 - RNA, 19 nt, Artificial Sequence
  Description of Artificial Sequence: Synthetic oligonucleotide
  Antisense Strand to SEQ ID NO: 470543
caugucaaaggcuucccuc

SEQ ID NO: 470545 - RNA, 19 nt, Artificial Sequence
  Description of Artificial Sequence: Synthetic oligonucleotide
  Sense strand starting at position 2556 of SEQ ID NO: 317178
gugaguccguagagugaga

SEQ ID NO: 470546 - RNA, 19 nt, Artificial Sequence
  Description of Artificial Sequence: Synthetic oligonucleotide
  Antisense Strand to SEQ ID NO: 470545
ucucacucuacggacucac

SEQ ID NO: 470547 - RNA, 19 nt, Artificial Sequence
  Description of Artificial Sequence: Synthetic oligonucleotide
  Sense strand starting at position 2572 of SEQ ID NO: 317178
agagcaaguuuauuaagga

SEQ ID NO: 470548 - RNA, 19 nt, Artificial Sequence
  Description of Artificial Sequence: Synthetic oligonucleotide
  Antisense Strand to SEQ ID NO: 470547
uccuuaauaaacuugcucu

SEQ ID NO: 470549 - RNA, 19 nt, Artificial Sequence
  Description of Artificial Sequence: Synthetic oligonucleotide
  Sense strand starting at position 2573 of SEQ ID NO: 317178
gagcaaguuuauuaaggaa

SEQ ID NO: 470550 - RNA, 19 nt, Artificial Sequence
  Description of Artificial Sequence: Synthetic oligonucleotide
  Antisense Strand to SEQ ID NO: 470549
uuccuuaauaaacuugcuc

SEQ ID NO: 470551 - RNA, 19 nt, Artificial Sequence
  Description of Artificial Sequence: Synthetic oligonucleotide
  Sense strand starting at position 2749 of SEQ ID NO: 317178
ggugcucuaugccuguaau

SEQ ID NO: 470552 - RNA, 19 nt, Artificial Sequence
  Description of Artificial Sequence: Synthetic oligonucleotide
  Antisense Strand to SEQ ID NO: 470551
auuacaggcauagagcacc

SEQ ID NO: 470553 - RNA, 19 nt, Artificial Sequence
  Description of Artificial Sequence: Synthetic oligonucleotide
  Sense strand starting at position 2971 of SEQ ID NO: 317178
ugggcugcuuagcuaauua

SEQ ID NO: 470554 - RNA, 19 nt, Artificial Sequence
  Description of Artificial Sequence: Synthetic oligonucleotide
  Antisense Strand to SEQ ID NO: 470553
uaauuagcuaagcagccca

SEQ ID NO: 470555 - RNA, 19 nt, Artificial Sequence
  Description of Artificial Sequence: Synthetic oligonucleotide
  Sense strand starting at position 3507 of SEQ ID NO: 317178
guguguugacuuggagaga

SEQ ID NO: 470556 - RNA, 19 nt, Artificial Sequence
  Description of Artificial Sequence: Synthetic oligonucleotide
  Antisense Strand to SEQ ID NO: 470555
ucucuccaagucaacacac

SEQ ID NO: 470557 - RNA, 19 nt, Artificial Sequence
  Description of Artificial Sequence: Synthetic oligonucleotide
  Sense strand starting at position 3579 of SEQ ID NO: 317178
cgaauuggucccuguaccu

SEQ ID NO: 470558 - RNA, 19 nt, Artificial Sequence
  Description of Artificial Sequence: Synthetic oligonucleotide
  Antisense Strand to SEQ ID NO: 470557
agguacagggaccaauucg

SEQ ID NO: 470559 - RNA, 19 nt, Artificial Sequence
  Description of Artificial Sequence: Synthetic oligonucleotide
  Sense strand starting at position 3639 of SEQ ID NO: 317178
acuuguuguuucucagauu

SEQ ID NO: 470560 - RNA, 19 nt, Artificial Sequence
  Description of Artificial Sequence: Synthetic oligonucleotide
  Antisense Strand to SEQ ID NO: 470559
aaucugagaaacaacaagu

SEQ ID NO: 470561 - RNA, 19 nt, Artificial Sequence
  Description of Artificial Sequence: Synthetic oligonucleotide
  Sense strand starting at position 3743 of SEQ ID NO: 317178
uuugacuguuccucaggaa

SEQ ID NO: 470562 - RNA, 19 nt, Artificial Sequence
  Description of Artificial Sequence: Synthetic oligonucleotide
  Antisense Strand to SEQ ID NO: 470561
uuccugaggaacagucaaa

SEQ ID NO: 470563 - RNA, 19 nt, Artificial Sequence
  Description of Artificial Sequence: Synthetic oligonucleotide
  Sense strand starting at position 3894 of SEQ ID NO: 317178
uucccugcugcagaguaau

SEQ ID NO: 470564 - RNA, 19 nt, Artificial Sequence
  Description of Artificial Sequence: Synthetic oligonucleotide
  Antisense Strand to SEQ ID NO: 470563
auuacucugcagcagggaa

SEQ ID NO: 470565 - RNA, 19 nt, Artificial Sequence
  Description of Artificial Sequence: Synthetic oligonucleotide
  Sense strand starting at position 83 of SEQ ID NO: 317179
guuacaugugcugacauaa

SEQ ID NO: 470566 - RNA, 19 nt, Artificial Sequence
  Description of Artificial Sequence: Synthetic oligonucleotide
  Antisense Strand to SEQ ID NO: 470565
uuaugucagcacauguaac

SEQ ID NO: 470567 - RNA, 19 nt, Artificial Sequence
  Description of Artificial Sequence: Synthetic oligonucleotide
  Sense strand starting at position 226 of SEQ ID NO: 317179
agaacuuacagcgauggua

SEQ ID NO: 470568 - RNA, 19 nt, Artificial Sequence
  Description of Artificial Sequence: Synthetic oligonucleotide
  Antisense Strand to SEQ ID NO: 470567
uaccaucgcuguaaguucu

SEQ ID NO: 470569 - RNA, 19 nt, Artificial Sequence
  Description of Artificial Sequence: Synthetic oligonucleotide
  Sense strand starting at position 351 of SEQ ID NO: 317179
augaaagaggccugacuua

SEQ ID NO: 470570 - RNA, 19 nt, Artificial Sequence
  Description of Artificial Sequence: Synthetic oligonucleotide
  Antisense Strand to SEQ ID NO: 470569
uaagucaggccucuuucau

SEQ ID NO: 470571 - RNA, 19 nt, Artificial Sequence
  Description of Artificial Sequence: Synthetic oligonucleotide
  Sense strand starting at position 787 of SEQ ID NO: 317179
ucccgauggccaugagaaa

SEQ ID NO: 470572 - RNA, 19 nt, Artificial Sequence
  Description of Artificial Sequence: Synthetic oligonucleotide
  Antisense Strand to SEQ ID NO: 470571
uuucucauggccaucggga

SEQ ID NO: 470573 - RNA, 19 nt, Artificial Sequence
  Description of Artificial Sequence: Synthetic oligonucleotide
  Sense strand starting at position 788 of SEQ ID NO: 317179
cccgauggccaugagaaau

SEQ ID NO: 470574 - RNA, 19 nt, Artificial Sequence
  Description of Artificial Sequence: Synthetic oligonucleotide
  Antisense Strand to SEQ ID NO: 470573
auuucucauggccaucggg

SEQ ID NO: 470575 - RNA, 19 nt, Artificial Sequence
  Description of Artificial Sequence: Synthetic oligonucleotide
  Sense strand starting at position 812 of SEQ ID NO: 317179
gcaggauaagguugauaaa

SEQ ID NO: 470576 - RNA, 19 nt, Artificial Sequence
  Description of Artificial Sequence: Synthetic oligonucleotide
  Antisense Strand to SEQ ID NO: 470575
uuuaucaaccuuauccugc

SEQ ID NO: 470577 - RNA, 19 nt, Artificial Sequence
  Description of Artificial Sequence: Synthetic oligonucleotide
  Sense strand starting at position 1054 of SEQ ID NO: 317179
gcaaauggccacuagaaca

SEQ ID NO: 470578 - RNA, 19 nt, Artificial Sequence
  Description of Artificial Sequence: Synthetic oligonucleotide
  Antisense Strand to SEQ ID NO: 470577
uguucuaguggccauuugc

SEQ ID NO: 470579 - RNA, 19 nt, Artificial Sequence
  Description of Artificial Sequence: Synthetic oligonucleotide
  Sense strand starting at position 1323 of SEQ ID NO: 317179
gcaaauauagcacaaguca

SEQ ID NO: 470580 - RNA, 19 nt, Artificial Sequence
  Description of Artificial Sequence: Synthetic oligonucleotide
  Antisense Strand to SEQ ID NO: 470579
ugacuugugcuauauuugc

SEQ ID NO: 470581 - RNA, 19 nt, Artificial Sequence
  Description of Artificial Sequence: Synthetic oligonucleotide
  Sense strand starting at position 1341 of SEQ ID NO: 317179
auagcugguugcucaauuu

SEQ ID NO: 470582 - RNA, 19 nt, Artificial Sequence
  Description of Artificial Sequence: Synthetic oligonucleotide
  Antisense Strand to SEQ ID NO: 470581
aaauugagcaaccagcuau

SEQ ID NO: 470583 - RNA, 19 nt, Artificial Sequence
  Description of Artificial Sequence: Synthetic oligonucleotide
  Sense strand starting at position 1348 of SEQ ID NO: 317179
guugcucaauuucuuguua

SEQ ID NO: 470584 - RNA, 19 nt, Artificial Sequence
  Description of Artificial Sequence: Synthetic oligonucleotide
  Antisense Strand to SEQ ID NO: 470583
uaacaagaaauugagcaac

SEQ ID NO: 470585 - RNA, 19 nt, Artificial Sequence
  Description of Artificial Sequence: Synthetic oligonucleotide
  Sense strand starting at position 1359 of SEQ ID NO: 317179
ucuuguuagaagugggaca

SEQ ID NO: 470586 - RNA, 19 nt, Artificial Sequence
  Description of Artificial Sequence: Synthetic oligonucleotide
  Antisense Strand to SEQ ID NO: 470585
ugucccacuucuaacaaga

SEQ ID NO: 470587 - RNA, 19 nt, Artificial Sequence
  Description of Artificial Sequence: Synthetic oligonucleotide
  Sense strand starting at position 1360 of SEQ ID NO: 317179
cuuguuagaagugggacau

SEQ ID NO: 470588 - RNA, 19 nt, Artificial Sequence
  Description of Artificial Sequence: Synthetic oligonucleotide
  Antisense Strand to SEQ ID NO: 470587
augucccacuucuaacaag

SEQ ID NO: 470589 - RNA, 19 nt, Artificial Sequence
  Description of Artificial Sequence: Synthetic oligonucleotide
  Sense strand starting at position 1361 of SEQ ID NO: 317179
uuguuagaagugggacauu

SEQ ID NO: 470590 - RNA, 19 nt, Artificial Sequence
  Description of Artificial Sequence: Synthetic oligonucleotide
  Antisense Strand to SEQ ID NO: 470589
aaugucccacuucuaacaa

SEQ ID NO: 470591 - RNA, 19 nt, Artificial Sequence
  Description of Artificial Sequence: Synthetic oligonucleotide
  Sense strand starting at position 1427 of SEQ ID NO: 317179
aaacaagguugggauuuaa

SEQ ID NO: 470592 - RNA, 19 nt, Artificial Sequence
  Description of Artificial Sequence: Synthetic oligonucleotide
  Antisense Strand to SEQ ID NO: 470591
uuaaaucccaaccuuguuu

SEQ ID NO: 470593 - RNA, 19 nt, Artificial Sequence
  Description of Artificial Sequence: Synthetic oligonucleotide
  Sense strand starting at position 1453 of SEQ ID NO: 317179
uccucuguuggguaugaga

SEQ ID NO: 470594 - RNA, 19 nt, Artificial Sequence
  Description of Artificial Sequence: Synthetic oligonucleotide
  Antisense Strand to SEQ ID NO: 470593
ucucauacccaacagagga

SEQ ID NO: 470595 - RNA, 19 nt, Artificial Sequence
  Description of Artificial Sequence: Synthetic oligonucleotide
  Sense strand starting at position 1461 of SEQ ID NO: 317179
uggguaugagauugcacaa

SEQ ID NO: 470596 - RNA, 19 nt, Artificial Sequence
  Description of Artificial Sequence: Synthetic oligonucleotide
  Antisense Strand to SEQ ID NO: 470595
uugugcaaucucauaccca

SEQ ID NO: 470597 - RNA, 19 nt, Artificial Sequence
  Description of Artificial Sequence: Synthetic oligonucleotide
  Sense strand starting at position 1491 of SEQ ID NO: 317179
uccagugguuuagucauuu

SEQ ID NO: 470598 - RNA, 19 nt, Artificial Sequence
  Description of Artificial Sequence: Synthetic oligonucleotide
  Antisense Strand to SEQ ID NO: 470597
aaaugacuaaaccacugga

SEQ ID NO: 470599 - RNA, 19 nt, Artificial Sequence
  Description of Artificial Sequence: Synthetic oligonucleotide
  Sense strand starting at position 1580 of SEQ ID NO: 317179
uccgccuuugaagaauuaa

SEQ ID NO: 470600 - RNA, 19 nt, Artificial Sequence
  Description of Artificial Sequence: Synthetic oligonucleotide
  Antisense Strand to SEQ ID NO: 470599
uuaauucuucaaaggcgga

SEQ ID NO: 470601 - RNA, 19 nt, Artificial Sequence
  Description of Artificial Sequence: Synthetic oligonucleotide
  Sense strand starting at position 1658 of SEQ ID NO: 317179
ggacauuagaaaugugcuu

SEQ ID NO: 470602 - RNA, 19 nt, Artificial Sequence
  Description of Artificial Sequence: Synthetic oligonucleotide
  Antisense Strand to SEQ ID NO: 470601
aagcacauuucuaaugucc

SEQ ID NO: 470603 - RNA, 19 nt, Artificial Sequence
  Description of Artificial Sequence: Synthetic oligonucleotide
  Sense strand starting at position 1663 of SEQ ID NO: 317179
uuagaaaugugcuuggaua

SEQ ID NO: 470604 - RNA, 19 nt, Artificial Sequence
  Description of Artificial Sequence: Synthetic oligonucleotide
  Antisense Strand to SEQ ID NO: 470603
uauccaagcacauuucuaa

SEQ ID NO: 470605 - RNA, 19 nt, Artificial Sequence
  Description of Artificial Sequence: Synthetic oligonucleotide
  Sense strand starting at position 1664 of SEQ ID NO: 317179
uagaaaugugcuuggauau

SEQ ID NO: 470606 - RNA, 19 nt, Artificial Sequence
  Description of Artificial Sequence: Synthetic oligonucleotide
  Antisense Strand to SEQ ID NO: 470605
auauccaagcacauuucua

SEQ ID NO: 470607 - RNA, 19 nt, Artificial Sequence
  Description of Artificial Sequence: Synthetic oligonucleotide
  Sense strand starting at position 1665 of SEQ ID NO: 317179
agaaaugugcuuggauaua

SEQ ID NO: 470608 - RNA, 19 nt, Artificial Sequence
  Description of Artificial Sequence: Synthetic oligonucleotide
  Antisense Strand to SEQ ID NO: 470607
uauauccaagcacauuucu

SEQ ID NO: 470609 - RNA, 19 nt, Artificial Sequence
  Description of Artificial Sequence: Synthetic oligonucleotide
  Sense strand starting at position 1880 of SEQ ID NO: 317179
gggauuguugaagguuuaa

SEQ ID NO: 470610 - RNA, 19 nt, Artificial Sequence
  Description of Artificial Sequence: Synthetic oligonucleotide
  Antisense Strand to SEQ ID NO: 470609
uuaaaccuucaacaauccc

SEQ ID NO: 470611 - RNA, 19 nt, Artificial Sequence
  Description of Artificial Sequence: Synthetic oligonucleotide
  Sense strand starting at position 2080 of SEQ ID NO: 317179
aaggaauagcugggugaau

SEQ ID NO: 470612 - RNA, 19 nt, Artificial Sequence
  Description of Artificial Sequence: Synthetic oligonucleotide
  Antisense Strand to SEQ ID NO: 470611
auucacccagcuauuccuu

SEQ ID NO: 470613 - RNA, 19 nt, Artificial Sequence
  Description of Artificial Sequence: Synthetic oligonucleotide
  Sense strand starting at position 2081 of SEQ ID NO: 317179
aggaauagcugggugaauu

SEQ ID NO: 470614 - RNA, 19 nt, Artificial Sequence
  Description of Artificial Sequence: Synthetic oligonucleotide
  Antisense Strand to SEQ ID NO: 470613
aauucacccagcuauuccu

SEQ ID NO: 470615 - RNA, 19 nt, Artificial Sequence
  Description of Artificial Sequence: Synthetic oligonucleotide
  Sense strand starting at position 2082 of SEQ ID NO: 317179
ggaauagcugggugaauuc

SEQ ID NO: 470616 - RNA, 19 nt, Artificial Sequence
  Description of Artificial Sequence: Synthetic oligonucleotide
  Antisense Strand to SEQ ID NO: 470615
gaauucacccagcuauucc

SEQ ID NO: 470617 - RNA, 19 nt, Artificial Sequence
  Description of Artificial Sequence: Synthetic oligonucleotide
  Sense strand starting at position 2091 of SEQ ID NO: 317179
gggugaauucuauaguauu

SEQ ID NO: 470618 - RNA, 19 nt, Artificial Sequence
  Description of Artificial Sequence: Synthetic oligonucleotide
  Antisense Strand to SEQ ID NO: 470617
aauacuauagaauucaccc

SEQ ID NO: 470619 - RNA, 19 nt, Artificial Sequence
  Description of Artificial Sequence: Synthetic oligonucleotide
  Sense strand starting at position 2251 of SEQ ID NO: 317179
agacauaugaugugguuga

SEQ ID NO: 470620 - RNA, 19 nt, Artificial Sequence
  Description of Artificial Sequence: Synthetic oligonucleotide
  Antisense Strand to SEQ ID NO: 470619
ucaaccacaucauaugucu

SEQ ID NO: 470621 - RNA, 19 nt, Artificial Sequence
  Description of Artificial Sequence: Synthetic oligonucleotide
  Sense strand starting at position 2261 of SEQ ID NO: 317179
ugugguugaaugcauuaaa

SEQ ID NO: 470622 - RNA, 19 nt, Artificial Sequence
  Description of Artificial Sequence: Synthetic oligonucleotide
  Antisense Strand to SEQ ID NO: 470621
uuuaaugcauucaaccaca

SEQ ID NO: 470623 - RNA, 19 nt, Artificial Sequence
  Description of Artificial Sequence: Synthetic oligonucleotide
  Sense strand starting at position 2758 of SEQ ID NO: 317179
aaaucugaaccaugcgaga

SEQ ID NO: 470624 - RNA, 19 nt, Artificial Sequence
  Description of Artificial Sequence: Synthetic oligonucleotide
  Antisense Strand to SEQ ID NO: 470623
ucucgcaugguucagauuu

SEQ ID NO: 470625 - RNA, 19 nt, Artificial Sequence
  Description of Artificial Sequence: Synthetic oligonucleotide
  Sense strand starting at position 2940 of SEQ ID NO: 317179
guauauggauucccacacu

SEQ ID NO: 470626 - RNA, 19 nt, Artificial Sequence
  Description of Artificial Sequence: Synthetic oligonucleotide
  Antisense Strand to SEQ ID NO: 470625
agugugggaauccauauac

SEQ ID NO: 470627 - RNA, 19 nt, Artificial Sequence
  Description of Artificial Sequence: Synthetic oligonucleotide
  Sense strand starting at position 2999 of SEQ ID NO: 317179
cugugaucauuucuggcuu

SEQ ID NO: 470628 - RNA, 19 nt, Artificial Sequence
  Description of Artificial Sequence: Synthetic oligonucleotide
  Antisense Strand to SEQ ID NO: 470627
aagccagaaaugaucacag

SEQ ID NO: 470629 - RNA, 19 nt, Artificial Sequence
  Description of Artificial Sequence: Synthetic oligonucleotide
  Sense strand starting at position 3022 of SEQ ID NO: 317179
uuugguuaugaguaauucu

SEQ ID NO: 470630 - RNA, 19 nt, Artificial Sequence
  Description of Artificial Sequence: Synthetic oligonucleotide
  Antisense Strand to SEQ ID NO: 470629
agaauuacucauaaccaaa

SEQ ID NO: 470631 - RNA, 19 nt, Artificial Sequence
  Description of Artificial Sequence: Synthetic oligonucleotide
  Sense strand starting at position 3029 of SEQ ID NO: 317179
augaguaauucuccuagaa

SEQ ID NO: 470632 - RNA, 19 nt, Artificial Sequence
  Description of Artificial Sequence: Synthetic oligonucleotide
  Antisense Strand to SEQ ID NO: 470631
uucuaggagaauuacucau

SEQ ID NO: 470633 - RNA, 19 nt, Artificial Sequence
  Description of Artificial Sequence: Synthetic oligonucleotide
  Sense strand starting at position 3118 of SEQ ID NO: 317179
uggauacuguaacugaaua

SEQ ID NO: 470634 - RNA, 19 nt, Artificial Sequence
  Description of Artificial Sequence: Synthetic oligonucleotide
  Antisense Strand to SEQ ID NO: 470633
uauucaguuacaguaucca

SEQ ID NO: 470635 - RNA, 19 nt, Artificial Sequence
  Description of Artificial Sequence: Synthetic oligonucleotide
  Sense strand starting at position 3192 of SEQ ID NO: 317179
gggcgaaauacagaauugu

SEQ ID NO: 470636 - RNA, 19 nt, Artificial Sequence
  Description of Artificial Sequence: Synthetic oligonucleotide
  Antisense Strand to SEQ ID NO: 470635
acaauucuguauuucgccc

SEQ ID NO: 470637 - RNA, 19 nt, Artificial Sequence
  Description of Artificial Sequence: Synthetic oligonucleotide
  Sense strand starting at position 3210 of SEQ ID NO: 317179
uuaggaaucauaggucuga

SEQ ID NO: 470638 - RNA, 19 nt, Artificial Sequence
  Description of Artificial Sequence: Synthetic oligonucleotide
  Antisense Strand to SEQ ID NO: 470637
ucagaccuaugauuccuaa

SEQ ID NO: 470639 - RNA, 19 nt, Artificial Sequence
  Description of Artificial Sequence: Synthetic oligonucleotide
  Sense strand starting at position 3380 of SEQ ID NO: 317179
uuuccaugugucuaugaaa

SEQ ID NO: 470640 - RNA, 19 nt, Artificial Sequence
  Description of Artificial Sequence: Synthetic oligonucleotide
  Antisense Strand to SEQ ID NO: 470639
uuucauagacacauggaaa

SEQ ID NO: 470641 - RNA, 19 nt, Artificial Sequence
  Description of Artificial Sequence: Synthetic oligonucleotide
  Sense strand starting at position 3843 of SEQ ID NO: 317179
uuuguuauuuaucugguca

SEQ ID NO: 470642 - RNA, 19 nt, Artificial Sequence
  Description of Artificial Sequence: Synthetic oligonucleotide
  Antisense Strand to SEQ ID NO: 470641
ugaccagauaaauaacaaa

SEQ ID NO: 470643 - RNA, 19 nt, Artificial Sequence
  Description of Artificial Sequence: Synthetic oligonucleotide
  Sense strand starting at position 3931 of SEQ ID NO: 317179
ccaguaggacuuuauaucu

SEQ ID NO: 470644 - RNA, 19 nt, Artificial Sequence
  Description of Artificial Sequence: Synthetic oligonucleotide
  Antisense Strand to SEQ ID NO: 470643
agauauaaaguccuacugg

SEQ ID NO: 470645 - RNA, 19 nt, Artificial Sequence
  Description of Artificial Sequence: Synthetic oligonucleotide
  Sense strand starting at position 41 of SEQ ID NO: 317180
agaagagacuucuucccuu

SEQ ID NO: 470646 - RNA, 19 nt, Artificial Sequence
  Description of Artificial Sequence: Synthetic oligonucleotide
  Antisense Strand to SEQ ID NO: 470645
aagggaagaagucucuucu

SEQ ID NO: 470647 - RNA, 19 nt, Artificial Sequence
  Description of Artificial Sequence: Synthetic oligonucleotide
  Sense strand starting at position 429 of SEQ ID NO: 317180
gcgagcacucaauaauaau

SEQ ID NO: 470648 - RNA, 19 nt, Artificial Sequence
  Description of Artificial Sequence: Synthetic oligonucleotide
  Antisense Strand to SEQ ID NO: 470647
auuauuauugagugcucgc

SEQ ID NO: 470649 - RNA, 19 nt, Artificial Sequence
  Description of Artificial Sequence: Synthetic oligonucleotide
  Sense strand starting at position 540 of SEQ ID NO: 317180
uaacuugaugagcaaaugu

SEQ ID NO: 470650 - RNA, 19 nt, Artificial Sequence
  Description of Artificial Sequence: Synthetic oligonucleotide
  Antisense Strand to SEQ ID NO: 470649
acauuugcucaucaaguua

SEQ ID NO: 470651 - RNA, 19 nt, Artificial Sequence
  Description of Artificial Sequence: Synthetic oligonucleotide
  Sense strand starting at position 573 of SEQ ID NO: 317180
aaugcaaugcuagauagua

SEQ ID NO: 470652 - RNA, 19 nt, Artificial Sequence
  Description of Artificial Sequence: Synthetic oligonucleotide
  Antisense Strand to SEQ ID NO: 470651
uacuaucuagcauugcauu

SEQ ID NO: 470653 - RNA, 19 nt, Artificial Sequence
  Description of Artificial Sequence: Synthetic oligonucleotide
  Sense strand starting at position 588 of SEQ ID NO: 317180
aguaucuuguuaccaaaua

SEQ ID NO: 470654 - RNA, 19 nt, Artificial Sequence
  Description of Artificial Sequence: Synthetic oligonucleotide
  Antisense Strand to SEQ ID NO: 470653
uauuugguaacaagauacu

SEQ ID NO: 470655 - RNA, 19 nt, Artificial Sequence
  Description of Artificial Sequence: Synthetic oligonucleotide
  Sense strand starting at position 656 of SEQ ID NO: 317180
guaaguuaauucucacuau

SEQ ID NO: 470656 - RNA, 19 nt, Artificial Sequence
  Description of Artificial Sequence: Synthetic oligonucleotide
  Antisense Strand to SEQ ID NO: 470655
auagugagaauuaacuuac

SEQ ID NO: 470657 - RNA, 19 nt, Artificial Sequence
  Description of Artificial Sequence: Synthetic oligonucleotide
  Sense strand starting at position 704 of SEQ ID NO: 317180
aggugcuuucuagaacuca

SEQ ID NO: 470658 - RNA, 19 nt, Artificial Sequence
  Description of Artificial Sequence: Synthetic oligonucleotide
  Antisense Strand to SEQ ID NO: 470657
ugaguucuagaaagcaccu

SEQ ID NO: 470659 - RNA, 19 nt, Artificial Sequence
  Description of Artificial Sequence: Synthetic oligonucleotide
  Sense strand starting at position 973 of SEQ ID NO: 317180
uuggaacuguggccugaaa

SEQ ID NO: 470660 - RNA, 19 nt, Artificial Sequence
  Description of Artificial Sequence: Synthetic oligonucleotide
  Antisense Strand to SEQ ID NO: 470659
uuucaggccacaguuccaa

SEQ ID NO: 470661 - RNA, 19 nt, Artificial Sequence
  Description of Artificial Sequence: Synthetic oligonucleotide
  Sense strand starting at position 1075 of SEQ ID NO: 317180
aggacagaauaagaugaua

SEQ ID NO: 470662 - RNA, 19 nt, Artificial Sequence
  Description of Artificial Sequence: Synthetic oligonucleotide
  Antisense Strand to SEQ ID NO: 470661
uaucaucuuauucuguccu

SEQ ID NO: 470663 - RNA, 19 nt, Artificial Sequence
  Description of Artificial Sequence: Synthetic oligonucleotide
  Sense strand starting at position 1080 of SEQ ID NO: 317180
agaauaagaugauagacaa

SEQ ID NO: 470664 - RNA, 19 nt, Artificial Sequence
  Description of Artificial Sequence: Synthetic oligonucleotide
  Antisense Strand to SEQ ID NO: 470663
uugucuaucaucuuauucu

SEQ ID NO: 470665 - RNA, 19 nt, Artificial Sequence
  Description of Artificial Sequence: Synthetic oligonucleotide
  Sense strand starting at position 1242 of SEQ ID NO: 317180
uuuauuguaggucaugcaa

SEQ ID NO: 470666 - RNA, 19 nt, Artificial Sequence
  Description of Artificial Sequence: Synthetic oligonucleotide
  Antisense Strand to SEQ ID NO: 470665
uugcaugaccuacaauaaa

SEQ ID NO: 470667 - RNA, 19 nt, Artificial Sequence
  Description of Artificial Sequence: Synthetic oligonucleotide
  Sense strand starting at position 1268 of SEQ ID NO: 317180
cacagaacccuagguuuga

SEQ ID NO: 470668 - RNA, 19 nt, Artificial Sequence
  Description of Artificial Sequence: Synthetic oligonucleotide
  Antisense Strand to SEQ ID NO: 470667
ucaaaccuaggguucugug

SEQ ID NO: 470669 - RNA, 19 nt, Artificial Sequence
  Description of Artificial Sequence: Synthetic oligonucleotide
  Sense strand starting at position 1451 of SEQ ID NO: 317180
uaggcuuucccaggacauu

SEQ ID NO: 470670 - RNA, 19 nt, Artificial Sequence
  Description of Artificial Sequence: Synthetic oligonucleotide
  Antisense Strand to SEQ ID NO: 470669
aauguccugggaaagccua

SEQ ID NO: 470671 - RNA, 19 nt, Artificial Sequence
  Description of Artificial Sequence: Synthetic oligonucleotide
  Sense strand starting at position 1608 of SEQ ID NO: 317180
gggcgugaaggcgaauaaa

SEQ ID NO: 470672 - RNA, 19 nt, Artificial Sequence
  Description of Artificial Sequence: Synthetic oligonucleotide
  Antisense Strand to SEQ ID NO: 470671
uuuauucgccuucacgccc

SEQ ID NO: 470673 - RNA, 19 nt, Artificial Sequence
  Description of Artificial Sequence: Synthetic oligonucleotide
  Sense strand starting at position 1611 of SEQ ID NO: 317180
cgugaaggcgaauaaacuu

SEQ ID NO: 470674 - RNA, 19 nt, Artificial Sequence
  Description of Artificial Sequence: Synthetic oligonucleotide
  Antisense Strand to SEQ ID NO: 470673
aaguuuauucgccuucacg

SEQ ID NO: 470675 - RNA, 19 nt, Artificial Sequence
  Description of Artificial Sequence: Synthetic oligonucleotide
  Sense strand starting at position 1745 of SEQ ID NO: 317180
gucaguucuccgcuccuca

SEQ ID NO: 470676 - RNA, 19 nt, Artificial Sequence
  Description of Artificial Sequence: Synthetic oligonucleotide
  Antisense Strand to SEQ ID NO: 470675
ugaggagcggagaacugac

SEQ ID NO: 470677 - RNA, 19 nt, Artificial Sequence
  Description of Artificial Sequence: Synthetic oligonucleotide
  Sense strand starting at position 2045 of SEQ ID NO: 317180
cucggaggugguuacuaua

SEQ ID NO: 470678 - RNA, 19 nt, Artificial Sequence
  Description of Artificial Sequence: Synthetic oligonucleotide
  Antisense Strand to SEQ ID NO: 470677
uauaguaaccaccuccgag

SEQ ID NO: 470679 - RNA, 19 nt, Artificial Sequence
  Description of Artificial Sequence: Synthetic oligonucleotide
  Sense strand starting at position 2053 of SEQ ID NO: 317180
ugguuacuauacucauaga

SEQ ID NO: 470680 - RNA, 19 nt, Artificial Sequence
  Description of Artificial Sequence: Synthetic oligonucleotide
  Antisense Strand to SEQ ID NO: 470679
ucuaugaguauaguaacca

SEQ ID NO: 470681 - RNA, 19 nt, Artificial Sequence
  Description of Artificial Sequence: Synthetic oligonucleotide
  Sense strand starting at position 2152 of SEQ ID NO: 317180
gugauaauguacucuacau

SEQ ID NO: 470682 - RNA, 19 nt, Artificial Sequence
  Description of Artificial Sequence: Synthetic oligonucleotide
  Antisense Strand to SEQ ID NO: 470681
auguagaguacauuaucac

SEQ ID NO: 470683 - RNA, 19 nt, Artificial Sequence
  Description of Artificial Sequence: Synthetic oligonucleotide
  Sense strand starting at position 2297 of SEQ ID NO: 317180
uuugaaagcugauuggaca

SEQ ID NO: 470684 - RNA, 19 nt, Artificial Sequence
  Description of Artificial Sequence: Synthetic oligonucleotide
  Antisense Strand to SEQ ID NO: 470683
uguccaaucagcuuucaaa

SEQ ID NO: 470685 - RNA, 19 nt, Artificial Sequence
  Description of Artificial Sequence: Synthetic oligonucleotide
  Sense strand starting at position 2628 of SEQ ID NO: 317180
gucaucuguaugucgcuaa

SEQ ID NO: 470686 - RNA, 19 nt, Artificial Sequence
  Description of Artificial Sequence: Synthetic oligonucleotide
  Antisense Strand to SEQ ID NO: 470685
uuagcgacauacagaugac

SEQ ID NO: 470687 - RNA, 19 nt, Artificial Sequence
  Description of Artificial Sequence: Synthetic oligonucleotide
  Sense strand starting at position 2673 of SEQ ID NO: 317180
cuuaaagucgucuggauuu

SEQ ID NO: 470688 - RNA, 19 nt, Artificial Sequence
  Description of Artificial Sequence: Synthetic oligonucleotide
  Antisense Strand to SEQ ID NO: 470687
aaauccagacgacuuuaag

SEQ ID NO: 470689 - RNA, 19 nt, Artificial Sequence
  Description of Artificial Sequence: Synthetic oligonucleotide
  Sense strand starting at position 2976 of SEQ ID NO: 317180
uggagcaagaguuaagagu

SEQ ID NO: 470690 - RNA, 19 nt, Artificial Sequence
  Description of Artificial Sequence: Synthetic oligonucleotide
  Antisense Strand to SEQ ID NO: 470689
acucuuaacucuugcucca

SEQ ID NO: 470691 - RNA, 19 nt, Artificial Sequence
  Description of Artificial Sequence: Synthetic oligonucleotide
  Sense strand starting at position 2985 of SEQ ID NO: 317180
aguuaagagucacugauua

SEQ ID NO: 470692 - RNA, 19 nt, Artificial Sequence
  Description of Artificial Sequence: Synthetic oligonucleotide
  Antisense Strand to SEQ ID NO: 470691
uaaucagugacucuuaacu

SEQ ID NO: 470693 - RNA, 19 nt, Artificial Sequence
  Description of Artificial Sequence: Synthetic oligonucleotide
  Sense strand starting at position 2997 of SEQ ID NO: 317180
cugauuacauaaguccaga

SEQ ID NO: 470694 - RNA, 19 nt, Artificial Sequence
  Description of Artificial Sequence: Synthetic oligonucleotide
  Antisense Strand to SEQ ID NO: 470693
ucuggacuuauguaaucag

SEQ ID NO: 470695 - RNA, 19 nt, Artificial Sequence
  Description of Artificial Sequence: Synthetic oligonucleotide
  Sense strand starting at position 3152 of SEQ ID NO: 317180
gcuugaagacgguaaugaa

SEQ ID NO: 470696 - RNA, 19 nt, Artificial Sequence
  Description of Artificial Sequence: Synthetic oligonucleotide
  Antisense Strand to SEQ ID NO: 470695
uucauuaccgucuucaagc

SEQ ID NO: 470697 - RNA, 19 nt, Artificial Sequence
  Description of Artificial Sequence: Synthetic oligonucleotide
  Sense strand starting at position 3193 of SEQ ID NO: 317180
auccaauucuaaguacagu

SEQ ID NO: 470698 - RNA, 19 nt, Artificial Sequence
  Description of Artificial Sequence: Synthetic oligonucleotide
  Antisense Strand to SEQ ID NO: 470697
acuguacuuagaauuggau

SEQ ID NO: 470699 - RNA, 19 nt, Artificial Sequence
  Description of Artificial Sequence: Synthetic oligonucleotide
  Sense strand starting at position 3244 of SEQ ID NO: 317180
gagucucucccagagucau

SEQ ID NO: 470700 - RNA, 19 nt, Artificial Sequence
  Description of Artificial Sequence: Synthetic oligonucleotide
  Antisense Strand to SEQ ID NO: 470699
augacucugggagagacuc

SEQ ID NO: 470701 - RNA, 19 nt, Artificial Sequence
  Description of Artificial Sequence: Synthetic oligonucleotide
  Sense strand starting at position 3289 of SEQ ID NO: 317180
cgaaucuuagguuauguaa

SEQ ID NO: 470702 - RNA, 19 nt, Artificial Sequence
  Description of Artificial Sequence: Synthetic oligonucleotide
  Antisense Strand to SEQ ID NO: 470701
uuacauaaccuaagauucg

SEQ ID NO: 470703 - RNA, 19 nt, Artificial Sequence
  Description of Artificial Sequence: Synthetic oligonucleotide
  Sense strand starting at position 3297 of SEQ ID NO: 317180
agguuauguaaaggccaau

SEQ ID NO: 470704 - RNA, 19 nt, Artificial Sequence
  Description of Artificial Sequence: Synthetic oligonucleotide
  Antisense Strand to SEQ ID NO: 470703
auuggccuuuacauaaccu

SEQ ID NO: 470705 - RNA, 19 nt, Artificial Sequence
  Description of Artificial Sequence: Synthetic oligonucleotide
  Sense strand starting at position 3300 of SEQ ID NO: 317180
uuauguaaaggccaaugau

SEQ ID NO: 470706 - RNA, 19 nt, Artificial Sequence
  Description of Artificial Sequence: Synthetic oligonucleotide
  Antisense Strand to SEQ ID NO: 470705
aucauuggccuuuacauaa

SEQ ID NO: 470707 - RNA, 19 nt, Artificial Sequence
  Description of Artificial Sequence: Synthetic oligonucleotide
  Sense strand starting at position 3303 of SEQ ID NO: 317180
uguaaaggccaaugauaac

SEQ ID NO: 470708 - RNA, 19 nt, Artificial Sequence
  Description of Artificial Sequence: Synthetic oligonucleotide
  Antisense Strand to SEQ ID NO: 470707
guuaucauuggccuuuaca

SEQ ID NO: 470709 - RNA, 19 nt, Artificial Sequence
  Description of Artificial Sequence: Synthetic oligonucleotide
  Sense strand starting at position 3352 of SEQ ID NO: 317180
agcguuuauauguaggaag

SEQ ID NO: 470710 - RNA, 19 nt, Artificial Sequence
  Description of Artificial Sequence: Synthetic oligonucleotide
  Antisense Strand to SEQ ID NO: 470709
cuuccuacauauaaacgcu

SEQ ID NO: 470711 - RNA, 19 nt, Artificial Sequence
  Description of Artificial Sequence: Synthetic oligonucleotide
  Sense strand starting at position 3381 of SEQ ID NO: 317180
cacuguaaagcagaauguu

SEQ ID NO: 470712 - RNA, 19 nt, Artificial Sequence
  Description of Artificial Sequence: Synthetic oligonucleotide
  Antisense Strand to SEQ ID NO: 470711
aacauucugcuuuacagug

SEQ ID NO: 470713 - RNA, 19 nt, Artificial Sequence
  Description of Artificial Sequence: Synthetic oligonucleotide
  Sense strand starting at position 3389 of SEQ ID NO: 317180
agcagaauguuucugaaau

SEQ ID NO: 470714 - RNA, 19 nt, Artificial Sequence
  Description of Artificial Sequence: Synthetic oligonucleotide
  Antisense Strand to SEQ ID NO: 470713
auuucagaaacauucugcu

SEQ ID NO: 470715 - RNA, 19 nt, Artificial Sequence
  Description of Artificial Sequence: Synthetic oligonucleotide
  Sense strand starting at position 3624 of SEQ ID NO: 317180
caugacaauucuguuaggu

SEQ ID NO: 470716 - RNA, 19 nt, Artificial Sequence
  Description of Artificial Sequence: Synthetic oligonucleotide
  Antisense Strand to SEQ ID NO: 470715
accuaacagaauugucaug

SEQ ID NO: 470717 - RNA, 19 nt, Artificial Sequence
  Description of Artificial Sequence: Synthetic oligonucleotide
  Sense strand starting at position 3745 of SEQ ID NO: 317180
gcaauugcuguagaaguaa

SEQ ID NO: 470718 - RNA, 19 nt, Artificial Sequence
  Description of Artificial Sequence: Synthetic oligonucleotide
  Antisense Strand to SEQ ID NO: 470717
uuacuucuacagcaauugc

SEQ ID NO: 470719 - RNA, 19 nt, Artificial Sequence
  Description of Artificial Sequence: Synthetic oligonucleotide
  Sense strand starting at position 3784 of SEQ ID NO: 317180
augguauacguuuauauac

SEQ ID NO: 470720 - RNA, 19 nt, Artificial Sequence
  Description of Artificial Sequence: Synthetic oligonucleotide
  Antisense Strand to SEQ ID NO: 470719
guauauaaacguauaccau

SEQ ID NO: 470721 - RNA, 19 nt, Artificial Sequence
  Description of Artificial Sequence: Synthetic oligonucleotide
  Sense strand starting at position 3981 of SEQ ID NO: 317180
guaaguuugcuccaggaac

SEQ ID NO: 470722 - RNA, 19 nt, Artificial Sequence
  Description of Artificial Sequence: Synthetic oligonucleotide
  Antisense Strand to SEQ ID NO: 470721
guuccuggagcaaacuuac

SEQ ID NO: 470723 - RNA, 19 nt, Artificial Sequence
  Description of Artificial Sequence: Synthetic oligonucleotide
  Sense strand starting at position 3983 of SEQ ID NO: 317180
aaguuugcuccaggaacca

SEQ ID NO: 470724 - RNA, 19 nt, Artificial Sequence
  Description of Artificial Sequence: Synthetic oligonucleotide
  Antisense Strand to SEQ ID NO: 470723
ugguuccuggagcaaacuu

SEQ ID NO: 470725 - RNA, 19 nt, Artificial Sequence
  Description of Artificial Sequence: Synthetic oligonucleotide
  Sense strand starting at position 74 of SEQ ID NO: 317181
acuggaucuuauccaguuu

SEQ ID NO: 470726 - RNA, 19 nt, Artificial Sequence
  Description of Artificial Sequence: Synthetic oligonucleotide
  Antisense Strand to SEQ ID NO: 470725
aaacuggauaagauccagu

SEQ ID NO: 470727 - RNA, 19 nt, Artificial Sequence
  Description of Artificial Sequence: Synthetic oligonucleotide
  Sense strand starting at position 80 of SEQ ID NO: 317181
ucuuauccaguuugagauc

SEQ ID NO: 470728 - RNA, 19 nt, Artificial Sequence
  Description of Artificial Sequence: Synthetic oligonucleotide
  Antisense Strand to SEQ ID NO: 470727
gaucucaaacuggauaaga

SEQ ID NO: 470729 - RNA, 19 nt, Artificial Sequence
  Description of Artificial Sequence: Synthetic oligonucleotide
  Sense strand starting at position 212 of SEQ ID NO: 317181
ucaggucuaauaugagagu

SEQ ID NO: 470730 - RNA, 19 nt, Artificial Sequence
  Description of Artificial Sequence: Synthetic oligonucleotide
  Antisense Strand to SEQ ID NO: 470729
acucucauauuagaccuga

SEQ ID NO: 470731 - RNA, 19 nt, Artificial Sequence
  Description of Artificial Sequence: Synthetic oligonucleotide
  Sense strand starting at position 215 of SEQ ID NO: 317181
ggucuaauaugagagucca

SEQ ID NO: 470732 - RNA, 19 nt, Artificial Sequence
  Description of Artificial Sequence: Synthetic oligonucleotide
  Antisense Strand to SEQ ID NO: 470731
uggacucucauauuagacc

SEQ ID NO: 470733 - RNA, 19 nt, Artificial Sequence
  Description of Artificial Sequence: Synthetic oligonucleotide
  Sense strand starting at position 243 of SEQ ID NO: 317181
gugugaugugccuggacca

SEQ ID NO: 470734 - RNA, 19 nt, Artificial Sequence
  Description of Artificial Sequence: Synthetic oligonucleotide
  Antisense Strand to SEQ ID NO: 470733
ugguccaggcacaucacac

SEQ ID NO: 470735 - RNA, 19 nt, Artificial Sequence
  Description of Artificial Sequence: Synthetic oligonucleotide
  Sense strand starting at position 281 of SEQ ID NO: 317181
ggccucuccugggaagguu

SEQ ID NO: 470736 - RNA, 19 nt, Artificial Sequence
  Description of Artificial Sequence: Synthetic oligonucleotide
  Antisense Strand to SEQ ID NO: 470735
aaccuucccaggagaggcc

SEQ ID NO: 470737 - RNA, 19 nt, Artificial Sequence
  Description of Artificial Sequence: Synthetic oligonucleotide
  Sense strand starting at position 495 of SEQ ID NO: 317181
gaggcccuaucuguacaaa

SEQ ID NO: 470738 - RNA, 19 nt, Artificial Sequence
  Description of Artificial Sequence: Synthetic oligonucleotide
  Antisense Strand to SEQ ID NO: 470737
uuuguacagauagggccuc

SEQ ID NO: 470739 - RNA, 19 nt, Artificial Sequence
  Description of Artificial Sequence: Synthetic oligonucleotide
  Sense strand starting at position 536 of SEQ ID NO: 317181
aaggccaugugugucuaua

SEQ ID NO: 470740 - RNA, 19 nt, Artificial Sequence
  Description of Artificial Sequence: Synthetic oligonucleotide
  Antisense Strand to SEQ ID NO: 470739
uauagacacacauggccuu

SEQ ID NO: 470741 - RNA, 19 nt, Artificial Sequence
  Description of Artificial Sequence: Synthetic oligonucleotide
  Sense strand starting at position 538 of SEQ ID NO: 317181
ggccaugugugucuauagu

SEQ ID NO: 470742 - RNA, 19 nt, Artificial Sequence
  Description of Artificial Sequence: Synthetic oligonucleotide
  Antisense Strand to SEQ ID NO: 470741
acuauagacacacauggcc

SEQ ID NO: 470743 - RNA, 19 nt, Artificial Sequence
  Description of Artificial Sequence: Synthetic oligonucleotide
  Sense strand starting at position 736 of SEQ ID NO: 317181
agccaaugccugugaguac

SEQ ID NO: 470744 - RNA, 19 nt, Artificial Sequence
  Description of Artificial Sequence: Synthetic oligonucleotide
  Antisense Strand to SEQ ID NO: 470743
guacucacaggcauuggcu

SEQ ID NO: 470745 - RNA, 19 nt, Artificial Sequence
  Description of Artificial Sequence: Synthetic oligonucleotide
  Sense strand starting at position 916 of SEQ ID NO: 317181
cagacauguugacaagaac

SEQ ID NO: 470746 - RNA, 19 nt, Artificial Sequence
  Description of Artificial Sequence: Synthetic oligonucleotide
  Antisense Strand to SEQ ID NO: 470745
guucuugucaacaugucug

SEQ ID NO: 470747 - RNA, 19 nt, Artificial Sequence
  Description of Artificial Sequence: Synthetic oligonucleotide
  Sense strand starting at position 1131 of SEQ ID NO: 317181
cugcgaugggcgagaaagu

SEQ ID NO: 470748 - RNA, 19 nt, Artificial Sequence
  Description of Artificial Sequence: Synthetic oligonucleotide
  Antisense Strand to SEQ ID NO: 470747
acuuucucgcccaucgcag

SEQ ID NO: 470749 - RNA, 19 nt, Artificial Sequence
  Description of Artificial Sequence: Synthetic oligonucleotide
  Sense strand starting at position 1132 of SEQ ID NO: 317181
ugcgaugggcgagaaaguu

SEQ ID NO: 470750 - RNA, 19 nt, Artificial Sequence
  Description of Artificial Sequence: Synthetic oligonucleotide
  Antisense Strand to SEQ ID NO: 470749
aacuuucucgcccaucgca

SEQ ID NO: 470751 - RNA, 19 nt, Artificial Sequence
  Description of Artificial Sequence: Synthetic oligonucleotide
  Sense strand starting at position 1140 of SEQ ID NO: 317181
gcgagaaaguucgcgagaa

SEQ ID NO: 470752 - RNA, 19 nt, Artificial Sequence
  Description of Artificial Sequence: Synthetic oligonucleotide
  Antisense Strand to SEQ ID NO: 470751
uucucgcgaacuuucucgc

SEQ ID NO: 470753 - RNA, 19 nt, Artificial Sequence
  Description of Artificial Sequence: Synthetic oligonucleotide
  Sense strand starting at position 1141 of SEQ ID NO: 317181
cgagaaaguucgcgagaau

SEQ ID NO: 470754 - RNA, 19 nt, Artificial Sequence
  Description of Artificial Sequence: Synthetic oligonucleotide
  Antisense Strand to SEQ ID NO: 470753
auucucgcgaacuuucucg

SEQ ID NO: 470755 - RNA, 19 nt, Artificial Sequence
  Description of Artificial Sequence: Synthetic oligonucleotide
  Sense strand starting at position 1142 of SEQ ID NO: 317181
gagaaaguucgcgagaaug

SEQ ID NO: 470756 - RNA, 19 nt, Artificial Sequence
  Description of Artificial Sequence: Synthetic oligonucleotide
  Antisense Strand to SEQ ID NO: 470755
cauucucgcgaacuuucuc

SEQ ID NO: 470757 - RNA, 19 nt, Artificial Sequence
  Description of Artificial Sequence: Synthetic oligonucleotide
  Sense strand starting at position 1144 of SEQ ID NO: 317181
gaaaguucgcgagaaugac

SEQ ID NO: 470758 - RNA, 19 nt, Artificial Sequence
  Description of Artificial Sequence: Synthetic oligonucleotide
  Antisense Strand to SEQ ID NO: 470757
gucauucucgcgaacuuuc

SEQ ID NO: 470759 - RNA, 19 nt, Artificial Sequence
  Description of Artificial Sequence: Synthetic oligonucleotide
  Sense strand starting at position 1284 of SEQ ID NO: 317181
acugcauggcuuuaaguca

SEQ ID NO: 470760 - RNA, 19 nt, Artificial Sequence
  Description of Artificial Sequence: Synthetic oligonucleotide
  Antisense Strand to SEQ ID NO: 470759
ugacuuaaagccaugcagu

SEQ ID NO: 470761 - RNA, 19 nt, Artificial Sequence
  Description of Artificial Sequence: Synthetic oligonucleotide
  Sense strand starting at position 1292 of SEQ ID NO: 317181
gcuuuaagucagggaagga

SEQ ID NO: 470762 - RNA, 19 nt, Artificial Sequence
  Description of Artificial Sequence: Synthetic oligonucleotide
  Antisense Strand to SEQ ID NO: 470761
uccuucccugacuuaaagc

SEQ ID NO: 470763 - RNA, 19 nt, Artificial Sequence
  Description of Artificial Sequence: Synthetic oligonucleotide
  Sense strand starting at position 1312 of SEQ ID NO: 317181
aagagagguuucuguaacu

SEQ ID NO: 470764 - RNA, 19 nt, Artificial Sequence
  Description of Artificial Sequence: Synthetic oligonucleotide
  Antisense Strand to SEQ ID NO: 470763
aguuacagaaaccucucuu

SEQ ID NO: 470765 - RNA, 19 nt, Artificial Sequence
  Description of Artificial Sequence: Synthetic oligonucleotide
  Sense strand starting at position 2712 of SEQ ID NO: 317181
guacucgucccugcguauu

SEQ ID NO: 470766 - RNA, 19 nt, Artificial Sequence
  Description of Artificial Sequence: Synthetic oligonucleotide
  Antisense Strand to SEQ ID NO: 470765
aauacgcagggacgaguac

SEQ ID NO: 470767 - RNA, 19 nt, Artificial Sequence
  Description of Artificial Sequence: Synthetic oligonucleotide
  Sense strand starting at position 2761 of SEQ ID NO: 317181
ugugucuggccgucuguua

SEQ ID NO: 470768 - RNA, 19 nt, Artificial Sequence
  Description of Artificial Sequence: Synthetic oligonucleotide
  Antisense Strand to SEQ ID NO: 470767
uaacagacggccagacaca

SEQ ID NO: 470769 - RNA, 19 nt, Artificial Sequence
  Description of Artificial Sequence: Synthetic oligonucleotide
  Sense strand starting at position 2762 of SEQ ID NO: 317181
gugucuggccgucuguuau

SEQ ID NO: 470770 - RNA, 19 nt, Artificial Sequence
  Description of Artificial Sequence: Synthetic oligonucleotide
  Antisense Strand to SEQ ID NO: 470769
auaacagacggccagacac

SEQ ID NO: 470771 - RNA, 19 nt, Artificial Sequence
  Description of Artificial Sequence: Synthetic oligonucleotide
  Sense strand starting at position 2771 of SEQ ID NO: 317181
cgucuguuaucgggugugu

SEQ ID NO: 470772 - RNA, 19 nt, Artificial Sequence
  Description of Artificial Sequence: Synthetic oligonucleotide
  Antisense Strand to SEQ ID NO: 470771
acacacccgauaacagacg

SEQ ID NO: 470773 - RNA, 19 nt, Artificial Sequence
  Description of Artificial Sequence: Synthetic oligonucleotide
  Sense strand starting at position 2773 of SEQ ID NO: 317181
ucuguuaucgggugugucu

SEQ ID NO: 470774 - RNA, 19 nt, Artificial Sequence
  Description of Artificial Sequence: Synthetic oligonucleotide
  Antisense Strand to SEQ ID NO: 470773
agacacacccgauaacaga

SEQ ID NO: 470775 - RNA, 19 nt, Artificial Sequence
  Description of Artificial Sequence: Synthetic oligonucleotide
  Sense strand starting at position 2884 of SEQ ID NO: 317181
ugugugucggcugcgagau

SEQ ID NO: 470776 - RNA, 19 nt, Artificial Sequence
  Description of Artificial Sequence: Synthetic oligonucleotide
  Antisense Strand to SEQ ID NO: 470775
aucucgcagccgacacaca

SEQ ID NO: 470777 - RNA, 19 nt, Artificial Sequence
  Description of Artificial Sequence: Synthetic oligonucleotide
  Sense strand starting at position 3161 of SEQ ID NO: 317181
ugggaaguuucagcugaag

SEQ ID NO: 470778 - RNA, 19 nt, Artificial Sequence
  Description of Artificial Sequence: Synthetic oligonucleotide
  Antisense Strand to SEQ ID NO: 470777
cuucagcugaaacuuccca

SEQ ID NO: 470779 - RNA, 19 nt, Artificial Sequence
  Description of Artificial Sequence: Synthetic oligonucleotide
  Sense strand starting at position 3541 of SEQ ID NO: 317181
acacauauguauguguuga

SEQ ID NO: 470780 - RNA, 19 nt, Artificial Sequence
  Description of Artificial Sequence: Synthetic oligonucleotide
  Antisense Strand to SEQ ID NO: 470779
ucaacacauacauaugugu

SEQ ID NO: 470781 - RNA, 19 nt, Artificial Sequence
  Description of Artificial Sequence: Synthetic oligonucleotide
  Sense strand starting at position 3545 of SEQ ID NO: 317181
auauguauguguugaccua

SEQ ID NO: 470782 - RNA, 19 nt, Artificial Sequence
  Description of Artificial Sequence: Synthetic oligonucleotide
  Antisense Strand to SEQ ID NO: 470781
uaggucaacacauacauau

SEQ ID NO: 470783 - RNA, 19 nt, Artificial Sequence
  Description of Artificial Sequence: Synthetic oligonucleotide
  Sense strand starting at position 3546 of SEQ ID NO: 317181
uauguauguguugaccuau

SEQ ID NO: 470784 - RNA, 19 nt, Artificial Sequence
  Description of Artificial Sequence: Synthetic oligonucleotide
  Antisense Strand to SEQ ID NO: 470783
auaggucaacacauacaua

SEQ ID NO: 470785 - RNA, 19 nt, Artificial Sequence
  Description of Artificial Sequence: Synthetic oligonucleotide
  Sense strand starting at position 3694 of SEQ ID NO: 317181
gggaucaugaccugugaga

SEQ ID NO: 470786 - RNA, 19 nt, Artificial Sequence
  Description of Artificial Sequence: Synthetic oligonucleotide
  Antisense Strand to SEQ ID NO: 470785
ucucacaggucaugauccc

SEQ ID NO: 470787 - RNA, 19 nt, Artificial Sequence
  Description of Artificial Sequence: Synthetic oligonucleotide
  Sense strand starting at position 3696 of SEQ ID NO: 317181
gaucaugaccugugagacu

SEQ ID NO: 470788 - RNA, 19 nt, Artificial Sequence
  Description of Artificial Sequence: Synthetic oligonucleotide
  Antisense Strand to SEQ ID NO: 470787
agucucacaggucaugauc

SEQ ID NO: 470789 - RNA, 19 nt, Artificial Sequence
  Description of Artificial Sequence: Synthetic oligonucleotide
  Sense strand starting at position 3725 of SEQ ID NO: 317181
cuucuaagagcuugggagu

SEQ ID NO: 470790 - RNA, 19 nt, Artificial Sequence
  Description of Artificial Sequence: Synthetic oligonucleotide
  Antisense Strand to SEQ ID NO: 470789
acucccaagcucuuagaag

SEQ ID NO: 470791 - RNA, 19 nt, Artificial Sequence
  Description of Artificial Sequence: Synthetic oligonucleotide
  Sense strand starting at position 57 of SEQ ID NO: 317182
aucagauaauuuggagaga

SEQ ID NO: 470792 - RNA, 19 nt, Artificial Sequence
  Description of Artificial Sequence: Synthetic oligonucleotide
  Antisense Strand to SEQ ID NO: 470791
ucucuccaaauuaucugau

SEQ ID NO: 470793 - RNA, 19 nt, Artificial Sequence
  Description of Artificial Sequence: Synthetic oligonucleotide
  Sense strand starting at position 285 of SEQ ID NO: 317182
ggcgaugauggcuauaacu

SEQ ID NO: 470794 - RNA, 19 nt, Artificial Sequence
  Description of Artificial Sequence: Synthetic oligonucleotide
  Antisense Strand to SEQ ID NO: 470793
aguuauagccaucaucgcc

SEQ ID NO: 470795 - RNA, 19 nt, Artificial Sequence
  Description of Artificial Sequence: Synthetic oligonucleotide
  Sense strand starting at position 287 of SEQ ID NO: 317182
cgaugauggcuauaacugu

SEQ ID NO: 470796 - RNA, 19 nt, Artificial Sequence
  Description of Artificial Sequence: Synthetic oligonucleotide
  Antisense Strand to SEQ ID NO: 470795
acaguuauagccaucaucg

SEQ ID NO: 470797 - RNA, 19 nt, Artificial Sequence
  Description of Artificial Sequence: Synthetic oligonucleotide
  Sense strand starting at position 293 of SEQ ID NO: 317182
uggcuauaacuguagccua

SEQ ID NO: 470798 - RNA, 19 nt, Artificial Sequence
  Description of Artificial Sequence: Synthetic oligonucleotide
  Antisense Strand to SEQ ID NO: 470797
uaggcuacaguuauagcca

SEQ ID NO: 470799 - RNA, 19 nt, Artificial Sequence
  Description of Artificial Sequence: Synthetic oligonucleotide
  Sense strand starting at position 298 of SEQ ID NO: 317182
auaacuguagccuacugaa

SEQ ID NO: 470800 - RNA, 19 nt, Artificial Sequence
  Description of Artificial Sequence: Synthetic oligonucleotide
  Antisense Strand to SEQ ID NO: 470799
uucaguaggcuacaguuau

SEQ ID NO: 470801 - RNA, 19 nt, Artificial Sequence
  Description of Artificial Sequence: Synthetic oligonucleotide
  Sense strand starting at position 349 of SEQ ID NO: 317182
agcuaagcucaucagacua

SEQ ID NO: 470802 - RNA, 19 nt, Artificial Sequence
  Description of Artificial Sequence: Synthetic oligonucleotide
  Antisense Strand to SEQ ID NO: 470801
uagucugaugagcuuagcu

SEQ ID NO: 470803 - RNA, 19 nt, Artificial Sequence
  Description of Artificial Sequence: Synthetic oligonucleotide
  Sense strand starting at position 455 of SEQ ID NO: 317182
aacaaagaguucuuagugu

SEQ ID NO: 470804 - RNA, 19 nt, Artificial Sequence
  Description of Artificial Sequence: Synthetic oligonucleotide
  Antisense Strand to SEQ ID NO: 470803
acacuaagaacucuuuguu

SEQ ID NO: 470805 - RNA, 19 nt, Artificial Sequence
  Description of Artificial Sequence: Synthetic oligonucleotide
  Sense strand starting at position 461 of SEQ ID NO: 317182
gaguucuuaguguaaacua

SEQ ID NO: 470806 - RNA, 19 nt, Artificial Sequence
  Description of Artificial Sequence: Synthetic oligonucleotide
  Antisense Strand to SEQ ID NO: 470805
uaguuuacacuaagaacuc

SEQ ID NO: 470807 - RNA, 19 nt, Artificial Sequence
  Description of Artificial Sequence: Synthetic oligonucleotide
  Sense strand starting at position 528 of SEQ ID NO: 317182
gaggcuucuguauaaucaa

SEQ ID NO: 470808 - RNA, 19 nt, Artificial Sequence
  Description of Artificial Sequence: Synthetic oligonucleotide
  Antisense Strand to SEQ ID NO: 470807
uugauuauacagaagccuc

SEQ ID NO: 470809 - RNA, 19 nt, Artificial Sequence
  Description of Artificial Sequence: Synthetic oligonucleotide
  Sense strand starting at position 563 of SEQ ID NO: 317182
ugguaugcacuacggaaau

SEQ ID NO: 470810 - RNA, 19 nt, Artificial Sequence
  Description of Artificial Sequence: Synthetic oligonucleotide
  Antisense Strand to SEQ ID NO: 470809
auuuccguagugcauacca

SEQ ID NO: 470811 - RNA, 19 nt, Artificial Sequence
  Description of Artificial Sequence: Synthetic oligonucleotide
  Sense strand starting at position 692 of SEQ ID NO: 317182
ucuugcuaggucuaacagu

SEQ ID NO: 470812 - RNA, 19 nt, Artificial Sequence
  Description of Artificial Sequence: Synthetic oligonucleotide
  Antisense Strand to SEQ ID NO: 470811
acuguuagaccuagcaaga

SEQ ID NO: 470813 - RNA, 19 nt, Artificial Sequence
  Description of Artificial Sequence: Synthetic oligonucleotide
  Sense strand starting at position 698 of SEQ ID NO: 317182
uaggucuaacaguacguua

SEQ ID NO: 470814 - RNA, 19 nt, Artificial Sequence
  Description of Artificial Sequence: Synthetic oligonucleotide
  Antisense Strand to SEQ ID NO: 470813
uaacguacuguuagaccua

SEQ ID NO: 470815 - RNA, 19 nt, Artificial Sequence
  Description of Artificial Sequence: Synthetic oligonucleotide
  Sense strand starting at position 703 of SEQ ID NO: 317182
cuaacaguacguuauaaau

SEQ ID NO: 470816 - RNA, 19 nt, Artificial Sequence
  Description of Artificial Sequence: Synthetic oligonucleotide
  Antisense Strand to SEQ ID NO: 470815
auuuauaacguacuguuag

SEQ ID NO: 470817 - RNA, 19 nt, Artificial Sequence
  Description of Artificial Sequence: Synthetic oligonucleotide
  Sense strand starting at position 713 of SEQ ID NO: 317182
guuauaaauacgggcugaa

SEQ ID NO: 470818 - RNA, 19 nt, Artificial Sequence
  Description of Artificial Sequence: Synthetic oligonucleotide
  Antisense Strand to SEQ ID NO: 470817
uucagcccguauuuauaac

SEQ ID NO: 470819 - RNA, 19 nt, Artificial Sequence
  Description of Artificial Sequence: Synthetic oligonucleotide
  Sense strand starting at position 947 of SEQ ID NO: 317182
augacaauguccgcaacau

SEQ ID NO: 470820 - RNA, 19 nt, Artificial Sequence
  Description of Artificial Sequence: Synthetic oligonucleotide
  Antisense Strand to SEQ ID NO: 470819
auguugcggacauugucau

SEQ ID NO: 470821 - RNA, 19 nt, Artificial Sequence
  Description of Artificial Sequence: Synthetic oligonucleotide
  Sense strand starting at position 948 of SEQ ID NO: 317182
ugacaauguccgcaacaua

SEQ ID NO: 470822 - RNA, 19 nt, Artificial Sequence
  Description of Artificial Sequence: Synthetic oligonucleotide
  Antisense Strand to SEQ ID NO: 470821
uauguugcggacauuguca

SEQ ID NO: 470823 - RNA, 19 nt, Artificial Sequence
  Description of Artificial Sequence: Synthetic oligonucleotide
  Sense strand starting at position 1248 of SEQ ID NO: 317182
acaugugaaucgucugaaa

SEQ ID NO: 470824 - RNA, 19 nt, Artificial Sequence
  Description of Artificial Sequence: Synthetic oligonucleotide
  Antisense Strand to SEQ ID NO: 470823
uuucagacgauucacaugu

SEQ ID NO: 470825 - RNA, 19 nt, Artificial Sequence
  Description of Artificial Sequence: Synthetic oligonucleotide
  Sense strand starting at position 1250 of SEQ ID NO: 317182
augugaaucgucugaaaga

SEQ ID NO: 470826 - RNA, 19 nt, Artificial Sequence
  Description of Artificial Sequence: Synthetic oligonucleotide
  Antisense Strand to SEQ ID NO: 470825
ucuuucagacgauucacau

SEQ ID NO: 470827 - RNA, 19 nt, Artificial Sequence
  Description of Artificial Sequence: Synthetic oligonucleotide
  Sense strand starting at position 1414 of SEQ ID NO: 317182
cugagcaacuguguuagaa

SEQ ID NO: 470828 - RNA, 19 nt, Artificial Sequence
  Description of Artificial Sequence: Synthetic oligonucleotide
  Antisense Strand to SEQ ID NO: 470827
uucuaacacaguugcucag

SEQ ID NO: 470829 - RNA, 19 nt, Artificial Sequence
  Description of Artificial Sequence: Synthetic oligonucleotide
  Sense strand starting at position 1512 of SEQ ID NO: 317182
uguuuaguauaccuacaca

SEQ ID NO: 470830 - RNA, 19 nt, Artificial Sequence
  Description of Artificial Sequence: Synthetic oligonucleotide
  Antisense Strand to SEQ ID NO: 470829
uguguagguauacuaaaca

SEQ ID NO: 470831 - RNA, 19 nt, Artificial Sequence
  Description of Artificial Sequence: Synthetic oligonucleotide
  Sense strand starting at position 1705 of SEQ ID NO: 317182
acaaguaaaguuugaucca

SEQ ID NO: 470832 - RNA, 19 nt, Artificial Sequence
  Description of Artificial Sequence: Synthetic oligonucleotide
  Antisense Strand to SEQ ID NO: 470831
uggaucaaacuuuacuugu

SEQ ID NO: 470833 - RNA, 19 nt, Artificial Sequence
  Description of Artificial Sequence: Synthetic oligonucleotide
  Sense strand starting at position 1708 of SEQ ID NO: 317182
aguaaaguuugauccacca

SEQ ID NO: 470834 - RNA, 19 nt, Artificial Sequence
  Description of Artificial Sequence: Synthetic oligonucleotide
  Antisense Strand to SEQ ID NO: 470833
ugguggaucaaacuuuacu

SEQ ID NO: 470835 - RNA, 19 nt, Artificial Sequence
  Description of Artificial Sequence: Synthetic oligonucleotide
  Sense strand starting at position 1732 of SEQ ID NO: 317182
aguaaacacuugguuuacu

SEQ ID NO: 470836 - RNA, 19 nt, Artificial Sequence
  Description of Artificial Sequence: Synthetic oligonucleotide
  Antisense Strand to SEQ ID NO: 470835
aguaaaccaaguguuuacu

SEQ ID NO: 470837 - RNA, 19 nt, Artificial Sequence
  Description of Artificial Sequence: Synthetic oligonucleotide
  Sense strand starting at position 1876 of SEQ ID NO: 317182
acaaguuguccucaacuca

SEQ ID NO: 470838 - RNA, 19 nt, Artificial Sequence
  Description of Artificial Sequence: Synthetic oligonucleotide
  Antisense Strand to SEQ ID NO: 470837
ugaguugaggacaacuugu

SEQ ID NO: 470839 - RNA, 19 nt, Artificial Sequence
  Description of Artificial Sequence: Synthetic oligonucleotide
  Sense strand starting at position 1932 of SEQ ID NO: 317182
gcgggcuuucgaguuucaa

SEQ ID NO: 470840 - RNA, 19 nt, Artificial Sequence
  Description of Artificial Sequence: Synthetic oligonucleotide
  Antisense Strand to SEQ ID NO: 470839
uugaaacucgaaagcccgc

SEQ ID NO: 470841 - RNA, 19 nt, Artificial Sequence
  Description of Artificial Sequence: Synthetic oligonucleotide
  Sense strand starting at position 2569 of SEQ ID NO: 317182
gagagugaguagucacuuc

SEQ ID NO: 470842 - RNA, 19 nt, Artificial Sequence
  Description of Artificial Sequence: Synthetic oligonucleotide
  Antisense Strand to SEQ ID NO: 470841
gaagugacuacucacucuc

SEQ ID NO: 470843 - RNA, 19 nt, Artificial Sequence
  Description of Artificial Sequence: Synthetic oligonucleotide
  Sense strand starting at position 3229 of SEQ ID NO: 317182
uuguguauuucuuuccaga

SEQ ID NO: 470844 - RNA, 19 nt, Artificial Sequence
  Description of Artificial Sequence: Synthetic oligonucleotide
  Antisense Strand to SEQ ID NO: 470843
ucuggaaagaaauacacaa

SEQ ID NO: 470845 - RNA, 19 nt, Artificial Sequence
  Description of Artificial Sequence: Synthetic oligonucleotide
  Sense strand starting at position 3446 of SEQ ID NO: 317182
agaugaaggcuuugccaaa

SEQ ID NO: 470846 - RNA, 19 nt, Artificial Sequence
  Description of Artificial Sequence: Synthetic oligonucleotide
  Antisense Strand to SEQ ID NO: 470845
uuuggcaaagccuucaucu

SEQ ID NO: 470847 - RNA, 19 nt, Artificial Sequence
  Description of Artificial Sequence: Synthetic oligonucleotide
  Sense strand starting at position 3510 of SEQ ID NO: 317182
gagacaugucacugucgga

SEQ ID NO: 470848 - RNA, 19 nt, Artificial Sequence
  Description of Artificial Sequence: Synthetic oligonucleotide
  Antisense Strand to SEQ ID NO: 470847
uccgacagugacaugucuc

SEQ ID NO: 470849 - RNA, 19 nt, Artificial Sequence
  Description of Artificial Sequence: Synthetic oligonucleotide
  Sense strand starting at position 3517 of SEQ ID NO: 317182
gucacugucggaagacguu

SEQ ID NO: 470850 - RNA, 19 nt, Artificial Sequence
  Description of Artificial Sequence: Synthetic oligonucleotide
  Antisense Strand to SEQ ID NO: 470849
aacgucuuccgacagugac

SEQ ID NO: 470851 - RNA, 19 nt, Artificial Sequence
  Description of Artificial Sequence: Synthetic oligonucleotide
  Sense strand starting at position 3566 of SEQ ID NO: 317182
ucuuguaaauugcuugaua

SEQ ID NO: 470852 - RNA, 19 nt, Artificial Sequence
  Description of Artificial Sequence: Synthetic oligonucleotide
  Antisense Strand to SEQ ID NO: 470851
uaucaagcaauuuacaaga

SEQ ID NO: 470853 - RNA, 19 nt, Artificial Sequence
  Description of Artificial Sequence: Synthetic oligonucleotide
  Sense strand starting at position 3568 of SEQ ID NO: 317182
uuguaaauugcuugauaac

SEQ ID NO: 470854 - RNA, 19 nt, Artificial Sequence
  Description of Artificial Sequence: Synthetic oligonucleotide
  Antisense Strand to SEQ ID NO: 470853
guuaucaagcaauuuacaa

SEQ ID NO: 470855 - RNA, 19 nt, Artificial Sequence
  Description of Artificial Sequence: Synthetic oligonucleotide
  Sense strand starting at position 3654 of SEQ ID NO: 317182
cguugaauggcagggaauu

SEQ ID NO: 470856 - RNA, 19 nt, Artificial Sequence
  Description of Artificial Sequence: Synthetic oligonucleotide
  Antisense Strand to SEQ ID NO: 470855
aauucccugccauucaacg

SEQ ID NO: 470857 - RNA, 19 nt, Artificial Sequence
  Description of Artificial Sequence: Synthetic oligonucleotide
  Sense strand starting at position 3843 of SEQ ID NO: 317182
ggagcauuacuauagguuu

SEQ ID NO: 470858 - RNA, 19 nt, Artificial Sequence
  Description of Artificial Sequence: Synthetic oligonucleotide
  Antisense Strand to SEQ ID NO: 470857
aaaccuauaguaaugcucc

SEQ ID NO: 470859 - RNA, 19 nt, Artificial Sequence
  Description of Artificial Sequence: Synthetic oligonucleotide
  Sense strand starting at position 3846 of SEQ ID NO: 317182
gcauuacuauagguuuaga

SEQ ID NO: 470860 - RNA, 19 nt, Artificial Sequence
  Description of Artificial Sequence: Synthetic oligonucleotide
  Antisense Strand to SEQ ID NO: 470859
ucuaaaccuauaguaaugc

SEQ ID NO: 470861 - RNA, 19 nt, Artificial Sequence
  Description of Artificial Sequence: Synthetic oligonucleotide
  Sense strand starting at position 3857 of SEQ ID NO: 317182
gguuuagacauguagucaa

SEQ ID NO: 470862 - RNA, 19 nt, Artificial Sequence
  Description of Artificial Sequence: Synthetic oligonucleotide
  Antisense Strand to SEQ ID NO: 470861
uugacuacaugucuaaacc

SEQ ID NO: 470863 - RNA, 19 nt, Artificial Sequence
  Description of Artificial Sequence: Synthetic oligonucleotide
  Sense strand starting at position 3860 of SEQ ID NO: 317182
uuagacauguagucaaaua

SEQ ID NO: 470864 - RNA, 19 nt, Artificial Sequence
  Description of Artificial Sequence: Synthetic oligonucleotide
  Antisense Strand to SEQ ID NO: 470863
uauuugacuacaugucuaa

SEQ ID NO: 470865 - RNA, 19 nt, Artificial Sequence
  Description of Artificial Sequence: Synthetic oligonucleotide
  Sense strand starting at position 3868 of SEQ ID NO: 317182
guagucaaauaccuuggaa

SEQ ID NO: 470866 - RNA, 19 nt, Artificial Sequence
  Description of Artificial Sequence: Synthetic oligonucleotide
  Antisense Strand to SEQ ID NO: 470865
uuccaagguauuugacuac

SEQ ID NO: 470867 - RNA, 19 nt, Artificial Sequence
  Description of Artificial Sequence: Synthetic oligonucleotide
  Sense strand starting at position 3870 of SEQ ID NO: 317182
agucaaauaccuuggaaug

SEQ ID NO: 470868 - RNA, 19 nt, Artificial Sequence
  Description of Artificial Sequence: Synthetic oligonucleotide
  Antisense Strand to SEQ ID NO: 470867
cauuccaagguauuugacu

SEQ ID NO: 470869 - RNA, 19 nt, Artificial Sequence
  Description of Artificial Sequence: Synthetic oligonucleotide
  Sense strand starting at position 3910 of SEQ ID NO: 317182
gugagaguccaacgacaaa

SEQ ID NO: 470870 - RNA, 19 nt, Artificial Sequence
  Description of Artificial Sequence: Synthetic oligonucleotide
  Antisense Strand to SEQ ID NO: 470869
uuugucguuggacucucac

SEQ ID NO: 470871 - RNA, 19 nt, Artificial Sequence
  Description of Artificial Sequence: Synthetic oligonucleotide
  Sense strand starting at position 56 of SEQ ID NO: 317183
aagggcuacuguucuguau

SEQ ID NO: 470872 - RNA, 19 nt, Artificial Sequence
  Description of Artificial Sequence: Synthetic oligonucleotide
  Antisense Strand to SEQ ID NO: 470871
auacagaacaguagcccuu

SEQ ID NO: 470873 - RNA, 19 nt, Artificial Sequence
  Description of Artificial Sequence: Synthetic oligonucleotide
  Sense strand starting at position 60 of SEQ ID NO: 317183
gcuacuguucuguauuaga

SEQ ID NO: 470874 - RNA, 19 nt, Artificial Sequence
  Description of Artificial Sequence: Synthetic oligonucleotide
  Antisense Strand to SEQ ID NO: 470873
ucuaauacagaacaguagc

SEQ ID NO: 470875 - RNA, 19 nt, Artificial Sequence
  Description of Artificial Sequence: Synthetic oligonucleotide
  Sense strand starting at position 154 of SEQ ID NO: 317183
cugcauccucucugagagu

SEQ ID NO: 470876 - RNA, 19 nt, Artificial Sequence
  Description of Artificial Sequence: Synthetic oligonucleotide
  Antisense Strand to SEQ ID NO: 470875
acucucagagaggaugcag

SEQ ID NO: 470877 - RNA, 19 nt, Artificial Sequence
  Description of Artificial Sequence: Synthetic oligonucleotide
  Sense strand starting at position 165 of SEQ ID NO: 317183
cugagagucuccuuucuga

SEQ ID NO: 470878 - RNA, 19 nt, Artificial Sequence
  Description of Artificial Sequence: Synthetic oligonucleotide
  Antisense Strand to SEQ ID NO: 470877
ucagaaaggagacucucag

SEQ ID NO: 470879 - RNA, 19 nt, Artificial Sequence
  Description of Artificial Sequence: Synthetic oligonucleotide
  Sense strand starting at position 172 of SEQ ID NO: 317183
ucuccuuucugagcagaaa

SEQ ID NO: 470880 - RNA, 19 nt, Artificial Sequence
  Description of Artificial Sequence: Synthetic oligonucleotide
  Antisense Strand to SEQ ID NO: 470879
uuucugcucagaaaggaga

SEQ ID NO: 470881 - RNA, 19 nt, Artificial Sequence
  Description of Artificial Sequence: Synthetic oligonucleotide
  Sense strand starting at position 173 of SEQ ID NO: 317183
cuccuuucugagcagaaag

SEQ ID NO: 470882 - RNA, 19 nt, Artificial Sequence
  Description of Artificial Sequence: Synthetic oligonucleotide
  Antisense Strand to SEQ ID NO: 470881
cuuucugcucagaaaggag

SEQ ID NO: 470883 - RNA, 19 nt, Artificial Sequence
  Description of Artificial Sequence: Synthetic oligonucleotide
  Sense strand starting at position 184 of SEQ ID NO: 317183
gcagaaagcguccaccuau

SEQ ID NO: 470884 - RNA, 19 nt, Artificial Sequence
  Description of Artificial Sequence: Synthetic oligonucleotide
  Antisense Strand to SEQ ID NO: 470883
auagguggacgcuuucugc

SEQ ID NO: 470885 - RNA, 19 nt, Artificial Sequence
  Description of Artificial Sequence: Synthetic oligonucleotide
  Sense strand starting at position 211 of SEQ ID NO: 317183
ugaacaaugucaguaacaa

SEQ ID NO: 470886 - RNA, 19 nt, Artificial Sequence
  Description of Artificial Sequence: Synthetic oligonucleotide
  Antisense Strand to SEQ ID NO: 470885
uuguuacugacauuguuca

SEQ ID NO: 470887 - RNA, 19 nt, Artificial Sequence
  Description of Artificial Sequence: Synthetic oligonucleotide
  Sense strand starting at position 271 of SEQ ID NO: 317183
acugaaacugcuugaaggu

SEQ ID NO: 470888 - RNA, 19 nt, Artificial Sequence
  Description of Artificial Sequence: Synthetic oligonucleotide
  Antisense Strand to SEQ ID NO: 470887
accuucaagcaguuucagu

SEQ ID NO: 470889 - RNA, 19 nt, Artificial Sequence
  Description of Artificial Sequence: Synthetic oligonucleotide
  Sense strand starting at position 272 of SEQ ID NO: 317183
cugaaacugcuugaagguu

SEQ ID NO: 470890 - RNA, 19 nt, Artificial Sequence
  Description of Artificial Sequence: Synthetic oligonucleotide
  Antisense Strand to SEQ ID NO: 470889
aaccuucaagcaguuucag

SEQ ID NO: 470891 - RNA, 19 nt, Artificial Sequence
  Description of Artificial Sequence: Synthetic oligonucleotide
  Sense strand starting at position 691 of SEQ ID NO: 317183
acacuuaaugccuggcaua

SEQ ID NO: 470892 - RNA, 19 nt, Artificial Sequence
  Description of Artificial Sequence: Synthetic oligonucleotide
  Antisense Strand to SEQ ID NO: 470891
uaugccaggcauuaagugu

SEQ ID NO: 470893 - RNA, 19 nt, Artificial Sequence
  Description of Artificial Sequence: Synthetic oligonucleotide
  Sense strand starting at position 730 of SEQ ID NO: 317183
guuagcaauguccauuauu

SEQ ID NO: 470894 - RNA, 19 nt, Artificial Sequence
  Description of Artificial Sequence: Synthetic oligonucleotide
  Antisense Strand to SEQ ID NO: 470893
aauaauggacauugcuaac

SEQ ID NO: 470895 - RNA, 19 nt, Artificial Sequence
  Description of Artificial Sequence: Synthetic oligonucleotide
  Sense strand starting at position 773 of SEQ ID NO: 317183
gccaaugauuaauaagaau

SEQ ID NO: 470896 - RNA, 19 nt, Artificial Sequence
  Description of Artificial Sequence: Synthetic oligonucleotide
  Antisense Strand to SEQ ID NO: 470895
auucuuauuaaucauuggc

SEQ ID NO: 470897 - RNA, 19 nt, Artificial Sequence
  Description of Artificial Sequence: Synthetic oligonucleotide
  Sense strand starting at position 898 of SEQ ID NO: 317183
agccuaucauuugcaaagu

SEQ ID NO: 470898 - RNA, 19 nt, Artificial Sequence
  Description of Artificial Sequence: Synthetic oligonucleotide
  Antisense Strand to SEQ ID NO: 470897
acuuugcaaaugauaggcu

SEQ ID NO: 470899 - RNA, 19 nt, Artificial Sequence
  Description of Artificial Sequence: Synthetic oligonucleotide
  Sense strand starting at position 1013 of SEQ ID NO: 317183
ccuguaagacuuugaaugu

SEQ ID NO: 470900 - RNA, 19 nt, Artificial Sequence
  Description of Artificial Sequence: Synthetic oligonucleotide
  Antisense Strand to SEQ ID NO: 470899
acauucaaagucuuacagg

SEQ ID NO: 470901 - RNA, 19 nt, Artificial Sequence
  Description of Artificial Sequence: Synthetic oligonucleotide
  Sense strand starting at position 1679 of SEQ ID NO: 317183
cgucuuauccaucauagua

SEQ ID NO: 470902 - RNA, 19 nt, Artificial Sequence
  Description of Artificial Sequence: Synthetic oligonucleotide
  Antisense Strand to SEQ ID NO: 470901
uacuaugauggauaagacg

SEQ ID NO: 470903 - RNA, 19 nt, Artificial Sequence
  Description of Artificial Sequence: Synthetic oligonucleotide
  Sense strand starting at position 1687 of SEQ ID NO: 317183
ccaucauaguagcuuucua

SEQ ID NO: 470904 - RNA, 19 nt, Artificial Sequence
  Description of Artificial Sequence: Synthetic oligonucleotide
  Antisense Strand to SEQ ID NO: 470903
uagaaagcuacuaugaugg

SEQ ID NO: 470905 - RNA, 19 nt, Artificial Sequence
  Description of Artificial Sequence: Synthetic oligonucleotide
  Sense strand starting at position 1821 of SEQ ID NO: 317183
uaagauccagccugugaaa

SEQ ID NO: 470906 - RNA, 19 nt, Artificial Sequence
  Description of Artificial Sequence: Synthetic oligonucleotide
  Antisense Strand to SEQ ID NO: 470905
uuucacaggcuggaucuua

SEQ ID NO: 470907 - RNA, 19 nt, Artificial Sequence
  Description of Artificial Sequence: Synthetic oligonucleotide
  Sense strand starting at position 1823 of SEQ ID NO: 317183
agauccagccugugaaauu

SEQ ID NO: 470908 - RNA, 19 nt, Artificial Sequence
  Description of Artificial Sequence: Synthetic oligonucleotide
  Antisense Strand to SEQ ID NO: 470907
aauuucacaggcuggaucu

SEQ ID NO: 470909 - RNA, 19 nt, Artificial Sequence
  Description of Artificial Sequence: Synthetic oligonucleotide
  Sense strand starting at position 1834 of SEQ ID NO: 317183
gugaaauucuacuagaaca

SEQ ID NO: 470910 - RNA, 19 nt, Artificial Sequence
  Description of Artificial Sequence: Synthetic oligonucleotide
  Antisense Strand to SEQ ID NO: 470909
uguucuaguagaauuucac

SEQ ID NO: 470911 - RNA, 19 nt, Artificial Sequence
  Description of Artificial Sequence: Synthetic oligonucleotide
  Sense strand starting at position 1931 of SEQ ID NO: 317183
cucuguucucucgaagaua

SEQ ID NO: 470912 - RNA, 19 nt, Artificial Sequence
  Description of Artificial Sequence: Synthetic oligonucleotide
  Antisense Strand to SEQ ID NO: 470911
uaucuucgagagaacagag

SEQ ID NO: 470913 - RNA, 19 nt, Artificial Sequence
  Description of Artificial Sequence: Synthetic oligonucleotide
  Sense strand starting at position 1934 of SEQ ID NO: 317183
uguucucucgaagauagug

SEQ ID NO: 470914 - RNA, 19 nt, Artificial Sequence
  Description of Artificial Sequence: Synthetic oligonucleotide
  Antisense Strand to SEQ ID NO: 470913
cacuaucuucgagagaaca

SEQ ID NO: 470915 - RNA, 19 nt, Artificial Sequence
  Description of Artificial Sequence: Synthetic oligonucleotide
  Sense strand starting at position 1981 of SEQ ID NO: 317183
cgagacugagagugcaaua

SEQ ID NO: 470916 - RNA, 19 nt, Artificial Sequence
  Description of Artificial Sequence: Synthetic oligonucleotide
  Antisense Strand to SEQ ID NO: 470915
uauugcacucucagucucg

SEQ ID NO: 470917 - RNA, 19 nt, Artificial Sequence
  Description of Artificial Sequence: Synthetic oligonucleotide
  Sense strand starting at position 1986 of SEQ ID NO: 317183
cugagagugcaauaccuaa

SEQ ID NO: 470918 - RNA, 19 nt, Artificial Sequence
  Description of Artificial Sequence: Synthetic oligonucleotide
  Antisense Strand to SEQ ID NO: 470917
uuagguauugcacucucag

SEQ ID NO: 470919 - RNA, 19 nt, Artificial Sequence
  Description of Artificial Sequence: Synthetic oligonucleotide
  Sense strand starting at position 2239 of SEQ ID NO: 317183
gccuuucuccuuuaggaca

SEQ ID NO: 470920 - RNA, 19 nt, Artificial Sequence
  Description of Artificial Sequence: Synthetic oligonucleotide
  Antisense Strand to SEQ ID NO: 470919
uguccuaaaggagaaaggc

SEQ ID NO: 470921 - RNA, 19 nt, Artificial Sequence
  Description of Artificial Sequence: Synthetic oligonucleotide
  Sense strand starting at position 2390 of SEQ ID NO: 317183
cuggcaacuucuguaggaa

SEQ ID NO: 470922 - RNA, 19 nt, Artificial Sequence
  Description of Artificial Sequence: Synthetic oligonucleotide
  Antisense Strand to SEQ ID NO: 470921
uuccuacagaaguugccag

SEQ ID NO: 470923 - RNA, 19 nt, Artificial Sequence
  Description of Artificial Sequence: Synthetic oligonucleotide
  Sense strand starting at position 2391 of SEQ ID NO: 317183
uggcaacuucuguaggaau

SEQ ID NO: 470924 - RNA, 19 nt, Artificial Sequence
  Description of Artificial Sequence: Synthetic oligonucleotide
  Antisense Strand to SEQ ID NO: 470923
auuccuacagaaguugcca

SEQ ID NO: 470925 - RNA, 19 nt, Artificial Sequence
  Description of Artificial Sequence: Synthetic oligonucleotide
  Sense strand starting at position 2393 of SEQ ID NO: 317183
gcaacuucuguaggaaugu

SEQ ID NO: 470926 - RNA, 19 nt, Artificial Sequence
  Description of Artificial Sequence: Synthetic oligonucleotide
  Antisense Strand to SEQ ID NO: 470925
acauuccuacagaaguugc

SEQ ID NO: 470927 - RNA, 19 nt, Artificial Sequence
  Description of Artificial Sequence: Synthetic oligonucleotide
  Sense strand starting at position 2471 of SEQ ID NO: 317183
cuuagaggcucuguguaaa

SEQ ID NO: 470928 - RNA, 19 nt, Artificial Sequence
  Description of Artificial Sequence: Synthetic oligonucleotide
  Antisense Strand to SEQ ID NO: 470927
uuuacacagagccucuaag

SEQ ID NO: 470929 - RNA, 19 nt, Artificial Sequence
  Description of Artificial Sequence: Synthetic oligonucleotide
  Sense strand starting at position 2527 of SEQ ID NO: 317183
cucauucuuuccuugguga

SEQ ID NO: 470930 - RNA, 19 nt, Artificial Sequence
  Description of Artificial Sequence: Synthetic oligonucleotide
  Antisense Strand to SEQ ID NO: 470929
ucaccaaggaaagaaugag

SEQ ID NO: 470931 - RNA, 19 nt, Artificial Sequence
  Description of Artificial Sequence: Synthetic oligonucleotide
  Sense strand starting at position 2528 of SEQ ID NO: 317183
ucauucuuuccuuggugau

SEQ ID NO: 470932 - RNA, 19 nt, Artificial Sequence
  Description of Artificial Sequence: Synthetic oligonucleotide
  Antisense Strand to SEQ ID NO: 470931
aucaccaaggaaagaauga

SEQ ID NO: 470933 - RNA, 19 nt, Artificial Sequence
  Description of Artificial Sequence: Synthetic oligonucleotide
  Sense strand starting at position 2530 of SEQ ID NO: 317183
auucuuuccuuggugauca

SEQ ID NO: 470934 - RNA, 19 nt, Artificial Sequence
  Description of Artificial Sequence: Synthetic oligonucleotide
  Antisense Strand to SEQ ID NO: 470933
ugaucaccaaggaaagaau

SEQ ID NO: 470935 - RNA, 19 nt, Artificial Sequence
  Description of Artificial Sequence: Synthetic oligonucleotide
  Sense strand starting at position 2611 of SEQ ID NO: 317183
guaucaucccaagagguuu

SEQ ID NO: 470936 - RNA, 19 nt, Artificial Sequence
  Description of Artificial Sequence: Synthetic oligonucleotide
  Antisense Strand to SEQ ID NO: 470935
aaaccucuugggaugauac

SEQ ID NO: 470937 - RNA, 19 nt, Artificial Sequence
  Description of Artificial Sequence: Synthetic oligonucleotide
  Sense strand starting at position 2774 of SEQ ID NO: 317183
auucuaaagcugugaauug

SEQ ID NO: 470938 - RNA, 19 nt, Artificial Sequence
  Description of Artificial Sequence: Synthetic oligonucleotide
  Antisense Strand to SEQ ID NO: 470937
caauucacagcuuuagaau

SEQ ID NO: 470939 - RNA, 19 nt, Artificial Sequence
  Description of Artificial Sequence: Synthetic oligonucleotide
  Sense strand starting at position 3496 of SEQ ID NO: 317183
uuucuauuacuggguaucu

SEQ ID NO: 470940 - RNA, 19 nt, Artificial Sequence
  Description of Artificial Sequence: Synthetic oligonucleotide
  Antisense Strand to SEQ ID NO: 470939
agauacccaguaauagaaa

SEQ ID NO: 470941 - RNA, 19 nt, Artificial Sequence
  Description of Artificial Sequence: Synthetic oligonucleotide
  Sense strand starting at position 3521 of SEQ ID NO: 317183
aagauauuccuguaccgua

SEQ ID NO: 470942 - RNA, 19 nt, Artificial Sequence
  Description of Artificial Sequence: Synthetic oligonucleotide
  Antisense Strand to SEQ ID NO: 470941
uacgguacaggaauaucuu

SEQ ID NO: 470943 - RNA, 19 nt, Artificial Sequence
  Description of Artificial Sequence: Synthetic oligonucleotide
  Sense strand starting at position 3534 of SEQ ID NO: 317183
accguaaaggguuaugguu

SEQ ID NO: 470944 - RNA, 19 nt, Artificial Sequence
  Description of Artificial Sequence: Synthetic oligonucleotide
  Antisense Strand to SEQ ID NO: 470943
aaccauaacccuuuacggu

SEQ ID NO: 470945 - RNA, 19 nt, Artificial Sequence
  Description of Artificial Sequence: Synthetic oligonucleotide
  Sense strand starting at position 3972 of SEQ ID NO: 317183
gauccaauugagugguucu

SEQ ID NO: 470946 - RNA, 19 nt, Artificial Sequence
  Description of Artificial Sequence: Synthetic oligonucleotide
  Antisense Strand to SEQ ID NO: 470945
agaaccacucaauuggauc

SEQ ID NO: 470947 - RNA, 19 nt, Artificial Sequence
  Description of Artificial Sequence: Synthetic oligonucleotide
  Sense strand starting at position 3979 of SEQ ID NO: 317183
uugagugguucucccuuua

SEQ ID NO: 470948 - RNA, 19 nt, Artificial Sequence
  Description of Artificial Sequence: Synthetic oligonucleotide
  Antisense Strand to SEQ ID NO: 470947
uaaagggagaaccacucaa

SEQ ID NO: 470949 - RNA, 19 nt, Artificial Sequence
  Description of Artificial Sequence: Synthetic oligonucleotide
  Sense strand starting at position 3983 of SEQ ID NO: 317183
gugguucucccuuuacguu

SEQ ID NO: 470950 - RNA, 19 nt, Artificial Sequence
  Description of Artificial Sequence: Synthetic oligonucleotide
  Antisense Strand to SEQ ID NO: 470949
aacguaaagggagaaccac

SEQ ID NO: 470951 - RNA, 19 nt, Artificial Sequence
  Description of Artificial Sequence: Synthetic oligonucleotide
  Sense strand starting at position 69 of SEQ ID NO: 317184
uaugaaauuuacugagguc

SEQ ID NO: 470952 - RNA, 19 nt, Artificial Sequence
  Description of Artificial Sequence: Synthetic oligonucleotide
  Antisense Strand to SEQ ID NO: 470951
gaccucaguaaauuucaua

SEQ ID NO: 470953 - RNA, 19 nt, Artificial Sequence
  Description of Artificial Sequence: Synthetic oligonucleotide
  Sense strand starting at position 72 of SEQ ID NO: 317184
gaaauuuacugaggucaau

SEQ ID NO: 470954 - RNA, 19 nt, Artificial Sequence
  Description of Artificial Sequence: Synthetic oligonucleotide
  Antisense Strand to SEQ ID NO: 470953
auugaccucaguaaauuuc

SEQ ID NO: 470955 - RNA, 19 nt, Artificial Sequence
  Description of Artificial Sequence: Synthetic oligonucleotide
  Sense strand starting at position 124 of SEQ ID NO: 317184
ugcagauacuagcuggaaa

SEQ ID NO: 470956 - RNA, 19 nt, Artificial Sequence
  Description of Artificial Sequence: Synthetic oligonucleotide
  Antisense Strand to SEQ ID NO: 470955
uuuccagcuaguaucugca

SEQ ID NO: 470957 - RNA, 19 nt, Artificial Sequence
  Description of Artificial Sequence: Synthetic oligonucleotide
  Sense strand starting at position 596 of SEQ ID NO: 317184
uggaaucugucaucaccuu

SEQ ID NO: 470958 - RNA, 19 nt, Artificial Sequence
  Description of Artificial Sequence: Synthetic oligonucleotide
  Antisense Strand to SEQ ID NO: 470957
aaggugaugacagauucca

SEQ ID NO: 470959 - RNA, 19 nt, Artificial Sequence
  Description of Artificial Sequence: Synthetic oligonucleotide
  Sense strand starting at position 597 of SEQ ID NO: 317184
ggaaucugucaucaccuua

SEQ ID NO: 470960 - RNA, 19 nt, Artificial Sequence
  Description of Artificial Sequence: Synthetic oligonucleotide
  Antisense Strand to SEQ ID NO: 470959
uaaggugaugacagauucc

SEQ ID NO: 470961 - RNA, 19 nt, Artificial Sequence
  Description of Artificial Sequence: Synthetic oligonucleotide
  Sense strand starting at position 689 of SEQ ID NO: 317184
uuauguaaacauuggugaa

SEQ ID NO: 470962 - RNA, 19 nt, Artificial Sequence
  Description of Artificial Sequence: Synthetic oligonucleotide
  Antisense Strand to SEQ ID NO: 470961
uucaccaauguuuacauaa

SEQ ID NO: 470963 - RNA, 19 nt, Artificial Sequence
  Description of Artificial Sequence: Synthetic oligonucleotide
  Sense strand starting at position 878 of SEQ ID NO: 317184
cacucaucaccuuggagga

SEQ ID NO: 470964 - RNA, 19 nt, Artificial Sequence
  Description of Artificial Sequence: Synthetic oligonucleotide
  Antisense Strand to SEQ ID NO: 470963
uccuccaaggugaugagug

SEQ ID NO: 470965 - RNA, 19 nt, Artificial Sequence
  Description of Artificial Sequence: Synthetic oligonucleotide
  Sense strand starting at position 952 of SEQ ID NO: 317184
uuguccagauucuugauga

SEQ ID NO: 470966 - RNA, 19 nt, Artificial Sequence
  Description of Artificial Sequence: Synthetic oligonucleotide
  Antisense Strand to SEQ ID NO: 470965
ucaucaagaaucuggacaa

SEQ ID NO: 470967 - RNA, 19 nt, Artificial Sequence
  Description of Artificial Sequence: Synthetic oligonucleotide
  Sense strand starting at position 984 of SEQ ID NO: 317184
uccagaucuccucaaguag

SEQ ID NO: 470968 - RNA, 19 nt, Artificial Sequence
  Description of Artificial Sequence: Synthetic oligonucleotide
  Antisense Strand to SEQ ID NO: 470967
cuacuugaggagaucugga

SEQ ID NO: 470969 - RNA, 19 nt, Artificial Sequence
  Description of Artificial Sequence: Synthetic oligonucleotide
  Sense strand starting at position 1132 of SEQ ID NO: 317184
gugaccuggucccugcaaa

SEQ ID NO: 470970 - RNA, 19 nt, Artificial Sequence
  Description of Artificial Sequence: Synthetic oligonucleotide
  Antisense Strand to SEQ ID NO: 470969
uuugcagggaccaggucac

SEQ ID NO: 470971 - RNA, 19 nt, Artificial Sequence
  Description of Artificial Sequence: Synthetic oligonucleotide
  Sense strand starting at position 1133 of SEQ ID NO: 317184
ugaccuggucccugcaaau

SEQ ID NO: 470972 - RNA, 19 nt, Artificial Sequence
  Description of Artificial Sequence: Synthetic oligonucleotide
  Antisense Strand to SEQ ID NO: 470971
auuugcagggaccagguca

SEQ ID NO: 470973 - RNA, 19 nt, Artificial Sequence
  Description of Artificial Sequence: Synthetic oligonucleotide
  Sense strand starting at position 1205 of SEQ ID NO: 317184
cggugacaucugcauguaa

SEQ ID NO: 470974 - RNA, 19 nt, Artificial Sequence
  Description of Artificial Sequence: Synthetic oligonucleotide
  Antisense Strand to SEQ ID NO: 470973
uuacaugcagaugucaccg

SEQ ID NO: 470975 - RNA, 19 nt, Artificial Sequence
  Description of Artificial Sequence: Synthetic oligonucleotide
  Sense strand starting at position 1216 of SEQ ID NO: 317184
gcauguaagucacccacau

SEQ ID NO: 470976 - RNA, 19 nt, Artificial Sequence
  Description of Artificial Sequence: Synthetic oligonucleotide
  Antisense Strand to SEQ ID NO: 470975
augugggugacuuacaugc

SEQ ID NO: 470977 - RNA, 19 nt, Artificial Sequence
  Description of Artificial Sequence: Synthetic oligonucleotide
  Sense strand starting at position 1302 of SEQ ID NO: 317184
ccuggaguucuuugagcaa

SEQ ID NO: 470978 - RNA, 19 nt, Artificial Sequence
  Description of Artificial Sequence: Synthetic oligonucleotide
  Antisense Strand to SEQ ID NO: 470977
uugcucaaagaacuccagg

SEQ ID NO: 470979 - RNA, 19 nt, Artificial Sequence
  Description of Artificial Sequence: Synthetic oligonucleotide
  Sense strand starting at position 1487 of SEQ ID NO: 317184
cggcaacagaacugugaaa

SEQ ID NO: 470980 - RNA, 19 nt, Artificial Sequence
  Description of Artificial Sequence: Synthetic oligonucleotide
  Antisense Strand to SEQ ID NO: 470979
uuucacaguucuguugccg

SEQ ID NO: 470981 - RNA, 19 nt, Artificial Sequence
  Description of Artificial Sequence: Synthetic oligonucleotide
  Sense strand starting at position 1511 of SEQ ID NO: 317184
aagagagauuauuaggaca

SEQ ID NO: 470982 - RNA, 19 nt, Artificial Sequence
  Description of Artificial Sequence: Synthetic oligonucleotide
  Antisense Strand to SEQ ID NO: 470981
uguccuaauaaucucucuu

SEQ ID NO: 470983 - RNA, 19 nt, Artificial Sequence
  Description of Artificial Sequence: Synthetic oligonucleotide
  Sense strand starting at position 1514 of SEQ ID NO: 317184
agagauuauuaggacaaga

SEQ ID NO: 470984 - RNA, 19 nt, Artificial Sequence
  Description of Artificial Sequence: Synthetic oligonucleotide
  Antisense Strand to SEQ ID NO: 470983
ucuuguccuaauaaucucu

SEQ ID NO: 470985 - RNA, 19 nt, Artificial Sequence
  Description of Artificial Sequence: Synthetic oligonucleotide
  Sense strand starting at position 1542 of SEQ ID NO: 317184
cccucagauuugugagaaa

SEQ ID NO: 470986 - RNA, 19 nt, Artificial Sequence
  Description of Artificial Sequence: Synthetic oligonucleotide
  Antisense Strand to SEQ ID NO: 470985
uuucucacaaaucugaggg

SEQ ID NO: 470987 - RNA, 19 nt, Artificial Sequence
  Description of Artificial Sequence: Synthetic oligonucleotide
  Sense strand starting at position 1644 of SEQ ID NO: 317184
cucagagugguuuaaaguu

SEQ ID NO: 470988 - RNA, 19 nt, Artificial Sequence
  Description of Artificial Sequence: Synthetic oligonucleotide
  Antisense Strand to SEQ ID NO: 470987
aacuuuaaaccacucugag

SEQ ID NO: 470989 - RNA, 19 nt, Artificial Sequence
  Description of Artificial Sequence: Synthetic oligonucleotide
  Sense strand starting at position 2229 of SEQ ID NO: 317184
gaaggagccuuuccaaaug

SEQ ID NO: 470990 - RNA, 19 nt, Artificial Sequence
  Description of Artificial Sequence: Synthetic oligonucleotide
  Antisense Strand to SEQ ID NO: 470989
cauuuggaaaggcuccuuc

SEQ ID NO: 470991 - RNA, 19 nt, Artificial Sequence
  Description of Artificial Sequence: Synthetic oligonucleotide
  Sense strand starting at position 2343 of SEQ ID NO: 317184
ucugcaggauuccugaaau

SEQ ID NO: 470992 - RNA, 19 nt, Artificial Sequence
  Description of Artificial Sequence: Synthetic oligonucleotide
  Antisense Strand to SEQ ID NO: 470991
auuucaggaauccugcaga

SEQ ID NO: 470993 - RNA, 19 nt, Artificial Sequence
  Description of Artificial Sequence: Synthetic oligonucleotide
  Sense strand starting at position 2440 of SEQ ID NO: 317184
aaauguguucuucggaaau

SEQ ID NO: 470994 - RNA, 19 nt, Artificial Sequence
  Description of Artificial Sequence: Synthetic oligonucleotide
  Antisense Strand to SEQ ID NO: 470993
auuuccgaagaacacauuu

SEQ ID NO: 470995 - RNA, 19 nt, Artificial Sequence
  Description of Artificial Sequence: Synthetic oligonucleotide
  Sense strand starting at position 2446 of SEQ ID NO: 317184
guucuucggaaaugaguua

SEQ ID NO: 470996 - RNA, 19 nt, Artificial Sequence
  Description of Artificial Sequence: Synthetic oligonucleotide
  Antisense Strand to SEQ ID NO: 470995
uaacucauuuccgaagaac

SEQ ID NO: 470997 - RNA, 19 nt, Artificial Sequence
  Description of Artificial Sequence: Synthetic oligonucleotide
  Sense strand starting at position 2607 of SEQ ID NO: 317184
ugcacuuuauucucaggga

SEQ ID NO: 470998 - RNA, 19 nt, Artificial Sequence
  Description of Artificial Sequence: Synthetic oligonucleotide
  Antisense Strand to SEQ ID NO: 470997
ucccugagaauaaagugca

SEQ ID NO: 470999 - RNA, 19 nt, Artificial Sequence
  Description of Artificial Sequence: Synthetic oligonucleotide
  Sense strand starting at position 2730 of SEQ ID NO: 317184
uuacgugugaaaugaguua

SEQ ID NO: 471000 - RNA, 19 nt, Artificial Sequence
  Description of Artificial Sequence: Synthetic oligonucleotide
  Antisense Strand to SEQ ID NO: 470999
uaacucauuucacacguaa

SEQ ID NO: 471001 - RNA, 19 nt, Artificial Sequence
  Description of Artificial Sequence: Synthetic oligonucleotide
  Sense strand starting at position 2745 of SEQ ID NO: 317184
guuaauagauuuggaaaug

SEQ ID NO: 471002 - RNA, 19 nt, Artificial Sequence
  Description of Artificial Sequence: Synthetic oligonucleotide
  Antisense Strand to SEQ ID NO: 471001
cauuuccaaaucuauuaac

SEQ ID NO: 471003 - RNA, 19 nt, Artificial Sequence
  Description of Artificial Sequence: Synthetic oligonucleotide
  Sense strand starting at position 2757 of SEQ ID NO: 317184
ggaaauggauaacacaaua

SEQ ID NO: 471004 - RNA, 19 nt, Artificial Sequence
  Description of Artificial Sequence: Synthetic oligonucleotide
  Antisense Strand to SEQ ID NO: 471003
uauuguguuauccauuucc

SEQ ID NO: 471005 - RNA, 19 nt, Artificial Sequence
  Description of Artificial Sequence: Synthetic oligonucleotide
  Sense strand starting at position 2787 of SEQ ID NO: 317184
agugguuuccaguaacaau

SEQ ID NO: 471006 - RNA, 19 nt, Artificial Sequence
  Description of Artificial Sequence: Synthetic oligonucleotide
  Antisense Strand to SEQ ID NO: 471005
auuguuacuggaaaccacu

SEQ ID NO: 471007 - RNA, 19 nt, Artificial Sequence
  Description of Artificial Sequence: Synthetic oligonucleotide
  Sense strand starting at position 2908 of SEQ ID NO: 317184
guagcaugaccuugauucu

SEQ ID NO: 471008 - RNA, 19 nt, Artificial Sequence
  Description of Artificial Sequence: Synthetic oligonucleotide
  Antisense Strand to SEQ ID NO: 471007
agaaucaaggucaugcuac

SEQ ID NO: 471009 - RNA, 19 nt, Artificial Sequence
  Description of Artificial Sequence: Synthetic oligonucleotide
  Sense strand starting at position 2914 of SEQ ID NO: 317184
ugaccuugauucuccaaga

SEQ ID NO: 471010 - RNA, 19 nt, Artificial Sequence
  Description of Artificial Sequence: Synthetic oligonucleotide
  Antisense Strand to SEQ ID NO: 471009
ucuuggagaaucaagguca

SEQ ID NO: 471011 - RNA, 19 nt, Artificial Sequence
  Description of Artificial Sequence: Synthetic oligonucleotide
  Sense strand starting at position 2927 of SEQ ID NO: 317184
ccaagagugccagaaccua

SEQ ID NO: 471012 - RNA, 19 nt, Artificial Sequence
  Description of Artificial Sequence: Synthetic oligonucleotide
  Antisense Strand to SEQ ID NO: 471011
uagguucuggcacucuugg

SEQ ID NO: 471013 - RNA, 19 nt, Artificial Sequence
  Description of Artificial Sequence: Synthetic oligonucleotide
  Sense strand starting at position 2947 of SEQ ID NO: 317184
gaaauuaaccuguggucuc

SEQ ID NO: 471014 - RNA, 19 nt, Artificial Sequence
  Description of Artificial Sequence: Synthetic oligonucleotide
  Antisense Strand to SEQ ID NO: 471013
gagaccacagguuaauuuc

SEQ ID NO: 471015 - RNA, 19 nt, Artificial Sequence
  Description of Artificial Sequence: Synthetic oligonucleotide
  Sense strand starting at position 2966 of SEQ ID NO: 317184
aguuguacuuguuuacaga

SEQ ID NO: 471016 - RNA, 19 nt, Artificial Sequence
  Description of Artificial Sequence: Synthetic oligonucleotide
  Antisense Strand to SEQ ID NO: 471015
ucuguaaacaaguacaacu

SEQ ID NO: 471017 - RNA, 19 nt, Artificial Sequence
  Description of Artificial Sequence: Synthetic oligonucleotide
  Sense strand starting at position 2967 of SEQ ID NO: 317184
guuguacuuguuuacagaa

SEQ ID NO: 471018 - RNA, 19 nt, Artificial Sequence
  Description of Artificial Sequence: Synthetic oligonucleotide
  Antisense Strand to SEQ ID NO: 471017
uucuguaaacaaguacaac

SEQ ID NO: 471019 - RNA, 19 nt, Artificial Sequence
  Description of Artificial Sequence: Synthetic oligonucleotide
  Sense strand starting at position 3340 of SEQ ID NO: 317184
uucugcucugcuuaacaga

SEQ ID NO: 471020 - RNA, 19 nt, Artificial Sequence
  Description of Artificial Sequence: Synthetic oligonucleotide
  Antisense Strand to SEQ ID NO: 471019
ucuguuaagcagagcagaa

SEQ ID NO: 471021 - RNA, 19 nt, Artificial Sequence
  Description of Artificial Sequence: Synthetic oligonucleotide
  Sense strand starting at position 3435 of SEQ ID NO: 317184
gcagaacauuaccugcaaa

SEQ ID NO: 471022 - RNA, 19 nt, Artificial Sequence
  Description of Artificial Sequence: Synthetic oligonucleotide
  Antisense Strand to SEQ ID NO: 471021
uuugcagguaauguucugc

SEQ ID NO: 471023 - RNA, 19 nt, Artificial Sequence
  Description of Artificial Sequence: Synthetic oligonucleotide
  Sense strand starting at position 3453 of SEQ ID NO: 317184
aucugaauuggguggauca

SEQ ID NO: 471024 - RNA, 19 nt, Artificial Sequence
  Description of Artificial Sequence: Synthetic oligonucleotide
  Antisense Strand to SEQ ID NO: 471023
ugauccacccaauucagau

SEQ ID NO: 471025 - RNA, 19 nt, Artificial Sequence
  Description of Artificial Sequence: Synthetic oligonucleotide
  Sense strand starting at position 3614 of SEQ ID NO: 317184
aaauucugcuggucucuga

SEQ ID NO: 471026 - RNA, 19 nt, Artificial Sequence
  Description of Artificial Sequence: Synthetic oligonucleotide
  Antisense Strand to SEQ ID NO: 471025
ucagagaccagcagaauuu

SEQ ID NO: 471027 - RNA, 19 nt, Artificial Sequence
  Description of Artificial Sequence: Synthetic oligonucleotide
  Sense strand starting at position 3715 of SEQ ID NO: 317184
guuuaacuugcagaagaua

SEQ ID NO: 471028 - RNA, 19 nt, Artificial Sequence
  Description of Artificial Sequence: Synthetic oligonucleotide
  Antisense Strand to SEQ ID NO: 471027
uaucuucugcaaguuaaac

SEQ ID NO: 471029 - RNA, 19 nt, Artificial Sequence
  Description of Artificial Sequence: Synthetic oligonucleotide
  Sense strand starting at position 3874 of SEQ ID NO: 317184
agauuacugagcugaagau

SEQ ID NO: 471030 - RNA, 19 nt, Artificial Sequence
  Description of Artificial Sequence: Synthetic oligonucleotide
  Antisense Strand to SEQ ID NO: 471029
aucuucagcucaguaaucu

SEQ ID NO: 471031 - RNA, 19 nt, Artificial Sequence
  Description of Artificial Sequence: Synthetic oligonucleotide
  Sense strand starting at position 15 of SEQ ID NO: 317185
uuaacaucuugggcuacau

SEQ ID NO: 471032 - RNA, 19 nt, Artificial Sequence
  Description of Artificial Sequence: Synthetic oligonucleotide
  Antisense Strand to SEQ ID NO: 471031
auguagcccaagauguuaa

SEQ ID NO: 471033 - RNA, 19 nt, Artificial Sequence
  Description of Artificial Sequence: Synthetic oligonucleotide
  Sense strand starting at position 364 of SEQ ID NO: 317185
gcuucuacaguuuaugagu

SEQ ID NO: 471034 - RNA, 19 nt, Artificial Sequence
  Description of Artificial Sequence: Synthetic oligonucleotide
  Antisense Strand to SEQ ID NO: 471033
acucauaaacuguagaagc

SEQ ID NO: 471035 - RNA, 19 nt, Artificial Sequence
  Description of Artificial Sequence: Synthetic oligonucleotide
  Sense strand starting at position 750 of SEQ ID NO: 317185
gaagcaugccacugacaag

SEQ ID NO: 471036 - RNA, 19 nt, Artificial Sequence
  Description of Artificial Sequence: Synthetic oligonucleotide
  Antisense Strand to SEQ ID NO: 471035
cuugucaguggcaugcuuc

SEQ ID NO: 471037 - RNA, 19 nt, Artificial Sequence
  Description of Artificial Sequence: Synthetic oligonucleotide
  Sense strand starting at position 1127 of SEQ ID NO: 317185
aucugugucaaugguagga

SEQ ID NO: 471038 - RNA, 19 nt, Artificial Sequence
  Description of Artificial Sequence: Synthetic oligonucleotide
  Antisense Strand to SEQ ID NO: 471037
uccuaccauugacacagau

SEQ ID NO: 471039 - RNA, 19 nt, Artificial Sequence
  Description of Artificial Sequence: Synthetic oligonucleotide
  Sense strand starting at position 1131 of SEQ ID NO: 317185
gugucaaugguaggaaagu

SEQ ID NO: 471040 - RNA, 19 nt, Artificial Sequence
  Description of Artificial Sequence: Synthetic oligonucleotide
  Antisense Strand to SEQ ID NO: 471039
acuuuccuaccauugacac

SEQ ID NO: 471041 - RNA, 19 nt, Artificial Sequence
  Description of Artificial Sequence: Synthetic oligonucleotide
  Sense strand starting at position 1142 of SEQ ID NO: 317185
aggaaaguguacuuucuau

SEQ ID NO: 471042 - RNA, 19 nt, Artificial Sequence
  Description of Artificial Sequence: Synthetic oligonucleotide
  Antisense Strand to SEQ ID NO: 471041
auagaaaguacacuuuccu

SEQ ID NO: 471043 - RNA, 19 nt, Artificial Sequence
  Description of Artificial Sequence: Synthetic oligonucleotide
  Sense strand starting at position 1183 of SEQ ID NO: 317185
gccuauuucuuucccugua

SEQ ID NO: 471044 - RNA, 19 nt, Artificial Sequence
  Description of Artificial Sequence: Synthetic oligonucleotide
  Antisense Strand to SEQ ID NO: 471043
uacagggaaagaaauaggc

SEQ ID NO: 471045 - RNA, 19 nt, Artificial Sequence
  Description of Artificial Sequence: Synthetic oligonucleotide
  Sense strand starting at position 1291 of SEQ ID NO: 317185
guuccaaacguguaaguaa

SEQ ID NO: 471046 - RNA, 19 nt, Artificial Sequence
  Description of Artificial Sequence: Synthetic oligonucleotide
  Antisense Strand to SEQ ID NO: 471045
uuacuuacacguuuggaac

SEQ ID NO: 471047 - RNA, 19 nt, Artificial Sequence
  Description of Artificial Sequence: Synthetic oligonucleotide
  Sense strand starting at position 1338 of SEQ ID NO: 317185
uuguaaagcucugucaaau

SEQ ID NO: 471048 - RNA, 19 nt, Artificial Sequence
  Description of Artificial Sequence: Synthetic oligonucleotide
  Antisense Strand to SEQ ID NO: 471047
auuugacagagcuuuacaa

SEQ ID NO: 471049 - RNA, 19 nt, Artificial Sequence
  Description of Artificial Sequence: Synthetic oligonucleotide
  Sense strand starting at position 2023 of SEQ ID NO: 317185
cgucuaaaccaaugguaag

SEQ ID NO: 471050 - RNA, 19 nt, Artificial Sequence
  Description of Artificial Sequence: Synthetic oligonucleotide
  Antisense Strand to SEQ ID NO: 471049
cuuaccauugguuuagacg

SEQ ID NO: 471051 - RNA, 19 nt, Artificial Sequence
  Description of Artificial Sequence: Synthetic oligonucleotide
  Sense strand starting at position 2280 of SEQ ID NO: 317185
cucauuguuccucagcuau

SEQ ID NO: 471052 - RNA, 19 nt, Artificial Sequence
  Description of Artificial Sequence: Synthetic oligonucleotide
  Antisense Strand to SEQ ID NO: 471051
auagcugaggaacaaugag

SEQ ID NO: 471053 - RNA, 19 nt, Artificial Sequence
  Description of Artificial Sequence: Synthetic oligonucleotide
  Sense strand starting at position 2303 of SEQ ID NO: 317185
cccucaauacucggagaac

SEQ ID NO: 471054 - RNA, 19 nt, Artificial Sequence
  Description of Artificial Sequence: Synthetic oligonucleotide
  Antisense Strand to SEQ ID NO: 471053
guucuccgaguauugaggg

SEQ ID NO: 471055 - RNA, 19 nt, Artificial Sequence
  Description of Artificial Sequence: Synthetic oligonucleotide
  Sense strand starting at position 2412 of SEQ ID NO: 317185
guucuaucuggcuaaauca

SEQ ID NO: 471056 - RNA, 19 nt, Artificial Sequence
  Description of Artificial Sequence: Synthetic oligonucleotide
  Antisense Strand to SEQ ID NO: 471055
ugauuuagccagauagaac

SEQ ID NO: 471057 - RNA, 19 nt, Artificial Sequence
  Description of Artificial Sequence: Synthetic oligonucleotide
  Sense strand starting at position 2431 of SEQ ID NO: 317185
uaagccuagcuguggaaau

SEQ ID NO: 471058 - RNA, 19 nt, Artificial Sequence
  Description of Artificial Sequence: Synthetic oligonucleotide
  Antisense Strand to SEQ ID NO: 471057
auuuccacagcuaggcuua

SEQ ID NO: 471059 - RNA, 19 nt, Artificial Sequence
  Description of Artificial Sequence: Synthetic oligonucleotide
  Sense strand starting at position 2448 of SEQ ID NO: 317185
auucguuuccugucguauu

SEQ ID NO: 471060 - RNA, 19 nt, Artificial Sequence
  Description of Artificial Sequence: Synthetic oligonucleotide
  Antisense Strand to SEQ ID NO: 471059
aauacgacaggaaacgaau

SEQ ID NO: 471061 - RNA, 19 nt, Artificial Sequence
  Description of Artificial Sequence: Synthetic oligonucleotide
  Sense strand starting at position 2774 of SEQ ID NO: 317185
cuaaauuggcauugucuga

SEQ ID NO: 471062 - RNA, 19 nt, Artificial Sequence
  Description of Artificial Sequence: Synthetic oligonucleotide
  Antisense Strand to SEQ ID NO: 471061
ucagacaaugccaauuuag

SEQ ID NO: 471063 - RNA, 19 nt, Artificial Sequence
  Description of Artificial Sequence: Synthetic oligonucleotide
  Sense strand starting at position 2804 of SEQ ID NO: 317185
uguguaauccuucugugcu

SEQ ID NO: 471064 - RNA, 19 nt, Artificial Sequence
  Description of Artificial Sequence: Synthetic oligonucleotide
  Antisense Strand to SEQ ID NO: 471063
agcacagaaggauuacaca

SEQ ID NO: 471065 - RNA, 19 nt, Artificial Sequence
  Description of Artificial Sequence: Synthetic oligonucleotide
  Sense strand starting at position 2871 of SEQ ID NO: 317185
auuagauugugaguuuccu

SEQ ID NO: 471066 - RNA, 19 nt, Artificial Sequence
  Description of Artificial Sequence: Synthetic oligonucleotide
  Antisense Strand to SEQ ID NO: 471065
aggaaacucacaaucuaau

SEQ ID NO: 471067 - RNA, 19 nt, Artificial Sequence
  Description of Artificial Sequence: Synthetic oligonucleotide
  Sense strand starting at position 2877 of SEQ ID NO: 317185
uugugaguuuccucaggau

SEQ ID NO: 471068 - RNA, 19 nt, Artificial Sequence
  Description of Artificial Sequence: Synthetic oligonucleotide
  Antisense Strand to SEQ ID NO: 471067
auccugaggaaacucacaa

SEQ ID NO: 471069 - RNA, 19 nt, Artificial Sequence
  Description of Artificial Sequence: Synthetic oligonucleotide
  Sense strand starting at position 2961 of SEQ ID NO: 317185
augucuucugaaugaauaa

SEQ ID NO: 471070 - RNA, 19 nt, Artificial Sequence
  Description of Artificial Sequence: Synthetic oligonucleotide
  Antisense Strand to SEQ ID NO: 471069
uuauucauucagaagacau

SEQ ID NO: 471071 - RNA, 19 nt, Artificial Sequence
  Description of Artificial Sequence: Synthetic oligonucleotide
  Sense strand starting at position 2994 of SEQ ID NO: 317185
uucugucuaugucuaauuu

SEQ ID NO: 471072 - RNA, 19 nt, Artificial Sequence
  Description of Artificial Sequence: Synthetic oligonucleotide
  Antisense Strand to SEQ ID NO: 471071
aaauuagacauagacagaa

SEQ ID NO: 471073 - RNA, 19 nt, Artificial Sequence
  Description of Artificial Sequence: Synthetic oligonucleotide
  Sense strand starting at position 3014 of SEQ ID NO: 317185
ucuaauguucugugaaccu

SEQ ID NO: 471074 - RNA, 19 nt, Artificial Sequence
  Description of Artificial Sequence: Synthetic oligonucleotide
  Antisense Strand to SEQ ID NO: 471073
agguucacagaacauuaga

SEQ ID NO: 471075 - RNA, 19 nt, Artificial Sequence
  Description of Artificial Sequence: Synthetic oligonucleotide
  Sense strand starting at position 3025 of SEQ ID NO: 317185
gugaaccuugcauacaaau

SEQ ID NO: 471076 - RNA, 19 nt, Artificial Sequence
  Description of Artificial Sequence: Synthetic oligonucleotide
  Antisense Strand to SEQ ID NO: 471075
auuuguaugcaagguucac

SEQ ID NO: 471077 - RNA, 19 nt, Artificial Sequence
  Description of Artificial Sequence: Synthetic oligonucleotide
  Sense strand starting at position 3094 of SEQ ID NO: 317185
ugaaauugucuuuauugcu

SEQ ID NO: 471078 - RNA, 19 nt, Artificial Sequence
  Description of Artificial Sequence: Synthetic oligonucleotide
  Antisense Strand to SEQ ID NO: 471077
agcaauaaagacaauuuca

SEQ ID NO: 471079 - RNA, 19 nt, Artificial Sequence
  Description of Artificial Sequence: Synthetic oligonucleotide
  Sense strand starting at position 3360 of SEQ ID NO: 317185
uucaguaucgcagaggaau

SEQ ID NO: 471080 - RNA, 19 nt, Artificial Sequence
  Description of Artificial Sequence: Synthetic oligonucleotide
  Antisense Strand to SEQ ID NO: 471079
auuccucugcgauacugaa

SEQ ID NO: 471081 - RNA, 19 nt, Artificial Sequence
  Description of Artificial Sequence: Synthetic oligonucleotide
  Sense strand starting at position 3362 of SEQ ID NO: 317185
caguaucgcagaggaauga

SEQ ID NO: 471082 - RNA, 19 nt, Artificial Sequence
  Description of Artificial Sequence: Synthetic oligonucleotide
  Antisense Strand to SEQ ID NO: 471081
ucauuccucugcgauacug

SEQ ID NO: 471083 - RNA, 19 nt, Artificial Sequence
  Description of Artificial Sequence: Synthetic oligonucleotide
  Sense strand starting at position 3375 of SEQ ID NO: 317185
gaaugacaagcauaugugu

SEQ ID NO: 471084 - RNA, 19 nt, Artificial Sequence
  Description of Artificial Sequence: Synthetic oligonucleotide
  Antisense Strand to SEQ ID NO: 471083
acacauaugcuugucauuc

SEQ ID NO: 471085 - RNA, 19 nt, Artificial Sequence
  Description of Artificial Sequence: Synthetic oligonucleotide
  Sense strand starting at position 3382 of SEQ ID NO: 317185
aagcauauguguucuggag

SEQ ID NO: 471086 - RNA, 19 nt, Artificial Sequence
  Description of Artificial Sequence: Synthetic oligonucleotide
  Antisense Strand to SEQ ID NO: 471085
cuccagaacacauaugcuu

SEQ ID NO: 471087 - RNA, 19 nt, Artificial Sequence
  Description of Artificial Sequence: Synthetic oligonucleotide
  Sense strand starting at position 3386 of SEQ ID NO: 317185
auauguguucuggaguuaa

SEQ ID NO: 471088 - RNA, 19 nt, Artificial Sequence
  Description of Artificial Sequence: Synthetic oligonucleotide
  Antisense Strand to SEQ ID NO: 471087
uuaacuccagaacacauau

SEQ ID NO: 471089 - RNA, 19 nt, Artificial Sequence
  Description of Artificial Sequence: Synthetic oligonucleotide
  Sense strand starting at position 3390 of SEQ ID NO: 317185
guguucuggaguuaagcua

SEQ ID NO: 471090 - RNA, 19 nt, Artificial Sequence
  Description of Artificial Sequence: Synthetic oligonucleotide
  Antisense Strand to SEQ ID NO: 471089
uagcuuaacuccagaacac

SEQ ID NO: 471091 - RNA, 19 nt, Artificial Sequence
  Description of Artificial Sequence: Synthetic oligonucleotide
  Sense strand starting at position 3432 of SEQ ID NO: 317185
agcuaugaguccuugugga

SEQ ID NO: 471092 - RNA, 19 nt, Artificial Sequence
  Description of Artificial Sequence: Synthetic oligonucleotide
  Antisense Strand to SEQ ID NO: 471091
uccacaaggacucauagcu

SEQ ID NO: 471093 - RNA, 19 nt, Artificial Sequence
  Description of Artificial Sequence: Synthetic oligonucleotide
  Sense strand starting at position 3489 of SEQ ID NO: 317185
ggguuauugcgagacuuaa

SEQ ID NO: 471094 - RNA, 19 nt, Artificial Sequence
  Description of Artificial Sequence: Synthetic oligonucleotide
  Antisense Strand to SEQ ID NO: 471093
uuaagucucgcaauaaccc

SEQ ID NO: 471095 - RNA, 19 nt, Artificial Sequence
  Description of Artificial Sequence: Synthetic oligonucleotide
  Sense strand starting at position 3606 of SEQ ID NO: 317185
ggacaucguaaguggcaaa

SEQ ID NO: 471096 - RNA, 19 nt, Artificial Sequence
  Description of Artificial Sequence: Synthetic oligonucleotide
  Antisense Strand to SEQ ID NO: 471095
uuugccacuuacgaugucc

SEQ ID NO: 471097 - RNA, 19 nt, Artificial Sequence
  Description of Artificial Sequence: Synthetic oligonucleotide
  Sense strand starting at position 3644 of SEQ ID NO: 317185
guguaugaaccauggacga

SEQ ID NO: 471098 - RNA, 19 nt, Artificial Sequence
  Description of Artificial Sequence: Synthetic oligonucleotide
  Antisense Strand to SEQ ID NO: 471097
ucguccaugguucauacac

SEQ ID NO: 471099 - RNA, 19 nt, Artificial Sequence
  Description of Artificial Sequence: Synthetic oligonucleotide
  Sense strand starting at position 3801 of SEQ ID NO: 317185
ucaggauauuaugcaauaa

SEQ ID NO: 471100 - RNA, 19 nt, Artificial Sequence
  Description of Artificial Sequence: Synthetic oligonucleotide
  Antisense Strand to SEQ ID NO: 471099
uuauugcauaauauccuga

SEQ ID NO: 471101 - RNA, 19 nt, Artificial Sequence
  Description of Artificial Sequence: Synthetic oligonucleotide
  Sense strand starting at position 3825 of SEQ ID NO: 317185
gggugcuuucuugaauaca

SEQ ID NO: 471102 - RNA, 19 nt, Artificial Sequence
  Description of Artificial Sequence: Synthetic oligonucleotide
  Antisense Strand to SEQ ID NO: 471101
uguauucaagaaagcaccc

SEQ ID NO: 471103 - RNA, 19 nt, Artificial Sequence
  Description of Artificial Sequence: Synthetic oligonucleotide
  Sense strand starting at position 3836 of SEQ ID NO: 317185
ugaauacacugguuugaca

SEQ ID NO: 471104 - RNA, 19 nt, Artificial Sequence
  Description of Artificial Sequence: Synthetic oligonucleotide
  Antisense Strand to SEQ ID NO: 471103
ugucaaaccaguguauuca

SEQ ID NO: 471105 - RNA, 19 nt, Artificial Sequence
  Description of Artificial Sequence: Synthetic oligonucleotide
  Sense strand starting at position 3923 of SEQ ID NO: 317185
gagaacugggcauagcuau

SEQ ID NO: 471106 - RNA, 19 nt, Artificial Sequence
  Description of Artificial Sequence: Synthetic oligonucleotide
  Antisense Strand to SEQ ID NO: 471105
auagcuaugcccaguucuc

SEQ ID NO: 471107 - RNA, 19 nt, Artificial Sequence
  Description of Artificial Sequence: Synthetic oligonucleotide
  Sense strand starting at position 3950 of SEQ ID NO: 317185
gagccaucagcauauguag

SEQ ID NO: 471108 - RNA, 19 nt, Artificial Sequence
  Description of Artificial Sequence: Synthetic oligonucleotide
  Antisense Strand to SEQ ID NO: 471107
cuacauaugcugauggcuc

SEQ ID NO: 471109 - RNA, 19 nt, Artificial Sequence
  Description of Artificial Sequence: Synthetic oligonucleotide
  Sense strand starting at position 3973 of SEQ ID NO: 317185
ugaguugggcgauaggagu

SEQ ID NO: 471110 - RNA, 19 nt, Artificial Sequence
  Description of Artificial Sequence: Synthetic oligonucleotide
  Antisense Strand to SEQ ID NO: 471109
acuccuaucgcccaacuca

SEQ ID NO: 471111 - RNA, 19 nt, Artificial Sequence
  Description of Artificial Sequence: Synthetic oligonucleotide
  Sense strand starting at position 191 of SEQ ID NO: 317186
gguccuugccuugauucua

SEQ ID NO: 471112 - RNA, 19 nt, Artificial Sequence
  Description of Artificial Sequence: Synthetic oligonucleotide
  Antisense Strand to SEQ ID NO: 471111
uagaaucaaggcaaggacc

SEQ ID NO: 471113 - RNA, 19 nt, Artificial Sequence
  Description of Artificial Sequence: Synthetic oligonucleotide
  Sense strand starting at position 204 of SEQ ID NO: 317186
auucuagggaguugauacu

SEQ ID NO: 471114 - RNA, 19 nt, Artificial Sequence
  Description of Artificial Sequence: Synthetic oligonucleotide
  Antisense Strand to SEQ ID NO: 471113
aguaucaacucccuagaau

SEQ ID NO: 471115 - RNA, 19 nt, Artificial Sequence
  Description of Artificial Sequence: Synthetic oligonucleotide
  Sense strand starting at position 210 of SEQ ID NO: 317186
gggaguugauacucaauau

SEQ ID NO: 471116 - RNA, 19 nt, Artificial Sequence
  Description of Artificial Sequence: Synthetic oligonucleotide
  Antisense Strand to SEQ ID NO: 471115
auauugaguaucaacuccc

SEQ ID NO: 471117 - RNA, 19 nt, Artificial Sequence
  Description of Artificial Sequence: Synthetic oligonucleotide
  Sense strand starting at position 595 of SEQ ID NO: 317186
aguuacuuucuauguggaa

SEQ ID NO: 471118 - RNA, 19 nt, Artificial Sequence
  Description of Artificial Sequence: Synthetic oligonucleotide
  Antisense Strand to SEQ ID NO: 471117
uuccacauagaaaguaacu

SEQ ID NO: 471119 - RNA, 19 nt, Artificial Sequence
  Description of Artificial Sequence: Synthetic oligonucleotide
  Sense strand starting at position 596 of SEQ ID NO: 317186
guuacuuucuauguggaaa

SEQ ID NO: 471120 - RNA, 19 nt, Artificial Sequence
  Description of Artificial Sequence: Synthetic oligonucleotide
  Antisense Strand to SEQ ID NO: 471119
uuuccacauagaaaguaac

SEQ ID NO: 471121 - RNA, 19 nt, Artificial Sequence
  Description of Artificial Sequence: Synthetic oligonucleotide
  Sense strand starting at position 720 of SEQ ID NO: 317186
acaaucuuuccugauagug

SEQ ID NO: 471122 - RNA, 19 nt, Artificial Sequence
  Description of Artificial Sequence: Synthetic oligonucleotide
  Antisense Strand to SEQ ID NO: 471121
cacuaucaggaaagauugu

SEQ ID NO: 471123 - RNA, 19 nt, Artificial Sequence
  Description of Artificial Sequence: Synthetic oligonucleotide
  Sense strand starting at position 1431 of SEQ ID NO: 317186
uuagaaaggucauuaaccu

SEQ ID NO: 471124 - RNA, 19 nt, Artificial Sequence
  Description of Artificial Sequence: Synthetic oligonucleotide
  Antisense Strand to SEQ ID NO: 471123
agguuaaugaccuuucuaa

SEQ ID NO: 471125 - RNA, 19 nt, Artificial Sequence
  Description of Artificial Sequence: Synthetic oligonucleotide
  Sense strand starting at position 2610 of SEQ ID NO: 317186
gugcuuucggcggcgacau

SEQ ID NO: 471126 - RNA, 19 nt, Artificial Sequence
  Description of Artificial Sequence: Synthetic oligonucleotide
  Antisense Strand to SEQ ID NO: 471125
augucgccgccgaaagcac

SEQ ID NO: 471127 - RNA, 19 nt, Artificial Sequence
  Description of Artificial Sequence: Synthetic oligonucleotide
  Sense strand starting at position 2707 of SEQ ID NO: 317186
ggauguaccgcaugugauc

SEQ ID NO: 471128 - RNA, 19 nt, Artificial Sequence
  Description of Artificial Sequence: Synthetic oligonucleotide
  Antisense Strand to SEQ ID NO: 471127
gaucacaugcgguacaucc

SEQ ID NO: 471129 - RNA, 19 nt, Artificial Sequence
  Description of Artificial Sequence: Synthetic oligonucleotide
  Sense strand starting at position 2718 of SEQ ID NO: 317186
augugaucacucugggacu

SEQ ID NO: 471130 - RNA, 19 nt, Artificial Sequence
  Description of Artificial Sequence: Synthetic oligonucleotide
  Antisense Strand to SEQ ID NO: 471129
agucccagagugaucacau

SEQ ID NO: 471131 - RNA, 19 nt, Artificial Sequence
  Description of Artificial Sequence: Synthetic oligonucleotide
  Sense strand starting at position 2925 of SEQ ID NO: 317186
ccucgcuuccaugaacuuu

SEQ ID NO: 471132 - RNA, 19 nt, Artificial Sequence
  Description of Artificial Sequence: Synthetic oligonucleotide
  Antisense Strand to SEQ ID NO: 471131
aaaguucauggaagcgagg

SEQ ID NO: 471133 - RNA, 19 nt, Artificial Sequence
  Description of Artificial Sequence: Synthetic oligonucleotide
  Sense strand starting at position 3229 of SEQ ID NO: 317186
ggcagagcuauugagcaga

SEQ ID NO: 471134 - RNA, 19 nt, Artificial Sequence
  Description of Artificial Sequence: Synthetic oligonucleotide
  Antisense Strand to SEQ ID NO: 471133
ucugcucaauagcucugcc

SEQ ID NO: 471135 - RNA, 19 nt, Artificial Sequence
  Description of Artificial Sequence: Synthetic oligonucleotide
  Sense strand starting at position 3231 of SEQ ID NO: 317186
cagagcuauugagcagauu

SEQ ID NO: 471136 - RNA, 19 nt, Artificial Sequence
  Description of Artificial Sequence: Synthetic oligonucleotide
  Antisense Strand to SEQ ID NO: 471135
aaucugcucaauagcucug

SEQ ID NO: 471137 - RNA, 19 nt, Artificial Sequence
  Description of Artificial Sequence: Synthetic oligonucleotide
  Sense strand starting at position 3232 of SEQ ID NO: 317186
agagcuauugagcagauua

SEQ ID NO: 471138 - RNA, 19 nt, Artificial Sequence
  Description of Artificial Sequence: Synthetic oligonucleotide
  Antisense Strand to SEQ ID NO: 471137
uaaucugcucaauagcucu

SEQ ID NO: 471139 - RNA, 19 nt, Artificial Sequence
  Description of Artificial Sequence: Synthetic oligonucleotide
  Sense strand starting at position 3234 of SEQ ID NO: 317186
agcuauugagcagauuaug

SEQ ID NO: 471140 - RNA, 19 nt, Artificial Sequence
  Description of Artificial Sequence: Synthetic oligonucleotide
  Antisense Strand to SEQ ID NO: 471139
cauaaucugcucaauagcu

SEQ ID NO: 471141 - RNA, 19 nt, Artificial Sequence
  Description of Artificial Sequence: Synthetic oligonucleotide
  Sense strand starting at position 3242 of SEQ ID NO: 317186
agcagauuauggguuugaa

SEQ ID NO: 471142 - RNA, 19 nt, Artificial Sequence
  Description of Artificial Sequence: Synthetic oligonucleotide
  Antisense Strand to SEQ ID NO: 471141
uucaaacccauaaucugcu

SEQ ID NO: 471143 - RNA, 19 nt, Artificial Sequence
  Description of Artificial Sequence: Synthetic oligonucleotide
  Sense strand starting at position 3245 of SEQ ID NO: 317186
agauuauggguuugaaagu

SEQ ID NO: 471144 - RNA, 19 nt, Artificial Sequence
  Description of Artificial Sequence: Synthetic oligonucleotide
  Antisense Strand to SEQ ID NO: 471143
acuuucaaacccauaaucu

SEQ ID NO: 471145 - RNA, 19 nt, Artificial Sequence
  Description of Artificial Sequence: Synthetic oligonucleotide
  Sense strand starting at position 3251 of SEQ ID NO: 317186
uggguuugaaaguaguuau

SEQ ID NO: 471146 - RNA, 19 nt, Artificial Sequence
  Description of Artificial Sequence: Synthetic oligonucleotide
  Antisense Strand to SEQ ID NO: 471145
auaacuacuuucaaaccca

SEQ ID NO: 471147 - RNA, 19 nt, Artificial Sequence
  Description of Artificial Sequence: Synthetic oligonucleotide
  Sense strand starting at position 3261 of SEQ ID NO: 317186
aguaguuaucgcuauggga

SEQ ID NO: 471148 - RNA, 19 nt, Artificial Sequence
  Description of Artificial Sequence: Synthetic oligonucleotide
  Antisense Strand to SEQ ID NO: 471147
ucccauagcgauaacuacu

SEQ ID NO: 471149 - RNA, 19 nt, Artificial Sequence
  Description of Artificial Sequence: Synthetic oligonucleotide
  Sense strand starting at position 3263 of SEQ ID NO: 317186
uaguuaucgcuaugggaac

SEQ ID NO: 471150 - RNA, 19 nt, Artificial Sequence
  Description of Artificial Sequence: Synthetic oligonucleotide
  Antisense Strand to SEQ ID NO: 471149
guucccauagcgauaacua

SEQ ID NO: 471151 - RNA, 19 nt, Artificial Sequence
  Description of Artificial Sequence: Synthetic oligonucleotide
  Sense strand starting at position 3277 of SEQ ID NO: 317186
ggaacuugaggaugcuaga

SEQ ID NO: 471152 - RNA, 19 nt, Artificial Sequence
  Description of Artificial Sequence: Synthetic oligonucleotide
  Antisense Strand to SEQ ID NO: 471151
ucuagcauccucaaguucc

SEQ ID NO: 471153 - RNA, 19 nt, Artificial Sequence
  Description of Artificial Sequence: Synthetic oligonucleotide
  Sense strand starting at position 3310 of SEQ ID NO: 317186
aaagaugacuaguugaugu

SEQ ID NO: 471154 - RNA, 19 nt, Artificial Sequence
  Description of Artificial Sequence: Synthetic oligonucleotide
  Antisense Strand to SEQ ID NO: 471153
acaucaacuagucaucuuu

SEQ ID NO: 471155 - RNA, 19 nt, Artificial Sequence
  Description of Artificial Sequence: Synthetic oligonucleotide
  Sense strand starting at position 3318 of SEQ ID NO: 317186
cuaguugauguugagaaug

SEQ ID NO: 471156 - RNA, 19 nt, Artificial Sequence
  Description of Artificial Sequence: Synthetic oligonucleotide
  Antisense Strand to SEQ ID NO: 471155
cauucucaacaucaacuag

SEQ ID NO: 471157 - RNA, 19 nt, Artificial Sequence
  Description of Artificial Sequence: Synthetic oligonucleotide
  Sense strand starting at position 3417 of SEQ ID NO: 317186
guagacgucuugccuaaug

SEQ ID NO: 471158 - RNA, 19 nt, Artificial Sequence
  Description of Artificial Sequence: Synthetic oligonucleotide
  Antisense Strand to SEQ ID NO: 471157
cauuaggcaagacgucuac

SEQ ID NO: 471159 - RNA, 19 nt, Artificial Sequence
  Description of Artificial Sequence: Synthetic oligonucleotide
  Sense strand starting at position 3419 of SEQ ID NO: 317186
agacgucuugccuaaugaa

SEQ ID NO: 471160 - RNA, 19 nt, Artificial Sequence
  Description of Artificial Sequence: Synthetic oligonucleotide
  Antisense Strand to SEQ ID NO: 471159
uucauuaggcaagacgucu

SEQ ID NO: 471161 - RNA, 19 nt, Artificial Sequence
  Description of Artificial Sequence: Synthetic oligonucleotide
  Sense strand starting at position 3500 of SEQ ID NO: 317186
uagugucucuaugccaaga

SEQ ID NO: 471162 - RNA, 19 nt, Artificial Sequence
  Description of Artificial Sequence: Synthetic oligonucleotide
  Antisense Strand to SEQ ID NO: 471161
ucuuggcauagagacacua

SEQ ID NO: 471163 - RNA, 19 nt, Artificial Sequence
  Description of Artificial Sequence: Synthetic oligonucleotide
  Sense strand starting at position 3573 of SEQ ID NO: 317186
cuuugcuucggugaucuuu

SEQ ID NO: 471164 - RNA, 19 nt, Artificial Sequence
  Description of Artificial Sequence: Synthetic oligonucleotide
  Antisense Strand to SEQ ID NO: 471163
aaagaucaccgaagcaaag

SEQ ID NO: 471165 - RNA, 19 nt, Artificial Sequence
  Description of Artificial Sequence: Synthetic oligonucleotide
  Sense strand starting at position 3614 of SEQ ID NO: 317186
acuggaaguugauauaaau

SEQ ID NO: 471166 - RNA, 19 nt, Artificial Sequence
  Description of Artificial Sequence: Synthetic oligonucleotide
  Antisense Strand to SEQ ID NO: 471165
auuuauaucaacuuccagu

SEQ ID NO: 471167 - RNA, 19 nt, Artificial Sequence
  Description of Artificial Sequence: Synthetic oligonucleotide
  Sense strand starting at position 3632 of SEQ ID NO: 317186
uuauuacacuaggauaaga

SEQ ID NO: 471168 - RNA, 19 nt, Artificial Sequence
  Description of Artificial Sequence: Synthetic oligonucleotide
  Antisense Strand to SEQ ID NO: 471167
ucuuauccuaguguaauaa

SEQ ID NO: 471169 - RNA, 19 nt, Artificial Sequence
  Description of Artificial Sequence: Synthetic oligonucleotide
  Sense strand starting at position 3652 of SEQ ID NO: 317186
aaacaaaccuggguuugau

SEQ ID NO: 471170 - RNA, 19 nt, Artificial Sequence
  Description of Artificial Sequence: Synthetic oligonucleotide
  Antisense Strand to SEQ ID NO: 471169
aucaaacccagguuuguuu

SEQ ID NO: 471171 - RNA, 19 nt, Artificial Sequence
  Description of Artificial Sequence: Synthetic oligonucleotide
  Sense strand starting at position 3655 of SEQ ID NO: 317186
caaaccuggguuugauauu

SEQ ID NO: 471172 - RNA, 19 nt, Artificial Sequence
  Description of Artificial Sequence: Synthetic oligonucleotide
  Antisense Strand to SEQ ID NO: 471171
aauaucaaacccagguuug

SEQ ID NO: 471173 - RNA, 19 nt, Artificial Sequence
  Description of Artificial Sequence: Synthetic oligonucleotide
  Sense strand starting at position 3661 of SEQ ID NO: 317186
uggguuugauauucuuacu

SEQ ID NO: 471174 - RNA, 19 nt, Artificial Sequence
  Description of Artificial Sequence: Synthetic oligonucleotide
  Antisense Strand to SEQ ID NO: 471173
aguaagaauaucaaaccca

SEQ ID NO: 471175 - RNA, 19 nt, Artificial Sequence
  Description of Artificial Sequence: Synthetic oligonucleotide
  Sense strand starting at position 3684 of SEQ ID NO: 317186
guauuacaguuuccauaag

SEQ ID NO: 471176 - RNA, 19 nt, Artificial Sequence
  Description of Artificial Sequence: Synthetic oligonucleotide
  Antisense Strand to SEQ ID NO: 471175
cuuauggaaacuguaauac

SEQ ID NO: 471177 - RNA, 19 nt, Artificial Sequence
  Description of Artificial Sequence: Synthetic oligonucleotide
  Sense strand starting at position 3701 of SEQ ID NO: 317186
aggcaauacagugguaaca

SEQ ID NO: 471178 - RNA, 19 nt, Artificial Sequence
  Description of Artificial Sequence: Synthetic oligonucleotide
  Antisense Strand to SEQ ID NO: 471177
uguuaccacuguauugccu

SEQ ID NO: 471179 - RNA, 19 nt, Artificial Sequence
  Description of Artificial Sequence: Synthetic oligonucleotide
  Sense strand starting at position 3731 of SEQ ID NO: 317186
aguuaaggaacuuggcaau

SEQ ID NO: 471180 - RNA, 19 nt, Artificial Sequence
  Description of Artificial Sequence: Synthetic oligonucleotide
  Antisense Strand to SEQ ID NO: 471179
auugccaaguuccuuaacu

SEQ ID NO: 471181 - RNA, 19 nt, Artificial Sequence
  Description of Artificial Sequence: Synthetic oligonucleotide
  Sense strand starting at position 3887 of SEQ ID NO: 317186
uguguuccuuguuuacuaa

SEQ ID NO: 471182 - RNA, 19 nt, Artificial Sequence
  Description of Artificial Sequence: Synthetic oligonucleotide
  Antisense Strand to SEQ ID NO: 471181
uuaguaaacaaggaacaca

SEQ ID NO: 471183 - RNA, 19 nt, Artificial Sequence
  Description of Artificial Sequence: Synthetic oligonucleotide
  Sense strand starting at position 3888 of SEQ ID NO: 317186
guguuccuuguuuacuaaa

SEQ ID NO: 471184 - RNA, 19 nt, Artificial Sequence
  Description of Artificial Sequence: Synthetic oligonucleotide
  Antisense Strand to SEQ ID NO: 471183
uuuaguaaacaaggaacac

SEQ ID NO: 471185 - RNA, 19 nt, Artificial Sequence
  Description of Artificial Sequence: Synthetic oligonucleotide
  Sense strand starting at position 3890 of SEQ ID NO: 317186
guuccuuguuuacuaaaga

SEQ ID NO: 471186 - RNA, 19 nt, Artificial Sequence
  Description of Artificial Sequence: Synthetic oligonucleotide
  Antisense Strand to SEQ ID NO: 471185
ucuuuaguaaacaaggaac

SEQ ID NO: 471187 - RNA, 19 nt, Artificial Sequence
  Description of Artificial Sequence: Synthetic oligonucleotide
  Sense strand starting at position 3968 of SEQ ID NO: 317186
auaauuguggguugaccau

SEQ ID NO: 471188 - RNA, 19 nt, Artificial Sequence
  Description of Artificial Sequence: Synthetic oligonucleotide
  Antisense Strand to SEQ ID NO: 471187
auggucaacccacaauuau

SEQ ID NO: 471189 - RNA, 19 nt, Artificial Sequence
  Description of Artificial Sequence: Synthetic oligonucleotide
  Sense strand starting at position 3977 of SEQ ID NO: 317186
gguugaccauaauagauuu

SEQ ID NO: 471190 - RNA, 19 nt, Artificial Sequence
  Description of Artificial Sequence: Synthetic oligonucleotide
  Antisense Strand to SEQ ID NO: 471189
aaaucuauuauggucaacc

SEQ ID NO: 471191 - RNA, 19 nt, Artificial Sequence
  Description of Artificial Sequence: Synthetic oligonucleotide
  Sense strand starting at position 241 of SEQ ID NO: 317187
aguuacuuucuauguggaa

SEQ ID NO: 471192 - RNA, 19 nt, Artificial Sequence
  Description of Artificial Sequence: Synthetic oligonucleotide
  Antisense Strand to SEQ ID NO: 471191
uuccacauagaaaguaacu

SEQ ID NO: 471193 - RNA, 19 nt, Artificial Sequence
  Description of Artificial Sequence: Synthetic oligonucleotide
  Sense strand starting at position 242 of SEQ ID NO: 317187
guuacuuucuauguggaaa

SEQ ID NO: 471194 - RNA, 19 nt, Artificial Sequence
  Description of Artificial Sequence: Synthetic oligonucleotide
  Antisense Strand to SEQ ID NO: 471193
uuuccacauagaaaguaac

SEQ ID NO: 471195 - RNA, 19 nt, Artificial Sequence
  Description of Artificial Sequence: Synthetic oligonucleotide
  Sense strand starting at position 366 of SEQ ID NO: 317187
acaaucuuuccugauagug

SEQ ID NO: 471196 - RNA, 19 nt, Artificial Sequence
  Description of Artificial Sequence: Synthetic oligonucleotide
  Antisense Strand to SEQ ID NO: 471195
cacuaucaggaaagauugu

SEQ ID NO: 471197 - RNA, 19 nt, Artificial Sequence
  Description of Artificial Sequence: Synthetic oligonucleotide
  Sense strand starting at position 1077 of SEQ ID NO: 317187
uuagaaaggucauuaaccu

SEQ ID NO: 471198 - RNA, 19 nt, Artificial Sequence
  Description of Artificial Sequence: Synthetic oligonucleotide
  Antisense Strand to SEQ ID NO: 471197
agguuaaugaccuuucuaa

SEQ ID NO: 471199 - RNA, 19 nt, Artificial Sequence
  Description of Artificial Sequence: Synthetic oligonucleotide
  Sense strand starting at position 2256 of SEQ ID NO: 317187
gugcuuucggcggcgacau

SEQ ID NO: 471200 - RNA, 19 nt, Artificial Sequence
  Description of Artificial Sequence: Synthetic oligonucleotide
  Antisense Strand to SEQ ID NO: 471199
augucgccgccgaaagcac

SEQ ID NO: 471201 - RNA, 19 nt, Artificial Sequence
  Description of Artificial Sequence: Synthetic oligonucleotide
  Sense strand starting at position 2364 of SEQ ID NO: 317187
augugaucacucugggacu

SEQ ID NO: 471202 - RNA, 19 nt, Artificial Sequence
  Description of Artificial Sequence: Synthetic oligonucleotide
  Antisense Strand to SEQ ID NO: 471201
agucccagagugaucacau

SEQ ID NO: 471203 - RNA, 19 nt, Artificial Sequence
  Description of Artificial Sequence: Synthetic oligonucleotide
  Sense strand starting at position 2571 of SEQ ID NO: 317187
ccucgcuuccaugaacuuu

SEQ ID NO: 471204 - RNA, 19 nt, Artificial Sequence
  Description of Artificial Sequence: Synthetic oligonucleotide
  Antisense Strand to SEQ ID NO: 471203
aaaguucauggaagcgagg

SEQ ID NO: 471205 - RNA, 19 nt, Artificial Sequence
  Description of Artificial Sequence: Synthetic oligonucleotide
  Sense strand starting at position 2875 of SEQ ID NO: 317187
ggcagagcuauugagcaga

SEQ ID NO: 471206 - RNA, 19 nt, Artificial Sequence
  Description of Artificial Sequence: Synthetic oligonucleotide
  Antisense Strand to SEQ ID NO: 471205
ucugcucaauagcucugcc

SEQ ID NO: 471207 - RNA, 19 nt, Artificial Sequence
  Description of Artificial Sequence: Synthetic oligonucleotide
  Sense strand starting at position 2877 of SEQ ID NO: 317187
cagagcuauugagcagauu

SEQ ID NO: 471208 - RNA, 19 nt, Artificial Sequence
  Description of Artificial Sequence: Synthetic oligonucleotide
  Antisense Strand to SEQ ID NO: 471207
aaucugcucaauagcucug

SEQ ID NO: 471209 - RNA, 19 nt, Artificial Sequence
  Description of Artificial Sequence: Synthetic oligonucleotide
  Sense strand starting at position 2878 of SEQ ID NO: 317187
agagcuauugagcagauua

SEQ ID NO: 471210 - RNA, 19 nt, Artificial Sequence
  Description of Artificial Sequence: Synthetic oligonucleotide
  Antisense Strand to SEQ ID NO: 471209
uaaucugcucaauagcucu

SEQ ID NO: 471211 - RNA, 19 nt, Artificial Sequence
  Description of Artificial Sequence: Synthetic oligonucleotide
  Sense strand starting at position 2880 of SEQ ID NO: 317187
agcuauugagcagauuaug

SEQ ID NO: 471212 - RNA, 19 nt, Artificial Sequence
  Description of Artificial Sequence: Synthetic oligonucleotide
  Antisense Strand to SEQ ID NO: 471211
cauaaucugcucaauagcu

SEQ ID NO: 471213 - RNA, 19 nt, Artificial Sequence
  Description of Artificial Sequence: Synthetic oligonucleotide
  Sense strand starting at position 2888 of SEQ ID NO: 317187
agcagauuauggguuugaa

SEQ ID NO: 471214 - RNA, 19 nt, Artificial Sequence
  Description of Artificial Sequence: Synthetic oligonucleotide
  Antisense Strand to SEQ ID NO: 471213
uucaaacccauaaucugcu

SEQ ID NO: 471215 - RNA, 19 nt, Artificial Sequence
  Description of Artificial Sequence: Synthetic oligonucleotide
  Sense strand starting at position 2891 of SEQ ID NO: 317187
agauuauggguuugaaagu

SEQ ID NO: 471216 - RNA, 19 nt, Artificial Sequence
  Description of Artificial Sequence: Synthetic oligonucleotide
  Antisense Strand to SEQ ID NO: 471215
acuuucaaacccauaaucu

SEQ ID NO: 471217 - RNA, 19 nt, Artificial Sequence
  Description of Artificial Sequence: Synthetic oligonucleotide
  Sense strand starting at position 2897 of SEQ ID NO: 317187
uggguuugaaaguaguuau

SEQ ID NO: 471218 - RNA, 19 nt, Artificial Sequence
  Description of Artificial Sequence: Synthetic oligonucleotide
  Antisense Strand to SEQ ID NO: 471217
auaacuacuuucaaaccca

SEQ ID NO: 471219 - RNA, 19 nt, Artificial Sequence
  Description of Artificial Sequence: Synthetic oligonucleotide
  Sense strand starting at position 2907 of SEQ ID NO: 317187
aguaguuaucgcuauggga

SEQ ID NO: 471220 - RNA, 19 nt, Artificial Sequence
  Description of Artificial Sequence: Synthetic oligonucleotide
  Antisense Strand to SEQ ID NO: 471219
ucccauagcgauaacuacu

SEQ ID NO: 471221 - RNA, 19 nt, Artificial Sequence
  Description of Artificial Sequence: Synthetic oligonucleotide
  Sense strand starting at position 2909 of SEQ ID NO: 317187
uaguuaucgcuaugggaac

SEQ ID NO: 471222 - RNA, 19 nt, Artificial Sequence
  Description of Artificial Sequence: Synthetic oligonucleotide
  Antisense Strand to SEQ ID NO: 471221
guucccauagcgauaacua

SEQ ID NO: 471223 - RNA, 19 nt, Artificial Sequence
  Description of Artificial Sequence: Synthetic oligonucleotide
  Sense strand starting at position 2923 of SEQ ID NO: 317187
ggaacuugaggaugcuaga

SEQ ID NO: 471224 - RNA, 19 nt, Artificial Sequence
  Description of Artificial Sequence: Synthetic oligonucleotide
  Antisense Strand to SEQ ID NO: 471223
ucuagcauccucaaguucc

SEQ ID NO: 471225 - RNA, 19 nt, Artificial Sequence
  Description of Artificial Sequence: Synthetic oligonucleotide
  Sense strand starting at position 2956 of SEQ ID NO: 317187
aaagaugacuaguugaugu

SEQ ID NO: 471226 - RNA, 19 nt, Artificial Sequence
  Description of Artificial Sequence: Synthetic oligonucleotide
  Antisense Strand to SEQ ID NO: 471225
acaucaacuagucaucuuu

SEQ ID NO: 471227 - RNA, 19 nt, Artificial Sequence
  Description of Artificial Sequence: Synthetic oligonucleotide
  Sense strand starting at position 2964 of SEQ ID NO: 317187
cuaguugauguugagaaug

SEQ ID NO: 471228 - RNA, 19 nt, Artificial Sequence
  Description of Artificial Sequence: Synthetic oligonucleotide
  Antisense Strand to SEQ ID NO: 471227
cauucucaacaucaacuag

SEQ ID NO: 471229 - RNA, 19 nt, Artificial Sequence
  Description of Artificial Sequence: Synthetic oligonucleotide
  Sense strand starting at position 3065 of SEQ ID NO: 317187
agacgucuugccuaaugaa

SEQ ID NO: 471230 - RNA, 19 nt, Artificial Sequence
  Description of Artificial Sequence: Synthetic oligonucleotide
  Antisense Strand to SEQ ID NO: 471229
uucauuaggcaagacgucu

SEQ ID NO: 471231 - RNA, 19 nt, Artificial Sequence
  Description of Artificial Sequence: Synthetic oligonucleotide
  Sense strand starting at position 3146 of SEQ ID NO: 317187
uagugucucuaugccaaga

SEQ ID NO: 471232 - RNA, 19 nt, Artificial Sequence
  Description of Artificial Sequence: Synthetic oligonucleotide
  Antisense Strand to SEQ ID NO: 471231
ucuuggcauagagacacua

SEQ ID NO: 471233 - RNA, 19 nt, Artificial Sequence
  Description of Artificial Sequence: Synthetic oligonucleotide
  Sense strand starting at position 3260 of SEQ ID NO: 317187
acuggaaguugauauaaau

SEQ ID NO: 471234 - RNA, 19 nt, Artificial Sequence
  Description of Artificial Sequence: Synthetic oligonucleotide
  Antisense Strand to SEQ ID NO: 471233
auuuauaucaacuuccagu

SEQ ID NO: 471235 - RNA, 19 nt, Artificial Sequence
  Description of Artificial Sequence: Synthetic oligonucleotide
  Sense strand starting at position 3278 of SEQ ID NO: 317187
uuauuacacuaggauaaga

SEQ ID NO: 471236 - RNA, 19 nt, Artificial Sequence
  Description of Artificial Sequence: Synthetic oligonucleotide
  Antisense Strand to SEQ ID NO: 471235
ucuuauccuaguguaauaa

SEQ ID NO: 471237 - RNA, 19 nt, Artificial Sequence
  Description of Artificial Sequence: Synthetic oligonucleotide
  Sense strand starting at position 3298 of SEQ ID NO: 317187
aaacaaaccuggguuugau

SEQ ID NO: 471238 - RNA, 19 nt, Artificial Sequence
  Description of Artificial Sequence: Synthetic oligonucleotide
  Antisense Strand to SEQ ID NO: 471237
aucaaacccagguuuguuu

SEQ ID NO: 471239 - RNA, 19 nt, Artificial Sequence
  Description of Artificial Sequence: Synthetic oligonucleotide
  Sense strand starting at position 3301 of SEQ ID NO: 317187
caaaccuggguuugauauu

SEQ ID NO: 471240 - RNA, 19 nt, Artificial Sequence
  Description of Artificial Sequence: Synthetic oligonucleotide
  Antisense Strand to SEQ ID NO: 471239
aauaucaaacccagguuug

SEQ ID NO: 471241 - RNA, 19 nt, Artificial Sequence
  Description of Artificial Sequence: Synthetic oligonucleotide
  Sense strand starting at position 3307 of SEQ ID NO: 317187
uggguuugauauucuuacu

SEQ ID NO: 471242 - RNA, 19 nt, Artificial Sequence
  Description of Artificial Sequence: Synthetic oligonucleotide
  Antisense Strand to SEQ ID NO: 471241
aguaagaauaucaaaccca

SEQ ID NO: 471243 - RNA, 19 nt, Artificial Sequence
  Description of Artificial Sequence: Synthetic oligonucleotide
  Sense strand starting at position 3330 of SEQ ID NO: 317187
guauuacaguuuccauaag

SEQ ID NO: 471244 - RNA, 19 nt, Artificial Sequence
  Description of Artificial Sequence: Synthetic oligonucleotide
  Antisense Strand to SEQ ID NO: 471243
cuuauggaaacuguaauac

SEQ ID NO: 471245 - RNA, 19 nt, Artificial Sequence
  Description of Artificial Sequence: Synthetic oligonucleotide
  Sense strand starting at position 3347 of SEQ ID NO: 317187
aggcaauacagugguaaca

SEQ ID NO: 471246 - RNA, 19 nt, Artificial Sequence
  Description of Artificial Sequence: Synthetic oligonucleotide
  Antisense Strand to SEQ ID NO: 471245
uguuaccacuguauugccu

SEQ ID NO: 471247 - RNA, 19 nt, Artificial Sequence
  Description of Artificial Sequence: Synthetic oligonucleotide
  Sense strand starting at position 3377 of SEQ ID NO: 317187
aguuaaggaacuuggcaau

SEQ ID NO: 471248 - RNA, 19 nt, Artificial Sequence
  Description of Artificial Sequence: Synthetic oligonucleotide
  Antisense Strand to SEQ ID NO: 471247
auugccaaguuccuuaacu

SEQ ID NO: 471249 - RNA, 19 nt, Artificial Sequence
  Description of Artificial Sequence: Synthetic oligonucleotide
  Sense strand starting at position 3534 of SEQ ID NO: 317187
guguuccuuguuuacuaaa

SEQ ID NO: 471250 - RNA, 19 nt, Artificial Sequence
  Description of Artificial Sequence: Synthetic oligonucleotide
  Antisense Strand to SEQ ID NO: 471249
uuuaguaaacaaggaacac

SEQ ID NO: 471251 - RNA, 19 nt, Artificial Sequence
  Description of Artificial Sequence: Synthetic oligonucleotide
  Sense strand starting at position 3536 of SEQ ID NO: 317187
guuccuuguuuacuaaaga

SEQ ID NO: 471252 - RNA, 19 nt, Artificial Sequence
  Description of Artificial Sequence: Synthetic oligonucleotide
  Antisense Strand to SEQ ID NO: 471251
ucuuuaguaaacaaggaac

SEQ ID NO: 471253 - RNA, 19 nt, Artificial Sequence
  Description of Artificial Sequence: Synthetic oligonucleotide
  Sense strand starting at position 3614 of SEQ ID NO: 317187
auaauuguggguugaccau

SEQ ID NO: 471254 - RNA, 19 nt, Artificial Sequence
  Description of Artificial Sequence: Synthetic oligonucleotide
  Antisense Strand to SEQ ID NO: 471253
auggucaacccacaauuau

SEQ ID NO: 471255 - RNA, 19 nt, Artificial Sequence
  Description of Artificial Sequence: Synthetic oligonucleotide
  Sense strand starting at position 3623 of SEQ ID NO: 317187
gguugaccauaauagauuu

SEQ ID NO: 471256 - RNA, 19 nt, Artificial Sequence
  Description of Artificial Sequence: Synthetic oligonucleotide
  Antisense Strand to SEQ ID NO: 471255
aaaucuauuauggucaacc

SEQ ID NO: 471257 - RNA, 19 nt, Artificial Sequence
  Description of Artificial Sequence: Synthetic oligonucleotide
  Sense strand starting at position 3680 of SEQ ID NO: 317187
uacguaauccaaggagaaa

SEQ ID NO: 471258 - RNA, 19 nt, Artificial Sequence
  Description of Artificial Sequence: Synthetic oligonucleotide
  Antisense Strand to SEQ ID NO: 471257
uuucuccuuggauuacgua

SEQ ID NO: 471259 - RNA, 19 nt, Artificial Sequence
  Description of Artificial Sequence: Synthetic oligonucleotide
  Sense strand starting at position 3715 of SEQ ID NO: 317187
gugguaguugugagcaaca

SEQ ID NO: 471260 - RNA, 19 nt, Artificial Sequence
  Description of Artificial Sequence: Synthetic oligonucleotide
  Antisense Strand to SEQ ID NO: 471259
uguugcucacaacuaccac

SEQ ID NO: 471261 - RNA, 19 nt, Artificial Sequence
  Description of Artificial Sequence: Synthetic oligonucleotide
  Sense strand starting at position 3717 of SEQ ID NO: 317187
gguaguugugagcaacauu

SEQ ID NO: 471262 - RNA, 19 nt, Artificial Sequence
  Description of Artificial Sequence: Synthetic oligonucleotide
  Antisense Strand to SEQ ID NO: 471261
aauguugcucacaacuacc

SEQ ID NO: 471263 - RNA, 19 nt, Artificial Sequence
  Description of Artificial Sequence: Synthetic oligonucleotide
  Sense strand starting at position 3720 of SEQ ID NO: 317187
aguugugagcaacauuagu

SEQ ID NO: 471264 - RNA, 19 nt, Artificial Sequence
  Description of Artificial Sequence: Synthetic oligonucleotide
  Antisense Strand to SEQ ID NO: 471263
acuaauguugcucacaacu

SEQ ID NO: 471265 - RNA, 19 nt, Artificial Sequence
  Description of Artificial Sequence: Synthetic oligonucleotide
  Sense strand starting at position 3725 of SEQ ID NO: 317187
ugagcaacauuaguuugua

SEQ ID NO: 471266 - RNA, 19 nt, Artificial Sequence
  Description of Artificial Sequence: Synthetic oligonucleotide
  Antisense Strand to SEQ ID NO: 471265
uacaaacuaauguugcuca

SEQ ID NO: 471267 - RNA, 19 nt, Artificial Sequence
  Description of Artificial Sequence: Synthetic oligonucleotide
  Sense strand starting at position 3726 of SEQ ID NO: 317187
gagcaacauuaguuuguaa

SEQ ID NO: 471268 - RNA, 19 nt, Artificial Sequence
  Description of Artificial Sequence: Synthetic oligonucleotide
  Antisense Strand to SEQ ID NO: 471267
uuacaaacuaauguugcuc

SEQ ID NO: 471269 - RNA, 19 nt, Artificial Sequence
  Description of Artificial Sequence: Synthetic oligonucleotide
  Sense strand starting at position 3728 of SEQ ID NO: 317187
gcaacauuaguuuguaaca

SEQ ID NO: 471270 - RNA, 19 nt, Artificial Sequence
  Description of Artificial Sequence: Synthetic oligonucleotide
  Antisense Strand to SEQ ID NO: 471269
uguuacaaacuaauguugc

SEQ ID NO: 471271 - RNA, 19 nt, Artificial Sequence
  Description of Artificial Sequence: Synthetic oligonucleotide
  Sense strand starting at position 27 of SEQ ID NO: 317188
ugucaaugcaggcagauau

SEQ ID NO: 471272 - RNA, 19 nt, Artificial Sequence
  Description of Artificial Sequence: Synthetic oligonucleotide
  Antisense Strand to SEQ ID NO: 471271
auaucugccugcauugaca

SEQ ID NO: 471273 - RNA, 19 nt, Artificial Sequence
  Description of Artificial Sequence: Synthetic oligonucleotide
  Sense strand starting at position 203 of SEQ ID NO: 317188
ucaccauacugaguccauu

SEQ ID NO: 471274 - RNA, 19 nt, Artificial Sequence
  Description of Artificial Sequence: Synthetic oligonucleotide
  Antisense Strand to SEQ ID NO: 471273
aauggacucaguaugguga

SEQ ID NO: 471275 - RNA, 19 nt, Artificial Sequence
  Description of Artificial Sequence: Synthetic oligonucleotide
  Sense strand starting at position 401 of SEQ ID NO: 317188
gcuguaauuucaccgggac

SEQ ID NO: 471276 - RNA, 19 nt, Artificial Sequence
  Description of Artificial Sequence: Synthetic oligonucleotide
  Antisense Strand to SEQ ID NO: 471275
gucccggugaaauuacagc

SEQ ID NO: 471277 - RNA, 19 nt, Artificial Sequence
  Description of Artificial Sequence: Synthetic oligonucleotide
  Sense strand starting at position 413 of SEQ ID NO: 317188
ccgggacacagucauuaac

SEQ ID NO: 471278 - RNA, 19 nt, Artificial Sequence
  Description of Artificial Sequence: Synthetic oligonucleotide
  Antisense Strand to SEQ ID NO: 471277
guuaaugacugugucccgg

SEQ ID NO: 471279 - RNA, 19 nt, Artificial Sequence
  Description of Artificial Sequence: Synthetic oligonucleotide
  Sense strand starting at position 415 of SEQ ID NO: 317188
gggacacagucauuaacuc

SEQ ID NO: 471280 - RNA, 19 nt, Artificial Sequence
  Description of Artificial Sequence: Synthetic oligonucleotide
  Antisense Strand to SEQ ID NO: 471279
gaguuaaugacuguguccc

SEQ ID NO: 471281 - RNA, 19 nt, Artificial Sequence
  Description of Artificial Sequence: Synthetic oligonucleotide
  Sense strand starting at position 450 of SEQ ID NO: 317188
cuaacuggagcucaguaau

SEQ ID NO: 471282 - RNA, 19 nt, Artificial Sequence
  Description of Artificial Sequence: Synthetic oligonucleotide
  Antisense Strand to SEQ ID NO: 471281
auuacugagcuccaguuag

SEQ ID NO: 471283 - RNA, 19 nt, Artificial Sequence
  Description of Artificial Sequence: Synthetic oligonucleotide
  Sense strand starting at position 627 of SEQ ID NO: 317188
ggaggucaaagugauugua

SEQ ID NO: 471284 - RNA, 19 nt, Artificial Sequence
  Description of Artificial Sequence: Synthetic oligonucleotide
  Antisense Strand to SEQ ID NO: 471283
uacaaucacuuugaccucc

SEQ ID NO: 471285 - RNA, 19 nt, Artificial Sequence
  Description of Artificial Sequence: Synthetic oligonucleotide
  Sense strand starting at position 815 of SEQ ID NO: 317188
auauucuaggaauguguaa

SEQ ID NO: 471286 - RNA, 19 nt, Artificial Sequence
  Description of Artificial Sequence: Synthetic oligonucleotide
  Antisense Strand to SEQ ID NO: 471285
uuacacauuccuagaauau

SEQ ID NO: 471287 - RNA, 19 nt, Artificial Sequence
  Description of Artificial Sequence: Synthetic oligonucleotide
  Sense strand starting at position 822 of SEQ ID NO: 317188
aggaauguguaaucaugua

SEQ ID NO: 471288 - RNA, 19 nt, Artificial Sequence
  Description of Artificial Sequence: Synthetic oligonucleotide
  Antisense Strand to SEQ ID NO: 471287
uacaugauuacacauuccu

SEQ ID NO: 471289 - RNA, 19 nt, Artificial Sequence
  Description of Artificial Sequence: Synthetic oligonucleotide
  Sense strand starting at position 892 of SEQ ID NO: 317188
agcaauaacuugucaaaga

SEQ ID NO: 471290 - RNA, 19 nt, Artificial Sequence
  Description of Artificial Sequence: Synthetic oligonucleotide
  Antisense Strand to SEQ ID NO: 471289
ucuuugacaaguuauugcu

SEQ ID NO: 471291 - RNA, 19 nt, Artificial Sequence
  Description of Artificial Sequence: Synthetic oligonucleotide
  Sense strand starting at position 965 of SEQ ID NO: 317188
aaguucuuucugugagaaa

SEQ ID NO: 471292 - RNA, 19 nt, Artificial Sequence
  Description of Artificial Sequence: Synthetic oligonucleotide
  Antisense Strand to SEQ ID NO: 471291
uuucucacagaaagaacuu

SEQ ID NO: 471293 - RNA, 19 nt, Artificial Sequence
  Description of Artificial Sequence: Synthetic oligonucleotide
  Sense strand starting at position 994 of SEQ ID NO: 317188
aggcacauuuaucaugaaa

SEQ ID NO: 471294 - RNA, 19 nt, Artificial Sequence
  Description of Artificial Sequence: Synthetic oligonucleotide
  Antisense Strand to SEQ ID NO: 471293
uuucaugauaaaugugccu

SEQ ID NO: 471295 - RNA, 19 nt, Artificial Sequence
  Description of Artificial Sequence: Synthetic oligonucleotide
  Sense strand starting at position 1016 of SEQ ID NO: 317188
ggauuuaauuucugcauau

SEQ ID NO: 471296 - RNA, 19 nt, Artificial Sequence
  Description of Artificial Sequence: Synthetic oligonucleotide
  Antisense Strand to SEQ ID NO: 471295
auaugcagaaauuaaaucc

SEQ ID NO: 471297 - RNA, 19 nt, Artificial Sequence
  Description of Artificial Sequence: Synthetic oligonucleotide
  Sense strand starting at position 1029 of SEQ ID NO: 317188
gcauauaugugauugaaua

SEQ ID NO: 471298 - RNA, 19 nt, Artificial Sequence
  Description of Artificial Sequence: Synthetic oligonucleotide
  Antisense Strand to SEQ ID NO: 471297
uauucaaucacauauaugc

SEQ ID NO: 471299 - RNA, 19 nt, Artificial Sequence
  Description of Artificial Sequence: Synthetic oligonucleotide
  Sense strand starting at position 1030 of SEQ ID NO: 317188
cauauaugugauugaauag

SEQ ID NO: 471300 - RNA, 19 nt, Artificial Sequence
  Description of Artificial Sequence: Synthetic oligonucleotide
  Antisense Strand to SEQ ID NO: 471299
cuauucaaucacauauaug

SEQ ID NO: 471301 - RNA, 19 nt, Artificial Sequence
  Description of Artificial Sequence: Synthetic oligonucleotide
  Sense strand starting at position 1072 of SEQ ID NO: 317188
aagaaauggcuuuauaugu

SEQ ID NO: 471302 - RNA, 19 nt, Artificial Sequence
  Description of Artificial Sequence: Synthetic oligonucleotide
  Antisense Strand to SEQ ID NO: 471301
acauauaaagccauuucuu

SEQ ID NO: 471303 - RNA, 19 nt, Artificial Sequence
  Description of Artificial Sequence: Synthetic oligonucleotide
  Sense strand starting at position 1144 of SEQ ID NO: 317188
guaauaugagccugaaauc

SEQ ID NO: 471304 - RNA, 19 nt, Artificial Sequence
  Description of Artificial Sequence: Synthetic oligonucleotide
  Antisense Strand to SEQ ID NO: 471303
gauuucaggcucauauuac

SEQ ID NO: 471305 - RNA, 19 nt, Artificial Sequence
  Description of Artificial Sequence: Synthetic oligonucleotide
  Sense strand starting at position 1235 of SEQ ID NO: 317188
uucugugauguuuaaacuu

SEQ ID NO: 471306 - RNA, 19 nt, Artificial Sequence
  Description of Artificial Sequence: Synthetic oligonucleotide
  Antisense Strand to SEQ ID NO: 471305
aaguuuaaacaucacagaa

SEQ ID NO: 471307 - RNA, 19 nt, Artificial Sequence
  Description of Artificial Sequence: Synthetic oligonucleotide
  Sense strand starting at position 1244 of SEQ ID NO: 317188
guuuaaacuugacuggacu

SEQ ID NO: 471308 - RNA, 19 nt, Artificial Sequence
  Description of Artificial Sequence: Synthetic oligonucleotide
  Antisense Strand to SEQ ID NO: 471307
aguccagucaaguuuaaac

SEQ ID NO: 471309 - RNA, 19 nt, Artificial Sequence
  Description of Artificial Sequence: Synthetic oligonucleotide
  Sense strand starting at position 1251 of SEQ ID NO: 317188
cuugacuggacucgagauu

SEQ ID NO: 471310 - RNA, 19 nt, Artificial Sequence
  Description of Artificial Sequence: Synthetic oligonucleotide
  Antisense Strand to SEQ ID NO: 471309
aaucucgaguccagucaag

SEQ ID NO: 471311 - RNA, 19 nt, Artificial Sequence
  Description of Artificial Sequence: Synthetic oligonucleotide
  Sense strand starting at position 1449 of SEQ ID NO: 317188
ggucuaucacuuuaagcca

SEQ ID NO: 471312 - RNA, 19 nt, Artificial Sequence
  Description of Artificial Sequence: Synthetic oligonucleotide
  Antisense Strand to SEQ ID NO: 471311
uggcuuaaagugauagacc

SEQ ID NO: 471313 - RNA, 19 nt, Artificial Sequence
  Description of Artificial Sequence: Synthetic oligonucleotide
  Sense strand starting at position 1483 of SEQ ID NO: 317188
cuuaaauaugggugagggu

SEQ ID NO: 471314 - RNA, 19 nt, Artificial Sequence
  Description of Artificial Sequence: Synthetic oligonucleotide
  Antisense Strand to SEQ ID NO: 471313
acccucacccauauuuaag

SEQ ID NO: 471315 - RNA, 19 nt, Artificial Sequence
  Description of Artificial Sequence: Synthetic oligonucleotide
  Sense strand starting at position 1633 of SEQ ID NO: 317188
aaguguaauucucugacag

SEQ ID NO: 471316 - RNA, 19 nt, Artificial Sequence
  Description of Artificial Sequence: Synthetic oligonucleotide
  Antisense Strand to SEQ ID NO: 471315
cugucagagaauuacacuu

SEQ ID NO: 471317 - RNA, 19 nt, Artificial Sequence
  Description of Artificial Sequence: Synthetic oligonucleotide
  Sense strand starting at position 2138 of SEQ ID NO: 317188
agggcuggguucuuagaaa

SEQ ID NO: 471318 - RNA, 19 nt, Artificial Sequence
  Description of Artificial Sequence: Synthetic oligonucleotide
  Antisense Strand to SEQ ID NO: 471317
uuucuaagaacccagcccu

SEQ ID NO: 471319 - RNA, 19 nt, Artificial Sequence
  Description of Artificial Sequence: Synthetic oligonucleotide
  Sense strand starting at position 2185 of SEQ ID NO: 317188
auuuauggaucugauaaac

SEQ ID NO: 471320 - RNA, 19 nt, Artificial Sequence
  Description of Artificial Sequence: Synthetic oligonucleotide
  Antisense Strand to SEQ ID NO: 471319
guuuaucagauccauaaau

SEQ ID NO: 471321 - RNA, 19 nt, Artificial Sequence
  Description of Artificial Sequence: Synthetic oligonucleotide
  Sense strand starting at position 2191 of SEQ ID NO: 317188
ggaucugauaaacguagga

SEQ ID NO: 471322 - RNA, 19 nt, Artificial Sequence
  Description of Artificial Sequence: Synthetic oligonucleotide
  Antisense Strand to SEQ ID NO: 471321
uccuacguuuaucagaucc

SEQ ID NO: 471323 - RNA, 19 nt, Artificial Sequence
  Description of Artificial Sequence: Synthetic oligonucleotide
  Sense strand starting at position 2196 of SEQ ID NO: 317188
ugauaaacguaggauuuaa

SEQ ID NO: 471324 - RNA, 19 nt, Artificial Sequence
  Description of Artificial Sequence: Synthetic oligonucleotide
  Antisense Strand to SEQ ID NO: 471323
uuaaauccuacguuuauca

SEQ ID NO: 471325 - RNA, 19 nt, Artificial Sequence
  Description of Artificial Sequence: Synthetic oligonucleotide
  Sense strand starting at position 2232 of SEQ ID NO: 317188
uuggacuuguagcuggaaa

SEQ ID NO: 471326 - RNA, 19 nt, Artificial Sequence
  Description of Artificial Sequence: Synthetic oligonucleotide
  Antisense Strand to SEQ ID NO: 471325
uuuccagcuacaaguccaa

SEQ ID NO: 471327 - RNA, 19 nt, Artificial Sequence
  Description of Artificial Sequence: Synthetic oligonucleotide
  Sense strand starting at position 2233 of SEQ ID NO: 317188
uggacuuguagcuggaaau

SEQ ID NO: 471328 - RNA, 19 nt, Artificial Sequence
  Description of Artificial Sequence: Synthetic oligonucleotide
  Antisense Strand to SEQ ID NO: 471327
auuuccagcuacaagucca

SEQ ID NO: 471329 - RNA, 19 nt, Artificial Sequence
  Description of Artificial Sequence: Synthetic oligonucleotide
  Sense strand starting at position 2234 of SEQ ID NO: 317188
ggacuuguagcuggaaauc

SEQ ID NO: 471330 - RNA, 19 nt, Artificial Sequence
  Description of Artificial Sequence: Synthetic oligonucleotide
  Antisense Strand to SEQ ID NO: 471329
gauuuccagcuacaagucc

SEQ ID NO: 471331 - RNA, 19 nt, Artificial Sequence
  Description of Artificial Sequence: Synthetic oligonucleotide
  Sense strand starting at position 2355 of SEQ ID NO: 317188
uucuguucugugcauuuaa

SEQ ID NO: 471332 - RNA, 19 nt, Artificial Sequence
  Description of Artificial Sequence: Synthetic oligonucleotide
  Antisense Strand to SEQ ID NO: 471331
uuaaaugcacagaacagaa

SEQ ID NO: 471333 - RNA, 19 nt, Artificial Sequence
  Description of Artificial Sequence: Synthetic oligonucleotide
  Sense strand starting at position 2435 of SEQ ID NO: 317188
cugucaaauugaguggaaa

SEQ ID NO: 471334 - RNA, 19 nt, Artificial Sequence
  Description of Artificial Sequence: Synthetic oligonucleotide
  Antisense Strand to SEQ ID NO: 471333
uuuccacucaauuugacag

SEQ ID NO: 471335 - RNA, 19 nt, Artificial Sequence
  Description of Artificial Sequence: Synthetic oligonucleotide
  Sense strand starting at position 2436 of SEQ ID NO: 317188
ugucaaauugaguggaaag

SEQ ID NO: 471336 - RNA, 19 nt, Artificial Sequence
  Description of Artificial Sequence: Synthetic oligonucleotide
  Antisense Strand to SEQ ID NO: 471335
cuuuccacucaauuugaca

SEQ ID NO: 471337 - RNA, 19 nt, Artificial Sequence
  Description of Artificial Sequence: Synthetic oligonucleotide
  Sense strand starting at position 2437 of SEQ ID NO: 317188
gucaaauugaguggaaagu

SEQ ID NO: 471338 - RNA, 19 nt, Artificial Sequence
  Description of Artificial Sequence: Synthetic oligonucleotide
  Antisense Strand to SEQ ID NO: 471337
acuuuccacucaauuugac

SEQ ID NO: 471339 - RNA, 19 nt, Artificial Sequence
  Description of Artificial Sequence: Synthetic oligonucleotide
  Sense strand starting at position 2494 of SEQ ID NO: 317188
gauauaugacuaugguaug

SEQ ID NO: 471340 - RNA, 19 nt, Artificial Sequence
  Description of Artificial Sequence: Synthetic oligonucleotide
  Antisense Strand to SEQ ID NO: 471339
cauaccauagucauauauc

SEQ ID NO: 471341 - RNA, 19 nt, Artificial Sequence
  Description of Artificial Sequence: Synthetic oligonucleotide
  Sense strand starting at position 2499 of SEQ ID NO: 317188
augacuaugguauguauua

SEQ ID NO: 471342 - RNA, 19 nt, Artificial Sequence
  Description of Artificial Sequence: Synthetic oligonucleotide
  Antisense Strand to SEQ ID NO: 471341
uaauacauaccauagucau

SEQ ID NO: 471343 - RNA, 19 nt, Artificial Sequence
  Description of Artificial Sequence: Synthetic oligonucleotide
  Sense strand starting at position 2500 of SEQ ID NO: 317188
ugacuaugguauguauuaa

SEQ ID NO: 471344 - RNA, 19 nt, Artificial Sequence
  Description of Artificial Sequence: Synthetic oligonucleotide
  Antisense Strand to SEQ ID NO: 471343
uuaauacauaccauaguca

SEQ ID NO: 471345 - RNA, 19 nt, Artificial Sequence
  Description of Artificial Sequence: Synthetic oligonucleotide
  Sense strand starting at position 2566 of SEQ ID NO: 317188
ggaucuuauccacauugca

SEQ ID NO: 471346 - RNA, 19 nt, Artificial Sequence
  Description of Artificial Sequence: Synthetic oligonucleotide
  Antisense Strand to SEQ ID NO: 471345
ugcaauguggauaagaucc

SEQ ID NO: 471347 - RNA, 19 nt, Artificial Sequence
  Description of Artificial Sequence: Synthetic oligonucleotide
  Sense strand starting at position 2930 of SEQ ID NO: 317188
guaagaccaucacauuuga

SEQ ID NO: 471348 - RNA, 19 nt, Artificial Sequence
  Description of Artificial Sequence: Synthetic oligonucleotide
  Antisense Strand to SEQ ID NO: 471347
ucaaaugugauggucuuac

SEQ ID NO: 471349 - RNA, 19 nt, Artificial Sequence
  Description of Artificial Sequence: Synthetic oligonucleotide
  Sense strand starting at position 3029 of SEQ ID NO: 317188
ccaaacugguccuuuagaa

SEQ ID NO: 471350 - RNA, 19 nt, Artificial Sequence
  Description of Artificial Sequence: Synthetic oligonucleotide
  Antisense Strand to SEQ ID NO: 471349
uucuaaaggaccaguuugg

SEQ ID NO: 471351 - RNA, 19 nt, Artificial Sequence
  Description of Artificial Sequence: Synthetic oligonucleotide
  Sense strand starting at position 69 of SEQ ID NO: 317189
auguaaacacuguagugau

SEQ ID NO: 471352 - RNA, 19 nt, Artificial Sequence
  Description of Artificial Sequence: Synthetic oligonucleotide
  Antisense Strand to SEQ ID NO: 471351
aucacuacaguguuuacau

SEQ ID NO: 471353 - RNA, 19 nt, Artificial Sequence
  Description of Artificial Sequence: Synthetic oligonucleotide
  Sense strand starting at position 76 of SEQ ID NO: 317189
cacuguagugaucaaagua

SEQ ID NO: 471354 - RNA, 19 nt, Artificial Sequence
  Description of Artificial Sequence: Synthetic oligonucleotide
  Antisense Strand to SEQ ID NO: 471353
uacuuugaucacuacagug

SEQ ID NO: 471355 - RNA, 19 nt, Artificial Sequence
  Description of Artificial Sequence: Synthetic oligonucleotide
  Sense strand starting at position 199 of SEQ ID NO: 317189
gguaucuggcaacaaucuu

SEQ ID NO: 471356 - RNA, 19 nt, Artificial Sequence
  Description of Artificial Sequence: Synthetic oligonucleotide
  Antisense Strand to SEQ ID NO: 471355
aagauuguugccagauacc

SEQ ID NO: 471357 - RNA, 19 nt, Artificial Sequence
  Description of Artificial Sequence: Synthetic oligonucleotide
  Sense strand starting at position 362 of SEQ ID NO: 317189
ccauuauacgggcaauuau

SEQ ID NO: 471358 - RNA, 19 nt, Artificial Sequence
  Description of Artificial Sequence: Synthetic oligonucleotide
  Antisense Strand to SEQ ID NO: 471357
auaauugcccguauaaugg

SEQ ID NO: 471359 - RNA, 19 nt, Artificial Sequence
  Description of Artificial Sequence: Synthetic oligonucleotide
  Sense strand starting at position 371 of SEQ ID NO: 317189
gggcaauuauaagcuggaa

SEQ ID NO: 471360 - RNA, 19 nt, Artificial Sequence
  Description of Artificial Sequence: Synthetic oligonucleotide
  Antisense Strand to SEQ ID NO: 471359
uuccagcuuauaauugccc

SEQ ID NO: 471361 - RNA, 19 nt, Artificial Sequence
  Description of Artificial Sequence: Synthetic oligonucleotide
  Sense strand starting at position 473 of SEQ ID NO: 317189
uccacuuggaagugugaga

SEQ ID NO: 471362 - RNA, 19 nt, Artificial Sequence
  Description of Artificial Sequence: Synthetic oligonucleotide
  Antisense Strand to SEQ ID NO: 471361
ucucacacuuccaagugga

SEQ ID NO: 471363 - RNA, 19 nt, Artificial Sequence
  Description of Artificial Sequence: Synthetic oligonucleotide
  Sense strand starting at position 1062 of SEQ ID NO: 317189
uggauuugguuagacaaag

SEQ ID NO: 471364 - RNA, 19 nt, Artificial Sequence
  Description of Artificial Sequence: Synthetic oligonucleotide
  Antisense Strand to SEQ ID NO: 471363
cuuugucuaaccaaaucca

SEQ ID NO: 471365 - RNA, 19 nt, Artificial Sequence
  Description of Artificial Sequence: Synthetic oligonucleotide
  Sense strand starting at position 1165 of SEQ ID NO: 317189
ccagauuucucaugggaaa

SEQ ID NO: 471366 - RNA, 19 nt, Artificial Sequence
  Description of Artificial Sequence: Synthetic oligonucleotide
  Antisense Strand to SEQ ID NO: 471365
uuucccaugagaaaucugg

SEQ ID NO: 471367 - RNA, 19 nt, Artificial Sequence
  Description of Artificial Sequence: Synthetic oligonucleotide
  Sense strand starting at position 1261 of SEQ ID NO: 317189
gaaauugauugcuuuguga

SEQ ID NO: 471368 - RNA, 19 nt, Artificial Sequence
  Description of Artificial Sequence: Synthetic oligonucleotide
  Antisense Strand to SEQ ID NO: 471367
ucacaaagcaaucaauuuc

SEQ ID NO: 471369 - RNA, 19 nt, Artificial Sequence
  Description of Artificial Sequence: Synthetic oligonucleotide
  Sense strand starting at position 1263 of SEQ ID NO: 317189
aauugauugcuuugugaaa

SEQ ID NO: 471370 - RNA, 19 nt, Artificial Sequence
  Description of Artificial Sequence: Synthetic oligonucleotide
  Antisense Strand to SEQ ID NO: 471369
uuucacaaagcaaucaauu

SEQ ID NO: 471371 - RNA, 19 nt, Artificial Sequence
  Description of Artificial Sequence: Synthetic oligonucleotide
  Sense strand starting at position 1264 of SEQ ID NO: 317189
auugauugcuuugugaaag

SEQ ID NO: 471372 - RNA, 19 nt, Artificial Sequence
  Description of Artificial Sequence: Synthetic oligonucleotide
  Antisense Strand to SEQ ID NO: 471371
cuuucacaaagcaaucaau

SEQ ID NO: 471373 - RNA, 19 nt, Artificial Sequence
  Description of Artificial Sequence: Synthetic oligonucleotide
  Sense strand starting at position 1588 of SEQ ID NO: 317189
guauucugaguccacuaca

SEQ ID NO: 471374 - RNA, 19 nt, Artificial Sequence
  Description of Artificial Sequence: Synthetic oligonucleotide
  Antisense Strand to SEQ ID NO: 471373
uguaguggacucagaauac

SEQ ID NO: 471375 - RNA, 19 nt, Artificial Sequence
  Description of Artificial Sequence: Synthetic oligonucleotide
  Sense strand starting at position 1672 of SEQ ID NO: 317189
agcuuuauuuccuccaugu

SEQ ID NO: 471376 - RNA, 19 nt, Artificial Sequence
  Description of Artificial Sequence: Synthetic oligonucleotide
  Antisense Strand to SEQ ID NO: 471375
acauggaggaaauaaagcu

SEQ ID NO: 471377 - RNA, 19 nt, Artificial Sequence
  Description of Artificial Sequence: Synthetic oligonucleotide
  Sense strand starting at position 2094 of SEQ ID NO: 317189
gcugcuaaacuccagaaau

SEQ ID NO: 471378 - RNA, 19 nt, Artificial Sequence
  Description of Artificial Sequence: Synthetic oligonucleotide
  Antisense Strand to SEQ ID NO: 471377
auuucuggaguuuagcagc

SEQ ID NO: 471379 - RNA, 19 nt, Artificial Sequence
  Description of Artificial Sequence: Synthetic oligonucleotide
  Sense strand starting at position 2421 of SEQ ID NO: 317189
gcguuaccucuugugaguu

SEQ ID NO: 471380 - RNA, 19 nt, Artificial Sequence
  Description of Artificial Sequence: Synthetic oligonucleotide
  Antisense Strand to SEQ ID NO: 471379
aacucacaagagguaacgc

SEQ ID NO: 471381 - RNA, 19 nt, Artificial Sequence
  Description of Artificial Sequence: Synthetic oligonucleotide
  Sense strand starting at position 2525 of SEQ ID NO: 317189
gaauaaaucuggucuuugu

SEQ ID NO: 471382 - RNA, 19 nt, Artificial Sequence
  Description of Artificial Sequence: Synthetic oligonucleotide
  Antisense Strand to SEQ ID NO: 471381
acaaagaccagauuuauuc

SEQ ID NO: 471383 - RNA, 19 nt, Artificial Sequence
  Description of Artificial Sequence: Synthetic oligonucleotide
  Sense strand starting at position 2555 of SEQ ID NO: 317189
uugaacaagucugccauua

SEQ ID NO: 471384 - RNA, 19 nt, Artificial Sequence
  Description of Artificial Sequence: Synthetic oligonucleotide
  Antisense Strand to SEQ ID NO: 471383
uaauggcagacuuguucaa

SEQ ID NO: 471385 - RNA, 19 nt, Artificial Sequence
  Description of Artificial Sequence: Synthetic oligonucleotide
  Sense strand starting at position 2586 of SEQ ID NO: 317189
caccaaugucuagggaaca

SEQ ID NO: 471386 - RNA, 19 nt, Artificial Sequence
  Description of Artificial Sequence: Synthetic oligonucleotide
  Antisense Strand to SEQ ID NO: 471385
uguucccuagacauuggug

SEQ ID NO: 471387 - RNA, 19 nt, Artificial Sequence
  Description of Artificial Sequence: Synthetic oligonucleotide
  Sense strand starting at position 2614 of SEQ ID NO: 317189
uugcgacucauugagggau

SEQ ID NO: 471388 - RNA, 19 nt, Artificial Sequence
  Description of Artificial Sequence: Synthetic oligonucleotide
  Antisense Strand to SEQ ID NO: 471387
aucccucaaugagucgcaa

SEQ ID NO: 471389 - RNA, 19 nt, Artificial Sequence
  Description of Artificial Sequence: Synthetic oligonucleotide
  Sense strand starting at position 2626 of SEQ ID NO: 317189
gagggaugaacauguguac

SEQ ID NO: 471390 - RNA, 19 nt, Artificial Sequence
  Description of Artificial Sequence: Synthetic oligonucleotide
  Antisense Strand to SEQ ID NO: 471389
guacacauguucaucccuc

SEQ ID NO: 471391 - RNA, 19 nt, Artificial Sequence
  Description of Artificial Sequence: Synthetic oligonucleotide
  Sense strand starting at position 2681 of SEQ ID NO: 317189
gucauagugacucaguuac

SEQ ID NO: 471392 - RNA, 19 nt, Artificial Sequence
  Description of Artificial Sequence: Synthetic oligonucleotide
  Antisense Strand to SEQ ID NO: 471391
guaacugagucacuaugac

SEQ ID NO: 471393 - RNA, 19 nt, Artificial Sequence
  Description of Artificial Sequence: Synthetic oligonucleotide
  Sense strand starting at position 2789 of SEQ ID NO: 317189
ggcagacagugcuuaauuu

SEQ ID NO: 471394 - RNA, 19 nt, Artificial Sequence
  Description of Artificial Sequence: Synthetic oligonucleotide
  Antisense Strand to SEQ ID NO: 471393
aaauuaagcacugucugcc

SEQ ID NO: 471395 - RNA, 19 nt, Artificial Sequence
  Description of Artificial Sequence: Synthetic oligonucleotide
  Sense strand starting at position 3010 of SEQ ID NO: 317189
aaaugcguuccggaaauag

SEQ ID NO: 471396 - RNA, 19 nt, Artificial Sequence
  Description of Artificial Sequence: Synthetic oligonucleotide
  Antisense Strand to SEQ ID NO: 471395
cuauuuccggaacgcauuu

SEQ ID NO: 471397 - RNA, 19 nt, Artificial Sequence
  Description of Artificial Sequence: Synthetic oligonucleotide
  Sense strand starting at position 3130 of SEQ ID NO: 317189
uuauuaucccgaggaagug

SEQ ID NO: 471398 - RNA, 19 nt, Artificial Sequence
  Description of Artificial Sequence: Synthetic oligonucleotide
  Antisense Strand to SEQ ID NO: 471397
cacuuccucgggauaauaa

SEQ ID NO: 471399 - RNA, 19 nt, Artificial Sequence
  Description of Artificial Sequence: Synthetic oligonucleotide
  Sense strand starting at position 3139 of SEQ ID NO: 317189
cgaggaaguggugagucau

SEQ ID NO: 471400 - RNA, 19 nt, Artificial Sequence
  Description of Artificial Sequence: Synthetic oligonucleotide
  Antisense Strand to SEQ ID NO: 471399
augacucaccacuuccucg

SEQ ID NO: 471401 - RNA, 19 nt, Artificial Sequence
  Description of Artificial Sequence: Synthetic oligonucleotide
  Sense strand starting at position 3215 of SEQ ID NO: 317189
aguuaauaaggaugagguu

SEQ ID NO: 471402 - RNA, 19 nt, Artificial Sequence
  Description of Artificial Sequence: Synthetic oligonucleotide
  Antisense Strand to SEQ ID NO: 471401
aaccucauccuuauuaacu

SEQ ID NO: 471403 - RNA, 19 nt, Artificial Sequence
  Description of Artificial Sequence: Synthetic oligonucleotide
  Sense strand starting at position 3280 of SEQ ID NO: 317189
cuuguaugucauuagaucu

SEQ ID NO: 471404 - RNA, 19 nt, Artificial Sequence
  Description of Artificial Sequence: Synthetic oligonucleotide
  Antisense Strand to SEQ ID NO: 471403
agaucuaaugacauacaag

SEQ ID NO: 471405 - RNA, 19 nt, Artificial Sequence
  Description of Artificial Sequence: Synthetic oligonucleotide
  Sense strand starting at position 3339 of SEQ ID NO: 317189
uuauuagggucauugaaua

SEQ ID NO: 471406 - RNA, 19 nt, Artificial Sequence
  Description of Artificial Sequence: Synthetic oligonucleotide
  Antisense Strand to SEQ ID NO: 471405
uauucaaugacccuaauaa

SEQ ID NO: 471407 - RNA, 19 nt, Artificial Sequence
  Description of Artificial Sequence: Synthetic oligonucleotide
  Sense strand starting at position 3367 of SEQ ID NO: 317189
gaauacuucguuuaucuga

SEQ ID NO: 471408 - RNA, 19 nt, Artificial Sequence
  Description of Artificial Sequence: Synthetic oligonucleotide
  Antisense Strand to SEQ ID NO: 471407
ucagauaaacgaaguauuc

SEQ ID NO: 471409 - RNA, 19 nt, Artificial Sequence
  Description of Artificial Sequence: Synthetic oligonucleotide
  Sense strand starting at position 3369 of SEQ ID NO: 317189
auacuucguuuaucugaaa

SEQ ID NO: 471410 - RNA, 19 nt, Artificial Sequence
  Description of Artificial Sequence: Synthetic oligonucleotide
  Antisense Strand to SEQ ID NO: 471409
uuucagauaaacgaaguau

SEQ ID NO: 471411 - RNA, 19 nt, Artificial Sequence
  Description of Artificial Sequence: Synthetic oligonucleotide
  Sense strand starting at position 3469 of SEQ ID NO: 317189
cagcaaggguucuuagaaa

SEQ ID NO: 471412 - RNA, 19 nt, Artificial Sequence
  Description of Artificial Sequence: Synthetic oligonucleotide
  Antisense Strand to SEQ ID NO: 471411
uuucuaagaacccuugcug

SEQ ID NO: 471413 - RNA, 19 nt, Artificial Sequence
  Description of Artificial Sequence: Synthetic oligonucleotide
  Sense strand starting at position 3484 of SEQ ID NO: 317189
gaaagaucuuuccucugug

SEQ ID NO: 471414 - RNA, 19 nt, Artificial Sequence
  Description of Artificial Sequence: Synthetic oligonucleotide
  Antisense Strand to SEQ ID NO: 471413
cacagaggaaagaucuuuc

SEQ ID NO: 471415 - RNA, 19 nt, Artificial Sequence
  Description of Artificial Sequence: Synthetic oligonucleotide
  Sense strand starting at position 3487 of SEQ ID NO: 317189
agaucuuuccucugugaau

SEQ ID NO: 471416 - RNA, 19 nt, Artificial Sequence
  Description of Artificial Sequence: Synthetic oligonucleotide
  Antisense Strand to SEQ ID NO: 471415
auucacagaggaaagaucu

SEQ ID NO: 471417 - RNA, 19 nt, Artificial Sequence
  Description of Artificial Sequence: Synthetic oligonucleotide
  Sense strand starting at position 3571 of SEQ ID NO: 317189
aguauaugaucaccaugag

SEQ ID NO: 471418 - RNA, 19 nt, Artificial Sequence
  Description of Artificial Sequence: Synthetic oligonucleotide
  Antisense Strand to SEQ ID NO: 471417
cucauggugaucauauacu

SEQ ID NO: 471419 - RNA, 19 nt, Artificial Sequence
  Description of Artificial Sequence: Synthetic oligonucleotide
  Sense strand starting at position 3580 of SEQ ID NO: 317189
ucaccaugagcgcagaaau

SEQ ID NO: 471420 - RNA, 19 nt, Artificial Sequence
  Description of Artificial Sequence: Synthetic oligonucleotide
  Antisense Strand to SEQ ID NO: 471419
auuucugcgcucaugguga

SEQ ID NO: 471421 - RNA, 19 nt, Artificial Sequence
  Description of Artificial Sequence: Synthetic oligonucleotide
  Sense strand starting at position 3588 of SEQ ID NO: 317189
agcgcagaaaucugaagaa

SEQ ID NO: 471422 - RNA, 19 nt, Artificial Sequence
  Description of Artificial Sequence: Synthetic oligonucleotide
  Antisense Strand to SEQ ID NO: 471421
uucuucagauuucugcgcu

SEQ ID NO: 471423 - RNA, 19 nt, Artificial Sequence
  Description of Artificial Sequence: Synthetic oligonucleotide
  Sense strand starting at position 3630 of SEQ ID NO: 317189
accugugaauguuuagaag

SEQ ID NO: 471424 - RNA, 19 nt, Artificial Sequence
  Description of Artificial Sequence: Synthetic oligonucleotide
  Antisense Strand to SEQ ID NO: 471423
cuucuaaacauucacaggu

SEQ ID NO: 471425 - RNA, 19 nt, Artificial Sequence
  Description of Artificial Sequence: Synthetic oligonucleotide
  Sense strand starting at position 3639 of SEQ ID NO: 317189
uguuuagaagucugaaauu

SEQ ID NO: 471426 - RNA, 19 nt, Artificial Sequence
  Description of Artificial Sequence: Synthetic oligonucleotide
  Antisense Strand to SEQ ID NO: 471425
aauuucagacuucuaaaca

SEQ ID NO: 471427 - RNA, 19 nt, Artificial Sequence
  Description of Artificial Sequence: Synthetic oligonucleotide
  Sense strand starting at position 3848 of SEQ ID NO: 317189
ugugaugugccugcccauu

SEQ ID NO: 471428 - RNA, 19 nt, Artificial Sequence
  Description of Artificial Sequence: Synthetic oligonucleotide
  Antisense Strand to SEQ ID NO: 471427
aaugggcaggcacaucaca

SEQ ID NO: 471429 - RNA, 19 nt, Artificial Sequence
  Description of Artificial Sequence: Synthetic oligonucleotide
  Sense strand starting at position 3864 of SEQ ID NO: 317189
auuugcuugugcuccaaau

SEQ ID NO: 471430 - RNA, 19 nt, Artificial Sequence
  Description of Artificial Sequence: Synthetic oligonucleotide
  Antisense Strand to SEQ ID NO: 471429
auuuggagcacaagcaaau

SEQ ID NO: 471431 - RNA, 19 nt, Artificial Sequence
  Description of Artificial Sequence: Synthetic oligonucleotide
  Sense strand starting at position 278 of SEQ ID NO: 317190
gaaagaugcugucuuucua

SEQ ID NO: 471432 - RNA, 19 nt, Artificial Sequence
  Description of Artificial Sequence: Synthetic oligonucleotide
  Antisense Strand to SEQ ID NO: 471431
uagaaagacagcaucuuuc

SEQ ID NO: 471433 - RNA, 19 nt, Artificial Sequence
  Description of Artificial Sequence: Synthetic oligonucleotide
  Sense strand starting at position 282 of SEQ ID NO: 317190
gaugcugucuuucuagaag

SEQ ID NO: 471434 - RNA, 19 nt, Artificial Sequence
  Description of Artificial Sequence: Synthetic oligonucleotide
  Antisense Strand to SEQ ID NO: 471433
cuucuagaaagacagcauc

SEQ ID NO: 471435 - RNA, 19 nt, Artificial Sequence
  Description of Artificial Sequence: Synthetic oligonucleotide
  Sense strand starting at position 285 of SEQ ID NO: 317190
gcugucuuucuagaagcaa

SEQ ID NO: 471436 - RNA, 19 nt, Artificial Sequence
  Description of Artificial Sequence: Synthetic oligonucleotide
  Antisense Strand to SEQ ID NO: 471435
uugcuucuagaaagacagc

SEQ ID NO: 471437 - RNA, 19 nt, Artificial Sequence
  Description of Artificial Sequence: Synthetic oligonucleotide
  Sense strand starting at position 319 of SEQ ID NO: 317190
cuggacaauucucuggcua

SEQ ID NO: 471438 - RNA, 19 nt, Artificial Sequence
  Description of Artificial Sequence: Synthetic oligonucleotide
  Antisense Strand to SEQ ID NO: 471437
uagccagagaauuguccag

SEQ ID NO: 471439 - RNA, 19 nt, Artificial Sequence
  Description of Artificial Sequence: Synthetic oligonucleotide
  Sense strand starting at position 320 of SEQ ID NO: 317190
uggacaauucucuggcuau

SEQ ID NO: 471440 - RNA, 19 nt, Artificial Sequence
  Description of Artificial Sequence: Synthetic oligonucleotide
  Antisense Strand to SEQ ID NO: 471439
auagccagagaauugucca

SEQ ID NO: 471441 - RNA, 19 nt, Artificial Sequence
  Description of Artificial Sequence: Synthetic oligonucleotide
  Sense strand starting at position 469 of SEQ ID NO: 317190
gcuuaugaaccaggaucau

SEQ ID NO: 471442 - RNA, 19 nt, Artificial Sequence
  Description of Artificial Sequence: Synthetic oligonucleotide
  Antisense Strand to SEQ ID NO: 471441
augauccugguucauaagc

SEQ ID NO: 471443 - RNA, 19 nt, Artificial Sequence
  Description of Artificial Sequence: Synthetic oligonucleotide
  Sense strand starting at position 481 of SEQ ID NO: 317190
ggaucauauuauuccaugu

SEQ ID NO: 471444 - RNA, 19 nt, Artificial Sequence
  Description of Artificial Sequence: Synthetic oligonucleotide
  Antisense Strand to SEQ ID NO: 471443
acauggaauaauaugaucc

SEQ ID NO: 471445 - RNA, 19 nt, Artificial Sequence
  Description of Artificial Sequence: Synthetic oligonucleotide
  Sense strand starting at position 538 of SEQ ID NO: 317190
gcuaguuucucugugauua

SEQ ID NO: 471446 - RNA, 19 nt, Artificial Sequence
  Description of Artificial Sequence: Synthetic oligonucleotide
  Antisense Strand to SEQ ID NO: 471445
uaaucacagagaaacuagc

SEQ ID NO: 471447 - RNA, 19 nt, Artificial Sequence
  Description of Artificial Sequence: Synthetic oligonucleotide
  Sense strand starting at position 539 of SEQ ID NO: 317190
cuaguuucucugugauuac

SEQ ID NO: 471448 - RNA, 19 nt, Artificial Sequence
  Description of Artificial Sequence: Synthetic oligonucleotide
  Antisense Strand to SEQ ID NO: 471447
guaaucacagagaaacuag

SEQ ID NO: 471449 - RNA, 19 nt, Artificial Sequence
  Description of Artificial Sequence: Synthetic oligonucleotide
  Sense strand starting at position 546 of SEQ ID NO: 317190
cucugugauuacgcauuaa

SEQ ID NO: 471450 - RNA, 19 nt, Artificial Sequence
  Description of Artificial Sequence: Synthetic oligonucleotide
  Antisense Strand to SEQ ID NO: 471449
uuaaugcguaaucacagag

SEQ ID NO: 471451 - RNA, 19 nt, Artificial Sequence
  Description of Artificial Sequence: Synthetic oligonucleotide
  Sense strand starting at position 592 of SEQ ID NO: 317190
uagagacucccagguugau

SEQ ID NO: 471452 - RNA, 19 nt, Artificial Sequence
  Description of Artificial Sequence: Synthetic oligonucleotide
  Antisense Strand to SEQ ID NO: 471451
aucaaccugggagucucua

SEQ ID NO: 471453 - RNA, 19 nt, Artificial Sequence
  Description of Artificial Sequence: Synthetic oligonucleotide
  Sense strand starting at position 1242 of SEQ ID NO: 317190
gcgcaaacuuccuuugaau

SEQ ID NO: 471454 - RNA, 19 nt, Artificial Sequence
  Description of Artificial Sequence: Synthetic oligonucleotide
  Antisense Strand to SEQ ID NO: 471453
auucaaaggaaguuugcgc

SEQ ID NO: 471455 - RNA, 19 nt, Artificial Sequence
  Description of Artificial Sequence: Synthetic oligonucleotide
  Sense strand starting at position 1274 of SEQ ID NO: 317190
ggugaaccaucccaaagaa

SEQ ID NO: 471456 - RNA, 19 nt, Artificial Sequence
  Description of Artificial Sequence: Synthetic oligonucleotide
  Antisense Strand to SEQ ID NO: 471455
uucuuugggaugguucacc

SEQ ID NO: 471457 - RNA, 19 nt, Artificial Sequence
  Description of Artificial Sequence: Synthetic oligonucleotide
  Sense strand starting at position 1376 of SEQ ID NO: 317190
gaaugaugucaucgccucu

SEQ ID NO: 471458 - RNA, 19 nt, Artificial Sequence
  Description of Artificial Sequence: Synthetic oligonucleotide
  Antisense Strand to SEQ ID NO: 471457
agaggcgaugacaucauuc

SEQ ID NO: 471459 - RNA, 19 nt, Artificial Sequence
  Description of Artificial Sequence: Synthetic oligonucleotide
  Sense strand starting at position 1465 of SEQ ID NO: 317190
gagcguggccaagauuaag

SEQ ID NO: 471460 - RNA, 19 nt, Artificial Sequence
  Description of Artificial Sequence: Synthetic oligonucleotide
  Antisense Strand to SEQ ID NO: 471459
cuuaaucuuggccacgcuc

SEQ ID NO: 471461 - RNA, 19 nt, Artificial Sequence
  Description of Artificial Sequence: Synthetic oligonucleotide
  Sense strand starting at position 1506 of SEQ ID NO: 317190
gugcgagguguucagagaa

SEQ ID NO: 471462 - RNA, 19 nt, Artificial Sequence
  Description of Artificial Sequence: Synthetic oligonucleotide
  Antisense Strand to SEQ ID NO: 471461
uucucugaacaccucgcac

SEQ ID NO: 471463 - RNA, 19 nt, Artificial Sequence
  Description of Artificial Sequence: Synthetic oligonucleotide
  Sense strand starting at position 2163 of SEQ ID NO: 317190
cgggcuuuccuggaacgau

SEQ ID NO: 471464 - RNA, 19 nt, Artificial Sequence
  Description of Artificial Sequence: Synthetic oligonucleotide
  Antisense Strand to SEQ ID NO: 471463
aucguuccaggaaagcccg

SEQ ID NO: 471465 - RNA, 19 nt, Artificial Sequence
  Description of Artificial Sequence: Synthetic oligonucleotide
  Sense strand starting at position 2171 of SEQ ID NO: 317190
ccuggaacgaucgagaagu

SEQ ID NO: 471466 - RNA, 19 nt, Artificial Sequence
  Description of Artificial Sequence: Synthetic oligonucleotide
  Antisense Strand to SEQ ID NO: 471465
acuucucgaucguuccagg

SEQ ID NO: 471467 - RNA, 19 nt, Artificial Sequence
  Description of Artificial Sequence: Synthetic oligonucleotide
  Sense strand starting at position 2177 of SEQ ID NO: 317190
acgaucgagaagugcuaau

SEQ ID NO: 471468 - RNA, 19 nt, Artificial Sequence
  Description of Artificial Sequence: Synthetic oligonucleotide
  Antisense Strand to SEQ ID NO: 471467
auuagcacuucucgaucgu

SEQ ID NO: 471469 - RNA, 19 nt, Artificial Sequence
  Description of Artificial Sequence: Synthetic oligonucleotide
  Sense strand starting at position 2188 of SEQ ID NO: 317190
gugcuaauaacgggaaaga

SEQ ID NO: 471470 - RNA, 19 nt, Artificial Sequence
  Description of Artificial Sequence: Synthetic oligonucleotide
  Antisense Strand to SEQ ID NO: 471469
ucuuucccguuauuagcac

SEQ ID NO: 471471 - RNA, 19 nt, Artificial Sequence
  Description of Artificial Sequence: Synthetic oligonucleotide
  Sense strand starting at position 2230 of SEQ ID NO: 317190
auauguugucggcuuguua

SEQ ID NO: 471472 - RNA, 19 nt, Artificial Sequence
  Description of Artificial Sequence: Synthetic oligonucleotide
  Antisense Strand to SEQ ID NO: 471471
uaacaagccgacaacauau

SEQ ID NO: 471473 - RNA, 19 nt, Artificial Sequence
  Description of Artificial Sequence: Synthetic oligonucleotide
  Sense strand starting at position 2249 of SEQ ID NO: 317190
ggaugauucuccuccggug

SEQ ID NO: 471474 - RNA, 19 nt, Artificial Sequence
  Description of Artificial Sequence: Synthetic oligonucleotide
  Antisense Strand to SEQ ID NO: 471473
caccggaggagaaucaucc

SEQ ID NO: 471475 - RNA, 19 nt, Artificial Sequence
  Description of Artificial Sequence: Synthetic oligonucleotide
  Sense strand starting at position 2290 of SEQ ID NO: 317190
acuaaagaguguccaauaa

SEQ ID NO: 471476 - RNA, 19 nt, Artificial Sequence
  Description of Artificial Sequence: Synthetic oligonucleotide
  Antisense Strand to SEQ ID NO: 471475
uuauuggacacucuuuagu

SEQ ID NO: 471477 - RNA, 19 nt, Artificial Sequence
  Description of Artificial Sequence: Synthetic oligonucleotide
  Sense strand starting at position 2546 of SEQ ID NO: 317190
cuggguucuguguaauaaa

SEQ ID NO: 471478 - RNA, 19 nt, Artificial Sequence
  Description of Artificial Sequence: Synthetic oligonucleotide
  Antisense Strand to SEQ ID NO: 471477
uuuauuacacagaacccag

SEQ ID NO: 471479 - RNA, 19 nt, Artificial Sequence
  Description of Artificial Sequence: Synthetic oligonucleotide
  Sense strand starting at position 2650 of SEQ ID NO: 317190
gugauccucuuagcucaua

SEQ ID NO: 471480 - RNA, 19 nt, Artificial Sequence
  Description of Artificial Sequence: Synthetic oligonucleotide
  Antisense Strand to SEQ ID NO: 471479
uaugagcuaagaggaucac

SEQ ID NO: 471481 - RNA, 19 nt, Artificial Sequence
  Description of Artificial Sequence: Synthetic oligonucleotide
  Sense strand starting at position 2679 of SEQ ID NO: 317190
ggcccugagucacuuauuu

SEQ ID NO: 471482 - RNA, 19 nt, Artificial Sequence
  Description of Artificial Sequence: Synthetic oligonucleotide
  Antisense Strand to SEQ ID NO: 471481
aaauaagugacucagggcc

SEQ ID NO: 471483 - RNA, 19 nt, Artificial Sequence
  Description of Artificial Sequence: Synthetic oligonucleotide
  Sense strand starting at position 2715 of SEQ ID NO: 317190
ggaacuucuguagaagugu

SEQ ID NO: 471484 - RNA, 19 nt, Artificial Sequence
  Description of Artificial Sequence: Synthetic oligonucleotide
  Antisense Strand to SEQ ID NO: 471483
acacuucuacagaaguucc

SEQ ID NO: 471485 - RNA, 19 nt, Artificial Sequence
  Description of Artificial Sequence: Synthetic oligonucleotide
  Sense strand starting at position 2748 of SEQ ID NO: 317190
uggacucauucguuccaga

SEQ ID NO: 471486 - RNA, 19 nt, Artificial Sequence
  Description of Artificial Sequence: Synthetic oligonucleotide
  Antisense Strand to SEQ ID NO: 471485
ucuggaacgaaugagucca

SEQ ID NO: 471487 - RNA, 19 nt, Artificial Sequence
  Description of Artificial Sequence: Synthetic oligonucleotide
  Sense strand starting at position 2753 of SEQ ID NO: 317190
ucauucguuccagaauuaa

SEQ ID NO: 471488 - RNA, 19 nt, Artificial Sequence
  Description of Artificial Sequence: Synthetic oligonucleotide
  Antisense Strand to SEQ ID NO: 471487
uuaauucuggaacgaauga

SEQ ID NO: 471489 - RNA, 19 nt, Artificial Sequence
  Description of Artificial Sequence: Synthetic oligonucleotide
  Sense strand starting at position 3016 of SEQ ID NO: 317190
augaaugaaugguaauauc

SEQ ID NO: 471490 - RNA, 19 nt, Artificial Sequence
  Description of Artificial Sequence: Synthetic oligonucleotide
  Antisense Strand to SEQ ID NO: 471489
gauauuaccauucauucau

SEQ ID NO: 471491 - RNA, 19 nt, Artificial Sequence
  Description of Artificial Sequence: Synthetic oligonucleotide
  Sense strand starting at position 3128 of SEQ ID NO: 317190
guagaccacuuguuuaaag

SEQ ID NO: 471492 - RNA, 19 nt, Artificial Sequence
  Description of Artificial Sequence: Synthetic oligonucleotide
  Antisense Strand to SEQ ID NO: 471491
cuuuaaacaaguggucuac

SEQ ID NO: 471493 - RNA, 19 nt, Artificial Sequence
  Description of Artificial Sequence: Synthetic oligonucleotide
  Sense strand starting at position 3139 of SEQ ID NO: 317190
guuuaaaggguuuaguacu

SEQ ID NO: 471494 - RNA, 19 nt, Artificial Sequence
  Description of Artificial Sequence: Synthetic oligonucleotide
  Antisense Strand to SEQ ID NO: 471493
aguacuaaacccuuuaaac

SEQ ID NO: 471495 - RNA, 19 nt, Artificial Sequence
  Description of Artificial Sequence: Synthetic oligonucleotide
  Sense strand starting at position 3147 of SEQ ID NO: 317190
gguuuaguacuguaacugu

SEQ ID NO: 471496 - RNA, 19 nt, Artificial Sequence
  Description of Artificial Sequence: Synthetic oligonucleotide
  Antisense Strand to SEQ ID NO: 471495
acaguuacaguacuaaacc

SEQ ID NO: 471497 - RNA, 19 nt, Artificial Sequence
  Description of Artificial Sequence: Synthetic oligonucleotide
  Sense strand starting at position 3164 of SEQ ID NO: 317190
guauccugccgucauuacu

SEQ ID NO: 471498 - RNA, 19 nt, Artificial Sequence
  Description of Artificial Sequence: Synthetic oligonucleotide
  Antisense Strand to SEQ ID NO: 471497
aguaaugacggcaggauac

SEQ ID NO: 471499 - RNA, 19 nt, Artificial Sequence
  Description of Artificial Sequence: Synthetic oligonucleotide
  Sense strand starting at position 3229 of SEQ ID NO: 317190
gucuauuccucucucggaa

SEQ ID NO: 471500 - RNA, 19 nt, Artificial Sequence
  Description of Artificial Sequence: Synthetic oligonucleotide
  Antisense Strand to SEQ ID NO: 471499
uuccgagagaggaauagac

SEQ ID NO: 471501 - RNA, 19 nt, Artificial Sequence
  Description of Artificial Sequence: Synthetic oligonucleotide
  Sense strand starting at position 3242 of SEQ ID NO: 317190
ucggaaauaucuuuauuga

SEQ ID NO: 471502 - RNA, 19 nt, Artificial Sequence
  Description of Artificial Sequence: Synthetic oligonucleotide
  Antisense Strand to SEQ ID NO: 471501
ucaauaaagauauuuccga

SEQ ID NO: 471503 - RNA, 19 nt, Artificial Sequence
  Description of Artificial Sequence: Synthetic oligonucleotide
  Sense strand starting at position 3267 of SEQ ID NO: 317190
aaugaauaacgaugucugu

SEQ ID NO: 471504 - RNA, 19 nt, Artificial Sequence
  Description of Artificial Sequence: Synthetic oligonucleotide
  Antisense Strand to SEQ ID NO: 471503
acagacaucguuauucauu

SEQ ID NO: 471505 - RNA, 19 nt, Artificial Sequence
  Description of Artificial Sequence: Synthetic oligonucleotide
  Sense strand starting at position 3270 of SEQ ID NO: 317190
gaauaacgaugucuguaaa

SEQ ID NO: 471506 - RNA, 19 nt, Artificial Sequence
  Description of Artificial Sequence: Synthetic oligonucleotide
  Antisense Strand to SEQ ID NO: 471505
uuuacagacaucguuauuc

SEQ ID NO: 471507 - RNA, 19 nt, Artificial Sequence
  Description of Artificial Sequence: Synthetic oligonucleotide
  Sense strand starting at position 3329 of SEQ ID NO: 317190
aauugaaugucccugugau

SEQ ID NO: 471508 - RNA, 19 nt, Artificial Sequence
  Description of Artificial Sequence: Synthetic oligonucleotide
  Antisense Strand to SEQ ID NO: 471507
aucacagggacauucaauu

SEQ ID NO: 471509 - RNA, 19 nt, Artificial Sequence
  Description of Artificial Sequence: Synthetic oligonucleotide
  Sense strand starting at position 3330 of SEQ ID NO: 317190
auugaaugucccugugauu

SEQ ID NO: 471510 - RNA, 19 nt, Artificial Sequence
  Description of Artificial Sequence: Synthetic oligonucleotide
  Antisense Strand to SEQ ID NO: 471509
aaucacagggacauucaau

SEQ ID NO: 471511 - RNA, 19 nt, Artificial Sequence
  Description of Artificial Sequence: Synthetic oligonucleotide
  Sense strand starting at position 104 of SEQ ID NO: 317191
agggcagucaaacaaguuu

SEQ ID NO: 471512 - RNA, 19 nt, Artificial Sequence
  Description of Artificial Sequence: Synthetic oligonucleotide
  Antisense Strand to SEQ ID NO: 471511
aaacuuguuugacugcccu

SEQ ID NO: 471513 - RNA, 19 nt, Artificial Sequence
  Description of Artificial Sequence: Synthetic oligonucleotide
  Sense strand starting at position 112 of SEQ ID NO: 317191
caaacaaguuucgucaaug

SEQ ID NO: 471514 - RNA, 19 nt, Artificial Sequence
  Description of Artificial Sequence: Synthetic oligonucleotide
  Antisense Strand to SEQ ID NO: 471513
cauugacgaaacuuguuug

SEQ ID NO: 471515 - RNA, 19 nt, Artificial Sequence
  Description of Artificial Sequence: Synthetic oligonucleotide
  Sense strand starting at position 518 of SEQ ID NO: 317191
uuucccuaaccgugaaaca

SEQ ID NO: 471516 - RNA, 19 nt, Artificial Sequence
  Description of Artificial Sequence: Synthetic oligonucleotide
  Antisense Strand to SEQ ID NO: 471515
uguuucacgguuagggaaa

SEQ ID NO: 471517 - RNA, 19 nt, Artificial Sequence
  Description of Artificial Sequence: Synthetic oligonucleotide
  Sense strand starting at position 528 of SEQ ID NO: 317191
cgugaaacaccuuaaggua

SEQ ID NO: 471518 - RNA, 19 nt, Artificial Sequence
  Description of Artificial Sequence: Synthetic oligonucleotide
  Antisense Strand to SEQ ID NO: 471517
uaccuuaagguguuucacg

SEQ ID NO: 471519 - RNA, 19 nt, Artificial Sequence
  Description of Artificial Sequence: Synthetic oligonucleotide
  Sense strand starting at position 554 of SEQ ID NO: 317191
cgaaacugagucugaguuu

SEQ ID NO: 471520 - RNA, 19 nt, Artificial Sequence
  Description of Artificial Sequence: Synthetic oligonucleotide
  Antisense Strand to SEQ ID NO: 471519
aaacucagacucaguuucg

SEQ ID NO: 471521 - RNA, 19 nt, Artificial Sequence
  Description of Artificial Sequence: Synthetic oligonucleotide
  Sense strand starting at position 629 of SEQ ID NO: 317191
aaacaaucccgugaaguac

SEQ ID NO: 471522 - RNA, 19 nt, Artificial Sequence
  Description of Artificial Sequence: Synthetic oligonucleotide
  Antisense Strand to SEQ ID NO: 471521
guacuucacgggauuguuu

SEQ ID NO: 471523 - RNA, 19 nt, Artificial Sequence
  Description of Artificial Sequence: Synthetic oligonucleotide
  Sense strand starting at position 690 of SEQ ID NO: 317191
agugacucuccucaagauc

SEQ ID NO: 471524 - RNA, 19 nt, Artificial Sequence
  Description of Artificial Sequence: Synthetic oligonucleotide
  Antisense Strand to SEQ ID NO: 471523
gaucuugaggagagucacu

SEQ ID NO: 471525 - RNA, 19 nt, Artificial Sequence
  Description of Artificial Sequence: Synthetic oligonucleotide
  Sense strand starting at position 806 of SEQ ID NO: 317191
ccuuaccaucuauagaguu

SEQ ID NO: 471526 - RNA, 19 nt, Artificial Sequence
  Description of Artificial Sequence: Synthetic oligonucleotide
  Antisense Strand to SEQ ID NO: 471525
aacucuauagaugguaagg

SEQ ID NO: 471527 - RNA, 19 nt, Artificial Sequence
  Description of Artificial Sequence: Synthetic oligonucleotide
  Sense strand starting at position 986 of SEQ ID NO: 317191
uuauuauuccauuggacug

SEQ ID NO: 471528 - RNA, 19 nt, Artificial Sequence
  Description of Artificial Sequence: Synthetic oligonucleotide
  Antisense Strand to SEQ ID NO: 471527
caguccaauggaauaauaa

SEQ ID NO: 471529 - RNA, 19 nt, Artificial Sequence
  Description of Artificial Sequence: Synthetic oligonucleotide
  Sense strand starting at position 991 of SEQ ID NO: 317191
auuccauuggacugugaaa

SEQ ID NO: 471530 - RNA, 19 nt, Artificial Sequence
  Description of Artificial Sequence: Synthetic oligonucleotide
  Antisense Strand to SEQ ID NO: 471529
uuucacaguccaauggaau

SEQ ID NO: 471531 - RNA, 19 nt, Artificial Sequence
  Description of Artificial Sequence: Synthetic oligonucleotide
  Sense strand starting at position 993 of SEQ ID NO: 317191
uccauuggacugugaaaua

SEQ ID NO: 471532 - RNA, 19 nt, Artificial Sequence
  Description of Artificial Sequence: Synthetic oligonucleotide
  Antisense Strand to SEQ ID NO: 471531
uauuucacaguccaaugga

SEQ ID NO: 471533 - RNA, 19 nt, Artificial Sequence
  Description of Artificial Sequence: Synthetic oligonucleotide
  Sense strand starting at position 998 of SEQ ID NO: 317191
uggacugugaaauaacguu

SEQ ID NO: 471534 - RNA, 19 nt, Artificial Sequence
  Description of Artificial Sequence: Synthetic oligonucleotide
  Antisense Strand to SEQ ID NO: 471533
aacguuauuucacagucca

SEQ ID NO: 471535 - RNA, 19 nt, Artificial Sequence
  Description of Artificial Sequence: Synthetic oligonucleotide
  Sense strand starting at position 1090 of SEQ ID NO: 317191
agauaaggcucuuucucau

SEQ ID NO: 471536 - RNA, 19 nt, Artificial Sequence
  Description of Artificial Sequence: Synthetic oligonucleotide
  Antisense Strand to SEQ ID NO: 471535
augagaaagagccuuaucu

SEQ ID NO: 471537 - RNA, 19 nt, Artificial Sequence
  Description of Artificial Sequence: Synthetic oligonucleotide
  Sense strand starting at position 1096 of SEQ ID NO: 317191
ggcucuuucucaucacaga

SEQ ID NO: 471538 - RNA, 19 nt, Artificial Sequence
  Description of Artificial Sequence: Synthetic oligonucleotide
  Antisense Strand to SEQ ID NO: 471537
ucugugaugagaaagagcc

SEQ ID NO: 471539 - RNA, 19 nt, Artificial Sequence
  Description of Artificial Sequence: Synthetic oligonucleotide
  Sense strand starting at position 1123 of SEQ ID NO: 317191
ggaaguaagcaacguuaug

SEQ ID NO: 471540 - RNA, 19 nt, Artificial Sequence
  Description of Artificial Sequence: Synthetic oligonucleotide
  Antisense Strand to SEQ ID NO: 471539
cauaacguugcuuacuucc

SEQ ID NO: 471541 - RNA, 19 nt, Artificial Sequence
  Description of Artificial Sequence: Synthetic oligonucleotide
  Sense strand starting at position 1166 of SEQ ID NO: 317191
acuggcagucauuacuaaa

SEQ ID NO: 471542 - RNA, 19 nt, Artificial Sequence
  Description of Artificial Sequence: Synthetic oligonucleotide
  Antisense Strand to SEQ ID NO: 471541
uuuaguaaugacugccagu

SEQ ID NO: 471543 - RNA, 19 nt, Artificial Sequence
  Description of Artificial Sequence: Synthetic oligonucleotide
  Sense strand starting at position 1543 of SEQ ID NO: 317191
ccaguucacgggugaagga

SEQ ID NO: 471544 - RNA, 19 nt, Artificial Sequence
  Description of Artificial Sequence: Synthetic oligonucleotide
  Antisense Strand to SEQ ID NO: 471543
uccuucacccgugaacugg

SEQ ID NO: 471545 - RNA, 19 nt, Artificial Sequence
  Description of Artificial Sequence: Synthetic oligonucleotide
  Sense strand starting at position 2952 of SEQ ID NO: 317191
caaccuggauuagugauua

SEQ ID NO: 471546 - RNA, 19 nt, Artificial Sequence
  Description of Artificial Sequence: Synthetic oligonucleotide
  Antisense Strand to SEQ ID NO: 471545
uaaucacuaauccagguug

SEQ ID NO: 471547 - RNA, 19 nt, Artificial Sequence
  Description of Artificial Sequence: Synthetic oligonucleotide
  Sense strand starting at position 2956 of SEQ ID NO: 317191
cuggauuagugauuacuua

SEQ ID NO: 471548 - RNA, 19 nt, Artificial Sequence
  Description of Artificial Sequence: Synthetic oligonucleotide
  Antisense Strand to SEQ ID NO: 471547
uaaguaaucacuaauccag

SEQ ID NO: 471549 - RNA, 19 nt, Artificial Sequence
  Description of Artificial Sequence: Synthetic oligonucleotide
  Sense strand starting at position 3013 of SEQ ID NO: 317191
aucagauuucugugcagug

SEQ ID NO: 471550 - RNA, 19 nt, Artificial Sequence
  Description of Artificial Sequence: Synthetic oligonucleotide
  Antisense Strand to SEQ ID NO: 471549
cacugcacagaaaucugau

SEQ ID NO: 471551 - RNA, 19 nt, Artificial Sequence
  Description of Artificial Sequence: Synthetic oligonucleotide
  Sense strand starting at position 3059 of SEQ ID NO: 317191
gcuucuguauuauuaagag

SEQ ID NO: 471552 - RNA, 19 nt, Artificial Sequence
  Description of Artificial Sequence: Synthetic oligonucleotide
  Antisense Strand to SEQ ID NO: 471551
cucuuaauaauacagaagc

SEQ ID NO: 471553 - RNA, 19 nt, Artificial Sequence
  Description of Artificial Sequence: Synthetic oligonucleotide
  Sense strand starting at position 3177 of SEQ ID NO: 317191
cuaauuauuccagggcuag

SEQ ID NO: 471554 - RNA, 19 nt, Artificial Sequence
  Description of Artificial Sequence: Synthetic oligonucleotide
  Antisense Strand to SEQ ID NO: 471553
cuagcccuggaauaauuag

SEQ ID NO: 471555 - RNA, 19 nt, Artificial Sequence
  Description of Artificial Sequence: Synthetic oligonucleotide
  Sense strand starting at position 3178 of SEQ ID NO: 317191
uaauuauuccagggcuagu

SEQ ID NO: 471556 - RNA, 19 nt, Artificial Sequence
  Description of Artificial Sequence: Synthetic oligonucleotide
  Antisense Strand to SEQ ID NO: 471555
acuagcccuggaauaauua

SEQ ID NO: 471557 - RNA, 19 nt, Artificial Sequence
  Description of Artificial Sequence: Synthetic oligonucleotide
  Sense strand starting at position 3222 of SEQ ID NO: 317191
gacagaguuuccuccagga

SEQ ID NO: 471558 - RNA, 19 nt, Artificial Sequence
  Description of Artificial Sequence: Synthetic oligonucleotide
  Antisense Strand to SEQ ID NO: 471557
uccuggaggaaacucuguc

SEQ ID NO: 471559 - RNA, 19 nt, Artificial Sequence
  Description of Artificial Sequence: Synthetic oligonucleotide
  Sense strand starting at position 3224 of SEQ ID NO: 317191
cagaguuuccuccaggagu

SEQ ID NO: 471560 - RNA, 19 nt, Artificial Sequence
  Description of Artificial Sequence: Synthetic oligonucleotide
  Antisense Strand to SEQ ID NO: 471559
acuccuggaggaaacucug

SEQ ID NO: 471561 - RNA, 19 nt, Artificial Sequence
  Description of Artificial Sequence: Synthetic oligonucleotide
  Sense strand starting at position 3226 of SEQ ID NO: 317191
gaguuuccuccaggaguua

SEQ ID NO: 471562 - RNA, 19 nt, Artificial Sequence
  Description of Artificial Sequence: Synthetic oligonucleotide
  Antisense Strand to SEQ ID NO: 471561
uaacuccuggaggaaacuc

SEQ ID NO: 471563 - RNA, 19 nt, Artificial Sequence
  Description of Artificial Sequence: Synthetic oligonucleotide
  Sense strand starting at position 3227 of SEQ ID NO: 317191
aguuuccuccaggaguuau

SEQ ID NO: 471564 - RNA, 19 nt, Artificial Sequence
  Description of Artificial Sequence: Synthetic oligonucleotide
  Antisense Strand to SEQ ID NO: 471563
auaacuccuggaggaaacu

SEQ ID NO: 471565 - RNA, 19 nt, Artificial Sequence
  Description of Artificial Sequence: Synthetic oligonucleotide
  Sense strand starting at position 3389 of SEQ ID NO: 317191
ccuguuagugacuagcaaa

SEQ ID NO: 471566 - RNA, 19 nt, Artificial Sequence
  Description of Artificial Sequence: Synthetic oligonucleotide
  Antisense Strand to SEQ ID NO: 471565
uuugcuagucacuaacagg

SEQ ID NO: 471567 - RNA, 19 nt, Artificial Sequence
  Description of Artificial Sequence: Synthetic oligonucleotide
  Sense strand starting at position 3438 of SEQ ID NO: 317191
ugcugcugccuguuaguga

SEQ ID NO: 471568 - RNA, 19 nt, Artificial Sequence
  Description of Artificial Sequence: Synthetic oligonucleotide
  Antisense Strand to SEQ ID NO: 471567
ucacuaacaggcagcagca

SEQ ID NO: 471569 - RNA, 19 nt, Artificial Sequence
  Description of Artificial Sequence: Synthetic oligonucleotide
  Sense strand starting at position 3489 of SEQ ID NO: 317191
ggcugcugccuguuaguga

SEQ ID NO: 471570 - RNA, 19 nt, Artificial Sequence
  Description of Artificial Sequence: Synthetic oligonucleotide
  Antisense Strand to SEQ ID NO: 471569
ucacuaacaggcagcagcc

SEQ ID NO: 471571 - RNA, 19 nt, Artificial Sequence
  Description of Artificial Sequence: Synthetic oligonucleotide
  Sense strand starting at position 3567 of SEQ ID NO: 317191
cuauauccagccugaguua

SEQ ID NO: 471572 - RNA, 19 nt, Artificial Sequence
  Description of Artificial Sequence: Synthetic oligonucleotide
  Antisense Strand to SEQ ID NO: 471571
uaacucaggcuggauauag

SEQ ID NO: 471573 - RNA, 19 nt, Artificial Sequence
  Description of Artificial Sequence: Synthetic oligonucleotide
  Sense strand starting at position 3664 of SEQ ID NO: 317191
ccugcugucagagcgguau

SEQ ID NO: 471574 - RNA, 19 nt, Artificial Sequence
  Description of Artificial Sequence: Synthetic oligonucleotide
  Antisense Strand to SEQ ID NO: 471573
auaccgcucugacagcagg

SEQ ID NO: 471575 - RNA, 19 nt, Artificial Sequence
  Description of Artificial Sequence: Synthetic oligonucleotide
  Sense strand starting at position 3668 of SEQ ID NO: 317191
cugucagagcgguauuucu

SEQ ID NO: 471576 - RNA, 19 nt, Artificial Sequence
  Description of Artificial Sequence: Synthetic oligonucleotide
  Antisense Strand to SEQ ID NO: 471575
agaaauaccgcucugacag

SEQ ID NO: 471577 - RNA, 19 nt, Artificial Sequence
  Description of Artificial Sequence: Synthetic oligonucleotide
  Sense strand starting at position 3690 of SEQ ID NO: 317191
acagaaaucugaucuuguu

SEQ ID NO: 471578 - RNA, 19 nt, Artificial Sequence
  Description of Artificial Sequence: Synthetic oligonucleotide
  Antisense Strand to SEQ ID NO: 471577
aacaagaucagauuucugu

SEQ ID NO: 471579 - RNA, 19 nt, Artificial Sequence
  Description of Artificial Sequence: Synthetic oligonucleotide
  Sense strand starting at position 3699 of SEQ ID NO: 317191
ugaucuuguuacuugacua

SEQ ID NO: 471580 - RNA, 19 nt, Artificial Sequence
  Description of Artificial Sequence: Synthetic oligonucleotide
  Antisense Strand to SEQ ID NO: 471579
uagucaaguaacaagauca

SEQ ID NO: 471581 - RNA, 19 nt, Artificial Sequence
  Description of Artificial Sequence: Synthetic oligonucleotide
  Sense strand starting at position 3703 of SEQ ID NO: 317191
cuuguuacuugacuacuua

SEQ ID NO: 471582 - RNA, 19 nt, Artificial Sequence
  Description of Artificial Sequence: Synthetic oligonucleotide
  Antisense Strand to SEQ ID NO: 471581
uaaguagucaaguaacaag

SEQ ID NO: 471583 - RNA, 19 nt, Artificial Sequence
  Description of Artificial Sequence: Synthetic oligonucleotide
  Sense strand starting at position 3897 of SEQ ID NO: 317191
gaguucugguucuuauuag

SEQ ID NO: 471584 - RNA, 19 nt, Artificial Sequence
  Description of Artificial Sequence: Synthetic oligonucleotide
  Antisense Strand to SEQ ID NO: 471583
cuaauaagaaccagaacuc

SEQ ID NO: 471585 - RNA, 19 nt, Artificial Sequence
  Description of Artificial Sequence: Synthetic oligonucleotide
  Sense strand starting at position 3905 of SEQ ID NO: 317191
guucuuauuagagggaaau

SEQ ID NO: 471586 - RNA, 19 nt, Artificial Sequence
  Description of Artificial Sequence: Synthetic oligonucleotide
  Antisense Strand to SEQ ID NO: 471585
auuucccucuaauaagaac

SEQ ID NO: 471587 - RNA, 19 nt, Artificial Sequence
  Description of Artificial Sequence: Synthetic oligonucleotide
  Sense strand starting at position 3955 of SEQ ID NO: 317191
gugcucacugcugugaguu

SEQ ID NO: 471588 - RNA, 19 nt, Artificial Sequence
  Description of Artificial Sequence: Synthetic oligonucleotide
  Antisense Strand to SEQ ID NO: 471587
aacucacagcagugagcac

SEQ ID NO: 471589 - RNA, 19 nt, Artificial Sequence
  Description of Artificial Sequence: Synthetic oligonucleotide
  Sense strand starting at position 3971 of SEQ ID NO: 317191
guuugaccuuauuucuagu

SEQ ID NO: 471590 - RNA, 19 nt, Artificial Sequence
  Description of Artificial Sequence: Synthetic oligonucleotide
  Antisense Strand to SEQ ID NO: 471589
acuagaaauaaggucaaac

SEQ ID NO: 471591 - RNA, 19 nt, Artificial Sequence
  Description of Artificial Sequence: Synthetic oligonucleotide
  Sense strand starting at position 122 of SEQ ID NO: 317192
ccauuuauugacggcuuau

SEQ ID NO: 471592 - RNA, 19 nt, Artificial Sequence
  Description of Artificial Sequence: Synthetic oligonucleotide
  Antisense Strand to SEQ ID NO: 471591
auaagccgucaauaaaugg

SEQ ID NO: 471593 - RNA, 19 nt, Artificial Sequence
  Description of Artificial Sequence: Synthetic oligonucleotide
  Sense strand starting at position 231 of SEQ ID NO: 317192
uuuauauguggguauaaug

SEQ ID NO: 471594 - RNA, 19 nt, Artificial Sequence
  Description of Artificial Sequence: Synthetic oligonucleotide
  Antisense Strand to SEQ ID NO: 471593
cauuauacccacauauaaa

SEQ ID NO: 471595 - RNA, 19 nt, Artificial Sequence
  Description of Artificial Sequence: Synthetic oligonucleotide
  Sense strand starting at position 325 of SEQ ID NO: 317192
ucaauagcucaagagcuaa

SEQ ID NO: 471596 - RNA, 19 nt, Artificial Sequence
  Description of Artificial Sequence: Synthetic oligonucleotide
  Antisense Strand to SEQ ID NO: 471595
uuagcucuugagcuauuga

SEQ ID NO: 471597 - RNA, 19 nt, Artificial Sequence
  Description of Artificial Sequence: Synthetic oligonucleotide
  Sense strand starting at position 367 of SEQ ID NO: 317192
ccaugagauuuggacccua

SEQ ID NO: 471598 - RNA, 19 nt, Artificial Sequence
  Description of Artificial Sequence: Synthetic oligonucleotide
  Antisense Strand to SEQ ID NO: 471597
uaggguccaaaucucaugg

SEQ ID NO: 471599 - RNA, 19 nt, Artificial Sequence
  Description of Artificial Sequence: Synthetic oligonucleotide
  Sense strand starting at position 406 of SEQ ID NO: 317192
acugcuaguugaguagaaa

SEQ ID NO: 471600 - RNA, 19 nt, Artificial Sequence
  Description of Artificial Sequence: Synthetic oligonucleotide
  Antisense Strand to SEQ ID NO: 471599
uuucuacucaacuagcagu

SEQ ID NO: 471601 - RNA, 19 nt, Artificial Sequence
  Description of Artificial Sequence: Synthetic oligonucleotide
  Sense strand starting at position 481 of SEQ ID NO: 317192
gaacucagcuguguaauuu

SEQ ID NO: 471602 - RNA, 19 nt, Artificial Sequence
  Description of Artificial Sequence: Synthetic oligonucleotide
  Antisense Strand to SEQ ID NO: 471601
aaauuacacagcugaguuc

SEQ ID NO: 471603 - RNA, 19 nt, Artificial Sequence
  Description of Artificial Sequence: Synthetic oligonucleotide
  Sense strand starting at position 490 of SEQ ID NO: 317192
uguguaauuuacucaugca

SEQ ID NO: 471604 - RNA, 19 nt, Artificial Sequence
  Description of Artificial Sequence: Synthetic oligonucleotide
  Antisense Strand to SEQ ID NO: 471603
ugcaugaguaaauuacaca

SEQ ID NO: 471605 - RNA, 19 nt, Artificial Sequence
  Description of Artificial Sequence: Synthetic oligonucleotide
  Sense strand starting at position 601 of SEQ ID NO: 317192
ucaccuugugaccaugagu

SEQ ID NO: 471606 - RNA, 19 nt, Artificial Sequence
  Description of Artificial Sequence: Synthetic oligonucleotide
  Antisense Strand to SEQ ID NO: 471605
acucauggucacaagguga

SEQ ID NO: 471607 - RNA, 19 nt, Artificial Sequence
  Description of Artificial Sequence: Synthetic oligonucleotide
  Sense strand starting at position 786 of SEQ ID NO: 317192
cuuaauucuccugaagcag

SEQ ID NO: 471608 - RNA, 19 nt, Artificial Sequence
  Description of Artificial Sequence: Synthetic oligonucleotide
  Antisense Strand to SEQ ID NO: 471607
cugcuucaggagaauuaag

SEQ ID NO: 471609 - RNA, 19 nt, Artificial Sequence
  Description of Artificial Sequence: Synthetic oligonucleotide
  Sense strand starting at position 1038 of SEQ ID NO: 317192
ccacaaugguuauuaugua

SEQ ID NO: 471610 - RNA, 19 nt, Artificial Sequence
  Description of Artificial Sequence: Synthetic oligonucleotide
  Antisense Strand to SEQ ID NO: 471609
uacauaauaaccauugugg

SEQ ID NO: 471611 - RNA, 19 nt, Artificial Sequence
  Description of Artificial Sequence: Synthetic oligonucleotide
  Sense strand starting at position 1171 of SEQ ID NO: 317192
ugaauaaaucucgggugua

SEQ ID NO: 471612 - RNA, 19 nt, Artificial Sequence
  Description of Artificial Sequence: Synthetic oligonucleotide
  Antisense Strand to SEQ ID NO: 471611
uacacccgagauuuauuca

SEQ ID NO: 471613 - RNA, 19 nt, Artificial Sequence
  Description of Artificial Sequence: Synthetic oligonucleotide
  Sense strand starting at position 1238 of SEQ ID NO: 317192
acugaauucccacaguguu

SEQ ID NO: 471614 - RNA, 19 nt, Artificial Sequence
  Description of Artificial Sequence: Synthetic oligonucleotide
  Antisense Strand to SEQ ID NO: 471613
aacacugugggaauucagu

SEQ ID NO: 471615 - RNA, 19 nt, Artificial Sequence
  Description of Artificial Sequence: Synthetic oligonucleotide
  Sense strand starting at position 1270 of SEQ ID NO: 317192
agguauacaccgggcaaau

SEQ ID NO: 471616 - RNA, 19 nt, Artificial Sequence
  Description of Artificial Sequence: Synthetic oligonucleotide
  Antisense Strand to SEQ ID NO: 471615
auuugcccgguguauaccu

SEQ ID NO: 471617 - RNA, 19 nt, Artificial Sequence
  Description of Artificial Sequence: Synthetic oligonucleotide
  Sense strand starting at position 1272 of SEQ ID NO: 317192
guauacaccgggcaaauau

SEQ ID NO: 471618 - RNA, 19 nt, Artificial Sequence
  Description of Artificial Sequence: Synthetic oligonucleotide
  Antisense Strand to SEQ ID NO: 471617
auauuugcccgguguauac

SEQ ID NO: 471619 - RNA, 19 nt, Artificial Sequence
  Description of Artificial Sequence: Synthetic oligonucleotide
  Sense strand starting at position 1315 of SEQ ID NO: 317192
ucucaaugagccgaacaaa

SEQ ID NO: 471620 - RNA, 19 nt, Artificial Sequence
  Description of Artificial Sequence: Synthetic oligonucleotide
  Antisense Strand to SEQ ID NO: 471619
uuuguucggcucauugaga

SEQ ID NO: 471621 - RNA, 19 nt, Artificial Sequence
  Description of Artificial Sequence: Synthetic oligonucleotide
  Sense strand starting at position 1364 of SEQ ID NO: 317192
agagcaaagcgucauagga

SEQ ID NO: 471622 - RNA, 19 nt, Artificial Sequence
  Description of Artificial Sequence: Synthetic oligonucleotide
  Antisense Strand to SEQ ID NO: 471621
uccuaugacgcuuugcucu

SEQ ID NO: 471623 - RNA, 19 nt, Artificial Sequence
  Description of Artificial Sequence: Synthetic oligonucleotide
  Sense strand starting at position 1372 of SEQ ID NO: 317192
gcgucauaggagagcugua

SEQ ID NO: 471624 - RNA, 19 nt, Artificial Sequence
  Description of Artificial Sequence: Synthetic oligonucleotide
  Antisense Strand to SEQ ID NO: 471623
uacagcucuccuaugacgc

SEQ ID NO: 471625 - RNA, 19 nt, Artificial Sequence
  Description of Artificial Sequence: Synthetic oligonucleotide
  Sense strand starting at position 1386 of SEQ ID NO: 317192
cuguaauuaugaucacugu

SEQ ID NO: 471626 - RNA, 19 nt, Artificial Sequence
  Description of Artificial Sequence: Synthetic oligonucleotide
  Antisense Strand to SEQ ID NO: 471625
acagugaucauaauuacag

SEQ ID NO: 471627 - RNA, 19 nt, Artificial Sequence
  Description of Artificial Sequence: Synthetic oligonucleotide
  Sense strand starting at position 1387 of SEQ ID NO: 317192
uguaauuaugaucacuguu

SEQ ID NO: 471628 - RNA, 19 nt, Artificial Sequence
  Description of Artificial Sequence: Synthetic oligonucleotide
  Antisense Strand to SEQ ID NO: 471627
aacagugaucauaauuaca

SEQ ID NO: 471629 - RNA, 19 nt, Artificial Sequence
  Description of Artificial Sequence: Synthetic oligonucleotide
  Sense strand starting at position 1395 of SEQ ID NO: 317192
ugaucacuguuacuaucau

SEQ ID NO: 471630 - RNA, 19 nt, Artificial Sequence
  Description of Artificial Sequence: Synthetic oligonucleotide
  Antisense Strand to SEQ ID NO: 471629
augauaguaacagugauca

SEQ ID NO: 471631 - RNA, 19 nt, Artificial Sequence
  Description of Artificial Sequence: Synthetic oligonucleotide
  Sense strand starting at position 1412 of SEQ ID NO: 317192
augauuauuccguggacca

SEQ ID NO: 471632 - RNA, 19 nt, Artificial Sequence
  Description of Artificial Sequence: Synthetic oligonucleotide
  Antisense Strand to SEQ ID NO: 471631
ugguccacggaauaaucau

SEQ ID NO: 471633 - RNA, 19 nt, Artificial Sequence
  Description of Artificial Sequence: Synthetic oligonucleotide
  Sense strand starting at position 1413 of SEQ ID NO: 317192
ugauuauuccguggaccaa

SEQ ID NO: 471634 - RNA, 19 nt, Artificial Sequence
  Description of Artificial Sequence: Synthetic oligonucleotide
  Antisense Strand to SEQ ID NO: 471633
uugguccacggaauaauca

SEQ ID NO: 471635 - RNA, 19 nt, Artificial Sequence
  Description of Artificial Sequence: Synthetic oligonucleotide
  Sense strand starting at position 1414 of SEQ ID NO: 317192
gauuauuccguggaccaag

SEQ ID NO: 471636 - RNA, 19 nt, Artificial Sequence
  Description of Artificial Sequence: Synthetic oligonucleotide
  Antisense Strand to SEQ ID NO: 471635
cuugguccacggaauaauc

SEQ ID NO: 471637 - RNA, 19 nt, Artificial Sequence
  Description of Artificial Sequence: Synthetic oligonucleotide
  Sense strand starting at position 1688 of SEQ ID NO: 317192
ggaucugcucguaggugua

SEQ ID NO: 471638 - RNA, 19 nt, Artificial Sequence
  Description of Artificial Sequence: Synthetic oligonucleotide
  Antisense Strand to SEQ ID NO: 471637
uacaccuacgagcagaucc

SEQ ID NO: 471639 - RNA, 19 nt, Artificial Sequence
  Description of Artificial Sequence: Synthetic oligonucleotide
  Sense strand starting at position 1762 of SEQ ID NO: 317192
auguaaugcgcgcucuuca

SEQ ID NO: 471640 - RNA, 19 nt, Artificial Sequence
  Description of Artificial Sequence: Synthetic oligonucleotide
  Antisense Strand to SEQ ID NO: 471639
ugaagagcgcgcauuacau

SEQ ID NO: 471641 - RNA, 19 nt, Artificial Sequence
  Description of Artificial Sequence: Synthetic oligonucleotide
  Sense strand starting at position 2393 of SEQ ID NO: 317192
uuagcacgauaauuggaaa

SEQ ID NO: 471642 - RNA, 19 nt, Artificial Sequence
  Description of Artificial Sequence: Synthetic oligonucleotide
  Antisense Strand to SEQ ID NO: 471641
uuuccaauuaucgugcuaa

SEQ ID NO: 471643 - RNA, 19 nt, Artificial Sequence
  Description of Artificial Sequence: Synthetic oligonucleotide
  Sense strand starting at position 2452 of SEQ ID NO: 317192
agcacauccugagccauaa

SEQ ID NO: 471644 - RNA, 19 nt, Artificial Sequence
  Description of Artificial Sequence: Synthetic oligonucleotide
  Antisense Strand to SEQ ID NO: 471643
uuauggcucaggaugugcu

SEQ ID NO: 471645 - RNA, 19 nt, Artificial Sequence
  Description of Artificial Sequence: Synthetic oligonucleotide
  Sense strand starting at position 2515 of SEQ ID NO: 317192
auguucucugaucacagua

SEQ ID NO: 471646 - RNA, 19 nt, Artificial Sequence
  Description of Artificial Sequence: Synthetic oligonucleotide
  Antisense Strand to SEQ ID NO: 471645
uacugugaucagagaacau

SEQ ID NO: 471647 - RNA, 19 nt, Artificial Sequence
  Description of Artificial Sequence: Synthetic oligonucleotide
  Sense strand starting at position 2694 of SEQ ID NO: 317192
uauaguagcguuuacagga

SEQ ID NO: 471648 - RNA, 19 nt, Artificial Sequence
  Description of Artificial Sequence: Synthetic oligonucleotide
  Antisense Strand to SEQ ID NO: 471647
uccuguaaacgcuacuaua

SEQ ID NO: 471649 - RNA, 19 nt, Artificial Sequence
  Description of Artificial Sequence: Synthetic oligonucleotide
  Sense strand starting at position 2723 of SEQ ID NO: 317192
cuuuguuucuggcuauuua

SEQ ID NO: 471650 - RNA, 19 nt, Artificial Sequence
  Description of Artificial Sequence: Synthetic oligonucleotide
  Antisense Strand to SEQ ID NO: 471649
uaaauagccagaaacaaag

SEQ ID NO: 471651 - RNA, 19 nt, Artificial Sequence
  Description of Artificial Sequence: Synthetic oligonucleotide
  Sense strand starting at position 2730 of SEQ ID NO: 317192
ucuggcuauuuacuguaau

SEQ ID NO: 471652 - RNA, 19 nt, Artificial Sequence
  Description of Artificial Sequence: Synthetic oligonucleotide
  Antisense Strand to SEQ ID NO: 471651
auuacaguaaauagccaga

SEQ ID NO: 471653 - RNA, 19 nt, Artificial Sequence
  Description of Artificial Sequence: Synthetic oligonucleotide
  Sense strand starting at position 2796 of SEQ ID NO: 317192
accguauguguauaauaga

SEQ ID NO: 471654 - RNA, 19 nt, Artificial Sequence
  Description of Artificial Sequence: Synthetic oligonucleotide
  Antisense Strand to SEQ ID NO: 471653
ucuauuauacacauacggu

SEQ ID NO: 471655 - RNA, 19 nt, Artificial Sequence
  Description of Artificial Sequence: Synthetic oligonucleotide
  Sense strand starting at position 2832 of SEQ ID NO: 317192
uggcauuguaagggcaaga

SEQ ID NO: 471656 - RNA, 19 nt, Artificial Sequence
  Description of Artificial Sequence: Synthetic oligonucleotide
  Antisense Strand to SEQ ID NO: 471655
ucuugcccuuacaaugcca

SEQ ID NO: 471657 - RNA, 19 nt, Artificial Sequence
  Description of Artificial Sequence: Synthetic oligonucleotide
  Sense strand starting at position 3452 of SEQ ID NO: 317192
aauucuuggccucagagua

SEQ ID NO: 471658 - RNA, 19 nt, Artificial Sequence
  Description of Artificial Sequence: Synthetic oligonucleotide
  Antisense Strand to SEQ ID NO: 471657
uacucugaggccaagaauu

SEQ ID NO: 471659 - RNA, 19 nt, Artificial Sequence
  Description of Artificial Sequence: Synthetic oligonucleotide
  Sense strand starting at position 3507 of SEQ ID NO: 317192
cuaguuucaggugagguaa

SEQ ID NO: 471660 - RNA, 19 nt, Artificial Sequence
  Description of Artificial Sequence: Synthetic oligonucleotide
  Antisense Strand to SEQ ID NO: 471659
uuaccucaccugaaacuag

SEQ ID NO: 471661 - RNA, 19 nt, Artificial Sequence
  Description of Artificial Sequence: Synthetic oligonucleotide
  Sense strand starting at position 3533 of SEQ ID NO: 317192
cuccuuugugaccacggaa

SEQ ID NO: 471662 - RNA, 19 nt, Artificial Sequence
  Description of Artificial Sequence: Synthetic oligonucleotide
  Antisense Strand to SEQ ID NO: 471661
uuccguggucacaaaggag

SEQ ID NO: 471663 - RNA, 19 nt, Artificial Sequence
  Description of Artificial Sequence: Synthetic oligonucleotide
  Sense strand starting at position 3563 of SEQ ID NO: 317192
gucagaaaguaaccuuacu

SEQ ID NO: 471664 - RNA, 19 nt, Artificial Sequence
  Description of Artificial Sequence: Synthetic oligonucleotide
  Antisense Strand to SEQ ID NO: 471663
aguaagguuacuuucugac

SEQ ID NO: 471665 - RNA, 19 nt, Artificial Sequence
  Description of Artificial Sequence: Synthetic oligonucleotide
  Sense strand starting at position 3922 of SEQ ID NO: 317192
agagaaauucuagguugua

SEQ ID NO: 471666 - RNA, 19 nt, Artificial Sequence
  Description of Artificial Sequence: Synthetic oligonucleotide
  Antisense Strand to SEQ ID NO: 471665
uacaaccuagaauuucucu

SEQ ID NO: 471667 - RNA, 19 nt, Artificial Sequence
  Description of Artificial Sequence: Synthetic oligonucleotide
  Sense strand starting at position 3923 of SEQ ID NO: 317192
gagaaauucuagguuguaa

SEQ ID NO: 471668 - RNA, 19 nt, Artificial Sequence
  Description of Artificial Sequence: Synthetic oligonucleotide
  Antisense Strand to SEQ ID NO: 471667
uuacaaccuagaauuucuc

SEQ ID NO: 471669 - RNA, 19 nt, Artificial Sequence
  Description of Artificial Sequence: Synthetic oligonucleotide
  Sense strand starting at position 3925 of SEQ ID NO: 317192
gaaauucuagguuguaaga

SEQ ID NO: 471670 - RNA, 19 nt, Artificial Sequence
  Description of Artificial Sequence: Synthetic oligonucleotide
  Antisense Strand to SEQ ID NO: 471669
ucuuacaaccuagaauuuc

SEQ ID NO: 471671 - RNA, 19 nt, Artificial Sequence
  Description of Artificial Sequence: Synthetic oligonucleotide
  Sense strand starting at position 7 of SEQ ID NO: 317193
gggugauauuccucccgga

SEQ ID NO: 471672 - RNA, 19 nt, Artificial Sequence
  Description of Artificial Sequence: Synthetic oligonucleotide
  Antisense Strand to SEQ ID NO: 471671
uccgggaggaauaucaccc

SEQ ID NO: 471673 - RNA, 19 nt, Artificial Sequence
  Description of Artificial Sequence: Synthetic oligonucleotide
  Sense strand starting at position 11 of SEQ ID NO: 317193
gauauuccucccggaauag

SEQ ID NO: 471674 - RNA, 19 nt, Artificial Sequence
  Description of Artificial Sequence: Synthetic oligonucleotide
  Antisense Strand to SEQ ID NO: 471673
cuauuccgggaggaauauc

SEQ ID NO: 471675 - RNA, 19 nt, Artificial Sequence
  Description of Artificial Sequence: Synthetic oligonucleotide
  Sense strand starting at position 324 of SEQ ID NO: 317193
uccugcuuugaggauuaca

SEQ ID NO: 471676 - RNA, 19 nt, Artificial Sequence
  Description of Artificial Sequence: Synthetic oligonucleotide
  Antisense Strand to SEQ ID NO: 471675
uguaauccucaaagcagga

SEQ ID NO: 471677 - RNA, 19 nt, Artificial Sequence
  Description of Artificial Sequence: Synthetic oligonucleotide
  Sense strand starting at position 487 of SEQ ID NO: 317193
ccgagauaccagcgagaaa

SEQ ID NO: 471678 - RNA, 19 nt, Artificial Sequence
  Description of Artificial Sequence: Synthetic oligonucleotide
  Antisense Strand to SEQ ID NO: 471677
uuucucgcugguaucucgg

SEQ ID NO: 471679 - RNA, 19 nt, Artificial Sequence
  Description of Artificial Sequence: Synthetic oligonucleotide
  Sense strand starting at position 705 of SEQ ID NO: 317193
aguagaaucgguuugcgcu

SEQ ID NO: 471680 - RNA, 19 nt, Artificial Sequence
  Description of Artificial Sequence: Synthetic oligonucleotide
  Antisense Strand to SEQ ID NO: 471679
agcgcaaaccgauucuacu

SEQ ID NO: 471681 - RNA, 19 nt, Artificial Sequence
  Description of Artificial Sequence: Synthetic oligonucleotide
  Sense strand starting at position 724 of SEQ ID NO: 317193
augugacuuugggucacau

SEQ ID NO: 471682 - RNA, 19 nt, Artificial Sequence
  Description of Artificial Sequence: Synthetic oligonucleotide
  Antisense Strand to SEQ ID NO: 471681
augugacccaaagucacau

SEQ ID NO: 471683 - RNA, 19 nt, Artificial Sequence
  Description of Artificial Sequence: Synthetic oligonucleotide
  Sense strand starting at position 728 of SEQ ID NO: 317193
gacuuugggucacauuuaa

SEQ ID NO: 471684 - RNA, 19 nt, Artificial Sequence
  Description of Artificial Sequence: Synthetic oligonucleotide
  Antisense Strand to SEQ ID NO: 471683
uuaaaugugacccaaaguc

SEQ ID NO: 471685 - RNA, 19 nt, Artificial Sequence
  Description of Artificial Sequence: Synthetic oligonucleotide
  Sense strand starting at position 848 of SEQ ID NO: 317193
guaccugaacucuagauuc

SEQ ID NO: 471686 - RNA, 19 nt, Artificial Sequence
  Description of Artificial Sequence: Synthetic oligonucleotide
  Antisense Strand to SEQ ID NO: 471685
gaaucuagaguucagguac

SEQ ID NO: 471687 - RNA, 19 nt, Artificial Sequence
  Description of Artificial Sequence: Synthetic oligonucleotide
  Sense strand starting at position 959 of SEQ ID NO: 317193
gccgucuguggucccgaaa

SEQ ID NO: 471688 - RNA, 19 nt, Artificial Sequence
  Description of Artificial Sequence: Synthetic oligonucleotide
  Antisense Strand to SEQ ID NO: 471687
uuucgggaccacagacggc

SEQ ID NO: 471689 - RNA, 19 nt, Artificial Sequence
  Description of Artificial Sequence: Synthetic oligonucleotide
  Sense strand starting at position 1054 of SEQ ID NO: 317193
uaguuucuucuaugggaua

SEQ ID NO: 471690 - RNA, 19 nt, Artificial Sequence
  Description of Artificial Sequence: Synthetic oligonucleotide
  Antisense Strand to SEQ ID NO: 471689
uaucccauagaagaaacua

SEQ ID NO: 471691 - RNA, 19 nt, Artificial Sequence
  Description of Artificial Sequence: Synthetic oligonucleotide
  Sense strand starting at position 1059 of SEQ ID NO: 317193
ucuucuaugggauacguuu

SEQ ID NO: 471692 - RNA, 19 nt, Artificial Sequence
  Description of Artificial Sequence: Synthetic oligonucleotide
  Antisense Strand to SEQ ID NO: 471691
aaacguaucccauagaaga

SEQ ID NO: 471693 - RNA, 19 nt, Artificial Sequence
  Description of Artificial Sequence: Synthetic oligonucleotide
  Sense strand starting at position 1209 of SEQ ID NO: 317193
accgccaagacucgagaaa

SEQ ID NO: 471694 - RNA, 19 nt, Artificial Sequence
  Description of Artificial Sequence: Synthetic oligonucleotide
  Antisense Strand to SEQ ID NO: 471693
uuucucgagucuuggcggu

SEQ ID NO: 471695 - RNA, 19 nt, Artificial Sequence
  Description of Artificial Sequence: Synthetic oligonucleotide
  Sense strand starting at position 1358 of SEQ ID NO: 317193
ggcagagugcgcuccgaaa

SEQ ID NO: 471696 - RNA, 19 nt, Artificial Sequence
  Description of Artificial Sequence: Synthetic oligonucleotide
  Antisense Strand to SEQ ID NO: 471695
uuucggagcgcacucugcc

SEQ ID NO: 471697 - RNA, 19 nt, Artificial Sequence
  Description of Artificial Sequence: Synthetic oligonucleotide
  Sense strand starting at position 1697 of SEQ ID NO: 317193
gccaauuaccugcaguuaa

SEQ ID NO: 471698 - RNA, 19 nt, Artificial Sequence
  Description of Artificial Sequence: Synthetic oligonucleotide
  Antisense Strand to SEQ ID NO: 471697
uuaacugcagguaauuggc

SEQ ID NO: 471699 - RNA, 19 nt, Artificial Sequence
  Description of Artificial Sequence: Synthetic oligonucleotide
  Sense strand starting at position 2303 of SEQ ID NO: 317193
aggaguucccucggagaac

SEQ ID NO: 471700 - RNA, 19 nt, Artificial Sequence
  Description of Artificial Sequence: Synthetic oligonucleotide
  Antisense Strand to SEQ ID NO: 471699
guucuccgagggaacuccu

SEQ ID NO: 471701 - RNA, 19 nt, Artificial Sequence
  Description of Artificial Sequence: Synthetic oligonucleotide
  Sense strand starting at position 2435 of SEQ ID NO: 317193
ggaugucugccgcugcauu

SEQ ID NO: 471702 - RNA, 19 nt, Artificial Sequence
  Description of Artificial Sequence: Synthetic oligonucleotide
  Antisense Strand to SEQ ID NO: 471701
aaugcagcggcagacaucc

SEQ ID NO: 471703 - RNA, 19 nt, Artificial Sequence
  Description of Artificial Sequence: Synthetic oligonucleotide
  Sense strand starting at position 2584 of SEQ ID NO: 317193
aagacaauguucucaaggu

SEQ ID NO: 471704 - RNA, 19 nt, Artificial Sequence
  Description of Artificial Sequence: Synthetic oligonucleotide
  Antisense Strand to SEQ ID NO: 471703
accuugagaacauugucuu

SEQ ID NO: 471705 - RNA, 19 nt, Artificial Sequence
  Description of Artificial Sequence: Synthetic oligonucleotide
  Sense strand starting at position 2626 of SEQ ID NO: 317193
gugcacuaggcccauaaua

SEQ ID NO: 471706 - RNA, 19 nt, Artificial Sequence
  Description of Artificial Sequence: Synthetic oligonucleotide
  Antisense Strand to SEQ ID NO: 471705
uauuaugggccuagugcac

SEQ ID NO: 471707 - RNA, 19 nt, Artificial Sequence
  Description of Artificial Sequence: Synthetic oligonucleotide
  Sense strand starting at position 2628 of SEQ ID NO: 317193
gcacuaggcccauaauaaa

SEQ ID NO: 471708 - RNA, 19 nt, Artificial Sequence
  Description of Artificial Sequence: Synthetic oligonucleotide
  Antisense Strand to SEQ ID NO: 471707
uuuauuaugggccuagugc

SEQ ID NO: 471709 - RNA, 19 nt, Artificial Sequence
  Description of Artificial Sequence: Synthetic oligonucleotide
  Sense strand starting at position 2692 of SEQ ID NO: 317193
cgugcuguucaggaaucaa

SEQ ID NO: 471710 - RNA, 19 nt, Artificial Sequence
  Description of Artificial Sequence: Synthetic oligonucleotide
  Antisense Strand to SEQ ID NO: 471709
uugauuccugaacagcacg

SEQ ID NO: 471711 - RNA, 19 nt, Artificial Sequence
  Description of Artificial Sequence: Synthetic oligonucleotide
  Sense strand starting at position 2740 of SEQ ID NO: 317193
uggagauuauauccucguu

SEQ ID NO: 471712 - RNA, 19 nt, Artificial Sequence
  Description of Artificial Sequence: Synthetic oligonucleotide
  Antisense Strand to SEQ ID NO: 471711
aacgaggauauaaucucca

SEQ ID NO: 471713 - RNA, 19 nt, Artificial Sequence
  Description of Artificial Sequence: Synthetic oligonucleotide
  Sense strand starting at position 2813 of SEQ ID NO: 317193
cucgcaaguaaugauaaga

SEQ ID NO: 471714 - RNA, 19 nt, Artificial Sequence
  Description of Artificial Sequence: Synthetic oligonucleotide
  Antisense Strand to SEQ ID NO: 471713
ucuuaucauuacuugcgag

SEQ ID NO: 471715 - RNA, 19 nt, Artificial Sequence
  Description of Artificial Sequence: Synthetic oligonucleotide
  Sense strand starting at position 3069 of SEQ ID NO: 317193
uuaacaagccuuuguaaag

SEQ ID NO: 471716 - RNA, 19 nt, Artificial Sequence
  Description of Artificial Sequence: Synthetic oligonucleotide
  Antisense Strand to SEQ ID NO: 471715
cuuuacaaaggcuuguuaa

SEQ ID NO: 471717 - RNA, 19 nt, Artificial Sequence
  Description of Artificial Sequence: Synthetic oligonucleotide
  Sense strand starting at position 3190 of SEQ ID NO: 317193
aggaguccugagcaccuua

SEQ ID NO: 471718 - RNA, 19 nt, Artificial Sequence
  Description of Artificial Sequence: Synthetic oligonucleotide
  Antisense Strand to SEQ ID NO: 471717
uaaggugcucaggacuccu

SEQ ID NO: 471719 - RNA, 19 nt, Artificial Sequence
  Description of Artificial Sequence: Synthetic oligonucleotide
  Sense strand starting at position 3462 of SEQ ID NO: 317193
cgguuucuaggguaaucua

SEQ ID NO: 471720 - RNA, 19 nt, Artificial Sequence
  Description of Artificial Sequence: Synthetic oligonucleotide
  Antisense Strand to SEQ ID NO: 471719
uagauuacccuagaaaccg

SEQ ID NO: 471721 - RNA, 19 nt, Artificial Sequence
  Description of Artificial Sequence: Synthetic oligonucleotide
  Sense strand starting at position 3469 of SEQ ID NO: 317193
uaggguaaucuaugugauu

SEQ ID NO: 471722 - RNA, 19 nt, Artificial Sequence
  Description of Artificial Sequence: Synthetic oligonucleotide
  Antisense Strand to SEQ ID NO: 471721
aaucacauagauuacccua

SEQ ID NO: 471723 - RNA, 19 nt, Artificial Sequence
  Description of Artificial Sequence: Synthetic oligonucleotide
  Sense strand starting at position 3470 of SEQ ID NO: 317193
aggguaaucuaugugauua

SEQ ID NO: 471724 - RNA, 19 nt, Artificial Sequence
  Description of Artificial Sequence: Synthetic oligonucleotide
  Antisense Strand to SEQ ID NO: 471723
uaaucacauagauuacccu

SEQ ID NO: 471725 - RNA, 19 nt, Artificial Sequence
  Description of Artificial Sequence: Synthetic oligonucleotide
  Sense strand starting at position 3471 of SEQ ID NO: 317193
ggguaaucuaugugauuag

SEQ ID NO: 471726 - RNA, 19 nt, Artificial Sequence
  Description of Artificial Sequence: Synthetic oligonucleotide
  Antisense Strand to SEQ ID NO: 471725
cuaaucacauagauuaccc

SEQ ID NO: 471727 - RNA, 19 nt, Artificial Sequence
  Description of Artificial Sequence: Synthetic oligonucleotide
  Sense strand starting at position 3474 of SEQ ID NO: 317193
uaaucuaugugauuaggaa

SEQ ID NO: 471728 - RNA, 19 nt, Artificial Sequence
  Description of Artificial Sequence: Synthetic oligonucleotide
  Antisense Strand to SEQ ID NO: 471727
uuccuaaucacauagauua

SEQ ID NO: 471729 - RNA, 19 nt, Artificial Sequence
  Description of Artificial Sequence: Synthetic oligonucleotide
  Sense strand starting at position 3596 of SEQ ID NO: 317193
gguuaaguaagugacucua

SEQ ID NO: 471730 - RNA, 19 nt, Artificial Sequence
  Description of Artificial Sequence: Synthetic oligonucleotide
  Antisense Strand to SEQ ID NO: 471729
uagagucacuuacuuaacc

SEQ ID NO: 471731 - RNA, 19 nt, Artificial Sequence
  Description of Artificial Sequence: Synthetic oligonucleotide
  Sense strand starting at position 3685 of SEQ ID NO: 317193
gaaggagucuuucuggagu

SEQ ID NO: 471732 - RNA, 19 nt, Artificial Sequence
  Description of Artificial Sequence: Synthetic oligonucleotide
  Antisense Strand to SEQ ID NO: 471731
acuccagaaagacuccuuc

SEQ ID NO: 471733 - RNA, 19 nt, Artificial Sequence
  Description of Artificial Sequence: Synthetic oligonucleotide
  Sense strand starting at position 3713 of SEQ ID NO: 317193
gugcaacucuaaccuugau

SEQ ID NO: 471734 - RNA, 19 nt, Artificial Sequence
  Description of Artificial Sequence: Synthetic oligonucleotide
  Antisense Strand to SEQ ID NO: 471733
aucaagguuagaguugcac

SEQ ID NO: 471735 - RNA, 19 nt, Artificial Sequence
  Description of Artificial Sequence: Synthetic oligonucleotide
  Sense strand starting at position 3734 of SEQ ID NO: 317193
cuaagauaaugguuuggua

SEQ ID NO: 471736 - RNA, 19 nt, Artificial Sequence
  Description of Artificial Sequence: Synthetic oligonucleotide
  Antisense Strand to SEQ ID NO: 471735
uaccaaaccauuaucuuag

SEQ ID NO: 471737 - RNA, 19 nt, Artificial Sequence
  Description of Artificial Sequence: Synthetic oligonucleotide
  Sense strand starting at position 3736 of SEQ ID NO: 317193
aagauaaugguuugguacu

SEQ ID NO: 471738 - RNA, 19 nt, Artificial Sequence
  Description of Artificial Sequence: Synthetic oligonucleotide
  Antisense Strand to SEQ ID NO: 471737
aguaccaaaccauuaucuu

SEQ ID NO: 471739 - RNA, 19 nt, Artificial Sequence
  Description of Artificial Sequence: Synthetic oligonucleotide
  Sense strand starting at position 3738 of SEQ ID NO: 317193
gauaaugguuugguacuca

SEQ ID NO: 471740 - RNA, 19 nt, Artificial Sequence
  Description of Artificial Sequence: Synthetic oligonucleotide
  Antisense Strand to SEQ ID NO: 471739
ugaguaccaaaccauuauc

SEQ ID NO: 471741 - RNA, 19 nt, Artificial Sequence
  Description of Artificial Sequence: Synthetic oligonucleotide
  Sense strand starting at position 3742 of SEQ ID NO: 317193
augguuugguacucaaaga

SEQ ID NO: 471742 - RNA, 19 nt, Artificial Sequence
  Description of Artificial Sequence: Synthetic oligonucleotide
  Antisense Strand to SEQ ID NO: 471741
ucuuugaguaccaaaccau

SEQ ID NO: 471743 - RNA, 19 nt, Artificial Sequence
  Description of Artificial Sequence: Synthetic oligonucleotide
  Sense strand starting at position 3804 of SEQ ID NO: 317193
uucuauuguacgcaggaua

SEQ ID NO: 471744 - RNA, 19 nt, Artificial Sequence
  Description of Artificial Sequence: Synthetic oligonucleotide
  Antisense Strand to SEQ ID NO: 471743
uauccugcguacaauagaa

SEQ ID NO: 471745 - RNA, 19 nt, Artificial Sequence
  Description of Artificial Sequence: Synthetic oligonucleotide
  Sense strand starting at position 3815 of SEQ ID NO: 317193
gcaggauagaguugaaaua

SEQ ID NO: 471746 - RNA, 19 nt, Artificial Sequence
  Description of Artificial Sequence: Synthetic oligonucleotide
  Antisense Strand to SEQ ID NO: 471745
uauuucaacucuauccugc

SEQ ID NO: 471747 - RNA, 19 nt, Artificial Sequence
  Description of Artificial Sequence: Synthetic oligonucleotide
  Sense strand starting at position 3949 of SEQ ID NO: 317193
uggaaauacaaugguugua

SEQ ID NO: 471748 - RNA, 19 nt, Artificial Sequence
  Description of Artificial Sequence: Synthetic oligonucleotide
  Antisense Strand to SEQ ID NO: 471747
uacaaccauuguauuucca

SEQ ID NO: 471749 - RNA, 19 nt, Artificial Sequence
  Description of Artificial Sequence: Synthetic oligonucleotide
  Sense strand starting at position 3961 of SEQ ID NO: 317193
gguuguaauagccagggua

SEQ ID NO: 471750 - RNA, 19 nt, Artificial Sequence
  Description of Artificial Sequence: Synthetic oligonucleotide
  Antisense Strand to SEQ ID NO: 471749
uacccuggcuauuacaacc

SEQ ID NO: 471751 - RNA, 19 nt, Artificial Sequence
  Description of Artificial Sequence: Synthetic oligonucleotide
  Sense strand starting at position 2098 of SEQ ID NO: 317194
caccgagcugccgaugauu

SEQ ID NO: 471752 - RNA, 19 nt, Artificial Sequence
  Description of Artificial Sequence: Synthetic oligonucleotide
  Antisense Strand to SEQ ID NO: 471751
aaucaucggcagcucggug

SEQ ID NO: 471753 - RNA, 19 nt, Artificial Sequence
  Description of Artificial Sequence: Synthetic oligonucleotide
  Sense strand starting at position 2107 of SEQ ID NO: 317194
gccgaugauuggccaaacu

SEQ ID NO: 471754 - RNA, 19 nt, Artificial Sequence
  Description of Artificial Sequence: Synthetic oligonucleotide
  Antisense Strand to SEQ ID NO: 471753
aguuuggccaaucaucggc

SEQ ID NO: 471755 - RNA, 19 nt, Artificial Sequence
  Description of Artificial Sequence: Synthetic oligonucleotide
  Sense strand starting at position 2250 of SEQ ID NO: 317194
ggacaaugccgcggaaagu

SEQ ID NO: 471756 - RNA, 19 nt, Artificial Sequence
  Description of Artificial Sequence: Synthetic oligonucleotide
  Antisense Strand to SEQ ID NO: 471755
acuuuccgcggcauugucc

SEQ ID NO: 471757 - RNA, 19 nt, Artificial Sequence
  Description of Artificial Sequence: Synthetic oligonucleotide
  Sense strand starting at position 2251 of SEQ ID NO: 317194
gacaaugccgcggaaaguu

SEQ ID NO: 471758 - RNA, 19 nt, Artificial Sequence
  Description of Artificial Sequence: Synthetic oligonucleotide
  Antisense Strand to SEQ ID NO: 471757
aacuuuccgcggcauuguc

SEQ ID NO: 471759 - RNA, 19 nt, Artificial Sequence
  Description of Artificial Sequence: Synthetic oligonucleotide
  Sense strand starting at position 2314 of SEQ ID NO: 317194
cccuguuugcaucagcaaa

SEQ ID NO: 471760 - RNA, 19 nt, Artificial Sequence
  Description of Artificial Sequence: Synthetic oligonucleotide
  Antisense Strand to SEQ ID NO: 471759
uuugcugaugcaaacaggg

SEQ ID NO: 471761 - RNA, 19 nt, Artificial Sequence
  Description of Artificial Sequence: Synthetic oligonucleotide
  Sense strand starting at position 2357 of SEQ ID NO: 317194
gcgauauccucuccuagga

SEQ ID NO: 471762 - RNA, 19 nt, Artificial Sequence
  Description of Artificial Sequence: Synthetic oligonucleotide
  Antisense Strand to SEQ ID NO: 471761
uccuaggagaggauaucgc

SEQ ID NO: 471763 - RNA, 19 nt, Artificial Sequence
  Description of Artificial Sequence: Synthetic oligonucleotide
  Sense strand starting at position 2424 of SEQ ID NO: 317194
ccuaauacgcaucauggaa

SEQ ID NO: 471764 - RNA, 19 nt, Artificial Sequence
  Description of Artificial Sequence: Synthetic oligonucleotide
  Antisense Strand to SEQ ID NO: 471763
uuccaugaugcguauuagg

SEQ ID NO: 471765 - RNA, 19 nt, Artificial Sequence
  Description of Artificial Sequence: Synthetic oligonucleotide
  Sense strand starting at position 2486 of SEQ ID NO: 317194
uggcaaggguuaccuaauu

SEQ ID NO: 471766 - RNA, 19 nt, Artificial Sequence
  Description of Artificial Sequence: Synthetic oligonucleotide
  Antisense Strand to SEQ ID NO: 471765
aauuagguaacccuugcca

SEQ ID NO: 471767 - RNA, 19 nt, Artificial Sequence
  Description of Artificial Sequence: Synthetic oligonucleotide
  Sense strand starting at position 2540 of SEQ ID NO: 317194
aagugaguauuauauggca

SEQ ID NO: 471768 - RNA, 19 nt, Artificial Sequence
  Description of Artificial Sequence: Synthetic oligonucleotide
  Antisense Strand to SEQ ID NO: 471767
ugccauauaauacucacuu

SEQ ID NO: 471769 - RNA, 19 nt, Artificial Sequence
  Description of Artificial Sequence: Synthetic oligonucleotide
  Sense strand starting at position 2542 of SEQ ID NO: 317194
gugaguauuauauggcaug

SEQ ID NO: 471770 - RNA, 19 nt, Artificial Sequence
  Description of Artificial Sequence: Synthetic oligonucleotide
  Antisense Strand to SEQ ID NO: 471769
caugccauauaauacucac

SEQ ID NO: 471771 - RNA, 19 nt, Artificial Sequence
  Description of Artificial Sequence: Synthetic oligonucleotide
  Sense strand starting at position 2547 of SEQ ID NO: 317194
uauuauauggcauguguca

SEQ ID NO: 471772 - RNA, 19 nt, Artificial Sequence
  Description of Artificial Sequence: Synthetic oligonucleotide
  Antisense Strand to SEQ ID NO: 471771
ugacacaugccauauaaua

SEQ ID NO: 471773 - RNA, 19 nt, Artificial Sequence
  Description of Artificial Sequence: Synthetic oligonucleotide
  Sense strand starting at position 2552 of SEQ ID NO: 317194
uauggcaugugucaaucua

SEQ ID NO: 471774 - RNA, 19 nt, Artificial Sequence
  Description of Artificial Sequence: Synthetic oligonucleotide
  Antisense Strand to SEQ ID NO: 471773
uagauugacacaugccaua

SEQ ID NO: 471775 - RNA, 19 nt, Artificial Sequence
  Description of Artificial Sequence: Synthetic oligonucleotide
  Sense strand starting at position 2798 of SEQ ID NO: 317194
cgcguucaucagugacuga

SEQ ID NO: 471776 - RNA, 19 nt, Artificial Sequence
  Description of Artificial Sequence: Synthetic oligonucleotide
  Antisense Strand to SEQ ID NO: 471775
ucagucacugaugaacgcg

SEQ ID NO: 471777 - RNA, 19 nt, Artificial Sequence
  Description of Artificial Sequence: Synthetic oligonucleotide
  Sense strand starting at position 2985 of SEQ ID NO: 317194
uuggcaauuggagaucgau

SEQ ID NO: 471778 - RNA, 19 nt, Artificial Sequence
  Description of Artificial Sequence: Synthetic oligonucleotide
  Antisense Strand to SEQ ID NO: 471777
aucgaucuccaauugccaa

SEQ ID NO: 471779 - RNA, 19 nt, Artificial Sequence
  Description of Artificial Sequence: Synthetic oligonucleotide
  Sense strand starting at position 3011 of SEQ ID NO: 317194
cccaccaugcuagauuaga

SEQ ID NO: 471780 - RNA, 19 nt, Artificial Sequence
  Description of Artificial Sequence: Synthetic oligonucleotide
  Antisense Strand to SEQ ID NO: 471779
ucuaaucuagcaugguggg

SEQ ID NO: 471781 - RNA, 19 nt, Artificial Sequence
  Description of Artificial Sequence: Synthetic oligonucleotide
  Sense strand starting at position 3150 of SEQ ID NO: 317194
cggguaucugcgaacacgu

SEQ ID NO: 471782 - RNA, 19 nt, Artificial Sequence
  Description of Artificial Sequence: Synthetic oligonucleotide
  Antisense Strand to SEQ ID NO: 471781
acguguucgcagauacccg

SEQ ID NO: 471783 - RNA, 19 nt, Artificial Sequence
  Description of Artificial Sequence: Synthetic oligonucleotide
  Sense strand starting at position 3208 of SEQ ID NO: 317194
agggcuuagcucuguguaa

SEQ ID NO: 471784 - RNA, 19 nt, Artificial Sequence
  Description of Artificial Sequence: Synthetic oligonucleotide
  Antisense Strand to SEQ ID NO: 471783
uuacacagagcuaagcccu

SEQ ID NO: 471785 - RNA, 19 nt, Artificial Sequence
  Description of Artificial Sequence: Synthetic oligonucleotide
  Sense strand starting at position 3209 of SEQ ID NO: 317194
gggcuuagcucuguguaag

SEQ ID NO: 471786 - RNA, 19 nt, Artificial Sequence
  Description of Artificial Sequence: Synthetic oligonucleotide
  Antisense Strand to SEQ ID NO: 471785
cuuacacagagcuaagccc

SEQ ID NO: 471787 - RNA, 19 nt, Artificial Sequence
  Description of Artificial Sequence: Synthetic oligonucleotide
  Sense strand starting at position 3318 of SEQ ID NO: 317194
cauagcuaguucuugugaa

SEQ ID NO: 471788 - RNA, 19 nt, Artificial Sequence
  Description of Artificial Sequence: Synthetic oligonucleotide
  Antisense Strand to SEQ ID NO: 471787
uucacaagaacuagcuaug

SEQ ID NO: 471789 - RNA, 19 nt, Artificial Sequence
  Description of Artificial Sequence: Synthetic oligonucleotide
  Sense strand starting at position 3319 of SEQ ID NO: 317194
auagcuaguucuugugaag

SEQ ID NO: 471790 - RNA, 19 nt, Artificial Sequence
  Description of Artificial Sequence: Synthetic oligonucleotide
  Antisense Strand to SEQ ID NO: 471789
cuucacaagaacuagcuau

SEQ ID NO: 471791 - RNA, 19 nt, Artificial Sequence
  Description of Artificial Sequence: Synthetic oligonucleotide
  Sense strand starting at position 3348 of SEQ ID NO: 317194
gcgcgaacucuuuaaugcu

SEQ ID NO: 471792 - RNA, 19 nt, Artificial Sequence
  Description of Artificial Sequence: Synthetic oligonucleotide
  Antisense Strand to SEQ ID NO: 471791
agcauuaaagaguucgcgc

SEQ ID NO: 471793 - RNA, 19 nt, Artificial Sequence
  Description of Artificial Sequence: Synthetic oligonucleotide
  Sense strand starting at position 3355 of SEQ ID NO: 317194
cucuuuaaugcuggagagu

SEQ ID NO: 471794 - RNA, 19 nt, Artificial Sequence
  Description of Artificial Sequence: Synthetic oligonucleotide
  Antisense Strand to SEQ ID NO: 471793
acucuccagcauuaaagag

SEQ ID NO: 471795 - RNA, 19 nt, Artificial Sequence
  Description of Artificial Sequence: Synthetic oligonucleotide
  Sense strand starting at position 3356 of SEQ ID NO: 317194
ucuuuaaugcuggagagug

SEQ ID NO: 471796 - RNA, 19 nt, Artificial Sequence
  Description of Artificial Sequence: Synthetic oligonucleotide
  Antisense Strand to SEQ ID NO: 471795
cacucuccagcauuaaaga

SEQ ID NO: 471797 - RNA, 19 nt, Artificial Sequence
  Description of Artificial Sequence: Synthetic oligonucleotide
  Sense strand starting at position 3380 of SEQ ID NO: 317194
aaugccaguucucuaagga

SEQ ID NO: 471798 - RNA, 19 nt, Artificial Sequence
  Description of Artificial Sequence: Synthetic oligonucleotide
  Antisense Strand to SEQ ID NO: 471797
uccuuagagaacuggcauu

SEQ ID NO: 471799 - RNA, 19 nt, Artificial Sequence
  Description of Artificial Sequence: Synthetic oligonucleotide
  Sense strand starting at position 3381 of SEQ ID NO: 317194
augccaguucucuaaggaa

SEQ ID NO: 471800 - RNA, 19 nt, Artificial Sequence
  Description of Artificial Sequence: Synthetic oligonucleotide
  Antisense Strand to SEQ ID NO: 471799
uuccuuagagaacuggcau

SEQ ID NO: 471801 - RNA, 19 nt, Artificial Sequence
  Description of Artificial Sequence: Synthetic oligonucleotide
  Sense strand starting at position 3384 of SEQ ID NO: 317194
ccaguucucuaaggaaaga

SEQ ID NO: 471802 - RNA, 19 nt, Artificial Sequence
  Description of Artificial Sequence: Synthetic oligonucleotide
  Antisense Strand to SEQ ID NO: 471801
ucuuuccuuagagaacugg

SEQ ID NO: 471803 - RNA, 19 nt, Artificial Sequence
  Description of Artificial Sequence: Synthetic oligonucleotide
  Sense strand starting at position 3439 of SEQ ID NO: 317194
caaggaauugguuguuuau

SEQ ID NO: 471804 - RNA, 19 nt, Artificial Sequence
  Description of Artificial Sequence: Synthetic oligonucleotide
  Antisense Strand to SEQ ID NO: 471803
auaaacaaccaauuccuug

SEQ ID NO: 471805 - RNA, 19 nt, Artificial Sequence
  Description of Artificial Sequence: Synthetic oligonucleotide
  Sense strand starting at position 3512 of SEQ ID NO: 317194
cuuugcugcuuucugguaa

SEQ ID NO: 471806 - RNA, 19 nt, Artificial Sequence
  Description of Artificial Sequence: Synthetic oligonucleotide
  Antisense Strand to SEQ ID NO: 471805
uuaccagaaagcagcaaag

SEQ ID NO: 471807 - RNA, 19 nt, Artificial Sequence
  Description of Artificial Sequence: Synthetic oligonucleotide
  Sense strand starting at position 3516 of SEQ ID NO: 317194
gcugcuuucugguaaugaa

SEQ ID NO: 471808 - RNA, 19 nt, Artificial Sequence
  Description of Artificial Sequence: Synthetic oligonucleotide
  Antisense Strand to SEQ ID NO: 471807
uucauuaccagaaagcagc

SEQ ID NO: 471809 - RNA, 19 nt, Artificial Sequence
  Description of Artificial Sequence: Synthetic oligonucleotide
  Sense strand starting at position 3602 of SEQ ID NO: 317194
gccauuuccuccuggcaag

SEQ ID NO: 471810 - RNA, 19 nt, Artificial Sequence
  Description of Artificial Sequence: Synthetic oligonucleotide
  Antisense Strand to SEQ ID NO: 471809
cuugccaggaggaaauggc

SEQ ID NO: 471811 - RNA, 19 nt, Artificial Sequence
  Description of Artificial Sequence: Synthetic oligonucleotide
  Sense strand starting at position 3638 of SEQ ID NO: 317194
uguccaugggcgugauagu

SEQ ID NO: 471812 - RNA, 19 nt, Artificial Sequence
  Description of Artificial Sequence: Synthetic oligonucleotide
  Antisense Strand to SEQ ID NO: 471811
acuaucacgcccauggaca

SEQ ID NO: 471813 - RNA, 19 nt, Artificial Sequence
  Description of Artificial Sequence: Synthetic oligonucleotide
  Sense strand starting at position 3639 of SEQ ID NO: 317194
guccaugggcgugauagua

SEQ ID NO: 471814 - RNA, 19 nt, Artificial Sequence
  Description of Artificial Sequence: Synthetic oligonucleotide
  Antisense Strand to SEQ ID NO: 471813
uacuaucacgcccauggac

SEQ ID NO: 471815 - RNA, 19 nt, Artificial Sequence
  Description of Artificial Sequence: Synthetic oligonucleotide
  Sense strand starting at position 3647 of SEQ ID NO: 317194
gcgugauaguagccugaga

SEQ ID NO: 471816 - RNA, 19 nt, Artificial Sequence
  Description of Artificial Sequence: Synthetic oligonucleotide
  Antisense Strand to SEQ ID NO: 471815
ucucaggcuacuaucacgc

SEQ ID NO: 471817 - RNA, 19 nt, Artificial Sequence
  Description of Artificial Sequence: Synthetic oligonucleotide
  Sense strand starting at position 3770 of SEQ ID NO: 317194
gaagauggguccugccuuu

SEQ ID NO: 471818 - RNA, 19 nt, Artificial Sequence
  Description of Artificial Sequence: Synthetic oligonucleotide
  Antisense Strand to SEQ ID NO: 471817
aaaggcaggacccaucuuc

SEQ ID NO: 471819 - RNA, 19 nt, Artificial Sequence
  Description of Artificial Sequence: Synthetic oligonucleotide
  Sense strand starting at position 3781 of SEQ ID NO: 317194
cugccuuugagcgcuuaga

SEQ ID NO: 471820 - RNA, 19 nt, Artificial Sequence
  Description of Artificial Sequence: Synthetic oligonucleotide
  Antisense Strand to SEQ ID NO: 471819
ucuaagcgcucaaaggcag

SEQ ID NO: 471821 - RNA, 19 nt, Artificial Sequence
  Description of Artificial Sequence: Synthetic oligonucleotide
  Sense strand starting at position 3800 of SEQ ID NO: 317194
aggaaaggauuccagcaaa

SEQ ID NO: 471822 - RNA, 19 nt, Artificial Sequence
  Description of Artificial Sequence: Synthetic oligonucleotide
  Antisense Strand to SEQ ID NO: 471821
uuugcuggaauccuuuccu

SEQ ID NO: 471823 - RNA, 19 nt, Artificial Sequence
  Description of Artificial Sequence: Synthetic oligonucleotide
  Sense strand starting at position 3904 of SEQ ID NO: 317194
cacgucugcggcugagaau

SEQ ID NO: 471824 - RNA, 19 nt, Artificial Sequence
  Description of Artificial Sequence: Synthetic oligonucleotide
  Antisense Strand to SEQ ID NO: 471823
auucucagccgcagacgug

SEQ ID NO: 471825 - RNA, 19 nt, Artificial Sequence
  Description of Artificial Sequence: Synthetic oligonucleotide
  Sense strand starting at position 3962 of SEQ ID NO: 317194
aggagauuauaguguaucu

SEQ ID NO: 471826 - RNA, 19 nt, Artificial Sequence
  Description of Artificial Sequence: Synthetic oligonucleotide
  Antisense Strand to SEQ ID NO: 471825
agauacacuauaaucuccu

SEQ ID NO: 471827 - RNA, 19 nt, Artificial Sequence
  Description of Artificial Sequence: Synthetic oligonucleotide
  Sense strand starting at position 3978 of SEQ ID NO: 317194
ucugaauauuaauacggua

SEQ ID NO: 471828 - RNA, 19 nt, Artificial Sequence
  Description of Artificial Sequence: Synthetic oligonucleotide
  Antisense Strand to SEQ ID NO: 471827
uaccguauuaauauucaga

SEQ ID NO: 471829 - RNA, 19 nt, Artificial Sequence
  Description of Artificial Sequence: Synthetic oligonucleotide
  Sense strand starting at position 3983 of SEQ ID NO: 317194
auauuaauacgguauugca

SEQ ID NO: 471830 - RNA, 19 nt, Artificial Sequence
  Description of Artificial Sequence: Synthetic oligonucleotide
  Antisense Strand to SEQ ID NO: 471829
ugcaauaccguauuaauau

SEQ ID NO: 471831 - RNA, 19 nt, Artificial Sequence
  Description of Artificial Sequence: Synthetic oligonucleotide
  Sense strand starting at position 24 of SEQ ID NO: 317195
augggucaaugguuacaua

SEQ ID NO: 471832 - RNA, 19 nt, Artificial Sequence
  Description of Artificial Sequence: Synthetic oligonucleotide
  Antisense Strand to SEQ ID NO: 471831
uauguaaccauugacccau

SEQ ID NO: 471833 - RNA, 19 nt, Artificial Sequence
  Description of Artificial Sequence: Synthetic oligonucleotide
  Sense strand starting at position 25 of SEQ ID NO: 317195
ugggucaaugguuacauau

SEQ ID NO: 471834 - RNA, 19 nt, Artificial Sequence
  Description of Artificial Sequence: Synthetic oligonucleotide
  Antisense Strand to SEQ ID NO: 471833
auauguaaccauugaccca

SEQ ID NO: 471835 - RNA, 19 nt, Artificial Sequence
  Description of Artificial Sequence: Synthetic oligonucleotide
  Sense strand starting at position 36 of SEQ ID NO: 317195
uuacauauguaguuaugga

SEQ ID NO: 471836 - RNA, 19 nt, Artificial Sequence
  Description of Artificial Sequence: Synthetic oligonucleotide
  Antisense Strand to SEQ ID NO: 471835
uccauaacuacauauguaa

SEQ ID NO: 471837 - RNA, 19 nt, Artificial Sequence
  Description of Artificial Sequence: Synthetic oligonucleotide
  Sense strand starting at position 85 of SEQ ID NO: 317195
guaugucacuugcccauuu

SEQ ID NO: 471838 - RNA, 19 nt, Artificial Sequence
  Description of Artificial Sequence: Synthetic oligonucleotide
  Antisense Strand to SEQ ID NO: 471837
aaaugggcaagugacauac

SEQ ID NO: 471839 - RNA, 19 nt, Artificial Sequence
  Description of Artificial Sequence: Synthetic oligonucleotide
  Sense strand starting at position 127 of SEQ ID NO: 317195
uguaacaguggugauauau

SEQ ID NO: 471840 - RNA, 19 nt, Artificial Sequence
  Description of Artificial Sequence: Synthetic oligonucleotide
  Antisense Strand to SEQ ID NO: 471839
auauaucaccacuguuaca

SEQ ID NO: 471841 - RNA, 19 nt, Artificial Sequence
  Description of Artificial Sequence: Synthetic oligonucleotide
  Sense strand starting at position 325 of SEQ ID NO: 317195
uguggcauuaguuaagauu

SEQ ID NO: 471842 - RNA, 19 nt, Artificial Sequence
  Description of Artificial Sequence: Synthetic oligonucleotide
  Antisense Strand to SEQ ID NO: 471841
aaucuuaacuaaugccaca

SEQ ID NO: 471843 - RNA, 19 nt, Artificial Sequence
  Description of Artificial Sequence: Synthetic oligonucleotide
  Sense strand starting at position 377 of SEQ ID NO: 317195
aagugaccauguccaugaa

SEQ ID NO: 471844 - RNA, 19 nt, Artificial Sequence
  Description of Artificial Sequence: Synthetic oligonucleotide
  Antisense Strand to SEQ ID NO: 471843
uucauggacauggucacuu

SEQ ID NO: 471845 - RNA, 19 nt, Artificial Sequence
  Description of Artificial Sequence: Synthetic oligonucleotide
  Sense strand starting at position 381 of SEQ ID NO: 317195
gaccauguccaugaagcuu

SEQ ID NO: 471846 - RNA, 19 nt, Artificial Sequence
  Description of Artificial Sequence: Synthetic oligonucleotide
  Antisense Strand to SEQ ID NO: 471845
aagcuucauggacaugguc

SEQ ID NO: 471847 - RNA, 19 nt, Artificial Sequence
  Description of Artificial Sequence: Synthetic oligonucleotide
  Sense strand starting at position 387 of SEQ ID NO: 317195
guccaugaagcuuacaaac

SEQ ID NO: 471848 - RNA, 19 nt, Artificial Sequence
  Description of Artificial Sequence: Synthetic oligonucleotide
  Antisense Strand to SEQ ID NO: 471847
guuuguaagcuucauggac

SEQ ID NO: 471849 - RNA, 19 nt, Artificial Sequence
  Description of Artificial Sequence: Synthetic oligonucleotide
  Sense strand starting at position 422 of SEQ ID NO: 317195
ccagaauccuuguccugaa

SEQ ID NO: 471850 - RNA, 19 nt, Artificial Sequence
  Description of Artificial Sequence: Synthetic oligonucleotide
  Antisense Strand to SEQ ID NO: 471849
uucaggacaaggauucugg

SEQ ID NO: 471851 - RNA, 19 nt, Artificial Sequence
  Description of Artificial Sequence: Synthetic oligonucleotide
  Sense strand starting at position 432 of SEQ ID NO: 317195
uguccugaacucugaccaa

SEQ ID NO: 471852 - RNA, 19 nt, Artificial Sequence
  Description of Artificial Sequence: Synthetic oligonucleotide
  Antisense Strand to SEQ ID NO: 471851
uuggucagaguucaggaca

SEQ ID NO: 471853 - RNA, 19 nt, Artificial Sequence
  Description of Artificial Sequence: Synthetic oligonucleotide
  Sense strand starting at position 510 of SEQ ID NO: 317195
gggacaugagguugauguu

SEQ ID NO: 471854 - RNA, 19 nt, Artificial Sequence
  Description of Artificial Sequence: Synthetic oligonucleotide
  Antisense Strand to SEQ ID NO: 471853
aacaucaaccucauguccc

SEQ ID NO: 471855 - RNA, 19 nt, Artificial Sequence
  Description of Artificial Sequence: Synthetic oligonucleotide
  Sense strand starting at position 537 of SEQ ID NO: 317195
guuuauugucauuaacauc

SEQ ID NO: 471856 - RNA, 19 nt, Artificial Sequence
  Description of Artificial Sequence: Synthetic oligonucleotide
  Antisense Strand to SEQ ID NO: 471855
gauguuaaugacaauaaac

SEQ ID NO: 471857 - RNA, 19 nt, Artificial Sequence
  Description of Artificial Sequence: Synthetic oligonucleotide
  Sense strand starting at position 602 of SEQ ID NO: 317195
cccaaaucuugagccugaa

SEQ ID NO: 471858 - RNA, 19 nt, Artificial Sequence
  Description of Artificial Sequence: Synthetic oligonucleotide
  Antisense Strand to SEQ ID NO: 471857
uucaggcucaagauuuggg

SEQ ID NO: 471859 - RNA, 19 nt, Artificial Sequence
  Description of Artificial Sequence: Synthetic oligonucleotide
  Sense strand starting at position 727 of SEQ ID NO: 317195
augacugcugaaggaauau

SEQ ID NO: 471860 - RNA, 19 nt, Artificial Sequence
  Description of Artificial Sequence: Synthetic oligonucleotide
  Antisense Strand to SEQ ID NO: 471859
auauuccuucagcagucau

SEQ ID NO: 471861 - RNA, 19 nt, Artificial Sequence
  Description of Artificial Sequence: Synthetic oligonucleotide
  Sense strand starting at position 868 of SEQ ID NO: 317195
gucauuggagucugaaaug

SEQ ID NO: 471862 - RNA, 19 nt, Artificial Sequence
  Description of Artificial Sequence: Synthetic oligonucleotide
  Antisense Strand to SEQ ID NO: 471861
cauuucagacuccaaugac

SEQ ID NO: 471863 - RNA, 19 nt, Artificial Sequence
  Description of Artificial Sequence: Synthetic oligonucleotide
  Sense strand starting at position 905 of SEQ ID NO: 317195
gagccagaccucugaggua

SEQ ID NO: 471864 - RNA, 19 nt, Artificial Sequence
  Description of Artificial Sequence: Synthetic oligonucleotide
  Antisense Strand to SEQ ID NO: 471863
uaccucagaggucuggcuc

SEQ ID NO: 471865 - RNA, 19 nt, Artificial Sequence
  Description of Artificial Sequence: Synthetic oligonucleotide
  Sense strand starting at position 974 of SEQ ID NO: 317195
cgaucuaacucucugacca

SEQ ID NO: 471866 - RNA, 19 nt, Artificial Sequence
  Description of Artificial Sequence: Synthetic oligonucleotide
  Antisense Strand to SEQ ID NO: 471865
uggucagagaguuagaucg

SEQ ID NO: 471867 - RNA, 19 nt, Artificial Sequence
  Description of Artificial Sequence: Synthetic oligonucleotide
  Sense strand starting at position 982 of SEQ ID NO: 317195
cucucugaccacuaugagu

SEQ ID NO: 471868 - RNA, 19 nt, Artificial Sequence
  Description of Artificial Sequence: Synthetic oligonucleotide
  Antisense Strand to SEQ ID NO: 471867
acucauaguggucagagag

SEQ ID NO: 471869 - RNA, 19 nt, Artificial Sequence
  Description of Artificial Sequence: Synthetic oligonucleotide
  Sense strand starting at position 1029 of SEQ ID NO: 317195
uccgaaccucgauauuaaa

SEQ ID NO: 471870 - RNA, 19 nt, Artificial Sequence
  Description of Artificial Sequence: Synthetic oligonucleotide
  Antisense Strand to SEQ ID NO: 471869
uuuaauaucgagguucgga

SEQ ID NO: 471871 - RNA, 19 nt, Artificial Sequence
  Description of Artificial Sequence: Synthetic oligonucleotide
  Sense strand starting at position 1066 of SEQ ID NO: 317195
cgaguauguguggagggaa

SEQ ID NO: 471872 - RNA, 19 nt, Artificial Sequence
  Description of Artificial Sequence: Synthetic oligonucleotide
  Antisense Strand to SEQ ID NO: 471871
uucccuccacacauacucg

SEQ ID NO: 471873 - RNA, 19 nt, Artificial Sequence
  Description of Artificial Sequence: Synthetic oligonucleotide
  Sense strand starting at position 1187 of SEQ ID NO: 317195
ggagaauugucauuaauau

SEQ ID NO: 471874 - RNA, 19 nt, Artificial Sequence
  Description of Artificial Sequence: Synthetic oligonucleotide
  Antisense Strand to SEQ ID NO: 471873
auauuaaugacaauucucc

SEQ ID NO: 471875 - RNA, 19 nt, Artificial Sequence
  Description of Artificial Sequence: Synthetic oligonucleotide
  Sense strand starting at position 1248 of SEQ ID NO: 317195
uggguagagugaucacauc

SEQ ID NO: 471876 - RNA, 19 nt, Artificial Sequence
  Description of Artificial Sequence: Synthetic oligonucleotide
  Antisense Strand to SEQ ID NO: 471875
gaugugaucacucuaccca

SEQ ID NO: 471877 - RNA, 19 nt, Artificial Sequence
  Description of Artificial Sequence: Synthetic oligonucleotide
  Sense strand starting at position 1389 of SEQ ID NO: 317195
cucgaaaucgaacaguaga

SEQ ID NO: 471878 - RNA, 19 nt, Artificial Sequence
  Description of Artificial Sequence: Synthetic oligonucleotide
  Antisense Strand to SEQ ID NO: 471877
ucuacuguucgauuucgag

SEQ ID NO: 471879 - RNA, 19 nt, Artificial Sequence
  Description of Artificial Sequence: Synthetic oligonucleotide
  Sense strand starting at position 1516 of SEQ ID NO: 317195
uacaucgugguugaaagau

SEQ ID NO: 471880 - RNA, 19 nt, Artificial Sequence
  Description of Artificial Sequence: Synthetic oligonucleotide
  Antisense Strand to SEQ ID NO: 471879
aucuuucaaccacgaugua

SEQ ID NO: 471881 - RNA, 19 nt, Artificial Sequence
  Description of Artificial Sequence: Synthetic oligonucleotide
  Sense strand starting at position 1761 of SEQ ID NO: 317195
ucacgacuuccagauaccu

SEQ ID NO: 471882 - RNA, 19 nt, Artificial Sequence
  Description of Artificial Sequence: Synthetic oligonucleotide
  Antisense Strand to SEQ ID NO: 471881
agguaucuggaagucguga

SEQ ID NO: 471883 - RNA, 19 nt, Artificial Sequence
  Description of Artificial Sequence: Synthetic oligonucleotide
  Sense strand starting at position 1821 of SEQ ID NO: 317195
ccucuuuccaggcaggaga

SEQ ID NO: 471884 - RNA, 19 nt, Artificial Sequence
  Description of Artificial Sequence: Synthetic oligonucleotide
  Antisense Strand to SEQ ID NO: 471883
ucuccugccuggaaagagg

SEQ ID NO: 471885 - RNA, 19 nt, Artificial Sequence
  Description of Artificial Sequence: Synthetic oligonucleotide
  Sense strand starting at position 1972 of SEQ ID NO: 317195
gauugcugacuccagucua

SEQ ID NO: 471886 - RNA, 19 nt, Artificial Sequence
  Description of Artificial Sequence: Synthetic oligonucleotide
  Antisense Strand to SEQ ID NO: 471885
uagacuggagucagcaauc

SEQ ID NO: 471887 - RNA, 19 nt, Artificial Sequence
  Description of Artificial Sequence: Synthetic oligonucleotide
  Sense strand starting at position 2037 of SEQ ID NO: 317195
guguguugaaucgcuucca

SEQ ID NO: 471888 - RNA, 19 nt, Artificial Sequence
  Description of Artificial Sequence: Synthetic oligonucleotide
  Antisense Strand to SEQ ID NO: 471887
uggaagcgauucaacacac

SEQ ID NO: 471889 - RNA, 19 nt, Artificial Sequence
  Description of Artificial Sequence: Synthetic oligonucleotide
  Sense strand starting at position 2353 of SEQ ID NO: 317195
ucuggucgccuuuauuuau

SEQ ID NO: 471890 - RNA, 19 nt, Artificial Sequence
  Description of Artificial Sequence: Synthetic oligonucleotide
  Antisense Strand to SEQ ID NO: 471889
auaaauaaaggcgaccaga

SEQ ID NO: 471891 - RNA, 19 nt, Artificial Sequence
  Description of Artificial Sequence: Synthetic oligonucleotide
  Sense strand starting at position 2755 of SEQ ID NO: 317195
accucagaauuuggaacua

SEQ ID NO: 471892 - RNA, 19 nt, Artificial Sequence
  Description of Artificial Sequence: Synthetic oligonucleotide
  Antisense Strand to SEQ ID NO: 471891
uaguuccaaauucugaggu

SEQ ID NO: 471893 - RNA, 19 nt, Artificial Sequence
  Description of Artificial Sequence: Synthetic oligonucleotide
  Sense strand starting at position 2833 of SEQ ID NO: 317195
guaauauuucuuuguccug

SEQ ID NO: 471894 - RNA, 19 nt, Artificial Sequence
  Description of Artificial Sequence: Synthetic oligonucleotide
  Antisense Strand to SEQ ID NO: 471893
caggacaaagaaauauuac

SEQ ID NO: 471895 - RNA, 19 nt, Artificial Sequence
  Description of Artificial Sequence: Synthetic oligonucleotide
  Sense strand starting at position 2971 of SEQ ID NO: 317195
uggacucaauaguuuacaa

SEQ ID NO: 471896 - RNA, 19 nt, Artificial Sequence
  Description of Artificial Sequence: Synthetic oligonucleotide
  Antisense Strand to SEQ ID NO: 471895
uuguaaacuauugagucca

SEQ ID NO: 471897 - RNA, 19 nt, Artificial Sequence
  Description of Artificial Sequence: Synthetic oligonucleotide
  Sense strand starting at position 3057 of SEQ ID NO: 317195
gguuguuuacacugacaaa

SEQ ID NO: 471898 - RNA, 19 nt, Artificial Sequence
  Description of Artificial Sequence: Synthetic oligonucleotide
  Antisense Strand to SEQ ID NO: 471897
uuugucaguguaaacaacc

SEQ ID NO: 471899 - RNA, 19 nt, Artificial Sequence
  Description of Artificial Sequence: Synthetic oligonucleotide
  Sense strand starting at position 3076 of SEQ ID NO: 317195
ucaaaugccugagcugaaa

SEQ ID NO: 471900 - RNA, 19 nt, Artificial Sequence
  Description of Artificial Sequence: Synthetic oligonucleotide
  Antisense Strand to SEQ ID NO: 471899
uuucagcucaggcauuuga

SEQ ID NO: 471901 - RNA, 19 nt, Artificial Sequence
  Description of Artificial Sequence: Synthetic oligonucleotide
  Sense strand starting at position 3123 of SEQ ID NO: 317195
ggaaauaucaugggaggcu

SEQ ID NO: 471902 - RNA, 19 nt, Artificial Sequence
  Description of Artificial Sequence: Synthetic oligonucleotide
  Antisense Strand to SEQ ID NO: 471901
agccucccaugauauuucc

SEQ ID NO: 471903 - RNA, 19 nt, Artificial Sequence
  Description of Artificial Sequence: Synthetic oligonucleotide
  Sense strand starting at position 3327 of SEQ ID NO: 317195
acagaaugucauugucacu

SEQ ID NO: 471904 - RNA, 19 nt, Artificial Sequence
  Description of Artificial Sequence: Synthetic oligonucleotide
  Antisense Strand to SEQ ID NO: 471903
agugacaaugacauucugu

SEQ ID NO: 471905 - RNA, 19 nt, Artificial Sequence
  Description of Artificial Sequence: Synthetic oligonucleotide
  Sense strand starting at position 3585 of SEQ ID NO: 317195
gcaaauugugcagaauaga

SEQ ID NO: 471906 - RNA, 19 nt, Artificial Sequence
  Description of Artificial Sequence: Synthetic oligonucleotide
  Antisense Strand to SEQ ID NO: 471905
ucuauucugcacaauuugc

SEQ ID NO: 471907 - RNA, 19 nt, Artificial Sequence
  Description of Artificial Sequence: Synthetic oligonucleotide
  Sense strand starting at position 3776 of SEQ ID NO: 317195
uggccuagaucucuaacaa

SEQ ID NO: 471908 - RNA, 19 nt, Artificial Sequence
  Description of Artificial Sequence: Synthetic oligonucleotide
  Antisense Strand to SEQ ID NO: 471907
uuguuagagaucuaggcca

SEQ ID NO: 471909 - RNA, 19 nt, Artificial Sequence
  Description of Artificial Sequence: Synthetic oligonucleotide
  Sense strand starting at position 3777 of SEQ ID NO: 317195
ggccuagaucucuaacaau

SEQ ID NO: 471910 - RNA, 19 nt, Artificial Sequence
  Description of Artificial Sequence: Synthetic oligonucleotide
  Antisense Strand to SEQ ID NO: 471909
auuguuagagaucuaggcc

SEQ ID NO: 471911 - RNA, 19 nt, Artificial Sequence
  Description of Artificial Sequence: Synthetic oligonucleotide
  Sense strand starting at position 2039 of SEQ ID NO: 317196
gcgcgauucagggaggaga

SEQ ID NO: 471912 - RNA, 19 nt, Artificial Sequence
  Description of Artificial Sequence: Synthetic oligonucleotide
  Antisense Strand to SEQ ID NO: 471911
ucuccucccugaaucgcgc

SEQ ID NO: 471913 - RNA, 19 nt, Artificial Sequence
  Description of Artificial Sequence: Synthetic oligonucleotide
  Sense strand starting at position 2041 of SEQ ID NO: 317196
gcgauucagggaggagauu

SEQ ID NO: 471914 - RNA, 19 nt, Artificial Sequence
  Description of Artificial Sequence: Synthetic oligonucleotide
  Antisense Strand to SEQ ID NO: 471913
aaucuccucccugaaucgc

SEQ ID NO: 471915 - RNA, 19 nt, Artificial Sequence
  Description of Artificial Sequence: Synthetic oligonucleotide
  Sense strand starting at position 2223 of SEQ ID NO: 317196
acuugaucccuuugcaguu

SEQ ID NO: 471916 - RNA, 19 nt, Artificial Sequence
  Description of Artificial Sequence: Synthetic oligonucleotide
  Antisense Strand to SEQ ID NO: 471915
aacugcaaagggaucaagu

SEQ ID NO: 471917 - RNA, 19 nt, Artificial Sequence
  Description of Artificial Sequence: Synthetic oligonucleotide
  Sense strand starting at position 2273 of SEQ ID NO: 317196
gcgacguuagccggcgaaa

SEQ ID NO: 471918 - RNA, 19 nt, Artificial Sequence
  Description of Artificial Sequence: Synthetic oligonucleotide
  Antisense Strand to SEQ ID NO: 471917
uuucgccggcuaacgucgc

SEQ ID NO: 471919 - RNA, 19 nt, Artificial Sequence
  Description of Artificial Sequence: Synthetic oligonucleotide
  Sense strand starting at position 2331 of SEQ ID NO: 317196
gcccaauucugucuggauu

SEQ ID NO: 471920 - RNA, 19 nt, Artificial Sequence
  Description of Artificial Sequence: Synthetic oligonucleotide
  Antisense Strand to SEQ ID NO: 471919
aauccagacagaauugggc

SEQ ID NO: 471921 - RNA, 19 nt, Artificial Sequence
  Description of Artificial Sequence: Synthetic oligonucleotide
  Sense strand starting at position 2333 of SEQ ID NO: 317196
ccaauucugucuggauuuc

SEQ ID NO: 471922 - RNA, 19 nt, Artificial Sequence
  Description of Artificial Sequence: Synthetic oligonucleotide
  Antisense Strand to SEQ ID NO: 471921
gaaauccagacagaauugg

SEQ ID NO: 471923 - RNA, 19 nt, Artificial Sequence
  Description of Artificial Sequence: Synthetic oligonucleotide
  Sense strand starting at position 2499 of SEQ ID NO: 317196
uggugaauuccgcaguugu

SEQ ID NO: 471924 - RNA, 19 nt, Artificial Sequence
  Description of Artificial Sequence: Synthetic oligonucleotide
  Antisense Strand to SEQ ID NO: 471923
acaacugcggaauucacca

SEQ ID NO: 471925 - RNA, 19 nt, Artificial Sequence
  Description of Artificial Sequence: Synthetic oligonucleotide
  Sense strand starting at position 2501 of SEQ ID NO: 317196
gugaauuccgcaguugucu

SEQ ID NO: 471926 - RNA, 19 nt, Artificial Sequence
  Description of Artificial Sequence: Synthetic oligonucleotide
  Antisense Strand to SEQ ID NO: 471925
agacaacugcggaauucac

SEQ ID NO: 471927 - RNA, 19 nt, Artificial Sequence
  Description of Artificial Sequence: Synthetic oligonucleotide
  Sense strand starting at position 2510 of SEQ ID NO: 317196
gcaguugucucgucccuuu

SEQ ID NO: 471928 - RNA, 19 nt, Artificial Sequence
  Description of Artificial Sequence: Synthetic oligonucleotide
  Antisense Strand to SEQ ID NO: 471927
aaagggacgagacaacugc

SEQ ID NO: 471929 - RNA, 19 nt, Artificial Sequence
  Description of Artificial Sequence: Synthetic oligonucleotide
  Sense strand starting at position 2884 of SEQ ID NO: 317196
gccaguccucuuuaagcca

SEQ ID NO: 471930 - RNA, 19 nt, Artificial Sequence
  Description of Artificial Sequence: Synthetic oligonucleotide
  Antisense Strand to SEQ ID NO: 471929
uggcuuaaagaggacuggc

SEQ ID NO: 471931 - RNA, 19 nt, Artificial Sequence
  Description of Artificial Sequence: Synthetic oligonucleotide
  Sense strand starting at position 3008 of SEQ ID NO: 317196
acgcgugagagcuuucgga

SEQ ID NO: 471932 - RNA, 19 nt, Artificial Sequence
  Description of Artificial Sequence: Synthetic oligonucleotide
  Antisense Strand to SEQ ID NO: 471931
uccgaaagcucucacgcgu

SEQ ID NO: 471933 - RNA, 19 nt, Artificial Sequence
  Description of Artificial Sequence: Synthetic oligonucleotide
  Sense strand starting at position 3023 of SEQ ID NO: 317196
cggagcuggugucaggaua

SEQ ID NO: 471934 - RNA, 19 nt, Artificial Sequence
  Description of Artificial Sequence: Synthetic oligonucleotide
  Antisense Strand to SEQ ID NO: 471933
uauccugacaccagcuccg

SEQ ID NO: 471935 - RNA, 19 nt, Artificial Sequence
  Description of Artificial Sequence: Synthetic oligonucleotide
  Sense strand starting at position 3094 of SEQ ID NO: 317196
gucuccgguucgcgauuua

SEQ ID NO: 471936 - RNA, 19 nt, Artificial Sequence
  Description of Artificial Sequence: Synthetic oligonucleotide
  Antisense Strand to SEQ ID NO: 471935
uaaaucgcgaaccggagac

SEQ ID NO: 471937 - RNA, 19 nt, Artificial Sequence
  Description of Artificial Sequence: Synthetic oligonucleotide
  Sense strand starting at position 3107 of SEQ ID NO: 317196
gauuuaggaucuugguuag

SEQ ID NO: 471938 - RNA, 19 nt, Artificial Sequence
  Description of Artificial Sequence: Synthetic oligonucleotide
  Antisense Strand to SEQ ID NO: 471937
cuaaccaagauccuaaauc

SEQ ID NO: 471939 - RNA, 19 nt, Artificial Sequence
  Description of Artificial Sequence: Synthetic oligonucleotide
  Sense strand starting at position 3118 of SEQ ID NO: 317196
uugguuaggacaugguuau

SEQ ID NO: 471940 - RNA, 19 nt, Artificial Sequence
  Description of Artificial Sequence: Synthetic oligonucleotide
  Antisense Strand to SEQ ID NO: 471939
auaaccauguccuaaccaa

SEQ ID NO: 471941 - RNA, 19 nt, Artificial Sequence
  Description of Artificial Sequence: Synthetic oligonucleotide
  Sense strand starting at position 3308 of SEQ ID NO: 317196
ggugaaggaugucugucuu

SEQ ID NO: 471942 - RNA, 19 nt, Artificial Sequence
  Description of Artificial Sequence: Synthetic oligonucleotide
  Antisense Strand to SEQ ID NO: 471941
aagacagacauccuucacc

SEQ ID NO: 471943 - RNA, 19 nt, Artificial Sequence
  Description of Artificial Sequence: Synthetic oligonucleotide
  Sense strand starting at position 3312 of SEQ ID NO: 317196
aaggaugucugucuuuguu

SEQ ID NO: 471944 - RNA, 19 nt, Artificial Sequence
  Description of Artificial Sequence: Synthetic oligonucleotide
  Antisense Strand to SEQ ID NO: 471943
aacaaagacagacauccuu

SEQ ID NO: 471945 - RNA, 19 nt, Artificial Sequence
  Description of Artificial Sequence: Synthetic oligonucleotide
  Sense strand starting at position 3314 of SEQ ID NO: 317196
ggaugucugucuuuguuua

SEQ ID NO: 471946 - RNA, 19 nt, Artificial Sequence
  Description of Artificial Sequence: Synthetic oligonucleotide
  Antisense Strand to SEQ ID NO: 471945
uaaacaaagacagacaucc

SEQ ID NO: 471947 - RNA, 19 nt, Artificial Sequence
  Description of Artificial Sequence: Synthetic oligonucleotide
  Sense strand starting at position 3315 of SEQ ID NO: 317196
gaugucugucuuuguuuaa

SEQ ID NO: 471948 - RNA, 19 nt, Artificial Sequence
  Description of Artificial Sequence: Synthetic oligonucleotide
  Antisense Strand to SEQ ID NO: 471947
uuaaacaaagacagacauc

SEQ ID NO: 471949 - RNA, 19 nt, Artificial Sequence
  Description of Artificial Sequence: Synthetic oligonucleotide
  Sense strand starting at position 3316 of SEQ ID NO: 317196
augucugucuuuguuuaaa

SEQ ID NO: 471950 - RNA, 19 nt, Artificial Sequence
  Description of Artificial Sequence: Synthetic oligonucleotide
  Antisense Strand to SEQ ID NO: 471949
uuuaaacaaagacagacau

SEQ ID NO: 471951 - RNA, 19 nt, Artificial Sequence
  Description of Artificial Sequence: Synthetic oligonucleotide
  Sense strand starting at position 3318 of SEQ ID NO: 317196
gucugucuuuguuuaaaug

SEQ ID NO: 471952 - RNA, 19 nt, Artificial Sequence
  Description of Artificial Sequence: Synthetic oligonucleotide
  Antisense Strand to SEQ ID NO: 471951
cauuuaaacaaagacagac

SEQ ID NO: 471953 - RNA, 19 nt, Artificial Sequence
  Description of Artificial Sequence: Synthetic oligonucleotide
  Sense strand starting at position 3326 of SEQ ID NO: 317196
uuguuuaaaugcuugacau

SEQ ID NO: 471954 - RNA, 19 nt, Artificial Sequence
  Description of Artificial Sequence: Synthetic oligonucleotide
  Antisense Strand to SEQ ID NO: 471953
augucaagcauuuaaacaa

SEQ ID NO: 471955 - RNA, 19 nt, Artificial Sequence
  Description of Artificial Sequence: Synthetic oligonucleotide
  Sense strand starting at position 3327 of SEQ ID NO: 317196
uguuuaaaugcuugacauu

SEQ ID NO: 471956 - RNA, 19 nt, Artificial Sequence
  Description of Artificial Sequence: Synthetic oligonucleotide
  Antisense Strand to SEQ ID NO: 471955
aaugucaagcauuuaaaca

SEQ ID NO: 471957 - RNA, 19 nt, Artificial Sequence
  Description of Artificial Sequence: Synthetic oligonucleotide
  Sense strand starting at position 3328 of SEQ ID NO: 317196
guuuaaaugcuugacauuc

SEQ ID NO: 471958 - RNA, 19 nt, Artificial Sequence
  Description of Artificial Sequence: Synthetic oligonucleotide
  Antisense Strand to SEQ ID NO: 471957
gaaugucaagcauuuaaac

SEQ ID NO: 471959 - RNA, 19 nt, Artificial Sequence
  Description of Artificial Sequence: Synthetic oligonucleotide
  Sense strand starting at position 3407 of SEQ ID NO: 317196
guuggaaaccucgauauua

SEQ ID NO: 471960 - RNA, 19 nt, Artificial Sequence
  Description of Artificial Sequence: Synthetic oligonucleotide
  Antisense Strand to SEQ ID NO: 471959
uaauaucgagguuuccaac

SEQ ID NO: 471961 - RNA, 19 nt, Artificial Sequence
  Description of Artificial Sequence: Synthetic oligonucleotide
  Sense strand starting at position 3470 of SEQ ID NO: 317196
agcgucaccuaucuggaua

SEQ ID NO: 471962 - RNA, 19 nt, Artificial Sequence
  Description of Artificial Sequence: Synthetic oligonucleotide
  Antisense Strand to SEQ ID NO: 471961
uauccagauaggugacgcu

SEQ ID NO: 471963 - RNA, 19 nt, Artificial Sequence
  Description of Artificial Sequence: Synthetic oligonucleotide
  Sense strand starting at position 3471 of SEQ ID NO: 317196
gcgucaccuaucuggauaa

SEQ ID NO: 471964 - RNA, 19 nt, Artificial Sequence
  Description of Artificial Sequence: Synthetic oligonucleotide
  Antisense Strand to SEQ ID NO: 471963
uuauccagauaggugacgc

SEQ ID NO: 471965 - RNA, 19 nt, Artificial Sequence
  Description of Artificial Sequence: Synthetic oligonucleotide
  Sense strand starting at position 3472 of SEQ ID NO: 317196
cgucaccuaucuggauaaa

SEQ ID NO: 471966 - RNA, 19 nt, Artificial Sequence
  Description of Artificial Sequence: Synthetic oligonucleotide
  Antisense Strand to SEQ ID NO: 471965
uuuauccagauaggugacg

SEQ ID NO: 471967 - RNA, 19 nt, Artificial Sequence
  Description of Artificial Sequence: Synthetic oligonucleotide
  Sense strand starting at position 3508 of SEQ ID NO: 317196
uggcaacuuuguguaccaa

SEQ ID NO: 471968 - RNA, 19 nt, Artificial Sequence
  Description of Artificial Sequence: Synthetic oligonucleotide
  Antisense Strand to SEQ ID NO: 471967
uugguacacaaaguugcca

SEQ ID NO: 471969 - RNA, 19 nt, Artificial Sequence
  Description of Artificial Sequence: Synthetic oligonucleotide
  Sense strand starting at position 3509 of SEQ ID NO: 317196
ggcaacuuuguguaccaaa

SEQ ID NO: 471970 - RNA, 19 nt, Artificial Sequence
  Description of Artificial Sequence: Synthetic oligonucleotide
  Antisense Strand to SEQ ID NO: 471969
uuugguacacaaaguugcc

SEQ ID NO: 471971 - RNA, 19 nt, Artificial Sequence
  Description of Artificial Sequence: Synthetic oligonucleotide
  Sense strand starting at position 3557 of SEQ ID NO: 317196
gacuuugugucccuugacu

SEQ ID NO: 471972 - RNA, 19 nt, Artificial Sequence
  Description of Artificial Sequence: Synthetic oligonucleotide
  Antisense Strand to SEQ ID NO: 471971
agucaagggacacaaaguc

SEQ ID NO: 471973 - RNA, 19 nt, Artificial Sequence
  Description of Artificial Sequence: Synthetic oligonucleotide
  Sense strand starting at position 3576 of SEQ ID NO: 317196
gucccuauuuccugaagca

SEQ ID NO: 471974 - RNA, 19 nt, Artificial Sequence
  Description of Artificial Sequence: Synthetic oligonucleotide
  Antisense Strand to SEQ ID NO: 471973
ugcuucaggaaauagggac

SEQ ID NO: 471975 - RNA, 19 nt, Artificial Sequence
  Description of Artificial Sequence: Synthetic oligonucleotide
  Sense strand starting at position 3898 of SEQ ID NO: 317196
guggguauucuuuacgaga

SEQ ID NO: 471976 - RNA, 19 nt, Artificial Sequence
  Description of Artificial Sequence: Synthetic oligonucleotide
  Antisense Strand to SEQ ID NO: 471975
ucucguaaagaauacccac

SEQ ID NO: 471977 - RNA, 19 nt, Artificial Sequence
  Description of Artificial Sequence: Synthetic oligonucleotide
  Sense strand starting at position 3900 of SEQ ID NO: 317196
ggguauucuuuacgagacc

SEQ ID NO: 471978 - RNA, 19 nt, Artificial Sequence
  Description of Artificial Sequence: Synthetic oligonucleotide
  Antisense Strand to SEQ ID NO: 471977
ggucucguaaagaauaccc

SEQ ID NO: 471979 - RNA, 19 nt, Artificial Sequence
  Description of Artificial Sequence: Synthetic oligonucleotide
  Sense strand starting at position 3901 of SEQ ID NO: 317196
gguauucuuuacgagaccu

SEQ ID NO: 471980 - RNA, 19 nt, Artificial Sequence
  Description of Artificial Sequence: Synthetic oligonucleotide
  Antisense Strand to SEQ ID NO: 471979
aggucucguaaagaauacc

SEQ ID NO: 471981 - RNA, 19 nt, Artificial Sequence
  Description of Artificial Sequence: Synthetic oligonucleotide
  Sense strand starting at position 2032 of SEQ ID NO: 317197
gcgcgauucagggaggaga

SEQ ID NO: 471982 - RNA, 19 nt, Artificial Sequence
  Description of Artificial Sequence: Synthetic oligonucleotide
  Antisense Strand to SEQ ID NO: 471981
ucuccucccugaaucgcgc

SEQ ID NO: 471983 - RNA, 19 nt, Artificial Sequence
  Description of Artificial Sequence: Synthetic oligonucleotide
  Sense strand starting at position 2034 of SEQ ID NO: 317197
gcgauucagggaggagauu

SEQ ID NO: 471984 - RNA, 19 nt, Artificial Sequence
  Description of Artificial Sequence: Synthetic oligonucleotide
  Antisense Strand to SEQ ID NO: 471983
aaucuccucccugaaucgc

SEQ ID NO: 471985 - RNA, 19 nt, Artificial Sequence
  Description of Artificial Sequence: Synthetic oligonucleotide
  Sense strand starting at position 2216 of SEQ ID NO: 317197
acuugaucccuuugcaguu

SEQ ID NO: 471986 - RNA, 19 nt, Artificial Sequence
  Description of Artificial Sequence: Synthetic oligonucleotide
  Antisense Strand to SEQ ID NO: 471985
aacugcaaagggaucaagu

SEQ ID NO: 471987 - RNA, 19 nt, Artificial Sequence
  Description of Artificial Sequence: Synthetic oligonucleotide
  Sense strand starting at position 2266 of SEQ ID NO: 317197
gcgacguuagccggcgaaa

SEQ ID NO: 471988 - RNA, 19 nt, Artificial Sequence
  Description of Artificial Sequence: Synthetic oligonucleotide
  Antisense Strand to SEQ ID NO: 471987
uuucgccggcuaacgucgc

SEQ ID NO: 471989 - RNA, 19 nt, Artificial Sequence
  Description of Artificial Sequence: Synthetic oligonucleotide
  Sense strand starting at position 2324 of SEQ ID NO: 317197
gcccaauucugucuggauu

SEQ ID NO: 471990 - RNA, 19 nt, Artificial Sequence
  Description of Artificial Sequence: Synthetic oligonucleotide
  Antisense Strand to SEQ ID NO: 471989
aauccagacagaauugggc

SEQ ID NO: 471991 - RNA, 19 nt, Artificial Sequence
  Description of Artificial Sequence: Synthetic oligonucleotide
  Sense strand starting at position 2326 of SEQ ID NO: 317197
ccaauucugucuggauuuc

SEQ ID NO: 471992 - RNA, 19 nt, Artificial Sequence
  Description of Artificial Sequence: Synthetic oligonucleotide
  Antisense Strand to SEQ ID NO: 471991
gaaauccagacagaauugg

SEQ ID NO: 471993 - RNA, 19 nt, Artificial Sequence
  Description of Artificial Sequence: Synthetic oligonucleotide
  Sense strand starting at position 2492 of SEQ ID NO: 317197
uggugaauuccgcaguugu

SEQ ID NO: 471994 - RNA, 19 nt, Artificial Sequence
  Description of Artificial Sequence: Synthetic oligonucleotide
  Antisense Strand to SEQ ID NO: 471993
acaacugcggaauucacca

SEQ ID NO: 471995 - RNA, 19 nt, Artificial Sequence
  Description of Artificial Sequence: Synthetic oligonucleotide
  Sense strand starting at position 2494 of SEQ ID NO: 317197
gugaauuccgcaguugucu

SEQ ID NO: 471996 - RNA, 19 nt, Artificial Sequence
  Description of Artificial Sequence: Synthetic oligonucleotide
  Antisense Strand to SEQ ID NO: 471995
agacaacugcggaauucac

SEQ ID NO: 471997 - RNA, 19 nt, Artificial Sequence
  Description of Artificial Sequence: Synthetic oligonucleotide
  Sense strand starting at position 2503 of SEQ ID NO: 317197
gcaguugucucgucccuuu

SEQ ID NO: 471998 - RNA, 19 nt, Artificial Sequence
  Description of Artificial Sequence: Synthetic oligonucleotide
  Antisense Strand to SEQ ID NO: 471997
aaagggacgagacaacugc

SEQ ID NO: 471999 - RNA, 19 nt, Artificial Sequence
  Description of Artificial Sequence: Synthetic oligonucleotide
  Sense strand starting at position 2877 of SEQ ID NO: 317197
gccaguccucuuuaagcca

SEQ ID NO: 472000 - RNA, 19 nt, Artificial Sequence
  Description of Artificial Sequence: Synthetic oligonucleotide
  Antisense Strand to SEQ ID NO: 471999
uggcuuaaagaggacuggc

SEQ ID NO: 472001 - RNA, 19 nt, Artificial Sequence
  Description of Artificial Sequence: Synthetic oligonucleotide
  Sense strand starting at position 3001 of SEQ ID NO: 317197
acgcgugagagcuuucgga

SEQ ID NO: 472002 - RNA, 19 nt, Artificial Sequence
  Description of Artificial Sequence: Synthetic oligonucleotide
  Antisense Strand to SEQ ID NO: 472001
uccgaaagcucucacgcgu

SEQ ID NO: 472003 - RNA, 19 nt, Artificial Sequence
  Description of Artificial Sequence: Synthetic oligonucleotide
  Sense strand starting at position 3016 of SEQ ID NO: 317197
cggagcuggugucaggaua

SEQ ID NO: 472004 - RNA, 19 nt, Artificial Sequence
  Description of Artificial Sequence: Synthetic oligonucleotide
  Antisense Strand to SEQ ID NO: 472003
uauccugacaccagcuccg

SEQ ID NO: 472005 - RNA, 19 nt, Artificial Sequence
  Description of Artificial Sequence: Synthetic oligonucleotide
  Sense strand starting at position 3087 of SEQ ID NO: 317197
gucuccgguucgcgauuua

SEQ ID NO: 472006 - RNA, 19 nt, Artificial Sequence
  Description of Artificial Sequence: Synthetic oligonucleotide
  Antisense Strand to SEQ ID NO: 472005
uaaaucgcgaaccggagac

SEQ ID NO: 472007 - RNA, 19 nt, Artificial Sequence
  Description of Artificial Sequence: Synthetic oligonucleotide
  Sense strand starting at position 3100 of SEQ ID NO: 317197
gauuuaggaucuugguuag

SEQ ID NO: 472008 - RNA, 19 nt, Artificial Sequence
  Description of Artificial Sequence: Synthetic oligonucleotide
  Antisense Strand to SEQ ID NO: 472007
cuaaccaagauccuaaauc

SEQ ID NO: 472009 - RNA, 19 nt, Artificial Sequence
  Description of Artificial Sequence: Synthetic oligonucleotide
  Sense strand starting at position 3111 of SEQ ID NO: 317197
uugguuaggacaugguuau

SEQ ID NO: 472010 - RNA, 19 nt, Artificial Sequence
  Description of Artificial Sequence: Synthetic oligonucleotide
  Antisense Strand to SEQ ID NO: 472009
auaaccauguccuaaccaa

SEQ ID NO: 472011 - RNA, 19 nt, Artificial Sequence
  Description of Artificial Sequence: Synthetic oligonucleotide
  Sense strand starting at position 3301 of SEQ ID NO: 317197
ggugaaggaugucugucuu

SEQ ID NO: 472012 - RNA, 19 nt, Artificial Sequence
  Description of Artificial Sequence: Synthetic oligonucleotide
  Antisense Strand to SEQ ID NO: 472011
aagacagacauccuucacc

SEQ ID NO: 472013 - RNA, 19 nt, Artificial Sequence
  Description of Artificial Sequence: Synthetic oligonucleotide
  Sense strand starting at position 3305 of SEQ ID NO: 317197
aaggaugucugucuuuguu

SEQ ID NO: 472014 - RNA, 19 nt, Artificial Sequence
  Description of Artificial Sequence: Synthetic oligonucleotide
  Antisense Strand to SEQ ID NO: 472013
aacaaagacagacauccuu

SEQ ID NO: 472015 - RNA, 19 nt, Artificial Sequence
  Description of Artificial Sequence: Synthetic oligonucleotide
  Sense strand starting at position 3307 of SEQ ID NO: 317197
ggaugucugucuuuguuua

SEQ ID NO: 472016 - RNA, 19 nt, Artificial Sequence
  Description of Artificial Sequence: Synthetic oligonucleotide
  Antisense Strand to SEQ ID NO: 472015
uaaacaaagacagacaucc

SEQ ID NO: 472017 - RNA, 19 nt, Artificial Sequence
  Description of Artificial Sequence: Synthetic oligonucleotide
  Sense strand starting at position 3308 of SEQ ID NO: 317197
gaugucugucuuuguuuaa

SEQ ID NO: 472018 - RNA, 19 nt, Artificial Sequence
  Description of Artificial Sequence: Synthetic oligonucleotide
  Antisense Strand to SEQ ID NO: 472017
uuaaacaaagacagacauc

SEQ ID NO: 472019 - RNA, 19 nt, Artificial Sequence
  Description of Artificial Sequence: Synthetic oligonucleotide
  Sense strand starting at position 3309 of SEQ ID NO: 317197
augucugucuuuguuuaaa

SEQ ID NO: 472020 - RNA, 19 nt, Artificial Sequence
  Description of Artificial Sequence: Synthetic oligonucleotide
  Antisense Strand to SEQ ID NO: 472019
uuuaaacaaagacagacau

SEQ ID NO: 472021 - RNA, 19 nt, Artificial Sequence
  Description of Artificial Sequence: Synthetic oligonucleotide
  Sense strand starting at position 3311 of SEQ ID NO: 317197
gucugucuuuguuuaaaug

SEQ ID NO: 472022 - RNA, 19 nt, Artificial Sequence
  Description of Artificial Sequence: Synthetic oligonucleotide
  Antisense Strand to SEQ ID NO: 472021
cauuuaaacaaagacagac

SEQ ID NO: 472023 - RNA, 19 nt, Artificial Sequence
  Description of Artificial Sequence: Synthetic oligonucleotide
  Sense strand starting at position 3319 of SEQ ID NO: 317197
uuguuuaaaugcuugacau

SEQ ID NO: 472024 - RNA, 19 nt, Artificial Sequence
  Description of Artificial Sequence: Synthetic oligonucleotide
  Antisense Strand to SEQ ID NO: 472023
augucaagcauuuaaacaa

SEQ ID NO: 472025 - RNA, 19 nt, Artificial Sequence
  Description of Artificial Sequence: Synthetic oligonucleotide
  Sense strand starting at position 3320 of SEQ ID NO: 317197
uguuuaaaugcuugacauu

SEQ ID NO: 472026 - RNA, 19 nt, Artificial Sequence
  Description of Artificial Sequence: Synthetic oligonucleotide
  Antisense Strand to SEQ ID NO: 472025
aaugucaagcauuuaaaca

SEQ ID NO: 472027 - RNA, 19 nt, Artificial Sequence
  Description of Artificial Sequence: Synthetic oligonucleotide
  Sense strand starting at position 3321 of SEQ ID NO: 317197
guuuaaaugcuugacauuc

SEQ ID NO: 472028 - RNA, 19 nt, Artificial Sequence
  Description of Artificial Sequence: Synthetic oligonucleotide
  Antisense Strand to SEQ ID NO: 472027
gaaugucaagcauuuaaac

SEQ ID NO: 472029 - RNA, 19 nt, Artificial Sequence
  Description of Artificial Sequence: Synthetic oligonucleotide
  Sense strand starting at position 3400 of SEQ ID NO: 317197
guuggaaaccucgauauua

SEQ ID NO: 472030 - RNA, 19 nt, Artificial Sequence
  Description of Artificial Sequence: Synthetic oligonucleotide
  Antisense Strand to SEQ ID NO: 472029
uaauaucgagguuuccaac

SEQ ID NO: 472031 - RNA, 19 nt, Artificial Sequence
  Description of Artificial Sequence: Synthetic oligonucleotide
  Sense strand starting at position 3463 of SEQ ID NO: 317197
agcgucaccuaucuggaua

SEQ ID NO: 472032 - RNA, 19 nt, Artificial Sequence
  Description of Artificial Sequence: Synthetic oligonucleotide
  Antisense Strand to SEQ ID NO: 472031
uauccagauaggugacgcu

SEQ ID NO: 472033 - RNA, 19 nt, Artificial Sequence
  Description of Artificial Sequence: Synthetic oligonucleotide
  Sense strand starting at position 3464 of SEQ ID NO: 317197
gcgucaccuaucuggauaa

SEQ ID NO: 472034 - RNA, 19 nt, Artificial Sequence
  Description of Artificial Sequence: Synthetic oligonucleotide
  Antisense Strand to SEQ ID NO: 472033
uuauccagauaggugacgc

SEQ ID NO: 472035 - RNA, 19 nt, Artificial Sequence
  Description of Artificial Sequence: Synthetic oligonucleotide
  Sense strand starting at position 3465 of SEQ ID NO: 317197
cgucaccuaucuggauaaa

SEQ ID NO: 472036 - RNA, 19 nt, Artificial Sequence
  Description of Artificial Sequence: Synthetic oligonucleotide
  Antisense Strand to SEQ ID NO: 472035
uuuauccagauaggugacg

SEQ ID NO: 472037 - RNA, 19 nt, Artificial Sequence
  Description of Artificial Sequence: Synthetic oligonucleotide
  Sense strand starting at position 3501 of SEQ ID NO: 317197
uggcaacuuuguguaccaa

SEQ ID NO: 472038 - RNA, 19 nt, Artificial Sequence
  Description of Artificial Sequence: Synthetic oligonucleotide
  Antisense Strand to SEQ ID NO: 472037
uugguacacaaaguugcca

SEQ ID NO: 472039 - RNA, 19 nt, Artificial Sequence
  Description of Artificial Sequence: Synthetic oligonucleotide
  Sense strand starting at position 3502 of SEQ ID NO: 317197
ggcaacuuuguguaccaaa

SEQ ID NO: 472040 - RNA, 19 nt, Artificial Sequence
  Description of Artificial Sequence: Synthetic oligonucleotide
  Antisense Strand to SEQ ID NO: 472039
uuugguacacaaaguugcc

SEQ ID NO: 472041 - RNA, 19 nt, Artificial Sequence
  Description of Artificial Sequence: Synthetic oligonucleotide
  Sense strand starting at position 3550 of SEQ ID NO: 317197
gacuuugugucccuugacu

SEQ ID NO: 472042 - RNA, 19 nt, Artificial Sequence
  Description of Artificial Sequence: Synthetic oligonucleotide
  Antisense Strand to SEQ ID NO: 472041
agucaagggacacaaaguc

SEQ ID NO: 472043 - RNA, 19 nt, Artificial Sequence
  Description of Artificial Sequence: Synthetic oligonucleotide
  Sense strand starting at position 3569 of SEQ ID NO: 317197
gucccuauuuccugaagca

SEQ ID NO: 472044 - RNA, 19 nt, Artificial Sequence
  Description of Artificial Sequence: Synthetic oligonucleotide
  Antisense Strand to SEQ ID NO: 472043
ugcuucaggaaauagggac

SEQ ID NO: 472045 - RNA, 19 nt, Artificial Sequence
  Description of Artificial Sequence: Synthetic oligonucleotide
  Sense strand starting at position 3891 of SEQ ID NO: 317197
guggguauucuuuacgaga

SEQ ID NO: 472046 - RNA, 19 nt, Artificial Sequence
  Description of Artificial Sequence: Synthetic oligonucleotide
  Antisense Strand to SEQ ID NO: 472045
ucucguaaagaauacccac

SEQ ID NO: 472047 - RNA, 19 nt, Artificial Sequence
  Description of Artificial Sequence: Synthetic oligonucleotide
  Sense strand starting at position 3893 of SEQ ID NO: 317197
ggguauucuuuacgagacc

SEQ ID NO: 472048 - RNA, 19 nt, Artificial Sequence
  Description of Artificial Sequence: Synthetic oligonucleotide
  Antisense Strand to SEQ ID NO: 472047
ggucucguaaagaauaccc

SEQ ID NO: 472049 - RNA, 19 nt, Artificial Sequence
  Description of Artificial Sequence: Synthetic oligonucleotide
  Sense strand starting at position 3894 of SEQ ID NO: 317197
gguauucuuuacgagaccu

SEQ ID NO: 472050 - RNA, 19 nt, Artificial Sequence
  Description of Artificial Sequence: Synthetic oligonucleotide
  Antisense Strand to SEQ ID NO: 472049
aggucucguaaagaauacc

SEQ ID NO: 472051 - RNA, 19 nt, Artificial Sequence
  Description of Artificial Sequence: Synthetic oligonucleotide
  Sense strand starting at position 399 of SEQ ID NO: 317198
ucagguccuccugaauuau

SEQ ID NO: 472052 - RNA, 19 nt, Artificial Sequence
  Description of Artificial Sequence: Synthetic oligonucleotide
  Antisense Strand to SEQ ID NO: 472051
auaauucaggaggaccuga

SEQ ID NO: 472053 - RNA, 19 nt, Artificial Sequence
  Description of Artificial Sequence: Synthetic oligonucleotide
  Sense strand starting at position 405 of SEQ ID NO: 317198
ccuccugaauuauggucau

SEQ ID NO: 472054 - RNA, 19 nt, Artificial Sequence
  Description of Artificial Sequence: Synthetic oligonucleotide
  Antisense Strand to SEQ ID NO: 472053
augaccauaauucaggagg

SEQ ID NO: 472055 - RNA, 19 nt, Artificial Sequence
  Description of Artificial Sequence: Synthetic oligonucleotide
  Sense strand starting at position 536 of SEQ ID NO: 317198
ccgugauucuucccagggu

SEQ ID NO: 472056 - RNA, 19 nt, Artificial Sequence
  Description of Artificial Sequence: Synthetic oligonucleotide
  Antisense Strand to SEQ ID NO: 472055
acccugggaagaaucacgg

SEQ ID NO: 472057 - RNA, 19 nt, Artificial Sequence
  Description of Artificial Sequence: Synthetic oligonucleotide
  Sense strand starting at position 540 of SEQ ID NO: 317198
gauucuucccaggguccua

SEQ ID NO: 472058 - RNA, 19 nt, Artificial Sequence
  Description of Artificial Sequence: Synthetic oligonucleotide
  Antisense Strand to SEQ ID NO: 472057
uaggacccugggaagaauc

SEQ ID NO: 472059 - RNA, 19 nt, Artificial Sequence
  Description of Artificial Sequence: Synthetic oligonucleotide
  Sense strand starting at position 662 of SEQ ID NO: 317198
gaugaugugucauuguguc

SEQ ID NO: 472060 - RNA, 19 nt, Artificial Sequence
  Description of Artificial Sequence: Synthetic oligonucleotide
  Antisense Strand to SEQ ID NO: 472059
gacacaaugacacaucauc

SEQ ID NO: 472061 - RNA, 19 nt, Artificial Sequence
  Description of Artificial Sequence: Synthetic oligonucleotide
  Sense strand starting at position 668 of SEQ ID NO: 317198
gugucauuguguccuagca

SEQ ID NO: 472062 - RNA, 19 nt, Artificial Sequence
  Description of Artificial Sequence: Synthetic oligonucleotide
  Antisense Strand to SEQ ID NO: 472061
ugcuaggacacaaugacac

SEQ ID NO: 472063 - RNA, 19 nt, Artificial Sequence
  Description of Artificial Sequence: Synthetic oligonucleotide
  Sense strand starting at position 670 of SEQ ID NO: 317198
gucauuguguccuagcacu

SEQ ID NO: 472064 - RNA, 19 nt, Artificial Sequence
  Description of Artificial Sequence: Synthetic oligonucleotide
  Antisense Strand to SEQ ID NO: 472063
agugcuaggacacaaugac

SEQ ID NO: 472065 - RNA, 19 nt, Artificial Sequence
  Description of Artificial Sequence: Synthetic oligonucleotide
  Sense strand starting at position 2362 of SEQ ID NO: 317198
ggguuaagggucgguguua

SEQ ID NO: 472066 - RNA, 19 nt, Artificial Sequence
  Description of Artificial Sequence: Synthetic oligonucleotide
  Antisense Strand to SEQ ID NO: 472065
uaacaccgacccuuaaccc

SEQ ID NO: 472067 - RNA, 19 nt, Artificial Sequence
  Description of Artificial Sequence: Synthetic oligonucleotide
  Sense strand starting at position 2449 of SEQ ID NO: 317198
ggguuagagucaggguuag

SEQ ID NO: 472068 - RNA, 19 nt, Artificial Sequence
  Description of Artificial Sequence: Synthetic oligonucleotide
  Antisense Strand to SEQ ID NO: 472067
cuaacccugacucuaaccc

SEQ ID NO: 472069 - RNA, 19 nt, Artificial Sequence
  Description of Artificial Sequence: Synthetic oligonucleotide
  Sense strand starting at position 2460 of SEQ ID NO: 317198
aggguuaggacuggguuua

SEQ ID NO: 472070 - RNA, 19 nt, Artificial Sequence
  Description of Artificial Sequence: Synthetic oligonucleotide
  Antisense Strand to SEQ ID NO: 472069
uaaacccaguccuaacccu

SEQ ID NO: 472071 - RNA, 19 nt, Artificial Sequence
  Description of Artificial Sequence: Synthetic oligonucleotide
  Sense strand starting at position 2504 of SEQ ID NO: 317198
ggguuaggguuggguuuau

SEQ ID NO: 472072 - RNA, 19 nt, Artificial Sequence
  Description of Artificial Sequence: Synthetic oligonucleotide
  Antisense Strand to SEQ ID NO: 472071
auaaacccaacccuaaccc

SEQ ID NO: 472073 - RNA, 19 nt, Artificial Sequence
  Description of Artificial Sequence: Synthetic oligonucleotide
  Sense strand starting at position 2520 of SEQ ID NO: 317198
uaugguuagggucaggauu

SEQ ID NO: 472074 - RNA, 19 nt, Artificial Sequence
  Description of Artificial Sequence: Synthetic oligonucleotide
  Antisense Strand to SEQ ID NO: 472073
aauccugacccuaaccaua

SEQ ID NO: 472075 - RNA, 19 nt, Artificial Sequence
  Description of Artificial Sequence: Synthetic oligonucleotide
  Sense strand starting at position 2564 of SEQ ID NO: 317198
agggucuggucuaggguua

SEQ ID NO: 472076 - RNA, 19 nt, Artificial Sequence
  Description of Artificial Sequence: Synthetic oligonucleotide
  Antisense Strand to SEQ ID NO: 472075
uaacccuagaccagacccu

SEQ ID NO: 472077 - RNA, 19 nt, Artificial Sequence
  Description of Artificial Sequence: Synthetic oligonucleotide
  Sense strand starting at position 2678 of SEQ ID NO: 317198
uaggguuagggucagcauu

SEQ ID NO: 472078 - RNA, 19 nt, Artificial Sequence
  Description of Artificial Sequence: Synthetic oligonucleotide
  Antisense Strand to SEQ ID NO: 472077
aaugcugacccuaacccua

SEQ ID NO: 472079 - RNA, 19 nt, Artificial Sequence
  Description of Artificial Sequence: Synthetic oligonucleotide
  Sense strand starting at position 2839 of SEQ ID NO: 317198
ggucauguuuaggcuugua

SEQ ID NO: 472080 - RNA, 19 nt, Artificial Sequence
  Description of Artificial Sequence: Synthetic oligonucleotide
  Antisense Strand to SEQ ID NO: 472079
uacaagccuaaacaugacc

SEQ ID NO: 472081 - RNA, 19 nt, Artificial Sequence
  Description of Artificial Sequence: Synthetic oligonucleotide
  Sense strand starting at position 2844 of SEQ ID NO: 317198
uguuuaggcuuguauuuag

SEQ ID NO: 472082 - RNA, 19 nt, Artificial Sequence
  Description of Artificial Sequence: Synthetic oligonucleotide
  Antisense Strand to SEQ ID NO: 472081
cuaaauacaagccuaaaca

SEQ ID NO: 472083 - RNA, 19 nt, Artificial Sequence
  Description of Artificial Sequence: Synthetic oligonucleotide
  Sense strand starting at position 2851 of SEQ ID NO: 317198
gcuuguauuuagguuaugu

SEQ ID NO: 472084 - RNA, 19 nt, Artificial Sequence
  Description of Artificial Sequence: Synthetic oligonucleotide
  Antisense Strand to SEQ ID NO: 472083
acauaaccuaaauacaagc

SEQ ID NO: 472085 - RNA, 19 nt, Artificial Sequence
  Description of Artificial Sequence: Synthetic oligonucleotide
  Sense strand starting at position 3315 of SEQ ID NO: 317198
cgugaagucuagaguugga

SEQ ID NO: 472086 - RNA, 19 nt, Artificial Sequence
  Description of Artificial Sequence: Synthetic oligonucleotide
  Antisense Strand to SEQ ID NO: 472085
uccaacucuagacuucacg

SEQ ID NO: 472087 - RNA, 19 nt, Artificial Sequence
  Description of Artificial Sequence: Synthetic oligonucleotide
  Sense strand starting at position 3442 of SEQ ID NO: 317198
ugcugagaucuccagcacu

SEQ ID NO: 472088 - RNA, 19 nt, Artificial Sequence
  Description of Artificial Sequence: Synthetic oligonucleotide
  Antisense Strand to SEQ ID NO: 472087
agugcuggagaucucagca

SEQ ID NO: 472089 - RNA, 19 nt, Artificial Sequence
  Description of Artificial Sequence: Synthetic oligonucleotide
  Sense strand starting at position 3467 of SEQ ID NO: 317198
acacguuauccggguggga

SEQ ID NO: 472090 - RNA, 19 nt, Artificial Sequence
  Description of Artificial Sequence: Synthetic oligonucleotide
  Antisense Strand to SEQ ID NO: 472089
ucccacccggauaacgugu

SEQ ID NO: 472091 - RNA, 19 nt, Artificial Sequence
  Description of Artificial Sequence: Synthetic oligonucleotide
  Sense strand starting at position 3505 of SEQ ID NO: 317198
ugugaauguguacagcauu

SEQ ID NO: 472092 - RNA, 19 nt, Artificial Sequence
  Description of Artificial Sequence: Synthetic oligonucleotide
  Antisense Strand to SEQ ID NO: 472091
aaugcuguacacauucaca

SEQ ID NO: 472093 - RNA, 19 nt, Artificial Sequence
  Description of Artificial Sequence: Synthetic oligonucleotide
  Sense strand starting at position 3526 of SEQ ID NO: 317198
caggcaugcugcugugaag

SEQ ID NO: 472094 - RNA, 19 nt, Artificial Sequence
  Description of Artificial Sequence: Synthetic oligonucleotide
  Antisense Strand to SEQ ID NO: 472093
cuucacagcagcaugccug

SEQ ID NO: 472095 - RNA, 19 nt, Artificial Sequence
  Description of Artificial Sequence: Synthetic oligonucleotide
  Sense strand starting at position 15 of SEQ ID NO: 317199
agguuuguugugcggauuu

SEQ ID NO: 472096 - RNA, 19 nt, Artificial Sequence
  Description of Artificial Sequence: Synthetic oligonucleotide
  Antisense Strand to SEQ ID NO: 472095
aaauccgcacaacaaaccu

SEQ ID NO: 472097 - RNA, 19 nt, Artificial Sequence
  Description of Artificial Sequence: Synthetic oligonucleotide
  Sense strand starting at position 17 of SEQ ID NO: 317199
guuuguugugcggauuuca

SEQ ID NO: 472098 - RNA, 19 nt, Artificial Sequence
  Description of Artificial Sequence: Synthetic oligonucleotide
  Antisense Strand to SEQ ID NO: 472097
ugaaauccgcacaacaaac

SEQ ID NO: 472099 - RNA, 19 nt, Artificial Sequence
  Description of Artificial Sequence: Synthetic oligonucleotide
  Sense strand starting at position 68 of SEQ ID NO: 317199
uugagaucaaccuggguuu

SEQ ID NO: 472100 - RNA, 19 nt, Artificial Sequence
  Description of Artificial Sequence: Synthetic oligonucleotide
  Antisense Strand to SEQ ID NO: 472099
aaacccagguugaucucaa

SEQ ID NO: 472101 - RNA, 19 nt, Artificial Sequence
  Description of Artificial Sequence: Synthetic oligonucleotide
  Sense strand starting at position 637 of SEQ ID NO: 317199
aggcauuuaccaugccauu

SEQ ID NO: 472102 - RNA, 19 nt, Artificial Sequence
  Description of Artificial Sequence: Synthetic oligonucleotide
  Antisense Strand to SEQ ID NO: 472101
aauggcaugguaaaugccu

SEQ ID NO: 472103 - RNA, 19 nt, Artificial Sequence
  Description of Artificial Sequence: Synthetic oligonucleotide
  Sense strand starting at position 657 of SEQ ID NO: 317199
auaguuauaucugucuucu

SEQ ID NO: 472104 - RNA, 19 nt, Artificial Sequence
  Description of Artificial Sequence: Synthetic oligonucleotide
  Antisense Strand to SEQ ID NO: 472103
agaagacagauauaacuau

SEQ ID NO: 472105 - RNA, 19 nt, Artificial Sequence
  Description of Artificial Sequence: Synthetic oligonucleotide
  Sense strand starting at position 677 of SEQ ID NO: 317199
cuuguucccucauuaguaa

SEQ ID NO: 472106 - RNA, 19 nt, Artificial Sequence
  Description of Artificial Sequence: Synthetic oligonucleotide
  Antisense Strand to SEQ ID NO: 472105
uuacuaaugagggaacaag

SEQ ID NO: 472107 - RNA, 19 nt, Artificial Sequence
  Description of Artificial Sequence: Synthetic oligonucleotide
  Sense strand starting at position 701 of SEQ ID NO: 317199
uagaacagguccguaucua

SEQ ID NO: 472108 - RNA, 19 nt, Artificial Sequence
  Description of Artificial Sequence: Synthetic oligonucleotide
  Antisense Strand to SEQ ID NO: 472107
uagauacggaccuguucua

SEQ ID NO: 472109 - RNA, 19 nt, Artificial Sequence
  Description of Artificial Sequence: Synthetic oligonucleotide
  Sense strand starting at position 702 of SEQ ID NO: 317199
agaacagguccguaucuaa

SEQ ID NO: 472110 - RNA, 19 nt, Artificial Sequence
  Description of Artificial Sequence: Synthetic oligonucleotide
  Antisense Strand to SEQ ID NO: 472109
uuagauacggaccuguucu

SEQ ID NO: 472111 - RNA, 19 nt, Artificial Sequence
  Description of Artificial Sequence: Synthetic oligonucleotide
  Sense strand starting at position 731 of SEQ ID NO: 317199
cugaauaacuggcuguuga

SEQ ID NO: 472112 - RNA, 19 nt, Artificial Sequence
  Description of Artificial Sequence: Synthetic oligonucleotide
  Antisense Strand to SEQ ID NO: 472111
ucaacagccaguuauucag

SEQ ID NO: 472113 - RNA, 19 nt, Artificial Sequence
  Description of Artificial Sequence: Synthetic oligonucleotide
  Sense strand starting at position 732 of SEQ ID NO: 317199
ugaauaacuggcuguugaa

SEQ ID NO: 472114 - RNA, 19 nt, Artificial Sequence
  Description of Artificial Sequence: Synthetic oligonucleotide
  Antisense Strand to SEQ ID NO: 472113
uucaacagccaguuauuca

SEQ ID NO: 472115 - RNA, 19 nt, Artificial Sequence
  Description of Artificial Sequence: Synthetic oligonucleotide
  Sense strand starting at position 833 of SEQ ID NO: 317199
aggacaaaucugcaauguu

SEQ ID NO: 472116 - RNA, 19 nt, Artificial Sequence
  Description of Artificial Sequence: Synthetic oligonucleotide
  Antisense Strand to SEQ ID NO: 472115
aacauugcagauuuguccu

SEQ ID NO: 472117 - RNA, 19 nt, Artificial Sequence
  Description of Artificial Sequence: Synthetic oligonucleotide
  Sense strand starting at position 885 of SEQ ID NO: 317199
ccauuauuagcaugaaagg

SEQ ID NO: 472118 - RNA, 19 nt, Artificial Sequence
  Description of Artificial Sequence: Synthetic oligonucleotide
  Antisense Strand to SEQ ID NO: 472117
ccuuucaugcuaauaaugg

SEQ ID NO: 472119 - RNA, 19 nt, Artificial Sequence
  Description of Artificial Sequence: Synthetic oligonucleotide
  Sense strand starting at position 1045 of SEQ ID NO: 317199
guuucuguaaguuagaaag

SEQ ID NO: 472120 - RNA, 19 nt, Artificial Sequence
  Description of Artificial Sequence: Synthetic oligonucleotide
  Antisense Strand to SEQ ID NO: 472119
cuuucuaacuuacagaaac

SEQ ID NO: 472121 - RNA, 19 nt, Artificial Sequence
  Description of Artificial Sequence: Synthetic oligonucleotide
  Sense strand starting at position 1491 of SEQ ID NO: 317199
agacauaugugacuaguag

SEQ ID NO: 472122 - RNA, 19 nt, Artificial Sequence
  Description of Artificial Sequence: Synthetic oligonucleotide
  Antisense Strand to SEQ ID NO: 472121
cuacuagucacauaugucu

SEQ ID NO: 472123 - RNA, 19 nt, Artificial Sequence
  Description of Artificial Sequence: Synthetic oligonucleotide
  Sense strand starting at position 1556 of SEQ ID NO: 317199
ugaauuacacuugggcuaa

SEQ ID NO: 472124 - RNA, 19 nt, Artificial Sequence
  Description of Artificial Sequence: Synthetic oligonucleotide
  Antisense Strand to SEQ ID NO: 472123
uuagcccaaguguaauuca

SEQ ID NO: 472125 - RNA, 19 nt, Artificial Sequence
  Description of Artificial Sequence: Synthetic oligonucleotide
  Sense strand starting at position 1572 of SEQ ID NO: 317199
uaacguugccgcucuauua

SEQ ID NO: 472126 - RNA, 19 nt, Artificial Sequence
  Description of Artificial Sequence: Synthetic oligonucleotide
  Antisense Strand to SEQ ID NO: 472125
uaauagagcggcaacguua

SEQ ID NO: 472127 - RNA, 19 nt, Artificial Sequence
  Description of Artificial Sequence: Synthetic oligonucleotide
  Sense strand starting at position 1573 of SEQ ID NO: 317199
aacguugccgcucuauuaa

SEQ ID NO: 472128 - RNA, 19 nt, Artificial Sequence
  Description of Artificial Sequence: Synthetic oligonucleotide
  Antisense Strand to SEQ ID NO: 472127
uuaauagagcggcaacguu

SEQ ID NO: 472129 - RNA, 19 nt, Artificial Sequence
  Description of Artificial Sequence: Synthetic oligonucleotide
  Sense strand starting at position 1633 of SEQ ID NO: 317199
ugugaaacacaauacguaa

SEQ ID NO: 472130 - RNA, 19 nt, Artificial Sequence
  Description of Artificial Sequence: Synthetic oligonucleotide
  Antisense Strand to SEQ ID NO: 472129
uuacguauuguguuucaca

SEQ ID NO: 472131 - RNA, 19 nt, Artificial Sequence
  Description of Artificial Sequence: Synthetic oligonucleotide
  Sense strand starting at position 1708 of SEQ ID NO: 317199
ggcguucuccuagaggauu

SEQ ID NO: 472132 - RNA, 19 nt, Artificial Sequence
  Description of Artificial Sequence: Synthetic oligonucleotide
  Antisense Strand to SEQ ID NO: 472131
aauccucuaggagaacgcc

SEQ ID NO: 472133 - RNA, 19 nt, Artificial Sequence
  Description of Artificial Sequence: Synthetic oligonucleotide
  Sense strand starting at position 2014 of SEQ ID NO: 317199
ucgagugaccgccagaaga

SEQ ID NO: 472134 - RNA, 19 nt, Artificial Sequence
  Description of Artificial Sequence: Synthetic oligonucleotide
  Antisense Strand to SEQ ID NO: 472133
ucuucuggcggucacucga

SEQ ID NO: 472135 - RNA, 19 nt, Artificial Sequence
  Description of Artificial Sequence: Synthetic oligonucleotide
  Sense strand starting at position 2113 of SEQ ID NO: 317199
ggaugguuguggguacuga

SEQ ID NO: 472136 - RNA, 19 nt, Artificial Sequence
  Description of Artificial Sequence: Synthetic oligonucleotide
  Antisense Strand to SEQ ID NO: 472135
ucaguacccacaaccaucc

SEQ ID NO: 472137 - RNA, 19 nt, Artificial Sequence
  Description of Artificial Sequence: Synthetic oligonucleotide
  Sense strand starting at position 2335 of SEQ ID NO: 317199
aggcguucuuaaccuggaa

SEQ ID NO: 472138 - RNA, 19 nt, Artificial Sequence
  Description of Artificial Sequence: Synthetic oligonucleotide
  Antisense Strand to SEQ ID NO: 472137
uuccagguuaagaacgccu

SEQ ID NO: 472139 - RNA, 19 nt, Artificial Sequence
  Description of Artificial Sequence: Synthetic oligonucleotide
  Sense strand starting at position 2339 of SEQ ID NO: 317199
guucuuaaccuggaaucca

SEQ ID NO: 472140 - RNA, 19 nt, Artificial Sequence
  Description of Artificial Sequence: Synthetic oligonucleotide
  Antisense Strand to SEQ ID NO: 472139
uggauuccagguuaagaac

SEQ ID NO: 472141 - RNA, 19 nt, Artificial Sequence
  Description of Artificial Sequence: Synthetic oligonucleotide
  Sense strand starting at position 2466 of SEQ ID NO: 317199
aguccuccugucuaagcau

SEQ ID NO: 472142 - RNA, 19 nt, Artificial Sequence
  Description of Artificial Sequence: Synthetic oligonucleotide
  Antisense Strand to SEQ ID NO: 472141
augcuuagacaggaggacu

SEQ ID NO: 472143 - RNA, 19 nt, Artificial Sequence
  Description of Artificial Sequence: Synthetic oligonucleotide
  Sense strand starting at position 2669 of SEQ ID NO: 317199
uacaauguauuuggauaga

SEQ ID NO: 472144 - RNA, 19 nt, Artificial Sequence
  Description of Artificial Sequence: Synthetic oligonucleotide
  Antisense Strand to SEQ ID NO: 472143
ucuauccaaauacauugua

SEQ ID NO: 472145 - RNA, 19 nt, Artificial Sequence
  Description of Artificial Sequence: Synthetic oligonucleotide
  Sense strand starting at position 2716 of SEQ ID NO: 317199
ccaaguguacuacacguaa

SEQ ID NO: 472146 - RNA, 19 nt, Artificial Sequence
  Description of Artificial Sequence: Synthetic oligonucleotide
  Antisense Strand to SEQ ID NO: 472145
uuacguguaguacacuugg

SEQ ID NO: 472147 - RNA, 19 nt, Artificial Sequence
  Description of Artificial Sequence: Synthetic oligonucleotide
  Sense strand starting at position 3197 of SEQ ID NO: 317199
guaggaugccuagacaggu

SEQ ID NO: 472148 - RNA, 19 nt, Artificial Sequence
  Description of Artificial Sequence: Synthetic oligonucleotide
  Antisense Strand to SEQ ID NO: 472147
accugucuaggcauccuac

SEQ ID NO: 472149 - RNA, 19 nt, Artificial Sequence
  Description of Artificial Sequence: Synthetic oligonucleotide
  Sense strand starting at position 3221 of SEQ ID NO: 317199
uuccucuguguuuaaauua

SEQ ID NO: 472150 - RNA, 19 nt, Artificial Sequence
  Description of Artificial Sequence: Synthetic oligonucleotide
  Antisense Strand to SEQ ID NO: 472149
uaauuuaaacacagaggaa

SEQ ID NO: 472151 - RNA, 19 nt, Artificial Sequence
  Description of Artificial Sequence: Synthetic oligonucleotide
  Sense strand starting at position 3246 of SEQ ID NO: 317199
ggauguuuacugggagaug

SEQ ID NO: 472152 - RNA, 19 nt, Artificial Sequence
  Description of Artificial Sequence: Synthetic oligonucleotide
  Antisense Strand to SEQ ID NO: 472151
caucucccaguaaacaucc

SEQ ID NO: 472153 - RNA, 19 nt, Artificial Sequence
  Description of Artificial Sequence: Synthetic oligonucleotide
  Sense strand starting at position 3443 of SEQ ID NO: 317199
cuccuaguagcccauauau

SEQ ID NO: 472154 - RNA, 19 nt, Artificial Sequence
  Description of Artificial Sequence: Synthetic oligonucleotide
  Antisense Strand to SEQ ID NO: 472153
auauaugggcuacuaggag

SEQ ID NO: 472155 - RNA, 19 nt, Artificial Sequence
  Description of Artificial Sequence: Synthetic oligonucleotide
  Sense strand starting at position 3445 of SEQ ID NO: 317199
ccuaguagcccauauauuc

SEQ ID NO: 472156 - RNA, 19 nt, Artificial Sequence
  Description of Artificial Sequence: Synthetic oligonucleotide
  Antisense Strand to SEQ ID NO: 472155
gaauauaugggcuacuagg

SEQ ID NO: 472157 - RNA, 19 nt, Artificial Sequence
  Description of Artificial Sequence: Synthetic oligonucleotide
  Sense strand starting at position 3474 of SEQ ID NO: 317199
guguaugagacaugaaucu

SEQ ID NO: 472158 - RNA, 19 nt, Artificial Sequence
  Description of Artificial Sequence: Synthetic oligonucleotide
  Antisense Strand to SEQ ID NO: 472157
agauucaugucucauacac

SEQ ID NO: 472159 - RNA, 19 nt, Artificial Sequence
  Description of Artificial Sequence: Synthetic oligonucleotide
  Sense strand starting at position 3612 of SEQ ID NO: 317199
accuaugucucucuggauu

SEQ ID NO: 472160 - RNA, 19 nt, Artificial Sequence
  Description of Artificial Sequence: Synthetic oligonucleotide
  Antisense Strand to SEQ ID NO: 472159
aauccagagagacauaggu

SEQ ID NO: 472161 - RNA, 19 nt, Artificial Sequence
  Description of Artificial Sequence: Synthetic oligonucleotide
  Sense strand starting at position 3644 of SEQ ID NO: 317199
gggaacugcugauuaaauu

SEQ ID NO: 472162 - RNA, 19 nt, Artificial Sequence
  Description of Artificial Sequence: Synthetic oligonucleotide
  Antisense Strand to SEQ ID NO: 472161
aauuuaaucagcaguuccc

SEQ ID NO: 472163 - RNA, 19 nt, Artificial Sequence
  Description of Artificial Sequence: Synthetic oligonucleotide
  Sense strand starting at position 3705 of SEQ ID NO: 317199
ggaaguacugugcacagaa

SEQ ID NO: 472164 - RNA, 19 nt, Artificial Sequence
  Description of Artificial Sequence: Synthetic oligonucleotide
  Antisense Strand to SEQ ID NO: 472163
uucugugcacaguacuucc

SEQ ID NO: 472165 - RNA, 19 nt, Artificial Sequence
  Description of Artificial Sequence: Synthetic oligonucleotide
  Sense strand starting at position 3893 of SEQ ID NO: 317199
ucaggaacuuuguuaguaa

SEQ ID NO: 472166 - RNA, 19 nt, Artificial Sequence
  Description of Artificial Sequence: Synthetic oligonucleotide
  Antisense Strand to SEQ ID NO: 472165
uuacuaacaaaguuccuga

SEQ ID NO: 472167 - RNA, 19 nt, Artificial Sequence
  Description of Artificial Sequence: Synthetic oligonucleotide
  Sense strand starting at position 3914 of SEQ ID NO: 317199
gguguaacuuaagcuauaa

SEQ ID NO: 472168 - RNA, 19 nt, Artificial Sequence
  Description of Artificial Sequence: Synthetic oligonucleotide
  Antisense Strand to SEQ ID NO: 472167
uuauagcuuaaguuacacc

SEQ ID NO: 472169 - RNA, 19 nt, Artificial Sequence
  Description of Artificial Sequence: Synthetic oligonucleotide
  Sense strand starting at position 3964 of SEQ ID NO: 317199
guuagauacucugcucuga

SEQ ID NO: 472170 - RNA, 19 nt, Artificial Sequence
  Description of Artificial Sequence: Synthetic oligonucleotide
  Antisense Strand to SEQ ID NO: 472169
ucagagcagaguaucuaac

SEQ ID NO: 472171 - RNA, 19 nt, Artificial Sequence
  Description of Artificial Sequence: Synthetic oligonucleotide
  Sense strand starting at position 3978 of SEQ ID NO: 317199
ucugaagaaugucuguaua

SEQ ID NO: 472172 - RNA, 19 nt, Artificial Sequence
  Description of Artificial Sequence: Synthetic oligonucleotide
  Antisense Strand to SEQ ID NO: 472171
uauacagacauucuucaga

SEQ ID NO: 472173 - RNA, 19 nt, Artificial Sequence
  Description of Artificial Sequence: Synthetic oligonucleotide
  Sense strand starting at position 3980 of SEQ ID NO: 317199
ugaagaaugucuguauaga

SEQ ID NO: 472174 - RNA, 19 nt, Artificial Sequence
  Description of Artificial Sequence: Synthetic oligonucleotide
  Antisense Strand to SEQ ID NO: 472173
ucuauacagacauucuuca

SEQ ID NO: 472175 - RNA, 19 nt, Artificial Sequence
  Description of Artificial Sequence: Synthetic oligonucleotide
  Sense strand starting at position 10 of SEQ ID NO: 317200
aagauuaaucccggagccu

SEQ ID NO: 472176 - RNA, 19 nt, Artificial Sequence
  Description of Artificial Sequence: Synthetic oligonucleotide
  Antisense Strand to SEQ ID NO: 472175
aggcuccgggauuaaucuu

SEQ ID NO: 472177 - RNA, 19 nt, Artificial Sequence
  Description of Artificial Sequence: Synthetic oligonucleotide
  Sense strand starting at position 11 of SEQ ID NO: 317200
agauuaaucccggagccuu

SEQ ID NO: 472178 - RNA, 19 nt, Artificial Sequence
  Description of Artificial Sequence: Synthetic oligonucleotide
  Antisense Strand to SEQ ID NO: 472177
aaggcuccgggauuaaucu

SEQ ID NO: 472179 - RNA, 19 nt, Artificial Sequence
  Description of Artificial Sequence: Synthetic oligonucleotide
  Sense strand starting at position 46 of SEQ ID NO: 317200
cccugaaagugacuaaauu

SEQ ID NO: 472180 - RNA, 19 nt, Artificial Sequence
  Description of Artificial Sequence: Synthetic oligonucleotide
  Antisense Strand to SEQ ID NO: 472179
aauuuagucacuuucaggg

SEQ ID NO: 472181 - RNA, 19 nt, Artificial Sequence
  Description of Artificial Sequence: Synthetic oligonucleotide
  Sense strand starting at position 74 of SEQ ID NO: 317200
ucuggauguuccuuaggaa

SEQ ID NO: 472182 - RNA, 19 nt, Artificial Sequence
  Description of Artificial Sequence: Synthetic oligonucleotide
  Antisense Strand to SEQ ID NO: 472181
uuccuaaggaacauccaga

SEQ ID NO: 472183 - RNA, 19 nt, Artificial Sequence
  Description of Artificial Sequence: Synthetic oligonucleotide
  Sense strand starting at position 754 of SEQ ID NO: 317200
gcaucaauuccucaggcuu

SEQ ID NO: 472184 - RNA, 19 nt, Artificial Sequence
  Description of Artificial Sequence: Synthetic oligonucleotide
  Antisense Strand to SEQ ID NO: 472183
aagccugaggaauugaugc

SEQ ID NO: 472185 - RNA, 19 nt, Artificial Sequence
  Description of Artificial Sequence: Synthetic oligonucleotide
  Sense strand starting at position 1329 of SEQ ID NO: 317200
cucagaaacuguuuggguu

SEQ ID NO: 472186 - RNA, 19 nt, Artificial Sequence
  Description of Artificial Sequence: Synthetic oligonucleotide
  Antisense Strand to SEQ ID NO: 472185
aacccaaacaguuucugag

SEQ ID NO: 472187 - RNA, 19 nt, Artificial Sequence
  Description of Artificial Sequence: Synthetic oligonucleotide
  Sense strand starting at position 1330 of SEQ ID NO: 317200
ucagaaacuguuuggguuu

SEQ ID NO: 472188 - RNA, 19 nt, Artificial Sequence
  Description of Artificial Sequence: Synthetic oligonucleotide
  Antisense Strand to SEQ ID NO: 472187
aaacccaaacaguuucuga

SEQ ID NO: 472189 - RNA, 19 nt, Artificial Sequence
  Description of Artificial Sequence: Synthetic oligonucleotide
  Sense strand starting at position 1404 of SEQ ID NO: 317200
ugagcacggauguaugaaa

SEQ ID NO: 472190 - RNA, 19 nt, Artificial Sequence
  Description of Artificial Sequence: Synthetic oligonucleotide
  Antisense Strand to SEQ ID NO: 472189
uuucauacauccgugcuca

SEQ ID NO: 472191 - RNA, 19 nt, Artificial Sequence
  Description of Artificial Sequence: Synthetic oligonucleotide
  Sense strand starting at position 1497 of SEQ ID NO: 317200
gaacuuugugagcaaguug

SEQ ID NO: 472192 - RNA, 19 nt, Artificial Sequence
  Description of Artificial Sequence: Synthetic oligonucleotide
  Antisense Strand to SEQ ID NO: 472191
caacuugcucacaaaguuc

SEQ ID NO: 472193 - RNA, 19 nt, Artificial Sequence
  Description of Artificial Sequence: Synthetic oligonucleotide
  Sense strand starting at position 1540 of SEQ ID NO: 317200
ucgacugugcucgcuuaga

SEQ ID NO: 472194 - RNA, 19 nt, Artificial Sequence
  Description of Artificial Sequence: Synthetic oligonucleotide
  Antisense Strand to SEQ ID NO: 472193
ucuaagcgagcacagucga

SEQ ID NO: 472195 - RNA, 19 nt, Artificial Sequence
  Description of Artificial Sequence: Synthetic oligonucleotide
  Sense strand starting at position 1542 of SEQ ID NO: 317200
gacugugcucgcuuagagu

SEQ ID NO: 472196 - RNA, 19 nt, Artificial Sequence
  Description of Artificial Sequence: Synthetic oligonucleotide
  Antisense Strand to SEQ ID NO: 472195
acucuaagcgagcacaguc

SEQ ID NO: 472197 - RNA, 19 nt, Artificial Sequence
  Description of Artificial Sequence: Synthetic oligonucleotide
  Sense strand starting at position 1900 of SEQ ID NO: 317200
ggguccgucccucagaaga

SEQ ID NO: 472198 - RNA, 19 nt, Artificial Sequence
  Description of Artificial Sequence: Synthetic oligonucleotide
  Antisense Strand to SEQ ID NO: 472197
ucuucugagggacggaccc

SEQ ID NO: 472199 - RNA, 19 nt, Artificial Sequence
  Description of Artificial Sequence: Synthetic oligonucleotide
  Sense strand starting at position 2528 of SEQ ID NO: 317200
gugugcuagcaagagagau

SEQ ID NO: 472200 - RNA, 19 nt, Artificial Sequence
  Description of Artificial Sequence: Synthetic oligonucleotide
  Antisense Strand to SEQ ID NO: 472199
aucucucuugcuagcacac

SEQ ID NO: 472201 - RNA, 19 nt, Artificial Sequence
  Description of Artificial Sequence: Synthetic oligonucleotide
  Sense strand starting at position 2542 of SEQ ID NO: 317200
gagauuugcagguguaggu

SEQ ID NO: 472202 - RNA, 19 nt, Artificial Sequence
  Description of Artificial Sequence: Synthetic oligonucleotide
  Antisense Strand to SEQ ID NO: 472201
accuacaccugcaaaucuc

SEQ ID NO: 472203 - RNA, 19 nt, Artificial Sequence
  Description of Artificial Sequence: Synthetic oligonucleotide
  Sense strand starting at position 2654 of SEQ ID NO: 317200
ccuuaugcauaacuggaaa

SEQ ID NO: 472204 - RNA, 19 nt, Artificial Sequence
  Description of Artificial Sequence: Synthetic oligonucleotide
  Antisense Strand to SEQ ID NO: 472203
uuuccaguuaugcauaagg

SEQ ID NO: 472205 - RNA, 19 nt, Artificial Sequence
  Description of Artificial Sequence: Synthetic oligonucleotide
  Sense strand starting at position 2741 of SEQ ID NO: 317200
agggcaccucuguacaauu

SEQ ID NO: 472206 - RNA, 19 nt, Artificial Sequence
  Description of Artificial Sequence: Synthetic oligonucleotide
  Antisense Strand to SEQ ID NO: 472205
aauuguacagaggugcccu

SEQ ID NO: 472207 - RNA, 19 nt, Artificial Sequence
  Description of Artificial Sequence: Synthetic oligonucleotide
  Sense strand starting at position 2755 of SEQ ID NO: 317200
caauuagguuaauccgaga

SEQ ID NO: 472208 - RNA, 19 nt, Artificial Sequence
  Description of Artificial Sequence: Synthetic oligonucleotide
  Antisense Strand to SEQ ID NO: 472207
ucucggauuaaccuaauug

SEQ ID NO: 472209 - RNA, 19 nt, Artificial Sequence
  Description of Artificial Sequence: Synthetic oligonucleotide
  Sense strand starting at position 2760 of SEQ ID NO: 317200
agguuaauccgagagcacu

SEQ ID NO: 472210 - RNA, 19 nt, Artificial Sequence
  Description of Artificial Sequence: Synthetic oligonucleotide
  Antisense Strand to SEQ ID NO: 472209
agugcucucggauuaaccu

SEQ ID NO: 472211 - RNA, 19 nt, Artificial Sequence
  Description of Artificial Sequence: Synthetic oligonucleotide
  Sense strand starting at position 2802 of SEQ ID NO: 317200
ggcaaccaguuaucccaau

SEQ ID NO: 472212 - RNA, 19 nt, Artificial Sequence
  Description of Artificial Sequence: Synthetic oligonucleotide
  Antisense Strand to SEQ ID NO: 472211
auugggauaacugguugcc

SEQ ID NO: 472213 - RNA, 19 nt, Artificial Sequence
  Description of Artificial Sequence: Synthetic oligonucleotide
  Sense strand starting at position 3038 of SEQ ID NO: 317200
ucuggaauuauggguugca

SEQ ID NO: 472214 - RNA, 19 nt, Artificial Sequence
  Description of Artificial Sequence: Synthetic oligonucleotide
  Antisense Strand to SEQ ID NO: 472213
ugcaacccauaauuccaga

SEQ ID NO: 472215 - RNA, 19 nt, Artificial Sequence
  Description of Artificial Sequence: Synthetic oligonucleotide
  Sense strand starting at position 3041 of SEQ ID NO: 317200
ggaauuauggguugcacaa

SEQ ID NO: 472216 - RNA, 19 nt, Artificial Sequence
  Description of Artificial Sequence: Synthetic oligonucleotide
  Antisense Strand to SEQ ID NO: 472215
uugugcaacccauaauucc

SEQ ID NO: 472217 - RNA, 19 nt, Artificial Sequence
  Description of Artificial Sequence: Synthetic oligonucleotide
  Sense strand starting at position 3052 of SEQ ID NO: 317200
uugcacaaugugugaauga

SEQ ID NO: 472218 - RNA, 19 nt, Artificial Sequence
  Description of Artificial Sequence: Synthetic oligonucleotide
  Antisense Strand to SEQ ID NO: 472217
ucauucacacauugugcaa

SEQ ID NO: 472219 - RNA, 19 nt, Artificial Sequence
  Description of Artificial Sequence: Synthetic oligonucleotide
  Sense strand starting at position 3065 of SEQ ID NO: 317200
gaaugacaccauuagcagu

SEQ ID NO: 472220 - RNA, 19 nt, Artificial Sequence
  Description of Artificial Sequence: Synthetic oligonucleotide
  Antisense Strand to SEQ ID NO: 472219
acugcuaauggugucauuc

SEQ ID NO: 472221 - RNA, 19 nt, Artificial Sequence
  Description of Artificial Sequence: Synthetic oligonucleotide
  Sense strand starting at position 3131 of SEQ ID NO: 317200
cuaaauacucuuggcaaga

SEQ ID NO: 472222 - RNA, 19 nt, Artificial Sequence
  Description of Artificial Sequence: Synthetic oligonucleotide
  Antisense Strand to SEQ ID NO: 472221
ucuugccaagaguauuuag

SEQ ID NO: 472223 - RNA, 19 nt, Artificial Sequence
  Description of Artificial Sequence: Synthetic oligonucleotide
  Sense strand starting at position 3334 of SEQ ID NO: 317200
caaucaaagcaguagagua

SEQ ID NO: 472224 - RNA, 19 nt, Artificial Sequence
  Description of Artificial Sequence: Synthetic oligonucleotide
  Antisense Strand to SEQ ID NO: 472223
uacucuacugcuuugauug

SEQ ID NO: 472225 - RNA, 19 nt, Artificial Sequence
  Description of Artificial Sequence: Synthetic oligonucleotide
  Sense strand starting at position 3341 of SEQ ID NO: 317200
agcaguagaguaugaacua

SEQ ID NO: 472226 - RNA, 19 nt, Artificial Sequence
  Description of Artificial Sequence: Synthetic oligonucleotide
  Antisense Strand to SEQ ID NO: 472225
uaguucauacucuacugcu

SEQ ID NO: 472227 - RNA, 19 nt, Artificial Sequence
  Description of Artificial Sequence: Synthetic oligonucleotide
  Sense strand starting at position 3350 of SEQ ID NO: 317200
guaugaacuaaugggugau

SEQ ID NO: 472228 - RNA, 19 nt, Artificial Sequence
  Description of Artificial Sequence: Synthetic oligonucleotide
  Antisense Strand to SEQ ID NO: 472227
aucacccauuaguucauac

SEQ ID NO: 472229 - RNA, 19 nt, Artificial Sequence
  Description of Artificial Sequence: Synthetic oligonucleotide
  Sense strand starting at position 3390 of SEQ ID NO: 317200
ugagaauucucuccuaaug

SEQ ID NO: 472230 - RNA, 19 nt, Artificial Sequence
  Description of Artificial Sequence: Synthetic oligonucleotide
  Antisense Strand to SEQ ID NO: 472229
cauuaggagagaauucuca

SEQ ID NO: 472231 - RNA, 19 nt, Artificial Sequence
  Description of Artificial Sequence: Synthetic oligonucleotide
  Sense strand starting at position 3402 of SEQ ID NO: 317200
ccuaauguguuacuaugau

SEQ ID NO: 472232 - RNA, 19 nt, Artificial Sequence
  Description of Artificial Sequence: Synthetic oligonucleotide
  Antisense Strand to SEQ ID NO: 472231
aucauaguaacacauuagg

SEQ ID NO: 472233 - RNA, 19 nt, Artificial Sequence
  Description of Artificial Sequence: Synthetic oligonucleotide
  Sense strand starting at position 3414 of SEQ ID NO: 317200
cuaugauagugauuauagu

SEQ ID NO: 472234 - RNA, 19 nt, Artificial Sequence
  Description of Artificial Sequence: Synthetic oligonucleotide
  Antisense Strand to SEQ ID NO: 472233
acuauaaucacuaucauag

SEQ ID NO: 472235 - RNA, 19 nt, Artificial Sequence
  Description of Artificial Sequence: Synthetic oligonucleotide
  Sense strand starting at position 3423 of SEQ ID NO: 317200
ugauuauagugcucaugga

SEQ ID NO: 472236 - RNA, 19 nt, Artificial Sequence
  Description of Artificial Sequence: Synthetic oligonucleotide
  Antisense Strand to SEQ ID NO: 472235
uccaugagcacuauaauca

SEQ ID NO: 472237 - RNA, 19 nt, Artificial Sequence
  Description of Artificial Sequence: Synthetic oligonucleotide
  Sense strand starting at position 3424 of SEQ ID NO: 317200
gauuauagugcucauggaa

SEQ ID NO: 472238 - RNA, 19 nt, Artificial Sequence
  Description of Artificial Sequence: Synthetic oligonucleotide
  Antisense Strand to SEQ ID NO: 472237
uuccaugagcacuauaauc

SEQ ID NO: 472239 - RNA, 19 nt, Artificial Sequence
  Description of Artificial Sequence: Synthetic oligonucleotide
  Sense strand starting at position 3427 of SEQ ID NO: 317200
uauagugcucauggaauac

SEQ ID NO: 472240 - RNA, 19 nt, Artificial Sequence
  Description of Artificial Sequence: Synthetic oligonucleotide
  Antisense Strand to SEQ ID NO: 472239
guauuccaugagcacuaua

SEQ ID NO: 472241 - RNA, 19 nt, Artificial Sequence
  Description of Artificial Sequence: Synthetic oligonucleotide
  Sense strand starting at position 3513 of SEQ ID NO: 317200
ugaacaucacaguguacua

SEQ ID NO: 472242 - RNA, 19 nt, Artificial Sequence
  Description of Artificial Sequence: Synthetic oligonucleotide
  Antisense Strand to SEQ ID NO: 472241
uaguacacugugauguuca

SEQ ID NO: 472243 - RNA, 19 nt, Artificial Sequence
  Description of Artificial Sequence: Synthetic oligonucleotide
  Sense strand starting at position 3743 of SEQ ID NO: 317200
ggcacauuacuguggaaag

SEQ ID NO: 472244 - RNA, 19 nt, Artificial Sequence
  Description of Artificial Sequence: Synthetic oligonucleotide
  Antisense Strand to SEQ ID NO: 472243
cuuuccacaguaaugugcc

SEQ ID NO: 472245 - RNA, 19 nt, Artificial Sequence
  Description of Artificial Sequence: Synthetic oligonucleotide
  Sense strand starting at position 3753 of SEQ ID NO: 317200
uguggaaaguuucuccuca

SEQ ID NO: 472246 - RNA, 19 nt, Artificial Sequence
  Description of Artificial Sequence: Synthetic oligonucleotide
  Antisense Strand to SEQ ID NO: 472245
ugaggagaaacuuuccaca

SEQ ID NO: 472247 - RNA, 19 nt, Artificial Sequence
  Description of Artificial Sequence: Synthetic oligonucleotide
  Sense strand starting at position 3755 of SEQ ID NO: 317200
uggaaaguuucuccucagu

SEQ ID NO: 472248 - RNA, 19 nt, Artificial Sequence
  Description of Artificial Sequence: Synthetic oligonucleotide
  Antisense Strand to SEQ ID NO: 472247
acugaggagaaacuuucca

SEQ ID NO: 472249 - RNA, 19 nt, Artificial Sequence
  Description of Artificial Sequence: Synthetic oligonucleotide
  Sense strand starting at position 3814 of SEQ ID NO: 317200
ggagaucaaucguaauuua

SEQ ID NO: 472250 - RNA, 19 nt, Artificial Sequence
  Description of Artificial Sequence: Synthetic oligonucleotide
  Antisense Strand to SEQ ID NO: 472249
uaaauuacgauugaucucc

SEQ ID NO: 472251 - RNA, 19 nt, Artificial Sequence
  Description of Artificial Sequence: Synthetic oligonucleotide
  Sense strand starting at position 3869 of SEQ ID NO: 317200
gggcuugaauuauuugcuu

SEQ ID NO: 472252 - RNA, 19 nt, Artificial Sequence
  Description of Artificial Sequence: Synthetic oligonucleotide
  Antisense Strand to SEQ ID NO: 472251
aagcaaauaauucaagccc

SEQ ID NO: 472253 - RNA, 19 nt, Artificial Sequence
  Description of Artificial Sequence: Synthetic oligonucleotide
  Sense strand starting at position 3887 of SEQ ID NO: 317200
uuuguuggauacuugauua

SEQ ID NO: 472254 - RNA, 19 nt, Artificial Sequence
  Description of Artificial Sequence: Synthetic oligonucleotide
  Antisense Strand to SEQ ID NO: 472253
uaaucaaguauccaacaaa

SEQ ID NO: 472255 - RNA, 19 nt, Artificial Sequence
  Description of Artificial Sequence: Synthetic oligonucleotide
  Sense strand starting at position 35 of SEQ ID NO: 317201
guagcucucuacuugaaga

SEQ ID NO: 472256 - RNA, 19 nt, Artificial Sequence
  Description of Artificial Sequence: Synthetic oligonucleotide
  Antisense Strand to SEQ ID NO: 472255
ucuucaaguagagagcuac

SEQ ID NO: 472257 - RNA, 19 nt, Artificial Sequence
  Description of Artificial Sequence: Synthetic oligonucleotide
  Sense strand starting at position 45 of SEQ ID NO: 317201
acuugaagacagugauagu

SEQ ID NO: 472258 - RNA, 19 nt, Artificial Sequence
  Description of Artificial Sequence: Synthetic oligonucleotide
  Antisense Strand to SEQ ID NO: 472257
acuaucacugucuucaagu

SEQ ID NO: 472259 - RNA, 19 nt, Artificial Sequence
  Description of Artificial Sequence: Synthetic oligonucleotide
  Sense strand starting at position 113 of SEQ ID NO: 317201
acagguguuugagaauuua

SEQ ID NO: 472260 - RNA, 19 nt, Artificial Sequence
  Description of Artificial Sequence: Synthetic oligonucleotide
  Antisense Strand to SEQ ID NO: 472259
uaaauucucaaacaccugu

SEQ ID NO: 472261 - RNA, 19 nt, Artificial Sequence
  Description of Artificial Sequence: Synthetic oligonucleotide
  Sense strand starting at position 135 of SEQ ID NO: 317201
augccagaaccuugauguu

SEQ ID NO: 472262 - RNA, 19 nt, Artificial Sequence
  Description of Artificial Sequence: Synthetic oligonucleotide
  Antisense Strand to SEQ ID NO: 472261
aacaucaagguucuggcau

SEQ ID NO: 472263 - RNA, 19 nt, Artificial Sequence
  Description of Artificial Sequence: Synthetic oligonucleotide
  Sense strand starting at position 159 of SEQ ID NO: 317201
acuaccauugaguguagau

SEQ ID NO: 472264 - RNA, 19 nt, Artificial Sequence
  Description of Artificial Sequence: Synthetic oligonucleotide
  Antisense Strand to SEQ ID NO: 472263
aucuacacucaaugguagu

SEQ ID NO: 472265 - RNA, 19 nt, Artificial Sequence
  Description of Artificial Sequence: Synthetic oligonucleotide
  Sense strand starting at position 161 of SEQ ID NO: 317201
uaccauugaguguagauca

SEQ ID NO: 472266 - RNA, 19 nt, Artificial Sequence
  Description of Artificial Sequence: Synthetic oligonucleotide
  Antisense Strand to SEQ ID NO: 472265
ugaucuacacucaauggua

SEQ ID NO: 472267 - RNA, 19 nt, Artificial Sequence
  Description of Artificial Sequence: Synthetic oligonucleotide
  Sense strand starting at position 211 of SEQ ID NO: 317201
augaaugucgaaugacaac

SEQ ID NO: 472268 - RNA, 19 nt, Artificial Sequence
  Description of Artificial Sequence: Synthetic oligonucleotide
  Antisense Strand to SEQ ID NO: 472267
guugucauucgacauucau

SEQ ID NO: 472269 - RNA, 19 nt, Artificial Sequence
  Description of Artificial Sequence: Synthetic oligonucleotide
  Sense strand starting at position 277 of SEQ ID NO: 317201
auggacgaucugggugaau

SEQ ID NO: 472270 - RNA, 19 nt, Artificial Sequence
  Description of Artificial Sequence: Synthetic oligonucleotide
  Antisense Strand to SEQ ID NO: 472269
auucacccagaucguccau

SEQ ID NO: 472271 - RNA, 19 nt, Artificial Sequence
  Description of Artificial Sequence: Synthetic oligonucleotide
  Sense strand starting at position 279 of SEQ ID NO: 317201
ggacgaucugggugaauau

SEQ ID NO: 472272 - RNA, 19 nt, Artificial Sequence
  Description of Artificial Sequence: Synthetic oligonucleotide
  Antisense Strand to SEQ ID NO: 472271
auauucacccagaucgucc

SEQ ID NO: 472273 - RNA, 19 nt, Artificial Sequence
  Description of Artificial Sequence: Synthetic oligonucleotide
  Sense strand starting at position 323 of SEQ ID NO: 317201
gccgcaugcaucuacagaa

SEQ ID NO: 472274 - RNA, 19 nt, Artificial Sequence
  Description of Artificial Sequence: Synthetic oligonucleotide
  Antisense Strand to SEQ ID NO: 472273
uucuguagaugcaugcggc

SEQ ID NO: 472275 - RNA, 19 nt, Artificial Sequence
  Description of Artificial Sequence: Synthetic oligonucleotide
  Sense strand starting at position 420 of SEQ ID NO: 317201
aaaguaaugugagcuccua

SEQ ID NO: 472276 - RNA, 19 nt, Artificial Sequence
  Description of Artificial Sequence: Synthetic oligonucleotide
  Antisense Strand to SEQ ID NO: 472275
uaggagcucacauuacuuu

SEQ ID NO: 472277 - RNA, 19 nt, Artificial Sequence
  Description of Artificial Sequence: Synthetic oligonucleotide
  Sense strand starting at position 473 of SEQ ID NO: 317201
aaacguaugcaauaaguuu

SEQ ID NO: 472278 - RNA, 19 nt, Artificial Sequence
  Description of Artificial Sequence: Synthetic oligonucleotide
  Antisense Strand to SEQ ID NO: 472277
aaacuuauugcauacguuu

SEQ ID NO: 472279 - RNA, 19 nt, Artificial Sequence
  Description of Artificial Sequence: Synthetic oligonucleotide
  Sense strand starting at position 656 of SEQ ID NO: 317201
agguuauauucuuuacucu

SEQ ID NO: 472280 - RNA, 19 nt, Artificial Sequence
  Description of Artificial Sequence: Synthetic oligonucleotide
  Antisense Strand to SEQ ID NO: 472279
agaguaaagaauauaaccu

SEQ ID NO: 472281 - RNA, 19 nt, Artificial Sequence
  Description of Artificial Sequence: Synthetic oligonucleotide
  Sense strand starting at position 887 of SEQ ID NO: 317201
agccucagaugaucuaaau

SEQ ID NO: 472282 - RNA, 19 nt, Artificial Sequence
  Description of Artificial Sequence: Synthetic oligonucleotide
  Antisense Strand to SEQ ID NO: 472281
auuuagaucaucugaggcu

SEQ ID NO: 472283 - RNA, 19 nt, Artificial Sequence
  Description of Artificial Sequence: Synthetic oligonucleotide
  Sense strand starting at position 908 of SEQ ID NO: 317201
uacagugagcaugguaaau

SEQ ID NO: 472284 - RNA, 19 nt, Artificial Sequence
  Description of Artificial Sequence: Synthetic oligonucleotide
  Antisense Strand to SEQ ID NO: 472283
auuuaccaugcucacugua

SEQ ID NO: 472285 - RNA, 19 nt, Artificial Sequence
  Description of Artificial Sequence: Synthetic oligonucleotide
  Sense strand starting at position 917 of SEQ ID NO: 317201
caugguaaauuugagaaau

SEQ ID NO: 472286 - RNA, 19 nt, Artificial Sequence
  Description of Artificial Sequence: Synthetic oligonucleotide
  Antisense Strand to SEQ ID NO: 472285
auuucucaaauuuaccaug

SEQ ID NO: 472287 - RNA, 19 nt, Artificial Sequence
  Description of Artificial Sequence: Synthetic oligonucleotide
  Sense strand starting at position 919 of SEQ ID NO: 317201
ugguaaauuugagaaauag

SEQ ID NO: 472288 - RNA, 19 nt, Artificial Sequence
  Description of Artificial Sequence: Synthetic oligonucleotide
  Antisense Strand to SEQ ID NO: 472287
cuauuucucaaauuuacca

SEQ ID NO: 472289 - RNA, 19 nt, Artificial Sequence
  Description of Artificial Sequence: Synthetic oligonucleotide
  Sense strand starting at position 946 of SEQ ID NO: 317201
uccuaugcugcuugggaga

SEQ ID NO: 472290 - RNA, 19 nt, Artificial Sequence
  Description of Artificial Sequence: Synthetic oligonucleotide
  Antisense Strand to SEQ ID NO: 472289
ucucccaagcagcauagga

SEQ ID NO: 472291 - RNA, 19 nt, Artificial Sequence
  Description of Artificial Sequence: Synthetic oligonucleotide
  Sense strand starting at position 1037 of SEQ ID NO: 317201
aaguguugguagguucuga

SEQ ID NO: 472292 - RNA, 19 nt, Artificial Sequence
  Description of Artificial Sequence: Synthetic oligonucleotide
  Antisense Strand to SEQ ID NO: 472291
ucagaaccuaccaacacuu

SEQ ID NO: 472293 - RNA, 19 nt, Artificial Sequence
  Description of Artificial Sequence: Synthetic oligonucleotide
  Sense strand starting at position 1099 of SEQ ID NO: 317201
agccaucccuaguuuacau

SEQ ID NO: 472294 - RNA, 19 nt, Artificial Sequence
  Description of Artificial Sequence: Synthetic oligonucleotide
  Antisense Strand to SEQ ID NO: 472293
auguaaacuagggauggcu

SEQ ID NO: 472295 - RNA, 19 nt, Artificial Sequence
  Description of Artificial Sequence: Synthetic oligonucleotide
  Sense strand starting at position 1147 of SEQ ID NO: 317201
ggacauuuaugcugauuua

SEQ ID NO: 472296 - RNA, 19 nt, Artificial Sequence
  Description of Artificial Sequence: Synthetic oligonucleotide
  Antisense Strand to SEQ ID NO: 472295
uaaaucagcauaaaugucc

SEQ ID NO: 472297 - RNA, 19 nt, Artificial Sequence
  Description of Artificial Sequence: Synthetic oligonucleotide
  Sense strand starting at position 1379 of SEQ ID NO: 317201
acagcaaccgaucauucua

SEQ ID NO: 472298 - RNA, 19 nt, Artificial Sequence
  Description of Artificial Sequence: Synthetic oligonucleotide
  Antisense Strand to SEQ ID NO: 472297
uagaaugaucgguugcugu

SEQ ID NO: 472299 - RNA, 19 nt, Artificial Sequence
  Description of Artificial Sequence: Synthetic oligonucleotide
  Sense strand starting at position 1522 of SEQ ID NO: 317201
aaagaagggcuggguuauu

SEQ ID NO: 472300 - RNA, 19 nt, Artificial Sequence
  Description of Artificial Sequence: Synthetic oligonucleotide
  Antisense Strand to SEQ ID NO: 472299
aauaacccagcccuucuuu

SEQ ID NO: 472301 - RNA, 19 nt, Artificial Sequence
  Description of Artificial Sequence: Synthetic oligonucleotide
  Sense strand starting at position 1527 of SEQ ID NO: 317201
agggcuggguuauuaaauu

SEQ ID NO: 472302 - RNA, 19 nt, Artificial Sequence
  Description of Artificial Sequence: Synthetic oligonucleotide
  Antisense Strand to SEQ ID NO: 472301
aauuuaauaacccagcccu

SEQ ID NO: 472303 - RNA, 19 nt, Artificial Sequence
  Description of Artificial Sequence: Synthetic oligonucleotide
  Sense strand starting at position 1549 of SEQ ID NO: 317201
aagauuaaucccggagccu

SEQ ID NO: 472304 - RNA, 19 nt, Artificial Sequence
  Description of Artificial Sequence: Synthetic oligonucleotide
  Antisense Strand to SEQ ID NO: 472303
aggcuccgggauuaaucuu

SEQ ID NO: 472305 - RNA, 19 nt, Artificial Sequence
  Description of Artificial Sequence: Synthetic oligonucleotide
  Sense strand starting at position 1550 of SEQ ID NO: 317201
agauuaaucccggagccuu

SEQ ID NO: 472306 - RNA, 19 nt, Artificial Sequence
  Description of Artificial Sequence: Synthetic oligonucleotide
  Antisense Strand to SEQ ID NO: 472305
aaggcuccgggauuaaucu

SEQ ID NO: 472307 - RNA, 19 nt, Artificial Sequence
  Description of Artificial Sequence: Synthetic oligonucleotide
  Sense strand starting at position 1585 of SEQ ID NO: 317201
cccugaaagugacuaaauu

SEQ ID NO: 472308 - RNA, 19 nt, Artificial Sequence
  Description of Artificial Sequence: Synthetic oligonucleotide
  Antisense Strand to SEQ ID NO: 472307
aauuuagucacuuucaggg

SEQ ID NO: 472309 - RNA, 19 nt, Artificial Sequence
  Description of Artificial Sequence: Synthetic oligonucleotide
  Sense strand starting at position 1613 of SEQ ID NO: 317201
ucuggauguuccuuaggaa

SEQ ID NO: 472310 - RNA, 19 nt, Artificial Sequence
  Description of Artificial Sequence: Synthetic oligonucleotide
  Antisense Strand to SEQ ID NO: 472309
uuccuaaggaacauccaga

SEQ ID NO: 472311 - RNA, 19 nt, Artificial Sequence
  Description of Artificial Sequence: Synthetic oligonucleotide
  Sense strand starting at position 2293 of SEQ ID NO: 317201
gcaucaauuccucaggcuu

SEQ ID NO: 472312 - RNA, 19 nt, Artificial Sequence
  Description of Artificial Sequence: Synthetic oligonucleotide
  Antisense Strand to SEQ ID NO: 472311
aagccugaggaauugaugc

SEQ ID NO: 472313 - RNA, 19 nt, Artificial Sequence
  Description of Artificial Sequence: Synthetic oligonucleotide
  Sense strand starting at position 2834 of SEQ ID NO: 317201
uggaaauggugcuuccgga

SEQ ID NO: 472314 - RNA, 19 nt, Artificial Sequence
  Description of Artificial Sequence: Synthetic oligonucleotide
  Antisense Strand to SEQ ID NO: 472313
uccggaagcaccauuucca

SEQ ID NO: 472315 - RNA, 19 nt, Artificial Sequence
  Description of Artificial Sequence: Synthetic oligonucleotide
  Sense strand starting at position 2868 of SEQ ID NO: 317201
cucagaaacuguuuggguu

SEQ ID NO: 472316 - RNA, 19 nt, Artificial Sequence
  Description of Artificial Sequence: Synthetic oligonucleotide
  Antisense Strand to SEQ ID NO: 472315
aacccaaacaguuucugag

SEQ ID NO: 472317 - RNA, 19 nt, Artificial Sequence
  Description of Artificial Sequence: Synthetic oligonucleotide
  Sense strand starting at position 2869 of SEQ ID NO: 317201
ucagaaacuguuuggguuu

SEQ ID NO: 472318 - RNA, 19 nt, Artificial Sequence
  Description of Artificial Sequence: Synthetic oligonucleotide
  Antisense Strand to SEQ ID NO: 472317
aaacccaaacaguuucuga

SEQ ID NO: 472319 - RNA, 19 nt, Artificial Sequence
  Description of Artificial Sequence: Synthetic oligonucleotide
  Sense strand starting at position 2943 of SEQ ID NO: 317201
ugagcacggauguaugaaa

SEQ ID NO: 472320 - RNA, 19 nt, Artificial Sequence
  Description of Artificial Sequence: Synthetic oligonucleotide
  Antisense Strand to SEQ ID NO: 472319
uuucauacauccgugcuca

SEQ ID NO: 472321 - RNA, 19 nt, Artificial Sequence
  Description of Artificial Sequence: Synthetic oligonucleotide
  Sense strand starting at position 3035 of SEQ ID NO: 317201
ugaacuuugugagcaaguu

SEQ ID NO: 472322 - RNA, 19 nt, Artificial Sequence
  Description of Artificial Sequence: Synthetic oligonucleotide
  Antisense Strand to SEQ ID NO: 472321
aacuugcucacaaaguuca

SEQ ID NO: 472323 - RNA, 19 nt, Artificial Sequence
  Description of Artificial Sequence: Synthetic oligonucleotide
  Sense strand starting at position 3036 of SEQ ID NO: 317201
gaacuuugugagcaaguug

SEQ ID NO: 472324 - RNA, 19 nt, Artificial Sequence
  Description of Artificial Sequence: Synthetic oligonucleotide
  Antisense Strand to SEQ ID NO: 472323
caacuugcucacaaaguuc

SEQ ID NO: 472325 - RNA, 19 nt, Artificial Sequence
  Description of Artificial Sequence: Synthetic oligonucleotide
  Sense strand starting at position 3079 of SEQ ID NO: 317201
ucgacugugcucgcuuaga

SEQ ID NO: 472326 - RNA, 19 nt, Artificial Sequence
  Description of Artificial Sequence: Synthetic oligonucleotide
  Antisense Strand to SEQ ID NO: 472325
ucuaagcgagcacagucga

SEQ ID NO: 472327 - RNA, 19 nt, Artificial Sequence
  Description of Artificial Sequence: Synthetic oligonucleotide
  Sense strand starting at position 3081 of SEQ ID NO: 317201
gacugugcucgcuuagagu

SEQ ID NO: 472328 - RNA, 19 nt, Artificial Sequence
  Description of Artificial Sequence: Synthetic oligonucleotide
  Antisense Strand to SEQ ID NO: 472327
acucuaagcgagcacaguc

SEQ ID NO: 472329 - RNA, 19 nt, Artificial Sequence
  Description of Artificial Sequence: Synthetic oligonucleotide
  Sense strand starting at position 3100 of SEQ ID NO: 317201
ugagguuucuaccucguaa

SEQ ID NO: 472330 - RNA, 19 nt, Artificial Sequence
  Description of Artificial Sequence: Synthetic oligonucleotide
  Antisense Strand to SEQ ID NO: 472329
uuacgagguagaaaccuca

SEQ ID NO: 472331 - RNA, 19 nt, Artificial Sequence
  Description of Artificial Sequence: Synthetic oligonucleotide
  Sense strand starting at position 3102 of SEQ ID NO: 317201
agguuucuaccucguaaca

SEQ ID NO: 472332 - RNA, 19 nt, Artificial Sequence
  Description of Artificial Sequence: Synthetic oligonucleotide
  Antisense Strand to SEQ ID NO: 472331
uguuacgagguagaaaccu

SEQ ID NO: 472333 - RNA, 19 nt, Artificial Sequence
  Description of Artificial Sequence: Synthetic oligonucleotide
  Sense strand starting at position 3439 of SEQ ID NO: 317201
ggguccgucccucagaaga

SEQ ID NO: 472334 - RNA, 19 nt, Artificial Sequence
  Description of Artificial Sequence: Synthetic oligonucleotide
  Antisense Strand to SEQ ID NO: 472333
ucuucugagggacggaccc

SEQ ID NO: 472335 - RNA, 19 nt, Artificial Sequence
  Description of Artificial Sequence: Synthetic oligonucleotide
  Sense strand starting at position 90 of SEQ ID NO: 317202
agccucagaugaucuaaau

SEQ ID NO: 472336 - RNA, 19 nt, Artificial Sequence
  Description of Artificial Sequence: Synthetic oligonucleotide
  Antisense Strand to SEQ ID NO: 472335
auuuagaucaucugaggcu

SEQ ID NO: 472337 - RNA, 19 nt, Artificial Sequence
  Description of Artificial Sequence: Synthetic oligonucleotide
  Sense strand starting at position 111 of SEQ ID NO: 317202
uacagugagcaugguaaau

SEQ ID NO: 472338 - RNA, 19 nt, Artificial Sequence
  Description of Artificial Sequence: Synthetic oligonucleotide
  Antisense Strand to SEQ ID NO: 472337
auuuaccaugcucacugua

SEQ ID NO: 472339 - RNA, 19 nt, Artificial Sequence
  Description of Artificial Sequence: Synthetic oligonucleotide
  Sense strand starting at position 120 of SEQ ID NO: 317202
caugguaaauuugagaaau

SEQ ID NO: 472340 - RNA, 19 nt, Artificial Sequence
  Description of Artificial Sequence: Synthetic oligonucleotide
  Antisense Strand to SEQ ID NO: 472339
auuucucaaauuuaccaug

SEQ ID NO: 472341 - RNA, 19 nt, Artificial Sequence
  Description of Artificial Sequence: Synthetic oligonucleotide
  Sense strand starting at position 122 of SEQ ID NO: 317202
ugguaaauuugagaaauag

SEQ ID NO: 472342 - RNA, 19 nt, Artificial Sequence
  Description of Artificial Sequence: Synthetic oligonucleotide
  Antisense Strand to SEQ ID NO: 472341
cuauuucucaaauuuacca

SEQ ID NO: 472343 - RNA, 19 nt, Artificial Sequence
  Description of Artificial Sequence: Synthetic oligonucleotide
  Sense strand starting at position 149 of SEQ ID NO: 317202
uccuaugcugcuugggaga

SEQ ID NO: 472344 - RNA, 19 nt, Artificial Sequence
  Description of Artificial Sequence: Synthetic oligonucleotide
  Antisense Strand to SEQ ID NO: 472343
ucucccaagcagcauagga

SEQ ID NO: 472345 - RNA, 19 nt, Artificial Sequence
  Description of Artificial Sequence: Synthetic oligonucleotide
  Sense strand starting at position 240 of SEQ ID NO: 317202
aaguguugguagguucuga

SEQ ID NO: 472346 - RNA, 19 nt, Artificial Sequence
  Description of Artificial Sequence: Synthetic oligonucleotide
  Antisense Strand to SEQ ID NO: 472345
ucagaaccuaccaacacuu

SEQ ID NO: 472347 - RNA, 19 nt, Artificial Sequence
  Description of Artificial Sequence: Synthetic oligonucleotide
  Sense strand starting at position 302 of SEQ ID NO: 317202
agccaucccuaguuuacau

SEQ ID NO: 472348 - RNA, 19 nt, Artificial Sequence
  Description of Artificial Sequence: Synthetic oligonucleotide
  Antisense Strand to SEQ ID NO: 472347
auguaaacuagggauggcu

SEQ ID NO: 472349 - RNA, 19 nt, Artificial Sequence
  Description of Artificial Sequence: Synthetic oligonucleotide
  Sense strand starting at position 350 of SEQ ID NO: 317202
ggacauuuaugcugauuua

SEQ ID NO: 472350 - RNA, 19 nt, Artificial Sequence
  Description of Artificial Sequence: Synthetic oligonucleotide
  Antisense Strand to SEQ ID NO: 472349
uaaaucagcauaaaugucc

SEQ ID NO: 472351 - RNA, 19 nt, Artificial Sequence
  Description of Artificial Sequence: Synthetic oligonucleotide
  Sense strand starting at position 582 of SEQ ID NO: 317202
acagcaaccgaucauucua

SEQ ID NO: 472352 - RNA, 19 nt, Artificial Sequence
  Description of Artificial Sequence: Synthetic oligonucleotide
  Antisense Strand to SEQ ID NO: 472351
uagaaugaucgguugcugu

SEQ ID NO: 472353 - RNA, 19 nt, Artificial Sequence
  Description of Artificial Sequence: Synthetic oligonucleotide
  Sense strand starting at position 725 of SEQ ID NO: 317202
aaagaagggcuggguuauu

SEQ ID NO: 472354 - RNA, 19 nt, Artificial Sequence
  Description of Artificial Sequence: Synthetic oligonucleotide
  Antisense Strand to SEQ ID NO: 472353
aauaacccagcccuucuuu

SEQ ID NO: 472355 - RNA, 19 nt, Artificial Sequence
  Description of Artificial Sequence: Synthetic oligonucleotide
  Sense strand starting at position 730 of SEQ ID NO: 317202
agggcuggguuauuaaauu

SEQ ID NO: 472356 - RNA, 19 nt, Artificial Sequence
  Description of Artificial Sequence: Synthetic oligonucleotide
  Antisense Strand to SEQ ID NO: 472355
aauuuaauaacccagcccu

SEQ ID NO: 472357 - RNA, 19 nt, Artificial Sequence
  Description of Artificial Sequence: Synthetic oligonucleotide
  Sense strand starting at position 752 of SEQ ID NO: 317202
aagauuaaucccggagccu

SEQ ID NO: 472358 - RNA, 19 nt, Artificial Sequence
  Description of Artificial Sequence: Synthetic oligonucleotide
  Antisense Strand to SEQ ID NO: 472357
aggcuccgggauuaaucuu

SEQ ID NO: 472359 - RNA, 19 nt, Artificial Sequence
  Description of Artificial Sequence: Synthetic oligonucleotide
  Sense strand starting at position 753 of SEQ ID NO: 317202
agauuaaucccggagccuu

SEQ ID NO: 472360 - RNA, 19 nt, Artificial Sequence
  Description of Artificial Sequence: Synthetic oligonucleotide
  Antisense Strand to SEQ ID NO: 472359
aaggcuccgggauuaaucu

SEQ ID NO: 472361 - RNA, 19 nt, Artificial Sequence
  Description of Artificial Sequence: Synthetic oligonucleotide
  Sense strand starting at position 788 of SEQ ID NO: 317202
cccugaaagugacuaaauu

SEQ ID NO: 472362 - RNA, 19 nt, Artificial Sequence
  Description of Artificial Sequence: Synthetic oligonucleotide
  Antisense Strand to SEQ ID NO: 472361
aauuuagucacuuucaggg

SEQ ID NO: 472363 - RNA, 19 nt, Artificial Sequence
  Description of Artificial Sequence: Synthetic oligonucleotide
  Sense strand starting at position 816 of SEQ ID NO: 317202
ucuggauguuccuuaggaa

SEQ ID NO: 472364 - RNA, 19 nt, Artificial Sequence
  Description of Artificial Sequence: Synthetic oligonucleotide
  Antisense Strand to SEQ ID NO: 472363
uuccuaaggaacauccaga

SEQ ID NO: 472365 - RNA, 19 nt, Artificial Sequence
  Description of Artificial Sequence: Synthetic oligonucleotide
  Sense strand starting at position 1496 of SEQ ID NO: 317202
gcaucaauuccucaggcuu

SEQ ID NO: 472366 - RNA, 19 nt, Artificial Sequence
  Description of Artificial Sequence: Synthetic oligonucleotide
  Antisense Strand to SEQ ID NO: 472365
aagccugaggaauugaugc

SEQ ID NO: 472367 - RNA, 19 nt, Artificial Sequence
  Description of Artificial Sequence: Synthetic oligonucleotide
  Sense strand starting at position 2037 of SEQ ID NO: 317202
uggaaauggugcuuccgga

SEQ ID NO: 472368 - RNA, 19 nt, Artificial Sequence
  Description of Artificial Sequence: Synthetic oligonucleotide
  Antisense Strand to SEQ ID NO: 472367
uccggaagcaccauuucca

SEQ ID NO: 472369 - RNA, 19 nt, Artificial Sequence
  Description of Artificial Sequence: Synthetic oligonucleotide
  Sense strand starting at position 2071 of SEQ ID NO: 317202
cucagaaacuguuuggguu

SEQ ID NO: 472370 - RNA, 19 nt, Artificial Sequence
  Description of Artificial Sequence: Synthetic oligonucleotide
  Antisense Strand to SEQ ID NO: 472369
aacccaaacaguuucugag

SEQ ID NO: 472371 - RNA, 19 nt, Artificial Sequence
  Description of Artificial Sequence: Synthetic oligonucleotide
  Sense strand starting at position 2072 of SEQ ID NO: 317202
ucagaaacuguuuggguuu

SEQ ID NO: 472372 - RNA, 19 nt, Artificial Sequence
  Description of Artificial Sequence: Synthetic oligonucleotide
  Antisense Strand to SEQ ID NO: 472371
aaacccaaacaguuucuga

SEQ ID NO: 472373 - RNA, 19 nt, Artificial Sequence
  Description of Artificial Sequence: Synthetic oligonucleotide
  Sense strand starting at position 2146 of SEQ ID NO: 317202
ugagcacggauguaugaaa

SEQ ID NO: 472374 - RNA, 19 nt, Artificial Sequence
  Description of Artificial Sequence: Synthetic oligonucleotide
  Antisense Strand to SEQ ID NO: 472373
uuucauacauccgugcuca

SEQ ID NO: 472375 - RNA, 19 nt, Artificial Sequence
  Description of Artificial Sequence: Synthetic oligonucleotide
  Sense strand starting at position 2238 of SEQ ID NO: 317202
ugaacuuugugagcaaguu

SEQ ID NO: 472376 - RNA, 19 nt, Artificial Sequence
  Description of Artificial Sequence: Synthetic oligonucleotide
  Antisense Strand to SEQ ID NO: 472375
aacuugcucacaaaguuca

SEQ ID NO: 472377 - RNA, 19 nt, Artificial Sequence
  Description of Artificial Sequence: Synthetic oligonucleotide
  Sense strand starting at position 2239 of SEQ ID NO: 317202
gaacuuugugagcaaguug

SEQ ID NO: 472378 - RNA, 19 nt, Artificial Sequence
  Description of Artificial Sequence: Synthetic oligonucleotide
  Antisense Strand to SEQ ID NO: 472377
caacuugcucacaaaguuc

SEQ ID NO: 472379 - RNA, 19 nt, Artificial Sequence
  Description of Artificial Sequence: Synthetic oligonucleotide
  Sense strand starting at position 2282 of SEQ ID NO: 317202
ucgacugugcucgcuuaga

SEQ ID NO: 472380 - RNA, 19 nt, Artificial Sequence
  Description of Artificial Sequence: Synthetic oligonucleotide
  Antisense Strand to SEQ ID NO: 472379
ucuaagcgagcacagucga

SEQ ID NO: 472381 - RNA, 19 nt, Artificial Sequence
  Description of Artificial Sequence: Synthetic oligonucleotide
  Sense strand starting at position 2284 of SEQ ID NO: 317202
gacugugcucgcuuagagu

SEQ ID NO: 472382 - RNA, 19 nt, Artificial Sequence
  Description of Artificial Sequence: Synthetic oligonucleotide
  Antisense Strand to SEQ ID NO: 472381
acucuaagcgagcacaguc

SEQ ID NO: 472383 - RNA, 19 nt, Artificial Sequence
  Description of Artificial Sequence: Synthetic oligonucleotide
  Sense strand starting at position 2303 of SEQ ID NO: 317202
ugagguuucuaccucguaa

SEQ ID NO: 472384 - RNA, 19 nt, Artificial Sequence
  Description of Artificial Sequence: Synthetic oligonucleotide
  Antisense Strand to SEQ ID NO: 472383
uuacgagguagaaaccuca

SEQ ID NO: 472385 - RNA, 19 nt, Artificial Sequence
  Description of Artificial Sequence: Synthetic oligonucleotide
  Sense strand starting at position 2305 of SEQ ID NO: 317202
agguuucuaccucguaaca

SEQ ID NO: 472386 - RNA, 19 nt, Artificial Sequence
  Description of Artificial Sequence: Synthetic oligonucleotide
  Antisense Strand to SEQ ID NO: 472385
uguuacgagguagaaaccu

SEQ ID NO: 472387 - RNA, 19 nt, Artificial Sequence
  Description of Artificial Sequence: Synthetic oligonucleotide
  Sense strand starting at position 2450 of SEQ ID NO: 317202
aacaaaguaugagaaggua

SEQ ID NO: 472388 - RNA, 19 nt, Artificial Sequence
  Description of Artificial Sequence: Synthetic oligonucleotide
  Antisense Strand to SEQ ID NO: 472387
uaccuucucauacuuuguu

SEQ ID NO: 472389 - RNA, 19 nt, Artificial Sequence
  Description of Artificial Sequence: Synthetic oligonucleotide
  Sense strand starting at position 2642 of SEQ ID NO: 317202
ggguccgucccucagaaga

SEQ ID NO: 472390 - RNA, 19 nt, Artificial Sequence
  Description of Artificial Sequence: Synthetic oligonucleotide
  Antisense Strand to SEQ ID NO: 472389
ucuucugagggacggaccc

SEQ ID NO: 472391 - RNA, 19 nt, Artificial Sequence
  Description of Artificial Sequence: Synthetic oligonucleotide
  Sense strand starting at position 3270 of SEQ ID NO: 317202
gugugcuagcaagagagau

SEQ ID NO: 472392 - RNA, 19 nt, Artificial Sequence
  Description of Artificial Sequence: Synthetic oligonucleotide
  Antisense Strand to SEQ ID NO: 472391
aucucucuugcuagcacac

SEQ ID NO: 472393 - RNA, 19 nt, Artificial Sequence
  Description of Artificial Sequence: Synthetic oligonucleotide
  Sense strand starting at position 3284 of SEQ ID NO: 317202
gagauuugcagguguaggu

SEQ ID NO: 472394 - RNA, 19 nt, Artificial Sequence
  Description of Artificial Sequence: Synthetic oligonucleotide
  Antisense Strand to SEQ ID NO: 472393
accuacaccugcaaaucuc

SEQ ID NO: 472395 - RNA, 19 nt, Artificial Sequence
  Description of Artificial Sequence: Synthetic oligonucleotide
  Sense strand starting at position 3396 of SEQ ID NO: 317202
ccuuaugcauaacuggaaa

SEQ ID NO: 472396 - RNA, 19 nt, Artificial Sequence
  Description of Artificial Sequence: Synthetic oligonucleotide
  Antisense Strand to SEQ ID NO: 472395
uuuccaguuaugcauaagg

SEQ ID NO: 472397 - RNA, 19 nt, Artificial Sequence
  Description of Artificial Sequence: Synthetic oligonucleotide
  Sense strand starting at position 3483 of SEQ ID NO: 317202
agggcaccucuguacaauu

SEQ ID NO: 472398 - RNA, 19 nt, Artificial Sequence
  Description of Artificial Sequence: Synthetic oligonucleotide
  Antisense Strand to SEQ ID NO: 472397
aauuguacagaggugcccu

SEQ ID NO: 472399 - RNA, 19 nt, Artificial Sequence
  Description of Artificial Sequence: Synthetic oligonucleotide
  Sense strand starting at position 3497 of SEQ ID NO: 317202
caauuagguuaauccgaga

SEQ ID NO: 472400 - RNA, 19 nt, Artificial Sequence
  Description of Artificial Sequence: Synthetic oligonucleotide
  Antisense Strand to SEQ ID NO: 472399
ucucggauuaaccuaauug

SEQ ID NO: 472401 - RNA, 19 nt, Artificial Sequence
  Description of Artificial Sequence: Synthetic oligonucleotide
  Sense strand starting at position 3502 of SEQ ID NO: 317202
agguuaauccgagagcacu

SEQ ID NO: 472402 - RNA, 19 nt, Artificial Sequence
  Description of Artificial Sequence: Synthetic oligonucleotide
  Antisense Strand to SEQ ID NO: 472401
agugcucucggauuaaccu

SEQ ID NO: 472403 - RNA, 19 nt, Artificial Sequence
  Description of Artificial Sequence: Synthetic oligonucleotide
  Sense strand starting at position 3544 of SEQ ID NO: 317202
ggcaaccaguuaucccaau

SEQ ID NO: 472404 - RNA, 19 nt, Artificial Sequence
  Description of Artificial Sequence: Synthetic oligonucleotide
  Antisense Strand to SEQ ID NO: 472403
auugggauaacugguugcc

SEQ ID NO: 472405 - RNA, 19 nt, Artificial Sequence
  Description of Artificial Sequence: Synthetic oligonucleotide
  Sense strand starting at position 3780 of SEQ ID NO: 317202
ucuggaauuauggguugca

SEQ ID NO: 472406 - RNA, 19 nt, Artificial Sequence
  Description of Artificial Sequence: Synthetic oligonucleotide
  Antisense Strand to SEQ ID NO: 472405
ugcaacccauaauuccaga

SEQ ID NO: 472407 - RNA, 19 nt, Artificial Sequence
  Description of Artificial Sequence: Synthetic oligonucleotide
  Sense strand starting at position 3783 of SEQ ID NO: 317202
ggaauuauggguugcacaa

SEQ ID NO: 472408 - RNA, 19 nt, Artificial Sequence
  Description of Artificial Sequence: Synthetic oligonucleotide
  Antisense Strand to SEQ ID NO: 472407
uugugcaacccauaauucc

SEQ ID NO: 472409 - RNA, 19 nt, Artificial Sequence
  Description of Artificial Sequence: Synthetic oligonucleotide
  Sense strand starting at position 3794 of SEQ ID NO: 317202
uugcacaaugugugaauga

SEQ ID NO: 472410 - RNA, 19 nt, Artificial Sequence
  Description of Artificial Sequence: Synthetic oligonucleotide
  Antisense Strand to SEQ ID NO: 472409
ucauucacacauugugcaa

SEQ ID NO: 472411 - RNA, 19 nt, Artificial Sequence
  Description of Artificial Sequence: Synthetic oligonucleotide
  Sense strand starting at position 3807 of SEQ ID NO: 317202
gaaugacaccauuagcagu

SEQ ID NO: 472412 - RNA, 19 nt, Artificial Sequence
  Description of Artificial Sequence: Synthetic oligonucleotide
  Antisense Strand to SEQ ID NO: 472411
acugcuaauggugucauuc

SEQ ID NO: 472413 - RNA, 19 nt, Artificial Sequence
  Description of Artificial Sequence: Synthetic oligonucleotide
  Sense strand starting at position 3873 of SEQ ID NO: 317202
cuaaauacucuuggcaaga

SEQ ID NO: 472414 - RNA, 19 nt, Artificial Sequence
  Description of Artificial Sequence: Synthetic oligonucleotide
  Antisense Strand to SEQ ID NO: 472413
ucuugccaagaguauuuag

SEQ ID NO: 472415 - RNA, 19 nt, Artificial Sequence
  Description of Artificial Sequence: Synthetic oligonucleotide
  Sense strand starting at position 94 of SEQ ID NO: 317203
gcuuacugccauugggaua

SEQ ID NO: 472416 - RNA, 19 nt, Artificial Sequence
  Description of Artificial Sequence: Synthetic oligonucleotide
  Antisense Strand to SEQ ID NO: 472415
uaucccaauggcaguaagc

SEQ ID NO: 472417 - RNA, 19 nt, Artificial Sequence
  Description of Artificial Sequence: Synthetic oligonucleotide
  Sense strand starting at position 108 of SEQ ID NO: 317203
ggauaagaggauugccacu

SEQ ID NO: 472418 - RNA, 19 nt, Artificial Sequence
  Description of Artificial Sequence: Synthetic oligonucleotide
  Antisense Strand to SEQ ID NO: 472417
aguggcaauccucuuaucc

SEQ ID NO: 472419 - RNA, 19 nt, Artificial Sequence
  Description of Artificial Sequence: Synthetic oligonucleotide
  Sense strand starting at position 509 of SEQ ID NO: 317203
guggguaauucccaaggcu

SEQ ID NO: 472420 - RNA, 19 nt, Artificial Sequence
  Description of Artificial Sequence: Synthetic oligonucleotide
  Antisense Strand to SEQ ID NO: 472419
agccuugggaauuacccac

SEQ ID NO: 472421 - RNA, 19 nt, Artificial Sequence
  Description of Artificial Sequence: Synthetic oligonucleotide
  Sense strand starting at position 512 of SEQ ID NO: 317203
gguaauucccaaggcucau

SEQ ID NO: 472422 - RNA, 19 nt, Artificial Sequence
  Description of Artificial Sequence: Synthetic oligonucleotide
  Antisense Strand to SEQ ID NO: 472421
augagccuugggaauuacc

SEQ ID NO: 472423 - RNA, 19 nt, Artificial Sequence
  Description of Artificial Sequence: Synthetic oligonucleotide
  Sense strand starting at position 849 of SEQ ID NO: 317203
cagugagccugucucgauu

SEQ ID NO: 472424 - RNA, 19 nt, Artificial Sequence
  Description of Artificial Sequence: Synthetic oligonucleotide
  Antisense Strand to SEQ ID NO: 472423
aaucgagacaggcucacug

SEQ ID NO: 472425 - RNA, 19 nt, Artificial Sequence
  Description of Artificial Sequence: Synthetic oligonucleotide
  Sense strand starting at position 948 of SEQ ID NO: 317203
gugggcucccaugggauaa

SEQ ID NO: 472426 - RNA, 19 nt, Artificial Sequence
  Description of Artificial Sequence: Synthetic oligonucleotide
  Antisense Strand to SEQ ID NO: 472425
uuaucccaugggagcccac

SEQ ID NO: 472427 - RNA, 19 nt, Artificial Sequence
  Description of Artificial Sequence: Synthetic oligonucleotide
  Sense strand starting at position 949 of SEQ ID NO: 317203
ugggcucccaugggauaaa

SEQ ID NO: 472428 - RNA, 19 nt, Artificial Sequence
  Description of Artificial Sequence: Synthetic oligonucleotide
  Antisense Strand to SEQ ID NO: 472427
uuuaucccaugggagccca

SEQ ID NO: 472429 - RNA, 19 nt, Artificial Sequence
  Description of Artificial Sequence: Synthetic oligonucleotide
  Sense strand starting at position 1112 of SEQ ID NO: 317203
uggucagucuuccuggaag

SEQ ID NO: 472430 - RNA, 19 nt, Artificial Sequence
  Description of Artificial Sequence: Synthetic oligonucleotide
  Antisense Strand to SEQ ID NO: 472429
cuuccaggaagacugacca

SEQ ID NO: 472431 - RNA, 19 nt, Artificial Sequence
  Description of Artificial Sequence: Synthetic oligonucleotide
  Sense strand starting at position 1166 of SEQ ID NO: 317203
augggauguggaugcagaa

SEQ ID NO: 472432 - RNA, 19 nt, Artificial Sequence
  Description of Artificial Sequence: Synthetic oligonucleotide
  Antisense Strand to SEQ ID NO: 472431
uucugcauccacaucccau

SEQ ID NO: 472433 - RNA, 19 nt, Artificial Sequence
  Description of Artificial Sequence: Synthetic oligonucleotide
  Sense strand starting at position 1228 of SEQ ID NO: 317203
cuccuagacucaggucuaa

SEQ ID NO: 472434 - RNA, 19 nt, Artificial Sequence
  Description of Artificial Sequence: Synthetic oligonucleotide
  Antisense Strand to SEQ ID NO: 472433
uuagaccugagucuaggag

SEQ ID NO: 472435 - RNA, 19 nt, Artificial Sequence
  Description of Artificial Sequence: Synthetic oligonucleotide
  Sense strand starting at position 2019 of SEQ ID NO: 317203
caaagucuuucuuagugag

SEQ ID NO: 472436 - RNA, 19 nt, Artificial Sequence
  Description of Artificial Sequence: Synthetic oligonucleotide
  Antisense Strand to SEQ ID NO: 472435
cucacuaagaaagacuuug

SEQ ID NO: 472437 - RNA, 19 nt, Artificial Sequence
  Description of Artificial Sequence: Synthetic oligonucleotide
  Sense strand starting at position 2021 of SEQ ID NO: 317203
aagucuuucuuagugagau

SEQ ID NO: 472438 - RNA, 19 nt, Artificial Sequence
  Description of Artificial Sequence: Synthetic oligonucleotide
  Antisense Strand to SEQ ID NO: 472437
aucucacuaagaaagacuu

SEQ ID NO: 472439 - RNA, 19 nt, Artificial Sequence
  Description of Artificial Sequence: Synthetic oligonucleotide
  Sense strand starting at position 2022 of SEQ ID NO: 317203
agucuuucuuagugagauu

SEQ ID NO: 472440 - RNA, 19 nt, Artificial Sequence
  Description of Artificial Sequence: Synthetic oligonucleotide
  Antisense Strand to SEQ ID NO: 472439
aaucucacuaagaaagacu

SEQ ID NO: 472441 - RNA, 19 nt, Artificial Sequence
  Description of Artificial Sequence: Synthetic oligonucleotide
  Sense strand starting at position 2148 of SEQ ID NO: 317203
gaaugaaggcugggaguaa

SEQ ID NO: 472442 - RNA, 19 nt, Artificial Sequence
  Description of Artificial Sequence: Synthetic oligonucleotide
  Antisense Strand to SEQ ID NO: 472441
uuacucccagccuucauuc

SEQ ID NO: 472443 - RNA, 19 nt, Artificial Sequence
  Description of Artificial Sequence: Synthetic oligonucleotide
  Sense strand starting at position 2218 of SEQ ID NO: 317203
gcauuuggcuucuagcgga

SEQ ID NO: 472444 - RNA, 19 nt, Artificial Sequence
  Description of Artificial Sequence: Synthetic oligonucleotide
  Antisense Strand to SEQ ID NO: 472443
uccgcuagaagccaaaugc

SEQ ID NO: 472445 - RNA, 19 nt, Artificial Sequence
  Description of Artificial Sequence: Synthetic oligonucleotide
  Sense strand starting at position 2286 of SEQ ID NO: 317203
gacgcuuucugcuggugga

SEQ ID NO: 472446 - RNA, 19 nt, Artificial Sequence
  Description of Artificial Sequence: Synthetic oligonucleotide
  Antisense Strand to SEQ ID NO: 472445
uccaccagcagaaagcguc

SEQ ID NO: 472447 - RNA, 19 nt, Artificial Sequence
  Description of Artificial Sequence: Synthetic oligonucleotide
  Sense strand starting at position 2552 of SEQ ID NO: 317203
aguugcuagucagccuuua

SEQ ID NO: 472448 - RNA, 19 nt, Artificial Sequence
  Description of Artificial Sequence: Synthetic oligonucleotide
  Antisense Strand to SEQ ID NO: 472447
uaaaggcugacuagcaacu

SEQ ID NO: 472449 - RNA, 19 nt, Artificial Sequence
  Description of Artificial Sequence: Synthetic oligonucleotide
  Sense strand starting at position 2832 of SEQ ID NO: 317203
guggcaguguuccugauuu

SEQ ID NO: 472450 - RNA, 19 nt, Artificial Sequence
  Description of Artificial Sequence: Synthetic oligonucleotide
  Antisense Strand to SEQ ID NO: 472449
aaaucaggaacacugccac

SEQ ID NO: 472451 - RNA, 19 nt, Artificial Sequence
  Description of Artificial Sequence: Synthetic oligonucleotide
  Sense strand starting at position 2866 of SEQ ID NO: 317203
cgcugauugucgcuuucca

SEQ ID NO: 472452 - RNA, 19 nt, Artificial Sequence
  Description of Artificial Sequence: Synthetic oligonucleotide
  Antisense Strand to SEQ ID NO: 472451
uggaaagcgacaaucagcg

SEQ ID NO: 472453 - RNA, 19 nt, Artificial Sequence
  Description of Artificial Sequence: Synthetic oligonucleotide
  Sense strand starting at position 2886 of SEQ ID NO: 317203
gcaccuuugugcugccaga

SEQ ID NO: 472454 - RNA, 19 nt, Artificial Sequence
  Description of Artificial Sequence: Synthetic oligonucleotide
  Antisense Strand to SEQ ID NO: 472453
ucuggcagcacaaaggugc

SEQ ID NO: 472455 - RNA, 19 nt, Artificial Sequence
  Description of Artificial Sequence: Synthetic oligonucleotide
  Sense strand starting at position 2897 of SEQ ID NO: 317203
cugccagauccugggcuua

SEQ ID NO: 472456 - RNA, 19 nt, Artificial Sequence
  Description of Artificial Sequence: Synthetic oligonucleotide
  Antisense Strand to SEQ ID NO: 472455
uaagcccaggaucuggcag

SEQ ID NO: 472457 - RNA, 19 nt, Artificial Sequence
  Description of Artificial Sequence: Synthetic oligonucleotide
  Sense strand starting at position 2899 of SEQ ID NO: 317203
gccagauccugggcuuaag

SEQ ID NO: 472458 - RNA, 19 nt, Artificial Sequence
  Description of Artificial Sequence: Synthetic oligonucleotide
  Antisense Strand to SEQ ID NO: 472457
cuuaagcccaggaucuggc

SEQ ID NO: 472459 - RNA, 19 nt, Artificial Sequence
  Description of Artificial Sequence: Synthetic oligonucleotide
  Sense strand starting at position 2910 of SEQ ID NO: 317203
ggcuuaagguuucuuccca

SEQ ID NO: 472460 - RNA, 19 nt, Artificial Sequence
  Description of Artificial Sequence: Synthetic oligonucleotide
  Antisense Strand to SEQ ID NO: 472459
ugggaagaaaccuuaagcc

SEQ ID NO: 472461 - RNA, 19 nt, Artificial Sequence
  Description of Artificial Sequence: Synthetic oligonucleotide
  Sense strand starting at position 2911 of SEQ ID NO: 317203
gcuuaagguuucuucccau

SEQ ID NO: 472462 - RNA, 19 nt, Artificial Sequence
  Description of Artificial Sequence: Synthetic oligonucleotide
  Antisense Strand to SEQ ID NO: 472461
augggaagaaaccuuaagc

SEQ ID NO: 472463 - RNA, 19 nt, Artificial Sequence
  Description of Artificial Sequence: Synthetic oligonucleotide
  Sense strand starting at position 2936 of SEQ ID NO: 317203
caguuuaucuguccauguu

SEQ ID NO: 472464 - RNA, 19 nt, Artificial Sequence
  Description of Artificial Sequence: Synthetic oligonucleotide
  Antisense Strand to SEQ ID NO: 472463
aacauggacagauaaacug

SEQ ID NO: 472465 - RNA, 19 nt, Artificial Sequence
  Description of Artificial Sequence: Synthetic oligonucleotide
  Sense strand starting at position 2945 of SEQ ID NO: 317203
uguccauguugucaccaua

SEQ ID NO: 472466 - RNA, 19 nt, Artificial Sequence
  Description of Artificial Sequence: Synthetic oligonucleotide
  Antisense Strand to SEQ ID NO: 472465
uauggugacaacauggaca

SEQ ID NO: 472467 - RNA, 19 nt, Artificial Sequence
  Description of Artificial Sequence: Synthetic oligonucleotide
  Sense strand starting at position 2948 of SEQ ID NO: 317203
ccauguugucaccauacuu

SEQ ID NO: 472468 - RNA, 19 nt, Artificial Sequence
  Description of Artificial Sequence: Synthetic oligonucleotide
  Antisense Strand to SEQ ID NO: 472467
aaguauggugacaacaugg

SEQ ID NO: 472469 - RNA, 19 nt, Artificial Sequence
  Description of Artificial Sequence: Synthetic oligonucleotide
  Sense strand starting at position 3033 of SEQ ID NO: 317203
cgugcaugagugugcacau

SEQ ID NO: 472470 - RNA, 19 nt, Artificial Sequence
  Description of Artificial Sequence: Synthetic oligonucleotide
  Antisense Strand to SEQ ID NO: 472469
augugcacacucaugcacg

SEQ ID NO: 472471 - RNA, 19 nt, Artificial Sequence
  Description of Artificial Sequence: Synthetic oligonucleotide
  Sense strand starting at position 3034 of SEQ ID NO: 317203
gugcaugagugugcacaua

SEQ ID NO: 472472 - RNA, 19 nt, Artificial Sequence
  Description of Artificial Sequence: Synthetic oligonucleotide
  Antisense Strand to SEQ ID NO: 472471
uaugugcacacucaugcac

SEQ ID NO: 472473 - RNA, 19 nt, Artificial Sequence
  Description of Artificial Sequence: Synthetic oligonucleotide
  Sense strand starting at position 3092 of SEQ ID NO: 317203
uguguguucgugugagcac

SEQ ID NO: 472474 - RNA, 19 nt, Artificial Sequence
  Description of Artificial Sequence: Synthetic oligonucleotide
  Antisense Strand to SEQ ID NO: 472473
gugcucacacgaacacaca

SEQ ID NO: 472475 - RNA, 19 nt, Artificial Sequence
  Description of Artificial Sequence: Synthetic oligonucleotide
  Sense strand starting at position 3144 of SEQ ID NO: 317203
agaguucucucagcacgag

SEQ ID NO: 472476 - RNA, 19 nt, Artificial Sequence
  Description of Artificial Sequence: Synthetic oligonucleotide
  Antisense Strand to SEQ ID NO: 472475
cucgugcugagagaacucu

SEQ ID NO: 472477 - RNA, 19 nt, Artificial Sequence
  Description of Artificial Sequence: Synthetic oligonucleotide
  Sense strand starting at position 3287 of SEQ ID NO: 317203
gcccuugugccaugauguu

SEQ ID NO: 472478 - RNA, 19 nt, Artificial Sequence
  Description of Artificial Sequence: Synthetic oligonucleotide
  Antisense Strand to SEQ ID NO: 472477
aacaucauggcacaagggc

SEQ ID NO: 472479 - RNA, 19 nt, Artificial Sequence
  Description of Artificial Sequence: Synthetic oligonucleotide
  Sense strand starting at position 3795 of SEQ ID NO: 317203
cacucaccugcgugugaaa

SEQ ID NO: 472480 - RNA, 19 nt, Artificial Sequence
  Description of Artificial Sequence: Synthetic oligonucleotide
  Antisense Strand to SEQ ID NO: 472479
uuucacacgcaggugagug

SEQ ID NO: 472481 - RNA, 19 nt, Artificial Sequence
  Description of Artificial Sequence: Synthetic oligonucleotide
  Sense strand starting at position 3798 of SEQ ID NO: 317203
ucaccugcgugugaaauga

SEQ ID NO: 472482 - RNA, 19 nt, Artificial Sequence
  Description of Artificial Sequence: Synthetic oligonucleotide
  Antisense Strand to SEQ ID NO: 472481
ucauuucacacgcagguga

SEQ ID NO: 472483 - RNA, 19 nt, Artificial Sequence
  Description of Artificial Sequence: Synthetic oligonucleotide
  Sense strand starting at position 3802 of SEQ ID NO: 317203
cugcgugugaaaugagcua

SEQ ID NO: 472484 - RNA, 19 nt, Artificial Sequence
  Description of Artificial Sequence: Synthetic oligonucleotide
  Antisense Strand to SEQ ID NO: 472483
uagcucauuucacacgcag

SEQ ID NO: 472485 - RNA, 19 nt, Artificial Sequence
  Description of Artificial Sequence: Synthetic oligonucleotide
  Sense strand starting at position 288 of SEQ ID NO: 317204
acggaaugaccuugaucuc

SEQ ID NO: 472486 - RNA, 19 nt, Artificial Sequence
  Description of Artificial Sequence: Synthetic oligonucleotide
  Antisense Strand to SEQ ID NO: 472485
gagaucaaggucauuccgu

SEQ ID NO: 472487 - RNA, 19 nt, Artificial Sequence
  Description of Artificial Sequence: Synthetic oligonucleotide
  Sense strand starting at position 347 of SEQ ID NO: 317204
acaauuuccugagaagcag

SEQ ID NO: 472488 - RNA, 19 nt, Artificial Sequence
  Description of Artificial Sequence: Synthetic oligonucleotide
  Antisense Strand to SEQ ID NO: 472487
cugcuucucaggaaauugu

SEQ ID NO: 472489 - RNA, 19 nt, Artificial Sequence
  Description of Artificial Sequence: Synthetic oligonucleotide
  Sense strand starting at position 652 of SEQ ID NO: 317204
gucuguguuccgcacaauc

SEQ ID NO: 472490 - RNA, 19 nt, Artificial Sequence
  Description of Artificial Sequence: Synthetic oligonucleotide
  Antisense Strand to SEQ ID NO: 472489
gauugugcggaacacagac

SEQ ID NO: 472491 - RNA, 19 nt, Artificial Sequence
  Description of Artificial Sequence: Synthetic oligonucleotide
  Sense strand starting at position 1552 of SEQ ID NO: 317204
ggucgugucccugaucacu

SEQ ID NO: 472492 - RNA, 19 nt, Artificial Sequence
  Description of Artificial Sequence: Synthetic oligonucleotide
  Antisense Strand to SEQ ID NO: 472491
agugaucagggacacgacc

SEQ ID NO: 472493 - RNA, 19 nt, Artificial Sequence
  Description of Artificial Sequence: Synthetic oligonucleotide
  Sense strand starting at position 1554 of SEQ ID NO: 317204
ucgugucccugaucacuca

SEQ ID NO: 472494 - RNA, 19 nt, Artificial Sequence
  Description of Artificial Sequence: Synthetic oligonucleotide
  Antisense Strand to SEQ ID NO: 472493
ugagugaucagggacacga

SEQ ID NO: 472495 - RNA, 19 nt, Artificial Sequence
  Description of Artificial Sequence: Synthetic oligonucleotide
  Sense strand starting at position 1731 of SEQ ID NO: 317204
ccgccaagcgucugagagu

SEQ ID NO: 472496 - RNA, 19 nt, Artificial Sequence
  Description of Artificial Sequence: Synthetic oligonucleotide
  Antisense Strand to SEQ ID NO: 472495
acucucagacgcuuggcgg

SEQ ID NO: 472497 - RNA, 19 nt, Artificial Sequence
  Description of Artificial Sequence: Synthetic oligonucleotide
  Sense strand starting at position 1734 of SEQ ID NO: 317204
ccaagcgucugagagugaa

SEQ ID NO: 472498 - RNA, 19 nt, Artificial Sequence
  Description of Artificial Sequence: Synthetic oligonucleotide
  Antisense Strand to SEQ ID NO: 472497
uucacucucagacgcuugg

SEQ ID NO: 472499 - RNA, 19 nt, Artificial Sequence
  Description of Artificial Sequence: Synthetic oligonucleotide
  Sense strand starting at position 1738 of SEQ ID NO: 317204
gcgucugagagugaagcau

SEQ ID NO: 472500 - RNA, 19 nt, Artificial Sequence
  Description of Artificial Sequence: Synthetic oligonucleotide
  Antisense Strand to SEQ ID NO: 472499
augcuucacucucagacgc

SEQ ID NO: 472501 - RNA, 19 nt, Artificial Sequence
  Description of Artificial Sequence: Synthetic oligonucleotide
  Sense strand starting at position 2101 of SEQ ID NO: 317204
cagugagauguucguagcu

SEQ ID NO: 472502 - RNA, 19 nt, Artificial Sequence
  Description of Artificial Sequence: Synthetic oligonucleotide
  Antisense Strand to SEQ ID NO: 472501
agcuacgaacaucucacug

SEQ ID NO: 472503 - RNA, 19 nt, Artificial Sequence
  Description of Artificial Sequence: Synthetic oligonucleotide
  Sense strand starting at position 2103 of SEQ ID NO: 317204
gugagauguucguagcuuu

SEQ ID NO: 472504 - RNA, 19 nt, Artificial Sequence
  Description of Artificial Sequence: Synthetic oligonucleotide
  Antisense Strand to SEQ ID NO: 472503
aaagcuacgaacaucucac

SEQ ID NO: 472505 - RNA, 19 nt, Artificial Sequence
  Description of Artificial Sequence: Synthetic oligonucleotide
  Sense strand starting at position 2106 of SEQ ID NO: 317204
agauguucguagcuuuauu

SEQ ID NO: 472506 - RNA, 19 nt, Artificial Sequence
  Description of Artificial Sequence: Synthetic oligonucleotide
  Antisense Strand to SEQ ID NO: 472505
aauaaagcuacgaacaucu

SEQ ID NO: 472507 - RNA, 19 nt, Artificial Sequence
  Description of Artificial Sequence: Synthetic oligonucleotide
  Sense strand starting at position 2114 of SEQ ID NO: 317204
guagcuuuauuucccagua

SEQ ID NO: 472508 - RNA, 19 nt, Artificial Sequence
  Description of Artificial Sequence: Synthetic oligonucleotide
  Antisense Strand to SEQ ID NO: 472507
uacugggaaauaaagcuac

SEQ ID NO: 472509 - RNA, 19 nt, Artificial Sequence
  Description of Artificial Sequence: Synthetic oligonucleotide
  Sense strand starting at position 2116 of SEQ ID NO: 317204
agcuuuauuucccaguaca

SEQ ID NO: 472510 - RNA, 19 nt, Artificial Sequence
  Description of Artificial Sequence: Synthetic oligonucleotide
  Antisense Strand to SEQ ID NO: 472509
uguacugggaaauaaagcu

SEQ ID NO: 472511 - RNA, 19 nt, Artificial Sequence
  Description of Artificial Sequence: Synthetic oligonucleotide
  Sense strand starting at position 2164 of SEQ ID NO: 317204
guugaauaauuguguguau

SEQ ID NO: 472512 - RNA, 19 nt, Artificial Sequence
  Description of Artificial Sequence: Synthetic oligonucleotide
  Antisense Strand to SEQ ID NO: 472511
auacacacaauuauucaac

SEQ ID NO: 472513 - RNA, 19 nt, Artificial Sequence
  Description of Artificial Sequence: Synthetic oligonucleotide
  Sense strand starting at position 2166 of SEQ ID NO: 317204
ugaauaauuguguguauug

SEQ ID NO: 472514 - RNA, 19 nt, Artificial Sequence
  Description of Artificial Sequence: Synthetic oligonucleotide
  Antisense Strand to SEQ ID NO: 472513
caauacacacaauuauuca

SEQ ID NO: 472515 - RNA, 19 nt, Artificial Sequence
  Description of Artificial Sequence: Synthetic oligonucleotide
  Sense strand starting at position 2167 of SEQ ID NO: 317204
gaauaauuguguguauuga

SEQ ID NO: 472516 - RNA, 19 nt, Artificial Sequence
  Description of Artificial Sequence: Synthetic oligonucleotide
  Antisense Strand to SEQ ID NO: 472515
ucaauacacacaauuauuc

SEQ ID NO: 472517 - RNA, 19 nt, Artificial Sequence
  Description of Artificial Sequence: Synthetic oligonucleotide
  Sense strand starting at position 2209 of SEQ ID NO: 317204
uggcgugauguucugaugu

SEQ ID NO: 472518 - RNA, 19 nt, Artificial Sequence
  Description of Artificial Sequence: Synthetic oligonucleotide
  Antisense Strand to SEQ ID NO: 472517
acaucagaacaucacgcca

SEQ ID NO: 472519 - RNA, 19 nt, Artificial Sequence
  Description of Artificial Sequence: Synthetic oligonucleotide
  Sense strand starting at position 2211 of SEQ ID NO: 317204
gcgugauguucugauguaa

SEQ ID NO: 472520 - RNA, 19 nt, Artificial Sequence
  Description of Artificial Sequence: Synthetic oligonucleotide
  Antisense Strand to SEQ ID NO: 472519
uuacaucagaacaucacgc

SEQ ID NO: 472521 - RNA, 19 nt, Artificial Sequence
  Description of Artificial Sequence: Synthetic oligonucleotide
  Sense strand starting at position 2228 of SEQ ID NO: 317204
aaguauuuguugcagaaag

SEQ ID NO: 472522 - RNA, 19 nt, Artificial Sequence
  Description of Artificial Sequence: Synthetic oligonucleotide
  Antisense Strand to SEQ ID NO: 472521
cuuucugcaacaaauacuu

SEQ ID NO: 472523 - RNA, 19 nt, Artificial Sequence
  Description of Artificial Sequence: Synthetic oligonucleotide
  Sense strand starting at position 2301 of SEQ ID NO: 317204
gugagaacauuacaagucu

SEQ ID NO: 472524 - RNA, 19 nt, Artificial Sequence
  Description of Artificial Sequence: Synthetic oligonucleotide
  Antisense Strand to SEQ ID NO: 472523
agacuuguaauguucucac

SEQ ID NO: 472525 - RNA, 19 nt, Artificial Sequence
  Description of Artificial Sequence: Synthetic oligonucleotide
  Sense strand starting at position 2325 of SEQ ID NO: 317204
cuagcaauuugguauacaa

SEQ ID NO: 472526 - RNA, 19 nt, Artificial Sequence
  Description of Artificial Sequence: Synthetic oligonucleotide
  Antisense Strand to SEQ ID NO: 472525
uuguauaccaaauugcuag

SEQ ID NO: 472527 - RNA, 19 nt, Artificial Sequence
  Description of Artificial Sequence: Synthetic oligonucleotide
  Sense strand starting at position 2357 of SEQ ID NO: 317204
cggcauccucagggaaauu

SEQ ID NO: 472528 - RNA, 19 nt, Artificial Sequence
  Description of Artificial Sequence: Synthetic oligonucleotide
  Antisense Strand to SEQ ID NO: 472527
aauuucccugaggaugccg

SEQ ID NO: 472529 - RNA, 19 nt, Artificial Sequence
  Description of Artificial Sequence: Synthetic oligonucleotide
  Sense strand starting at position 2414 of SEQ ID NO: 317204
guucaagucccggauguga

SEQ ID NO: 472530 - RNA, 19 nt, Artificial Sequence
  Description of Artificial Sequence: Synthetic oligonucleotide
  Antisense Strand to SEQ ID NO: 472529
ucacauccgggacuugaac

SEQ ID NO: 472531 - RNA, 19 nt, Artificial Sequence
  Description of Artificial Sequence: Synthetic oligonucleotide
  Sense strand starting at position 2416 of SEQ ID NO: 317204
ucaagucccggaugugaaa

SEQ ID NO: 472532 - RNA, 19 nt, Artificial Sequence
  Description of Artificial Sequence: Synthetic oligonucleotide
  Antisense Strand to SEQ ID NO: 472531
uuucacauccgggacuuga

SEQ ID NO: 472533 - RNA, 19 nt, Artificial Sequence
  Description of Artificial Sequence: Synthetic oligonucleotide
  Sense strand starting at position 2428 of SEQ ID NO: 317204
ugugaaauggccuagaguu

SEQ ID NO: 472534 - RNA, 19 nt, Artificial Sequence
  Description of Artificial Sequence: Synthetic oligonucleotide
  Antisense Strand to SEQ ID NO: 472533
aacucuaggccauuucaca

SEQ ID NO: 472535 - RNA, 19 nt, Artificial Sequence
  Description of Artificial Sequence: Synthetic oligonucleotide
  Sense strand starting at position 2436 of SEQ ID NO: 317204
ggccuagaguuuguacaga

SEQ ID NO: 472536 - RNA, 19 nt, Artificial Sequence
  Description of Artificial Sequence: Synthetic oligonucleotide
  Antisense Strand to SEQ ID NO: 472535
ucuguacaaacucuaggcc

SEQ ID NO: 472537 - RNA, 19 nt, Artificial Sequence
  Description of Artificial Sequence: Synthetic oligonucleotide
  Sense strand starting at position 2532 of SEQ ID NO: 317204
gcuguucuacuguauuguu

SEQ ID NO: 472538 - RNA, 19 nt, Artificial Sequence
  Description of Artificial Sequence: Synthetic oligonucleotide
  Antisense Strand to SEQ ID NO: 472537
aacaauacaguagaacagc

SEQ ID NO: 472539 - RNA, 19 nt, Artificial Sequence
  Description of Artificial Sequence: Synthetic oligonucleotide
  Sense strand starting at position 2593 of SEQ ID NO: 317204
ucauaaauccucggaagca

SEQ ID NO: 472540 - RNA, 19 nt, Artificial Sequence
  Description of Artificial Sequence: Synthetic oligonucleotide
  Antisense Strand to SEQ ID NO: 472539
ugcuuccgaggauuuauga

SEQ ID NO: 472541 - RNA, 19 nt, Artificial Sequence
  Description of Artificial Sequence: Synthetic oligonucleotide
  Sense strand starting at position 2631 of SEQ ID NO: 317204
cccuguguacugugguuaa

SEQ ID NO: 472542 - RNA, 19 nt, Artificial Sequence
  Description of Artificial Sequence: Synthetic oligonucleotide
  Antisense Strand to SEQ ID NO: 472541
uuaaccacaguacacaggg

SEQ ID NO: 472543 - RNA, 19 nt, Artificial Sequence
  Description of Artificial Sequence: Synthetic oligonucleotide
  Sense strand starting at position 2815 of SEQ ID NO: 317204
ucggaucccacaugugagu

SEQ ID NO: 472544 - RNA, 19 nt, Artificial Sequence
  Description of Artificial Sequence: Synthetic oligonucleotide
  Antisense Strand to SEQ ID NO: 472543
acucacaugugggauccga

SEQ ID NO: 472545 - RNA, 19 nt, Artificial Sequence
  Description of Artificial Sequence: Synthetic oligonucleotide
  Sense strand starting at position 2824 of SEQ ID NO: 317204
acaugugagugagauccua

SEQ ID NO: 472546 - RNA, 19 nt, Artificial Sequence
  Description of Artificial Sequence: Synthetic oligonucleotide
  Antisense Strand to SEQ ID NO: 472545
uaggaucucacucacaugu

SEQ ID NO: 472547 - RNA, 19 nt, Artificial Sequence
  Description of Artificial Sequence: Synthetic oligonucleotide
  Sense strand starting at position 3027 of SEQ ID NO: 317204
agccauguuucuccaguga

SEQ ID NO: 472548 - RNA, 19 nt, Artificial Sequence
  Description of Artificial Sequence: Synthetic oligonucleotide
  Antisense Strand to SEQ ID NO: 472547
ucacuggagaaacauggcu

SEQ ID NO: 472549 - RNA, 19 nt, Artificial Sequence
  Description of Artificial Sequence: Synthetic oligonucleotide
  Sense strand starting at position 3326 of SEQ ID NO: 317204
agcucagucacuggaguua

SEQ ID NO: 472550 - RNA, 19 nt, Artificial Sequence
  Description of Artificial Sequence: Synthetic oligonucleotide
  Antisense Strand to SEQ ID NO: 472549
uaacuccagugacugagcu

SEQ ID NO: 472551 - RNA, 19 nt, Artificial Sequence
  Description of Artificial Sequence: Synthetic oligonucleotide
  Sense strand starting at position 3337 of SEQ ID NO: 317204
uggaguuaguggguccaga

SEQ ID NO: 472552 - RNA, 19 nt, Artificial Sequence
  Description of Artificial Sequence: Synthetic oligonucleotide
  Antisense Strand to SEQ ID NO: 472551
ucuggacccacuaacucca

SEQ ID NO: 472553 - RNA, 19 nt, Artificial Sequence
  Description of Artificial Sequence: Synthetic oligonucleotide
  Sense strand starting at position 3572 of SEQ ID NO: 317204
ucaggagacucgcuguaga

SEQ ID NO: 472554 - RNA, 19 nt, Artificial Sequence
  Description of Artificial Sequence: Synthetic oligonucleotide
  Antisense Strand to SEQ ID NO: 472553
ucuacagcgagucuccuga

SEQ ID NO: 472555 - RNA, 19 nt, Artificial Sequence
  Description of Artificial Sequence: Synthetic oligonucleotide
  Sense strand starting at position 3575 of SEQ ID NO: 317204
ggagacucgcuguagaugu

SEQ ID NO: 472556 - RNA, 19 nt, Artificial Sequence
  Description of Artificial Sequence: Synthetic oligonucleotide
  Antisense Strand to SEQ ID NO: 472555
acaucuacagcgagucucc

SEQ ID NO: 472557 - RNA, 19 nt, Artificial Sequence
  Description of Artificial Sequence: Synthetic oligonucleotide
  Sense strand starting at position 3582 of SEQ ID NO: 317204
cgcuguagauguguggaau

SEQ ID NO: 472558 - RNA, 19 nt, Artificial Sequence
  Description of Artificial Sequence: Synthetic oligonucleotide
  Antisense Strand to SEQ ID NO: 472557
auuccacacaucuacagcg

SEQ ID NO: 472559 - RNA, 19 nt, Artificial Sequence
  Description of Artificial Sequence: Synthetic oligonucleotide
  Sense strand starting at position 3583 of SEQ ID NO: 317204
gcuguagauguguggaauc

SEQ ID NO: 472560 - RNA, 19 nt, Artificial Sequence
  Description of Artificial Sequence: Synthetic oligonucleotide
  Antisense Strand to SEQ ID NO: 472559
gauuccacacaucuacagc

SEQ ID NO: 472561 - RNA, 19 nt, Artificial Sequence
  Description of Artificial Sequence: Synthetic oligonucleotide
  Sense strand starting at position 3594 of SEQ ID NO: 317204
guggaaucgccaggugcau

SEQ ID NO: 472562 - RNA, 19 nt, Artificial Sequence
  Description of Artificial Sequence: Synthetic oligonucleotide
  Antisense Strand to SEQ ID NO: 472561
augcaccuggcgauuccac

SEQ ID NO: 472563 - RNA, 19 nt, Artificial Sequence
  Description of Artificial Sequence: Synthetic oligonucleotide
  Sense strand starting at position 3607 of SEQ ID NO: 317204
gugcauucuccucgcguga

SEQ ID NO: 472564 - RNA, 19 nt, Artificial Sequence
  Description of Artificial Sequence: Synthetic oligonucleotide
  Antisense Strand to SEQ ID NO: 472563
ucacgcgaggagaaugcac

SEQ ID NO: 472565 - RNA, 19 nt, Artificial Sequence
  Description of Artificial Sequence: Synthetic oligonucleotide
  Sense strand starting at position 310 of SEQ ID NO: 317205
ugguuaaucaagugacaga

SEQ ID NO: 472566 - RNA, 19 nt, Artificial Sequence
  Description of Artificial Sequence: Synthetic oligonucleotide
  Antisense Strand to SEQ ID NO: 472565
ucugucacuugauuaacca

SEQ ID NO: 472567 - RNA, 19 nt, Artificial Sequence
  Description of Artificial Sequence: Synthetic oligonucleotide
  Sense strand starting at position 321 of SEQ ID NO: 317205
gugacagaauccuugcauu

SEQ ID NO: 472568 - RNA, 19 nt, Artificial Sequence
  Description of Artificial Sequence: Synthetic oligonucleotide
  Antisense Strand to SEQ ID NO: 472567
aaugcaaggauucugucac

SEQ ID NO: 472569 - RNA, 19 nt, Artificial Sequence
  Description of Artificial Sequence: Synthetic oligonucleotide
  Sense strand starting at position 340 of SEQ ID NO: 317205
cugaauagaugauauacaa

SEQ ID NO: 472570 - RNA, 19 nt, Artificial Sequence
  Description of Artificial Sequence: Synthetic oligonucleotide
  Antisense Strand to SEQ ID NO: 472569
uuguauaucaucuauucag

SEQ ID NO: 472571 - RNA, 19 nt, Artificial Sequence
  Description of Artificial Sequence: Synthetic oligonucleotide
  Sense strand starting at position 412 of SEQ ID NO: 317205
uaaacagggcguuaaauau

SEQ ID NO: 472572 - RNA, 19 nt, Artificial Sequence
  Description of Artificial Sequence: Synthetic oligonucleotide
  Antisense Strand to SEQ ID NO: 472571
auauuuaacgcccuguuua

SEQ ID NO: 472573 - RNA, 19 nt, Artificial Sequence
  Description of Artificial Sequence: Synthetic oligonucleotide
  Sense strand starting at position 607 of SEQ ID NO: 317205
cugcccuggcuuuaugaaa

SEQ ID NO: 472574 - RNA, 19 nt, Artificial Sequence
  Description of Artificial Sequence: Synthetic oligonucleotide
  Antisense Strand to SEQ ID NO: 472573
uuucauaaagccagggcag

SEQ ID NO: 472575 - RNA, 19 nt, Artificial Sequence
  Description of Artificial Sequence: Synthetic oligonucleotide
  Sense strand starting at position 663 of SEQ ID NO: 317205
ggaacuugcaucugagagu

SEQ ID NO: 472576 - RNA, 19 nt, Artificial Sequence
  Description of Artificial Sequence: Synthetic oligonucleotide
  Antisense Strand to SEQ ID NO: 472575
acucucagaugcaaguucc

SEQ ID NO: 472577 - RNA, 19 nt, Artificial Sequence
  Description of Artificial Sequence: Synthetic oligonucleotide
  Sense strand starting at position 709 of SEQ ID NO: 317205
agcugaaaguaauucucau

SEQ ID NO: 472578 - RNA, 19 nt, Artificial Sequence
  Description of Artificial Sequence: Synthetic oligonucleotide
  Antisense Strand to SEQ ID NO: 472577
augagaauuacuuucagcu

SEQ ID NO: 472579 - RNA, 19 nt, Artificial Sequence
  Description of Artificial Sequence: Synthetic oligonucleotide
  Sense strand starting at position 737 of SEQ ID NO: 317205
aggauuaagucguuuccag

SEQ ID NO: 472580 - RNA, 19 nt, Artificial Sequence
  Description of Artificial Sequence: Synthetic oligonucleotide
  Antisense Strand to SEQ ID NO: 472579
cuggaaacgacuuaauccu

SEQ ID NO: 472581 - RNA, 19 nt, Artificial Sequence
  Description of Artificial Sequence: Synthetic oligonucleotide
  Sense strand starting at position 970 of SEQ ID NO: 317205
aauuaaugcggcugauaua

SEQ ID NO: 472582 - RNA, 19 nt, Artificial Sequence
  Description of Artificial Sequence: Synthetic oligonucleotide
  Antisense Strand to SEQ ID NO: 472581
uauaucagccgcauuaauu

SEQ ID NO: 472583 - RNA, 19 nt, Artificial Sequence
  Description of Artificial Sequence: Synthetic oligonucleotide
  Sense strand starting at position 971 of SEQ ID NO: 317205
auuaaugcggcugauauau

SEQ ID NO: 472584 - RNA, 19 nt, Artificial Sequence
  Description of Artificial Sequence: Synthetic oligonucleotide
  Antisense Strand to SEQ ID NO: 472583
auauaucagccgcauuaau

SEQ ID NO: 472585 - RNA, 19 nt, Artificial Sequence
  Description of Artificial Sequence: Synthetic oligonucleotide
  Sense strand starting at position 1015 of SEQ ID NO: 317205
cccaaaucugaguaaaguc

SEQ ID NO: 472586 - RNA, 19 nt, Artificial Sequence
  Description of Artificial Sequence: Synthetic oligonucleotide
  Antisense Strand to SEQ ID NO: 472585
gacuuuacucagauuuggg

SEQ ID NO: 472587 - RNA, 19 nt, Artificial Sequence
  Description of Artificial Sequence: Synthetic oligonucleotide
  Sense strand starting at position 1072 of SEQ ID NO: 317205
gaggcaguucuugaacuuc

SEQ ID NO: 472588 - RNA, 19 nt, Artificial Sequence
  Description of Artificial Sequence: Synthetic oligonucleotide
  Antisense Strand to SEQ ID NO: 472587
gaaguucaagaacugccuc

SEQ ID NO: 472589 - RNA, 19 nt, Artificial Sequence
  Description of Artificial Sequence: Synthetic oligonucleotide
  Sense strand starting at position 1091 of SEQ ID NO: 317205
uaacuuuagcaaugagcga

SEQ ID NO: 472590 - RNA, 19 nt, Artificial Sequence
  Description of Artificial Sequence: Synthetic oligonucleotide
  Antisense Strand to SEQ ID NO: 472589
ucgcucauugcuaaaguua

SEQ ID NO: 472591 - RNA, 19 nt, Artificial Sequence
  Description of Artificial Sequence: Synthetic oligonucleotide
  Sense strand starting at position 1115 of SEQ ID NO: 317205
caaugugcauuugaaauga

SEQ ID NO: 472592 - RNA, 19 nt, Artificial Sequence
  Description of Artificial Sequence: Synthetic oligonucleotide
  Antisense Strand to SEQ ID NO: 472591
ucauuucaaaugcacauug

SEQ ID NO: 472593 - RNA, 19 nt, Artificial Sequence
  Description of Artificial Sequence: Synthetic oligonucleotide
  Sense strand starting at position 1119 of SEQ ID NO: 317205
gugcauuugaaaugacguu

SEQ ID NO: 472594 - RNA, 19 nt, Artificial Sequence
  Description of Artificial Sequence: Synthetic oligonucleotide
  Antisense Strand to SEQ ID NO: 472593
aacgucauuucaaaugcac

SEQ ID NO: 472595 - RNA, 19 nt, Artificial Sequence
  Description of Artificial Sequence: Synthetic oligonucleotide
  Sense strand starting at position 1262 of SEQ ID NO: 317205
cgcacauuugcauguaaug

SEQ ID NO: 472596 - RNA, 19 nt, Artificial Sequence
  Description of Artificial Sequence: Synthetic oligonucleotide
  Antisense Strand to SEQ ID NO: 472595
cauuacaugcaaaugugcg

SEQ ID NO: 472597 - RNA, 19 nt, Artificial Sequence
  Description of Artificial Sequence: Synthetic oligonucleotide
  Sense strand starting at position 1474 of SEQ ID NO: 317205
ggcagaugucagcaggaga

SEQ ID NO: 472598 - RNA, 19 nt, Artificial Sequence
  Description of Artificial Sequence: Synthetic oligonucleotide
  Antisense Strand to SEQ ID NO: 472597
ucuccugcugacaucugcc

SEQ ID NO: 472599 - RNA, 19 nt, Artificial Sequence
  Description of Artificial Sequence: Synthetic oligonucleotide
  Sense strand starting at position 1633 of SEQ ID NO: 317205
cagagaaucgcaggguagu

SEQ ID NO: 472600 - RNA, 19 nt, Artificial Sequence
  Description of Artificial Sequence: Synthetic oligonucleotide
  Antisense Strand to SEQ ID NO: 472599
acuacccugcgauucucug

SEQ ID NO: 472601 - RNA, 19 nt, Artificial Sequence
  Description of Artificial Sequence: Synthetic oligonucleotide
  Sense strand starting at position 1742 of SEQ ID NO: 317205
ccaguuucccaagguuuaa

SEQ ID NO: 472602 - RNA, 19 nt, Artificial Sequence
  Description of Artificial Sequence: Synthetic oligonucleotide
  Antisense Strand to SEQ ID NO: 472601
uuaaaccuugggaaacugg

SEQ ID NO: 472603 - RNA, 19 nt, Artificial Sequence
  Description of Artificial Sequence: Synthetic oligonucleotide
  Sense strand starting at position 1951 of SEQ ID NO: 317205
agcaguuucugaucaauaa

SEQ ID NO: 472604 - RNA, 19 nt, Artificial Sequence
  Description of Artificial Sequence: Synthetic oligonucleotide
  Antisense Strand to SEQ ID NO: 472603
uuauugaucagaaacugcu

SEQ ID NO: 472605 - RNA, 19 nt, Artificial Sequence
  Description of Artificial Sequence: Synthetic oligonucleotide
  Sense strand starting at position 1952 of SEQ ID NO: 317205
gcaguuucugaucaauaac

SEQ ID NO: 472606 - RNA, 19 nt, Artificial Sequence
  Description of Artificial Sequence: Synthetic oligonucleotide
  Antisense Strand to SEQ ID NO: 472605
guuauugaucagaaacugc

SEQ ID NO: 472607 - RNA, 19 nt, Artificial Sequence
  Description of Artificial Sequence: Synthetic oligonucleotide
  Sense strand starting at position 2802 of SEQ ID NO: 317205
aagggugcugcagaaguaa

SEQ ID NO: 472608 - RNA, 19 nt, Artificial Sequence
  Description of Artificial Sequence: Synthetic oligonucleotide
  Antisense Strand to SEQ ID NO: 472607
uuacuucugcagcacccuu

SEQ ID NO: 472609 - RNA, 19 nt, Artificial Sequence
  Description of Artificial Sequence: Synthetic oligonucleotide
  Sense strand starting at position 2810 of SEQ ID NO: 317205
ugcagaaguaagugggaaa

SEQ ID NO: 472610 - RNA, 19 nt, Artificial Sequence
  Description of Artificial Sequence: Synthetic oligonucleotide
  Antisense Strand to SEQ ID NO: 472609
uuucccacuuacuucugca

SEQ ID NO: 472611 - RNA, 19 nt, Artificial Sequence
  Description of Artificial Sequence: Synthetic oligonucleotide
  Sense strand starting at position 2813 of SEQ ID NO: 317205
agaaguaagugggaaagaa

SEQ ID NO: 472612 - RNA, 19 nt, Artificial Sequence
  Description of Artificial Sequence: Synthetic oligonucleotide
  Antisense Strand to SEQ ID NO: 472611
uucuuucccacuuacuucu

SEQ ID NO: 472613 - RNA, 19 nt, Artificial Sequence
  Description of Artificial Sequence: Synthetic oligonucleotide
  Sense strand starting at position 2993 of SEQ ID NO: 317205
uccguaaagcaggacaaau

SEQ ID NO: 472614 - RNA, 19 nt, Artificial Sequence
  Description of Artificial Sequence: Synthetic oligonucleotide
  Antisense Strand to SEQ ID NO: 472613
auuuguccugcuuuacgga

SEQ ID NO: 472615 - RNA, 19 nt, Artificial Sequence
  Description of Artificial Sequence: Synthetic oligonucleotide
  Sense strand starting at position 3286 of SEQ ID NO: 317205
gugauagaauuguuuacau

SEQ ID NO: 472616 - RNA, 19 nt, Artificial Sequence
  Description of Artificial Sequence: Synthetic oligonucleotide
  Antisense Strand to SEQ ID NO: 472615
auguaaacaauucuaucac

SEQ ID NO: 472617 - RNA, 19 nt, Artificial Sequence
  Description of Artificial Sequence: Synthetic oligonucleotide
  Sense strand starting at position 3368 of SEQ ID NO: 317205
gagagaggccgaugcuuua

SEQ ID NO: 472618 - RNA, 19 nt, Artificial Sequence
  Description of Artificial Sequence: Synthetic oligonucleotide
  Antisense Strand to SEQ ID NO: 472617
uaaagcaucggccucucuc

SEQ ID NO: 472619 - RNA, 19 nt, Artificial Sequence
  Description of Artificial Sequence: Synthetic oligonucleotide
  Sense strand starting at position 3406 of SEQ ID NO: 317205
gguagucugaaaugaaaca

SEQ ID NO: 472620 - RNA, 19 nt, Artificial Sequence
  Description of Artificial Sequence: Synthetic oligonucleotide
  Antisense Strand to SEQ ID NO: 472619
uguuucauuucagacuacc

SEQ ID NO: 472621 - RNA, 19 nt, Artificial Sequence
  Description of Artificial Sequence: Synthetic oligonucleotide
  Sense strand starting at position 3462 of SEQ ID NO: 317205
cuaaauaugucugugacag

SEQ ID NO: 472622 - RNA, 19 nt, Artificial Sequence
  Description of Artificial Sequence: Synthetic oligonucleotide
  Antisense Strand to SEQ ID NO: 472621
cugucacagacauauuuag

SEQ ID NO: 472623 - RNA, 19 nt, Artificial Sequence
  Description of Artificial Sequence: Synthetic oligonucleotide
  Sense strand starting at position 3463 of SEQ ID NO: 317205
uaaauaugucugugacagg

SEQ ID NO: 472624 - RNA, 19 nt, Artificial Sequence
  Description of Artificial Sequence: Synthetic oligonucleotide
  Antisense Strand to SEQ ID NO: 472623
ccugucacagacauauuua

SEQ ID NO: 472625 - RNA, 19 nt, Artificial Sequence
  Description of Artificial Sequence: Synthetic oligonucleotide
  Sense strand starting at position 3517 of SEQ ID NO: 317205
cauugucaauguguuaaag

SEQ ID NO: 472626 - RNA, 19 nt, Artificial Sequence
  Description of Artificial Sequence: Synthetic oligonucleotide
  Antisense Strand to SEQ ID NO: 472625
cuuuaacacauugacaaug

SEQ ID NO: 472627 - RNA, 19 nt, Artificial Sequence
  Description of Artificial Sequence: Synthetic oligonucleotide
  Sense strand starting at position 3621 of SEQ ID NO: 317205
gcaggcaaaucagcaauau

SEQ ID NO: 472628 - RNA, 19 nt, Artificial Sequence
  Description of Artificial Sequence: Synthetic oligonucleotide
  Antisense Strand to SEQ ID NO: 472627
auauugcugauuugccugc

SEQ ID NO: 472629 - RNA, 19 nt, Artificial Sequence
  Description of Artificial Sequence: Synthetic oligonucleotide
  Sense strand starting at position 3719 of SEQ ID NO: 317205
auagcaaugucccugaaac

SEQ ID NO: 472630 - RNA, 19 nt, Artificial Sequence
  Description of Artificial Sequence: Synthetic oligonucleotide
  Antisense Strand to SEQ ID NO: 472629
guuucagggacauugcuau

SEQ ID NO: 472631 - RNA, 19 nt, Artificial Sequence
  Description of Artificial Sequence: Synthetic oligonucleotide
  Sense strand starting at position 3721 of SEQ ID NO: 317205
agcaaugucccugaaacua

SEQ ID NO: 472632 - RNA, 19 nt, Artificial Sequence
  Description of Artificial Sequence: Synthetic oligonucleotide
  Antisense Strand to SEQ ID NO: 472631
uaguuucagggacauugcu

SEQ ID NO: 472633 - RNA, 19 nt, Artificial Sequence
  Description of Artificial Sequence: Synthetic oligonucleotide
  Sense strand starting at position 3733 of SEQ ID NO: 317205
gaaacuaaggaguggcauu

SEQ ID NO: 472634 - RNA, 19 nt, Artificial Sequence
  Description of Artificial Sequence: Synthetic oligonucleotide
  Antisense Strand to SEQ ID NO: 472633
aaugccacuccuuaguuuc

SEQ ID NO: 472635 - RNA, 19 nt, Artificial Sequence
  Description of Artificial Sequence: Synthetic oligonucleotide
  Sense strand starting at position 3796 of SEQ ID NO: 317205
uucuucaguggugaggaaa

SEQ ID NO: 472636 - RNA, 19 nt, Artificial Sequence
  Description of Artificial Sequence: Synthetic oligonucleotide
  Antisense Strand to SEQ ID NO: 472635
uuuccucaccacugaagaa

SEQ ID NO: 472637 - RNA, 19 nt, Artificial Sequence
  Description of Artificial Sequence: Synthetic oligonucleotide
  Sense strand starting at position 3864 of SEQ ID NO: 317205
agaccuuucugcuuggaau

SEQ ID NO: 472638 - RNA, 19 nt, Artificial Sequence
  Description of Artificial Sequence: Synthetic oligonucleotide
  Antisense Strand to SEQ ID NO: 472637
auuccaagcagaaaggucu

SEQ ID NO: 472639 - RNA, 19 nt, Artificial Sequence
  Description of Artificial Sequence: Synthetic oligonucleotide
  Sense strand starting at position 3866 of SEQ ID NO: 317205
accuuucugcuuggaauau

SEQ ID NO: 472640 - RNA, 19 nt, Artificial Sequence
  Description of Artificial Sequence: Synthetic oligonucleotide
  Antisense Strand to SEQ ID NO: 472639
auauuccaagcagaaaggu

SEQ ID NO: 472641 - RNA, 19 nt, Artificial Sequence
  Description of Artificial Sequence: Synthetic oligonucleotide
  Sense strand starting at position 3878 of SEQ ID NO: 317205
ggaauauccuagucuucuu

SEQ ID NO: 472642 - RNA, 19 nt, Artificial Sequence
  Description of Artificial Sequence: Synthetic oligonucleotide
  Antisense Strand to SEQ ID NO: 472641
aagaagacuaggauauucc

SEQ ID NO: 472643 - RNA, 19 nt, Artificial Sequence
  Description of Artificial Sequence: Synthetic oligonucleotide
  Sense strand starting at position 3931 of SEQ ID NO: 317205
ccaucugucucauucuuga

SEQ ID NO: 472644 - RNA, 19 nt, Artificial Sequence
  Description of Artificial Sequence: Synthetic oligonucleotide
  Antisense Strand to SEQ ID NO: 472643
ucaagaaugagacagaugg

SEQ ID NO: 472645 - RNA, 19 nt, Artificial Sequence
  Description of Artificial Sequence: Synthetic oligonucleotide
  Sense strand starting at position 237 of SEQ ID NO: 317206
ggaguuaauuucgugugua

SEQ ID NO: 472646 - RNA, 19 nt, Artificial Sequence
  Description of Artificial Sequence: Synthetic oligonucleotide
  Antisense Strand to SEQ ID NO: 472645
uacacacgaaauuaacucc

SEQ ID NO: 472647 - RNA, 19 nt, Artificial Sequence
  Description of Artificial Sequence: Synthetic oligonucleotide
  Sense strand starting at position 240 of SEQ ID NO: 317206
guuaauuucguguguaaau

SEQ ID NO: 472648 - RNA, 19 nt, Artificial Sequence
  Description of Artificial Sequence: Synthetic oligonucleotide
  Antisense Strand to SEQ ID NO: 472647
auuuacacacgaaauuaac

SEQ ID NO: 472649 - RNA, 19 nt, Artificial Sequence
  Description of Artificial Sequence: Synthetic oligonucleotide
  Sense strand starting at position 241 of SEQ ID NO: 317206
uuaauuucguguguaaauc

SEQ ID NO: 472650 - RNA, 19 nt, Artificial Sequence
  Description of Artificial Sequence: Synthetic oligonucleotide
  Antisense Strand to SEQ ID NO: 472649
gauuuacacacgaaauuaa

SEQ ID NO: 472651 - RNA, 19 nt, Artificial Sequence
  Description of Artificial Sequence: Synthetic oligonucleotide
  Sense strand starting at position 455 of SEQ ID NO: 317206
gggagaauaugguuuaccu

SEQ ID NO: 472652 - RNA, 19 nt, Artificial Sequence
  Description of Artificial Sequence: Synthetic oligonucleotide
  Antisense Strand to SEQ ID NO: 472651
agguaaaccauauucuccc

SEQ ID NO: 472653 - RNA, 19 nt, Artificial Sequence
  Description of Artificial Sequence: Synthetic oligonucleotide
  Sense strand starting at position 536 of SEQ ID NO: 317206
acaagaaguucggcaccuu

SEQ ID NO: 472654 - RNA, 19 nt, Artificial Sequence
  Description of Artificial Sequence: Synthetic oligonucleotide
  Antisense Strand to SEQ ID NO: 472653
aaggugccgaacuucuugu

SEQ ID NO: 472655 - RNA, 19 nt, Artificial Sequence
  Description of Artificial Sequence: Synthetic oligonucleotide
  Sense strand starting at position 695 of SEQ ID NO: 317206
ccuuggugugcgguucgaa

SEQ ID NO: 472656 - RNA, 19 nt, Artificial Sequence
  Description of Artificial Sequence: Synthetic oligonucleotide
  Antisense Strand to SEQ ID NO: 472655
uucgaaccgcacaccaagg

SEQ ID NO: 472657 - RNA, 19 nt, Artificial Sequence
  Description of Artificial Sequence: Synthetic oligonucleotide
  Sense strand starting at position 696 of SEQ ID NO: 317206
cuuggugugcgguucgaaa

SEQ ID NO: 472658 - RNA, 19 nt, Artificial Sequence
  Description of Artificial Sequence: Synthetic oligonucleotide
  Antisense Strand to SEQ ID NO: 472657
uuucgaaccgcacaccaag

SEQ ID NO: 472659 - RNA, 19 nt, Artificial Sequence
  Description of Artificial Sequence: Synthetic oligonucleotide
  Sense strand starting at position 697 of SEQ ID NO: 317206
uuggugugcgguucgaaau

SEQ ID NO: 472660 - RNA, 19 nt, Artificial Sequence
  Description of Artificial Sequence: Synthetic oligonucleotide
  Antisense Strand to SEQ ID NO: 472659
auuucgaaccgcacaccaa

SEQ ID NO: 472661 - RNA, 19 nt, Artificial Sequence
  Description of Artificial Sequence: Synthetic oligonucleotide
  Sense strand starting at position 707 of SEQ ID NO: 317206
guucgaaauuccucaaauc

SEQ ID NO: 472662 - RNA, 19 nt, Artificial Sequence
  Description of Artificial Sequence: Synthetic oligonucleotide
  Antisense Strand to SEQ ID NO: 472661
gauuugaggaauuucgaac

SEQ ID NO: 472663 - RNA, 19 nt, Artificial Sequence
  Description of Artificial Sequence: Synthetic oligonucleotide
  Sense strand starting at position 775 of SEQ ID NO: 317206
uguguuugucauuauucca

SEQ ID NO: 472664 - RNA, 19 nt, Artificial Sequence
  Description of Artificial Sequence: Synthetic oligonucleotide
  Antisense Strand to SEQ ID NO: 472663
uggaauaaugacaaacaca

SEQ ID NO: 472665 - RNA, 19 nt, Artificial Sequence
  Description of Artificial Sequence: Synthetic oligonucleotide
  Sense strand starting at position 1011 of SEQ ID NO: 317206
uccaguaaucacgcgcauu

SEQ ID NO: 472666 - RNA, 19 nt, Artificial Sequence
  Description of Artificial Sequence: Synthetic oligonucleotide
  Antisense Strand to SEQ ID NO: 472665
aaugcgcgugauuacugga

SEQ ID NO: 472667 - RNA, 19 nt, Artificial Sequence
  Description of Artificial Sequence: Synthetic oligonucleotide
  Sense strand starting at position 1314 of SEQ ID NO: 317206
cuugguguucggcccagua

SEQ ID NO: 472668 - RNA, 19 nt, Artificial Sequence
  Description of Artificial Sequence: Synthetic oligonucleotide
  Antisense Strand to SEQ ID NO: 472667
uacugggccgaacaccaag

SEQ ID NO: 472669 - RNA, 19 nt, Artificial Sequence
  Description of Artificial Sequence: Synthetic oligonucleotide
  Sense strand starting at position 1318 of SEQ ID NO: 317206
guguucggcccaguauuca

SEQ ID NO: 472670 - RNA, 19 nt, Artificial Sequence
  Description of Artificial Sequence: Synthetic oligonucleotide
  Antisense Strand to SEQ ID NO: 472669
ugaauacugggccgaacac

SEQ ID NO: 472671 - RNA, 19 nt, Artificial Sequence
  Description of Artificial Sequence: Synthetic oligonucleotide
  Sense strand starting at position 1399 of SEQ ID NO: 317206
aggccauaggguuguuaga

SEQ ID NO: 472672 - RNA, 19 nt, Artificial Sequence
  Description of Artificial Sequence: Synthetic oligonucleotide
  Antisense Strand to SEQ ID NO: 472671
ucuaacaacccuauggccu

SEQ ID NO: 472673 - RNA, 19 nt, Artificial Sequence
  Description of Artificial Sequence: Synthetic oligonucleotide
  Sense strand starting at position 1401 of SEQ ID NO: 317206
gccauaggguuguuagaaa

SEQ ID NO: 472674 - RNA, 19 nt, Artificial Sequence
  Description of Artificial Sequence: Synthetic oligonucleotide
  Antisense Strand to SEQ ID NO: 472673
uuucuaacaacccuauggc

SEQ ID NO: 472675 - RNA, 19 nt, Artificial Sequence
  Description of Artificial Sequence: Synthetic oligonucleotide
  Sense strand starting at position 1510 of SEQ ID NO: 317206
aagugaaguuuauuccgaa

SEQ ID NO: 472676 - RNA, 19 nt, Artificial Sequence
  Description of Artificial Sequence: Synthetic oligonucleotide
  Antisense Strand to SEQ ID NO: 472675
uucggaauaaacuucacuu

SEQ ID NO: 472677 - RNA, 19 nt, Artificial Sequence
  Description of Artificial Sequence: Synthetic oligonucleotide
  Sense strand starting at position 1511 of SEQ ID NO: 317206
agugaaguuuauuccgaaa

SEQ ID NO: 472678 - RNA, 19 nt, Artificial Sequence
  Description of Artificial Sequence: Synthetic oligonucleotide
  Antisense Strand to SEQ ID NO: 472677
uuucggaauaaacuucacu

SEQ ID NO: 472679 - RNA, 19 nt, Artificial Sequence
  Description of Artificial Sequence: Synthetic oligonucleotide
  Sense strand starting at position 2146 of SEQ ID NO: 317206
gcccaucauuuccagaaug

SEQ ID NO: 472680 - RNA, 19 nt, Artificial Sequence
  Description of Artificial Sequence: Synthetic oligonucleotide
  Antisense Strand to SEQ ID NO: 472679
cauucuggaaaugaugggc

SEQ ID NO: 472681 - RNA, 19 nt, Artificial Sequence
  Description of Artificial Sequence: Synthetic oligonucleotide
  Sense strand starting at position 2400 of SEQ ID NO: 317206
guugcuaguuauuuaauag

SEQ ID NO: 472682 - RNA, 19 nt, Artificial Sequence
  Description of Artificial Sequence: Synthetic oligonucleotide
  Antisense Strand to SEQ ID NO: 472681
cuauuaaauaacuagcaac

SEQ ID NO: 472683 - RNA, 19 nt, Artificial Sequence
  Description of Artificial Sequence: Synthetic oligonucleotide
  Sense strand starting at position 2425 of SEQ ID NO: 317206
gcaaacuguugaguccaau

SEQ ID NO: 472684 - RNA, 19 nt, Artificial Sequence
  Description of Artificial Sequence: Synthetic oligonucleotide
  Antisense Strand to SEQ ID NO: 472683
auuggacucaacaguuugc

SEQ ID NO: 472685 - RNA, 19 nt, Artificial Sequence
  Description of Artificial Sequence: Synthetic oligonucleotide
  Sense strand starting at position 2428 of SEQ ID NO: 317206
aacuguugaguccaauaug

SEQ ID NO: 472686 - RNA, 19 nt, Artificial Sequence
  Description of Artificial Sequence: Synthetic oligonucleotide
  Antisense Strand to SEQ ID NO: 472685
cauauuggacucaacaguu

SEQ ID NO: 472687 - RNA, 19 nt, Artificial Sequence
  Description of Artificial Sequence: Synthetic oligonucleotide
  Sense strand starting at position 2431 of SEQ ID NO: 317206
uguugaguccaauaugaca

SEQ ID NO: 472688 - RNA, 19 nt, Artificial Sequence
  Description of Artificial Sequence: Synthetic oligonucleotide
  Antisense Strand to SEQ ID NO: 472687
ugucauauuggacucaaca

SEQ ID NO: 472689 - RNA, 19 nt, Artificial Sequence
  Description of Artificial Sequence: Synthetic oligonucleotide
  Sense strand starting at position 2489 of SEQ ID NO: 317206
aagacuggguggucugaaa

SEQ ID NO: 472690 - RNA, 19 nt, Artificial Sequence
  Description of Artificial Sequence: Synthetic oligonucleotide
  Antisense Strand to SEQ ID NO: 472689
uuucagaccacccagucuu

SEQ ID NO: 472691 - RNA, 19 nt, Artificial Sequence
  Description of Artificial Sequence: Synthetic oligonucleotide
  Sense strand starting at position 2496 of SEQ ID NO: 317206
gguggucugaaauacggua

SEQ ID NO: 472692 - RNA, 19 nt, Artificial Sequence
  Description of Artificial Sequence: Synthetic oligonucleotide
  Antisense Strand to SEQ ID NO: 472691
uaccguauuucagaccacc

SEQ ID NO: 472693 - RNA, 19 nt, Artificial Sequence
  Description of Artificial Sequence: Synthetic oligonucleotide
  Sense strand starting at position 2541 of SEQ ID NO: 317206
uggaacguucuccgauaga

SEQ ID NO: 472694 - RNA, 19 nt, Artificial Sequence
  Description of Artificial Sequence: Synthetic oligonucleotide
  Antisense Strand to SEQ ID NO: 472693
ucuaucggagaacguucca

SEQ ID NO: 472695 - RNA, 19 nt, Artificial Sequence
  Description of Artificial Sequence: Synthetic oligonucleotide
  Sense strand starting at position 2753 of SEQ ID NO: 317206
ggucgaacccuacgaauuc

SEQ ID NO: 472696 - RNA, 19 nt, Artificial Sequence
  Description of Artificial Sequence: Synthetic oligonucleotide
  Antisense Strand to SEQ ID NO: 472695
gaauucguaggguucgacc

SEQ ID NO: 472697 - RNA, 19 nt, Artificial Sequence
  Description of Artificial Sequence: Synthetic oligonucleotide
  Sense strand starting at position 2762 of SEQ ID NO: 317206
cuacgaauuccuuggaauu

SEQ ID NO: 472698 - RNA, 19 nt, Artificial Sequence
  Description of Artificial Sequence: Synthetic oligonucleotide
  Antisense Strand to SEQ ID NO: 472697
aauuccaaggaauucguag

SEQ ID NO: 472699 - RNA, 19 nt, Artificial Sequence
  Description of Artificial Sequence: Synthetic oligonucleotide
  Sense strand starting at position 2763 of SEQ ID NO: 317206
uacgaauuccuuggaauug

SEQ ID NO: 472700 - RNA, 19 nt, Artificial Sequence
  Description of Artificial Sequence: Synthetic oligonucleotide
  Antisense Strand to SEQ ID NO: 472699
caauuccaaggaauucgua

SEQ ID NO: 472701 - RNA, 19 nt, Artificial Sequence
  Description of Artificial Sequence: Synthetic oligonucleotide
  Sense strand starting at position 2817 of SEQ ID NO: 317206
ggccagugucgggaggaaa

SEQ ID NO: 472702 - RNA, 19 nt, Artificial Sequence
  Description of Artificial Sequence: Synthetic oligonucleotide
  Antisense Strand to SEQ ID NO: 472701
uuuccucccgacacuggcc

SEQ ID NO: 472703 - RNA, 19 nt, Artificial Sequence
  Description of Artificial Sequence: Synthetic oligonucleotide
  Sense strand starting at position 3373 of SEQ ID NO: 317206
accguaauguuuguagaaa

SEQ ID NO: 472704 - RNA, 19 nt, Artificial Sequence
  Description of Artificial Sequence: Synthetic oligonucleotide
  Antisense Strand to SEQ ID NO: 472703
uuucuacaaacauuacggu

SEQ ID NO: 472705 - RNA, 19 nt, Artificial Sequence
  Description of Artificial Sequence: Synthetic oligonucleotide
  Sense strand starting at position 3461 of SEQ ID NO: 317206
acaugcuguuaaguugaga

SEQ ID NO: 472706 - RNA, 19 nt, Artificial Sequence
  Description of Artificial Sequence: Synthetic oligonucleotide
  Antisense Strand to SEQ ID NO: 472705
ucucaacuuaacagcaugu

SEQ ID NO: 472707 - RNA, 19 nt, Artificial Sequence
  Description of Artificial Sequence: Synthetic oligonucleotide
  Sense strand starting at position 3712 of SEQ ID NO: 317206
gaguuuaaagcagaaagca

SEQ ID NO: 472708 - RNA, 19 nt, Artificial Sequence
  Description of Artificial Sequence: Synthetic oligonucleotide
  Antisense Strand to SEQ ID NO: 472707
ugcuuucugcuuuaaacuc

SEQ ID NO: 472709 - RNA, 19 nt, Artificial Sequence
  Description of Artificial Sequence: Synthetic oligonucleotide
  Sense strand starting at position 3720 of SEQ ID NO: 317206
agcagaaagcaauggauga

SEQ ID NO: 472710 - RNA, 19 nt, Artificial Sequence
  Description of Artificial Sequence: Synthetic oligonucleotide
  Antisense Strand to SEQ ID NO: 472709
ucauccauugcuuucugcu

SEQ ID NO: 472711 - RNA, 19 nt, Artificial Sequence
  Description of Artificial Sequence: Synthetic oligonucleotide
  Sense strand starting at position 3788 of SEQ ID NO: 317206
gaaugaugccuuuguuaug

SEQ ID NO: 472712 - RNA, 19 nt, Artificial Sequence
  Description of Artificial Sequence: Synthetic oligonucleotide
  Antisense Strand to SEQ ID NO: 472711
cauaacaaaggcaucauuc

SEQ ID NO: 472713 - RNA, 19 nt, Artificial Sequence
  Description of Artificial Sequence: Synthetic oligonucleotide
  Sense strand starting at position 3789 of SEQ ID NO: 317206
aaugaugccuuuguuauga

SEQ ID NO: 472714 - RNA, 19 nt, Artificial Sequence
  Description of Artificial Sequence: Synthetic oligonucleotide
  Antisense Strand to SEQ ID NO: 472713
ucauaacaaaggcaucauu

SEQ ID NO: 472715 - RNA, 19 nt, Artificial Sequence
  Description of Artificial Sequence: Synthetic oligonucleotide
  Sense strand starting at position 3814 of SEQ ID NO: 317206
acaaacauuugcuaaaggu

SEQ ID NO: 472716 - RNA, 19 nt, Artificial Sequence
  Description of Artificial Sequence: Synthetic oligonucleotide
  Antisense Strand to SEQ ID NO: 472715
accuuuagcaaauguuugu

SEQ ID NO: 472717 - RNA, 19 nt, Artificial Sequence
  Description of Artificial Sequence: Synthetic oligonucleotide
  Sense strand starting at position 3840 of SEQ ID NO: 317206
ugugacauucuggaagguu

SEQ ID NO: 472718 - RNA, 19 nt, Artificial Sequence
  Description of Artificial Sequence: Synthetic oligonucleotide
  Antisense Strand to SEQ ID NO: 472717
aaccuuccagaaugucaca

SEQ ID NO: 472719 - RNA, 19 nt, Artificial Sequence
  Description of Artificial Sequence: Synthetic oligonucleotide
  Sense strand starting at position 3843 of SEQ ID NO: 317206
gacauucuggaagguuuaa

SEQ ID NO: 472720 - RNA, 19 nt, Artificial Sequence
  Description of Artificial Sequence: Synthetic oligonucleotide
  Antisense Strand to SEQ ID NO: 472719
uuaaaccuuccagaauguc

SEQ ID NO: 472721 - RNA, 19 nt, Artificial Sequence
  Description of Artificial Sequence: Synthetic oligonucleotide
  Sense strand starting at position 3855 of SEQ ID NO: 317206
gguuuaaaggccugaggag

SEQ ID NO: 472722 - RNA, 19 nt, Artificial Sequence
  Description of Artificial Sequence: Synthetic oligonucleotide
  Antisense Strand to SEQ ID NO: 472721
cuccucaggccuuuaaacc

SEQ ID NO: 472723 - RNA, 19 nt, Artificial Sequence
  Description of Artificial Sequence: Synthetic oligonucleotide
  Sense strand starting at position 3872 of SEQ ID NO: 317206
agcugacuccagggauagu

SEQ ID NO: 472724 - RNA, 19 nt, Artificial Sequence
  Description of Artificial Sequence: Synthetic oligonucleotide
  Antisense Strand to SEQ ID NO: 472723
acuaucccuggagucagcu

SEQ ID NO: 472725 - RNA, 19 nt, Artificial Sequence
  Description of Artificial Sequence: Synthetic oligonucleotide
  Sense strand starting at position 253 of SEQ ID NO: 317207
acuaaacuguauucguuau

SEQ ID NO: 472726 - RNA, 19 nt, Artificial Sequence
  Description of Artificial Sequence: Synthetic oligonucleotide
  Antisense Strand to SEQ ID NO: 472725
auaacgaauacaguuuagu

SEQ ID NO: 472727 - RNA, 19 nt, Artificial Sequence
  Description of Artificial Sequence: Synthetic oligonucleotide
  Sense strand starting at position 259 of SEQ ID NO: 317207
cuguauucguuauuaggua

SEQ ID NO: 472728 - RNA, 19 nt, Artificial Sequence
  Description of Artificial Sequence: Synthetic oligonucleotide
  Antisense Strand to SEQ ID NO: 472727
uaccuaauaacgaauacag

SEQ ID NO: 472729 - RNA, 19 nt, Artificial Sequence
  Description of Artificial Sequence: Synthetic oligonucleotide
  Sense strand starting at position 280 of SEQ ID NO: 317207
ucaaguaaaugguuacaua

SEQ ID NO: 472730 - RNA, 19 nt, Artificial Sequence
  Description of Artificial Sequence: Synthetic oligonucleotide
  Antisense Strand to SEQ ID NO: 472729
uauguaaccauuuacuuga

SEQ ID NO: 472731 - RNA, 19 nt, Artificial Sequence
  Description of Artificial Sequence: Synthetic oligonucleotide
  Sense strand starting at position 291 of SEQ ID NO: 317207
guuacauauccauaggugu

SEQ ID NO: 472732 - RNA, 19 nt, Artificial Sequence
  Description of Artificial Sequence: Synthetic oligonucleotide
  Antisense Strand to SEQ ID NO: 472731
acaccuauggauauguaac

SEQ ID NO: 472733 - RNA, 19 nt, Artificial Sequence
  Description of Artificial Sequence: Synthetic oligonucleotide
  Sense strand starting at position 298 of SEQ ID NO: 317207
auccauagguguccugagu

SEQ ID NO: 472734 - RNA, 19 nt, Artificial Sequence
  Description of Artificial Sequence: Synthetic oligonucleotide
  Antisense Strand to SEQ ID NO: 472733
acucaggacaccuauggau

SEQ ID NO: 472735 - RNA, 19 nt, Artificial Sequence
  Description of Artificial Sequence: Synthetic oligonucleotide
  Sense strand starting at position 307 of SEQ ID NO: 317207
uguccugaguagcuugaaa

SEQ ID NO: 472736 - RNA, 19 nt, Artificial Sequence
  Description of Artificial Sequence: Synthetic oligonucleotide
  Antisense Strand to SEQ ID NO: 472735
uuucaagcuacucaggaca

SEQ ID NO: 472737 - RNA, 19 nt, Artificial Sequence
  Description of Artificial Sequence: Synthetic oligonucleotide
  Sense strand starting at position 309 of SEQ ID NO: 317207
uccugaguagcuugaaaua

SEQ ID NO: 472738 - RNA, 19 nt, Artificial Sequence
  Description of Artificial Sequence: Synthetic oligonucleotide
  Antisense Strand to SEQ ID NO: 472737
uauuucaagcuacucagga

SEQ ID NO: 472739 - RNA, 19 nt, Artificial Sequence
  Description of Artificial Sequence: Synthetic oligonucleotide
  Sense strand starting at position 339 of SEQ ID NO: 317207
ucaggauggugauucuaca

SEQ ID NO: 472740 - RNA, 19 nt, Artificial Sequence
  Description of Artificial Sequence: Synthetic oligonucleotide
  Antisense Strand to SEQ ID NO: 472739
uguagaaucaccauccuga

SEQ ID NO: 472741 - RNA, 19 nt, Artificial Sequence
  Description of Artificial Sequence: Synthetic oligonucleotide
  Sense strand starting at position 492 of SEQ ID NO: 317207
uuuagacuuguauaaguuc

SEQ ID NO: 472742 - RNA, 19 nt, Artificial Sequence
  Description of Artificial Sequence: Synthetic oligonucleotide
  Antisense Strand to SEQ ID NO: 472741
gaacuuauacaagucuaaa

SEQ ID NO: 472743 - RNA, 19 nt, Artificial Sequence
  Description of Artificial Sequence: Synthetic oligonucleotide
  Sense strand starting at position 2108 of SEQ ID NO: 317207
gccugagcugacugauuug

SEQ ID NO: 472744 - RNA, 19 nt, Artificial Sequence
  Description of Artificial Sequence: Synthetic oligonucleotide
  Antisense Strand to SEQ ID NO: 472743
caaaucagucagcucaggc

SEQ ID NO: 472745 - RNA, 19 nt, Artificial Sequence
  Description of Artificial Sequence: Synthetic oligonucleotide
  Sense strand starting at position 2114 of SEQ ID NO: 317207
gcugacugauuuguacagu

SEQ ID NO: 472746 - RNA, 19 nt, Artificial Sequence
  Description of Artificial Sequence: Synthetic oligonucleotide
  Antisense Strand to SEQ ID NO: 472745
acuguacaaaucagucagc

SEQ ID NO: 472747 - RNA, 19 nt, Artificial Sequence
  Description of Artificial Sequence: Synthetic oligonucleotide
  Sense strand starting at position 2250 of SEQ ID NO: 317207
ccuguuaaacccuggagca

SEQ ID NO: 472748 - RNA, 19 nt, Artificial Sequence
  Description of Artificial Sequence: Synthetic oligonucleotide
  Antisense Strand to SEQ ID NO: 472747
ugcuccaggguuuaacagg

SEQ ID NO: 472749 - RNA, 19 nt, Artificial Sequence
  Description of Artificial Sequence: Synthetic oligonucleotide
  Sense strand starting at position 2274 of SEQ ID NO: 317207
ucucaagcuuucccgacaa

SEQ ID NO: 472750 - RNA, 19 nt, Artificial Sequence
  Description of Artificial Sequence: Synthetic oligonucleotide
  Antisense Strand to SEQ ID NO: 472749
uugucgggaaagcuugaga

SEQ ID NO: 472751 - RNA, 19 nt, Artificial Sequence
  Description of Artificial Sequence: Synthetic oligonucleotide
  Sense strand starting at position 2278 of SEQ ID NO: 317207
aagcuuucccgacaagcgu

SEQ ID NO: 472752 - RNA, 19 nt, Artificial Sequence
  Description of Artificial Sequence: Synthetic oligonucleotide
  Antisense Strand to SEQ ID NO: 472751
acgcuugucgggaaagcuu

SEQ ID NO: 472753 - RNA, 19 nt, Artificial Sequence
  Description of Artificial Sequence: Synthetic oligonucleotide
  Sense strand starting at position 2284 of SEQ ID NO: 317207
ucccgacaagcguaucaaa

SEQ ID NO: 472754 - RNA, 19 nt, Artificial Sequence
  Description of Artificial Sequence: Synthetic oligonucleotide
  Antisense Strand to SEQ ID NO: 472753
uuugauacgcuugucggga

SEQ ID NO: 472755 - RNA, 19 nt, Artificial Sequence
  Description of Artificial Sequence: Synthetic oligonucleotide
  Sense strand starting at position 2342 of SEQ ID NO: 317207
aguucugagaguuagucca

SEQ ID NO: 472756 - RNA, 19 nt, Artificial Sequence
  Description of Artificial Sequence: Synthetic oligonucleotide
  Antisense Strand to SEQ ID NO: 472755
uggacuaacucucagaacu

SEQ ID NO: 472757 - RNA, 19 nt, Artificial Sequence
  Description of Artificial Sequence: Synthetic oligonucleotide
  Sense strand starting at position 2344 of SEQ ID NO: 317207
uucugagaguuaguccaaa

SEQ ID NO: 472758 - RNA, 19 nt, Artificial Sequence
  Description of Artificial Sequence: Synthetic oligonucleotide
  Antisense Strand to SEQ ID NO: 472757
uuuggacuaacucucagaa

SEQ ID NO: 472759 - RNA, 19 nt, Artificial Sequence
  Description of Artificial Sequence: Synthetic oligonucleotide
  Sense strand starting at position 2435 of SEQ ID NO: 317207
gcuccauaaugugccauau

SEQ ID NO: 472760 - RNA, 19 nt, Artificial Sequence
  Description of Artificial Sequence: Synthetic oligonucleotide
  Antisense Strand to SEQ ID NO: 472759
auauggcacauuauggagc

SEQ ID NO: 472761 - RNA, 19 nt, Artificial Sequence
  Description of Artificial Sequence: Synthetic oligonucleotide
  Sense strand starting at position 2641 of SEQ ID NO: 317207
aaaccucggccugaggaua

SEQ ID NO: 472762 - RNA, 19 nt, Artificial Sequence
  Description of Artificial Sequence: Synthetic oligonucleotide
  Antisense Strand to SEQ ID NO: 472761
uauccucaggccgagguuu

SEQ ID NO: 472763 - RNA, 19 nt, Artificial Sequence
  Description of Artificial Sequence: Synthetic oligonucleotide
  Sense strand starting at position 2674 of SEQ ID NO: 317207
guaauaaacuuugcuuggu

SEQ ID NO: 472764 - RNA, 19 nt, Artificial Sequence
  Description of Artificial Sequence: Synthetic oligonucleotide
  Antisense Strand to SEQ ID NO: 472763
accaagcaaaguuuauuac

SEQ ID NO: 472765 - RNA, 19 nt, Artificial Sequence
  Description of Artificial Sequence: Synthetic oligonucleotide
  Sense strand starting at position 2682 of SEQ ID NO: 317207
cuuugcuuggugugggaaa

SEQ ID NO: 472766 - RNA, 19 nt, Artificial Sequence
  Description of Artificial Sequence: Synthetic oligonucleotide
  Antisense Strand to SEQ ID NO: 472765
uuucccacaccaagcaaag

SEQ ID NO: 472767 - RNA, 19 nt, Artificial Sequence
  Description of Artificial Sequence: Synthetic oligonucleotide
  Sense strand starting at position 2744 of SEQ ID NO: 317207
aaguuuguaguuugugaca

SEQ ID NO: 472768 - RNA, 19 nt, Artificial Sequence
  Description of Artificial Sequence: Synthetic oligonucleotide
  Antisense Strand to SEQ ID NO: 472767
ugucacaaacuacaaacuu

SEQ ID NO: 472769 - RNA, 19 nt, Artificial Sequence
  Description of Artificial Sequence: Synthetic oligonucleotide
  Sense strand starting at position 2983 of SEQ ID NO: 317207
ccagccuuaguccaggaaa

SEQ ID NO: 472770 - RNA, 19 nt, Artificial Sequence
  Description of Artificial Sequence: Synthetic oligonucleotide
  Antisense Strand to SEQ ID NO: 472769
uuuccuggacuaaggcugg

SEQ ID NO: 472771 - RNA, 19 nt, Artificial Sequence
  Description of Artificial Sequence: Synthetic oligonucleotide
  Sense strand starting at position 2985 of SEQ ID NO: 317207
agccuuaguccaggaaauc

SEQ ID NO: 472772 - RNA, 19 nt, Artificial Sequence
  Description of Artificial Sequence: Synthetic oligonucleotide
  Antisense Strand to SEQ ID NO: 472771
gauuuccuggacuaaggcu

SEQ ID NO: 472773 - RNA, 19 nt, Artificial Sequence
  Description of Artificial Sequence: Synthetic oligonucleotide
  Sense strand starting at position 3005 of SEQ ID NO: 317207
agaaacauguucuuauagu

SEQ ID NO: 472774 - RNA, 19 nt, Artificial Sequence
  Description of Artificial Sequence: Synthetic oligonucleotide
  Antisense Strand to SEQ ID NO: 472773
acuauaagaacauguuucu

SEQ ID NO: 472775 - RNA, 19 nt, Artificial Sequence
  Description of Artificial Sequence: Synthetic oligonucleotide
  Sense strand starting at position 3107 of SEQ ID NO: 317207
gcaacagaguuugcuuaug

SEQ ID NO: 472776 - RNA, 19 nt, Artificial Sequence
  Description of Artificial Sequence: Synthetic oligonucleotide
  Antisense Strand to SEQ ID NO: 472775
cauaagcaaacucuguugc

SEQ ID NO: 472777 - RNA, 19 nt, Artificial Sequence
  Description of Artificial Sequence: Synthetic oligonucleotide
  Sense strand starting at position 3118 of SEQ ID NO: 317207
ugcuuaugccacuggaaac

SEQ ID NO: 472778 - RNA, 19 nt, Artificial Sequence
  Description of Artificial Sequence: Synthetic oligonucleotide
  Antisense Strand to SEQ ID NO: 472777
guuuccaguggcauaagca

SEQ ID NO: 472779 - RNA, 19 nt, Artificial Sequence
  Description of Artificial Sequence: Synthetic oligonucleotide
  Sense strand starting at position 3560 of SEQ ID NO: 317207
guuggaauucauggucuug

SEQ ID NO: 472780 - RNA, 19 nt, Artificial Sequence
  Description of Artificial Sequence: Synthetic oligonucleotide
  Antisense Strand to SEQ ID NO: 472779
caagaccaugaauuccaac

SEQ ID NO: 472781 - RNA, 19 nt, Artificial Sequence
  Description of Artificial Sequence: Synthetic oligonucleotide
  Sense strand starting at position 3646 of SEQ ID NO: 317207
uggagaucuccagggagca

SEQ ID NO: 472782 - RNA, 19 nt, Artificial Sequence
  Description of Artificial Sequence: Synthetic oligonucleotide
  Antisense Strand to SEQ ID NO: 472781
ugcucccuggagaucucca

SEQ ID NO: 472783 - RNA, 19 nt, Artificial Sequence
  Description of Artificial Sequence: Synthetic oligonucleotide
  Sense strand starting at position 3647 of SEQ ID NO: 317207
ggagaucuccagggagcau

SEQ ID NO: 472784 - RNA, 19 nt, Artificial Sequence
  Description of Artificial Sequence: Synthetic oligonucleotide
  Antisense Strand to SEQ ID NO: 472783
augcucccuggagaucucc

SEQ ID NO: 472785 - RNA, 19 nt, Artificial Sequence
  Description of Artificial Sequence: Synthetic oligonucleotide
  Sense strand starting at position 3656 of SEQ ID NO: 317207
cagggagcauuaucuccau

SEQ ID NO: 472786 - RNA, 19 nt, Artificial Sequence
  Description of Artificial Sequence: Synthetic oligonucleotide
  Antisense Strand to SEQ ID NO: 472785
auggagauaaugcucccug

SEQ ID NO: 472787 - RNA, 19 nt, Artificial Sequence
  Description of Artificial Sequence: Synthetic oligonucleotide
  Sense strand starting at position 3659 of SEQ ID NO: 317207
ggagcauuaucuccauaag

SEQ ID NO: 472788 - RNA, 19 nt, Artificial Sequence
  Description of Artificial Sequence: Synthetic oligonucleotide
  Antisense Strand to SEQ ID NO: 472787
cuuauggagauaaugcucc

SEQ ID NO: 472789 - RNA, 19 nt, Artificial Sequence
  Description of Artificial Sequence: Synthetic oligonucleotide
  Sense strand starting at position 3698 of SEQ ID NO: 317207
aggauagaacaguaguguu

SEQ ID NO: 472790 - RNA, 19 nt, Artificial Sequence
  Description of Artificial Sequence: Synthetic oligonucleotide
  Antisense Strand to SEQ ID NO: 472789
aacacuacuguucuauccu

SEQ ID NO: 472791 - RNA, 19 nt, Artificial Sequence
  Description of Artificial Sequence: Synthetic oligonucleotide
  Sense strand starting at position 3712 of SEQ ID NO: 317207
guguuaaugggucagugag

SEQ ID NO: 472792 - RNA, 19 nt, Artificial Sequence
  Description of Artificial Sequence: Synthetic oligonucleotide
  Antisense Strand to SEQ ID NO: 472791
cucacugacccauuaacac

SEQ ID NO: 472793 - RNA, 19 nt, Artificial Sequence
  Description of Artificial Sequence: Synthetic oligonucleotide
  Sense strand starting at position 3735 of SEQ ID NO: 317207
agcugagccuucucucaga

SEQ ID NO: 472794 - RNA, 19 nt, Artificial Sequence
  Description of Artificial Sequence: Synthetic oligonucleotide
  Antisense Strand to SEQ ID NO: 472793
ucugagagaaggcucagcu

SEQ ID NO: 472795 - RNA, 19 nt, Artificial Sequence
  Description of Artificial Sequence: Synthetic oligonucleotide
  Sense strand starting at position 3782 of SEQ ID NO: 317207
acacaagagcuguacagua

SEQ ID NO: 472796 - RNA, 19 nt, Artificial Sequence
  Description of Artificial Sequence: Synthetic oligonucleotide
  Antisense Strand to SEQ ID NO: 472795
uacuguacagcucuugugu

SEQ ID NO: 472797 - RNA, 19 nt, Artificial Sequence
  Description of Artificial Sequence: Synthetic oligonucleotide
  Sense strand starting at position 3784 of SEQ ID NO: 317207
acaagagcuguacaguaaa

SEQ ID NO: 472798 - RNA, 19 nt, Artificial Sequence
  Description of Artificial Sequence: Synthetic oligonucleotide
  Antisense Strand to SEQ ID NO: 472797
uuuacuguacagcucuugu

SEQ ID NO: 472799 - RNA, 19 nt, Artificial Sequence
  Description of Artificial Sequence: Synthetic oligonucleotide
  Sense strand starting at position 3794 of SEQ ID NO: 317207
uacaguaaagugugccaau

SEQ ID NO: 472800 - RNA, 19 nt, Artificial Sequence
  Description of Artificial Sequence: Synthetic oligonucleotide
  Antisense Strand to SEQ ID NO: 472799
auuggcacacuuuacugua

SEQ ID NO: 472801 - RNA, 19 nt, Artificial Sequence
  Description of Artificial Sequence: Synthetic oligonucleotide
  Sense strand starting at position 3795 of SEQ ID NO: 317207
acaguaaagugugccaauu

SEQ ID NO: 472802 - RNA, 19 nt, Artificial Sequence
  Description of Artificial Sequence: Synthetic oligonucleotide
  Antisense Strand to SEQ ID NO: 472801
aauuggcacacuuuacugu

SEQ ID NO: 472803 - RNA, 19 nt, Artificial Sequence
  Description of Artificial Sequence: Synthetic oligonucleotide
  Sense strand starting at position 3797 of SEQ ID NO: 317207
aguaaagugugccaauuua

SEQ ID NO: 472804 - RNA, 19 nt, Artificial Sequence
  Description of Artificial Sequence: Synthetic oligonucleotide
  Antisense Strand to SEQ ID NO: 472803
uaaauuggcacacuuuacu

SEQ ID NO: 472805 - RNA, 19 nt, Artificial Sequence
  Description of Artificial Sequence: Synthetic oligonucleotide
  Sense strand starting at position 81 of SEQ ID NO: 317208
agaauugguuucccuaaua

SEQ ID NO: 472806 - RNA, 19 nt, Artificial Sequence
  Description of Artificial Sequence: Synthetic oligonucleotide
  Antisense Strand to SEQ ID NO: 472805
uauuagggaaaccaauucu

SEQ ID NO: 472807 - RNA, 19 nt, Artificial Sequence
  Description of Artificial Sequence: Synthetic oligonucleotide
  Sense strand starting at position 142 of SEQ ID NO: 317208
aguccaacucuggaaugua

SEQ ID NO: 472808 - RNA, 19 nt, Artificial Sequence
  Description of Artificial Sequence: Synthetic oligonucleotide
  Antisense Strand to SEQ ID NO: 472807
uacauuccagaguuggacu

SEQ ID NO: 472809 - RNA, 19 nt, Artificial Sequence
  Description of Artificial Sequence: Synthetic oligonucleotide
  Sense strand starting at position 145 of SEQ ID NO: 317208
ccaacucuggaauguaagu

SEQ ID NO: 472810 - RNA, 19 nt, Artificial Sequence
  Description of Artificial Sequence: Synthetic oligonucleotide
  Antisense Strand to SEQ ID NO: 472809
acuuacauuccagaguugg

SEQ ID NO: 472811 - RNA, 19 nt, Artificial Sequence
  Description of Artificial Sequence: Synthetic oligonucleotide
  Sense strand starting at position 403 of SEQ ID NO: 317208
aguagauauaacggaaacu

SEQ ID NO: 472812 - RNA, 19 nt, Artificial Sequence
  Description of Artificial Sequence: Synthetic oligonucleotide
  Antisense Strand to SEQ ID NO: 472811
aguuuccguuauaucuacu

SEQ ID NO: 472813 - RNA, 19 nt, Artificial Sequence
  Description of Artificial Sequence: Synthetic oligonucleotide
  Sense strand starting at position 480 of SEQ ID NO: 317208
ugcuuacuuuacuuaggaa

SEQ ID NO: 472814 - RNA, 19 nt, Artificial Sequence
  Description of Artificial Sequence: Synthetic oligonucleotide
  Antisense Strand to SEQ ID NO: 472813
uuccuaaguaaaguaagca

SEQ ID NO: 472815 - RNA, 19 nt, Artificial Sequence
  Description of Artificial Sequence: Synthetic oligonucleotide
  Sense strand starting at position 547 of SEQ ID NO: 317208
gucagauguguuuauaugu

SEQ ID NO: 472816 - RNA, 19 nt, Artificial Sequence
  Description of Artificial Sequence: Synthetic oligonucleotide
  Antisense Strand to SEQ ID NO: 472815
acauauaaacacaucugac

SEQ ID NO: 472817 - RNA, 19 nt, Artificial Sequence
  Description of Artificial Sequence: Synthetic oligonucleotide
  Sense strand starting at position 608 of SEQ ID NO: 317208
gcgucuguaggauacacau

SEQ ID NO: 472818 - RNA, 19 nt, Artificial Sequence
  Description of Artificial Sequence: Synthetic oligonucleotide
  Antisense Strand to SEQ ID NO: 472817
auguguauccuacagacgc

SEQ ID NO: 472819 - RNA, 19 nt, Artificial Sequence
  Description of Artificial Sequence: Synthetic oligonucleotide
  Sense strand starting at position 642 of SEQ ID NO: 317208
aaaggauguugguucccaa

SEQ ID NO: 472820 - RNA, 19 nt, Artificial Sequence
  Description of Artificial Sequence: Synthetic oligonucleotide
  Antisense Strand to SEQ ID NO: 472819
uugggaaccaacauccuuu

SEQ ID NO: 472821 - RNA, 19 nt, Artificial Sequence
  Description of Artificial Sequence: Synthetic oligonucleotide
  Sense strand starting at position 645 of SEQ ID NO: 317208
ggauguugguucccaaauc

SEQ ID NO: 472822 - RNA, 19 nt, Artificial Sequence
  Description of Artificial Sequence: Synthetic oligonucleotide
  Antisense Strand to SEQ ID NO: 472821
gauuugggaaccaacaucc

SEQ ID NO: 472823 - RNA, 19 nt, Artificial Sequence
  Description of Artificial Sequence: Synthetic oligonucleotide
  Sense strand starting at position 717 of SEQ ID NO: 317208
ucuguaugagcagaucaau

SEQ ID NO: 472824 - RNA, 19 nt, Artificial Sequence
  Description of Artificial Sequence: Synthetic oligonucleotide
  Antisense Strand to SEQ ID NO: 472823
auugaucugcucauacaga

SEQ ID NO: 472825 - RNA, 19 nt, Artificial Sequence
  Description of Artificial Sequence: Synthetic oligonucleotide
  Sense strand starting at position 830 of SEQ ID NO: 317208
aguuuacgccuuuagguau

SEQ ID NO: 472826 - RNA, 19 nt, Artificial Sequence
  Description of Artificial Sequence: Synthetic oligonucleotide
  Antisense Strand to SEQ ID NO: 472825
auaccuaaaggcguaaacu

SEQ ID NO: 472827 - RNA, 19 nt, Artificial Sequence
  Description of Artificial Sequence: Synthetic oligonucleotide
  Sense strand starting at position 1030 of SEQ ID NO: 317208
ccaaguaaagcuugacuuu

SEQ ID NO: 472828 - RNA, 19 nt, Artificial Sequence
  Description of Artificial Sequence: Synthetic oligonucleotide
  Antisense Strand to SEQ ID NO: 472827
aaagucaagcuuuacuugg

SEQ ID NO: 472829 - RNA, 19 nt, Artificial Sequence
  Description of Artificial Sequence: Synthetic oligonucleotide
  Sense strand starting at position 1086 of SEQ ID NO: 317208
uuuacuuugcaucagguaa

SEQ ID NO: 472830 - RNA, 19 nt, Artificial Sequence
  Description of Artificial Sequence: Synthetic oligonucleotide
  Antisense Strand to SEQ ID NO: 472829
uuaccugaugcaaaguaaa

SEQ ID NO: 472831 - RNA, 19 nt, Artificial Sequence
  Description of Artificial Sequence: Synthetic oligonucleotide
  Sense strand starting at position 1130 of SEQ ID NO: 317208
uguagcuagaguuagaagu

SEQ ID NO: 472832 - RNA, 19 nt, Artificial Sequence
  Description of Artificial Sequence: Synthetic oligonucleotide
  Antisense Strand to SEQ ID NO: 472831
acuucuaacucuagcuaca

SEQ ID NO: 472833 - RNA, 19 nt, Artificial Sequence
  Description of Artificial Sequence: Synthetic oligonucleotide
  Sense strand starting at position 1137 of SEQ ID NO: 317208
agaguuagaaguugguaau

SEQ ID NO: 472834 - RNA, 19 nt, Artificial Sequence
  Description of Artificial Sequence: Synthetic oligonucleotide
  Antisense Strand to SEQ ID NO: 472833
auuaccaacuucuaacucu

SEQ ID NO: 472835 - RNA, 19 nt, Artificial Sequence
  Description of Artificial Sequence: Synthetic oligonucleotide
  Sense strand starting at position 1138 of SEQ ID NO: 317208
gaguuagaaguugguaauu

SEQ ID NO: 472836 - RNA, 19 nt, Artificial Sequence
  Description of Artificial Sequence: Synthetic oligonucleotide
  Antisense Strand to SEQ ID NO: 472835
aauuaccaacuucuaacuc

SEQ ID NO: 472837 - RNA, 19 nt, Artificial Sequence
  Description of Artificial Sequence: Synthetic oligonucleotide
  Sense strand starting at position 1143 of SEQ ID NO: 317208
agaaguugguaauuccuaa

SEQ ID NO: 472838 - RNA, 19 nt, Artificial Sequence
  Description of Artificial Sequence: Synthetic oligonucleotide
  Antisense Strand to SEQ ID NO: 472837
uuaggaauuaccaacuucu

SEQ ID NO: 472839 - RNA, 19 nt, Artificial Sequence
  Description of Artificial Sequence: Synthetic oligonucleotide
  Sense strand starting at position 1150 of SEQ ID NO: 317208
gguaauuccuaagccaagu

SEQ ID NO: 472840 - RNA, 19 nt, Artificial Sequence
  Description of Artificial Sequence: Synthetic oligonucleotide
  Antisense Strand to SEQ ID NO: 472839
acuuggcuuaggaauuacc

SEQ ID NO: 472841 - RNA, 19 nt, Artificial Sequence
  Description of Artificial Sequence: Synthetic oligonucleotide
  Sense strand starting at position 1396 of SEQ ID NO: 317208
cccaucauuuguuacggaa

SEQ ID NO: 472842 - RNA, 19 nt, Artificial Sequence
  Description of Artificial Sequence: Synthetic oligonucleotide
  Antisense Strand to SEQ ID NO: 472841
uuccguaacaaaugauggg

SEQ ID NO: 472843 - RNA, 19 nt, Artificial Sequence
  Description of Artificial Sequence: Synthetic oligonucleotide
  Sense strand starting at position 1565 of SEQ ID NO: 317208
uagagcggacuuugucaaa

SEQ ID NO: 472844 - RNA, 19 nt, Artificial Sequence
  Description of Artificial Sequence: Synthetic oligonucleotide
  Antisense Strand to SEQ ID NO: 472843
uuugacaaaguccgcucua

SEQ ID NO: 472845 - RNA, 19 nt, Artificial Sequence
  Description of Artificial Sequence: Synthetic oligonucleotide
  Sense strand starting at position 2029 of SEQ ID NO: 317208
cccggagagcuccaacuuu

SEQ ID NO: 472846 - RNA, 19 nt, Artificial Sequence
  Description of Artificial Sequence: Synthetic oligonucleotide
  Antisense Strand to SEQ ID NO: 472845
aaaguuggagcucuccggg

SEQ ID NO: 472847 - RNA, 19 nt, Artificial Sequence
  Description of Artificial Sequence: Synthetic oligonucleotide
  Sense strand starting at position 2263 of SEQ ID NO: 317208
acgagcaucaucgauacaa

SEQ ID NO: 472848 - RNA, 19 nt, Artificial Sequence
  Description of Artificial Sequence: Synthetic oligonucleotide
  Antisense Strand to SEQ ID NO: 472847
uuguaucgaugaugcucgu

SEQ ID NO: 472849 - RNA, 19 nt, Artificial Sequence
  Description of Artificial Sequence: Synthetic oligonucleotide
  Sense strand starting at position 2293 of SEQ ID NO: 317208
gcaguuucgagugcguuaa

SEQ ID NO: 472850 - RNA, 19 nt, Artificial Sequence
  Description of Artificial Sequence: Synthetic oligonucleotide
  Antisense Strand to SEQ ID NO: 472849
uuaacgcacucgaaacugc

SEQ ID NO: 472851 - RNA, 19 nt, Artificial Sequence
  Description of Artificial Sequence: Synthetic oligonucleotide
  Sense strand starting at position 2303 of SEQ ID NO: 317208
gugcguuaauauuuacuua

SEQ ID NO: 472852 - RNA, 19 nt, Artificial Sequence
  Description of Artificial Sequence: Synthetic oligonucleotide
  Antisense Strand to SEQ ID NO: 472851
uaaguaaauauuaacgcac

SEQ ID NO: 472853 - RNA, 19 nt, Artificial Sequence
  Description of Artificial Sequence: Synthetic oligonucleotide
  Sense strand starting at position 2337 of SEQ ID NO: 317208
uggccaaauuacuuaaugu

SEQ ID NO: 472854 - RNA, 19 nt, Artificial Sequence
  Description of Artificial Sequence: Synthetic oligonucleotide
  Antisense Strand to SEQ ID NO: 472853
acauuaaguaauuuggcca

SEQ ID NO: 472855 - RNA, 19 nt, Artificial Sequence
  Description of Artificial Sequence: Synthetic oligonucleotide
  Sense strand starting at position 2530 of SEQ ID NO: 317208
ugguguuacgcguugggau

SEQ ID NO: 472856 - RNA, 19 nt, Artificial Sequence
  Description of Artificial Sequence: Synthetic oligonucleotide
  Antisense Strand to SEQ ID NO: 472855
aucccaacgcguaacacca

SEQ ID NO: 472857 - RNA, 19 nt, Artificial Sequence
  Description of Artificial Sequence: Synthetic oligonucleotide
  Sense strand starting at position 2642 of SEQ ID NO: 317208
auaugauagggucguauug

SEQ ID NO: 472858 - RNA, 19 nt, Artificial Sequence
  Description of Artificial Sequence: Synthetic oligonucleotide
  Antisense Strand to SEQ ID NO: 472857
caauacgacccuaucauau

SEQ ID NO: 472859 - RNA, 19 nt, Artificial Sequence
  Description of Artificial Sequence: Synthetic oligonucleotide
  Sense strand starting at position 2650 of SEQ ID NO: 317208
gggucguauugguccagga

SEQ ID NO: 472860 - RNA, 19 nt, Artificial Sequence
  Description of Artificial Sequence: Synthetic oligonucleotide
  Antisense Strand to SEQ ID NO: 472859
uccuggaccaauacgaccc

SEQ ID NO: 472861 - RNA, 19 nt, Artificial Sequence
  Description of Artificial Sequence: Synthetic oligonucleotide
  Sense strand starting at position 2921 of SEQ ID NO: 317208
caucgaggagcugaacauu

SEQ ID NO: 472862 - RNA, 19 nt, Artificial Sequence
  Description of Artificial Sequence: Synthetic oligonucleotide
  Antisense Strand to SEQ ID NO: 472861
aauguucagcuccucgaug

SEQ ID NO: 472863 - RNA, 19 nt, Artificial Sequence
  Description of Artificial Sequence: Synthetic oligonucleotide
  Sense strand starting at position 2972 of SEQ ID NO: 317208
gcuguaucacugcagagca

SEQ ID NO: 472864 - RNA, 19 nt, Artificial Sequence
  Description of Artificial Sequence: Synthetic oligonucleotide
  Antisense Strand to SEQ ID NO: 472863
ugcucugcagugauacagc

SEQ ID NO: 472865 - RNA, 19 nt, Artificial Sequence
  Description of Artificial Sequence: Synthetic oligonucleotide
  Sense strand starting at position 3088 of SEQ ID NO: 317208
uuugguguuguguaauuau

SEQ ID NO: 472866 - RNA, 19 nt, Artificial Sequence
  Description of Artificial Sequence: Synthetic oligonucleotide
  Antisense Strand to SEQ ID NO: 472865
auaauuacacaacaccaaa

SEQ ID NO: 472867 - RNA, 19 nt, Artificial Sequence
  Description of Artificial Sequence: Synthetic oligonucleotide
  Sense strand starting at position 3232 of SEQ ID NO: 317208
ucugaugaguucuuucuuu

SEQ ID NO: 472868 - RNA, 19 nt, Artificial Sequence
  Description of Artificial Sequence: Synthetic oligonucleotide
  Antisense Strand to SEQ ID NO: 472867
aaagaaagaacucaucaga

SEQ ID NO: 472869 - RNA, 19 nt, Artificial Sequence
  Description of Artificial Sequence: Synthetic oligonucleotide
  Sense strand starting at position 3297 of SEQ ID NO: 317208
caggcuugaugaguuccua

SEQ ID NO: 472870 - RNA, 19 nt, Artificial Sequence
  Description of Artificial Sequence: Synthetic oligonucleotide
  Antisense Strand to SEQ ID NO: 472869
uaggaacucaucaagccug

SEQ ID NO: 472871 - RNA, 19 nt, Artificial Sequence
  Description of Artificial Sequence: Synthetic oligonucleotide
  Sense strand starting at position 3311 of SEQ ID NO: 317208
uccuaaggcuuugcagaga

SEQ ID NO: 472872 - RNA, 19 nt, Artificial Sequence
  Description of Artificial Sequence: Synthetic oligonucleotide
  Antisense Strand to SEQ ID NO: 472871
ucucugcaaagccuuagga

SEQ ID NO: 472873 - RNA, 19 nt, Artificial Sequence
  Description of Artificial Sequence: Synthetic oligonucleotide
  Sense strand starting at position 3391 of SEQ ID NO: 317208
gcaggaaagugcucagaag

SEQ ID NO: 472874 - RNA, 19 nt, Artificial Sequence
  Description of Artificial Sequence: Synthetic oligonucleotide
  Antisense Strand to SEQ ID NO: 472873
cuucugagcacuuuccugc

SEQ ID NO: 472875 - RNA, 19 nt, Artificial Sequence
  Description of Artificial Sequence: Synthetic oligonucleotide
  Sense strand starting at position 3392 of SEQ ID NO: 317208
caggaaagugcucagaagu

SEQ ID NO: 472876 - RNA, 19 nt, Artificial Sequence
  Description of Artificial Sequence: Synthetic oligonucleotide
  Antisense Strand to SEQ ID NO: 472875
acuucugagcacuuuccug

SEQ ID NO: 472877 - RNA, 19 nt, Artificial Sequence
  Description of Artificial Sequence: Synthetic oligonucleotide
  Sense strand starting at position 3402 of SEQ ID NO: 317208
cucagaagugacuguuaag

SEQ ID NO: 472878 - RNA, 19 nt, Artificial Sequence
  Description of Artificial Sequence: Synthetic oligonucleotide
  Antisense Strand to SEQ ID NO: 472877
cuuaacagucacuucugag

SEQ ID NO: 472879 - RNA, 19 nt, Artificial Sequence
  Description of Artificial Sequence: Synthetic oligonucleotide
  Sense strand starting at position 3441 of SEQ ID NO: 317208
gagggagaauucuaaggaa

SEQ ID NO: 472880 - RNA, 19 nt, Artificial Sequence
  Description of Artificial Sequence: Synthetic oligonucleotide
  Antisense Strand to SEQ ID NO: 472879
uuccuuagaauucucccuc

SEQ ID NO: 472881 - RNA, 19 nt, Artificial Sequence
  Description of Artificial Sequence: Synthetic oligonucleotide
  Sense strand starting at position 3444 of SEQ ID NO: 317208
ggagaauucuaaggaagaa

SEQ ID NO: 472882 - RNA, 19 nt, Artificial Sequence
  Description of Artificial Sequence: Synthetic oligonucleotide
  Antisense Strand to SEQ ID NO: 472881
uucuuccuuagaauucucc

SEQ ID NO: 472883 - RNA, 19 nt, Artificial Sequence
  Description of Artificial Sequence: Synthetic oligonucleotide
  Sense strand starting at position 3517 of SEQ ID NO: 317208
guucuaagaagagguucuu

SEQ ID NO: 472884 - RNA, 19 nt, Artificial Sequence
  Description of Artificial Sequence: Synthetic oligonucleotide
  Antisense Strand to SEQ ID NO: 472883
aagaaccucuucuuagaac

SEQ ID NO: 472885 - RNA, 19 nt, Artificial Sequence
  Description of Artificial Sequence: Synthetic oligonucleotide
  Sense strand starting at position 287 of SEQ ID NO: 317209
gaaaguugggcucaacuuc

SEQ ID NO: 472886 - RNA, 19 nt, Artificial Sequence
  Description of Artificial Sequence: Synthetic oligonucleotide
  Antisense Strand to SEQ ID NO: 472885
gaaguugagcccaacuuuc

SEQ ID NO: 472887 - RNA, 19 nt, Artificial Sequence
  Description of Artificial Sequence: Synthetic oligonucleotide
  Sense strand starting at position 386 of SEQ ID NO: 317209
gggauucccuuccuaacuu

SEQ ID NO: 472888 - RNA, 19 nt, Artificial Sequence
  Description of Artificial Sequence: Synthetic oligonucleotide
  Antisense Strand to SEQ ID NO: 472887
aaguuaggaagggaauccc

SEQ ID NO: 472889 - RNA, 19 nt, Artificial Sequence
  Description of Artificial Sequence: Synthetic oligonucleotide
  Sense strand starting at position 499 of SEQ ID NO: 317209
cuagaugcuucuucugcua

SEQ ID NO: 472890 - RNA, 19 nt, Artificial Sequence
  Description of Artificial Sequence: Synthetic oligonucleotide
  Antisense Strand to SEQ ID NO: 472889
uagcagaagaagcaucuag

SEQ ID NO: 472891 - RNA, 19 nt, Artificial Sequence
  Description of Artificial Sequence: Synthetic oligonucleotide
  Sense strand starting at position 597 of SEQ ID NO: 317209
ccuccaucugguuauuagu

SEQ ID NO: 472892 - RNA, 19 nt, Artificial Sequence
  Description of Artificial Sequence: Synthetic oligonucleotide
  Antisense Strand to SEQ ID NO: 472891
acuaauaaccagauggagg

SEQ ID NO: 472893 - RNA, 19 nt, Artificial Sequence
  Description of Artificial Sequence: Synthetic oligonucleotide
  Sense strand starting at position 694 of SEQ ID NO: 317209
ucuguagaguuauggauuu

SEQ ID NO: 472894 - RNA, 19 nt, Artificial Sequence
  Description of Artificial Sequence: Synthetic oligonucleotide
  Antisense Strand to SEQ ID NO: 472893
aaauccauaacucuacaga

SEQ ID NO: 472895 - RNA, 19 nt, Artificial Sequence
  Description of Artificial Sequence: Synthetic oligonucleotide
  Sense strand starting at position 735 of SEQ ID NO: 317209
augucuuugcucuaguacu

SEQ ID NO: 472896 - RNA, 19 nt, Artificial Sequence
  Description of Artificial Sequence: Synthetic oligonucleotide
  Antisense Strand to SEQ ID NO: 472895
aguacuagagcaaagacau

SEQ ID NO: 472897 - RNA, 19 nt, Artificial Sequence
  Description of Artificial Sequence: Synthetic oligonucleotide
  Sense strand starting at position 765 of SEQ ID NO: 317209
cuugguauuucccacacuu

SEQ ID NO: 472898 - RNA, 19 nt, Artificial Sequence
  Description of Artificial Sequence: Synthetic oligonucleotide
  Antisense Strand to SEQ ID NO: 472897
aagugugggaaauaccaag

SEQ ID NO: 472899 - RNA, 19 nt, Artificial Sequence
  Description of Artificial Sequence: Synthetic oligonucleotide
  Sense strand starting at position 792 of SEQ ID NO: 317209
gcuucauuagugggugaga

SEQ ID NO: 472900 - RNA, 19 nt, Artificial Sequence
  Description of Artificial Sequence: Synthetic oligonucleotide
  Antisense Strand to SEQ ID NO: 472899
ucucacccacuaaugaagc

SEQ ID NO: 472901 - RNA, 19 nt, Artificial Sequence
  Description of Artificial Sequence: Synthetic oligonucleotide
  Sense strand starting at position 873 of SEQ ID NO: 317209
agagaaauaucuugagauu

SEQ ID NO: 472902 - RNA, 19 nt, Artificial Sequence
  Description of Artificial Sequence: Synthetic oligonucleotide
  Antisense Strand to SEQ ID NO: 472901
aaucucaagauauuucucu

SEQ ID NO: 472903 - RNA, 19 nt, Artificial Sequence
  Description of Artificial Sequence: Synthetic oligonucleotide
  Sense strand starting at position 998 of SEQ ID NO: 317209
cuagccuuguuggccaaau

SEQ ID NO: 472904 - RNA, 19 nt, Artificial Sequence
  Description of Artificial Sequence: Synthetic oligonucleotide
  Antisense Strand to SEQ ID NO: 472903
auuuggccaacaaggcuag

SEQ ID NO: 472905 - RNA, 19 nt, Artificial Sequence
  Description of Artificial Sequence: Synthetic oligonucleotide
  Sense strand starting at position 999 of SEQ ID NO: 317209
uagccuuguuggccaaaua

SEQ ID NO: 472906 - RNA, 19 nt, Artificial Sequence
  Description of Artificial Sequence: Synthetic oligonucleotide
  Antisense Strand to SEQ ID NO: 472905
uauuuggccaacaaggcua

SEQ ID NO: 472907 - RNA, 19 nt, Artificial Sequence
  Description of Artificial Sequence: Synthetic oligonucleotide
  Sense strand starting at position 1000 of SEQ ID NO: 317209
agccuuguuggccaaauaa

SEQ ID NO: 472908 - RNA, 19 nt, Artificial Sequence
  Description of Artificial Sequence: Synthetic oligonucleotide
  Antisense Strand to SEQ ID NO: 472907
uuauuuggccaacaaggcu

SEQ ID NO: 472909 - RNA, 19 nt, Artificial Sequence
  Description of Artificial Sequence: Synthetic oligonucleotide
  Sense strand starting at position 1089 of SEQ ID NO: 317209
auaggaucuggcgaucaca

SEQ ID NO: 472910 - RNA, 19 nt, Artificial Sequence
  Description of Artificial Sequence: Synthetic oligonucleotide
  Antisense Strand to SEQ ID NO: 472909
ugugaucgccagauccuau

SEQ ID NO: 472911 - RNA, 19 nt, Artificial Sequence
  Description of Artificial Sequence: Synthetic oligonucleotide
  Sense strand starting at position 1099 of SEQ ID NO: 317209
gcgaucacacccuaaaucu

SEQ ID NO: 472912 - RNA, 19 nt, Artificial Sequence
  Description of Artificial Sequence: Synthetic oligonucleotide
  Antisense Strand to SEQ ID NO: 472911
agauuuagggugugaucgc

SEQ ID NO: 472913 - RNA, 19 nt, Artificial Sequence
  Description of Artificial Sequence: Synthetic oligonucleotide
  Sense strand starting at position 1265 of SEQ ID NO: 317209
ugacaaauguguuucuuaa

SEQ ID NO: 472914 - RNA, 19 nt, Artificial Sequence
  Description of Artificial Sequence: Synthetic oligonucleotide
  Antisense Strand to SEQ ID NO: 472913
uuaagaaacacauuuguca

SEQ ID NO: 472915 - RNA, 19 nt, Artificial Sequence
  Description of Artificial Sequence: Synthetic oligonucleotide
  Sense strand starting at position 1267 of SEQ ID NO: 317209
acaaauguguuucuuaaac

SEQ ID NO: 472916 - RNA, 19 nt, Artificial Sequence
  Description of Artificial Sequence: Synthetic oligonucleotide
  Antisense Strand to SEQ ID NO: 472915
guuuaagaaacacauuugu

SEQ ID NO: 472917 - RNA, 19 nt, Artificial Sequence
  Description of Artificial Sequence: Synthetic oligonucleotide
  Sense strand starting at position 1273 of SEQ ID NO: 317209
guguuucuuaaacgagcuu

SEQ ID NO: 472918 - RNA, 19 nt, Artificial Sequence
  Description of Artificial Sequence: Synthetic oligonucleotide
  Antisense Strand to SEQ ID NO: 472917
aagcucguuuaagaaacac

SEQ ID NO: 472919 - RNA, 19 nt, Artificial Sequence
  Description of Artificial Sequence: Synthetic oligonucleotide
  Sense strand starting at position 2134 of SEQ ID NO: 317209
accgaguuucggugggagu

SEQ ID NO: 472920 - RNA, 19 nt, Artificial Sequence
  Description of Artificial Sequence: Synthetic oligonucleotide
  Antisense Strand to SEQ ID NO: 472919
acucccaccgaaacucggu

SEQ ID NO: 472921 - RNA, 19 nt, Artificial Sequence
  Description of Artificial Sequence: Synthetic oligonucleotide
  Sense strand starting at position 2135 of SEQ ID NO: 317209
ccgaguuucggugggagua

SEQ ID NO: 472922 - RNA, 19 nt, Artificial Sequence
  Description of Artificial Sequence: Synthetic oligonucleotide
  Antisense Strand to SEQ ID NO: 472921
uacucccaccgaaacucgg

SEQ ID NO: 472923 - RNA, 19 nt, Artificial Sequence
  Description of Artificial Sequence: Synthetic oligonucleotide
  Sense strand starting at position 2148 of SEQ ID NO: 317209
ggaguagucuuagcggauu

SEQ ID NO: 472924 - RNA, 19 nt, Artificial Sequence
  Description of Artificial Sequence: Synthetic oligonucleotide
  Antisense Strand to SEQ ID NO: 472923
aauccgcuaagacuacucc

SEQ ID NO: 472925 - RNA, 19 nt, Artificial Sequence
  Description of Artificial Sequence: Synthetic oligonucleotide
  Sense strand starting at position 2252 of SEQ ID NO: 317209
agcaguugcucugccuaaa

SEQ ID NO: 472926 - RNA, 19 nt, Artificial Sequence
  Description of Artificial Sequence: Synthetic oligonucleotide
  Antisense Strand to SEQ ID NO: 472925
uuuaggcagagcaacugcu

SEQ ID NO: 472927 - RNA, 19 nt, Artificial Sequence
  Description of Artificial Sequence: Synthetic oligonucleotide
  Sense strand starting at position 2276 of SEQ ID NO: 317209
aaggguacuuuggauaaau

SEQ ID NO: 472928 - RNA, 19 nt, Artificial Sequence
  Description of Artificial Sequence: Synthetic oligonucleotide
  Antisense Strand to SEQ ID NO: 472927
auuuauccaaaguacccuu

SEQ ID NO: 472929 - RNA, 19 nt, Artificial Sequence
  Description of Artificial Sequence: Synthetic oligonucleotide
  Sense strand starting at position 2346 of SEQ ID NO: 317209
agcuuuacaugcucugaaa

SEQ ID NO: 472930 - RNA, 19 nt, Artificial Sequence
  Description of Artificial Sequence: Synthetic oligonucleotide
  Antisense Strand to SEQ ID NO: 472929
uuucagagcauguaaagcu

SEQ ID NO: 472931 - RNA, 19 nt, Artificial Sequence
  Description of Artificial Sequence: Synthetic oligonucleotide
  Sense strand starting at position 2365 of SEQ ID NO: 317209
agugcagacccagaaguuu

SEQ ID NO: 472932 - RNA, 19 nt, Artificial Sequence
  Description of Artificial Sequence: Synthetic oligonucleotide
  Antisense Strand to SEQ ID NO: 472931
aaacuucugggucugcacu

SEQ ID NO: 472933 - RNA, 19 nt, Artificial Sequence
  Description of Artificial Sequence: Synthetic oligonucleotide
  Sense strand starting at position 2373 of SEQ ID NO: 317209
cccagaaguuuaccuguca

SEQ ID NO: 472934 - RNA, 19 nt, Artificial Sequence
  Description of Artificial Sequence: Synthetic oligonucleotide
  Antisense Strand to SEQ ID NO: 472933
ugacagguaaacuucuggg

SEQ ID NO: 472935 - RNA, 19 nt, Artificial Sequence
  Description of Artificial Sequence: Synthetic oligonucleotide
  Sense strand starting at position 2418 of SEQ ID NO: 317209
agaaguuaacccuguccau

SEQ ID NO: 472936 - RNA, 19 nt, Artificial Sequence
  Description of Artificial Sequence: Synthetic oligonucleotide
  Antisense Strand to SEQ ID NO: 472935
auggacaggguuaacuucu

SEQ ID NO: 472937 - RNA, 19 nt, Artificial Sequence
  Description of Artificial Sequence: Synthetic oligonucleotide
  Sense strand starting at position 2443 of SEQ ID NO: 317209
agaagacagugauacauaa

SEQ ID NO: 472938 - RNA, 19 nt, Artificial Sequence
  Description of Artificial Sequence: Synthetic oligonucleotide
  Antisense Strand to SEQ ID NO: 472937
uuauguaucacugucuucu

SEQ ID NO: 472939 - RNA, 19 nt, Artificial Sequence
  Description of Artificial Sequence: Synthetic oligonucleotide
  Sense strand starting at position 2540 of SEQ ID NO: 317209
ucuauaggguugcuugaua

SEQ ID NO: 472940 - RNA, 19 nt, Artificial Sequence
  Description of Artificial Sequence: Synthetic oligonucleotide
  Antisense Strand to SEQ ID NO: 472939
uaucaagcaacccuauaga

SEQ ID NO: 472941 - RNA, 19 nt, Artificial Sequence
  Description of Artificial Sequence: Synthetic oligonucleotide
  Sense strand starting at position 2551 of SEQ ID NO: 317209
gcuugauacgcccgaggaa

SEQ ID NO: 472942 - RNA, 19 nt, Artificial Sequence
  Description of Artificial Sequence: Synthetic oligonucleotide
  Antisense Strand to SEQ ID NO: 472941
uuccucgggcguaucaagc

SEQ ID NO: 472943 - RNA, 19 nt, Artificial Sequence
  Description of Artificial Sequence: Synthetic oligonucleotide
  Sense strand starting at position 2552 of SEQ ID NO: 317209
cuugauacgcccgaggaau

SEQ ID NO: 472944 - RNA, 19 nt, Artificial Sequence
  Description of Artificial Sequence: Synthetic oligonucleotide
  Antisense Strand to SEQ ID NO: 472943
auuccucgggcguaucaag

SEQ ID NO: 472945 - RNA, 19 nt, Artificial Sequence
  Description of Artificial Sequence: Synthetic oligonucleotide
  Sense strand starting at position 2624 of SEQ ID NO: 317209
acuguuacacugugaauug

SEQ ID NO: 472946 - RNA, 19 nt, Artificial Sequence
  Description of Artificial Sequence: Synthetic oligonucleotide
  Antisense Strand to SEQ ID NO: 472945
caauucacaguguaacagu

SEQ ID NO: 472947 - RNA, 19 nt, Artificial Sequence
  Description of Artificial Sequence: Synthetic oligonucleotide
  Sense strand starting at position 2631 of SEQ ID NO: 317209
cacugugaauuggcuuaua

SEQ ID NO: 472948 - RNA, 19 nt, Artificial Sequence
  Description of Artificial Sequence: Synthetic oligonucleotide
  Antisense Strand to SEQ ID NO: 472947
uauaagccaauucacagug

SEQ ID NO: 472949 - RNA, 19 nt, Artificial Sequence
  Description of Artificial Sequence: Synthetic oligonucleotide
  Sense strand starting at position 2666 of SEQ ID NO: 317209
auucuuaaccaaggagcau

SEQ ID NO: 472950 - RNA, 19 nt, Artificial Sequence
  Description of Artificial Sequence: Synthetic oligonucleotide
  Antisense Strand to SEQ ID NO: 472949
augcuccuugguuaagaau

SEQ ID NO: 472951 - RNA, 19 nt, Artificial Sequence
  Description of Artificial Sequence: Synthetic oligonucleotide
  Sense strand starting at position 2809 of SEQ ID NO: 317209
uaucgaacaguugaaaugu

SEQ ID NO: 472952 - RNA, 19 nt, Artificial Sequence
  Description of Artificial Sequence: Synthetic oligonucleotide
  Antisense Strand to SEQ ID NO: 472951
acauuucaacuguucgaua

SEQ ID NO: 472953 - RNA, 19 nt, Artificial Sequence
  Description of Artificial Sequence: Synthetic oligonucleotide
  Sense strand starting at position 2818 of SEQ ID NO: 317209
guugaaauguggcuacugu

SEQ ID NO: 472954 - RNA, 19 nt, Artificial Sequence
  Description of Artificial Sequence: Synthetic oligonucleotide
  Antisense Strand to SEQ ID NO: 472953
acaguagccacauuucaac

SEQ ID NO: 472955 - RNA, 19 nt, Artificial Sequence
  Description of Artificial Sequence: Synthetic oligonucleotide
  Sense strand starting at position 3271 of SEQ ID NO: 317209
auugaaaugcguuggaagu

SEQ ID NO: 472956 - RNA, 19 nt, Artificial Sequence
  Description of Artificial Sequence: Synthetic oligonucleotide
  Antisense Strand to SEQ ID NO: 472955
acuuccaacgcauuucaau

SEQ ID NO: 472957 - RNA, 19 nt, Artificial Sequence
  Description of Artificial Sequence: Synthetic oligonucleotide
  Sense strand starting at position 3865 of SEQ ID NO: 317209
ggaguuugagguuaaccua

SEQ ID NO: 472958 - RNA, 19 nt, Artificial Sequence
  Description of Artificial Sequence: Synthetic oligonucleotide
  Antisense Strand to SEQ ID NO: 472957
uagguuaaccucaaacucc

SEQ ID NO: 472959 - RNA, 19 nt, Artificial Sequence
  Description of Artificial Sequence: Synthetic oligonucleotide
  Sense strand starting at position 3872 of SEQ ID NO: 317209
gagguuaaccuaggcaaca

SEQ ID NO: 472960 - RNA, 19 nt, Artificial Sequence
  Description of Artificial Sequence: Synthetic oligonucleotide
  Antisense Strand to SEQ ID NO: 472959
uguugccuagguuaaccuc

SEQ ID NO: 472961 - RNA, 19 nt, Artificial Sequence
  Description of Artificial Sequence: Synthetic oligonucleotide
  Sense strand starting at position 3959 of SEQ ID NO: 317209
ggucccagcuauuuguauu

SEQ ID NO: 472962 - RNA, 19 nt, Artificial Sequence
  Description of Artificial Sequence: Synthetic oligonucleotide
  Antisense Strand to SEQ ID NO: 472961
aauacaaauagcugggacc

SEQ ID NO: 472963 - RNA, 19 nt, Artificial Sequence
  Description of Artificial Sequence: Synthetic oligonucleotide
  Sense strand starting at position 3971 of SEQ ID NO: 317209
uuguauugcugagcccaga

SEQ ID NO: 472964 - RNA, 19 nt, Artificial Sequence
  Description of Artificial Sequence: Synthetic oligonucleotide
  Antisense Strand to SEQ ID NO: 472963
ucugggcucagcaauacaa

SEQ ID NO: 472965 - RNA, 19 nt, Artificial Sequence
  Description of Artificial Sequence: Synthetic oligonucleotide
  Sense strand starting at position 35 of SEQ ID NO: 317210
gucaaaguuuaaccaccau

SEQ ID NO: 472966 - RNA, 19 nt, Artificial Sequence
  Description of Artificial Sequence: Synthetic oligonucleotide
  Antisense Strand to SEQ ID NO: 472965
auggugguuaaacuuugac

SEQ ID NO: 472967 - RNA, 19 nt, Artificial Sequence
  Description of Artificial Sequence: Synthetic oligonucleotide
  Sense strand starting at position 62 of SEQ ID NO: 317210
auuuaagcuucuggauaua

SEQ ID NO: 472968 - RNA, 19 nt, Artificial Sequence
  Description of Artificial Sequence: Synthetic oligonucleotide
  Antisense Strand to SEQ ID NO: 472967
uauauccagaagcuuaaau

SEQ ID NO: 472969 - RNA, 19 nt, Artificial Sequence
  Description of Artificial Sequence: Synthetic oligonucleotide
  Sense strand starting at position 102 of SEQ ID NO: 317210
aaaggacuuugcgcuuuaa

SEQ ID NO: 472970 - RNA, 19 nt, Artificial Sequence
  Description of Artificial Sequence: Synthetic oligonucleotide
  Antisense Strand to SEQ ID NO: 472969
uuaaagcgcaaaguccuuu

SEQ ID NO: 472971 - RNA, 19 nt, Artificial Sequence
  Description of Artificial Sequence: Synthetic oligonucleotide
  Sense strand starting at position 144 of SEQ ID NO: 317210
auaguaaacuucuuaggca

SEQ ID NO: 472972 - RNA, 19 nt, Artificial Sequence
  Description of Artificial Sequence: Synthetic oligonucleotide
  Antisense Strand to SEQ ID NO: 472971
ugccuaagaaguuuacuau

SEQ ID NO: 472973 - RNA, 19 nt, Artificial Sequence
  Description of Artificial Sequence: Synthetic oligonucleotide
  Sense strand starting at position 330 of SEQ ID NO: 317210
acucaaagauguuaucuga

SEQ ID NO: 472974 - RNA, 19 nt, Artificial Sequence
  Description of Artificial Sequence: Synthetic oligonucleotide
  Antisense Strand to SEQ ID NO: 472973
ucagauaacaucuuugagu

SEQ ID NO: 472975 - RNA, 19 nt, Artificial Sequence
  Description of Artificial Sequence: Synthetic oligonucleotide
  Sense strand starting at position 333 of SEQ ID NO: 317210
caaagauguuaucugagau

SEQ ID NO: 472976 - RNA, 19 nt, Artificial Sequence
  Description of Artificial Sequence: Synthetic oligonucleotide
  Antisense Strand to SEQ ID NO: 472975
aucucagauaacaucuuug

SEQ ID NO: 472977 - RNA, 19 nt, Artificial Sequence
  Description of Artificial Sequence: Synthetic oligonucleotide
  Sense strand starting at position 337 of SEQ ID NO: 317210
gauguuaucugagauacaa

SEQ ID NO: 472978 - RNA, 19 nt, Artificial Sequence
  Description of Artificial Sequence: Synthetic oligonucleotide
  Antisense Strand to SEQ ID NO: 472977
uuguaucucagauaacauc

SEQ ID NO: 472979 - RNA, 19 nt, Artificial Sequence
  Description of Artificial Sequence: Synthetic oligonucleotide
  Sense strand starting at position 423 of SEQ ID NO: 317210
agcaguaucacaggagaaa

SEQ ID NO: 472980 - RNA, 19 nt, Artificial Sequence
  Description of Artificial Sequence: Synthetic oligonucleotide
  Antisense Strand to SEQ ID NO: 472979
uuucuccugugauacugcu

SEQ ID NO: 472981 - RNA, 19 nt, Artificial Sequence
  Description of Artificial Sequence: Synthetic oligonucleotide
  Sense strand starting at position 509 of SEQ ID NO: 317210
guggugaucuugucgguga

SEQ ID NO: 472982 - RNA, 19 nt, Artificial Sequence
  Description of Artificial Sequence: Synthetic oligonucleotide
  Antisense Strand to SEQ ID NO: 472981
ucaccgacaagaucaccac

SEQ ID NO: 472983 - RNA, 19 nt, Artificial Sequence
  Description of Artificial Sequence: Synthetic oligonucleotide
  Sense strand starting at position 511 of SEQ ID NO: 317210
ggugaucuugucggugauc

SEQ ID NO: 472984 - RNA, 19 nt, Artificial Sequence
  Description of Artificial Sequence: Synthetic oligonucleotide
  Antisense Strand to SEQ ID NO: 472983
gaucaccgacaagaucacc

SEQ ID NO: 472985 - RNA, 19 nt, Artificial Sequence
  Description of Artificial Sequence: Synthetic oligonucleotide
  Sense strand starting at position 512 of SEQ ID NO: 317210
gugaucuugucggugaucu

SEQ ID NO: 472986 - RNA, 19 nt, Artificial Sequence
  Description of Artificial Sequence: Synthetic oligonucleotide
  Antisense Strand to SEQ ID NO: 472985
agaucaccgacaagaucac

SEQ ID NO: 472987 - RNA, 19 nt, Artificial Sequence
  Description of Artificial Sequence: Synthetic oligonucleotide
  Sense strand starting at position 513 of SEQ ID NO: 317210
ugaucuugucggugaucuc

SEQ ID NO: 472988 - RNA, 19 nt, Artificial Sequence
  Description of Artificial Sequence: Synthetic oligonucleotide
  Antisense Strand to SEQ ID NO: 472987
gagaucaccgacaagauca

SEQ ID NO: 472989 - RNA, 19 nt, Artificial Sequence
  Description of Artificial Sequence: Synthetic oligonucleotide
  Sense strand starting at position 656 of SEQ ID NO: 317210
cggccucuaucggucagaa

SEQ ID NO: 472990 - RNA, 19 nt, Artificial Sequence
  Description of Artificial Sequence: Synthetic oligonucleotide
  Antisense Strand to SEQ ID NO: 472989
uucugaccgauagaggccg

SEQ ID NO: 472991 - RNA, 19 nt, Artificial Sequence
  Description of Artificial Sequence: Synthetic oligonucleotide
  Sense strand starting at position 795 of SEQ ID NO: 317210
gcucuuucccagggaucga

SEQ ID NO: 472992 - RNA, 19 nt, Artificial Sequence
  Description of Artificial Sequence: Synthetic oligonucleotide
  Antisense Strand to SEQ ID NO: 472991
ucgaucccugggaaagagc

SEQ ID NO: 472993 - RNA, 19 nt, Artificial Sequence
  Description of Artificial Sequence: Synthetic oligonucleotide
  Sense strand starting at position 796 of SEQ ID NO: 317210
cucuuucccagggaucgaa

SEQ ID NO: 472994 - RNA, 19 nt, Artificial Sequence
  Description of Artificial Sequence: Synthetic oligonucleotide
  Antisense Strand to SEQ ID NO: 472993
uucgaucccugggaaagag

SEQ ID NO: 472995 - RNA, 19 nt, Artificial Sequence
  Description of Artificial Sequence: Synthetic oligonucleotide
  Sense strand starting at position 2186 of SEQ ID NO: 317210
ggcaaacagugcuuuaucu

SEQ ID NO: 472996 - RNA, 19 nt, Artificial Sequence
  Description of Artificial Sequence: Synthetic oligonucleotide
  Antisense Strand to SEQ ID NO: 472995
agauaaagcacuguuugcc

SEQ ID NO: 472997 - RNA, 19 nt, Artificial Sequence
  Description of Artificial Sequence: Synthetic oligonucleotide
  Sense strand starting at position 2237 of SEQ ID NO: 317210
ggucauccugagggacaua

SEQ ID NO: 472998 - RNA, 19 nt, Artificial Sequence
  Description of Artificial Sequence: Synthetic oligonucleotide
  Antisense Strand to SEQ ID NO: 472997
uaugucccucaggaugacc

SEQ ID NO: 472999 - RNA, 19 nt, Artificial Sequence
  Description of Artificial Sequence: Synthetic oligonucleotide
  Sense strand starting at position 2263 of SEQ ID NO: 317210
cugguugggagguaguuaa

SEQ ID NO: 473000 - RNA, 19 nt, Artificial Sequence
  Description of Artificial Sequence: Synthetic oligonucleotide
  Antisense Strand to SEQ ID NO: 472999
uuaacuaccucccaaccag

SEQ ID NO: 473001 - RNA, 19 nt, Artificial Sequence
  Description of Artificial Sequence: Synthetic oligonucleotide
  Sense strand starting at position 2275 of SEQ ID NO: 317210
uaguuaauugcucggugaa

SEQ ID NO: 473002 - RNA, 19 nt, Artificial Sequence
  Description of Artificial Sequence: Synthetic oligonucleotide
  Antisense Strand to SEQ ID NO: 473001
uucaccgagcaauuaacua

SEQ ID NO: 473003 - RNA, 19 nt, Artificial Sequence
  Description of Artificial Sequence: Synthetic oligonucleotide
  Sense strand starting at position 2276 of SEQ ID NO: 317210
aguuaauugcucggugaaa

SEQ ID NO: 473004 - RNA, 19 nt, Artificial Sequence
  Description of Artificial Sequence: Synthetic oligonucleotide
  Antisense Strand to SEQ ID NO: 473003
uuucaccgagcaauuaacu

SEQ ID NO: 473005 - RNA, 19 nt, Artificial Sequence
  Description of Artificial Sequence: Synthetic oligonucleotide
  Sense strand starting at position 2325 of SEQ ID NO: 317210
ugcaaagucaaggaaaguu

SEQ ID NO: 473006 - RNA, 19 nt, Artificial Sequence
  Description of Artificial Sequence: Synthetic oligonucleotide
  Antisense Strand to SEQ ID NO: 473005
aacuuuccuugacuuugca

SEQ ID NO: 473007 - RNA, 19 nt, Artificial Sequence
  Description of Artificial Sequence: Synthetic oligonucleotide
  Sense strand starting at position 2411 of SEQ ID NO: 317210
uccuuagauuucugaaguu

SEQ ID NO: 473008 - RNA, 19 nt, Artificial Sequence
  Description of Artificial Sequence: Synthetic oligonucleotide
  Antisense Strand to SEQ ID NO: 473007
aacuucagaaaucuaagga

SEQ ID NO: 473009 - RNA, 19 nt, Artificial Sequence
  Description of Artificial Sequence: Synthetic oligonucleotide
  Sense strand starting at position 2711 of SEQ ID NO: 317210
uuauuaauuggguggguga

SEQ ID NO: 473010 - RNA, 19 nt, Artificial Sequence
  Description of Artificial Sequence: Synthetic oligonucleotide
  Antisense Strand to SEQ ID NO: 473009
ucacccacccaauuaauaa

SEQ ID NO: 473011 - RNA, 19 nt, Artificial Sequence
  Description of Artificial Sequence: Synthetic oligonucleotide
  Sense strand starting at position 2712 of SEQ ID NO: 317210
uauuaauugggugggugau

SEQ ID NO: 473012 - RNA, 19 nt, Artificial Sequence
  Description of Artificial Sequence: Synthetic oligonucleotide
  Antisense Strand to SEQ ID NO: 473011
aucacccacccaauuaaua

SEQ ID NO: 473013 - RNA, 19 nt, Artificial Sequence
  Description of Artificial Sequence: Synthetic oligonucleotide
  Sense strand starting at position 2713 of SEQ ID NO: 317210
auuaauugggugggugauu

SEQ ID NO: 473014 - RNA, 19 nt, Artificial Sequence
  Description of Artificial Sequence: Synthetic oligonucleotide
  Antisense Strand to SEQ ID NO: 473013
aaucacccacccaauuaau

SEQ ID NO: 473015 - RNA, 19 nt, Artificial Sequence
  Description of Artificial Sequence: Synthetic oligonucleotide
  Sense strand starting at position 2840 of SEQ ID NO: 317210
agcaguguuugagcaauuu

SEQ ID NO: 473016 - RNA, 19 nt, Artificial Sequence
  Description of Artificial Sequence: Synthetic oligonucleotide
  Antisense Strand to SEQ ID NO: 473015
aaauugcucaaacacugcu

SEQ ID NO: 473017 - RNA, 19 nt, Artificial Sequence
  Description of Artificial Sequence: Synthetic oligonucleotide
  Sense strand starting at position 2958 of SEQ ID NO: 317210
aggauacgauaauaugaaa

SEQ ID NO: 473018 - RNA, 19 nt, Artificial Sequence
  Description of Artificial Sequence: Synthetic oligonucleotide
  Antisense Strand to SEQ ID NO: 473017
uuucauauuaucguauccu

SEQ ID NO: 473019 - RNA, 19 nt, Artificial Sequence
  Description of Artificial Sequence: Synthetic oligonucleotide
  Sense strand starting at position 3020 of SEQ ID NO: 317210
gauauucgauuguuuauuc

SEQ ID NO: 473020 - RNA, 19 nt, Artificial Sequence
  Description of Artificial Sequence: Synthetic oligonucleotide
  Antisense Strand to SEQ ID NO: 473019
gaauaaacaaucgaauauc

SEQ ID NO: 473021 - RNA, 19 nt, Artificial Sequence
  Description of Artificial Sequence: Synthetic oligonucleotide
  Sense strand starting at position 3051 of SEQ ID NO: 317210
auggguacccauuggucua

SEQ ID NO: 473022 - RNA, 19 nt, Artificial Sequence
  Description of Artificial Sequence: Synthetic oligonucleotide
  Antisense Strand to SEQ ID NO: 473021
uagaccaauggguacccau

SEQ ID NO: 473023 - RNA, 19 nt, Artificial Sequence
  Description of Artificial Sequence: Synthetic oligonucleotide
  Sense strand starting at position 3052 of SEQ ID NO: 317210
uggguacccauuggucuau

SEQ ID NO: 473024 - RNA, 19 nt, Artificial Sequence
  Description of Artificial Sequence: Synthetic oligonucleotide
  Antisense Strand to SEQ ID NO: 473023
auagaccaauggguaccca

SEQ ID NO: 473025 - RNA, 19 nt, Artificial Sequence
  Description of Artificial Sequence: Synthetic oligonucleotide
  Sense strand starting at position 3156 of SEQ ID NO: 317210
aagagcagucauugcgaau

SEQ ID NO: 473026 - RNA, 19 nt, Artificial Sequence
  Description of Artificial Sequence: Synthetic oligonucleotide
  Antisense Strand to SEQ ID NO: 473025
auucgcaaugacugcucuu

SEQ ID NO: 473027 - RNA, 19 nt, Artificial Sequence
  Description of Artificial Sequence: Synthetic oligonucleotide
  Sense strand starting at position 3184 of SEQ ID NO: 317210
cacaguugcugauuugcua

SEQ ID NO: 473028 - RNA, 19 nt, Artificial Sequence
  Description of Artificial Sequence: Synthetic oligonucleotide
  Antisense Strand to SEQ ID NO: 473027
uagcaaaucagcaacugug

SEQ ID NO: 473029 - RNA, 19 nt, Artificial Sequence
  Description of Artificial Sequence: Synthetic oligonucleotide
  Sense strand starting at position 3187 of SEQ ID NO: 317210
aguugcugauuugcuagaa

SEQ ID NO: 473030 - RNA, 19 nt, Artificial Sequence
  Description of Artificial Sequence: Synthetic oligonucleotide
  Antisense Strand to SEQ ID NO: 473029
uucuagcaaaucagcaacu

SEQ ID NO: 473031 - RNA, 19 nt, Artificial Sequence
  Description of Artificial Sequence: Synthetic oligonucleotide
  Sense strand starting at position 3188 of SEQ ID NO: 317210
guugcugauuugcuagaac

SEQ ID NO: 473032 - RNA, 19 nt, Artificial Sequence
  Description of Artificial Sequence: Synthetic oligonucleotide
  Antisense Strand to SEQ ID NO: 473031
guucuagcaaaucagcaac

SEQ ID NO: 473033 - RNA, 19 nt, Artificial Sequence
  Description of Artificial Sequence: Synthetic oligonucleotide
  Sense strand starting at position 3197 of SEQ ID NO: 317210
uugcuagaacucugcccaa

SEQ ID NO: 473034 - RNA, 19 nt, Artificial Sequence
  Description of Artificial Sequence: Synthetic oligonucleotide
  Antisense Strand to SEQ ID NO: 473033
uugggcagaguucuagcaa

SEQ ID NO: 473035 - RNA, 19 nt, Artificial Sequence
  Description of Artificial Sequence: Synthetic oligonucleotide
  Sense strand starting at position 3225 of SEQ ID NO: 317210
cuuuguucuugggcauuua

SEQ ID NO: 473036 - RNA, 19 nt, Artificial Sequence
  Description of Artificial Sequence: Synthetic oligonucleotide
  Antisense Strand to SEQ ID NO: 473035
uaaaugcccaagaacaaag

SEQ ID NO: 473037 - RNA, 19 nt, Artificial Sequence
  Description of Artificial Sequence: Synthetic oligonucleotide
  Sense strand starting at position 3652 of SEQ ID NO: 317210
uauuucuuuguguguuaca

SEQ ID NO: 473038 - RNA, 19 nt, Artificial Sequence
  Description of Artificial Sequence: Synthetic oligonucleotide
  Antisense Strand to SEQ ID NO: 473037
uguaacacacaaagaaaua

SEQ ID NO: 473039 - RNA, 19 nt, Artificial Sequence
  Description of Artificial Sequence: Synthetic oligonucleotide
  Sense strand starting at position 3653 of SEQ ID NO: 317210
auuucuuuguguguuacau

SEQ ID NO: 473040 - RNA, 19 nt, Artificial Sequence
  Description of Artificial Sequence: Synthetic oligonucleotide
  Antisense Strand to SEQ ID NO: 473039
auguaacacacaaagaaau

SEQ ID NO: 473041 - RNA, 19 nt, Artificial Sequence
  Description of Artificial Sequence: Synthetic oligonucleotide
  Sense strand starting at position 3657 of SEQ ID NO: 317210
cuuuguguguuacauuuaa

SEQ ID NO: 473042 - RNA, 19 nt, Artificial Sequence
  Description of Artificial Sequence: Synthetic oligonucleotide
  Antisense Strand to SEQ ID NO: 473041
uuaaauguaacacacaaag

SEQ ID NO: 473043 - RNA, 19 nt, Artificial Sequence
  Description of Artificial Sequence: Synthetic oligonucleotide
  Sense strand starting at position 3708 of SEQ ID NO: 317210
ucaguagcuugcccauuau

SEQ ID NO: 473044 - RNA, 19 nt, Artificial Sequence
  Description of Artificial Sequence: Synthetic oligonucleotide
  Antisense Strand to SEQ ID NO: 473043
auaaugggcaagcuacuga

SEQ ID NO: 473045 - RNA, 19 nt, Artificial Sequence
  Description of Artificial Sequence: Synthetic oligonucleotide
  Sense strand starting at position 105 of SEQ ID NO: 317211
gcaaccuaugaauauguca

SEQ ID NO: 473046 - RNA, 19 nt, Artificial Sequence
  Description of Artificial Sequence: Synthetic oligonucleotide
  Antisense Strand to SEQ ID NO: 473045
ugacauauucauagguugc

SEQ ID NO: 473047 - RNA, 19 nt, Artificial Sequence
  Description of Artificial Sequence: Synthetic oligonucleotide
  Sense strand starting at position 170 of SEQ ID NO: 317211
uggaaaugguuucuggauu

SEQ ID NO: 473048 - RNA, 19 nt, Artificial Sequence
  Description of Artificial Sequence: Synthetic oligonucleotide
  Antisense Strand to SEQ ID NO: 473047
aauccagaaaccauuucca

SEQ ID NO: 473049 - RNA, 19 nt, Artificial Sequence
  Description of Artificial Sequence: Synthetic oligonucleotide
  Sense strand starting at position 176 of SEQ ID NO: 317211
ugguuucuggauuauccaa

SEQ ID NO: 473050 - RNA, 19 nt, Artificial Sequence
  Description of Artificial Sequence: Synthetic oligonucleotide
  Antisense Strand to SEQ ID NO: 473049
uuggauaauccagaaacca

SEQ ID NO: 473051 - RNA, 19 nt, Artificial Sequence
  Description of Artificial Sequence: Synthetic oligonucleotide
  Sense strand starting at position 218 of SEQ ID NO: 317211
cuccuuaugagagguaggu

SEQ ID NO: 473052 - RNA, 19 nt, Artificial Sequence
  Description of Artificial Sequence: Synthetic oligonucleotide
  Antisense Strand to SEQ ID NO: 473051
accuaccucucauaaggag

SEQ ID NO: 473053 - RNA, 19 nt, Artificial Sequence
  Description of Artificial Sequence: Synthetic oligonucleotide
  Sense strand starting at position 227 of SEQ ID NO: 317211
agagguagguagaguuaga

SEQ ID NO: 473054 - RNA, 19 nt, Artificial Sequence
  Description of Artificial Sequence: Synthetic oligonucleotide
  Antisense Strand to SEQ ID NO: 473053
ucuaacucuaccuaccucu

SEQ ID NO: 473055 - RNA, 19 nt, Artificial Sequence
  Description of Artificial Sequence: Synthetic oligonucleotide
  Sense strand starting at position 234 of SEQ ID NO: 317211
gguagaguuagaggcagaa

SEQ ID NO: 473056 - RNA, 19 nt, Artificial Sequence
  Description of Artificial Sequence: Synthetic oligonucleotide
  Antisense Strand to SEQ ID NO: 473055
uucugccucuaacucuacc

SEQ ID NO: 473057 - RNA, 19 nt, Artificial Sequence
  Description of Artificial Sequence: Synthetic oligonucleotide
  Sense strand starting at position 415 of SEQ ID NO: 317211
cuaugaucauacuuugagu

SEQ ID NO: 473058 - RNA, 19 nt, Artificial Sequence
  Description of Artificial Sequence: Synthetic oligonucleotide
  Antisense Strand to SEQ ID NO: 473057
acucaaaguaugaucauag

SEQ ID NO: 473059 - RNA, 19 nt, Artificial Sequence
  Description of Artificial Sequence: Synthetic oligonucleotide
  Sense strand starting at position 533 of SEQ ID NO: 317211
agccauagguaacuaauau

SEQ ID NO: 473060 - RNA, 19 nt, Artificial Sequence
  Description of Artificial Sequence: Synthetic oligonucleotide
  Antisense Strand to SEQ ID NO: 473059
auauuaguuaccuauggcu

SEQ ID NO: 473061 - RNA, 19 nt, Artificial Sequence
  Description of Artificial Sequence: Synthetic oligonucleotide
  Sense strand starting at position 591 of SEQ ID NO: 317211
cagugccuuccugagggau

SEQ ID NO: 473062 - RNA, 19 nt, Artificial Sequence
  Description of Artificial Sequence: Synthetic oligonucleotide
  Antisense Strand to SEQ ID NO: 473061
aucccucaggaaggcacug

SEQ ID NO: 473063 - RNA, 19 nt, Artificial Sequence
  Description of Artificial Sequence: Synthetic oligonucleotide
  Sense strand starting at position 594 of SEQ ID NO: 317211
ugccuuccugagggaugaa

SEQ ID NO: 473064 - RNA, 19 nt, Artificial Sequence
  Description of Artificial Sequence: Synthetic oligonucleotide
  Antisense Strand to SEQ ID NO: 473063
uucaucccucaggaaggca

SEQ ID NO: 473065 - RNA, 19 nt, Artificial Sequence
  Description of Artificial Sequence: Synthetic oligonucleotide
  Sense strand starting at position 595 of SEQ ID NO: 317211
gccuuccugagggaugaau

SEQ ID NO: 473066 - RNA, 19 nt, Artificial Sequence
  Description of Artificial Sequence: Synthetic oligonucleotide
  Antisense Strand to SEQ ID NO: 473065
auucaucccucaggaaggc

SEQ ID NO: 473067 - RNA, 19 nt, Artificial Sequence
  Description of Artificial Sequence: Synthetic oligonucleotide
  Sense strand starting at position 712 of SEQ ID NO: 317211
gauauuuauuggcaaaggu

SEQ ID NO: 473068 - RNA, 19 nt, Artificial Sequence
  Description of Artificial Sequence: Synthetic oligonucleotide
  Antisense Strand to SEQ ID NO: 473067
accuuugccaauaaauauc

SEQ ID NO: 473069 - RNA, 19 nt, Artificial Sequence
  Description of Artificial Sequence: Synthetic oligonucleotide
  Sense strand starting at position 730 of SEQ ID NO: 317211
uaauaauaauggucaaggu

SEQ ID NO: 473070 - RNA, 19 nt, Artificial Sequence
  Description of Artificial Sequence: Synthetic oligonucleotide
  Antisense Strand to SEQ ID NO: 473069
accuugaccauuauuauua

SEQ ID NO: 473071 - RNA, 19 nt, Artificial Sequence
  Description of Artificial Sequence: Synthetic oligonucleotide
  Sense strand starting at position 734 of SEQ ID NO: 317211
aauaauggucaagguaaau

SEQ ID NO: 473072 - RNA, 19 nt, Artificial Sequence
  Description of Artificial Sequence: Synthetic oligonucleotide
  Antisense Strand to SEQ ID NO: 473071
auuuaccuugaccauuauu

SEQ ID NO: 473073 - RNA, 19 nt, Artificial Sequence
  Description of Artificial Sequence: Synthetic oligonucleotide
  Sense strand starting at position 743 of SEQ ID NO: 317211
caagguaaauauguagcua

SEQ ID NO: 473074 - RNA, 19 nt, Artificial Sequence
  Description of Artificial Sequence: Synthetic oligonucleotide
  Antisense Strand to SEQ ID NO: 473073
uagcuacauauuuaccuug

SEQ ID NO: 473075 - RNA, 19 nt, Artificial Sequence
  Description of Artificial Sequence: Synthetic oligonucleotide
  Sense strand starting at position 794 of SEQ ID NO: 317211
uguaucagccaacauguaa

SEQ ID NO: 473076 - RNA, 19 nt, Artificial Sequence
  Description of Artificial Sequence: Synthetic oligonucleotide
  Antisense Strand to SEQ ID NO: 473075
uuacauguuggcugauaca

SEQ ID NO: 473077 - RNA, 19 nt, Artificial Sequence
  Description of Artificial Sequence: Synthetic oligonucleotide
  Sense strand starting at position 887 of SEQ ID NO: 317211
ugaaauuguuaugugucaa

SEQ ID NO: 473078 - RNA, 19 nt, Artificial Sequence
  Description of Artificial Sequence: Synthetic oligonucleotide
  Antisense Strand to SEQ ID NO: 473077
uugacacauaacaauuuca

SEQ ID NO: 473079 - RNA, 19 nt, Artificial Sequence
  Description of Artificial Sequence: Synthetic oligonucleotide
  Sense strand starting at position 1035 of SEQ ID NO: 317211
agaaguaugcuauauagca

SEQ ID NO: 473080 - RNA, 19 nt, Artificial Sequence
  Description of Artificial Sequence: Synthetic oligonucleotide
  Antisense Strand to SEQ ID NO: 473079
ugcuauauagcauacuucu

SEQ ID NO: 473081 - RNA, 19 nt, Artificial Sequence
  Description of Artificial Sequence: Synthetic oligonucleotide
  Sense strand starting at position 1554 of SEQ ID NO: 317211
gacagaaguuguucuaacc

SEQ ID NO: 473082 - RNA, 19 nt, Artificial Sequence
  Description of Artificial Sequence: Synthetic oligonucleotide
  Antisense Strand to SEQ ID NO: 473081
gguuagaacaacuucuguc

SEQ ID NO: 473083 - RNA, 19 nt, Artificial Sequence
  Description of Artificial Sequence: Synthetic oligonucleotide
  Sense strand starting at position 1629 of SEQ ID NO: 317211
ccguuaaguguggcuguga

SEQ ID NO: 473084 - RNA, 19 nt, Artificial Sequence
  Description of Artificial Sequence: Synthetic oligonucleotide
  Antisense Strand to SEQ ID NO: 473083
ucacagccacacuuaacgg

SEQ ID NO: 473085 - RNA, 19 nt, Artificial Sequence
  Description of Artificial Sequence: Synthetic oligonucleotide
  Sense strand starting at position 1640 of SEQ ID NO: 317211
ggcugugaucaugauccua

SEQ ID NO: 473086 - RNA, 19 nt, Artificial Sequence
  Description of Artificial Sequence: Synthetic oligonucleotide
  Antisense Strand to SEQ ID NO: 473085
uaggaucaugaucacagcc

SEQ ID NO: 473087 - RNA, 19 nt, Artificial Sequence
  Description of Artificial Sequence: Synthetic oligonucleotide
  Sense strand starting at position 1642 of SEQ ID NO: 317211
cugugaucaugauccuaga

SEQ ID NO: 473088 - RNA, 19 nt, Artificial Sequence
  Description of Artificial Sequence: Synthetic oligonucleotide
  Antisense Strand to SEQ ID NO: 473087
ucuaggaucaugaucacag

SEQ ID NO: 473089 - RNA, 19 nt, Artificial Sequence
  Description of Artificial Sequence: Synthetic oligonucleotide
  Sense strand starting at position 2227 of SEQ ID NO: 317211
uuguauuaacaguagaguu

SEQ ID NO: 473090 - RNA, 19 nt, Artificial Sequence
  Description of Artificial Sequence: Synthetic oligonucleotide
  Antisense Strand to SEQ ID NO: 473089
aacucuacuguuaauacaa

SEQ ID NO: 473091 - RNA, 19 nt, Artificial Sequence
  Description of Artificial Sequence: Synthetic oligonucleotide
  Sense strand starting at position 2229 of SEQ ID NO: 317211
guauuaacaguagaguucu

SEQ ID NO: 473092 - RNA, 19 nt, Artificial Sequence
  Description of Artificial Sequence: Synthetic oligonucleotide
  Antisense Strand to SEQ ID NO: 473091
agaacucuacuguuaauac

SEQ ID NO: 473093 - RNA, 19 nt, Artificial Sequence
  Description of Artificial Sequence: Synthetic oligonucleotide
  Sense strand starting at position 2469 of SEQ ID NO: 317211
cuagucucuggaugguauu

SEQ ID NO: 473094 - RNA, 19 nt, Artificial Sequence
  Description of Artificial Sequence: Synthetic oligonucleotide
  Antisense Strand to SEQ ID NO: 473093
aauaccauccagagacuag

SEQ ID NO: 473095 - RNA, 19 nt, Artificial Sequence
  Description of Artificial Sequence: Synthetic oligonucleotide
  Sense strand starting at position 2766 of SEQ ID NO: 317211
ugcucucugcaggaggauu

SEQ ID NO: 473096 - RNA, 19 nt, Artificial Sequence
  Description of Artificial Sequence: Synthetic oligonucleotide
  Antisense Strand to SEQ ID NO: 473095
aauccuccugcagagagca

SEQ ID NO: 473097 - RNA, 19 nt, Artificial Sequence
  Description of Artificial Sequence: Synthetic oligonucleotide
  Sense strand starting at position 2793 of SEQ ID NO: 317211
cugggaguugaaugugaga

SEQ ID NO: 473098 - RNA, 19 nt, Artificial Sequence
  Description of Artificial Sequence: Synthetic oligonucleotide
  Antisense Strand to SEQ ID NO: 473097
ucucacauucaacucccag

SEQ ID NO: 473099 - RNA, 19 nt, Artificial Sequence
  Description of Artificial Sequence: Synthetic oligonucleotide
  Sense strand starting at position 2795 of SEQ ID NO: 317211
gggaguugaaugugagaau

SEQ ID NO: 473100 - RNA, 19 nt, Artificial Sequence
  Description of Artificial Sequence: Synthetic oligonucleotide
  Antisense Strand to SEQ ID NO: 473099
auucucacauucaacuccc

SEQ ID NO: 473101 - RNA, 19 nt, Artificial Sequence
  Description of Artificial Sequence: Synthetic oligonucleotide
  Sense strand starting at position 2883 of SEQ ID NO: 317211
agucuucccuucucugaga

SEQ ID NO: 473102 - RNA, 19 nt, Artificial Sequence
  Description of Artificial Sequence: Synthetic oligonucleotide
  Antisense Strand to SEQ ID NO: 473101
ucucagagaagggaagacu

SEQ ID NO: 473103 - RNA, 19 nt, Artificial Sequence
  Description of Artificial Sequence: Synthetic oligonucleotide
  Sense strand starting at position 2884 of SEQ ID NO: 317211
gucuucccuucucugagaa

SEQ ID NO: 473104 - RNA, 19 nt, Artificial Sequence
  Description of Artificial Sequence: Synthetic oligonucleotide
  Antisense Strand to SEQ ID NO: 473103
uucucagagaagggaagac

SEQ ID NO: 473105 - RNA, 19 nt, Artificial Sequence
  Description of Artificial Sequence: Synthetic oligonucleotide
  Sense strand starting at position 2904 of SEQ ID NO: 317211
gaaugacuuuggcucuuga

SEQ ID NO: 473106 - RNA, 19 nt, Artificial Sequence
  Description of Artificial Sequence: Synthetic oligonucleotide
  Antisense Strand to SEQ ID NO: 473105
ucaagagccaaagucauuc

SEQ ID NO: 473107 - RNA, 19 nt, Artificial Sequence
  Description of Artificial Sequence: Synthetic oligonucleotide
  Sense strand starting at position 2917 of SEQ ID NO: 317211
ucuugauuagggcaaggua

SEQ ID NO: 473108 - RNA, 19 nt, Artificial Sequence
  Description of Artificial Sequence: Synthetic oligonucleotide
  Antisense Strand to SEQ ID NO: 473107
uaccuugcccuaaucaaga

SEQ ID NO: 473109 - RNA, 19 nt, Artificial Sequence
  Description of Artificial Sequence: Synthetic oligonucleotide
  Sense strand starting at position 2970 of SEQ ID NO: 317211
acuuauuaacagugguaaa

SEQ ID NO: 473110 - RNA, 19 nt, Artificial Sequence
  Description of Artificial Sequence: Synthetic oligonucleotide
  Antisense Strand to SEQ ID NO: 473109
uuuaccacuguuaauaagu

SEQ ID NO: 473111 - RNA, 19 nt, Artificial Sequence
  Description of Artificial Sequence: Synthetic oligonucleotide
  Sense strand starting at position 3061 of SEQ ID NO: 317211
gcaauuuaauuguugagcu

SEQ ID NO: 473112 - RNA, 19 nt, Artificial Sequence
  Description of Artificial Sequence: Synthetic oligonucleotide
  Antisense Strand to SEQ ID NO: 473111
agcucaacaauuaaauugc

SEQ ID NO: 473113 - RNA, 19 nt, Artificial Sequence
  Description of Artificial Sequence: Synthetic oligonucleotide
  Sense strand starting at position 3068 of SEQ ID NO: 317211
aauuguugagcugaguaau

SEQ ID NO: 473114 - RNA, 19 nt, Artificial Sequence
  Description of Artificial Sequence: Synthetic oligonucleotide
  Antisense Strand to SEQ ID NO: 473113
auuacucagcucaacaauu

SEQ ID NO: 473115 - RNA, 19 nt, Artificial Sequence
  Description of Artificial Sequence: Synthetic oligonucleotide
  Sense strand starting at position 3302 of SEQ ID NO: 317211
cacagagauacguaugugu

SEQ ID NO: 473116 - RNA, 19 nt, Artificial Sequence
  Description of Artificial Sequence: Synthetic oligonucleotide
  Antisense Strand to SEQ ID NO: 473115
acacauacguaucucugug

SEQ ID NO: 473117 - RNA, 19 nt, Artificial Sequence
  Description of Artificial Sequence: Synthetic oligonucleotide
  Sense strand starting at position 3458 of SEQ ID NO: 317211
cgaagaugauguguugaaa

SEQ ID NO: 473118 - RNA, 19 nt, Artificial Sequence
  Description of Artificial Sequence: Synthetic oligonucleotide
  Antisense Strand to SEQ ID NO: 473117
uuucaacacaucaucuucg

SEQ ID NO: 473119 - RNA, 19 nt, Artificial Sequence
  Description of Artificial Sequence: Synthetic oligonucleotide
  Sense strand starting at position 3631 of SEQ ID NO: 317211
gugacuuacauacaguagu

SEQ ID NO: 473120 - RNA, 19 nt, Artificial Sequence
  Description of Artificial Sequence: Synthetic oligonucleotide
  Antisense Strand to SEQ ID NO: 473119
acuacuguauguaagucac

SEQ ID NO: 473121 - RNA, 19 nt, Artificial Sequence
  Description of Artificial Sequence: Synthetic oligonucleotide
  Sense strand starting at position 3767 of SEQ ID NO: 317211
uguaaagucauaggaagca

SEQ ID NO: 473122 - RNA, 19 nt, Artificial Sequence
  Description of Artificial Sequence: Synthetic oligonucleotide
  Antisense Strand to SEQ ID NO: 473121
ugcuuccuaugacuuuaca

SEQ ID NO: 473123 - RNA, 19 nt, Artificial Sequence
  Description of Artificial Sequence: Synthetic oligonucleotide
  Sense strand starting at position 3968 of SEQ ID NO: 317211
ucuuucuacuaguuauaga

SEQ ID NO: 473124 - RNA, 19 nt, Artificial Sequence
  Description of Artificial Sequence: Synthetic oligonucleotide
  Antisense Strand to SEQ ID NO: 473123
ucuauaacuaguagaaaga

SEQ ID NO: 473125 - RNA, 19 nt, Artificial Sequence
  Description of Artificial Sequence: Synthetic oligonucleotide
  Sense strand starting at position 155 of SEQ ID NO: 317212
gaauguguugcuuaacaug

SEQ ID NO: 473126 - RNA, 19 nt, Artificial Sequence
  Description of Artificial Sequence: Synthetic oligonucleotide
  Antisense Strand to SEQ ID NO: 473125
cauguuaagcaacacauuc

SEQ ID NO: 473127 - RNA, 19 nt, Artificial Sequence
  Description of Artificial Sequence: Synthetic oligonucleotide
  Sense strand starting at position 277 of SEQ ID NO: 317212
guuucugaauuauccaagu

SEQ ID NO: 473128 - RNA, 19 nt, Artificial Sequence
  Description of Artificial Sequence: Synthetic oligonucleotide
  Antisense Strand to SEQ ID NO: 473127
acuuggauaauucagaaac

SEQ ID NO: 473129 - RNA, 19 nt, Artificial Sequence
  Description of Artificial Sequence: Synthetic oligonucleotide
  Sense strand starting at position 348 of SEQ ID NO: 317212
guagaagagucagcagaga

SEQ ID NO: 473130 - RNA, 19 nt, Artificial Sequence
  Description of Artificial Sequence: Synthetic oligonucleotide
  Antisense Strand to SEQ ID NO: 473129
ucucugcugacucuucuac

SEQ ID NO: 473131 - RNA, 19 nt, Artificial Sequence
  Description of Artificial Sequence: Synthetic oligonucleotide
  Sense strand starting at position 451 of SEQ ID NO: 317212
ggaaguagauucucuucua

SEQ ID NO: 473132 - RNA, 19 nt, Artificial Sequence
  Description of Artificial Sequence: Synthetic oligonucleotide
  Antisense Strand to SEQ ID NO: 473131
uagaagagaaucuacuucc

SEQ ID NO: 473133 - RNA, 19 nt, Artificial Sequence
  Description of Artificial Sequence: Synthetic oligonucleotide
  Sense strand starting at position 452 of SEQ ID NO: 317212
gaaguagauucucuucuag

SEQ ID NO: 473134 - RNA, 19 nt, Artificial Sequence
  Description of Artificial Sequence: Synthetic oligonucleotide
  Antisense Strand to SEQ ID NO: 473133
cuagaagagaaucuacuuc

SEQ ID NO: 473135 - RNA, 19 nt, Artificial Sequence
  Description of Artificial Sequence: Synthetic oligonucleotide
  Sense strand starting at position 454 of SEQ ID NO: 317212
aguagauucucuucuagag

SEQ ID NO: 473136 - RNA, 19 nt, Artificial Sequence
  Description of Artificial Sequence: Synthetic oligonucleotide
  Antisense Strand to SEQ ID NO: 473135
cucuagaagagaaucuacu

SEQ ID NO: 473137 - RNA, 19 nt, Artificial Sequence
  Description of Artificial Sequence: Synthetic oligonucleotide
  Sense strand starting at position 482 of SEQ ID NO: 317212
ggaauacagcucugaggac

SEQ ID NO: 473138 - RNA, 19 nt, Artificial Sequence
  Description of Artificial Sequence: Synthetic oligonucleotide
  Antisense Strand to SEQ ID NO: 473137
guccucagagcuguauucc

SEQ ID NO: 473139 - RNA, 19 nt, Artificial Sequence
  Description of Artificial Sequence: Synthetic oligonucleotide
  Sense strand starting at position 494 of SEQ ID NO: 317212
ugaggacagcuugaguuua

SEQ ID NO: 473140 - RNA, 19 nt, Artificial Sequence
  Description of Artificial Sequence: Synthetic oligonucleotide
  Antisense Strand to SEQ ID NO: 473139
uaaacucaagcuguccuca

SEQ ID NO: 473141 - RNA, 19 nt, Artificial Sequence
  Description of Artificial Sequence: Synthetic oligonucleotide
  Sense strand starting at position 515 of SEQ ID NO: 317212
cuuuaagacuuacuuugga

SEQ ID NO: 473142 - RNA, 19 nt, Artificial Sequence
  Description of Artificial Sequence: Synthetic oligonucleotide
  Antisense Strand to SEQ ID NO: 473141
uccaaaguaagucuuaaag

SEQ ID NO: 473143 - RNA, 19 nt, Artificial Sequence
  Description of Artificial Sequence: Synthetic oligonucleotide
  Sense strand starting at position 558 of SEQ ID NO: 317212
cgauaaauuuguguugguu

SEQ ID NO: 473144 - RNA, 19 nt, Artificial Sequence
  Description of Artificial Sequence: Synthetic oligonucleotide
  Antisense Strand to SEQ ID NO: 473143
aaccaacacaaauuuaucg

SEQ ID NO: 473145 - RNA, 19 nt, Artificial Sequence
  Description of Artificial Sequence: Synthetic oligonucleotide
  Sense strand starting at position 564 of SEQ ID NO: 317212
auuuguguugguuaagcca

SEQ ID NO: 473146 - RNA, 19 nt, Artificial Sequence
  Description of Artificial Sequence: Synthetic oligonucleotide
  Antisense Strand to SEQ ID NO: 473145
uggcuuaaccaacacaaau

SEQ ID NO: 473147 - RNA, 19 nt, Artificial Sequence
  Description of Artificial Sequence: Synthetic oligonucleotide
  Sense strand starting at position 663 of SEQ ID NO: 317212
agagcaaugucuuccuaaa

SEQ ID NO: 473148 - RNA, 19 nt, Artificial Sequence
  Description of Artificial Sequence: Synthetic oligonucleotide
  Antisense Strand to SEQ ID NO: 473147
uuuaggaagacauugcucu

SEQ ID NO: 473149 - RNA, 19 nt, Artificial Sequence
  Description of Artificial Sequence: Synthetic oligonucleotide
  Sense strand starting at position 765 of SEQ ID NO: 317212
agcagaguguugcuuauuu

SEQ ID NO: 473150 - RNA, 19 nt, Artificial Sequence
  Description of Artificial Sequence: Synthetic oligonucleotide
  Antisense Strand to SEQ ID NO: 473149
aaauaagcaacacucugcu

SEQ ID NO: 473151 - RNA, 19 nt, Artificial Sequence
  Description of Artificial Sequence: Synthetic oligonucleotide
  Sense strand starting at position 769 of SEQ ID NO: 317212
gaguguugcuuauuuacuu

SEQ ID NO: 473152 - RNA, 19 nt, Artificial Sequence
  Description of Artificial Sequence: Synthetic oligonucleotide
  Antisense Strand to SEQ ID NO: 473151
aaguaaauaagcaacacuc

SEQ ID NO: 473153 - RNA, 19 nt, Artificial Sequence
  Description of Artificial Sequence: Synthetic oligonucleotide
  Sense strand starting at position 809 of SEQ ID NO: 317212
ucgaguaaugcuuaagagc

SEQ ID NO: 473154 - RNA, 19 nt, Artificial Sequence
  Description of Artificial Sequence: Synthetic oligonucleotide
  Antisense Strand to SEQ ID NO: 473153
gcucuuaagcauuacucga

SEQ ID NO: 473155 - RNA, 19 nt, Artificial Sequence
  Description of Artificial Sequence: Synthetic oligonucleotide
  Sense strand starting at position 1377 of SEQ ID NO: 317212
cgaggacucacaugaguug

SEQ ID NO: 473156 - RNA, 19 nt, Artificial Sequence
  Description of Artificial Sequence: Synthetic oligonucleotide
  Antisense Strand to SEQ ID NO: 473155
caacucaugugaguccucg

SEQ ID NO: 473157 - RNA, 19 nt, Artificial Sequence
  Description of Artificial Sequence: Synthetic oligonucleotide
  Sense strand starting at position 1570 of SEQ ID NO: 317212
ugaguagccagagauacuu

SEQ ID NO: 473158 - RNA, 19 nt, Artificial Sequence
  Description of Artificial Sequence: Synthetic oligonucleotide
  Antisense Strand to SEQ ID NO: 473157
aaguaucucuggcuacuca

SEQ ID NO: 473159 - RNA, 19 nt, Artificial Sequence
  Description of Artificial Sequence: Synthetic oligonucleotide
  Sense strand starting at position 1738 of SEQ ID NO: 317212
cugcgaucaugauccuaga

SEQ ID NO: 473160 - RNA, 19 nt, Artificial Sequence
  Description of Artificial Sequence: Synthetic oligonucleotide
  Antisense Strand to SEQ ID NO: 473159
ucuaggaucaugaucgcag

SEQ ID NO: 473161 - RNA, 19 nt, Artificial Sequence
  Description of Artificial Sequence: Synthetic oligonucleotide
  Sense strand starting at position 2292 of SEQ ID NO: 317212
auaguagaguucucuguag

SEQ ID NO: 473162 - RNA, 19 nt, Artificial Sequence
  Description of Artificial Sequence: Synthetic oligonucleotide
  Antisense Strand to SEQ ID NO: 473161
cuacagagaacucuacuau

SEQ ID NO: 473163 - RNA, 19 nt, Artificial Sequence
  Description of Artificial Sequence: Synthetic oligonucleotide
  Sense strand starting at position 2296 of SEQ ID NO: 317212
uagaguucucuguagucac

SEQ ID NO: 473164 - RNA, 19 nt, Artificial Sequence
  Description of Artificial Sequence: Synthetic oligonucleotide
  Antisense Strand to SEQ ID NO: 473163
gugacuacagagaacucua

SEQ ID NO: 473165 - RNA, 19 nt, Artificial Sequence
  Description of Artificial Sequence: Synthetic oligonucleotide
  Sense strand starting at position 2303 of SEQ ID NO: 317212
cucuguagucaccaagcaa

SEQ ID NO: 473166 - RNA, 19 nt, Artificial Sequence
  Description of Artificial Sequence: Synthetic oligonucleotide
  Antisense Strand to SEQ ID NO: 473165
uugcuuggugacuacagag

SEQ ID NO: 473167 - RNA, 19 nt, Artificial Sequence
  Description of Artificial Sequence: Synthetic oligonucleotide
  Sense strand starting at position 2406 of SEQ ID NO: 317212
cuugauuaccauugaguuu

SEQ ID NO: 473168 - RNA, 19 nt, Artificial Sequence
  Description of Artificial Sequence: Synthetic oligonucleotide
  Antisense Strand to SEQ ID NO: 473167
aaacucaaugguaaucaag

SEQ ID NO: 473169 - RNA, 19 nt, Artificial Sequence
  Description of Artificial Sequence: Synthetic oligonucleotide
  Sense strand starting at position 2409 of SEQ ID NO: 317212
gauuaccauugaguuugau

SEQ ID NO: 473170 - RNA, 19 nt, Artificial Sequence
  Description of Artificial Sequence: Synthetic oligonucleotide
  Antisense Strand to SEQ ID NO: 473169
aucaaacucaaugguaauc

SEQ ID NO: 473171 - RNA, 19 nt, Artificial Sequence
  Description of Artificial Sequence: Synthetic oligonucleotide
  Sense strand starting at position 2437 of SEQ ID NO: 317212
uuugaagagugugcuauuu

SEQ ID NO: 473172 - RNA, 19 nt, Artificial Sequence
  Description of Artificial Sequence: Synthetic oligonucleotide
  Antisense Strand to SEQ ID NO: 473171
aaauagcacacucuucaaa

SEQ ID NO: 473173 - RNA, 19 nt, Artificial Sequence
  Description of Artificial Sequence: Synthetic oligonucleotide
  Sense strand starting at position 2486 of SEQ ID NO: 317212
uuuggucucuaggugauga

SEQ ID NO: 473174 - RNA, 19 nt, Artificial Sequence
  Description of Artificial Sequence: Synthetic oligonucleotide
  Antisense Strand to SEQ ID NO: 473173
ucaucaccuagagaccaaa

SEQ ID NO: 473175 - RNA, 19 nt, Artificial Sequence
  Description of Artificial Sequence: Synthetic oligonucleotide
  Sense strand starting at position 2536 of SEQ ID NO: 317212
uucccuagucucuggauga

SEQ ID NO: 473176 - RNA, 19 nt, Artificial Sequence
  Description of Artificial Sequence: Synthetic oligonucleotide
  Antisense Strand to SEQ ID NO: 473175
ucauccagagacuagggaa

SEQ ID NO: 473177 - RNA, 19 nt, Artificial Sequence
  Description of Artificial Sequence: Synthetic oligonucleotide
  Sense strand starting at position 2540 of SEQ ID NO: 317212
cuagucucuggaugagauu

SEQ ID NO: 473178 - RNA, 19 nt, Artificial Sequence
  Description of Artificial Sequence: Synthetic oligonucleotide
  Antisense Strand to SEQ ID NO: 473177
aaucucauccagagacuag

SEQ ID NO: 473179 - RNA, 19 nt, Artificial Sequence
  Description of Artificial Sequence: Synthetic oligonucleotide
  Sense strand starting at position 2605 of SEQ ID NO: 317212
ucuauuucccguuacucuu

SEQ ID NO: 473180 - RNA, 19 nt, Artificial Sequence
  Description of Artificial Sequence: Synthetic oligonucleotide
  Antisense Strand to SEQ ID NO: 473179
aagaguaacgggaaauaga

SEQ ID NO: 473181 - RNA, 19 nt, Artificial Sequence
  Description of Artificial Sequence: Synthetic oligonucleotide
  Sense strand starting at position 2857 of SEQ ID NO: 317212
cugggaguugggugugaga

SEQ ID NO: 473182 - RNA, 19 nt, Artificial Sequence
  Description of Artificial Sequence: Synthetic oligonucleotide
  Antisense Strand to SEQ ID NO: 473181
ucucacacccaacucccag

SEQ ID NO: 473183 - RNA, 19 nt, Artificial Sequence
  Description of Artificial Sequence: Synthetic oligonucleotide
  Sense strand starting at position 2968 of SEQ ID NO: 317212
gaaugacuuuggcucuuga

SEQ ID NO: 473184 - RNA, 19 nt, Artificial Sequence
  Description of Artificial Sequence: Synthetic oligonucleotide
  Antisense Strand to SEQ ID NO: 473183
ucaagagccaaagucauuc

SEQ ID NO: 473185 - RNA, 19 nt, Artificial Sequence
  Description of Artificial Sequence: Synthetic oligonucleotide
  Sense strand starting at position 2981 of SEQ ID NO: 317212
ucuugaucagggcaaggua

SEQ ID NO: 473186 - RNA, 19 nt, Artificial Sequence
  Description of Artificial Sequence: Synthetic oligonucleotide
  Antisense Strand to SEQ ID NO: 473185
uaccuugcccugaucaaga

SEQ ID NO: 473187 - RNA, 19 nt, Artificial Sequence
  Description of Artificial Sequence: Synthetic oligonucleotide
  Sense strand starting at position 3028 of SEQ ID NO: 317212
ugucacucugacuaacagu

SEQ ID NO: 473188 - RNA, 19 nt, Artificial Sequence
  Description of Artificial Sequence: Synthetic oligonucleotide
  Antisense Strand to SEQ ID NO: 473187
acuguuagucagagugaca

SEQ ID NO: 473189 - RNA, 19 nt, Artificial Sequence
  Description of Artificial Sequence: Synthetic oligonucleotide
  Sense strand starting at position 3483 of SEQ ID NO: 317212
agcuacaguagugaagaua

SEQ ID NO: 473190 - RNA, 19 nt, Artificial Sequence
  Description of Artificial Sequence: Synthetic oligonucleotide
  Antisense Strand to SEQ ID NO: 473189
uaucuucacuacuguagcu

SEQ ID NO: 473191 - RNA, 19 nt, Artificial Sequence
  Description of Artificial Sequence: Synthetic oligonucleotide
  Sense strand starting at position 3494 of SEQ ID NO: 317212
ugaagauaauguguugaaa

SEQ ID NO: 473192 - RNA, 19 nt, Artificial Sequence
  Description of Artificial Sequence: Synthetic oligonucleotide
  Antisense Strand to SEQ ID NO: 473191
uuucaacacauuaucuuca

SEQ ID NO: 473193 - RNA, 19 nt, Artificial Sequence
  Description of Artificial Sequence: Synthetic oligonucleotide
  Sense strand starting at position 3560 of SEQ ID NO: 317212
gcaauuagagcauauaauu

SEQ ID NO: 473194 - RNA, 19 nt, Artificial Sequence
  Description of Artificial Sequence: Synthetic oligonucleotide
  Antisense Strand to SEQ ID NO: 473193
aauuauaugcucuaauugc

SEQ ID NO: 473195 - RNA, 19 nt, Artificial Sequence
  Description of Artificial Sequence: Synthetic oligonucleotide
  Sense strand starting at position 3648 of SEQ ID NO: 317212
acaagauagugaucucuuc

SEQ ID NO: 473196 - RNA, 19 nt, Artificial Sequence
  Description of Artificial Sequence: Synthetic oligonucleotide
  Antisense Strand to SEQ ID NO: 473195
gaagagaucacuaucuugu

SEQ ID NO: 473197 - RNA, 19 nt, Artificial Sequence
  Description of Artificial Sequence: Synthetic oligonucleotide
  Sense strand starting at position 3722 of SEQ ID NO: 317212
gcaguaauagacuguauaa

SEQ ID NO: 473198 - RNA, 19 nt, Artificial Sequence
  Description of Artificial Sequence: Synthetic oligonucleotide
  Antisense Strand to SEQ ID NO: 473197
uuauacagucuauuacugc

SEQ ID NO: 473199 - RNA, 19 nt, Artificial Sequence
  Description of Artificial Sequence: Synthetic oligonucleotide
  Sense strand starting at position 3724 of SEQ ID NO: 317212
aguaauagacuguauaagu

SEQ ID NO: 473200 - RNA, 19 nt, Artificial Sequence
  Description of Artificial Sequence: Synthetic oligonucleotide
  Antisense Strand to SEQ ID NO: 473199
acuuauacagucuauuacu

SEQ ID NO: 473201 - RNA, 19 nt, Artificial Sequence
  Description of Artificial Sequence: Synthetic oligonucleotide
  Sense strand starting at position 3739 of SEQ ID NO: 317212
aagugaugaugaucccaua

SEQ ID NO: 473202 - RNA, 19 nt, Artificial Sequence
  Description of Artificial Sequence: Synthetic oligonucleotide
  Antisense Strand to SEQ ID NO: 473201
uaugggaucaucaucacuu

SEQ ID NO: 473203 - RNA, 19 nt, Artificial Sequence
  Description of Artificial Sequence: Synthetic oligonucleotide
  Sense strand starting at position 3875 of SEQ ID NO: 317212
cugugcuuccaguugcaua

SEQ ID NO: 473204 - RNA, 19 nt, Artificial Sequence
  Description of Artificial Sequence: Synthetic oligonucleotide
  Antisense Strand to SEQ ID NO: 473203
uaugcaacuggaagcacag

SEQ ID NO: 473205 - RNA, 19 nt, Artificial Sequence
  Description of Artificial Sequence: Synthetic oligonucleotide
  Sense strand starting at position 221 of SEQ ID NO: 317213
gagaaugaaugggcuucuu

SEQ ID NO: 473206 - RNA, 19 nt, Artificial Sequence
  Description of Artificial Sequence: Synthetic oligonucleotide
  Antisense Strand to SEQ ID NO: 473205
aagaagcccauucauucuc

SEQ ID NO: 473207 - RNA, 19 nt, Artificial Sequence
  Description of Artificial Sequence: Synthetic oligonucleotide
  Sense strand starting at position 263 of SEQ ID NO: 317213
agaagaaauuaacagagga

SEQ ID NO: 473208 - RNA, 19 nt, Artificial Sequence
  Description of Artificial Sequence: Synthetic oligonucleotide
  Antisense Strand to SEQ ID NO: 473207
uccucuguuaauuucuucu

SEQ ID NO: 473209 - RNA, 19 nt, Artificial Sequence
  Description of Artificial Sequence: Synthetic oligonucleotide
  Sense strand starting at position 280 of SEQ ID NO: 317213
gauagaacaugagaaguga

SEQ ID NO: 473210 - RNA, 19 nt, Artificial Sequence
  Description of Artificial Sequence: Synthetic oligonucleotide
  Antisense Strand to SEQ ID NO: 473209
ucacuucucauguucuauc

SEQ ID NO: 473211 - RNA, 19 nt, Artificial Sequence
  Description of Artificial Sequence: Synthetic oligonucleotide
  Sense strand starting at position 438 of SEQ ID NO: 317213
uucuguacucugcaagcua

SEQ ID NO: 473212 - RNA, 19 nt, Artificial Sequence
  Description of Artificial Sequence: Synthetic oligonucleotide
  Antisense Strand to SEQ ID NO: 473211
uagcuugcagaguacagaa

SEQ ID NO: 473213 - RNA, 19 nt, Artificial Sequence
  Description of Artificial Sequence: Synthetic oligonucleotide
  Sense strand starting at position 452 of SEQ ID NO: 317213
agcuacaaguuaucagaaa

SEQ ID NO: 473214 - RNA, 19 nt, Artificial Sequence
  Description of Artificial Sequence: Synthetic oligonucleotide
  Antisense Strand to SEQ ID NO: 473213
uuucugauaacuuguagcu

SEQ ID NO: 473215 - RNA, 19 nt, Artificial Sequence
  Description of Artificial Sequence: Synthetic oligonucleotide
  Sense strand starting at position 491 of SEQ ID NO: 317213
ugugaaucacaagguuauc

SEQ ID NO: 473216 - RNA, 19 nt, Artificial Sequence
  Description of Artificial Sequence: Synthetic oligonucleotide
  Antisense Strand to SEQ ID NO: 473215
gauaaccuugugauucaca

SEQ ID NO: 473217 - RNA, 19 nt, Artificial Sequence
  Description of Artificial Sequence: Synthetic oligonucleotide
  Sense strand starting at position 501 of SEQ ID NO: 317213
aagguuaucuucccaggaa

SEQ ID NO: 473218 - RNA, 19 nt, Artificial Sequence
  Description of Artificial Sequence: Synthetic oligonucleotide
  Antisense Strand to SEQ ID NO: 473217
uuccugggaagauaaccuu

SEQ ID NO: 473219 - RNA, 19 nt, Artificial Sequence
  Description of Artificial Sequence: Synthetic oligonucleotide
  Sense strand starting at position 536 of SEQ ID NO: 317213
aggaguugccaauagcauc

SEQ ID NO: 473220 - RNA, 19 nt, Artificial Sequence
  Description of Artificial Sequence: Synthetic oligonucleotide
  Antisense Strand to SEQ ID NO: 473219
gaugcuauuggcaacuccu

SEQ ID NO: 473221 - RNA, 19 nt, Artificial Sequence
  Description of Artificial Sequence: Synthetic oligonucleotide
  Sense strand starting at position 589 of SEQ ID NO: 317213
gggccagagaaugguaaau

SEQ ID NO: 473222 - RNA, 19 nt, Artificial Sequence
  Description of Artificial Sequence: Synthetic oligonucleotide
  Antisense Strand to SEQ ID NO: 473221
auuuaccauucucuggccc

SEQ ID NO: 473223 - RNA, 19 nt, Artificial Sequence
  Description of Artificial Sequence: Synthetic oligonucleotide
  Sense strand starting at position 734 of SEQ ID NO: 317213
gaggccuggccacauaauu

SEQ ID NO: 473224 - RNA, 19 nt, Artificial Sequence
  Description of Artificial Sequence: Synthetic oligonucleotide
  Antisense Strand to SEQ ID NO: 473223
aauuauguggccaggccuc

SEQ ID NO: 473225 - RNA, 19 nt, Artificial Sequence
  Description of Artificial Sequence: Synthetic oligonucleotide
  Sense strand starting at position 743 of SEQ ID NO: 317213
ccacauaauuuauggaggu

SEQ ID NO: 473226 - RNA, 19 nt, Artificial Sequence
  Description of Artificial Sequence: Synthetic oligonucleotide
  Antisense Strand to SEQ ID NO: 473225
accuccauaaauuaugugg

SEQ ID NO: 473227 - RNA, 19 nt, Artificial Sequence
  Description of Artificial Sequence: Synthetic oligonucleotide
  Sense strand starting at position 992 of SEQ ID NO: 317213
auaacagacuguuuagagu

SEQ ID NO: 473228 - RNA, 19 nt, Artificial Sequence
  Description of Artificial Sequence: Synthetic oligonucleotide
  Antisense Strand to SEQ ID NO: 473227
acucuaaacagucuguuau

SEQ ID NO: 473229 - RNA, 19 nt, Artificial Sequence
  Description of Artificial Sequence: Synthetic oligonucleotide
  Sense strand starting at position 998 of SEQ ID NO: 317213
gacuguuuagagugaauau

SEQ ID NO: 473230 - RNA, 19 nt, Artificial Sequence
  Description of Artificial Sequence: Synthetic oligonucleotide
  Antisense Strand to SEQ ID NO: 473229
auauucacucuaaacaguc

SEQ ID NO: 473231 - RNA, 19 nt, Artificial Sequence
  Description of Artificial Sequence: Synthetic oligonucleotide
  Sense strand starting at position 1005 of SEQ ID NO: 317213
uagagugaauauuagggau

SEQ ID NO: 473232 - RNA, 19 nt, Artificial Sequence
  Description of Artificial Sequence: Synthetic oligonucleotide
  Antisense Strand to SEQ ID NO: 473231
aucccuaauauucacucua

SEQ ID NO: 473233 - RNA, 19 nt, Artificial Sequence
  Description of Artificial Sequence: Synthetic oligonucleotide
  Sense strand starting at position 1052 of SEQ ID NO: 317213
aggacugacucucuacgua

SEQ ID NO: 473234 - RNA, 19 nt, Artificial Sequence
  Description of Artificial Sequence: Synthetic oligonucleotide
  Antisense Strand to SEQ ID NO: 473233
uacguagagagucaguccu

SEQ ID NO: 473235 - RNA, 19 nt, Artificial Sequence
  Description of Artificial Sequence: Synthetic oligonucleotide
  Sense strand starting at position 1185 of SEQ ID NO: 317213
gggcgagacgcaaguuuau

SEQ ID NO: 473236 - RNA, 19 nt, Artificial Sequence
  Description of Artificial Sequence: Synthetic oligonucleotide
  Antisense Strand to SEQ ID NO: 473235
auaaacuugcgucucgccc

SEQ ID NO: 473237 - RNA, 19 nt, Artificial Sequence
  Description of Artificial Sequence: Synthetic oligonucleotide
  Sense strand starting at position 1214 of SEQ ID NO: 317213
gggagugauguccagagcu

SEQ ID NO: 473238 - RNA, 19 nt, Artificial Sequence
  Description of Artificial Sequence: Synthetic oligonucleotide
  Antisense Strand to SEQ ID NO: 473237
agcucuggacaucacuccc

SEQ ID NO: 473239 - RNA, 19 nt, Artificial Sequence
  Description of Artificial Sequence: Synthetic oligonucleotide
  Sense strand starting at position 1231 of SEQ ID NO: 317213
cuggguuccugauucuaag

SEQ ID NO: 473240 - RNA, 19 nt, Artificial Sequence
  Description of Artificial Sequence: Synthetic oligonucleotide
  Antisense Strand to SEQ ID NO: 473239
cuuagaaucaggaacccag

SEQ ID NO: 473241 - RNA, 19 nt, Artificial Sequence
  Description of Artificial Sequence: Synthetic oligonucleotide
  Sense strand starting at position 1450 of SEQ ID NO: 317213
gagcgauucuggguccaug

SEQ ID NO: 473242 - RNA, 19 nt, Artificial Sequence
  Description of Artificial Sequence: Synthetic oligonucleotide
  Antisense Strand to SEQ ID NO: 473241
cauggacccagaaucgcuc

SEQ ID NO: 473243 - RNA, 19 nt, Artificial Sequence
  Description of Artificial Sequence: Synthetic oligonucleotide
  Sense strand starting at position 1500 of SEQ ID NO: 317213
agcggucugagugacagua

SEQ ID NO: 473244 - RNA, 19 nt, Artificial Sequence
  Description of Artificial Sequence: Synthetic oligonucleotide
  Antisense Strand to SEQ ID NO: 473243
uacugucacucagaccgcu

SEQ ID NO: 473245 - RNA, 19 nt, Artificial Sequence
  Description of Artificial Sequence: Synthetic oligonucleotide
  Sense strand starting at position 2171 of SEQ ID NO: 317213
gugagaaggguuugccauc

SEQ ID NO: 473246 - RNA, 19 nt, Artificial Sequence
  Description of Artificial Sequence: Synthetic oligonucleotide
  Antisense Strand to SEQ ID NO: 473245
gauggcaaacccuucucac

SEQ ID NO: 473247 - RNA, 19 nt, Artificial Sequence
  Description of Artificial Sequence: Synthetic oligonucleotide
  Sense strand starting at position 2287 of SEQ ID NO: 317213
gccugaagacuauguagaa

SEQ ID NO: 473248 - RNA, 19 nt, Artificial Sequence
  Description of Artificial Sequence: Synthetic oligonucleotide
  Antisense Strand to SEQ ID NO: 473247
uucuacauagucuucaggc

SEQ ID NO: 473249 - RNA, 19 nt, Artificial Sequence
  Description of Artificial Sequence: Synthetic oligonucleotide
  Sense strand starting at position 2745 of SEQ ID NO: 317213
gggucugucuacgugaaag

SEQ ID NO: 473250 - RNA, 19 nt, Artificial Sequence
  Description of Artificial Sequence: Synthetic oligonucleotide
  Antisense Strand to SEQ ID NO: 473249
cuuucacguagacagaccc

SEQ ID NO: 473251 - RNA, 19 nt, Artificial Sequence
  Description of Artificial Sequence: Synthetic oligonucleotide
  Sense strand starting at position 2850 of SEQ ID NO: 317213
ucauacgaugucuggaauu

SEQ ID NO: 473252 - RNA, 19 nt, Artificial Sequence
  Description of Artificial Sequence: Synthetic oligonucleotide
  Antisense Strand to SEQ ID NO: 473251
aauuccagacaucguauga

SEQ ID NO: 473253 - RNA, 19 nt, Artificial Sequence
  Description of Artificial Sequence: Synthetic oligonucleotide
  Sense strand starting at position 3063 of SEQ ID NO: 317213
agcagaaaugguggucucu

SEQ ID NO: 473254 - RNA, 19 nt, Artificial Sequence
  Description of Artificial Sequence: Synthetic oligonucleotide
  Antisense Strand to SEQ ID NO: 473253
agagaccaccauuucugcu

SEQ ID NO: 473255 - RNA, 19 nt, Artificial Sequence
  Description of Artificial Sequence: Synthetic oligonucleotide
  Sense strand starting at position 3065 of SEQ ID NO: 317213
cagaaaugguggucucuuu

SEQ ID NO: 473256 - RNA, 19 nt, Artificial Sequence
  Description of Artificial Sequence: Synthetic oligonucleotide
  Antisense Strand to SEQ ID NO: 473255
aaagagaccaccauuucug

SEQ ID NO: 473257 - RNA, 19 nt, Artificial Sequence
  Description of Artificial Sequence: Synthetic oligonucleotide
  Sense strand starting at position 3090 of SEQ ID NO: 317213
uagcgugaaacuuagggaa

SEQ ID NO: 473258 - RNA, 19 nt, Artificial Sequence
  Description of Artificial Sequence: Synthetic oligonucleotide
  Antisense Strand to SEQ ID NO: 473257
uucccuaaguuucacgcua

SEQ ID NO: 473259 - RNA, 19 nt, Artificial Sequence
  Description of Artificial Sequence: Synthetic oligonucleotide
  Sense strand starting at position 3244 of SEQ ID NO: 317213
ccagaugaccaucgacaau

SEQ ID NO: 473260 - RNA, 19 nt, Artificial Sequence
  Description of Artificial Sequence: Synthetic oligonucleotide
  Antisense Strand to SEQ ID NO: 473259
auugucgauggucaucugg

SEQ ID NO: 473261 - RNA, 19 nt, Artificial Sequence
  Description of Artificial Sequence: Synthetic oligonucleotide
  Sense strand starting at position 3267 of SEQ ID NO: 317213
uggauaaauacuugguagu

SEQ ID NO: 473262 - RNA, 19 nt, Artificial Sequence
  Description of Artificial Sequence: Synthetic oligonucleotide
  Antisense Strand to SEQ ID NO: 473261
acuaccaaguauuuaucca

SEQ ID NO: 473263 - RNA, 19 nt, Artificial Sequence
  Description of Artificial Sequence: Synthetic oligonucleotide
  Sense strand starting at position 3268 of SEQ ID NO: 317213
ggauaaauacuugguagua

SEQ ID NO: 473264 - RNA, 19 nt, Artificial Sequence
  Description of Artificial Sequence: Synthetic oligonucleotide
  Antisense Strand to SEQ ID NO: 473263
uacuaccaaguauuuaucc

SEQ ID NO: 473265 - RNA, 19 nt, Artificial Sequence
  Description of Artificial Sequence: Synthetic oligonucleotide
  Sense strand starting at position 3269 of SEQ ID NO: 317213
gauaaauacuugguaguau

SEQ ID NO: 473266 - RNA, 19 nt, Artificial Sequence
  Description of Artificial Sequence: Synthetic oligonucleotide
  Antisense Strand to SEQ ID NO: 473265
auacuaccaaguauuuauc

SEQ ID NO: 473267 - RNA, 19 nt, Artificial Sequence
  Description of Artificial Sequence: Synthetic oligonucleotide
  Sense strand starting at position 3281 of SEQ ID NO: 317213
guaguauauccauaccaau

SEQ ID NO: 473268 - RNA, 19 nt, Artificial Sequence
  Description of Artificial Sequence: Synthetic oligonucleotide
  Antisense Strand to SEQ ID NO: 473267
auugguauggauauacuac

SEQ ID NO: 473269 - RNA, 19 nt, Artificial Sequence
  Description of Artificial Sequence: Synthetic oligonucleotide
  Sense strand starting at position 3317 of SEQ ID NO: 317213
ggcacauugauagagcaau

SEQ ID NO: 473270 - RNA, 19 nt, Artificial Sequence
  Description of Artificial Sequence: Synthetic oligonucleotide
  Antisense Strand to SEQ ID NO: 473269
auugcucuaucaaugugcc

SEQ ID NO: 473271 - RNA, 19 nt, Artificial Sequence
  Description of Artificial Sequence: Synthetic oligonucleotide
  Sense strand starting at position 3698 of SEQ ID NO: 317213
aagggaauuugagggaguu

SEQ ID NO: 473272 - RNA, 19 nt, Artificial Sequence
  Description of Artificial Sequence: Synthetic oligonucleotide
  Antisense Strand to SEQ ID NO: 473271
aacucccucaaauucccuu

SEQ ID NO: 473273 - RNA, 19 nt, Artificial Sequence
  Description of Artificial Sequence: Synthetic oligonucleotide
  Sense strand starting at position 3708 of SEQ ID NO: 317213
gagggaguuguggaacugu

SEQ ID NO: 473274 - RNA, 19 nt, Artificial Sequence
  Description of Artificial Sequence: Synthetic oligonucleotide
  Antisense Strand to SEQ ID NO: 473273
acaguuccacaacucccuc

SEQ ID NO: 473275 - RNA, 19 nt, Artificial Sequence
  Description of Artificial Sequence: Synthetic oligonucleotide
  Sense strand starting at position 3767 of SEQ ID NO: 317213
cuuauagaacuguacgaua

SEQ ID NO: 473276 - RNA, 19 nt, Artificial Sequence
  Description of Artificial Sequence: Synthetic oligonucleotide
  Antisense Strand to SEQ ID NO: 473275
uaucguacaguucuauaag

SEQ ID NO: 473277 - RNA, 19 nt, Artificial Sequence
  Description of Artificial Sequence: Synthetic oligonucleotide
  Sense strand starting at position 3769 of SEQ ID NO: 317213
uauagaacuguacgauaua

SEQ ID NO: 473278 - RNA, 19 nt, Artificial Sequence
  Description of Artificial Sequence: Synthetic oligonucleotide
  Antisense Strand to SEQ ID NO: 473277
uauaucguacaguucuaua

SEQ ID NO: 473279 - RNA, 19 nt, Artificial Sequence
  Description of Artificial Sequence: Synthetic oligonucleotide
  Sense strand starting at position 3778 of SEQ ID NO: 317213
guacgauauaaaggguaaa

SEQ ID NO: 473280 - RNA, 19 nt, Artificial Sequence
  Description of Artificial Sequence: Synthetic oligonucleotide
  Antisense Strand to SEQ ID NO: 473279
uuuacccuuuauaucguac

SEQ ID NO: 473281 - RNA, 19 nt, Artificial Sequence
  Description of Artificial Sequence: Synthetic oligonucleotide
  Sense strand starting at position 3939 of SEQ ID NO: 317213
uguuucuugaccuggacga

SEQ ID NO: 473282 - RNA, 19 nt, Artificial Sequence
  Description of Artificial Sequence: Synthetic oligonucleotide
  Antisense Strand to SEQ ID NO: 473281
ucguccaggucaagaaaca

SEQ ID NO: 473283 - RNA, 19 nt, Artificial Sequence
  Description of Artificial Sequence: Synthetic oligonucleotide
  Sense strand starting at position 3940 of SEQ ID NO: 317213
guuucuugaccuggacgau

SEQ ID NO: 473284 - RNA, 19 nt, Artificial Sequence
  Description of Artificial Sequence: Synthetic oligonucleotide
  Antisense Strand to SEQ ID NO: 473283
aucguccaggucaagaaac

SEQ ID NO: 473285 - RNA, 19 nt, Artificial Sequence
  Description of Artificial Sequence: Synthetic oligonucleotide
  Sense strand starting at position 5 of SEQ ID NO: 317214
ggccuuacggaguaauaca

SEQ ID NO: 473286 - RNA, 19 nt, Artificial Sequence
  Description of Artificial Sequence: Synthetic oligonucleotide
  Antisense Strand to SEQ ID NO: 473285
uguauuacuccguaaggcc

SEQ ID NO: 473287 - RNA, 19 nt, Artificial Sequence
  Description of Artificial Sequence: Synthetic oligonucleotide
  Sense strand starting at position 13 of SEQ ID NO: 317214
ggaguaauacagcgaggga

SEQ ID NO: 473288 - RNA, 19 nt, Artificial Sequence
  Description of Artificial Sequence: Synthetic oligonucleotide
  Antisense Strand to SEQ ID NO: 473287
ucccucgcuguauuacucc

SEQ ID NO: 473289 - RNA, 19 nt, Artificial Sequence
  Description of Artificial Sequence: Synthetic oligonucleotide
  Sense strand starting at position 2020 of SEQ ID NO: 317214
acucaacucguuugacgaa

SEQ ID NO: 473290 - RNA, 19 nt, Artificial Sequence
  Description of Artificial Sequence: Synthetic oligonucleotide
  Antisense Strand to SEQ ID NO: 473289
uucgucaaacgaguugagu

SEQ ID NO: 473291 - RNA, 19 nt, Artificial Sequence
  Description of Artificial Sequence: Synthetic oligonucleotide
  Sense strand starting at position 2084 of SEQ ID NO: 317214
agucucauagaauagguuu

SEQ ID NO: 473292 - RNA, 19 nt, Artificial Sequence
  Description of Artificial Sequence: Synthetic oligonucleotide
  Antisense Strand to SEQ ID NO: 473291
aaaccuauucuaugagacu

SEQ ID NO: 473293 - RNA, 19 nt, Artificial Sequence
  Description of Artificial Sequence: Synthetic oligonucleotide
  Sense strand starting at position 2090 of SEQ ID NO: 317214
auagaauagguuugaaccu

SEQ ID NO: 473294 - RNA, 19 nt, Artificial Sequence
  Description of Artificial Sequence: Synthetic oligonucleotide
  Antisense Strand to SEQ ID NO: 473293
agguucaaaccuauucuau

SEQ ID NO: 473295 - RNA, 19 nt, Artificial Sequence
  Description of Artificial Sequence: Synthetic oligonucleotide
  Sense strand starting at position 2138 of SEQ ID NO: 317214
ggauauugacgaggcaagu

SEQ ID NO: 473296 - RNA, 19 nt, Artificial Sequence
  Description of Artificial Sequence: Synthetic oligonucleotide
  Antisense Strand to SEQ ID NO: 473295
acuugccucgucaauaucc

SEQ ID NO: 473297 - RNA, 19 nt, Artificial Sequence
  Description of Artificial Sequence: Synthetic oligonucleotide
  Sense strand starting at position 2252 of SEQ ID NO: 317214
ggguauuugugcgugaggu

SEQ ID NO: 473298 - RNA, 19 nt, Artificial Sequence
  Description of Artificial Sequence: Synthetic oligonucleotide
  Antisense Strand to SEQ ID NO: 473297
accucacgcacaaauaccc

SEQ ID NO: 473299 - RNA, 19 nt, Artificial Sequence
  Description of Artificial Sequence: Synthetic oligonucleotide
  Sense strand starting at position 2253 of SEQ ID NO: 317214
gguauuugugcgugaggug

SEQ ID NO: 473300 - RNA, 19 nt, Artificial Sequence
  Description of Artificial Sequence: Synthetic oligonucleotide
  Antisense Strand to SEQ ID NO: 473299
caccucacgcacaaauacc

SEQ ID NO: 473301 - RNA, 19 nt, Artificial Sequence
  Description of Artificial Sequence: Synthetic oligonucleotide
  Sense strand starting at position 2254 of SEQ ID NO: 317214
guauuugugcgugagguga

SEQ ID NO: 473302 - RNA, 19 nt, Artificial Sequence
  Description of Artificial Sequence: Synthetic oligonucleotide
  Antisense Strand to SEQ ID NO: 473301
ucaccucacgcacaaauac

SEQ ID NO: 473303 - RNA, 19 nt, Artificial Sequence
  Description of Artificial Sequence: Synthetic oligonucleotide
  Sense strand starting at position 2324 of SEQ ID NO: 317214
uguaaagggcccgaucaua

SEQ ID NO: 473304 - RNA, 19 nt, Artificial Sequence
  Description of Artificial Sequence: Synthetic oligonucleotide
  Antisense Strand to SEQ ID NO: 473303
uaugaucgggcccuuuaca

SEQ ID NO: 473305 - RNA, 19 nt, Artificial Sequence
  Description of Artificial Sequence: Synthetic oligonucleotide
  Sense strand starting at position 2400 of SEQ ID NO: 317214
acaauacuugaaugagugu

SEQ ID NO: 473306 - RNA, 19 nt, Artificial Sequence
  Description of Artificial Sequence: Synthetic oligonucleotide
  Antisense Strand to SEQ ID NO: 473305
acacucauucaaguauugu

SEQ ID NO: 473307 - RNA, 19 nt, Artificial Sequence
  Description of Artificial Sequence: Synthetic oligonucleotide
  Sense strand starting at position 2576 of SEQ ID NO: 317214
cugcauuagagguaccuga

SEQ ID NO: 473308 - RNA, 19 nt, Artificial Sequence
  Description of Artificial Sequence: Synthetic oligonucleotide
  Antisense Strand to SEQ ID NO: 473307
ucagguaccucuaaugcag

SEQ ID NO: 473309 - RNA, 19 nt, Artificial Sequence
  Description of Artificial Sequence: Synthetic oligonucleotide
  Sense strand starting at position 2601 of SEQ ID NO: 317214
gcgacacaauugguaguaa

SEQ ID NO: 473310 - RNA, 19 nt, Artificial Sequence
  Description of Artificial Sequence: Synthetic oligonucleotide
  Antisense Strand to SEQ ID NO: 473309
uuacuaccaauugugucgc

SEQ ID NO: 473311 - RNA, 19 nt, Artificial Sequence
  Description of Artificial Sequence: Synthetic oligonucleotide
  Sense strand starting at position 2612 of SEQ ID NO: 317214
gguaguaaaugaccauaua

SEQ ID NO: 473312 - RNA, 19 nt, Artificial Sequence
  Description of Artificial Sequence: Synthetic oligonucleotide
  Antisense Strand to SEQ ID NO: 473311
uauauggucauuuacuacc

SEQ ID NO: 473313 - RNA, 19 nt, Artificial Sequence
  Description of Artificial Sequence: Synthetic oligonucleotide
  Sense strand starting at position 2661 of SEQ ID NO: 317214
aguaaaguagggcauuaau

SEQ ID NO: 473314 - RNA, 19 nt, Artificial Sequence
  Description of Artificial Sequence: Synthetic oligonucleotide
  Antisense Strand to SEQ ID NO: 473313
auuaaugcccuacuuuacu

SEQ ID NO: 473315 - RNA, 19 nt, Artificial Sequence
  Description of Artificial Sequence: Synthetic oligonucleotide
  Sense strand starting at position 2776 of SEQ ID NO: 317214
gcuuuaggacuugguaaca

SEQ ID NO: 473316 - RNA, 19 nt, Artificial Sequence
  Description of Artificial Sequence: Synthetic oligonucleotide
  Antisense Strand to SEQ ID NO: 473315
uguuaccaaguccuaaagc

SEQ ID NO: 473317 - RNA, 19 nt, Artificial Sequence
  Description of Artificial Sequence: Synthetic oligonucleotide
  Sense strand starting at position 2801 of SEQ ID NO: 317214
gggaggugccagugaugga

SEQ ID NO: 473318 - RNA, 19 nt, Artificial Sequence
  Description of Artificial Sequence: Synthetic oligonucleotide
  Antisense Strand to SEQ ID NO: 473317
uccaucacuggcaccuccc

SEQ ID NO: 473319 - RNA, 19 nt, Artificial Sequence
  Description of Artificial Sequence: Synthetic oligonucleotide
  Sense strand starting at position 2802 of SEQ ID NO: 317214
ggaggugccagugauggaa

SEQ ID NO: 473320 - RNA, 19 nt, Artificial Sequence
  Description of Artificial Sequence: Synthetic oligonucleotide
  Antisense Strand to SEQ ID NO: 473319
uuccaucacuggcaccucc

SEQ ID NO: 473321 - RNA, 19 nt, Artificial Sequence
  Description of Artificial Sequence: Synthetic oligonucleotide
  Sense strand starting at position 2805 of SEQ ID NO: 317214
ggugccagugauggaaaua

SEQ ID NO: 473322 - RNA, 19 nt, Artificial Sequence
  Description of Artificial Sequence: Synthetic oligonucleotide
  Antisense Strand to SEQ ID NO: 473321
uauuuccaucacuggcacc

SEQ ID NO: 473323 - RNA, 19 nt, Artificial Sequence
  Description of Artificial Sequence: Synthetic oligonucleotide
  Sense strand starting at position 2806 of SEQ ID NO: 317214
gugccagugauggaaauag

SEQ ID NO: 473324 - RNA, 19 nt, Artificial Sequence
  Description of Artificial Sequence: Synthetic oligonucleotide
  Antisense Strand to SEQ ID NO: 473323
cuauuuccaucacuggcac

SEQ ID NO: 473325 - RNA, 19 nt, Artificial Sequence
  Description of Artificial Sequence: Synthetic oligonucleotide
  Sense strand starting at position 2851 of SEQ ID NO: 317214
ggagaagauagcuguagca

SEQ ID NO: 473326 - RNA, 19 nt, Artificial Sequence
  Description of Artificial Sequence: Synthetic oligonucleotide
  Antisense Strand to SEQ ID NO: 473325
ugcuacagcuaucuucucc

SEQ ID NO: 473327 - RNA, 19 nt, Artificial Sequence
  Description of Artificial Sequence: Synthetic oligonucleotide
  Sense strand starting at position 2873 of SEQ ID NO: 317214
ccaagagcuguauacaguu

SEQ ID NO: 473328 - RNA, 19 nt, Artificial Sequence
  Description of Artificial Sequence: Synthetic oligonucleotide
  Antisense Strand to SEQ ID NO: 473327
aacuguauacagcucuugg

SEQ ID NO: 473329 - RNA, 19 nt, Artificial Sequence
  Description of Artificial Sequence: Synthetic oligonucleotide
  Sense strand starting at position 2879 of SEQ ID NO: 317214
gcuguauacaguugagaca

SEQ ID NO: 473330 - RNA, 19 nt, Artificial Sequence
  Description of Artificial Sequence: Synthetic oligonucleotide
  Antisense Strand to SEQ ID NO: 473329
ugucucaacuguauacagc

SEQ ID NO: 473331 - RNA, 19 nt, Artificial Sequence
  Description of Artificial Sequence: Synthetic oligonucleotide
  Sense strand starting at position 2896 of SEQ ID NO: 317214
caacauugauaggaaggaa

SEQ ID NO: 473332 - RNA, 19 nt, Artificial Sequence
  Description of Artificial Sequence: Synthetic oligonucleotide
  Antisense Strand to SEQ ID NO: 473331
uuccuuccuaucaauguug

SEQ ID NO: 473333 - RNA, 19 nt, Artificial Sequence
  Description of Artificial Sequence: Synthetic oligonucleotide
  Sense strand starting at position 2969 of SEQ ID NO: 317214
auuagcugucccuaaagca

SEQ ID NO: 473334 - RNA, 19 nt, Artificial Sequence
  Description of Artificial Sequence: Synthetic oligonucleotide
  Antisense Strand to SEQ ID NO: 473333
ugcuuuagggacagcuaau

SEQ ID NO: 473335 - RNA, 19 nt, Artificial Sequence
  Description of Artificial Sequence: Synthetic oligonucleotide
  Sense strand starting at position 3007 of SEQ ID NO: 317214
ggacauccaugauugccua

SEQ ID NO: 473336 - RNA, 19 nt, Artificial Sequence
  Description of Artificial Sequence: Synthetic oligonucleotide
  Antisense Strand to SEQ ID NO: 473335
uaggcaaucauggaugucc

SEQ ID NO: 473337 - RNA, 19 nt, Artificial Sequence
  Description of Artificial Sequence: Synthetic oligonucleotide
  Sense strand starting at position 3065 of SEQ ID NO: 317214
uugagcauugcuggacauu

SEQ ID NO: 473338 - RNA, 19 nt, Artificial Sequence
  Description of Artificial Sequence: Synthetic oligonucleotide
  Antisense Strand to SEQ ID NO: 473337
aauguccagcaaugcucaa

SEQ ID NO: 473339 - RNA, 19 nt, Artificial Sequence
  Description of Artificial Sequence: Synthetic oligonucleotide
  Sense strand starting at position 3105 of SEQ ID NO: 317214
gcuaaaugucaguaccaca

SEQ ID NO: 473340 - RNA, 19 nt, Artificial Sequence
  Description of Artificial Sequence: Synthetic oligonucleotide
  Antisense Strand to SEQ ID NO: 473339
ugugguacugacauuuagc

SEQ ID NO: 473341 - RNA, 19 nt, Artificial Sequence
  Description of Artificial Sequence: Synthetic oligonucleotide
  Sense strand starting at position 3122 of SEQ ID NO: 317214
caccucaggcauugugaca

SEQ ID NO: 473342 - RNA, 19 nt, Artificial Sequence
  Description of Artificial Sequence: Synthetic oligonucleotide
  Antisense Strand to SEQ ID NO: 473341
ugucacaaugccugaggug

SEQ ID NO: 473343 - RNA, 19 nt, Artificial Sequence
  Description of Artificial Sequence: Synthetic oligonucleotide
  Sense strand starting at position 3179 of SEQ ID NO: 317214
ugugguacugguugagaac

SEQ ID NO: 473344 - RNA, 19 nt, Artificial Sequence
  Description of Artificial Sequence: Synthetic oligonucleotide
  Antisense Strand to SEQ ID NO: 473343
guucucaaccaguaccaca

SEQ ID NO: 473345 - RNA, 19 nt, Artificial Sequence
  Description of Artificial Sequence: Synthetic oligonucleotide
  Sense strand starting at position 3202 of SEQ ID NO: 317214
agcuuagacccucaggauu

SEQ ID NO: 473346 - RNA, 19 nt, Artificial Sequence
  Description of Artificial Sequence: Synthetic oligonucleotide
  Antisense Strand to SEQ ID NO: 473345
aauccugagggucuaagcu

SEQ ID NO: 473347 - RNA, 19 nt, Artificial Sequence
  Description of Artificial Sequence: Synthetic oligonucleotide
  Sense strand starting at position 3204 of SEQ ID NO: 317214
cuuagacccucaggauuua

SEQ ID NO: 473348 - RNA, 19 nt, Artificial Sequence
  Description of Artificial Sequence: Synthetic oligonucleotide
  Antisense Strand to SEQ ID NO: 473347
uaaauccugagggucuaag

SEQ ID NO: 473349 - RNA, 19 nt, Artificial Sequence
  Description of Artificial Sequence: Synthetic oligonucleotide
  Sense strand starting at position 3260 of SEQ ID NO: 317214
aguugguuuggagggaaga

SEQ ID NO: 473350 - RNA, 19 nt, Artificial Sequence
  Description of Artificial Sequence: Synthetic oligonucleotide
  Antisense Strand to SEQ ID NO: 473349
ucuucccuccaaaccaacu

SEQ ID NO: 473351 - RNA, 19 nt, Artificial Sequence
  Description of Artificial Sequence: Synthetic oligonucleotide
  Sense strand starting at position 3325 of SEQ ID NO: 317214
gggaauguuggguagcuaa

SEQ ID NO: 473352 - RNA, 19 nt, Artificial Sequence
  Description of Artificial Sequence: Synthetic oligonucleotide
  Antisense Strand to SEQ ID NO: 473351
uuagcuacccaacauuccc

SEQ ID NO: 473353 - RNA, 19 nt, Artificial Sequence
  Description of Artificial Sequence: Synthetic oligonucleotide
  Sense strand starting at position 3532 of SEQ ID NO: 317214
ggauacucuugcuuugagu

SEQ ID NO: 473354 - RNA, 19 nt, Artificial Sequence
  Description of Artificial Sequence: Synthetic oligonucleotide
  Antisense Strand to SEQ ID NO: 473353
acucaaagcaagaguaucc

SEQ ID NO: 473355 - RNA, 19 nt, Artificial Sequence
  Description of Artificial Sequence: Synthetic oligonucleotide
  Sense strand starting at position 3543 of SEQ ID NO: 317214
cuuugaguacugcaauaac

SEQ ID NO: 473356 - RNA, 19 nt, Artificial Sequence
  Description of Artificial Sequence: Synthetic oligonucleotide
  Antisense Strand to SEQ ID NO: 473355
guuauugcaguacucaaag

SEQ ID NO: 473357 - RNA, 19 nt, Artificial Sequence
  Description of Artificial Sequence: Synthetic oligonucleotide
  Sense strand starting at position 3546 of SEQ ID NO: 317214
ugaguacugcaauaacuuu

SEQ ID NO: 473358 - RNA, 19 nt, Artificial Sequence
  Description of Artificial Sequence: Synthetic oligonucleotide
  Antisense Strand to SEQ ID NO: 473357
aaaguuauugcaguacuca

SEQ ID NO: 473359 - RNA, 19 nt, Artificial Sequence
  Description of Artificial Sequence: Synthetic oligonucleotide
  Sense strand starting at position 3571 of SEQ ID NO: 317214
ggugacuugccgucagucu

SEQ ID NO: 473360 - RNA, 19 nt, Artificial Sequence
  Description of Artificial Sequence: Synthetic oligonucleotide
  Antisense Strand to SEQ ID NO: 473359
agacugacggcaagucacc

SEQ ID NO: 473361 - RNA, 19 nt, Artificial Sequence
  Description of Artificial Sequence: Synthetic oligonucleotide
  Sense strand starting at position 3618 of SEQ ID NO: 317214
cuagaacuguguucugauu

SEQ ID NO: 473362 - RNA, 19 nt, Artificial Sequence
  Description of Artificial Sequence: Synthetic oligonucleotide
  Antisense Strand to SEQ ID NO: 473361
aaucagaacacaguucuag

SEQ ID NO: 473363 - RNA, 19 nt, Artificial Sequence
  Description of Artificial Sequence: Synthetic oligonucleotide
  Sense strand starting at position 3983 of SEQ ID NO: 317214
ugaauuucuguguguuccu

SEQ ID NO: 473364 - RNA, 19 nt, Artificial Sequence
  Description of Artificial Sequence: Synthetic oligonucleotide
  Antisense Strand to SEQ ID NO: 473363
aggaacacacagaaauuca

SEQ ID NO: 473365 - RNA, 19 nt, Artificial Sequence
  Description of Artificial Sequence: Synthetic oligonucleotide
  Sense strand starting at position 241 of SEQ ID NO: 317215
caguauuucugaucggcca

SEQ ID NO: 473366 - RNA, 19 nt, Artificial Sequence
  Description of Artificial Sequence: Synthetic oligonucleotide
  Antisense Strand to SEQ ID NO: 473365
uggccgaucagaaauacug

SEQ ID NO: 473367 - RNA, 19 nt, Artificial Sequence
  Description of Artificial Sequence: Synthetic oligonucleotide
  Sense strand starting at position 242 of SEQ ID NO: 317215
aguauuucugaucggccau

SEQ ID NO: 473368 - RNA, 19 nt, Artificial Sequence
  Description of Artificial Sequence: Synthetic oligonucleotide
  Antisense Strand to SEQ ID NO: 473367
auggccgaucagaaauacu

SEQ ID NO: 473369 - RNA, 19 nt, Artificial Sequence
  Description of Artificial Sequence: Synthetic oligonucleotide
  Sense strand starting at position 547 of SEQ ID NO: 317215
cgugaagaguuuguaagga

SEQ ID NO: 473370 - RNA, 19 nt, Artificial Sequence
  Description of Artificial Sequence: Synthetic oligonucleotide
  Antisense Strand to SEQ ID NO: 473369
uccuuacaaacucuucacg

SEQ ID NO: 473371 - RNA, 19 nt, Artificial Sequence
  Description of Artificial Sequence: Synthetic oligonucleotide
  Sense strand starting at position 727 of SEQ ID NO: 317215
auuuguuaucugcggaaac

SEQ ID NO: 473372 - RNA, 19 nt, Artificial Sequence
  Description of Artificial Sequence: Synthetic oligonucleotide
  Antisense Strand to SEQ ID NO: 473371
guuuccgcagauaacaaau

SEQ ID NO: 473373 - RNA, 19 nt, Artificial Sequence
  Description of Artificial Sequence: Synthetic oligonucleotide
  Sense strand starting at position 790 of SEQ ID NO: 317215
cgccuuuggguggauugaa

SEQ ID NO: 473374 - RNA, 19 nt, Artificial Sequence
  Description of Artificial Sequence: Synthetic oligonucleotide
  Antisense Strand to SEQ ID NO: 473373
uucaauccacccaaaggcg

SEQ ID NO: 473375 - RNA, 19 nt, Artificial Sequence
  Description of Artificial Sequence: Synthetic oligonucleotide
  Sense strand starting at position 817 of SEQ ID NO: 317215
augugacggacuugagaua

SEQ ID NO: 473376 - RNA, 19 nt, Artificial Sequence
  Description of Artificial Sequence: Synthetic oligonucleotide
  Antisense Strand to SEQ ID NO: 473375
uaucucaaguccgucacau

SEQ ID NO: 473377 - RNA, 19 nt, Artificial Sequence
  Description of Artificial Sequence: Synthetic oligonucleotide
  Sense strand starting at position 1051 of SEQ ID NO: 317215
gccgcugucgguucuuaaa

SEQ ID NO: 473378 - RNA, 19 nt, Artificial Sequence
  Description of Artificial Sequence: Synthetic oligonucleotide
  Antisense Strand to SEQ ID NO: 473377
uuuaagaaccgacagcggc

SEQ ID NO: 473379 - RNA, 19 nt, Artificial Sequence
  Description of Artificial Sequence: Synthetic oligonucleotide
  Sense strand starting at position 1085 of SEQ ID NO: 317215
aguaaugagcuuuacucuu

SEQ ID NO: 473380 - RNA, 19 nt, Artificial Sequence
  Description of Artificial Sequence: Synthetic oligonucleotide
  Antisense Strand to SEQ ID NO: 473379
aagaguaaagcucauuacu

SEQ ID NO: 473381 - RNA, 19 nt, Artificial Sequence
  Description of Artificial Sequence: Synthetic oligonucleotide
  Sense strand starting at position 1093 of SEQ ID NO: 317215
gcuuuacucuuuguuauuu

SEQ ID NO: 473382 - RNA, 19 nt, Artificial Sequence
  Description of Artificial Sequence: Synthetic oligonucleotide
  Antisense Strand to SEQ ID NO: 473381
aaauaacaaagaguaaagc

SEQ ID NO: 473383 - RNA, 19 nt, Artificial Sequence
  Description of Artificial Sequence: Synthetic oligonucleotide
  Sense strand starting at position 1202 of SEQ ID NO: 317215
gugugacuaggauagugua

SEQ ID NO: 473384 - RNA, 19 nt, Artificial Sequence
  Description of Artificial Sequence: Synthetic oligonucleotide
  Antisense Strand to SEQ ID NO: 473383
uacacuauccuagucacac

SEQ ID NO: 473385 - RNA, 19 nt, Artificial Sequence
  Description of Artificial Sequence: Synthetic oligonucleotide
  Sense strand starting at position 1215 of SEQ ID NO: 317215
aguguaacccuguaaguga

SEQ ID NO: 473386 - RNA, 19 nt, Artificial Sequence
  Description of Artificial Sequence: Synthetic oligonucleotide
  Antisense Strand to SEQ ID NO: 473385
ucacuuacaggguuacacu

SEQ ID NO: 473387 - RNA, 19 nt, Artificial Sequence
  Description of Artificial Sequence: Synthetic oligonucleotide
  Sense strand starting at position 1218 of SEQ ID NO: 317215
guaacccuguaagugaauu

SEQ ID NO: 473388 - RNA, 19 nt, Artificial Sequence
  Description of Artificial Sequence: Synthetic oligonucleotide
  Antisense Strand to SEQ ID NO: 473387
aauucacuuacaggguuac

SEQ ID NO: 473389 - RNA, 19 nt, Artificial Sequence
  Description of Artificial Sequence: Synthetic oligonucleotide
  Sense strand starting at position 1285 of SEQ ID NO: 317215
aagcaaauuucguuuggua

SEQ ID NO: 473390 - RNA, 19 nt, Artificial Sequence
  Description of Artificial Sequence: Synthetic oligonucleotide
  Antisense Strand to SEQ ID NO: 473389
uaccaaacgaaauuugcuu

SEQ ID NO: 473391 - RNA, 19 nt, Artificial Sequence
  Description of Artificial Sequence: Synthetic oligonucleotide
  Sense strand starting at position 1287 of SEQ ID NO: 317215
gcaaauuucguuugguaaa

SEQ ID NO: 473392 - RNA, 19 nt, Artificial Sequence
  Description of Artificial Sequence: Synthetic oligonucleotide
  Antisense Strand to SEQ ID NO: 473391
uuuaccaaacgaaauuugc

SEQ ID NO: 473393 - RNA, 19 nt, Artificial Sequence
  Description of Artificial Sequence: Synthetic oligonucleotide
  Sense strand starting at position 1715 of SEQ ID NO: 317215
gggagaugugcacagcuca

SEQ ID NO: 473394 - RNA, 19 nt, Artificial Sequence
  Description of Artificial Sequence: Synthetic oligonucleotide
  Antisense Strand to SEQ ID NO: 473393
ugagcugugcacaucuccc

SEQ ID NO: 473395 - RNA, 19 nt, Artificial Sequence
  Description of Artificial Sequence: Synthetic oligonucleotide
  Sense strand starting at position 1809 of SEQ ID NO: 317215
gucugaggucucuagagca

SEQ ID NO: 473396 - RNA, 19 nt, Artificial Sequence
  Description of Artificial Sequence: Synthetic oligonucleotide
  Antisense Strand to SEQ ID NO: 473395
ugcucuagagaccucagac

SEQ ID NO: 473397 - RNA, 19 nt, Artificial Sequence
  Description of Artificial Sequence: Synthetic oligonucleotide
  Sense strand starting at position 1883 of SEQ ID NO: 317215
gucuuauugcuggcgcuuu

SEQ ID NO: 473398 - RNA, 19 nt, Artificial Sequence
  Description of Artificial Sequence: Synthetic oligonucleotide
  Antisense Strand to SEQ ID NO: 473397
aaagcgccagcaauaagac

SEQ ID NO: 473399 - RNA, 19 nt, Artificial Sequence
  Description of Artificial Sequence: Synthetic oligonucleotide
  Sense strand starting at position 2085 of SEQ ID NO: 317215
augaaaguugggugacgau

SEQ ID NO: 473400 - RNA, 19 nt, Artificial Sequence
  Description of Artificial Sequence: Synthetic oligonucleotide
  Antisense Strand to SEQ ID NO: 473399
aucgucacccaacuuucau

SEQ ID NO: 473401 - RNA, 19 nt, Artificial Sequence
  Description of Artificial Sequence: Synthetic oligonucleotide
  Sense strand starting at position 2094 of SEQ ID NO: 317215
gggugacgauucucccuga

SEQ ID NO: 473402 - RNA, 19 nt, Artificial Sequence
  Description of Artificial Sequence: Synthetic oligonucleotide
  Antisense Strand to SEQ ID NO: 473401
ucagggagaaucgucaccc

SEQ ID NO: 473403 - RNA, 19 nt, Artificial Sequence
  Description of Artificial Sequence: Synthetic oligonucleotide
  Sense strand starting at position 2098 of SEQ ID NO: 317215
gacgauucucccugaucca

SEQ ID NO: 473404 - RNA, 19 nt, Artificial Sequence
  Description of Artificial Sequence: Synthetic oligonucleotide
  Antisense Strand to SEQ ID NO: 473403
uggaucagggagaaucguc

SEQ ID NO: 473405 - RNA, 19 nt, Artificial Sequence
  Description of Artificial Sequence: Synthetic oligonucleotide
  Sense strand starting at position 2099 of SEQ ID NO: 317215
acgauucucccugauccaa

SEQ ID NO: 473406 - RNA, 19 nt, Artificial Sequence
  Description of Artificial Sequence: Synthetic oligonucleotide
  Antisense Strand to SEQ ID NO: 473405
uuggaucagggagaaucgu

SEQ ID NO: 473407 - RNA, 19 nt, Artificial Sequence
  Description of Artificial Sequence: Synthetic oligonucleotide
  Sense strand starting at position 2272 of SEQ ID NO: 317215
guguuacacgcucaauuua

SEQ ID NO: 473408 - RNA, 19 nt, Artificial Sequence
  Description of Artificial Sequence: Synthetic oligonucleotide
  Antisense Strand to SEQ ID NO: 473407
uaaauugagcguguaacac

SEQ ID NO: 473409 - RNA, 19 nt, Artificial Sequence
  Description of Artificial Sequence: Synthetic oligonucleotide
  Sense strand starting at position 2389 of SEQ ID NO: 317215
gguuuaugugaacgauaag

SEQ ID NO: 473410 - RNA, 19 nt, Artificial Sequence
  Description of Artificial Sequence: Synthetic oligonucleotide
  Antisense Strand to SEQ ID NO: 473409
cuuaucguucacauaaacc

SEQ ID NO: 473411 - RNA, 19 nt, Artificial Sequence
  Description of Artificial Sequence: Synthetic oligonucleotide
  Sense strand starting at position 2564 of SEQ ID NO: 317215
aaagcuuucgaaugugaaa

SEQ ID NO: 473412 - RNA, 19 nt, Artificial Sequence
  Description of Artificial Sequence: Synthetic oligonucleotide
  Antisense Strand to SEQ ID NO: 473411
uuucacauucgaaagcuuu

SEQ ID NO: 473413 - RNA, 19 nt, Artificial Sequence
  Description of Artificial Sequence: Synthetic oligonucleotide
  Sense strand starting at position 2603 of SEQ ID NO: 317215
guguucuuugcucucaguu

SEQ ID NO: 473414 - RNA, 19 nt, Artificial Sequence
  Description of Artificial Sequence: Synthetic oligonucleotide
  Antisense Strand to SEQ ID NO: 473413
aacugagagcaaagaacac

SEQ ID NO: 473415 - RNA, 19 nt, Artificial Sequence
  Description of Artificial Sequence: Synthetic oligonucleotide
  Sense strand starting at position 2617 of SEQ ID NO: 317215
caguucugucuguuugcau

SEQ ID NO: 473416 - RNA, 19 nt, Artificial Sequence
  Description of Artificial Sequence: Synthetic oligonucleotide
  Antisense Strand to SEQ ID NO: 473415
augcaaacagacagaacug

SEQ ID NO: 473417 - RNA, 19 nt, Artificial Sequence
  Description of Artificial Sequence: Synthetic oligonucleotide
  Sense strand starting at position 2657 of SEQ ID NO: 317215
ugaguuucugugagguugu

SEQ ID NO: 473418 - RNA, 19 nt, Artificial Sequence
  Description of Artificial Sequence: Synthetic oligonucleotide
  Antisense Strand to SEQ ID NO: 473417
acaaccucacagaaacuca

SEQ ID NO: 473419 - RNA, 19 nt, Artificial Sequence
  Description of Artificial Sequence: Synthetic oligonucleotide
  Sense strand starting at position 2708 of SEQ ID NO: 317215
caugaaguguacccaaaug

SEQ ID NO: 473420 - RNA, 19 nt, Artificial Sequence
  Description of Artificial Sequence: Synthetic oligonucleotide
  Antisense Strand to SEQ ID NO: 473419
cauuuggguacacuucaug

SEQ ID NO: 473421 - RNA, 19 nt, Artificial Sequence
  Description of Artificial Sequence: Synthetic oligonucleotide
  Sense strand starting at position 2845 of SEQ ID NO: 317215
gacuguagugagggaaauu

SEQ ID NO: 473422 - RNA, 19 nt, Artificial Sequence
  Description of Artificial Sequence: Synthetic oligonucleotide
  Antisense Strand to SEQ ID NO: 473421
aauuucccucacuacaguc

SEQ ID NO: 473423 - RNA, 19 nt, Artificial Sequence
  Description of Artificial Sequence: Synthetic oligonucleotide
  Sense strand starting at position 2856 of SEQ ID NO: 317215
gggaaauucuugccaugua

SEQ ID NO: 473424 - RNA, 19 nt, Artificial Sequence
  Description of Artificial Sequence: Synthetic oligonucleotide
  Antisense Strand to SEQ ID NO: 473423
uacauggcaagaauuuccc

SEQ ID NO: 473425 - RNA, 19 nt, Artificial Sequence
  Description of Artificial Sequence: Synthetic oligonucleotide
  Sense strand starting at position 3092 of SEQ ID NO: 317215
gggaaagcuuagcugaauc

SEQ ID NO: 473426 - RNA, 19 nt, Artificial Sequence
  Description of Artificial Sequence: Synthetic oligonucleotide
  Antisense Strand to SEQ ID NO: 473425
gauucagcuaagcuuuccc

SEQ ID NO: 473427 - RNA, 19 nt, Artificial Sequence
  Description of Artificial Sequence: Synthetic oligonucleotide
  Sense strand starting at position 3193 of SEQ ID NO: 317215
uuaugugcucuguaacaag

SEQ ID NO: 473428 - RNA, 19 nt, Artificial Sequence
  Description of Artificial Sequence: Synthetic oligonucleotide
  Antisense Strand to SEQ ID NO: 473427
cuuguuacagagcacauaa

SEQ ID NO: 473429 - RNA, 19 nt, Artificial Sequence
  Description of Artificial Sequence: Synthetic oligonucleotide
  Sense strand starting at position 3203 of SEQ ID NO: 317215
uguaacaagucaguaauua

SEQ ID NO: 473430 - RNA, 19 nt, Artificial Sequence
  Description of Artificial Sequence: Synthetic oligonucleotide
  Antisense Strand to SEQ ID NO: 473429
uaauuacugacuuguuaca

SEQ ID NO: 473431 - RNA, 19 nt, Artificial Sequence
  Description of Artificial Sequence: Synthetic oligonucleotide
  Sense strand starting at position 3204 of SEQ ID NO: 317215
guaacaagucaguaauuaa

SEQ ID NO: 473432 - RNA, 19 nt, Artificial Sequence
  Description of Artificial Sequence: Synthetic oligonucleotide
  Antisense Strand to SEQ ID NO: 473431
uuaauuacugacuuguuac

SEQ ID NO: 473433 - RNA, 19 nt, Artificial Sequence
  Description of Artificial Sequence: Synthetic oligonucleotide
  Sense strand starting at position 3207 of SEQ ID NO: 317215
acaagucaguaauuaaagu

SEQ ID NO: 473434 - RNA, 19 nt, Artificial Sequence
  Description of Artificial Sequence: Synthetic oligonucleotide
  Antisense Strand to SEQ ID NO: 473433
acuuuaauuacugacuugu

SEQ ID NO: 473435 - RNA, 19 nt, Artificial Sequence
  Description of Artificial Sequence: Synthetic oligonucleotide
  Sense strand starting at position 3369 of SEQ ID NO: 317215
ggacgcaguaauggauuaa

SEQ ID NO: 473436 - RNA, 19 nt, Artificial Sequence
  Description of Artificial Sequence: Synthetic oligonucleotide
  Antisense Strand to SEQ ID NO: 473435
uuaauccauuacugcgucc

SEQ ID NO: 473437 - RNA, 19 nt, Artificial Sequence
  Description of Artificial Sequence: Synthetic oligonucleotide
  Sense strand starting at position 3515 of SEQ ID NO: 317215
gaggauccuggugauaguu

SEQ ID NO: 473438 - RNA, 19 nt, Artificial Sequence
  Description of Artificial Sequence: Synthetic oligonucleotide
  Antisense Strand to SEQ ID NO: 473437
aacuaucaccaggauccuc

SEQ ID NO: 473439 - RNA, 19 nt, Artificial Sequence
  Description of Artificial Sequence: Synthetic oligonucleotide
  Sense strand starting at position 3706 of SEQ ID NO: 317215
uuucuuuauggucaccaga

SEQ ID NO: 473440 - RNA, 19 nt, Artificial Sequence
  Description of Artificial Sequence: Synthetic oligonucleotide
  Antisense Strand to SEQ ID NO: 473439
ucuggugaccauaaagaaa

SEQ ID NO: 473441 - RNA, 19 nt, Artificial Sequence
  Description of Artificial Sequence: Synthetic oligonucleotide
  Sense strand starting at position 3813 of SEQ ID NO: 317215
agcggagauuugucuuuau

SEQ ID NO: 473442 - RNA, 19 nt, Artificial Sequence
  Description of Artificial Sequence: Synthetic oligonucleotide
  Antisense Strand to SEQ ID NO: 473441
auaaagacaaaucuccgcu

SEQ ID NO: 473443 - RNA, 19 nt, Artificial Sequence
  Description of Artificial Sequence: Synthetic oligonucleotide
  Sense strand starting at position 3838 of SEQ ID NO: 317215
cgcucucaugaauaugaau

SEQ ID NO: 473444 - RNA, 19 nt, Artificial Sequence
  Description of Artificial Sequence: Synthetic oligonucleotide
  Antisense Strand to SEQ ID NO: 473443
auucauauucaugagagcg

SEQ ID NO: 473445 - RNA, 19 nt, Artificial Sequence
  Description of Artificial Sequence: Synthetic oligonucleotide
  Sense strand starting at position 185 of SEQ ID NO: 317216
ccuuaauacuguuuguuua

SEQ ID NO: 473446 - RNA, 19 nt, Artificial Sequence
  Description of Artificial Sequence: Synthetic oligonucleotide
  Antisense Strand to SEQ ID NO: 473445
uaaacaaacaguauuaagg

SEQ ID NO: 473447 - RNA, 19 nt, Artificial Sequence
  Description of Artificial Sequence: Synthetic oligonucleotide
  Sense strand starting at position 416 of SEQ ID NO: 317216
uugguuaaacgucaaugca

SEQ ID NO: 473448 - RNA, 19 nt, Artificial Sequence
  Description of Artificial Sequence: Synthetic oligonucleotide
  Antisense Strand to SEQ ID NO: 473447
ugcauugacguuuaaccaa

SEQ ID NO: 473449 - RNA, 19 nt, Artificial Sequence
  Description of Artificial Sequence: Synthetic oligonucleotide
  Sense strand starting at position 456 of SEQ ID NO: 317216
gggagcagacguugguuaa

SEQ ID NO: 473450 - RNA, 19 nt, Artificial Sequence
  Description of Artificial Sequence: Synthetic oligonucleotide
  Antisense Strand to SEQ ID NO: 473449
uuaaccaacgucugcuccc

SEQ ID NO: 473451 - RNA, 19 nt, Artificial Sequence
  Description of Artificial Sequence: Synthetic oligonucleotide
  Sense strand starting at position 457 of SEQ ID NO: 317216
ggagcagacguugguuaaa

SEQ ID NO: 473452 - RNA, 19 nt, Artificial Sequence
  Description of Artificial Sequence: Synthetic oligonucleotide
  Antisense Strand to SEQ ID NO: 473451
uuuaaccaacgucugcucc

SEQ ID NO: 473453 - RNA, 19 nt, Artificial Sequence
  Description of Artificial Sequence: Synthetic oligonucleotide
  Sense strand starting at position 467 of SEQ ID NO: 317216
uugguuaaagcuuaaacaa

SEQ ID NO: 473454 - RNA, 19 nt, Artificial Sequence
  Description of Artificial Sequence: Synthetic oligonucleotide
  Antisense Strand to SEQ ID NO: 473453
uuguuuaagcuuuaaccaa

SEQ ID NO: 473455 - RNA, 19 nt, Artificial Sequence
  Description of Artificial Sequence: Synthetic oligonucleotide
  Sense strand starting at position 504 of SEQ ID NO: 317216
uugggauucucugauuuau

SEQ ID NO: 473456 - RNA, 19 nt, Artificial Sequence
  Description of Artificial Sequence: Synthetic oligonucleotide
  Antisense Strand to SEQ ID NO: 473455
auaaaucagagaaucccaa

SEQ ID NO: 473457 - RNA, 19 nt, Artificial Sequence
  Description of Artificial Sequence: Synthetic oligonucleotide
  Sense strand starting at position 527 of SEQ ID NO: 317216
ucuagaauaugccugaaug

SEQ ID NO: 473458 - RNA, 19 nt, Artificial Sequence
  Description of Artificial Sequence: Synthetic oligonucleotide
  Antisense Strand to SEQ ID NO: 473457
cauucaggcauauucuaga

SEQ ID NO: 473459 - RNA, 19 nt, Artificial Sequence
  Description of Artificial Sequence: Synthetic oligonucleotide
  Sense strand starting at position 528 of SEQ ID NO: 317216
cuagaauaugccugaaugu

SEQ ID NO: 473460 - RNA, 19 nt, Artificial Sequence
  Description of Artificial Sequence: Synthetic oligonucleotide
  Antisense Strand to SEQ ID NO: 473459
acauucaggcauauucuag

SEQ ID NO: 473461 - RNA, 19 nt, Artificial Sequence
  Description of Artificial Sequence: Synthetic oligonucleotide
  Sense strand starting at position 529 of SEQ ID NO: 317216
uagaauaugccugaaugua

SEQ ID NO: 473462 - RNA, 19 nt, Artificial Sequence
  Description of Artificial Sequence: Synthetic oligonucleotide
  Antisense Strand to SEQ ID NO: 473461
uacauucaggcauauucua

SEQ ID NO: 473463 - RNA, 19 nt, Artificial Sequence
  Description of Artificial Sequence: Synthetic oligonucleotide
  Sense strand starting at position 561 of SEQ ID NO: 317216
acuugagugaccgauucua

SEQ ID NO: 473464 - RNA, 19 nt, Artificial Sequence
  Description of Artificial Sequence: Synthetic oligonucleotide
  Antisense Strand to SEQ ID NO: 473463
uagaaucggucacucaagu

SEQ ID NO: 473465 - RNA, 19 nt, Artificial Sequence
  Description of Artificial Sequence: Synthetic oligonucleotide
  Sense strand starting at position 698 of SEQ ID NO: 317216
uaaguugucaugugugaag

SEQ ID NO: 473466 - RNA, 19 nt, Artificial Sequence
  Description of Artificial Sequence: Synthetic oligonucleotide
  Antisense Strand to SEQ ID NO: 473465
cuucacacaugacaacuua

SEQ ID NO: 473467 - RNA, 19 nt, Artificial Sequence
  Description of Artificial Sequence: Synthetic oligonucleotide
  Sense strand starting at position 705 of SEQ ID NO: 317216
ucaugugugaagcgauaaa

SEQ ID NO: 473468 - RNA, 19 nt, Artificial Sequence
  Description of Artificial Sequence: Synthetic oligonucleotide
  Antisense Strand to SEQ ID NO: 473467
uuuaucgcuucacacauga

SEQ ID NO: 473469 - RNA, 19 nt, Artificial Sequence
  Description of Artificial Sequence: Synthetic oligonucleotide
  Sense strand starting at position 1166 of SEQ ID NO: 317216
uggauauucuggcugucca

SEQ ID NO: 473470 - RNA, 19 nt, Artificial Sequence
  Description of Artificial Sequence: Synthetic oligonucleotide
  Antisense Strand to SEQ ID NO: 473469
uggacagccagaauaucca

SEQ ID NO: 473471 - RNA, 19 nt, Artificial Sequence
  Description of Artificial Sequence: Synthetic oligonucleotide
  Sense strand starting at position 1167 of SEQ ID NO: 317216
ggauauucuggcuguccau

SEQ ID NO: 473472 - RNA, 19 nt, Artificial Sequence
  Description of Artificial Sequence: Synthetic oligonucleotide
  Antisense Strand to SEQ ID NO: 473471
auggacagccagaauaucc

SEQ ID NO: 473473 - RNA, 19 nt, Artificial Sequence
  Description of Artificial Sequence: Synthetic oligonucleotide
  Sense strand starting at position 1213 of SEQ ID NO: 317216
ucaccacuccgggaacuuu

SEQ ID NO: 473474 - RNA, 19 nt, Artificial Sequence
  Description of Artificial Sequence: Synthetic oligonucleotide
  Antisense Strand to SEQ ID NO: 473473
aaaguucccggagugguga

SEQ ID NO: 473475 - RNA, 19 nt, Artificial Sequence
  Description of Artificial Sequence: Synthetic oligonucleotide
  Sense strand starting at position 1356 of SEQ ID NO: 317216
ggucuaaagaaucgguuua

SEQ ID NO: 473476 - RNA, 19 nt, Artificial Sequence
  Description of Artificial Sequence: Synthetic oligonucleotide
  Antisense Strand to SEQ ID NO: 473475
uaaaccgauucuuuagacc

SEQ ID NO: 473477 - RNA, 19 nt, Artificial Sequence
  Description of Artificial Sequence: Synthetic oligonucleotide
  Sense strand starting at position 1357 of SEQ ID NO: 317216
gucuaaagaaucgguuuaa

SEQ ID NO: 473478 - RNA, 19 nt, Artificial Sequence
  Description of Artificial Sequence: Synthetic oligonucleotide
  Antisense Strand to SEQ ID NO: 473477
uuaaaccgauucuuuagac

SEQ ID NO: 473479 - RNA, 19 nt, Artificial Sequence
  Description of Artificial Sequence: Synthetic oligonucleotide
  Sense strand starting at position 1358 of SEQ ID NO: 317216
ucuaaagaaucgguuuaau

SEQ ID NO: 473480 - RNA, 19 nt, Artificial Sequence
  Description of Artificial Sequence: Synthetic oligonucleotide
  Antisense Strand to SEQ ID NO: 473479
auuaaaccgauucuuuaga

SEQ ID NO: 473481 - RNA, 19 nt, Artificial Sequence
  Description of Artificial Sequence: Synthetic oligonucleotide
  Sense strand starting at position 1397 of SEQ ID NO: 317216
gagggagcucccggagaaa

SEQ ID NO: 473482 - RNA, 19 nt, Artificial Sequence
  Description of Artificial Sequence: Synthetic oligonucleotide
  Antisense Strand to SEQ ID NO: 473481
uuucuccgggagcucccuc

SEQ ID NO: 473483 - RNA, 19 nt, Artificial Sequence
  Description of Artificial Sequence: Synthetic oligonucleotide
  Sense strand starting at position 2284 of SEQ ID NO: 317216
cggcuucucccugacagaa

SEQ ID NO: 473484 - RNA, 19 nt, Artificial Sequence
  Description of Artificial Sequence: Synthetic oligonucleotide
  Antisense Strand to SEQ ID NO: 473483
uucugucagggagaagccg

SEQ ID NO: 473485 - RNA, 19 nt, Artificial Sequence
  Description of Artificial Sequence: Synthetic oligonucleotide
  Sense strand starting at position 2306 of SEQ ID NO: 317216
ucucucagaguuuaccaua

SEQ ID NO: 473486 - RNA, 19 nt, Artificial Sequence
  Description of Artificial Sequence: Synthetic oligonucleotide
  Antisense Strand to SEQ ID NO: 473485
uaugguaaacucugagaga

SEQ ID NO: 473487 - RNA, 19 nt, Artificial Sequence
  Description of Artificial Sequence: Synthetic oligonucleotide
  Sense strand starting at position 2314 of SEQ ID NO: 317216
aguuuaccauaaucuguaa

SEQ ID NO: 473488 - RNA, 19 nt, Artificial Sequence
  Description of Artificial Sequence: Synthetic oligonucleotide
  Antisense Strand to SEQ ID NO: 473487
uuacagauuaugguaaacu

SEQ ID NO: 473489 - RNA, 19 nt, Artificial Sequence
  Description of Artificial Sequence: Synthetic oligonucleotide
  Sense strand starting at position 2445 of SEQ ID NO: 317216
ugacuaaucuagcuagaag

SEQ ID NO: 473490 - RNA, 19 nt, Artificial Sequence
  Description of Artificial Sequence: Synthetic oligonucleotide
  Antisense Strand to SEQ ID NO: 473489
cuucuagcuagauuaguca

SEQ ID NO: 473491 - RNA, 19 nt, Artificial Sequence
  Description of Artificial Sequence: Synthetic oligonucleotide
  Sense strand starting at position 2448 of SEQ ID NO: 317216
cuaaucuagcuagaaguuu

SEQ ID NO: 473492 - RNA, 19 nt, Artificial Sequence
  Description of Artificial Sequence: Synthetic oligonucleotide
  Antisense Strand to SEQ ID NO: 473491
aaacuucuagcuagauuag

SEQ ID NO: 473493 - RNA, 19 nt, Artificial Sequence
  Description of Artificial Sequence: Synthetic oligonucleotide
  Sense strand starting at position 2583 of SEQ ID NO: 317216
uuucuaguugcuuagagua

SEQ ID NO: 473494 - RNA, 19 nt, Artificial Sequence
  Description of Artificial Sequence: Synthetic oligonucleotide
  Antisense Strand to SEQ ID NO: 473493
uacucuaagcaacuagaaa

SEQ ID NO: 473495 - RNA, 19 nt, Artificial Sequence
  Description of Artificial Sequence: Synthetic oligonucleotide
  Sense strand starting at position 2588 of SEQ ID NO: 317216
aguugcuuagaguagaaga

SEQ ID NO: 473496 - RNA, 19 nt, Artificial Sequence
  Description of Artificial Sequence: Synthetic oligonucleotide
  Antisense Strand to SEQ ID NO: 473495
ucuucuacucuaagcaacu

SEQ ID NO: 473497 - RNA, 19 nt, Artificial Sequence
  Description of Artificial Sequence: Synthetic oligonucleotide
  Sense strand starting at position 2599 of SEQ ID NO: 317216
guagaagaugauugauucu

SEQ ID NO: 473498 - RNA, 19 nt, Artificial Sequence
  Description of Artificial Sequence: Synthetic oligonucleotide
  Antisense Strand to SEQ ID NO: 473497
agaaucaaucaucuucuac

SEQ ID NO: 473499 - RNA, 19 nt, Artificial Sequence
  Description of Artificial Sequence: Synthetic oligonucleotide
  Sense strand starting at position 2652 of SEQ ID NO: 317216
ggcuauaaauugcccucua

SEQ ID NO: 473500 - RNA, 19 nt, Artificial Sequence
  Description of Artificial Sequence: Synthetic oligonucleotide
  Antisense Strand to SEQ ID NO: 473499
uagagggcaauuuauagcc

SEQ ID NO: 473501 - RNA, 19 nt, Artificial Sequence
  Description of Artificial Sequence: Synthetic oligonucleotide
  Sense strand starting at position 2808 of SEQ ID NO: 317216
gggaucuucucagcuuuaa

SEQ ID NO: 473502 - RNA, 19 nt, Artificial Sequence
  Description of Artificial Sequence: Synthetic oligonucleotide
  Antisense Strand to SEQ ID NO: 473501
uuaaagcugagaagauccc

SEQ ID NO: 473503 - RNA, 19 nt, Artificial Sequence
  Description of Artificial Sequence: Synthetic oligonucleotide
  Sense strand starting at position 3129 of SEQ ID NO: 317216
ccaacuuguuaugucaaag

SEQ ID NO: 473504 - RNA, 19 nt, Artificial Sequence
  Description of Artificial Sequence: Synthetic oligonucleotide
  Antisense Strand to SEQ ID NO: 473503
cuuugacauaacaaguugg

SEQ ID NO: 473505 - RNA, 19 nt, Artificial Sequence
  Description of Artificial Sequence: Synthetic oligonucleotide
  Sense strand starting at position 3135 of SEQ ID NO: 317216
uguuaugucaaagggagag

SEQ ID NO: 473506 - RNA, 19 nt, Artificial Sequence
  Description of Artificial Sequence: Synthetic oligonucleotide
  Antisense Strand to SEQ ID NO: 473505
cucucccuuugacauaaca

SEQ ID NO: 473507 - RNA, 19 nt, Artificial Sequence
  Description of Artificial Sequence: Synthetic oligonucleotide
  Sense strand starting at position 3150 of SEQ ID NO: 317216
agaguuaagccuggagacu

SEQ ID NO: 473508 - RNA, 19 nt, Artificial Sequence
  Description of Artificial Sequence: Synthetic oligonucleotide
  Antisense Strand to SEQ ID NO: 473507
agucuccaggcuuaacucu

SEQ ID NO: 473509 - RNA, 19 nt, Artificial Sequence
  Description of Artificial Sequence: Synthetic oligonucleotide
  Sense strand starting at position 3151 of SEQ ID NO: 317216
gaguuaagccuggagacug

SEQ ID NO: 473510 - RNA, 19 nt, Artificial Sequence
  Description of Artificial Sequence: Synthetic oligonucleotide
  Antisense Strand to SEQ ID NO: 473509
cagucuccaggcuuaacuc

SEQ ID NO: 473511 - RNA, 19 nt, Artificial Sequence
  Description of Artificial Sequence: Synthetic oligonucleotide
  Sense strand starting at position 3210 of SEQ ID NO: 317216
uguuacuucccauaguugu

SEQ ID NO: 473512 - RNA, 19 nt, Artificial Sequence
  Description of Artificial Sequence: Synthetic oligonucleotide
  Antisense Strand to SEQ ID NO: 473511
acaacuaugggaaguaaca

SEQ ID NO: 473513 - RNA, 19 nt, Artificial Sequence
  Description of Artificial Sequence: Synthetic oligonucleotide
  Sense strand starting at position 3298 of SEQ ID NO: 317216
ggaugacuguccucaacaa

SEQ ID NO: 473514 - RNA, 19 nt, Artificial Sequence
  Description of Artificial Sequence: Synthetic oligonucleotide
  Antisense Strand to SEQ ID NO: 473513
uuguugaggacagucaucc

SEQ ID NO: 473515 - RNA, 19 nt, Artificial Sequence
  Description of Artificial Sequence: Synthetic oligonucleotide
  Sense strand starting at position 3358 of SEQ ID NO: 317216
agauguauauccuuccaua

SEQ ID NO: 473516 - RNA, 19 nt, Artificial Sequence
  Description of Artificial Sequence: Synthetic oligonucleotide
  Antisense Strand to SEQ ID NO: 473515
uauggaaggauauacaucu

SEQ ID NO: 473517 - RNA, 19 nt, Artificial Sequence
  Description of Artificial Sequence: Synthetic oligonucleotide
  Sense strand starting at position 3383 of SEQ ID NO: 317216
ggacgugucaauuguauaa

SEQ ID NO: 473518 - RNA, 19 nt, Artificial Sequence
  Description of Artificial Sequence: Synthetic oligonucleotide
  Antisense Strand to SEQ ID NO: 473517
uuauacaauugacacgucc

SEQ ID NO: 473519 - RNA, 19 nt, Artificial Sequence
  Description of Artificial Sequence: Synthetic oligonucleotide
  Sense strand starting at position 3387 of SEQ ID NO: 317216
gugucaauuguauaacuuu

SEQ ID NO: 473520 - RNA, 19 nt, Artificial Sequence
  Description of Artificial Sequence: Synthetic oligonucleotide
  Antisense Strand to SEQ ID NO: 473519
aaaguuauacaauugacac

SEQ ID NO: 473521 - RNA, 19 nt, Artificial Sequence
  Description of Artificial Sequence: Synthetic oligonucleotide
  Sense strand starting at position 3585 of SEQ ID NO: 317216
uuaugcauagcauagaguu

SEQ ID NO: 473522 - RNA, 19 nt, Artificial Sequence
  Description of Artificial Sequence: Synthetic oligonucleotide
  Antisense Strand to SEQ ID NO: 473521
aacucuaugcuaugcauaa

SEQ ID NO: 473523 - RNA, 19 nt, Artificial Sequence
  Description of Artificial Sequence: Synthetic oligonucleotide
  Sense strand starting at position 3675 of SEQ ID NO: 317216
ccuucuccgcuuuaaagaa

SEQ ID NO: 473524 - RNA, 19 nt, Artificial Sequence
  Description of Artificial Sequence: Synthetic oligonucleotide
  Antisense Strand to SEQ ID NO: 473523
uucuuuaaagcggagaagg

SEQ ID NO: 473525 - RNA, 19 nt, Artificial Sequence
  Description of Artificial Sequence: Synthetic oligonucleotide
  Sense strand starting at position 112 of SEQ ID NO: 317217
gguggaaacagugguaauu

SEQ ID NO: 473526 - RNA, 19 nt, Artificial Sequence
  Description of Artificial Sequence: Synthetic oligonucleotide
  Antisense Strand to SEQ ID NO: 473525
aauuaccacuguuuccacc

SEQ ID NO: 473527 - RNA, 19 nt, Artificial Sequence
  Description of Artificial Sequence: Synthetic oligonucleotide
  Sense strand starting at position 128 of SEQ ID NO: 317217
auuguugaggccggaacau

SEQ ID NO: 473528 - RNA, 19 nt, Artificial Sequence
  Description of Artificial Sequence: Synthetic oligonucleotide
  Antisense Strand to SEQ ID NO: 473527
auguuccggccucaacaau

SEQ ID NO: 473529 - RNA, 19 nt, Artificial Sequence
  Description of Artificial Sequence: Synthetic oligonucleotide
  Sense strand starting at position 162 of SEQ ID NO: 317217
auguauacugguggauaau

SEQ ID NO: 473530 - RNA, 19 nt, Artificial Sequence
  Description of Artificial Sequence: Synthetic oligonucleotide
  Antisense Strand to SEQ ID NO: 473529
auuauccaccaguauacau

SEQ ID NO: 473531 - RNA, 19 nt, Artificial Sequence
  Description of Artificial Sequence: Synthetic oligonucleotide
  Sense strand starting at position 163 of SEQ ID NO: 317217
uguauacugguggauaauu

SEQ ID NO: 473532 - RNA, 19 nt, Artificial Sequence
  Description of Artificial Sequence: Synthetic oligonucleotide
  Antisense Strand to SEQ ID NO: 473531
aauuauccaccaguauaca

SEQ ID NO: 473533 - RNA, 19 nt, Artificial Sequence
  Description of Artificial Sequence: Synthetic oligonucleotide
  Sense strand starting at position 204 of SEQ ID NO: 317217
aucugaguuugcuuuccua

SEQ ID NO: 473534 - RNA, 19 nt, Artificial Sequence
  Description of Artificial Sequence: Synthetic oligonucleotide
  Antisense Strand to SEQ ID NO: 473533
uaggaaagcaaacucagau

SEQ ID NO: 473535 - RNA, 19 nt, Artificial Sequence
  Description of Artificial Sequence: Synthetic oligonucleotide
  Sense strand starting at position 207 of SEQ ID NO: 317217
ugaguuugcuuuccuaucu

SEQ ID NO: 473536 - RNA, 19 nt, Artificial Sequence
  Description of Artificial Sequence: Synthetic oligonucleotide
  Antisense Strand to SEQ ID NO: 473535
agauaggaaagcaaacuca

SEQ ID NO: 473537 - RNA, 19 nt, Artificial Sequence
  Description of Artificial Sequence: Synthetic oligonucleotide
  Sense strand starting at position 337 of SEQ ID NO: 317217
guagguuagccuggaugau

SEQ ID NO: 473538 - RNA, 19 nt, Artificial Sequence
  Description of Artificial Sequence: Synthetic oligonucleotide
  Antisense Strand to SEQ ID NO: 473537
aucauccaggcuaaccuac

SEQ ID NO: 473539 - RNA, 19 nt, Artificial Sequence
  Description of Artificial Sequence: Synthetic oligonucleotide
  Sense strand starting at position 349 of SEQ ID NO: 317217
ggaugaucuugcucuaaau

SEQ ID NO: 473540 - RNA, 19 nt, Artificial Sequence
  Description of Artificial Sequence: Synthetic oligonucleotide
  Antisense Strand to SEQ ID NO: 473539
auuuagagcaagaucaucc

SEQ ID NO: 473541 - RNA, 19 nt, Artificial Sequence
  Description of Artificial Sequence: Synthetic oligonucleotide
  Sense strand starting at position 392 of SEQ ID NO: 317217
agcuuuggcuacuugacau

SEQ ID NO: 473542 - RNA, 19 nt, Artificial Sequence
  Description of Artificial Sequence: Synthetic oligonucleotide
  Antisense Strand to SEQ ID NO: 473541
augucaaguagccaaagcu

SEQ ID NO: 473543 - RNA, 19 nt, Artificial Sequence
  Description of Artificial Sequence: Synthetic oligonucleotide
  Sense strand starting at position 414 of SEQ ID NO: 317217
gcacaaaugaugggucuca

SEQ ID NO: 473544 - RNA, 19 nt, Artificial Sequence
  Description of Artificial Sequence: Synthetic oligonucleotide
  Antisense Strand to SEQ ID NO: 473543
ugagacccaucauuugugc

SEQ ID NO: 473545 - RNA, 19 nt, Artificial Sequence
  Description of Artificial Sequence: Synthetic oligonucleotide
  Sense strand starting at position 588 of SEQ ID NO: 317217
aggcaaacuuaccuugauu

SEQ ID NO: 473546 - RNA, 19 nt, Artificial Sequence
  Description of Artificial Sequence: Synthetic oligonucleotide
  Antisense Strand to SEQ ID NO: 473545
aaucaagguaaguuugccu

SEQ ID NO: 473547 - RNA, 19 nt, Artificial Sequence
  Description of Artificial Sequence: Synthetic oligonucleotide
  Sense strand starting at position 802 of SEQ ID NO: 317217
gcuccuaaguguuugaaag

SEQ ID NO: 473548 - RNA, 19 nt, Artificial Sequence
  Description of Artificial Sequence: Synthetic oligonucleotide
  Antisense Strand to SEQ ID NO: 473547
cuuucaaacacuuaggagc

SEQ ID NO: 473549 - RNA, 19 nt, Artificial Sequence
  Description of Artificial Sequence: Synthetic oligonucleotide
  Sense strand starting at position 803 of SEQ ID NO: 317217
cuccuaaguguuugaaaga

SEQ ID NO: 473550 - RNA, 19 nt, Artificial Sequence
  Description of Artificial Sequence: Synthetic oligonucleotide
  Antisense Strand to SEQ ID NO: 473549
ucuuucaaacacuuaggag

SEQ ID NO: 473551 - RNA, 19 nt, Artificial Sequence
  Description of Artificial Sequence: Synthetic oligonucleotide
  Sense strand starting at position 895 of SEQ ID NO: 317217
cagcacauacccugcgaua

SEQ ID NO: 473552 - RNA, 19 nt, Artificial Sequence
  Description of Artificial Sequence: Synthetic oligonucleotide
  Antisense Strand to SEQ ID NO: 473551
uaucgcaggguaugugcug

SEQ ID NO: 473553 - RNA, 19 nt, Artificial Sequence
  Description of Artificial Sequence: Synthetic oligonucleotide
  Sense strand starting at position 897 of SEQ ID NO: 317217
gcacauacccugcgauauc

SEQ ID NO: 473554 - RNA, 19 nt, Artificial Sequence
  Description of Artificial Sequence: Synthetic oligonucleotide
  Antisense Strand to SEQ ID NO: 473553
gauaucgcaggguaugugc

SEQ ID NO: 473555 - RNA, 19 nt, Artificial Sequence
  Description of Artificial Sequence: Synthetic oligonucleotide
  Sense strand starting at position 906 of SEQ ID NO: 317217
cugcgauaucuacauaacc

SEQ ID NO: 473556 - RNA, 19 nt, Artificial Sequence
  Description of Artificial Sequence: Synthetic oligonucleotide
  Antisense Strand to SEQ ID NO: 473555
gguuauguagauaucgcag

SEQ ID NO: 473557 - RNA, 19 nt, Artificial Sequence
  Description of Artificial Sequence: Synthetic oligonucleotide
  Sense strand starting at position 1010 of SEQ ID NO: 317217
aguagcaagcagugaauua

SEQ ID NO: 473558 - RNA, 19 nt, Artificial Sequence
  Description of Artificial Sequence: Synthetic oligonucleotide
  Antisense Strand to SEQ ID NO: 473557
uaauucacugcuugcuacu

SEQ ID NO: 473559 - RNA, 19 nt, Artificial Sequence
  Description of Artificial Sequence: Synthetic oligonucleotide
  Sense strand starting at position 1011 of SEQ ID NO: 317217
guagcaagcagugaauuau

SEQ ID NO: 473560 - RNA, 19 nt, Artificial Sequence
  Description of Artificial Sequence: Synthetic oligonucleotide
  Antisense Strand to SEQ ID NO: 473559
auaauucacugcuugcuac

SEQ ID NO: 473561 - RNA, 19 nt, Artificial Sequence
  Description of Artificial Sequence: Synthetic oligonucleotide
  Sense strand starting at position 1020 of SEQ ID NO: 317217
agugaauuauccucaguau

SEQ ID NO: 473562 - RNA, 19 nt, Artificial Sequence
  Description of Artificial Sequence: Synthetic oligonucleotide
  Antisense Strand to SEQ ID NO: 473561
auacugaggauaauucacu

SEQ ID NO: 473563 - RNA, 19 nt, Artificial Sequence
  Description of Artificial Sequence: Synthetic oligonucleotide
  Sense strand starting at position 1021 of SEQ ID NO: 317217
gugaauuauccucaguaug

SEQ ID NO: 473564 - RNA, 19 nt, Artificial Sequence
  Description of Artificial Sequence: Synthetic oligonucleotide
  Antisense Strand to SEQ ID NO: 473563
cauacugaggauaauucac

SEQ ID NO: 473565 - RNA, 19 nt, Artificial Sequence
  Description of Artificial Sequence: Synthetic oligonucleotide
  Sense strand starting at position 1023 of SEQ ID NO: 317217
gaauuauccucaguauggu

SEQ ID NO: 473566 - RNA, 19 nt, Artificial Sequence
  Description of Artificial Sequence: Synthetic oligonucleotide
  Antisense Strand to SEQ ID NO: 473565
accauacugaggauaauuc

SEQ ID NO: 473567 - RNA, 19 nt, Artificial Sequence
  Description of Artificial Sequence: Synthetic oligonucleotide
  Sense strand starting at position 1055 of SEQ ID NO: 317217
guaggagaaucccuacgua

SEQ ID NO: 473568 - RNA, 19 nt, Artificial Sequence
  Description of Artificial Sequence: Synthetic oligonucleotide
  Antisense Strand to SEQ ID NO: 473567
uacguagggauucuccuac

SEQ ID NO: 473569 - RNA, 19 nt, Artificial Sequence
  Description of Artificial Sequence: Synthetic oligonucleotide
  Sense strand starting at position 1058 of SEQ ID NO: 317217
ggagaaucccuacguaagg

SEQ ID NO: 473570 - RNA, 19 nt, Artificial Sequence
  Description of Artificial Sequence: Synthetic oligonucleotide
  Antisense Strand to SEQ ID NO: 473569
ccuuacguagggauucucc

SEQ ID NO: 473571 - RNA, 19 nt, Artificial Sequence
  Description of Artificial Sequence: Synthetic oligonucleotide
  Sense strand starting at position 1143 of SEQ ID NO: 317217
cguuuacauacugcguuua

SEQ ID NO: 473572 - RNA, 19 nt, Artificial Sequence
  Description of Artificial Sequence: Synthetic oligonucleotide
  Antisense Strand to SEQ ID NO: 473571
uaaacgcaguauguaaacg

SEQ ID NO: 473573 - RNA, 19 nt, Artificial Sequence
  Description of Artificial Sequence: Synthetic oligonucleotide
  Sense strand starting at position 1145 of SEQ ID NO: 317217
uuuacauacugcguuuaca

SEQ ID NO: 473574 - RNA, 19 nt, Artificial Sequence
  Description of Artificial Sequence: Synthetic oligonucleotide
  Antisense Strand to SEQ ID NO: 473573
uguaaacgcaguauguaaa

SEQ ID NO: 473575 - RNA, 19 nt, Artificial Sequence
  Description of Artificial Sequence: Synthetic oligonucleotide
  Sense strand starting at position 2051 of SEQ ID NO: 317217
gggcgucaccucggacaua

SEQ ID NO: 473576 - RNA, 19 nt, Artificial Sequence
  Description of Artificial Sequence: Synthetic oligonucleotide
  Antisense Strand to SEQ ID NO: 473575
uauguccgaggugacgccc

SEQ ID NO: 473577 - RNA, 19 nt, Artificial Sequence
  Description of Artificial Sequence: Synthetic oligonucleotide
  Sense strand starting at position 2645 of SEQ ID NO: 317217
uuuauuagagcugaauagu

SEQ ID NO: 473578 - RNA, 19 nt, Artificial Sequence
  Description of Artificial Sequence: Synthetic oligonucleotide
  Antisense Strand to SEQ ID NO: 473577
acuauucagcucuaauaaa

SEQ ID NO: 473579 - RNA, 19 nt, Artificial Sequence
  Description of Artificial Sequence: Synthetic oligonucleotide
  Sense strand starting at position 3436 of SEQ ID NO: 317217
ccgccacgcccgucaaauu

SEQ ID NO: 473580 - RNA, 19 nt, Artificial Sequence
  Description of Artificial Sequence: Synthetic oligonucleotide
  Antisense Strand to SEQ ID NO: 473579
aauuugacgggcguggcgg

SEQ ID NO: 473581 - RNA, 19 nt, Artificial Sequence
  Description of Artificial Sequence: Synthetic oligonucleotide
  Sense strand starting at position 3589 of SEQ ID NO: 317217
ccuguccggccuguuauua

SEQ ID NO: 473582 - RNA, 19 nt, Artificial Sequence
  Description of Artificial Sequence: Synthetic oligonucleotide
  Antisense Strand to SEQ ID NO: 473581
uaauaacaggccggacagg

SEQ ID NO: 473583 - RNA, 19 nt, Artificial Sequence
  Description of Artificial Sequence: Synthetic oligonucleotide
  Sense strand starting at position 3590 of SEQ ID NO: 317217
cuguccggccuguuauuau

SEQ ID NO: 473584 - RNA, 19 nt, Artificial Sequence
  Description of Artificial Sequence: Synthetic oligonucleotide
  Antisense Strand to SEQ ID NO: 473583
auaauaacaggccggacag

SEQ ID NO: 473585 - RNA, 19 nt, Artificial Sequence
  Description of Artificial Sequence: Synthetic oligonucleotide
  Sense strand starting at position 3612 of SEQ ID NO: 317217
uaugauugauaucucguga

SEQ ID NO: 473586 - RNA, 19 nt, Artificial Sequence
  Description of Artificial Sequence: Synthetic oligonucleotide
  Antisense Strand to SEQ ID NO: 473585
ucacgagauaucaaucaua

SEQ ID NO: 473587 - RNA, 19 nt, Artificial Sequence
  Description of Artificial Sequence: Synthetic oligonucleotide
  Sense strand starting at position 3619 of SEQ ID NO: 317217
gauaucucgugacucccua

SEQ ID NO: 473588 - RNA, 19 nt, Artificial Sequence
  Description of Artificial Sequence: Synthetic oligonucleotide
  Antisense Strand to SEQ ID NO: 473587
uagggagucacgagauauc

SEQ ID NO: 473589 - RNA, 19 nt, Artificial Sequence
  Description of Artificial Sequence: Synthetic oligonucleotide
  Sense strand starting at position 3713 of SEQ ID NO: 317217
cguccuuaacuuugggaaa

SEQ ID NO: 473590 - RNA, 19 nt, Artificial Sequence
  Description of Artificial Sequence: Synthetic oligonucleotide
  Antisense Strand to SEQ ID NO: 473589
uuucccaaaguuaaggacg

SEQ ID NO: 473591 - RNA, 19 nt, Artificial Sequence
  Description of Artificial Sequence: Synthetic oligonucleotide
  Sense strand starting at position 3716 of SEQ ID NO: 317217
ccuuaacuuugggaaauaa

SEQ ID NO: 473592 - RNA, 19 nt, Artificial Sequence
  Description of Artificial Sequence: Synthetic oligonucleotide
  Antisense Strand to SEQ ID NO: 473591
uuauuucccaaaguuaagg

SEQ ID NO: 473593 - RNA, 19 nt, Artificial Sequence
  Description of Artificial Sequence: Synthetic oligonucleotide
  Sense strand starting at position 3767 of SEQ ID NO: 317217
cucgauugacauugauaag

SEQ ID NO: 473594 - RNA, 19 nt, Artificial Sequence
  Description of Artificial Sequence: Synthetic oligonucleotide
  Antisense Strand to SEQ ID NO: 473593
cuuaucaaugucaaucgag

SEQ ID NO: 473595 - RNA, 19 nt, Artificial Sequence
  Description of Artificial Sequence: Synthetic oligonucleotide
  Sense strand starting at position 3791 of SEQ ID NO: 317217
agagauccucagugaaggu

SEQ ID NO: 473596 - RNA, 19 nt, Artificial Sequence
  Description of Artificial Sequence: Synthetic oligonucleotide
  Antisense Strand to SEQ ID NO: 473595
accuucacugaggaucucu

SEQ ID NO: 473597 - RNA, 19 nt, Artificial Sequence
  Description of Artificial Sequence: Synthetic oligonucleotide
  Sense strand starting at position 3820 of SEQ ID NO: 317217
gcagcaguucgccuauuga

SEQ ID NO: 473598 - RNA, 19 nt, Artificial Sequence
  Description of Artificial Sequence: Synthetic oligonucleotide
  Antisense Strand to SEQ ID NO: 473597
ucaauaggcgaacugcugc

SEQ ID NO: 473599 - RNA, 19 nt, Artificial Sequence
  Description of Artificial Sequence: Synthetic oligonucleotide
  Sense strand starting at position 3831 of SEQ ID NO: 317217
ccuauugauccucgguauu

SEQ ID NO: 473600 - RNA, 19 nt, Artificial Sequence
  Description of Artificial Sequence: Synthetic oligonucleotide
  Antisense Strand to SEQ ID NO: 473599
aauaccgaggaucaauagg

SEQ ID NO: 473601 - RNA, 19 nt, Artificial Sequence
  Description of Artificial Sequence: Synthetic oligonucleotide
  Sense strand starting at position 3876 of SEQ ID NO: 317217
guaggaugauugcugaaau

SEQ ID NO: 473602 - RNA, 19 nt, Artificial Sequence
  Description of Artificial Sequence: Synthetic oligonucleotide
  Antisense Strand to SEQ ID NO: 473601
auuucagcaaucauccuac

SEQ ID NO: 473603 - RNA, 19 nt, Artificial Sequence
  Description of Artificial Sequence: Synthetic oligonucleotide
  Sense strand starting at position 3886 of SEQ ID NO: 317217
ugcugaaaucugggaccuu

SEQ ID NO: 473604 - RNA, 19 nt, Artificial Sequence
  Description of Artificial Sequence: Synthetic oligonucleotide
  Antisense Strand to SEQ ID NO: 473603
aaggucccagauuucagca

SEQ ID NO: 473605 - RNA, 19 nt, Artificial Sequence
  Description of Artificial Sequence: Synthetic oligonucleotide
  Sense strand starting at position 174 of SEQ ID NO: 317218
uggauaagcuauucccaac

SEQ ID NO: 473606 - RNA, 19 nt, Artificial Sequence
  Description of Artificial Sequence: Synthetic oligonucleotide
  Antisense Strand to SEQ ID NO: 473605
guugggaauagcuuaucca

SEQ ID NO: 473607 - RNA, 19 nt, Artificial Sequence
  Description of Artificial Sequence: Synthetic oligonucleotide
  Sense strand starting at position 704 of SEQ ID NO: 317218
uuucgaaagcacuaagucu

SEQ ID NO: 473608 - RNA, 19 nt, Artificial Sequence
  Description of Artificial Sequence: Synthetic oligonucleotide
  Antisense Strand to SEQ ID NO: 473607
agacuuagugcuuucgaaa

SEQ ID NO: 473609 - RNA, 19 nt, Artificial Sequence
  Description of Artificial Sequence: Synthetic oligonucleotide
  Sense strand starting at position 859 of SEQ ID NO: 317218
uuugguguuuaugcgauuu

SEQ ID NO: 473610 - RNA, 19 nt, Artificial Sequence
  Description of Artificial Sequence: Synthetic oligonucleotide
  Antisense Strand to SEQ ID NO: 473609
aaaucgcauaaacaccaaa

SEQ ID NO: 473611 - RNA, 19 nt, Artificial Sequence
  Description of Artificial Sequence: Synthetic oligonucleotide
  Sense strand starting at position 865 of SEQ ID NO: 317218
guuuaugcgauuuguaaua

SEQ ID NO: 473612 - RNA, 19 nt, Artificial Sequence
  Description of Artificial Sequence: Synthetic oligonucleotide
  Antisense Strand to SEQ ID NO: 473611
uauuacaaaucgcauaaac

SEQ ID NO: 473613 - RNA, 19 nt, Artificial Sequence
  Description of Artificial Sequence: Synthetic oligonucleotide
  Sense strand starting at position 878 of SEQ ID NO: 317218
guaauacuagcguuagugu

SEQ ID NO: 473614 - RNA, 19 nt, Artificial Sequence
  Description of Artificial Sequence: Synthetic oligonucleotide
  Antisense Strand to SEQ ID NO: 473613
acacuaacgcuaguauuac

SEQ ID NO: 473615 - RNA, 19 nt, Artificial Sequence
  Description of Artificial Sequence: Synthetic oligonucleotide
  Sense strand starting at position 886 of SEQ ID NO: 317218
agcguuaguguugucaaua

SEQ ID NO: 473616 - RNA, 19 nt, Artificial Sequence
  Description of Artificial Sequence: Synthetic oligonucleotide
  Antisense Strand to SEQ ID NO: 473615
uauugacaacacuaacgcu

SEQ ID NO: 473617 - RNA, 19 nt, Artificial Sequence
  Description of Artificial Sequence: Synthetic oligonucleotide
  Sense strand starting at position 1012 of SEQ ID NO: 317218
acagcugaauugcuuaaga

SEQ ID NO: 473618 - RNA, 19 nt, Artificial Sequence
  Description of Artificial Sequence: Synthetic oligonucleotide
  Antisense Strand to SEQ ID NO: 473617
ucuuaagcaauucagcugu

SEQ ID NO: 473619 - RNA, 19 nt, Artificial Sequence
  Description of Artificial Sequence: Synthetic oligonucleotide
  Sense strand starting at position 1014 of SEQ ID NO: 317218
agcugaauugcuuaagauu

SEQ ID NO: 473620 - RNA, 19 nt, Artificial Sequence
  Description of Artificial Sequence: Synthetic oligonucleotide
  Antisense Strand to SEQ ID NO: 473619
aaucuuaagcaauucagcu

SEQ ID NO: 473621 - RNA, 19 nt, Artificial Sequence
  Description of Artificial Sequence: Synthetic oligonucleotide
  Sense strand starting at position 1038 of SEQ ID NO: 317218
gcaccaguuguacaagaca

SEQ ID NO: 473622 - RNA, 19 nt, Artificial Sequence
  Description of Artificial Sequence: Synthetic oligonucleotide
  Antisense Strand to SEQ ID NO: 473621
ugucuuguacaacuggugc

SEQ ID NO: 473623 - RNA, 19 nt, Artificial Sequence
  Description of Artificial Sequence: Synthetic oligonucleotide
  Sense strand starting at position 1246 of SEQ ID NO: 317218
ggcugaggcgggaguucua

SEQ ID NO: 473624 - RNA, 19 nt, Artificial Sequence
  Description of Artificial Sequence: Synthetic oligonucleotide
  Antisense Strand to SEQ ID NO: 473623
uagaacucccgccucagcc

SEQ ID NO: 473625 - RNA, 19 nt, Artificial Sequence
  Description of Artificial Sequence: Synthetic oligonucleotide
  Sense strand starting at position 2090 of SEQ ID NO: 317218
ucaucuauaguccggagga

SEQ ID NO: 473626 - RNA, 19 nt, Artificial Sequence
  Description of Artificial Sequence: Synthetic oligonucleotide
  Antisense Strand to SEQ ID NO: 473625
uccuccggacuauagauga

SEQ ID NO: 473627 - RNA, 19 nt, Artificial Sequence
  Description of Artificial Sequence: Synthetic oligonucleotide
  Sense strand starting at position 2254 of SEQ ID NO: 317218
gggaguuaggcuuggaccu

SEQ ID NO: 473628 - RNA, 19 nt, Artificial Sequence
  Description of Artificial Sequence: Synthetic oligonucleotide
  Antisense Strand to SEQ ID NO: 473627
agguccaagccuaacuccc

SEQ ID NO: 473629 - RNA, 19 nt, Artificial Sequence
  Description of Artificial Sequence: Synthetic oligonucleotide
  Sense strand starting at position 2255 of SEQ ID NO: 317218
ggaguuaggcuuggaccua

SEQ ID NO: 473630 - RNA, 19 nt, Artificial Sequence
  Description of Artificial Sequence: Synthetic oligonucleotide
  Antisense Strand to SEQ ID NO: 473629
uagguccaagccuaacucc

SEQ ID NO: 473631 - RNA, 19 nt, Artificial Sequence
  Description of Artificial Sequence: Synthetic oligonucleotide
  Sense strand starting at position 2311 of SEQ ID NO: 317218
auguauuguaccgaaugua

SEQ ID NO: 473632 - RNA, 19 nt, Artificial Sequence
  Description of Artificial Sequence: Synthetic oligonucleotide
  Antisense Strand to SEQ ID NO: 473631
uacauucgguacaauacau

SEQ ID NO: 473633 - RNA, 19 nt, Artificial Sequence
  Description of Artificial Sequence: Synthetic oligonucleotide
  Sense strand starting at position 2326 of SEQ ID NO: 317218
uguauugucauggauguau

SEQ ID NO: 473634 - RNA, 19 nt, Artificial Sequence
  Description of Artificial Sequence: Synthetic oligonucleotide
  Antisense Strand to SEQ ID NO: 473633
auacauccaugacaauaca

SEQ ID NO: 473635 - RNA, 19 nt, Artificial Sequence
  Description of Artificial Sequence: Synthetic oligonucleotide
  Sense strand starting at position 2343 of SEQ ID NO: 317218
auugaaagcgcucauuugu

SEQ ID NO: 473636 - RNA, 19 nt, Artificial Sequence
  Description of Artificial Sequence: Synthetic oligonucleotide
  Antisense Strand to SEQ ID NO: 473635
acaaaugagcgcuuucaau

SEQ ID NO: 473637 - RNA, 19 nt, Artificial Sequence
  Description of Artificial Sequence: Synthetic oligonucleotide
  Sense strand starting at position 2497 of SEQ ID NO: 317218
gagacccagucauugugaa

SEQ ID NO: 473638 - RNA, 19 nt, Artificial Sequence
  Description of Artificial Sequence: Synthetic oligonucleotide
  Antisense Strand to SEQ ID NO: 473637
uucacaaugacugggucuc

SEQ ID NO: 473639 - RNA, 19 nt, Artificial Sequence
  Description of Artificial Sequence: Synthetic oligonucleotide
  Sense strand starting at position 2509 of SEQ ID NO: 317218
uugugaaguauuugcguaa

SEQ ID NO: 473640 - RNA, 19 nt, Artificial Sequence
  Description of Artificial Sequence: Synthetic oligonucleotide
  Antisense Strand to SEQ ID NO: 473639
uuacgcaaauacuucacaa

SEQ ID NO: 473641 - RNA, 19 nt, Artificial Sequence
  Description of Artificial Sequence: Synthetic oligonucleotide
  Sense strand starting at position 2510 of SEQ ID NO: 317218
ugugaaguauuugcguaau

SEQ ID NO: 473642 - RNA, 19 nt, Artificial Sequence
  Description of Artificial Sequence: Synthetic oligonucleotide
  Antisense Strand to SEQ ID NO: 473641
auuacgcaaauacuucaca

SEQ ID NO: 473643 - RNA, 19 nt, Artificial Sequence
  Description of Artificial Sequence: Synthetic oligonucleotide
  Sense strand starting at position 2512 of SEQ ID NO: 317218
ugaaguauuugcguaauaa

SEQ ID NO: 473644 - RNA, 19 nt, Artificial Sequence
  Description of Artificial Sequence: Synthetic oligonucleotide
  Antisense Strand to SEQ ID NO: 473643
uuauuacgcaaauacuuca

SEQ ID NO: 473645 - RNA, 19 nt, Artificial Sequence
  Description of Artificial Sequence: Synthetic oligonucleotide
  Sense strand starting at position 2629 of SEQ ID NO: 317218
caaugagugggugauccau

SEQ ID NO: 473646 - RNA, 19 nt, Artificial Sequence
  Description of Artificial Sequence: Synthetic oligonucleotide
  Antisense Strand to SEQ ID NO: 473645
auggaucacccacucauug

SEQ ID NO: 473647 - RNA, 19 nt, Artificial Sequence
  Description of Artificial Sequence: Synthetic oligonucleotide
  Sense strand starting at position 2684 of SEQ ID NO: 317218
ccaagaaagugaccauguu

SEQ ID NO: 473648 - RNA, 19 nt, Artificial Sequence
  Description of Artificial Sequence: Synthetic oligonucleotide
  Antisense Strand to SEQ ID NO: 473647
aacauggucacuuucuugg

SEQ ID NO: 473649 - RNA, 19 nt, Artificial Sequence
  Description of Artificial Sequence: Synthetic oligonucleotide
  Sense strand starting at position 2710 of SEQ ID NO: 317218
uuucuuacaguguaguaga

SEQ ID NO: 473650 - RNA, 19 nt, Artificial Sequence
  Description of Artificial Sequence: Synthetic oligonucleotide
  Antisense Strand to SEQ ID NO: 473649
ucuacuacacuguaagaaa

SEQ ID NO: 473651 - RNA, 19 nt, Artificial Sequence
  Description of Artificial Sequence: Synthetic oligonucleotide
  Sense strand starting at position 2772 of SEQ ID NO: 317218
acaauuaguagcuggauga

SEQ ID NO: 473652 - RNA, 19 nt, Artificial Sequence
  Description of Artificial Sequence: Synthetic oligonucleotide
  Antisense Strand to SEQ ID NO: 473651
ucauccagcuacuaauugu

SEQ ID NO: 473653 - RNA, 19 nt, Artificial Sequence
  Description of Artificial Sequence: Synthetic oligonucleotide
  Sense strand starting at position 2782 of SEQ ID NO: 317218
gcuggaugacuuuggcaaa

SEQ ID NO: 473654 - RNA, 19 nt, Artificial Sequence
  Description of Artificial Sequence: Synthetic oligonucleotide
  Antisense Strand to SEQ ID NO: 473653
uuugccaaagucauccagc

SEQ ID NO: 473655 - RNA, 19 nt, Artificial Sequence
  Description of Artificial Sequence: Synthetic oligonucleotide
  Sense strand starting at position 2856 of SEQ ID NO: 317218
guagguagggcauaaaugu

SEQ ID NO: 473656 - RNA, 19 nt, Artificial Sequence
  Description of Artificial Sequence: Synthetic oligonucleotide
  Antisense Strand to SEQ ID NO: 473655
acauuuaugcccuaccuac

SEQ ID NO: 473657 - RNA, 19 nt, Artificial Sequence
  Description of Artificial Sequence: Synthetic oligonucleotide
  Sense strand starting at position 2878 of SEQ ID NO: 317218
ugugcauucgaagaacauu

SEQ ID NO: 473658 - RNA, 19 nt, Artificial Sequence
  Description of Artificial Sequence: Synthetic oligonucleotide
  Antisense Strand to SEQ ID NO: 473657
aauguucuucgaaugcaca

SEQ ID NO: 473659 - RNA, 19 nt, Artificial Sequence
  Description of Artificial Sequence: Synthetic oligonucleotide
  Sense strand starting at position 3163 of SEQ ID NO: 317218
cugacaaauguuuauaugu

SEQ ID NO: 473660 - RNA, 19 nt, Artificial Sequence
  Description of Artificial Sequence: Synthetic oligonucleotide
  Antisense Strand to SEQ ID NO: 473659
acauauaaacauuugucag

SEQ ID NO: 473661 - RNA, 19 nt, Artificial Sequence
  Description of Artificial Sequence: Synthetic oligonucleotide
  Sense strand starting at position 3285 of SEQ ID NO: 317218
agguuaauguaguuuauag

SEQ ID NO: 473662 - RNA, 19 nt, Artificial Sequence
  Description of Artificial Sequence: Synthetic oligonucleotide
  Antisense Strand to SEQ ID NO: 473661
cuauaaacuacauuaaccu

SEQ ID NO: 473663 - RNA, 19 nt, Artificial Sequence
  Description of Artificial Sequence: Synthetic oligonucleotide
  Sense strand starting at position 3287 of SEQ ID NO: 317218
guuaauguaguuuauagga

SEQ ID NO: 473664 - RNA, 19 nt, Artificial Sequence
  Description of Artificial Sequence: Synthetic oligonucleotide
  Antisense Strand to SEQ ID NO: 473663
uccuauaaacuacauuaac

SEQ ID NO: 473665 - RNA, 19 nt, Artificial Sequence
  Description of Artificial Sequence: Synthetic oligonucleotide
  Sense strand starting at position 3348 of SEQ ID NO: 317218
uaaugaaagucucugguug

SEQ ID NO: 473666 - RNA, 19 nt, Artificial Sequence
  Description of Artificial Sequence: Synthetic oligonucleotide
  Antisense Strand to SEQ ID NO: 473665
caaccagagacuuucauua

SEQ ID NO: 473667 - RNA, 19 nt, Artificial Sequence
  Description of Artificial Sequence: Synthetic oligonucleotide
  Sense strand starting at position 3406 of SEQ ID NO: 317218
auaacuuuccguuauuaga

SEQ ID NO: 473668 - RNA, 19 nt, Artificial Sequence
  Description of Artificial Sequence: Synthetic oligonucleotide
  Antisense Strand to SEQ ID NO: 473667
ucuaauaacggaaaguuau

SEQ ID NO: 473669 - RNA, 19 nt, Artificial Sequence
  Description of Artificial Sequence: Synthetic oligonucleotide
  Sense strand starting at position 3448 of SEQ ID NO: 317218
ggcaguuaucgggacauac

SEQ ID NO: 473670 - RNA, 19 nt, Artificial Sequence
  Description of Artificial Sequence: Synthetic oligonucleotide
  Antisense Strand to SEQ ID NO: 473669
guaugucccgauaacugcc

SEQ ID NO: 473671 - RNA, 19 nt, Artificial Sequence
  Description of Artificial Sequence: Synthetic oligonucleotide
  Sense strand starting at position 3583 of SEQ ID NO: 317218
gggugagcuguaggaaaga

SEQ ID NO: 473672 - RNA, 19 nt, Artificial Sequence
  Description of Artificial Sequence: Synthetic oligonucleotide
  Antisense Strand to SEQ ID NO: 473671
ucuuuccuacagcucaccc

SEQ ID NO: 473673 - RNA, 19 nt, Artificial Sequence
  Description of Artificial Sequence: Synthetic oligonucleotide
  Sense strand starting at position 3599 of SEQ ID NO: 317218
agauaaguuucugcuuaag

SEQ ID NO: 473674 - RNA, 19 nt, Artificial Sequence
  Description of Artificial Sequence: Synthetic oligonucleotide
  Antisense Strand to SEQ ID NO: 473673
cuuaagcagaaacuuaucu

SEQ ID NO: 473675 - RNA, 19 nt, Artificial Sequence
  Description of Artificial Sequence: Synthetic oligonucleotide
  Sense strand starting at position 3601 of SEQ ID NO: 317218
auaaguuucugcuuaagga

SEQ ID NO: 473676 - RNA, 19 nt, Artificial Sequence
  Description of Artificial Sequence: Synthetic oligonucleotide
  Antisense Strand to SEQ ID NO: 473675
uccuuaagcagaaacuuau

SEQ ID NO: 473677 - RNA, 19 nt, Artificial Sequence
  Description of Artificial Sequence: Synthetic oligonucleotide
  Sense strand starting at position 3602 of SEQ ID NO: 317218
uaaguuucugcuuaaggag

SEQ ID NO: 473678 - RNA, 19 nt, Artificial Sequence
  Description of Artificial Sequence: Synthetic oligonucleotide
  Antisense Strand to SEQ ID NO: 473677
cuccuuaagcagaaacuua

SEQ ID NO: 473679 - RNA, 19 nt, Artificial Sequence
  Description of Artificial Sequence: Synthetic oligonucleotide
  Sense strand starting at position 3716 of SEQ ID NO: 317218
gcugacagaucucuaucaa

SEQ ID NO: 473680 - RNA, 19 nt, Artificial Sequence
  Description of Artificial Sequence: Synthetic oligonucleotide
  Antisense Strand to SEQ ID NO: 473679
uugauagagaucugucagc

SEQ ID NO: 473681 - RNA, 19 nt, Artificial Sequence
  Description of Artificial Sequence: Synthetic oligonucleotide
  Sense strand starting at position 3922 of SEQ ID NO: 317218
ucaccauguguguauuaag

SEQ ID NO: 473682 - RNA, 19 nt, Artificial Sequence
  Description of Artificial Sequence: Synthetic oligonucleotide
  Antisense Strand to SEQ ID NO: 473681
cuuaauacacacaugguga

SEQ ID NO: 473683 - RNA, 19 nt, Artificial Sequence
  Description of Artificial Sequence: Synthetic oligonucleotide
  Sense strand starting at position 3956 of SEQ ID NO: 317218
gcaauaugucccuaaauag

SEQ ID NO: 473684 - RNA, 19 nt, Artificial Sequence
  Description of Artificial Sequence: Synthetic oligonucleotide
  Antisense Strand to SEQ ID NO: 473683
cuauuuagggacauauugc

SEQ ID NO: 473685 - RNA, 19 nt, Artificial Sequence
  Description of Artificial Sequence: Synthetic oligonucleotide
  Sense strand starting at position 132 of SEQ ID NO: 317219
gcgguuccucuggaaagug

SEQ ID NO: 473686 - RNA, 19 nt, Artificial Sequence
  Description of Artificial Sequence: Synthetic oligonucleotide
  Antisense Strand to SEQ ID NO: 473685
cacuuuccagaggaaccgc

SEQ ID NO: 473687 - RNA, 19 nt, Artificial Sequence
  Description of Artificial Sequence: Synthetic oligonucleotide
  Sense strand starting at position 643 of SEQ ID NO: 317219
cucagauuuccaugcgguu

SEQ ID NO: 473688 - RNA, 19 nt, Artificial Sequence
  Description of Artificial Sequence: Synthetic oligonucleotide
  Antisense Strand to SEQ ID NO: 473687
aaccgcauggaaaucugag

SEQ ID NO: 473689 - RNA, 19 nt, Artificial Sequence
  Description of Artificial Sequence: Synthetic oligonucleotide
  Sense strand starting at position 754 of SEQ ID NO: 317219
gggcauuucugagugguuu

SEQ ID NO: 473690 - RNA, 19 nt, Artificial Sequence
  Description of Artificial Sequence: Synthetic oligonucleotide
  Antisense Strand to SEQ ID NO: 473689
aaaccacucagaaaugccc

SEQ ID NO: 473691 - RNA, 19 nt, Artificial Sequence
  Description of Artificial Sequence: Synthetic oligonucleotide
  Sense strand starting at position 755 of SEQ ID NO: 317219
ggcauuucugagugguuuc

SEQ ID NO: 473692 - RNA, 19 nt, Artificial Sequence
  Description of Artificial Sequence: Synthetic oligonucleotide
  Antisense Strand to SEQ ID NO: 473691
gaaaccacucagaaaugcc

SEQ ID NO: 473693 - RNA, 19 nt, Artificial Sequence
  Description of Artificial Sequence: Synthetic oligonucleotide
  Sense strand starting at position 847 of SEQ ID NO: 317219
cucugaagguccucgaauc

SEQ ID NO: 473694 - RNA, 19 nt, Artificial Sequence
  Description of Artificial Sequence: Synthetic oligonucleotide
  Antisense Strand to SEQ ID NO: 473693
gauucgaggaccuucagag

SEQ ID NO: 473695 - RNA, 19 nt, Artificial Sequence
  Description of Artificial Sequence: Synthetic oligonucleotide
  Sense strand starting at position 848 of SEQ ID NO: 317219
ucugaagguccucgaauca

SEQ ID NO: 473696 - RNA, 19 nt, Artificial Sequence
  Description of Artificial Sequence: Synthetic oligonucleotide
  Antisense Strand to SEQ ID NO: 473695
ugauucgaggaccuucaga

SEQ ID NO: 473697 - RNA, 19 nt, Artificial Sequence
  Description of Artificial Sequence: Synthetic oligonucleotide
  Sense strand starting at position 919 of SEQ ID NO: 317219
uagagagggcggcagaauu

SEQ ID NO: 473698 - RNA, 19 nt, Artificial Sequence
  Description of Artificial Sequence: Synthetic oligonucleotide
  Antisense Strand to SEQ ID NO: 473697
aauucugccgcccucucua

SEQ ID NO: 473699 - RNA, 19 nt, Artificial Sequence
  Description of Artificial Sequence: Synthetic oligonucleotide
  Sense strand starting at position 932 of SEQ ID NO: 317219
agaauugcucgcgcccuua

SEQ ID NO: 473700 - RNA, 19 nt, Artificial Sequence
  Description of Artificial Sequence: Synthetic oligonucleotide
  Antisense Strand to SEQ ID NO: 473699
uaagggcgcgagcaauucu

SEQ ID NO: 473701 - RNA, 19 nt, Artificial Sequence
  Description of Artificial Sequence: Synthetic oligonucleotide
  Sense strand starting at position 1796 of SEQ ID NO: 317219
gggacagguaggugauauu

SEQ ID NO: 473702 - RNA, 19 nt, Artificial Sequence
  Description of Artificial Sequence: Synthetic oligonucleotide
  Antisense Strand to SEQ ID NO: 473701
aauaucaccuaccuguccc

SEQ ID NO: 473703 - RNA, 19 nt, Artificial Sequence
  Description of Artificial Sequence: Synthetic oligonucleotide
  Sense strand starting at position 2225 of SEQ ID NO: 317219
aggcaagcucccgggaauu

SEQ ID NO: 473704 - RNA, 19 nt, Artificial Sequence
  Description of Artificial Sequence: Synthetic oligonucleotide
  Antisense Strand to SEQ ID NO: 473703
aauucccgggagcuugccu

SEQ ID NO: 473705 - RNA, 19 nt, Artificial Sequence
  Description of Artificial Sequence: Synthetic oligonucleotide
  Sense strand starting at position 2312 of SEQ ID NO: 317219
agucgaaggcuugggagaa

SEQ ID NO: 473706 - RNA, 19 nt, Artificial Sequence
  Description of Artificial Sequence: Synthetic oligonucleotide
  Antisense Strand to SEQ ID NO: 473705
uucucccaagccuucgacu

SEQ ID NO: 473707 - RNA, 19 nt, Artificial Sequence
  Description of Artificial Sequence: Synthetic oligonucleotide
  Sense strand starting at position 2335 of SEQ ID NO: 317219
guggaauggucaagaagag

SEQ ID NO: 473708 - RNA, 19 nt, Artificial Sequence
  Description of Artificial Sequence: Synthetic oligonucleotide
  Antisense Strand to SEQ ID NO: 473707
cucuucuugaccauuccac

SEQ ID NO: 473709 - RNA, 19 nt, Artificial Sequence
  Description of Artificial Sequence: Synthetic oligonucleotide
  Sense strand starting at position 2517 of SEQ ID NO: 317219
gugaaugcugcgcuaaucu

SEQ ID NO: 473710 - RNA, 19 nt, Artificial Sequence
  Description of Artificial Sequence: Synthetic oligonucleotide
  Antisense Strand to SEQ ID NO: 473709
agauuagcgcagcauucac

SEQ ID NO: 473711 - RNA, 19 nt, Artificial Sequence
  Description of Artificial Sequence: Synthetic oligonucleotide
  Sense strand starting at position 2527 of SEQ ID NO: 317219
cgcuaaucugaagaagcuu

SEQ ID NO: 473712 - RNA, 19 nt, Artificial Sequence
  Description of Artificial Sequence: Synthetic oligonucleotide
  Antisense Strand to SEQ ID NO: 473711
aagcuucuucagauuagcg

SEQ ID NO: 473713 - RNA, 19 nt, Artificial Sequence
  Description of Artificial Sequence: Synthetic oligonucleotide
  Sense strand starting at position 2602 of SEQ ID NO: 317219
agcaaauggacccgucaaa

SEQ ID NO: 473714 - RNA, 19 nt, Artificial Sequence
  Description of Artificial Sequence: Synthetic oligonucleotide
  Antisense Strand to SEQ ID NO: 473713
uuugacggguccauuugcu

SEQ ID NO: 473715 - RNA, 19 nt, Artificial Sequence
  Description of Artificial Sequence: Synthetic oligonucleotide
  Sense strand starting at position 2708 of SEQ ID NO: 317219
cucugugaugcuuauuagu

SEQ ID NO: 473716 - RNA, 19 nt, Artificial Sequence
  Description of Artificial Sequence: Synthetic oligonucleotide
  Antisense Strand to SEQ ID NO: 473715
acuaauaagcaucacagag

SEQ ID NO: 473717 - RNA, 19 nt, Artificial Sequence
  Description of Artificial Sequence: Synthetic oligonucleotide
  Sense strand starting at position 2782 of SEQ ID NO: 317219
gcugaaagcuuauccauuc

SEQ ID NO: 473718 - RNA, 19 nt, Artificial Sequence
  Description of Artificial Sequence: Synthetic oligonucleotide
  Antisense Strand to SEQ ID NO: 473717
gaauggauaagcuuucagc

SEQ ID NO: 473719 - RNA, 19 nt, Artificial Sequence
  Description of Artificial Sequence: Synthetic oligonucleotide
  Sense strand starting at position 2799 of SEQ ID NO: 317219
ucuacuuaacguugauuaa

SEQ ID NO: 473720 - RNA, 19 nt, Artificial Sequence
  Description of Artificial Sequence: Synthetic oligonucleotide
  Antisense Strand to SEQ ID NO: 473719
uuaaucaacguuaaguaga

SEQ ID NO: 473721 - RNA, 19 nt, Artificial Sequence
  Description of Artificial Sequence: Synthetic oligonucleotide
  Sense strand starting at position 2800 of SEQ ID NO: 317219
cuacuuaacguugauuaag

SEQ ID NO: 473722 - RNA, 19 nt, Artificial Sequence
  Description of Artificial Sequence: Synthetic oligonucleotide
  Antisense Strand to SEQ ID NO: 473721
cuuaaucaacguuaaguag

SEQ ID NO: 473723 - RNA, 19 nt, Artificial Sequence
  Description of Artificial Sequence: Synthetic oligonucleotide
  Sense strand starting at position 2803 of SEQ ID NO: 317219
cuuaacguugauuaagaca

SEQ ID NO: 473724 - RNA, 19 nt, Artificial Sequence
  Description of Artificial Sequence: Synthetic oligonucleotide
  Antisense Strand to SEQ ID NO: 473723
ugucuuaaucaacguuaag

SEQ ID NO: 473725 - RNA, 19 nt, Artificial Sequence
  Description of Artificial Sequence: Synthetic oligonucleotide
  Sense strand starting at position 2844 of SEQ ID NO: 317219
ccuuguacacuguauuaag

SEQ ID NO: 473726 - RNA, 19 nt, Artificial Sequence
  Description of Artificial Sequence: Synthetic oligonucleotide
  Antisense Strand to SEQ ID NO: 473725
cuuaauacaguguacaagg

SEQ ID NO: 473727 - RNA, 19 nt, Artificial Sequence
  Description of Artificial Sequence: Synthetic oligonucleotide
  Sense strand starting at position 2934 of SEQ ID NO: 317219
auccauaaagccuguagaa

SEQ ID NO: 473728 - RNA, 19 nt, Artificial Sequence
  Description of Artificial Sequence: Synthetic oligonucleotide
  Antisense Strand to SEQ ID NO: 473727
uucuacaggcuuuauggau

SEQ ID NO: 473729 - RNA, 19 nt, Artificial Sequence
  Description of Artificial Sequence: Synthetic oligonucleotide
  Sense strand starting at position 2936 of SEQ ID NO: 317219
ccauaaagccuguagaauc

SEQ ID NO: 473730 - RNA, 19 nt, Artificial Sequence
  Description of Artificial Sequence: Synthetic oligonucleotide
  Antisense Strand to SEQ ID NO: 473729
gauucuacaggcuuuaugg

SEQ ID NO: 473731 - RNA, 19 nt, Artificial Sequence
  Description of Artificial Sequence: Synthetic oligonucleotide
  Sense strand starting at position 3008 of SEQ ID NO: 317219
uuaagaauguugccaaaua

SEQ ID NO: 473732 - RNA, 19 nt, Artificial Sequence
  Description of Artificial Sequence: Synthetic oligonucleotide
  Antisense Strand to SEQ ID NO: 473731
uauuuggcaacauucuuaa

SEQ ID NO: 473733 - RNA, 19 nt, Artificial Sequence
  Description of Artificial Sequence: Synthetic oligonucleotide
  Sense strand starting at position 3382 of SEQ ID NO: 317219
uuacuauggaguuaguguu

SEQ ID NO: 473734 - RNA, 19 nt, Artificial Sequence
  Description of Artificial Sequence: Synthetic oligonucleotide
  Antisense Strand to SEQ ID NO: 473733
aacacuaacuccauaguaa

SEQ ID NO: 473735 - RNA, 19 nt, Artificial Sequence
  Description of Artificial Sequence: Synthetic oligonucleotide
  Sense strand starting at position 3390 of SEQ ID NO: 317219
gaguuaguguuaucaucuc

SEQ ID NO: 473736 - RNA, 19 nt, Artificial Sequence
  Description of Artificial Sequence: Synthetic oligonucleotide
  Antisense Strand to SEQ ID NO: 473735
gagaugauaacacuaacuc

SEQ ID NO: 473737 - RNA, 19 nt, Artificial Sequence
  Description of Artificial Sequence: Synthetic oligonucleotide
  Sense strand starting at position 3396 of SEQ ID NO: 317219
guguuaucaucucugaaug

SEQ ID NO: 473738 - RNA, 19 nt, Artificial Sequence
  Description of Artificial Sequence: Synthetic oligonucleotide
  Antisense Strand to SEQ ID NO: 473737
cauucagagaugauaacac

SEQ ID NO: 473739 - RNA, 19 nt, Artificial Sequence
  Description of Artificial Sequence: Synthetic oligonucleotide
  Sense strand starting at position 3397 of SEQ ID NO: 317219
uguuaucaucucugaaugu

SEQ ID NO: 473740 - RNA, 19 nt, Artificial Sequence
  Description of Artificial Sequence: Synthetic oligonucleotide
  Antisense Strand to SEQ ID NO: 473739
acauucagagaugauaaca

SEQ ID NO: 473741 - RNA, 19 nt, Artificial Sequence
  Description of Artificial Sequence: Synthetic oligonucleotide
  Sense strand starting at position 3401 of SEQ ID NO: 317219
aucaucucugaauguguau

SEQ ID NO: 473742 - RNA, 19 nt, Artificial Sequence
  Description of Artificial Sequence: Synthetic oligonucleotide
  Antisense Strand to SEQ ID NO: 473741
auacacauucagagaugau

SEQ ID NO: 473743 - RNA, 19 nt, Artificial Sequence
  Description of Artificial Sequence: Synthetic oligonucleotide
  Sense strand starting at position 3412 of SEQ ID NO: 317219
auguguauuuguuugacau

SEQ ID NO: 473744 - RNA, 19 nt, Artificial Sequence
  Description of Artificial Sequence: Synthetic oligonucleotide
  Antisense Strand to SEQ ID NO: 473743
augucaaacaaauacacau

SEQ ID NO: 473745 - RNA, 19 nt, Artificial Sequence
  Description of Artificial Sequence: Synthetic oligonucleotide
  Sense strand starting at position 3413 of SEQ ID NO: 317219
uguguauuuguuugacauu

SEQ ID NO: 473746 - RNA, 19 nt, Artificial Sequence
  Description of Artificial Sequence: Synthetic oligonucleotide
  Antisense Strand to SEQ ID NO: 473745
aaugucaaacaaauacaca

SEQ ID NO: 473747 - RNA, 19 nt, Artificial Sequence
  Description of Artificial Sequence: Synthetic oligonucleotide
  Sense strand starting at position 3502 of SEQ ID NO: 317219
uugggaaacuuauucgaug

SEQ ID NO: 473748 - RNA, 19 nt, Artificial Sequence
  Description of Artificial Sequence: Synthetic oligonucleotide
  Antisense Strand to SEQ ID NO: 473747
caucgaauaaguuucccaa

SEQ ID NO: 473749 - RNA, 19 nt, Artificial Sequence
  Description of Artificial Sequence: Synthetic oligonucleotide
  Sense strand starting at position 3503 of SEQ ID NO: 317219
ugggaaacuuauucgaugu

SEQ ID NO: 473750 - RNA, 19 nt, Artificial Sequence
  Description of Artificial Sequence: Synthetic oligonucleotide
  Antisense Strand to SEQ ID NO: 473749
acaucgaauaaguuuccca

SEQ ID NO: 473751 - RNA, 19 nt, Artificial Sequence
  Description of Artificial Sequence: Synthetic oligonucleotide
  Sense strand starting at position 3504 of SEQ ID NO: 317219
gggaaacuuauucgaugug

SEQ ID NO: 473752 - RNA, 19 nt, Artificial Sequence
  Description of Artificial Sequence: Synthetic oligonucleotide
  Antisense Strand to SEQ ID NO: 473751
cacaucgaauaaguuuccc

SEQ ID NO: 473753 - RNA, 19 nt, Artificial Sequence
  Description of Artificial Sequence: Synthetic oligonucleotide
  Sense strand starting at position 3507 of SEQ ID NO: 317219
aaacuuauucgauguggaa

SEQ ID NO: 473754 - RNA, 19 nt, Artificial Sequence
  Description of Artificial Sequence: Synthetic oligonucleotide
  Antisense Strand to SEQ ID NO: 473753
uuccacaucgaauaaguuu

SEQ ID NO: 473755 - RNA, 19 nt, Artificial Sequence
  Description of Artificial Sequence: Synthetic oligonucleotide
  Sense strand starting at position 3509 of SEQ ID NO: 317219
acuuauucgauguggaaca

SEQ ID NO: 473756 - RNA, 19 nt, Artificial Sequence
  Description of Artificial Sequence: Synthetic oligonucleotide
  Antisense Strand to SEQ ID NO: 473755
uguuccacaucgaauaagu

SEQ ID NO: 473757 - RNA, 19 nt, Artificial Sequence
  Description of Artificial Sequence: Synthetic oligonucleotide
  Sense strand starting at position 3794 of SEQ ID NO: 317219
cagacaccugcucagagua

SEQ ID NO: 473758 - RNA, 19 nt, Artificial Sequence
  Description of Artificial Sequence: Synthetic oligonucleotide
  Antisense Strand to SEQ ID NO: 473757
uacucugagcaggugucug

SEQ ID NO: 473759 - RNA, 19 nt, Artificial Sequence
  Description of Artificial Sequence: Synthetic oligonucleotide
  Sense strand starting at position 3825 of SEQ ID NO: 317219
augugacaggucugcauua

SEQ ID NO: 473760 - RNA, 19 nt, Artificial Sequence
  Description of Artificial Sequence: Synthetic oligonucleotide
  Antisense Strand to SEQ ID NO: 473759
uaaugcagaccugucacau

SEQ ID NO: 473761 - RNA, 19 nt, Artificial Sequence
  Description of Artificial Sequence: Synthetic oligonucleotide
  Sense strand starting at position 3841 of SEQ ID NO: 317219
uuagcugaggcucauacau

SEQ ID NO: 473762 - RNA, 19 nt, Artificial Sequence
  Description of Artificial Sequence: Synthetic oligonucleotide
  Antisense Strand to SEQ ID NO: 473761
auguaugagccucagcuaa

SEQ ID NO: 473763 - RNA, 19 nt, Artificial Sequence
  Description of Artificial Sequence: Synthetic oligonucleotide
  Sense strand starting at position 3919 of SEQ ID NO: 317219
guugguaaagaagguuaaa

SEQ ID NO: 473764 - RNA, 19 nt, Artificial Sequence
  Description of Artificial Sequence: Synthetic oligonucleotide
  Antisense Strand to SEQ ID NO: 473763
uuuaaccuucuuuaccaac

SEQ ID NO: 473765 - RNA, 19 nt, Artificial Sequence
  Description of Artificial Sequence: Synthetic oligonucleotide
  Sense strand starting at position 166 of SEQ ID NO: 317220
uuugaacuaugucuaaaga

SEQ ID NO: 473766 - RNA, 19 nt, Artificial Sequence
  Description of Artificial Sequence: Synthetic oligonucleotide
  Antisense Strand to SEQ ID NO: 473765
ucuuuagacauaguucaaa

SEQ ID NO: 473767 - RNA, 19 nt, Artificial Sequence
  Description of Artificial Sequence: Synthetic oligonucleotide
  Sense strand starting at position 182 of SEQ ID NO: 317220
agauaauagucuuccagua

SEQ ID NO: 473768 - RNA, 19 nt, Artificial Sequence
  Description of Artificial Sequence: Synthetic oligonucleotide
  Antisense Strand to SEQ ID NO: 473767
uacuggaagacuauuaucu

SEQ ID NO: 473769 - RNA, 19 nt, Artificial Sequence
  Description of Artificial Sequence: Synthetic oligonucleotide
  Sense strand starting at position 187 of SEQ ID NO: 317220
auagucuuccaguaaacug

SEQ ID NO: 473770 - RNA, 19 nt, Artificial Sequence
  Description of Artificial Sequence: Synthetic oligonucleotide
  Antisense Strand to SEQ ID NO: 473769
caguuuacuggaagacuau

SEQ ID NO: 473771 - RNA, 19 nt, Artificial Sequence
  Description of Artificial Sequence: Synthetic oligonucleotide
  Sense strand starting at position 194 of SEQ ID NO: 317220
uccaguaaacuggagcauu

SEQ ID NO: 473772 - RNA, 19 nt, Artificial Sequence
  Description of Artificial Sequence: Synthetic oligonucleotide
  Antisense Strand to SEQ ID NO: 473771
aaugcuccaguuuacugga

SEQ ID NO: 473773 - RNA, 19 nt, Artificial Sequence
  Description of Artificial Sequence: Synthetic oligonucleotide
  Sense strand starting at position 385 of SEQ ID NO: 317220
uguugagacaagugacaga

SEQ ID NO: 473774 - RNA, 19 nt, Artificial Sequence
  Description of Artificial Sequence: Synthetic oligonucleotide
  Antisense Strand to SEQ ID NO: 473773
ucugucacuugucucaaca

SEQ ID NO: 473775 - RNA, 19 nt, Artificial Sequence
  Description of Artificial Sequence: Synthetic oligonucleotide
  Sense strand starting at position 599 of SEQ ID NO: 317220
ucuggauuaugaucucaac

SEQ ID NO: 473776 - RNA, 19 nt, Artificial Sequence
  Description of Artificial Sequence: Synthetic oligonucleotide
  Antisense Strand to SEQ ID NO: 473775
guugagaucauaauccaga

SEQ ID NO: 473777 - RNA, 19 nt, Artificial Sequence
  Description of Artificial Sequence: Synthetic oligonucleotide
  Sense strand starting at position 650 of SEQ ID NO: 317220
acaacaagcgaguauguaa

SEQ ID NO: 473778 - RNA, 19 nt, Artificial Sequence
  Description of Artificial Sequence: Synthetic oligonucleotide
  Antisense Strand to SEQ ID NO: 473777
uuacauacucgcuuguugu

SEQ ID NO: 473779 - RNA, 19 nt, Artificial Sequence
  Description of Artificial Sequence: Synthetic oligonucleotide
  Sense strand starting at position 706 of SEQ ID NO: 317220
uauugauuuguuggcuguu

SEQ ID NO: 473780 - RNA, 19 nt, Artificial Sequence
  Description of Artificial Sequence: Synthetic oligonucleotide
  Antisense Strand to SEQ ID NO: 473779
aacagccaacaaaucaaua

SEQ ID NO: 473781 - RNA, 19 nt, Artificial Sequence
  Description of Artificial Sequence: Synthetic oligonucleotide
  Sense strand starting at position 709 of SEQ ID NO: 317220
ugauuuguuggcuguucua

SEQ ID NO: 473782 - RNA, 19 nt, Artificial Sequence
  Description of Artificial Sequence: Synthetic oligonucleotide
  Antisense Strand to SEQ ID NO: 473781
uagaacagccaacaaauca

SEQ ID NO: 473783 - RNA, 19 nt, Artificial Sequence
  Description of Artificial Sequence: Synthetic oligonucleotide
  Sense strand starting at position 761 of SEQ ID NO: 317220
uugucuauucuagagguuu

SEQ ID NO: 473784 - RNA, 19 nt, Artificial Sequence
  Description of Artificial Sequence: Synthetic oligonucleotide
  Antisense Strand to SEQ ID NO: 473783
aaaccucuagaauagacaa

SEQ ID NO: 473785 - RNA, 19 nt, Artificial Sequence
  Description of Artificial Sequence: Synthetic oligonucleotide
  Sense strand starting at position 772 of SEQ ID NO: 317220
agagguuugauccaugccu

SEQ ID NO: 473786 - RNA, 19 nt, Artificial Sequence
  Description of Artificial Sequence: Synthetic oligonucleotide
  Antisense Strand to SEQ ID NO: 473785
aggcauggaucaaaccucu

SEQ ID NO: 473787 - RNA, 19 nt, Artificial Sequence
  Description of Artificial Sequence: Synthetic oligonucleotide
  Sense strand starting at position 868 of SEQ ID NO: 317220
uuacuaugcguugccgauu

SEQ ID NO: 473788 - RNA, 19 nt, Artificial Sequence
  Description of Artificial Sequence: Synthetic oligonucleotide
  Antisense Strand to SEQ ID NO: 473787
aaucggcaacgcauaguaa

SEQ ID NO: 473789 - RNA, 19 nt, Artificial Sequence
  Description of Artificial Sequence: Synthetic oligonucleotide
  Sense strand starting at position 907 of SEQ ID NO: 317220
cgaaauuaguacuuaacca

SEQ ID NO: 473790 - RNA, 19 nt, Artificial Sequence
  Description of Artificial Sequence: Synthetic oligonucleotide
  Antisense Strand to SEQ ID NO: 473789
ugguuaaguacuaauuucg

SEQ ID NO: 473791 - RNA, 19 nt, Artificial Sequence
  Description of Artificial Sequence: Synthetic oligonucleotide
  Sense strand starting at position 953 of SEQ ID NO: 317220
uguauugacucacuaauga

SEQ ID NO: 473792 - RNA, 19 nt, Artificial Sequence
  Description of Artificial Sequence: Synthetic oligonucleotide
  Antisense Strand to SEQ ID NO: 473791
ucauuagugagucaauaca

SEQ ID NO: 473793 - RNA, 19 nt, Artificial Sequence
  Description of Artificial Sequence: Synthetic oligonucleotide
  Sense strand starting at position 1007 of SEQ ID NO: 317220
cuggaaagauuguuaaauc

SEQ ID NO: 473794 - RNA, 19 nt, Artificial Sequence
  Description of Artificial Sequence: Synthetic oligonucleotide
  Antisense Strand to SEQ ID NO: 473793
gauuuaacaaucuuuccag

SEQ ID NO: 473795 - RNA, 19 nt, Artificial Sequence
  Description of Artificial Sequence: Synthetic oligonucleotide
  Sense strand starting at position 1266 of SEQ ID NO: 317220
cguuaaacucuggaagacu

SEQ ID NO: 473796 - RNA, 19 nt, Artificial Sequence
  Description of Artificial Sequence: Synthetic oligonucleotide
  Antisense Strand to SEQ ID NO: 473795
agucuuccagaguuuaacg

SEQ ID NO: 473797 - RNA, 19 nt, Artificial Sequence
  Description of Artificial Sequence: Synthetic oligonucleotide
  Sense strand starting at position 1448 of SEQ ID NO: 317220
uaccuucguccugagaaua

SEQ ID NO: 473798 - RNA, 19 nt, Artificial Sequence
  Description of Artificial Sequence: Synthetic oligonucleotide
  Antisense Strand to SEQ ID NO: 473797
uauucucaggacgaaggua

SEQ ID NO: 473799 - RNA, 19 nt, Artificial Sequence
  Description of Artificial Sequence: Synthetic oligonucleotide
  Sense strand starting at position 2012 of SEQ ID NO: 317220
ggguaucuaacagauguuc

SEQ ID NO: 473800 - RNA, 19 nt, Artificial Sequence
  Description of Artificial Sequence: Synthetic oligonucleotide
  Antisense Strand to SEQ ID NO: 473799
gaacaucuguuagauaccc

SEQ ID NO: 473801 - RNA, 19 nt, Artificial Sequence
  Description of Artificial Sequence: Synthetic oligonucleotide
  Sense strand starting at position 2192 of SEQ ID NO: 317220
aaugaaguagauuggcaua

SEQ ID NO: 473802 - RNA, 19 nt, Artificial Sequence
  Description of Artificial Sequence: Synthetic oligonucleotide
  Antisense Strand to SEQ ID NO: 473801
uaugccaaucuacuucauu

SEQ ID NO: 473803 - RNA, 19 nt, Artificial Sequence
  Description of Artificial Sequence: Synthetic oligonucleotide
  Sense strand starting at position 2194 of SEQ ID NO: 317220
ugaaguagauuggcauaua

SEQ ID NO: 473804 - RNA, 19 nt, Artificial Sequence
  Description of Artificial Sequence: Synthetic oligonucleotide
  Antisense Strand to SEQ ID NO: 473803
uauaugccaaucuacuuca

SEQ ID NO: 473805 - RNA, 19 nt, Artificial Sequence
  Description of Artificial Sequence: Synthetic oligonucleotide
  Sense strand starting at position 2267 of SEQ ID NO: 317220
ugucaucuacauugacaga

SEQ ID NO: 473806 - RNA, 19 nt, Artificial Sequence
  Description of Artificial Sequence: Synthetic oligonucleotide
  Antisense Strand to SEQ ID NO: 473805
ucugucaauguagaugaca

SEQ ID NO: 473807 - RNA, 19 nt, Artificial Sequence
  Description of Artificial Sequence: Synthetic oligonucleotide
  Sense strand starting at position 2278 of SEQ ID NO: 317220
uugacagagucauucuaag

SEQ ID NO: 473808 - RNA, 19 nt, Artificial Sequence
  Description of Artificial Sequence: Synthetic oligonucleotide
  Antisense Strand to SEQ ID NO: 473807
cuuagaaugacucugucaa

SEQ ID NO: 473809 - RNA, 19 nt, Artificial Sequence
  Description of Artificial Sequence: Synthetic oligonucleotide
  Sense strand starting at position 2284 of SEQ ID NO: 317220
gagucauucuaagcagagg

SEQ ID NO: 473810 - RNA, 19 nt, Artificial Sequence
  Description of Artificial Sequence: Synthetic oligonucleotide
  Antisense Strand to SEQ ID NO: 473809
ccucugcuuagaaugacuc

SEQ ID NO: 473811 - RNA, 19 nt, Artificial Sequence
  Description of Artificial Sequence: Synthetic oligonucleotide
  Sense strand starting at position 2305 of SEQ ID NO: 317220
cagagaaaccugcauugug

SEQ ID NO: 473812 - RNA, 19 nt, Artificial Sequence
  Description of Artificial Sequence: Synthetic oligonucleotide
  Antisense Strand to SEQ ID NO: 473811
cacaaugcagguuucucug

SEQ ID NO: 473813 - RNA, 19 nt, Artificial Sequence
  Description of Artificial Sequence: Synthetic oligonucleotide
  Sense strand starting at position 2330 of SEQ ID NO: 317220
cagguaaagccacaguaaa

SEQ ID NO: 473814 - RNA, 19 nt, Artificial Sequence
  Description of Artificial Sequence: Synthetic oligonucleotide
  Antisense Strand to SEQ ID NO: 473813
uuuacuguggcuuuaccug

SEQ ID NO: 473815 - RNA, 19 nt, Artificial Sequence
  Description of Artificial Sequence: Synthetic oligonucleotide
  Sense strand starting at position 2705 of SEQ ID NO: 317220
gauacaucucuugagcuga

SEQ ID NO: 473816 - RNA, 19 nt, Artificial Sequence
  Description of Artificial Sequence: Synthetic oligonucleotide
  Antisense Strand to SEQ ID NO: 473815
ucagcucaagagauguauc

SEQ ID NO: 473817 - RNA, 19 nt, Artificial Sequence
  Description of Artificial Sequence: Synthetic oligonucleotide
  Sense strand starting at position 2730 of SEQ ID NO: 317220
cuguaagugcaggaauaua

SEQ ID NO: 473818 - RNA, 19 nt, Artificial Sequence
  Description of Artificial Sequence: Synthetic oligonucleotide
  Antisense Strand to SEQ ID NO: 473817
uauauuccugcacuuacag

SEQ ID NO: 473819 - RNA, 19 nt, Artificial Sequence
  Description of Artificial Sequence: Synthetic oligonucleotide
  Sense strand starting at position 3123 of SEQ ID NO: 317220
gauaauugguacuuggaau

SEQ ID NO: 473820 - RNA, 19 nt, Artificial Sequence
  Description of Artificial Sequence: Synthetic oligonucleotide
  Antisense Strand to SEQ ID NO: 473819
auuccaaguaccaauuauc

SEQ ID NO: 473821 - RNA, 19 nt, Artificial Sequence
  Description of Artificial Sequence: Synthetic oligonucleotide
  Sense strand starting at position 3166 of SEQ ID NO: 317220
uuauaaagguaccuuguaa

SEQ ID NO: 473822 - RNA, 19 nt, Artificial Sequence
  Description of Artificial Sequence: Synthetic oligonucleotide
  Antisense Strand to SEQ ID NO: 473821
uuacaagguaccuuuauaa

SEQ ID NO: 473823 - RNA, 19 nt, Artificial Sequence
  Description of Artificial Sequence: Synthetic oligonucleotide
  Sense strand starting at position 3178 of SEQ ID NO: 317220
cuuguaaacuuucuuggaa

SEQ ID NO: 473824 - RNA, 19 nt, Artificial Sequence
  Description of Artificial Sequence: Synthetic oligonucleotide
  Antisense Strand to SEQ ID NO: 473823
uuccaagaaaguuuacaag

SEQ ID NO: 473825 - RNA, 19 nt, Artificial Sequence
  Description of Artificial Sequence: Synthetic oligonucleotide
  Sense strand starting at position 3179 of SEQ ID NO: 317220
uuguaaacuuucuuggaau

SEQ ID NO: 473826 - RNA, 19 nt, Artificial Sequence
  Description of Artificial Sequence: Synthetic oligonucleotide
  Antisense Strand to SEQ ID NO: 473825
auuccaagaaaguuuacaa

SEQ ID NO: 473827 - RNA, 19 nt, Artificial Sequence
  Description of Artificial Sequence: Synthetic oligonucleotide
  Sense strand starting at position 3233 of SEQ ID NO: 317220
cugggaagauauccucuuu

SEQ ID NO: 473828 - RNA, 19 nt, Artificial Sequence
  Description of Artificial Sequence: Synthetic oligonucleotide
  Antisense Strand to SEQ ID NO: 473827
aaagaggauaucuucccag

SEQ ID NO: 473829 - RNA, 19 nt, Artificial Sequence
  Description of Artificial Sequence: Synthetic oligonucleotide
  Sense strand starting at position 3261 of SEQ ID NO: 317220
ucaguuucuggaggaauag

SEQ ID NO: 473830 - RNA, 19 nt, Artificial Sequence
  Description of Artificial Sequence: Synthetic oligonucleotide
  Antisense Strand to SEQ ID NO: 473829
cuauuccuccagaaacuga

SEQ ID NO: 473831 - RNA, 19 nt, Artificial Sequence
  Description of Artificial Sequence: Synthetic oligonucleotide
  Sense strand starting at position 3521 of SEQ ID NO: 317220
agucauagcccucauauuc

SEQ ID NO: 473832 - RNA, 19 nt, Artificial Sequence
  Description of Artificial Sequence: Synthetic oligonucleotide
  Antisense Strand to SEQ ID NO: 473831
gaauaugagggcuaugacu

SEQ ID NO: 473833 - RNA, 19 nt, Artificial Sequence
  Description of Artificial Sequence: Synthetic oligonucleotide
  Sense strand starting at position 3544 of SEQ ID NO: 317220
ucaugaucucaauguuuag

SEQ ID NO: 473834 - RNA, 19 nt, Artificial Sequence
  Description of Artificial Sequence: Synthetic oligonucleotide
  Antisense Strand to SEQ ID NO: 473833
cuaaacauugagaucauga

SEQ ID NO: 473835 - RNA, 19 nt, Artificial Sequence
  Description of Artificial Sequence: Synthetic oligonucleotide
  Sense strand starting at position 3735 of SEQ ID NO: 317220
auguccucuggcuaaugaa

SEQ ID NO: 473836 - RNA, 19 nt, Artificial Sequence
  Description of Artificial Sequence: Synthetic oligonucleotide
  Antisense Strand to SEQ ID NO: 473835
uucauuagccagaggacau

SEQ ID NO: 473837 - RNA, 19 nt, Artificial Sequence
  Description of Artificial Sequence: Synthetic oligonucleotide
  Sense strand starting at position 3757 of SEQ ID NO: 317220
ugauauaggccacaugcua

SEQ ID NO: 473838 - RNA, 19 nt, Artificial Sequence
  Description of Artificial Sequence: Synthetic oligonucleotide
  Antisense Strand to SEQ ID NO: 473837
uagcauguggccuauauca

SEQ ID NO: 473839 - RNA, 19 nt, Artificial Sequence
  Description of Artificial Sequence: Synthetic oligonucleotide
  Sense strand starting at position 3764 of SEQ ID NO: 317220
ggccacaugcuaggaauaa

SEQ ID NO: 473840 - RNA, 19 nt, Artificial Sequence
  Description of Artificial Sequence: Synthetic oligonucleotide
  Antisense Strand to SEQ ID NO: 473839
uuauuccuagcauguggcc

SEQ ID NO: 473841 - RNA, 19 nt, Artificial Sequence
  Description of Artificial Sequence: Synthetic oligonucleotide
  Sense strand starting at position 3784 of SEQ ID NO: 317220
aguauuuguugagaacaaa

SEQ ID NO: 473842 - RNA, 19 nt, Artificial Sequence
  Description of Artificial Sequence: Synthetic oligonucleotide
  Antisense Strand to SEQ ID NO: 473841
uuuguucucaacaaauacu

SEQ ID NO: 473843 - RNA, 19 nt, Artificial Sequence
  Description of Artificial Sequence: Synthetic oligonucleotide
  Sense strand starting at position 3880 of SEQ ID NO: 317220
cagagugcuuaguuaauuu

SEQ ID NO: 473844 - RNA, 19 nt, Artificial Sequence
  Description of Artificial Sequence: Synthetic oligonucleotide
  Antisense Strand to SEQ ID NO: 473843
aaauuaacuaagcacucug

SEQ ID NO: 473845 - RNA, 19 nt, Artificial Sequence
  Description of Artificial Sequence: Synthetic oligonucleotide
  Sense strand starting at position 117 of SEQ ID NO: 317221
aguccuaagcguuaugauc

SEQ ID NO: 473846 - RNA, 19 nt, Artificial Sequence
  Description of Artificial Sequence: Synthetic oligonucleotide
  Antisense Strand to SEQ ID NO: 473845
gaucauaacgcuuaggacu

SEQ ID NO: 473847 - RNA, 19 nt, Artificial Sequence
  Description of Artificial Sequence: Synthetic oligonucleotide
  Sense strand starting at position 123 of SEQ ID NO: 317221
aagcguuaugaucaucucu

SEQ ID NO: 473848 - RNA, 19 nt, Artificial Sequence
  Description of Artificial Sequence: Synthetic oligonucleotide
  Antisense Strand to SEQ ID NO: 473847
agagaugaucauaacgcuu

SEQ ID NO: 473849 - RNA, 19 nt, Artificial Sequence
  Description of Artificial Sequence: Synthetic oligonucleotide
  Sense strand starting at position 206 of SEQ ID NO: 317221
cagcuaaugagugguggaa

SEQ ID NO: 473850 - RNA, 19 nt, Artificial Sequence
  Description of Artificial Sequence: Synthetic oligonucleotide
  Antisense Strand to SEQ ID NO: 473849
uuccaccacucauuagcug

SEQ ID NO: 473851 - RNA, 19 nt, Artificial Sequence
  Description of Artificial Sequence: Synthetic oligonucleotide
  Sense strand starting at position 269 of SEQ ID NO: 317221
guaacaacaccuggauugu

SEQ ID NO: 473852 - RNA, 19 nt, Artificial Sequence
  Description of Artificial Sequence: Synthetic oligonucleotide
  Antisense Strand to SEQ ID NO: 473851
acaauccagguguuguuac

SEQ ID NO: 473853 - RNA, 19 nt, Artificial Sequence
  Description of Artificial Sequence: Synthetic oligonucleotide
  Sense strand starting at position 2172 of SEQ ID NO: 317221
ucccgaguccgcguuccaa

SEQ ID NO: 473854 - RNA, 19 nt, Artificial Sequence
  Description of Artificial Sequence: Synthetic oligonucleotide
  Antisense Strand to SEQ ID NO: 473853
uuggaacgcggacucggga

SEQ ID NO: 473855 - RNA, 19 nt, Artificial Sequence
  Description of Artificial Sequence: Synthetic oligonucleotide
  Sense strand starting at position 2405 of SEQ ID NO: 317221
uggugugaauuagcgacau

SEQ ID NO: 473856 - RNA, 19 nt, Artificial Sequence
  Description of Artificial Sequence: Synthetic oligonucleotide
  Antisense Strand to SEQ ID NO: 473855
augucgcuaauucacacca

SEQ ID NO: 473857 - RNA, 19 nt, Artificial Sequence
  Description of Artificial Sequence: Synthetic oligonucleotide
  Sense strand starting at position 2409 of SEQ ID NO: 317221
gugaauuagcgacauccag

SEQ ID NO: 473858 - RNA, 19 nt, Artificial Sequence
  Description of Artificial Sequence: Synthetic oligonucleotide
  Antisense Strand to SEQ ID NO: 473857
cuggaugucgcuaauucac

SEQ ID NO: 473859 - RNA, 19 nt, Artificial Sequence
  Description of Artificial Sequence: Synthetic oligonucleotide
  Sense strand starting at position 2483 of SEQ ID NO: 317221
ggcugacuugcugugcauu

SEQ ID NO: 473860 - RNA, 19 nt, Artificial Sequence
  Description of Artificial Sequence: Synthetic oligonucleotide
  Antisense Strand to SEQ ID NO: 473859
aaugcacagcaagucagcc

SEQ ID NO: 473861 - RNA, 19 nt, Artificial Sequence
  Description of Artificial Sequence: Synthetic oligonucleotide
  Sense strand starting at position 2559 of SEQ ID NO: 317221
uggcuucugucuccacaca

SEQ ID NO: 473862 - RNA, 19 nt, Artificial Sequence
  Description of Artificial Sequence: Synthetic oligonucleotide
  Antisense Strand to SEQ ID NO: 473861
uguguggagacagaagcca

SEQ ID NO: 473863 - RNA, 19 nt, Artificial Sequence
  Description of Artificial Sequence: Synthetic oligonucleotide
  Sense strand starting at position 2560 of SEQ ID NO: 317221
ggcuucugucuccacacau

SEQ ID NO: 473864 - RNA, 19 nt, Artificial Sequence
  Description of Artificial Sequence: Synthetic oligonucleotide
  Antisense Strand to SEQ ID NO: 473863
auguguggagacagaagcc

SEQ ID NO: 473865 - RNA, 19 nt, Artificial Sequence
  Description of Artificial Sequence: Synthetic oligonucleotide
  Sense strand starting at position 2586 of SEQ ID NO: 317221
aucccagggauucgucaua

SEQ ID NO: 473866 - RNA, 19 nt, Artificial Sequence
  Description of Artificial Sequence: Synthetic oligonucleotide
  Antisense Strand to SEQ ID NO: 473865
uaugacgaaucccugggau

SEQ ID NO: 473867 - RNA, 19 nt, Artificial Sequence
  Description of Artificial Sequence: Synthetic oligonucleotide
  Sense strand starting at position 2593 of SEQ ID NO: 317221
ggauucgucauaggacucu

SEQ ID NO: 473868 - RNA, 19 nt, Artificial Sequence
  Description of Artificial Sequence: Synthetic oligonucleotide
  Antisense Strand to SEQ ID NO: 473867
agaguccuaugacgaaucc

SEQ ID NO: 473869 - RNA, 19 nt, Artificial Sequence
  Description of Artificial Sequence: Synthetic oligonucleotide
  Sense strand starting at position 2735 of SEQ ID NO: 317221
augugaugcucugcaauug

SEQ ID NO: 473870 - RNA, 19 nt, Artificial Sequence
  Description of Artificial Sequence: Synthetic oligonucleotide
  Antisense Strand to SEQ ID NO: 473869
caauugcagagcaucacau

SEQ ID NO: 473871 - RNA, 19 nt, Artificial Sequence
  Description of Artificial Sequence: Synthetic oligonucleotide
  Sense strand starting at position 2736 of SEQ ID NO: 317221
ugugaugcucugcaauugu

SEQ ID NO: 473872 - RNA, 19 nt, Artificial Sequence
  Description of Artificial Sequence: Synthetic oligonucleotide
  Antisense Strand to SEQ ID NO: 473871
acaauugcagagcaucaca

SEQ ID NO: 473873 - RNA, 19 nt, Artificial Sequence
  Description of Artificial Sequence: Synthetic oligonucleotide
  Sense strand starting at position 2743 of SEQ ID NO: 317221
cucugcaauugucugaaau

SEQ ID NO: 473874 - RNA, 19 nt, Artificial Sequence
  Description of Artificial Sequence: Synthetic oligonucleotide
  Antisense Strand to SEQ ID NO: 473873
auuucagacaauugcagag

SEQ ID NO: 473875 - RNA, 19 nt, Artificial Sequence
  Description of Artificial Sequence: Synthetic oligonucleotide
  Sense strand starting at position 2744 of SEQ ID NO: 317221
ucugcaauugucugaaauu

SEQ ID NO: 473876 - RNA, 19 nt, Artificial Sequence
  Description of Artificial Sequence: Synthetic oligonucleotide
  Antisense Strand to SEQ ID NO: 473875
aauuucagacaauugcaga

SEQ ID NO: 473877 - RNA, 19 nt, Artificial Sequence
  Description of Artificial Sequence: Synthetic oligonucleotide
  Sense strand starting at position 2745 of SEQ ID NO: 317221
cugcaauugucugaaauuu

SEQ ID NO: 473878 - RNA, 19 nt, Artificial Sequence
  Description of Artificial Sequence: Synthetic oligonucleotide
  Antisense Strand to SEQ ID NO: 473877
aaauuucagacaauugcag

SEQ ID NO: 473879 - RNA, 19 nt, Artificial Sequence
  Description of Artificial Sequence: Synthetic oligonucleotide
  Sense strand starting at position 2952 of SEQ ID NO: 317221
cugauaugaucucuguuuc

SEQ ID NO: 473880 - RNA, 19 nt, Artificial Sequence
  Description of Artificial Sequence: Synthetic oligonucleotide
  Antisense Strand to SEQ ID NO: 473879
gaaacagagaucauaucag

SEQ ID NO: 473881 - RNA, 19 nt, Artificial Sequence
  Description of Artificial Sequence: Synthetic oligonucleotide
  Sense strand starting at position 2953 of SEQ ID NO: 317221
ugauaugaucucuguuucu

SEQ ID NO: 473882 - RNA, 19 nt, Artificial Sequence
  Description of Artificial Sequence: Synthetic oligonucleotide
  Antisense Strand to SEQ ID NO: 473881
agaaacagagaucauauca

SEQ ID NO: 473883 - RNA, 19 nt, Artificial Sequence
  Description of Artificial Sequence: Synthetic oligonucleotide
  Sense strand starting at position 2975 of SEQ ID NO: 317221
uccugcuggcuugaucuua

SEQ ID NO: 473884 - RNA, 19 nt, Artificial Sequence
  Description of Artificial Sequence: Synthetic oligonucleotide
  Antisense Strand to SEQ ID NO: 473883
uaagaucaagccagcagga

SEQ ID NO: 473885 - RNA, 19 nt, Artificial Sequence
  Description of Artificial Sequence: Synthetic oligonucleotide
  Sense strand starting at position 2985 of SEQ ID NO: 317221
uugaucuuaugucuugcau

SEQ ID NO: 473886 - RNA, 19 nt, Artificial Sequence
  Description of Artificial Sequence: Synthetic oligonucleotide
  Antisense Strand to SEQ ID NO: 473885
augcaagacauaagaucaa

SEQ ID NO: 473887 - RNA, 19 nt, Artificial Sequence
  Description of Artificial Sequence: Synthetic oligonucleotide
  Sense strand starting at position 2999 of SEQ ID NO: 317221
ugcauuauuccgcauuaga

SEQ ID NO: 473888 - RNA, 19 nt, Artificial Sequence
  Description of Artificial Sequence: Synthetic oligonucleotide
  Antisense Strand to SEQ ID NO: 473887
ucuaaugcggaauaaugca

SEQ ID NO: 473889 - RNA, 19 nt, Artificial Sequence
  Description of Artificial Sequence: Synthetic oligonucleotide
  Sense strand starting at position 3002 of SEQ ID NO: 317221
auuauuccgcauuagaaca

SEQ ID NO: 473890 - RNA, 19 nt, Artificial Sequence
  Description of Artificial Sequence: Synthetic oligonucleotide
  Antisense Strand to SEQ ID NO: 473889
uguucuaaugcggaauaau

SEQ ID NO: 473891 - RNA, 19 nt, Artificial Sequence
  Description of Artificial Sequence: Synthetic oligonucleotide
  Sense strand starting at position 3007 of SEQ ID NO: 317221
uccgcauuagaacaauuga

SEQ ID NO: 473892 - RNA, 19 nt, Artificial Sequence
  Description of Artificial Sequence: Synthetic oligonucleotide
  Antisense Strand to SEQ ID NO: 473891
ucaauuguucuaaugcgga

SEQ ID NO: 473893 - RNA, 19 nt, Artificial Sequence
  Description of Artificial Sequence: Synthetic oligonucleotide
  Sense strand starting at position 3064 of SEQ ID NO: 317221
ccucacuauuuccagguua

SEQ ID NO: 473894 - RNA, 19 nt, Artificial Sequence
  Description of Artificial Sequence: Synthetic oligonucleotide
  Antisense Strand to SEQ ID NO: 473893
uaaccuggaaauagugagg

SEQ ID NO: 473895 - RNA, 19 nt, Artificial Sequence
  Description of Artificial Sequence: Synthetic oligonucleotide
  Sense strand starting at position 3078 of SEQ ID NO: 317221
gguuauauugcagaaccaa

SEQ ID NO: 473896 - RNA, 19 nt, Artificial Sequence
  Description of Artificial Sequence: Synthetic oligonucleotide
  Antisense Strand to SEQ ID NO: 473895
uugguucugcaauauaacc

SEQ ID NO: 473897 - RNA, 19 nt, Artificial Sequence
  Description of Artificial Sequence: Synthetic oligonucleotide
  Sense strand starting at position 3098 of SEQ ID NO: 317221
gcugcuuauuugucacguu

SEQ ID NO: 473898 - RNA, 19 nt, Artificial Sequence
  Description of Artificial Sequence: Synthetic oligonucleotide
  Antisense Strand to SEQ ID NO: 473897
aacgugacaaauaagcagc

SEQ ID NO: 473899 - RNA, 19 nt, Artificial Sequence
  Description of Artificial Sequence: Synthetic oligonucleotide
  Sense strand starting at position 3110 of SEQ ID NO: 317221
ucacguugaugcuuagaca

SEQ ID NO: 473900 - RNA, 19 nt, Artificial Sequence
  Description of Artificial Sequence: Synthetic oligonucleotide
  Antisense Strand to SEQ ID NO: 473899
ugucuaagcaucaacguga

SEQ ID NO: 473901 - RNA, 19 nt, Artificial Sequence
  Description of Artificial Sequence: Synthetic oligonucleotide
  Sense strand starting at position 3167 of SEQ ID NO: 317221
auuucugugguuugguuua

SEQ ID NO: 473902 - RNA, 19 nt, Artificial Sequence
  Description of Artificial Sequence: Synthetic oligonucleotide
  Antisense Strand to SEQ ID NO: 473901
uaaaccaaaccacagaaau

SEQ ID NO: 473903 - RNA, 19 nt, Artificial Sequence
  Description of Artificial Sequence: Synthetic oligonucleotide
  Sense strand starting at position 3172 of SEQ ID NO: 317221
ugugguuugguuuaguaaa

SEQ ID NO: 473904 - RNA, 19 nt, Artificial Sequence
  Description of Artificial Sequence: Synthetic oligonucleotide
  Antisense Strand to SEQ ID NO: 473903
uuuacuaaaccaaaccaca

SEQ ID NO: 473905 - RNA, 19 nt, Artificial Sequence
  Description of Artificial Sequence: Synthetic oligonucleotide
  Sense strand starting at position 3174 of SEQ ID NO: 317221
ugguuugguuuaguaaauu

SEQ ID NO: 473906 - RNA, 19 nt, Artificial Sequence
  Description of Artificial Sequence: Synthetic oligonucleotide
  Antisense Strand to SEQ ID NO: 473905
aauuuacuaaaccaaacca

SEQ ID NO: 473907 - RNA, 19 nt, Artificial Sequence
  Description of Artificial Sequence: Synthetic oligonucleotide
  Sense strand starting at position 3639 of SEQ ID NO: 317221
guccuaauugucuauucuu

SEQ ID NO: 473908 - RNA, 19 nt, Artificial Sequence
  Description of Artificial Sequence: Synthetic oligonucleotide
  Antisense Strand to SEQ ID NO: 473907
aagaauagacaauuaggac

SEQ ID NO: 473909 - RNA, 19 nt, Artificial Sequence
  Description of Artificial Sequence: Synthetic oligonucleotide
  Sense strand starting at position 3720 of SEQ ID NO: 317221
agacccugucuccaaguau

SEQ ID NO: 473910 - RNA, 19 nt, Artificial Sequence
  Description of Artificial Sequence: Synthetic oligonucleotide
  Antisense Strand to SEQ ID NO: 473909
auacuuggagacagggucu

SEQ ID NO: 473911 - RNA, 19 nt, Artificial Sequence
  Description of Artificial Sequence: Synthetic oligonucleotide
  Sense strand starting at position 3729 of SEQ ID NO: 317221
cuccaaguauggucauguu

SEQ ID NO: 473912 - RNA, 19 nt, Artificial Sequence
  Description of Artificial Sequence: Synthetic oligonucleotide
  Antisense Strand to SEQ ID NO: 473911
aacaugaccauacuuggag

SEQ ID NO: 473913 - RNA, 19 nt, Artificial Sequence
  Description of Artificial Sequence: Synthetic oligonucleotide
  Sense strand starting at position 3875 of SEQ ID NO: 317221
auuuguucucuaggcacau

SEQ ID NO: 473914 - RNA, 19 nt, Artificial Sequence
  Description of Artificial Sequence: Synthetic oligonucleotide
  Antisense Strand to SEQ ID NO: 473913
augugccuagagaacaaau

SEQ ID NO: 473915 - RNA, 19 nt, Artificial Sequence
  Description of Artificial Sequence: Synthetic oligonucleotide
  Sense strand starting at position 3876 of SEQ ID NO: 317221
uuuguucucuaggcacaua

SEQ ID NO: 473916 - RNA, 19 nt, Artificial Sequence
  Description of Artificial Sequence: Synthetic oligonucleotide
  Antisense Strand to SEQ ID NO: 473915
uaugugccuagagaacaaa

SEQ ID NO: 473917 - RNA, 19 nt, Artificial Sequence
  Description of Artificial Sequence: Synthetic oligonucleotide
  Sense strand starting at position 3879 of SEQ ID NO: 317221
guucucuaggcacauauaa

SEQ ID NO: 473918 - RNA, 19 nt, Artificial Sequence
  Description of Artificial Sequence: Synthetic oligonucleotide
  Antisense Strand to SEQ ID NO: 473917
uuauaugugccuagagaac

SEQ ID NO: 473919 - RNA, 19 nt, Artificial Sequence
  Description of Artificial Sequence: Synthetic oligonucleotide
  Sense strand starting at position 3914 of SEQ ID NO: 317221
agguaauuauggcuaccua

SEQ ID NO: 473920 - RNA, 19 nt, Artificial Sequence
  Description of Artificial Sequence: Synthetic oligonucleotide
  Antisense Strand to SEQ ID NO: 473919
uagguagccauaauuaccu

SEQ ID NO: 473921 - RNA, 19 nt, Artificial Sequence
  Description of Artificial Sequence: Synthetic oligonucleotide
  Sense strand starting at position 3915 of SEQ ID NO: 317221
gguaauuauggcuaccuau

SEQ ID NO: 473922 - RNA, 19 nt, Artificial Sequence
  Description of Artificial Sequence: Synthetic oligonucleotide
  Antisense Strand to SEQ ID NO: 473921
auagguagccauaauuacc

SEQ ID NO: 473923 - RNA, 19 nt, Artificial Sequence
  Description of Artificial Sequence: Synthetic oligonucleotide
  Sense strand starting at position 3974 of SEQ ID NO: 317221
uucucuuaacugugagcuu

SEQ ID NO: 473924 - RNA, 19 nt, Artificial Sequence
  Description of Artificial Sequence: Synthetic oligonucleotide
  Antisense Strand to SEQ ID NO: 473923
aagcucacaguuaagagaa

SEQ ID NO: 473925 - RNA, 19 nt, Artificial Sequence
  Description of Artificial Sequence: Synthetic oligonucleotide
  Sense strand starting at position 19 of SEQ ID NO: 317222
cgugcagauuucuucucaa

SEQ ID NO: 473926 - RNA, 19 nt, Artificial Sequence
  Description of Artificial Sequence: Synthetic oligonucleotide
  Antisense Strand to SEQ ID NO: 473925
uugagaagaaaucugcacg

SEQ ID NO: 473927 - RNA, 19 nt, Artificial Sequence
  Description of Artificial Sequence: Synthetic oligonucleotide
  Sense strand starting at position 85 of SEQ ID NO: 317222
guaaauugccuccaacaug

SEQ ID NO: 473928 - RNA, 19 nt, Artificial Sequence
  Description of Artificial Sequence: Synthetic oligonucleotide
  Antisense Strand to SEQ ID NO: 473927
cauguuggaggcaauuuac

SEQ ID NO: 473929 - RNA, 19 nt, Artificial Sequence
  Description of Artificial Sequence: Synthetic oligonucleotide
  Sense strand starting at position 436 of SEQ ID NO: 317222
gcacaaauuuaagaagcaa

SEQ ID NO: 473930 - RNA, 19 nt, Artificial Sequence
  Description of Artificial Sequence: Synthetic oligonucleotide
  Antisense Strand to SEQ ID NO: 473929
uugcuucuuaaauuugugc

SEQ ID NO: 473931 - RNA, 19 nt, Artificial Sequence
  Description of Artificial Sequence: Synthetic oligonucleotide
  Sense strand starting at position 481 of SEQ ID NO: 317222
cgcuuuaaaguauacaaga

SEQ ID NO: 473932 - RNA, 19 nt, Artificial Sequence
  Description of Artificial Sequence: Synthetic oligonucleotide
  Antisense Strand to SEQ ID NO: 473931
ucuuguauacuuuaaagcg

SEQ ID NO: 473933 - RNA, 19 nt, Artificial Sequence
  Description of Artificial Sequence: Synthetic oligonucleotide
  Sense strand starting at position 568 of SEQ ID NO: 317222
gcaucauagguuuacauga

SEQ ID NO: 473934 - RNA, 19 nt, Artificial Sequence
  Description of Artificial Sequence: Synthetic oligonucleotide
  Antisense Strand to SEQ ID NO: 473933
ucauguaaaccuaugaugc

SEQ ID NO: 473935 - RNA, 19 nt, Artificial Sequence
  Description of Artificial Sequence: Synthetic oligonucleotide
  Sense strand starting at position 675 of SEQ ID NO: 317222
agacucuaaccuuggcuaa

SEQ ID NO: 473936 - RNA, 19 nt, Artificial Sequence
  Description of Artificial Sequence: Synthetic oligonucleotide
  Antisense Strand to SEQ ID NO: 473935
uuagccaagguuagagucu

SEQ ID NO: 473937 - RNA, 19 nt, Artificial Sequence
  Description of Artificial Sequence: Synthetic oligonucleotide
  Sense strand starting at position 687 of SEQ ID NO: 317222
uggcuaaucuuauuggaaa

SEQ ID NO: 473938 - RNA, 19 nt, Artificial Sequence
  Description of Artificial Sequence: Synthetic oligonucleotide
  Antisense Strand to SEQ ID NO: 473937
uuuccaauaagauuagcca

SEQ ID NO: 473939 - RNA, 19 nt, Artificial Sequence
  Description of Artificial Sequence: Synthetic oligonucleotide
  Sense strand starting at position 809 of SEQ ID NO: 317222
agaacuaucucugccugaa

SEQ ID NO: 473940 - RNA, 19 nt, Artificial Sequence
  Description of Artificial Sequence: Synthetic oligonucleotide
  Antisense Strand to SEQ ID NO: 473939
uucaggcagagauaguucu

SEQ ID NO: 473941 - RNA, 19 nt, Artificial Sequence
  Description of Artificial Sequence: Synthetic oligonucleotide
  Sense strand starting at position 821 of SEQ ID NO: 317222
gccugaaauacugaguuga

SEQ ID NO: 473942 - RNA, 19 nt, Artificial Sequence
  Description of Artificial Sequence: Synthetic oligonucleotide
  Antisense Strand to SEQ ID NO: 473941
ucaacucaguauuucaggc

SEQ ID NO: 473943 - RNA, 19 nt, Artificial Sequence
  Description of Artificial Sequence: Synthetic oligonucleotide
  Sense strand starting at position 829 of SEQ ID NO: 317222
uacugaguugauuaguacu

SEQ ID NO: 473944 - RNA, 19 nt, Artificial Sequence
  Description of Artificial Sequence: Synthetic oligonucleotide
  Antisense Strand to SEQ ID NO: 473943
aguacuaaucaacucagua

SEQ ID NO: 473945 - RNA, 19 nt, Artificial Sequence
  Description of Artificial Sequence: Synthetic oligonucleotide
  Sense strand starting at position 831 of SEQ ID NO: 317222
cugaguugauuaguacuca

SEQ ID NO: 473946 - RNA, 19 nt, Artificial Sequence
  Description of Artificial Sequence: Synthetic oligonucleotide
  Antisense Strand to SEQ ID NO: 473945
ugaguacuaaucaacucag

SEQ ID NO: 473947 - RNA, 19 nt, Artificial Sequence
  Description of Artificial Sequence: Synthetic oligonucleotide
  Sense strand starting at position 921 of SEQ ID NO: 317222
cuguauuaacguuaaccaa

SEQ ID NO: 473948 - RNA, 19 nt, Artificial Sequence
  Description of Artificial Sequence: Synthetic oligonucleotide
  Antisense Strand to SEQ ID NO: 473947
uugguuaacguuaauacag

SEQ ID NO: 473949 - RNA, 19 nt, Artificial Sequence
  Description of Artificial Sequence: Synthetic oligonucleotide
  Sense strand starting at position 956 of SEQ ID NO: 317222
ggucacugauaucuaagga

SEQ ID NO: 473950 - RNA, 19 nt, Artificial Sequence
  Description of Artificial Sequence: Synthetic oligonucleotide
  Antisense Strand to SEQ ID NO: 473949
uccuuagauaucagugacc

SEQ ID NO: 473951 - RNA, 19 nt, Artificial Sequence
  Description of Artificial Sequence: Synthetic oligonucleotide
  Sense strand starting at position 1037 of SEQ ID NO: 317222
caaguuauugucuaugggu

SEQ ID NO: 473952 - RNA, 19 nt, Artificial Sequence
  Description of Artificial Sequence: Synthetic oligonucleotide
  Antisense Strand to SEQ ID NO: 473951
acccauagacaauaacuug

SEQ ID NO: 473953 - RNA, 19 nt, Artificial Sequence
  Description of Artificial Sequence: Synthetic oligonucleotide
  Sense strand starting at position 1093 of SEQ ID NO: 317222
aaguuaauacggcaugguu

SEQ ID NO: 473954 - RNA, 19 nt, Artificial Sequence
  Description of Artificial Sequence: Synthetic oligonucleotide
  Antisense Strand to SEQ ID NO: 473953
aaccaugccguauuaacuu

SEQ ID NO: 473955 - RNA, 19 nt, Artificial Sequence
  Description of Artificial Sequence: Synthetic oligonucleotide
  Sense strand starting at position 1287 of SEQ ID NO: 317222
acaccucuccguuagaaug

SEQ ID NO: 473956 - RNA, 19 nt, Artificial Sequence
  Description of Artificial Sequence: Synthetic oligonucleotide
  Antisense Strand to SEQ ID NO: 473955
cauucuaacggagaggugu

SEQ ID NO: 473957 - RNA, 19 nt, Artificial Sequence
  Description of Artificial Sequence: Synthetic oligonucleotide
  Sense strand starting at position 1297 of SEQ ID NO: 317222
guuagaaugugaccucuca

SEQ ID NO: 473958 - RNA, 19 nt, Artificial Sequence
  Description of Artificial Sequence: Synthetic oligonucleotide
  Antisense Strand to SEQ ID NO: 473957
ugagaggucacauucuaac

SEQ ID NO: 473959 - RNA, 19 nt, Artificial Sequence
  Description of Artificial Sequence: Synthetic oligonucleotide
  Sense strand starting at position 1359 of SEQ ID NO: 317222
ucacuagaacggcaagauu

SEQ ID NO: 473960 - RNA, 19 nt, Artificial Sequence
  Description of Artificial Sequence: Synthetic oligonucleotide
  Antisense Strand to SEQ ID NO: 473959
aaucuugccguucuaguga

SEQ ID NO: 473961 - RNA, 19 nt, Artificial Sequence
  Description of Artificial Sequence: Synthetic oligonucleotide
  Sense strand starting at position 1524 of SEQ ID NO: 317222
cauuuauacuggcagagac

SEQ ID NO: 473962 - RNA, 19 nt, Artificial Sequence
  Description of Artificial Sequence: Synthetic oligonucleotide
  Antisense Strand to SEQ ID NO: 473961
gucucugccaguauaaaug

SEQ ID NO: 473963 - RNA, 19 nt, Artificial Sequence
  Description of Artificial Sequence: Synthetic oligonucleotide
  Sense strand starting at position 2297 of SEQ ID NO: 317222
gcaagaguugcagagcuaa

SEQ ID NO: 473964 - RNA, 19 nt, Artificial Sequence
  Description of Artificial Sequence: Synthetic oligonucleotide
  Antisense Strand to SEQ ID NO: 473963
uuagcucugcaacucuugc

SEQ ID NO: 473965 - RNA, 19 nt, Artificial Sequence
  Description of Artificial Sequence: Synthetic oligonucleotide
  Sense strand starting at position 2622 of SEQ ID NO: 317222
cucuaaucaggacgagcua

SEQ ID NO: 473966 - RNA, 19 nt, Artificial Sequence
  Description of Artificial Sequence: Synthetic oligonucleotide
  Antisense Strand to SEQ ID NO: 473965
uagcucguccugauuagag

SEQ ID NO: 473967 - RNA, 19 nt, Artificial Sequence
  Description of Artificial Sequence: Synthetic oligonucleotide
  Sense strand starting at position 2647 of SEQ ID NO: 317222
aguuuagacuuuccggaaa

SEQ ID NO: 473968 - RNA, 19 nt, Artificial Sequence
  Description of Artificial Sequence: Synthetic oligonucleotide
  Antisense Strand to SEQ ID NO: 473967
uuuccggaaagucuaaacu

SEQ ID NO: 473969 - RNA, 19 nt, Artificial Sequence
  Description of Artificial Sequence: Synthetic oligonucleotide
  Sense strand starting at position 2715 of SEQ ID NO: 317222
gaaacaguaguguaaacuu

SEQ ID NO: 473970 - RNA, 19 nt, Artificial Sequence
  Description of Artificial Sequence: Synthetic oligonucleotide
  Antisense Strand to SEQ ID NO: 473969
aaguuuacacuacuguuuc

SEQ ID NO: 473971 - RNA, 19 nt, Artificial Sequence
  Description of Artificial Sequence: Synthetic oligonucleotide
  Sense strand starting at position 2854 of SEQ ID NO: 317222
uugugcgggauccauaaau

SEQ ID NO: 473972 - RNA, 19 nt, Artificial Sequence
  Description of Artificial Sequence: Synthetic oligonucleotide
  Antisense Strand to SEQ ID NO: 473971
auuuauggaucccgcacaa

SEQ ID NO: 473973 - RNA, 19 nt, Artificial Sequence
  Description of Artificial Sequence: Synthetic oligonucleotide
  Sense strand starting at position 2902 of SEQ ID NO: 317222
guaaauaucugguuaucuu

SEQ ID NO: 473974 - RNA, 19 nt, Artificial Sequence
  Description of Artificial Sequence: Synthetic oligonucleotide
  Antisense Strand to SEQ ID NO: 473973
aagauaaccagauauuuac

SEQ ID NO: 473975 - RNA, 19 nt, Artificial Sequence
  Description of Artificial Sequence: Synthetic oligonucleotide
  Sense strand starting at position 2906 of SEQ ID NO: 317222
auaucugguuaucuuagua

SEQ ID NO: 473976 - RNA, 19 nt, Artificial Sequence
  Description of Artificial Sequence: Synthetic oligonucleotide
  Antisense Strand to SEQ ID NO: 473975
uacuaagauaaccagauau

SEQ ID NO: 473977 - RNA, 19 nt, Artificial Sequence
  Description of Artificial Sequence: Synthetic oligonucleotide
  Sense strand starting at position 2959 of SEQ ID NO: 317222
cagagcaauguugaaagua

SEQ ID NO: 473978 - RNA, 19 nt, Artificial Sequence
  Description of Artificial Sequence: Synthetic oligonucleotide
  Antisense Strand to SEQ ID NO: 473977
uacuuucaacauugcucug

SEQ ID NO: 473979 - RNA, 19 nt, Artificial Sequence
  Description of Artificial Sequence: Synthetic oligonucleotide
  Sense strand starting at position 2968 of SEQ ID NO: 317222
guugaaaguauugggcaga

SEQ ID NO: 473980 - RNA, 19 nt, Artificial Sequence
  Description of Artificial Sequence: Synthetic oligonucleotide
  Antisense Strand to SEQ ID NO: 473979
ucugcccaauacuuucaac

SEQ ID NO: 473981 - RNA, 19 nt, Artificial Sequence
  Description of Artificial Sequence: Synthetic oligonucleotide
  Sense strand starting at position 3274 of SEQ ID NO: 317222
ugaguaaguauugggcaua

SEQ ID NO: 473982 - RNA, 19 nt, Artificial Sequence
  Description of Artificial Sequence: Synthetic oligonucleotide
  Antisense Strand to SEQ ID NO: 473981
uaugcccaauacuuacuca

SEQ ID NO: 473983 - RNA, 19 nt, Artificial Sequence
  Description of Artificial Sequence: Synthetic oligonucleotide
  Sense strand starting at position 3277 of SEQ ID NO: 317222
guaaguauugggcauaggu

SEQ ID NO: 473984 - RNA, 19 nt, Artificial Sequence
  Description of Artificial Sequence: Synthetic oligonucleotide
  Antisense Strand to SEQ ID NO: 473983
accuaugcccaauacuuac

SEQ ID NO: 473985 - RNA, 19 nt, Artificial Sequence
  Description of Artificial Sequence: Synthetic oligonucleotide
  Sense strand starting at position 3296 of SEQ ID NO: 317222
guguccuuucuauaagaau

SEQ ID NO: 473986 - RNA, 19 nt, Artificial Sequence
  Description of Artificial Sequence: Synthetic oligonucleotide
  Antisense Strand to SEQ ID NO: 473985
auucuuauagaaaggacac

SEQ ID NO: 473987 - RNA, 19 nt, Artificial Sequence
  Description of Artificial Sequence: Synthetic oligonucleotide
  Sense strand starting at position 3443 of SEQ ID NO: 317222
ucaugaauaugaucgcuca

SEQ ID NO: 473988 - RNA, 19 nt, Artificial Sequence
  Description of Artificial Sequence: Synthetic oligonucleotide
  Antisense Strand to SEQ ID NO: 473987
ugagcgaucauauucauga

SEQ ID NO: 473989 - RNA, 19 nt, Artificial Sequence
  Description of Artificial Sequence: Synthetic oligonucleotide
  Sense strand starting at position 3446 of SEQ ID NO: 317222
ugaauaugaucgcucacau

SEQ ID NO: 473990 - RNA, 19 nt, Artificial Sequence
  Description of Artificial Sequence: Synthetic oligonucleotide
  Antisense Strand to SEQ ID NO: 473989
augugagcgaucauauuca

SEQ ID NO: 473991 - RNA, 19 nt, Artificial Sequence
  Description of Artificial Sequence: Synthetic oligonucleotide
  Sense strand starting at position 3488 of SEQ ID NO: 317222
gcagacuuugggcaaguua

SEQ ID NO: 473992 - RNA, 19 nt, Artificial Sequence
  Description of Artificial Sequence: Synthetic oligonucleotide
  Antisense Strand to SEQ ID NO: 473991
uaacuugcccaaagucugc

SEQ ID NO: 473993 - RNA, 19 nt, Artificial Sequence
  Description of Artificial Sequence: Synthetic oligonucleotide
  Sense strand starting at position 3605 of SEQ ID NO: 317222
aggagucuugggcagugau

SEQ ID NO: 473994 - RNA, 19 nt, Artificial Sequence
  Description of Artificial Sequence: Synthetic oligonucleotide
  Antisense Strand to SEQ ID NO: 473993
aucacugcccaagacuccu

SEQ ID NO: 473995 - RNA, 19 nt, Artificial Sequence
  Description of Artificial Sequence: Synthetic oligonucleotide
  Sense strand starting at position 3653 of SEQ ID NO: 317222
gaauguucccuggaaggua

SEQ ID NO: 473996 - RNA, 19 nt, Artificial Sequence
  Description of Artificial Sequence: Synthetic oligonucleotide
  Antisense Strand to SEQ ID NO: 473995
uaccuuccagggaacauuc

SEQ ID NO: 473997 - RNA, 19 nt, Artificial Sequence
  Description of Artificial Sequence: Synthetic oligonucleotide
  Sense strand starting at position 3708 of SEQ ID NO: 317222
ugagaagucaugugacagu

SEQ ID NO: 473998 - RNA, 19 nt, Artificial Sequence
  Description of Artificial Sequence: Synthetic oligonucleotide
  Antisense Strand to SEQ ID NO: 473997
acugucacaugacuucuca

SEQ ID NO: 473999 - RNA, 19 nt, Artificial Sequence
  Description of Artificial Sequence: Synthetic oligonucleotide
  Sense strand starting at position 3840 of SEQ ID NO: 317222
cuuagcuuucuggaacauu

SEQ ID NO: 474000 - RNA, 19 nt, Artificial Sequence
  Description of Artificial Sequence: Synthetic oligonucleotide
  Antisense Strand to SEQ ID NO: 473999
aauguuccagaaagcuaag

SEQ ID NO: 474001 - RNA, 19 nt, Artificial Sequence
  Description of Artificial Sequence: Synthetic oligonucleotide
  Sense strand starting at position 3849 of SEQ ID NO: 317222
cuggaacauugguuucuca

SEQ ID NO: 474002 - RNA, 19 nt, Artificial Sequence
  Description of Artificial Sequence: Synthetic oligonucleotide
  Antisense Strand to SEQ ID NO: 474001
ugagaaaccaauguuccag

SEQ ID NO: 474003 - RNA, 19 nt, Artificial Sequence
  Description of Artificial Sequence: Synthetic oligonucleotide
  Sense strand starting at position 3890 of SEQ ID NO: 317222
cuagauuaccucugagaua

SEQ ID NO: 474004 - RNA, 19 nt, Artificial Sequence
  Description of Artificial Sequence: Synthetic oligonucleotide
  Antisense Strand to SEQ ID NO: 474003
uaucucagagguaaucuag

SEQ ID NO: 474005 - RNA, 19 nt, Artificial Sequence
  Description of Artificial Sequence: Synthetic oligonucleotide
  Sense strand starting at position 76 of SEQ ID NO: 317223
ccaugaagucuuuagccuu

SEQ ID NO: 474006 - RNA, 19 nt, Artificial Sequence
  Description of Artificial Sequence: Synthetic oligonucleotide
  Antisense Strand to SEQ ID NO: 474005
aaggcuaaagacuucaugg

SEQ ID NO: 474007 - RNA, 19 nt, Artificial Sequence
  Description of Artificial Sequence: Synthetic oligonucleotide
  Sense strand starting at position 253 of SEQ ID NO: 317223
ucuagacacugcucagaga

SEQ ID NO: 474008 - RNA, 19 nt, Artificial Sequence
  Description of Artificial Sequence: Synthetic oligonucleotide
  Antisense Strand to SEQ ID NO: 474007
ucucugagcagugucuaga

SEQ ID NO: 474009 - RNA, 19 nt, Artificial Sequence
  Description of Artificial Sequence: Synthetic oligonucleotide
  Sense strand starting at position 266 of SEQ ID NO: 317223
cagagauugugacuuagau

SEQ ID NO: 474010 - RNA, 19 nt, Artificial Sequence
  Description of Artificial Sequence: Synthetic oligonucleotide
  Antisense Strand to SEQ ID NO: 474009
aucuaagucacaaucucug

SEQ ID NO: 474011 - RNA, 19 nt, Artificial Sequence
  Description of Artificial Sequence: Synthetic oligonucleotide
  Sense strand starting at position 297 of SEQ ID NO: 317223
gguugaggaaucuguacaa

SEQ ID NO: 474012 - RNA, 19 nt, Artificial Sequence
  Description of Artificial Sequence: Synthetic oligonucleotide
  Antisense Strand to SEQ ID NO: 474011
uuguacagauuccucaacc

SEQ ID NO: 474013 - RNA, 19 nt, Artificial Sequence
  Description of Artificial Sequence: Synthetic oligonucleotide
  Sense strand starting at position 304 of SEQ ID NO: 317223
gaaucuguacaauguagaa

SEQ ID NO: 474014 - RNA, 19 nt, Artificial Sequence
  Description of Artificial Sequence: Synthetic oligonucleotide
  Antisense Strand to SEQ ID NO: 474013
uucuacauuguacagauuc

SEQ ID NO: 474015 - RNA, 19 nt, Artificial Sequence
  Description of Artificial Sequence: Synthetic oligonucleotide
  Sense strand starting at position 337 of SEQ ID NO: 317223
cagagauugugguuuagau

SEQ ID NO: 474016 - RNA, 19 nt, Artificial Sequence
  Description of Artificial Sequence: Synthetic oligonucleotide
  Antisense Strand to SEQ ID NO: 474015
aucuaaaccacaaucucug

SEQ ID NO: 474017 - RNA, 19 nt, Artificial Sequence
  Description of Artificial Sequence: Synthetic oligonucleotide
  Sense strand starting at position 355 of SEQ ID NO: 317223
uagaaugagcuagggucua

SEQ ID NO: 474018 - RNA, 19 nt, Artificial Sequence
  Description of Artificial Sequence: Synthetic oligonucleotide
  Antisense Strand to SEQ ID NO: 474017
uagacccuagcucauucua

SEQ ID NO: 474019 - RNA, 19 nt, Artificial Sequence
  Description of Artificial Sequence: Synthetic oligonucleotide
  Sense strand starting at position 790 of SEQ ID NO: 317223
uaaggagaugccugagguu

SEQ ID NO: 474020 - RNA, 19 nt, Artificial Sequence
  Description of Artificial Sequence: Synthetic oligonucleotide
  Antisense Strand to SEQ ID NO: 474019
aaccucaggcaucuccuua

SEQ ID NO: 474021 - RNA, 19 nt, Artificial Sequence
  Description of Artificial Sequence: Synthetic oligonucleotide
  Sense strand starting at position 1020 of SEQ ID NO: 317223
uuaggaaguucuguggaau

SEQ ID NO: 474022 - RNA, 19 nt, Artificial Sequence
  Description of Artificial Sequence: Synthetic oligonucleotide
  Antisense Strand to SEQ ID NO: 474021
auuccacagaacuuccuaa

SEQ ID NO: 474023 - RNA, 19 nt, Artificial Sequence
  Description of Artificial Sequence: Synthetic oligonucleotide
  Sense strand starting at position 1021 of SEQ ID NO: 317223
uaggaaguucuguggaaug

SEQ ID NO: 474024 - RNA, 19 nt, Artificial Sequence
  Description of Artificial Sequence: Synthetic oligonucleotide
  Antisense Strand to SEQ ID NO: 474023
cauuccacagaacuuccua

SEQ ID NO: 474025 - RNA, 19 nt, Artificial Sequence
  Description of Artificial Sequence: Synthetic oligonucleotide
  Sense strand starting at position 1023 of SEQ ID NO: 317223
ggaaguucuguggaauggu

SEQ ID NO: 474026 - RNA, 19 nt, Artificial Sequence
  Description of Artificial Sequence: Synthetic oligonucleotide
  Antisense Strand to SEQ ID NO: 474025
accauuccacagaacuucc

SEQ ID NO: 474027 - RNA, 19 nt, Artificial Sequence
  Description of Artificial Sequence: Synthetic oligonucleotide
  Sense strand starting at position 1060 of SEQ ID NO: 317223
ugcaguauuuggcucauau

SEQ ID NO: 474028 - RNA, 19 nt, Artificial Sequence
  Description of Artificial Sequence: Synthetic oligonucleotide
  Antisense Strand to SEQ ID NO: 474027
auaugagccaaauacugca

SEQ ID NO: 474029 - RNA, 19 nt, Artificial Sequence
  Description of Artificial Sequence: Synthetic oligonucleotide
  Sense strand starting at position 1119 of SEQ ID NO: 317223
uuguauuugucucuccuuu

SEQ ID NO: 474030 - RNA, 19 nt, Artificial Sequence
  Description of Artificial Sequence: Synthetic oligonucleotide
  Antisense Strand to SEQ ID NO: 474029
aaaggagagacaaauacaa

SEQ ID NO: 474031 - RNA, 19 nt, Artificial Sequence
  Description of Artificial Sequence: Synthetic oligonucleotide
  Sense strand starting at position 1158 of SEQ ID NO: 317223
aggacagcccacuaucuua

SEQ ID NO: 474032 - RNA, 19 nt, Artificial Sequence
  Description of Artificial Sequence: Synthetic oligonucleotide
  Antisense Strand to SEQ ID NO: 474031
uaagauagugggcuguccu

SEQ ID NO: 474033 - RNA, 19 nt, Artificial Sequence
  Description of Artificial Sequence: Synthetic oligonucleotide
  Sense strand starting at position 1285 of SEQ ID NO: 317223
ucuucuacuguuuauugau

SEQ ID NO: 474034 - RNA, 19 nt, Artificial Sequence
  Description of Artificial Sequence: Synthetic oligonucleotide
  Antisense Strand to SEQ ID NO: 474033
aucaauaaacaguagaaga

SEQ ID NO: 474035 - RNA, 19 nt, Artificial Sequence
  Description of Artificial Sequence: Synthetic oligonucleotide
  Sense strand starting at position 1401 of SEQ ID NO: 317223
gaagaauucuagucuguuu

SEQ ID NO: 474036 - RNA, 19 nt, Artificial Sequence
  Description of Artificial Sequence: Synthetic oligonucleotide
  Antisense Strand to SEQ ID NO: 474035
aaacagacuagaauucuuc

SEQ ID NO: 474037 - RNA, 19 nt, Artificial Sequence
  Description of Artificial Sequence: Synthetic oligonucleotide
  Sense strand starting at position 1538 of SEQ ID NO: 317223
aagaaauuagaccggcaua

SEQ ID NO: 474038 - RNA, 19 nt, Artificial Sequence
  Description of Artificial Sequence: Synthetic oligonucleotide
  Antisense Strand to SEQ ID NO: 474037
uaugccggucuaauuucuu

SEQ ID NO: 474039 - RNA, 19 nt, Artificial Sequence
  Description of Artificial Sequence: Synthetic oligonucleotide
  Sense strand starting at position 1541 of SEQ ID NO: 317223
aaauuagaccggcauaagu

SEQ ID NO: 474040 - RNA, 19 nt, Artificial Sequence
  Description of Artificial Sequence: Synthetic oligonucleotide
  Antisense Strand to SEQ ID NO: 474039
acuuaugccggucuaauuu

SEQ ID NO: 474041 - RNA, 19 nt, Artificial Sequence
  Description of Artificial Sequence: Synthetic oligonucleotide
  Sense strand starting at position 1551 of SEQ ID NO: 317223
ggcauaagucaacaugcau

SEQ ID NO: 474042 - RNA, 19 nt, Artificial Sequence
  Description of Artificial Sequence: Synthetic oligonucleotide
  Antisense Strand to SEQ ID NO: 474041
augcauguugacuuaugcc

SEQ ID NO: 474043 - RNA, 19 nt, Artificial Sequence
  Description of Artificial Sequence: Synthetic oligonucleotide
  Sense strand starting at position 1644 of SEQ ID NO: 317223
gcagcaauugaugaggauu

SEQ ID NO: 474044 - RNA, 19 nt, Artificial Sequence
  Description of Artificial Sequence: Synthetic oligonucleotide
  Antisense Strand to SEQ ID NO: 474043
aauccucaucaauugcugc

SEQ ID NO: 474045 - RNA, 19 nt, Artificial Sequence
  Description of Artificial Sequence: Synthetic oligonucleotide
  Sense strand starting at position 1892 of SEQ ID NO: 317223
cuuguaaaguacuuacaau

SEQ ID NO: 474046 - RNA, 19 nt, Artificial Sequence
  Description of Artificial Sequence: Synthetic oligonucleotide
  Antisense Strand to SEQ ID NO: 474045
auuguaaguacuuuacaag

SEQ ID NO: 474047 - RNA, 19 nt, Artificial Sequence
  Description of Artificial Sequence: Synthetic oligonucleotide
  Sense strand starting at position 1918 of SEQ ID NO: 317223
caagguuccgagcaggaaa

SEQ ID NO: 474048 - RNA, 19 nt, Artificial Sequence
  Description of Artificial Sequence: Synthetic oligonucleotide
  Antisense Strand to SEQ ID NO: 474047
uuuccugcucggaaccuug

SEQ ID NO: 474049 - RNA, 19 nt, Artificial Sequence
  Description of Artificial Sequence: Synthetic oligonucleotide
  Sense strand starting at position 2045 of SEQ ID NO: 317223
ucuuauuggccagaguaau

SEQ ID NO: 474050 - RNA, 19 nt, Artificial Sequence
  Description of Artificial Sequence: Synthetic oligonucleotide
  Antisense Strand to SEQ ID NO: 474049
auuacucuggccaauaaga

SEQ ID NO: 474051 - RNA, 19 nt, Artificial Sequence
  Description of Artificial Sequence: Synthetic oligonucleotide
  Sense strand starting at position 2053 of SEQ ID NO: 317223
gccagaguaauccagcaga

SEQ ID NO: 474052 - RNA, 19 nt, Artificial Sequence
  Description of Artificial Sequence: Synthetic oligonucleotide
  Antisense Strand to SEQ ID NO: 474051
ucugcuggauuacucuggc

SEQ ID NO: 474053 - RNA, 19 nt, Artificial Sequence
  Description of Artificial Sequence: Synthetic oligonucleotide
  Sense strand starting at position 2056 of SEQ ID NO: 317223
agaguaauccagcagaagu

SEQ ID NO: 474054 - RNA, 19 nt, Artificial Sequence
  Description of Artificial Sequence: Synthetic oligonucleotide
  Antisense Strand to SEQ ID NO: 474053
acuucugcuggauuacucu

SEQ ID NO: 474055 - RNA, 19 nt, Artificial Sequence
  Description of Artificial Sequence: Synthetic oligonucleotide
  Sense strand starting at position 2087 of SEQ ID NO: 317223
uguuucucuuaucuggaga

SEQ ID NO: 474056 - RNA, 19 nt, Artificial Sequence
  Description of Artificial Sequence: Synthetic oligonucleotide
  Antisense Strand to SEQ ID NO: 474055
ucuccagauaagagaaaca

SEQ ID NO: 474057 - RNA, 19 nt, Artificial Sequence
  Description of Artificial Sequence: Synthetic oligonucleotide
  Sense strand starting at position 2150 of SEQ ID NO: 317223
uuguguuagguacacugau

SEQ ID NO: 474058 - RNA, 19 nt, Artificial Sequence
  Description of Artificial Sequence: Synthetic oligonucleotide
  Antisense Strand to SEQ ID NO: 474057
aucaguguaccuaacacaa

SEQ ID NO: 474059 - RNA, 19 nt, Artificial Sequence
  Description of Artificial Sequence: Synthetic oligonucleotide
  Sense strand starting at position 2327 of SEQ ID NO: 317223
ucaagcauccuuuaauggu

SEQ ID NO: 474060 - RNA, 19 nt, Artificial Sequence
  Description of Artificial Sequence: Synthetic oligonucleotide
  Antisense Strand to SEQ ID NO: 474059
accauuaaaggaugcuuga

SEQ ID NO: 474061 - RNA, 19 nt, Artificial Sequence
  Description of Artificial Sequence: Synthetic oligonucleotide
  Sense strand starting at position 2376 of SEQ ID NO: 317223
ggccaagcauuaucaauga

SEQ ID NO: 474062 - RNA, 19 nt, Artificial Sequence
  Description of Artificial Sequence: Synthetic oligonucleotide
  Antisense Strand to SEQ ID NO: 474061
ucauugauaaugcuuggcc

SEQ ID NO: 474063 - RNA, 19 nt, Artificial Sequence
  Description of Artificial Sequence: Synthetic oligonucleotide
  Sense strand starting at position 2387 of SEQ ID NO: 317223
aucaaugacuuguuaauga

SEQ ID NO: 474064 - RNA, 19 nt, Artificial Sequence
  Description of Artificial Sequence: Synthetic oligonucleotide
  Antisense Strand to SEQ ID NO: 474063
ucauuaacaagucauugau

SEQ ID NO: 474065 - RNA, 19 nt, Artificial Sequence
  Description of Artificial Sequence: Synthetic oligonucleotide
  Sense strand starting at position 2456 of SEQ ID NO: 317223
ucagauucuugagcugacu

SEQ ID NO: 474066 - RNA, 19 nt, Artificial Sequence
  Description of Artificial Sequence: Synthetic oligonucleotide
  Antisense Strand to SEQ ID NO: 474065
agucagcucaagaaucuga

SEQ ID NO: 474067 - RNA, 19 nt, Artificial Sequence
  Description of Artificial Sequence: Synthetic oligonucleotide
  Sense strand starting at position 2494 of SEQ ID NO: 317223
acaaguuacucaccuagga

SEQ ID NO: 474068 - RNA, 19 nt, Artificial Sequence
  Description of Artificial Sequence: Synthetic oligonucleotide
  Antisense Strand to SEQ ID NO: 474067
uccuaggugaguaacuugu

SEQ ID NO: 474069 - RNA, 19 nt, Artificial Sequence
  Description of Artificial Sequence: Synthetic oligonucleotide
  Sense strand starting at position 3016 of SEQ ID NO: 317223
gaggcuaguccauaacaau

SEQ ID NO: 474070 - RNA, 19 nt, Artificial Sequence
  Description of Artificial Sequence: Synthetic oligonucleotide
  Antisense Strand to SEQ ID NO: 474069
auuguuauggacuagccuc

SEQ ID NO: 474071 - RNA, 19 nt, Artificial Sequence
  Description of Artificial Sequence: Synthetic oligonucleotide
  Sense strand starting at position 3112 of SEQ ID NO: 317223
acugcuuaaggucagaguu

SEQ ID NO: 474072 - RNA, 19 nt, Artificial Sequence
  Description of Artificial Sequence: Synthetic oligonucleotide
  Antisense Strand to SEQ ID NO: 474071
aacucugaccuuaagcagu

SEQ ID NO: 474073 - RNA, 19 nt, Artificial Sequence
  Description of Artificial Sequence: Synthetic oligonucleotide
  Sense strand starting at position 3429 of SEQ ID NO: 317223
ugggaaaucuuucccacua

SEQ ID NO: 474074 - RNA, 19 nt, Artificial Sequence
  Description of Artificial Sequence: Synthetic oligonucleotide
  Antisense Strand to SEQ ID NO: 474073
uagugggaaagauuuccca

SEQ ID NO: 474075 - RNA, 19 nt, Artificial Sequence
  Description of Artificial Sequence: Synthetic oligonucleotide
  Sense strand starting at position 3430 of SEQ ID NO: 317223
gggaaaucuuucccacuag

SEQ ID NO: 474076 - RNA, 19 nt, Artificial Sequence
  Description of Artificial Sequence: Synthetic oligonucleotide
  Antisense Strand to SEQ ID NO: 474075
cuagugggaaagauuuccc

SEQ ID NO: 474077 - RNA, 19 nt, Artificial Sequence
  Description of Artificial Sequence: Synthetic oligonucleotide
  Sense strand starting at position 3454 of SEQ ID NO: 317223
ggcuauugugugagguugu

SEQ ID NO: 474078 - RNA, 19 nt, Artificial Sequence
  Description of Artificial Sequence: Synthetic oligonucleotide
  Antisense Strand to SEQ ID NO: 474077
acaaccucacacaauagcc

SEQ ID NO: 474079 - RNA, 19 nt, Artificial Sequence
  Description of Artificial Sequence: Synthetic oligonucleotide
  Sense strand starting at position 3465 of SEQ ID NO: 317223
gagguuguacagugagaau

SEQ ID NO: 474080 - RNA, 19 nt, Artificial Sequence
  Description of Artificial Sequence: Synthetic oligonucleotide
  Antisense Strand to SEQ ID NO: 474079
auucucacuguacaaccuc

SEQ ID NO: 474081 - RNA, 19 nt, Artificial Sequence
  Description of Artificial Sequence: Synthetic oligonucleotide
  Sense strand starting at position 3488 of SEQ ID NO: 317223
ggcauuauggcagacucua

SEQ ID NO: 474082 - RNA, 19 nt, Artificial Sequence
  Description of Artificial Sequence: Synthetic oligonucleotide
  Antisense Strand to SEQ ID NO: 474081
uagagucugccauaaugcc

SEQ ID NO: 474083 - RNA, 19 nt, Artificial Sequence
  Description of Artificial Sequence: Synthetic oligonucleotide
  Sense strand starting at position 3587 of SEQ ID NO: 317223
gucaaaugagcguaauaau

SEQ ID NO: 474084 - RNA, 19 nt, Artificial Sequence
  Description of Artificial Sequence: Synthetic oligonucleotide
  Antisense Strand to SEQ ID NO: 474083
auuauuacgcucauuugac

SEQ ID NO: 474085 - RNA, 19 nt, Artificial Sequence
  Description of Artificial Sequence: Synthetic oligonucleotide
  Sense strand starting at position 110 of SEQ ID NO: 317224
guuagaaaucucuguugug

SEQ ID NO: 474086 - RNA, 19 nt, Artificial Sequence
  Description of Artificial Sequence: Synthetic oligonucleotide
  Antisense Strand to SEQ ID NO: 474085
cacaacagagauuucuaac

SEQ ID NO: 474087 - RNA, 19 nt, Artificial Sequence
  Description of Artificial Sequence: Synthetic oligonucleotide
  Sense strand starting at position 298 of SEQ ID NO: 317224
aagaaaucucgagguugcu

SEQ ID NO: 474088 - RNA, 19 nt, Artificial Sequence
  Description of Artificial Sequence: Synthetic oligonucleotide
  Antisense Strand to SEQ ID NO: 474087
agcaaccucgagauuucuu

SEQ ID NO: 474089 - RNA, 19 nt, Artificial Sequence
  Description of Artificial Sequence: Synthetic oligonucleotide
  Sense strand starting at position 307 of SEQ ID NO: 317224
cgagguugcucuuuaaagg

SEQ ID NO: 474090 - RNA, 19 nt, Artificial Sequence
  Description of Artificial Sequence: Synthetic oligonucleotide
  Antisense Strand to SEQ ID NO: 474089
ccuuuaaagagcaaccucg

SEQ ID NO: 474091 - RNA, 19 nt, Artificial Sequence
  Description of Artificial Sequence: Synthetic oligonucleotide
  Sense strand starting at position 358 of SEQ ID NO: 317224
agaggaaguugcucuguuu

SEQ ID NO: 474092 - RNA, 19 nt, Artificial Sequence
  Description of Artificial Sequence: Synthetic oligonucleotide
  Antisense Strand to SEQ ID NO: 474091
aaacagagcaacuuccucu

SEQ ID NO: 474093 - RNA, 19 nt, Artificial Sequence
  Description of Artificial Sequence: Synthetic oligonucleotide
  Sense strand starting at position 361 of SEQ ID NO: 317224
ggaaguugcucuguuugaa

SEQ ID NO: 474094 - RNA, 19 nt, Artificial Sequence
  Description of Artificial Sequence: Synthetic oligonucleotide
  Antisense Strand to SEQ ID NO: 474093
uucaaacagagcaacuucc

SEQ ID NO: 474095 - RNA, 19 nt, Artificial Sequence
  Description of Artificial Sequence: Synthetic oligonucleotide
  Sense strand starting at position 672 of SEQ ID NO: 317224
uugcauuaagccgagguca

SEQ ID NO: 474096 - RNA, 19 nt, Artificial Sequence
  Description of Artificial Sequence: Synthetic oligonucleotide
  Antisense Strand to SEQ ID NO: 474095
ugaccucggcuuaaugcaa

SEQ ID NO: 474097 - RNA, 19 nt, Artificial Sequence
  Description of Artificial Sequence: Synthetic oligonucleotide
  Sense strand starting at position 880 of SEQ ID NO: 317224
acgagcaaccugugaucau

SEQ ID NO: 474098 - RNA, 19 nt, Artificial Sequence
  Description of Artificial Sequence: Synthetic oligonucleotide
  Antisense Strand to SEQ ID NO: 474097
augaucacagguugcucgu

SEQ ID NO: 474099 - RNA, 19 nt, Artificial Sequence
  Description of Artificial Sequence: Synthetic oligonucleotide
  Sense strand starting at position 891 of SEQ ID NO: 317224
gugaucauggccgacagua

SEQ ID NO: 474100 - RNA, 19 nt, Artificial Sequence
  Description of Artificial Sequence: Synthetic oligonucleotide
  Antisense Strand to SEQ ID NO: 474099
uacugucggccaugaucac

SEQ ID NO: 474101 - RNA, 19 nt, Artificial Sequence
  Description of Artificial Sequence: Synthetic oligonucleotide
  Sense strand starting at position 900 of SEQ ID NO: 317224
gccgacaguagugaauuau

SEQ ID NO: 474102 - RNA, 19 nt, Artificial Sequence
  Description of Artificial Sequence: Synthetic oligonucleotide
  Antisense Strand to SEQ ID NO: 474101
auaauucacuacugucggc

SEQ ID NO: 474103 - RNA, 19 nt, Artificial Sequence
  Description of Artificial Sequence: Synthetic oligonucleotide
  Sense strand starting at position 1145 of SEQ ID NO: 317224
aaguacauuugguaagguu

SEQ ID NO: 474104 - RNA, 19 nt, Artificial Sequence
  Description of Artificial Sequence: Synthetic oligonucleotide
  Antisense Strand to SEQ ID NO: 474103
aaccuuaccaaauguacuu

SEQ ID NO: 474105 - RNA, 19 nt, Artificial Sequence
  Description of Artificial Sequence: Synthetic oligonucleotide
  Sense strand starting at position 1154 of SEQ ID NO: 317224
ugguaagguuacuccucau

SEQ ID NO: 474106 - RNA, 19 nt, Artificial Sequence
  Description of Artificial Sequence: Synthetic oligonucleotide
  Antisense Strand to SEQ ID NO: 474105
augaggaguaaccuuacca

SEQ ID NO: 474107 - RNA, 19 nt, Artificial Sequence
  Description of Artificial Sequence: Synthetic oligonucleotide
  Sense strand starting at position 1255 of SEQ ID NO: 317224
uucugaaaccgugaucuua

SEQ ID NO: 474108 - RNA, 19 nt, Artificial Sequence
  Description of Artificial Sequence: Synthetic oligonucleotide
  Antisense Strand to SEQ ID NO: 474107
uaagaucacgguuucagaa

SEQ ID NO: 474109 - RNA, 19 nt, Artificial Sequence
  Description of Artificial Sequence: Synthetic oligonucleotide
  Sense strand starting at position 1257 of SEQ ID NO: 317224
cugaaaccgugaucuuaga

SEQ ID NO: 474110 - RNA, 19 nt, Artificial Sequence
  Description of Artificial Sequence: Synthetic oligonucleotide
  Antisense Strand to SEQ ID NO: 474109
ucuaagaucacgguuucag

SEQ ID NO: 474111 - RNA, 19 nt, Artificial Sequence
  Description of Artificial Sequence: Synthetic oligonucleotide
  Sense strand starting at position 1280 of SEQ ID NO: 317224
ucauuuaacuagccguuua

SEQ ID NO: 474112 - RNA, 19 nt, Artificial Sequence
  Description of Artificial Sequence: Synthetic oligonucleotide
  Antisense Strand to SEQ ID NO: 474111
uaaacggcuaguuaaauga

SEQ ID NO: 474113 - RNA, 19 nt, Artificial Sequence
  Description of Artificial Sequence: Synthetic oligonucleotide
  Sense strand starting at position 1285 of SEQ ID NO: 317224
uaacuagccguuuaaaugu

SEQ ID NO: 474114 - RNA, 19 nt, Artificial Sequence
  Description of Artificial Sequence: Synthetic oligonucleotide
  Antisense Strand to SEQ ID NO: 474113
acauuuaaacggcuaguua

SEQ ID NO: 474115 - RNA, 19 nt, Artificial Sequence
  Description of Artificial Sequence: Synthetic oligonucleotide
  Sense strand starting at position 1435 of SEQ ID NO: 317224
cguguccuucuauagacau

SEQ ID NO: 474116 - RNA, 19 nt, Artificial Sequence
  Description of Artificial Sequence: Synthetic oligonucleotide
  Antisense Strand to SEQ ID NO: 474115
augucuauagaaggacacg

SEQ ID NO: 474117 - RNA, 19 nt, Artificial Sequence
  Description of Artificial Sequence: Synthetic oligonucleotide
  Sense strand starting at position 1463 of SEQ ID NO: 317224
uuuggcuucuguuugauuu

SEQ ID NO: 474118 - RNA, 19 nt, Artificial Sequence
  Description of Artificial Sequence: Synthetic oligonucleotide
  Antisense Strand to SEQ ID NO: 474117
aaaucaaacagaagccaaa

SEQ ID NO: 474119 - RNA, 19 nt, Artificial Sequence
  Description of Artificial Sequence: Synthetic oligonucleotide
  Sense strand starting at position 1586 of SEQ ID NO: 317224
gguuccaguaagugaacaa

SEQ ID NO: 474120 - RNA, 19 nt, Artificial Sequence
  Description of Artificial Sequence: Synthetic oligonucleotide
  Antisense Strand to SEQ ID NO: 474119
uuguucacuuacuggaacc

SEQ ID NO: 474121 - RNA, 19 nt, Artificial Sequence
  Description of Artificial Sequence: Synthetic oligonucleotide
  Sense strand starting at position 2017 of SEQ ID NO: 317224
gccgguaaauucuuaagag

SEQ ID NO: 474122 - RNA, 19 nt, Artificial Sequence
  Description of Artificial Sequence: Synthetic oligonucleotide
  Antisense Strand to SEQ ID NO: 474121
cucuuaagaauuuaccggc

SEQ ID NO: 474123 - RNA, 19 nt, Artificial Sequence
  Description of Artificial Sequence: Synthetic oligonucleotide
  Sense strand starting at position 2329 of SEQ ID NO: 317224
gaugguaugggcugagcaa

SEQ ID NO: 474124 - RNA, 19 nt, Artificial Sequence
  Description of Artificial Sequence: Synthetic oligonucleotide
  Antisense Strand to SEQ ID NO: 474123
uugcucagcccauaccauc

SEQ ID NO: 474125 - RNA, 19 nt, Artificial Sequence
  Description of Artificial Sequence: Synthetic oligonucleotide
  Sense strand starting at position 2400 of SEQ ID NO: 317224
cgcugauuugaaugcuuau

SEQ ID NO: 474126 - RNA, 19 nt, Artificial Sequence
  Description of Artificial Sequence: Synthetic oligonucleotide
  Antisense Strand to SEQ ID NO: 474125
auaagcauucaaaucagcg

SEQ ID NO: 474127 - RNA, 19 nt, Artificial Sequence
  Description of Artificial Sequence: Synthetic oligonucleotide
  Sense strand starting at position 2406 of SEQ ID NO: 317224
uuugaaugcuuauuagaug

SEQ ID NO: 474128 - RNA, 19 nt, Artificial Sequence
  Description of Artificial Sequence: Synthetic oligonucleotide
  Antisense Strand to SEQ ID NO: 474127
caucuaauaagcauucaaa

SEQ ID NO: 474129 - RNA, 19 nt, Artificial Sequence
  Description of Artificial Sequence: Synthetic oligonucleotide
  Sense strand starting at position 2501 of SEQ ID NO: 317224
cgccaaucucaugaaauaa

SEQ ID NO: 474130 - RNA, 19 nt, Artificial Sequence
  Description of Artificial Sequence: Synthetic oligonucleotide
  Antisense Strand to SEQ ID NO: 474129
uuauuucaugagauuggcg

SEQ ID NO: 474131 - RNA, 19 nt, Artificial Sequence
  Description of Artificial Sequence: Synthetic oligonucleotide
  Sense strand starting at position 2574 of SEQ ID NO: 317224
uuagcuuggcuuugggaaa

SEQ ID NO: 474132 - RNA, 19 nt, Artificial Sequence
  Description of Artificial Sequence: Synthetic oligonucleotide
  Antisense Strand to SEQ ID NO: 474131
uuucccaaagccaagcuaa

SEQ ID NO: 474133 - RNA, 19 nt, Artificial Sequence
  Description of Artificial Sequence: Synthetic oligonucleotide
  Sense strand starting at position 2776 of SEQ ID NO: 317224
ccagauggugcauagcaaa

SEQ ID NO: 474134 - RNA, 19 nt, Artificial Sequence
  Description of Artificial Sequence: Synthetic oligonucleotide
  Antisense Strand to SEQ ID NO: 474133
uuugcuaugcaccaucugg

SEQ ID NO: 474135 - RNA, 19 nt, Artificial Sequence
  Description of Artificial Sequence: Synthetic oligonucleotide
  Sense strand starting at position 2869 of SEQ ID NO: 317224
gggaccagaucuucccuaa

SEQ ID NO: 474136 - RNA, 19 nt, Artificial Sequence
  Description of Artificial Sequence: Synthetic oligonucleotide
  Antisense Strand to SEQ ID NO: 474135
uuagggaagaucugguccc

SEQ ID NO: 474137 - RNA, 19 nt, Artificial Sequence
  Description of Artificial Sequence: Synthetic oligonucleotide
  Sense strand starting at position 2900 of SEQ ID NO: 317224
guacuaacauggucgaaac

SEQ ID NO: 474138 - RNA, 19 nt, Artificial Sequence
  Description of Artificial Sequence: Synthetic oligonucleotide
  Antisense Strand to SEQ ID NO: 474137
guuucgaccauguuaguac

SEQ ID NO: 474139 - RNA, 19 nt, Artificial Sequence
  Description of Artificial Sequence: Synthetic oligonucleotide
  Sense strand starting at position 2929 of SEQ ID NO: 317224
ggugauggcuucccacauu

SEQ ID NO: 474140 - RNA, 19 nt, Artificial Sequence
  Description of Artificial Sequence: Synthetic oligonucleotide
  Antisense Strand to SEQ ID NO: 474139
aaugugggaagccaucacc

SEQ ID NO: 474141 - RNA, 19 nt, Artificial Sequence
  Description of Artificial Sequence: Synthetic oligonucleotide
  Sense strand starting at position 3050 of SEQ ID NO: 317224
aggcuaauuauccguaaug

SEQ ID NO: 474142 - RNA, 19 nt, Artificial Sequence
  Description of Artificial Sequence: Synthetic oligonucleotide
  Antisense Strand to SEQ ID NO: 474141
cauuacggauaauuagccu

SEQ ID NO: 474143 - RNA, 19 nt, Artificial Sequence
  Description of Artificial Sequence: Synthetic oligonucleotide
  Sense strand starting at position 3072 of SEQ ID NO: 317224
aguggcuaucccuagguga

SEQ ID NO: 474144 - RNA, 19 nt, Artificial Sequence
  Description of Artificial Sequence: Synthetic oligonucleotide
  Antisense Strand to SEQ ID NO: 474143
ucaccuagggauagccacu

SEQ ID NO: 474145 - RNA, 19 nt, Artificial Sequence
  Description of Artificial Sequence: Synthetic oligonucleotide
  Sense strand starting at position 3074 of SEQ ID NO: 317224
uggcuaucccuaggugauu

SEQ ID NO: 474146 - RNA, 19 nt, Artificial Sequence
  Description of Artificial Sequence: Synthetic oligonucleotide
  Antisense Strand to SEQ ID NO: 474145
aaucaccuagggauagcca

SEQ ID NO: 474147 - RNA, 19 nt, Artificial Sequence
  Description of Artificial Sequence: Synthetic oligonucleotide
  Sense strand starting at position 3085 of SEQ ID NO: 317224
aggugauuggcugauagac

SEQ ID NO: 474148 - RNA, 19 nt, Artificial Sequence
  Description of Artificial Sequence: Synthetic oligonucleotide
  Antisense Strand to SEQ ID NO: 474147
gucuaucagccaaucaccu

SEQ ID NO: 474149 - RNA, 19 nt, Artificial Sequence
  Description of Artificial Sequence: Synthetic oligonucleotide
  Sense strand starting at position 3157 of SEQ ID NO: 317224
caaugaauggcacgaucau

SEQ ID NO: 474150 - RNA, 19 nt, Artificial Sequence
  Description of Artificial Sequence: Synthetic oligonucleotide
  Antisense Strand to SEQ ID NO: 474149
augaucgugccauucauug

SEQ ID NO: 474151 - RNA, 19 nt, Artificial Sequence
  Description of Artificial Sequence: Synthetic oligonucleotide
  Sense strand starting at position 3398 of SEQ ID NO: 317224
ccacccauggccgauaauu

SEQ ID NO: 474152 - RNA, 19 nt, Artificial Sequence
  Description of Artificial Sequence: Synthetic oligonucleotide
  Antisense Strand to SEQ ID NO: 474151
aauuaucggccaugggugg

SEQ ID NO: 474153 - RNA, 19 nt, Artificial Sequence
  Description of Artificial Sequence: Synthetic oligonucleotide
  Sense strand starting at position 3581 of SEQ ID NO: 317224
guggauccucggugacaga

SEQ ID NO: 474154 - RNA, 19 nt, Artificial Sequence
  Description of Artificial Sequence: Synthetic oligonucleotide
  Antisense Strand to SEQ ID NO: 474153
ucugucaccgaggauccac

SEQ ID NO: 474155 - RNA, 19 nt, Artificial Sequence
  Description of Artificial Sequence: Synthetic oligonucleotide
  Sense strand starting at position 3670 of SEQ ID NO: 317224
acuauagcuguuuguauuu

SEQ ID NO: 474156 - RNA, 19 nt, Artificial Sequence
  Description of Artificial Sequence: Synthetic oligonucleotide
  Antisense Strand to SEQ ID NO: 474155
aaauacaaacagcuauagu

SEQ ID NO: 474157 - RNA, 19 nt, Artificial Sequence
  Description of Artificial Sequence: Synthetic oligonucleotide
  Sense strand starting at position 3707 of SEQ ID NO: 317224
agccaaugcuuggcaugaa

SEQ ID NO: 474158 - RNA, 19 nt, Artificial Sequence
  Description of Artificial Sequence: Synthetic oligonucleotide
  Antisense Strand to SEQ ID NO: 474157
uucaugccaagcauuggcu

SEQ ID NO: 474159 - RNA, 19 nt, Artificial Sequence
  Description of Artificial Sequence: Synthetic oligonucleotide
  Sense strand starting at position 3716 of SEQ ID NO: 317224
uuggcaugaaacugguauu

SEQ ID NO: 474160 - RNA, 19 nt, Artificial Sequence
  Description of Artificial Sequence: Synthetic oligonucleotide
  Antisense Strand to SEQ ID NO: 474159
aauaccaguuucaugccaa

SEQ ID NO: 474161 - RNA, 19 nt, Artificial Sequence
  Description of Artificial Sequence: Synthetic oligonucleotide
  Sense strand starting at position 3891 of SEQ ID NO: 317224
uccuuuaccugacuguauu

SEQ ID NO: 474162 - RNA, 19 nt, Artificial Sequence
  Description of Artificial Sequence: Synthetic oligonucleotide
  Antisense Strand to SEQ ID NO: 474161
aauacagucagguaaagga

SEQ ID NO: 474163 - RNA, 19 nt, Artificial Sequence
  Description of Artificial Sequence: Synthetic oligonucleotide
  Sense strand starting at position 3901 of SEQ ID NO: 317224
gacuguauuuacuuagugu

SEQ ID NO: 474164 - RNA, 19 nt, Artificial Sequence
  Description of Artificial Sequence: Synthetic oligonucleotide
  Antisense Strand to SEQ ID NO: 474163
acacuaaguaaauacaguc

SEQ ID NO: 474165 - RNA, 19 nt, Artificial Sequence
  Description of Artificial Sequence: Synthetic oligonucleotide
  Sense strand starting at position 547 of SEQ ID NO: 317225
auguuuauguuacuccuau

SEQ ID NO: 474166 - RNA, 19 nt, Artificial Sequence
  Description of Artificial Sequence: Synthetic oligonucleotide
  Antisense Strand to SEQ ID NO: 474165
auaggaguaacauaaacau

SEQ ID NO: 474167 - RNA, 19 nt, Artificial Sequence
  Description of Artificial Sequence: Synthetic oligonucleotide
  Sense strand starting at position 562 of SEQ ID NO: 317225
cuauuaggcugacuucuaa

SEQ ID NO: 474168 - RNA, 19 nt, Artificial Sequence
  Description of Artificial Sequence: Synthetic oligonucleotide
  Antisense Strand to SEQ ID NO: 474167
uuagaagucagccuaauag

SEQ ID NO: 474169 - RNA, 19 nt, Artificial Sequence
  Description of Artificial Sequence: Synthetic oligonucleotide
  Sense strand starting at position 814 of SEQ ID NO: 317225
uguaaaguguuccuuacac

SEQ ID NO: 474170 - RNA, 19 nt, Artificial Sequence
  Description of Artificial Sequence: Synthetic oligonucleotide
  Antisense Strand to SEQ ID NO: 474169
guguaaggaacacuuuaca

SEQ ID NO: 474171 - RNA, 19 nt, Artificial Sequence
  Description of Artificial Sequence: Synthetic oligonucleotide
  Sense strand starting at position 849 of SEQ ID NO: 317225
gcuaguagacaaggaguuu

SEQ ID NO: 474172 - RNA, 19 nt, Artificial Sequence
  Description of Artificial Sequence: Synthetic oligonucleotide
  Antisense Strand to SEQ ID NO: 474171
aaacuccuugucuacuagc

SEQ ID NO: 474173 - RNA, 19 nt, Artificial Sequence
  Description of Artificial Sequence: Synthetic oligonucleotide
  Sense strand starting at position 876 of SEQ ID NO: 317225
ucugauaccucucuaguua

SEQ ID NO: 474174 - RNA, 19 nt, Artificial Sequence
  Description of Artificial Sequence: Synthetic oligonucleotide
  Antisense Strand to SEQ ID NO: 474173
uaacuagagagguaucaga

SEQ ID NO: 474175 - RNA, 19 nt, Artificial Sequence
  Description of Artificial Sequence: Synthetic oligonucleotide
  Sense strand starting at position 877 of SEQ ID NO: 317225
cugauaccucucuaguuac

SEQ ID NO: 474176 - RNA, 19 nt, Artificial Sequence
  Description of Artificial Sequence: Synthetic oligonucleotide
  Antisense Strand to SEQ ID NO: 474175
guaacuagagagguaucag

SEQ ID NO: 474177 - RNA, 19 nt, Artificial Sequence
  Description of Artificial Sequence: Synthetic oligonucleotide
  Sense strand starting at position 909 of SEQ ID NO: 317225
gagagaaguugauuaguuu

SEQ ID NO: 474178 - RNA, 19 nt, Artificial Sequence
  Description of Artificial Sequence: Synthetic oligonucleotide
  Antisense Strand to SEQ ID NO: 474177
aaacuaaucaacuucucuc

SEQ ID NO: 474179 - RNA, 19 nt, Artificial Sequence
  Description of Artificial Sequence: Synthetic oligonucleotide
  Sense strand starting at position 913 of SEQ ID NO: 317225
gaaguugauuaguuuauuc

SEQ ID NO: 474180 - RNA, 19 nt, Artificial Sequence
  Description of Artificial Sequence: Synthetic oligonucleotide
  Antisense Strand to SEQ ID NO: 474179
gaauaaacuaaucaacuuc

SEQ ID NO: 474181 - RNA, 19 nt, Artificial Sequence
  Description of Artificial Sequence: Synthetic oligonucleotide
  Sense strand starting at position 1047 of SEQ ID NO: 317225
uaaagauuaugugugauga

SEQ ID NO: 474182 - RNA, 19 nt, Artificial Sequence
  Description of Artificial Sequence: Synthetic oligonucleotide
  Antisense Strand to SEQ ID NO: 474181
ucaucacacauaaucuuua

SEQ ID NO: 474183 - RNA, 19 nt, Artificial Sequence
  Description of Artificial Sequence: Synthetic oligonucleotide
  Sense strand starting at position 1048 of SEQ ID NO: 317225
aaagauuaugugugaugac

SEQ ID NO: 474184 - RNA, 19 nt, Artificial Sequence
  Description of Artificial Sequence: Synthetic oligonucleotide
  Antisense Strand to SEQ ID NO: 474183
gucaucacacauaaucuuu

SEQ ID NO: 474185 - RNA, 19 nt, Artificial Sequence
  Description of Artificial Sequence: Synthetic oligonucleotide
  Sense strand starting at position 1245 of SEQ ID NO: 317225
gauggugcacccuagugau

SEQ ID NO: 474186 - RNA, 19 nt, Artificial Sequence
  Description of Artificial Sequence: Synthetic oligonucleotide
  Antisense Strand to SEQ ID NO: 474185
aucacuagggugcaccauc

SEQ ID NO: 474187 - RNA, 19 nt, Artificial Sequence
  Description of Artificial Sequence: Synthetic oligonucleotide
  Sense strand starting at position 2130 of SEQ ID NO: 317225
ggaagaacuucugcaagac

SEQ ID NO: 474188 - RNA, 19 nt, Artificial Sequence
  Description of Artificial Sequence: Synthetic oligonucleotide
  Antisense Strand to SEQ ID NO: 474187
gucuugcagaaguucuucc

SEQ ID NO: 474189 - RNA, 19 nt, Artificial Sequence
  Description of Artificial Sequence: Synthetic oligonucleotide
  Sense strand starting at position 2163 of SEQ ID NO: 317225
gccuuaaagaugggacacu

SEQ ID NO: 474190 - RNA, 19 nt, Artificial Sequence
  Description of Artificial Sequence: Synthetic oligonucleotide
  Antisense Strand to SEQ ID NO: 474189
agugucccaucuuuaaggc

SEQ ID NO: 474191 - RNA, 19 nt, Artificial Sequence
  Description of Artificial Sequence: Synthetic oligonucleotide
  Sense strand starting at position 2254 of SEQ ID NO: 317225
augucaagcguuuaagacu

SEQ ID NO: 474192 - RNA, 19 nt, Artificial Sequence
  Description of Artificial Sequence: Synthetic oligonucleotide
  Antisense Strand to SEQ ID NO: 474191
agucuuaaacgcuugacau

SEQ ID NO: 474193 - RNA, 19 nt, Artificial Sequence
  Description of Artificial Sequence: Synthetic oligonucleotide
  Sense strand starting at position 2262 of SEQ ID NO: 317225
cguuuaagacuugacggaa

SEQ ID NO: 474194 - RNA, 19 nt, Artificial Sequence
  Description of Artificial Sequence: Synthetic oligonucleotide
  Antisense Strand to SEQ ID NO: 474193
uuccgucaagucuuaaacg

SEQ ID NO: 474195 - RNA, 19 nt, Artificial Sequence
  Description of Artificial Sequence: Synthetic oligonucleotide
  Sense strand starting at position 2332 of SEQ ID NO: 317225
gcuuauuccguaguuuguu

SEQ ID NO: 474196 - RNA, 19 nt, Artificial Sequence
  Description of Artificial Sequence: Synthetic oligonucleotide
  Antisense Strand to SEQ ID NO: 474195
aacaaacuacggaauaagc

SEQ ID NO: 474197 - RNA, 19 nt, Artificial Sequence
  Description of Artificial Sequence: Synthetic oligonucleotide
  Sense strand starting at position 2362 of SEQ ID NO: 317225
uaauguguacgguaccuua

SEQ ID NO: 474198 - RNA, 19 nt, Artificial Sequence
  Description of Artificial Sequence: Synthetic oligonucleotide
  Antisense Strand to SEQ ID NO: 474197
uaagguaccguacacauua

SEQ ID NO: 474199 - RNA, 19 nt, Artificial Sequence
  Description of Artificial Sequence: Synthetic oligonucleotide
  Sense strand starting at position 2456 of SEQ ID NO: 317225
acaguuagaucucucauac

SEQ ID NO: 474200 - RNA, 19 nt, Artificial Sequence
  Description of Artificial Sequence: Synthetic oligonucleotide
  Antisense Strand to SEQ ID NO: 474199
guaugagagaucuaacugu

SEQ ID NO: 474201 - RNA, 19 nt, Artificial Sequence
  Description of Artificial Sequence: Synthetic oligonucleotide
  Sense strand starting at position 2473 of SEQ ID NO: 317225
acacauaauuuguauggau

SEQ ID NO: 474202 - RNA, 19 nt, Artificial Sequence
  Description of Artificial Sequence: Synthetic oligonucleotide
  Antisense Strand to SEQ ID NO: 474201
auccauacaaauuaugugu

SEQ ID NO: 474203 - RNA, 19 nt, Artificial Sequence
  Description of Artificial Sequence: Synthetic oligonucleotide
  Sense strand starting at position 2495 of SEQ ID NO: 317225
aagagaccucuguaaguuu

SEQ ID NO: 474204 - RNA, 19 nt, Artificial Sequence
  Description of Artificial Sequence: Synthetic oligonucleotide
  Antisense Strand to SEQ ID NO: 474203
aaacuuacagaggucucuu

SEQ ID NO: 474205 - RNA, 19 nt, Artificial Sequence
  Description of Artificial Sequence: Synthetic oligonucleotide
  Sense strand starting at position 2538 of SEQ ID NO: 317225
aagugugaugcuuaaggaa

SEQ ID NO: 474206 - RNA, 19 nt, Artificial Sequence
  Description of Artificial Sequence: Synthetic oligonucleotide
  Antisense Strand to SEQ ID NO: 474205
uuccuuaagcaucacacuu

SEQ ID NO: 474207 - RNA, 19 nt, Artificial Sequence
  Description of Artificial Sequence: Synthetic oligonucleotide
  Sense strand starting at position 2545 of SEQ ID NO: 317225
augcuuaaggaaggauauu

SEQ ID NO: 474208 - RNA, 19 nt, Artificial Sequence
  Description of Artificial Sequence: Synthetic oligonucleotide
  Antisense Strand to SEQ ID NO: 474207
aauauccuuccuuaagcau

SEQ ID NO: 474209 - RNA, 19 nt, Artificial Sequence
  Description of Artificial Sequence: Synthetic oligonucleotide
  Sense strand starting at position 2588 of SEQ ID NO: 317225
cuuagaucuucuguuauua

SEQ ID NO: 474210 - RNA, 19 nt, Artificial Sequence
  Description of Artificial Sequence: Synthetic oligonucleotide
  Antisense Strand to SEQ ID NO: 474209
uaauaacagaagaucuaag

SEQ ID NO: 474211 - RNA, 19 nt, Artificial Sequence
  Description of Artificial Sequence: Synthetic oligonucleotide
  Sense strand starting at position 2592 of SEQ ID NO: 317225
gaucuucuguuauuaagug

SEQ ID NO: 474212 - RNA, 19 nt, Artificial Sequence
  Description of Artificial Sequence: Synthetic oligonucleotide
  Antisense Strand to SEQ ID NO: 474211
cacuuaauaacagaagauc

SEQ ID NO: 474213 - RNA, 19 nt, Artificial Sequence
  Description of Artificial Sequence: Synthetic oligonucleotide
  Sense strand starting at position 2596 of SEQ ID NO: 317225
uucuguuauuaagugaaag

SEQ ID NO: 474214 - RNA, 19 nt, Artificial Sequence
  Description of Artificial Sequence: Synthetic oligonucleotide
  Antisense Strand to SEQ ID NO: 474213
cuuucacuuaauaacagaa

SEQ ID NO: 474215 - RNA, 19 nt, Artificial Sequence
  Description of Artificial Sequence: Synthetic oligonucleotide
  Sense strand starting at position 2626 of SEQ ID NO: 317225
gauguuaguguguauuucu

SEQ ID NO: 474216 - RNA, 19 nt, Artificial Sequence
  Description of Artificial Sequence: Synthetic oligonucleotide
  Antisense Strand to SEQ ID NO: 474215
agaaauacacacuaacauc

SEQ ID NO: 474217 - RNA, 19 nt, Artificial Sequence
  Description of Artificial Sequence: Synthetic oligonucleotide
  Sense strand starting at position 3198 of SEQ ID NO: 317225
gugugaauuucuuaagaac

SEQ ID NO: 474218 - RNA, 19 nt, Artificial Sequence
  Description of Artificial Sequence: Synthetic oligonucleotide
  Antisense Strand to SEQ ID NO: 474217
guucuuaagaaauucacac

SEQ ID NO: 474219 - RNA, 19 nt, Artificial Sequence
  Description of Artificial Sequence: Synthetic oligonucleotide
  Sense strand starting at position 3225 of SEQ ID NO: 317225
ccucuuguauguuuaucaa

SEQ ID NO: 474220 - RNA, 19 nt, Artificial Sequence
  Description of Artificial Sequence: Synthetic oligonucleotide
  Antisense Strand to SEQ ID NO: 474219
uugauaaacauacaagagg

SEQ ID NO: 474221 - RNA, 19 nt, Artificial Sequence
  Description of Artificial Sequence: Synthetic oligonucleotide
  Sense strand starting at position 3382 of SEQ ID NO: 317225
cguauuuaguuaccauauc

SEQ ID NO: 474222 - RNA, 19 nt, Artificial Sequence
  Description of Artificial Sequence: Synthetic oligonucleotide
  Antisense Strand to SEQ ID NO: 474221
gauaugguaacuaaauacg

SEQ ID NO: 474223 - RNA, 19 nt, Artificial Sequence
  Description of Artificial Sequence: Synthetic oligonucleotide
  Sense strand starting at position 3421 of SEQ ID NO: 317225
ggaagaguuccucagcauu

SEQ ID NO: 474224 - RNA, 19 nt, Artificial Sequence
  Description of Artificial Sequence: Synthetic oligonucleotide
  Antisense Strand to SEQ ID NO: 474223
aaugcugaggaacucuucc

SEQ ID NO: 474225 - RNA, 19 nt, Artificial Sequence
  Description of Artificial Sequence: Synthetic oligonucleotide
  Sense strand starting at position 3654 of SEQ ID NO: 317225
uguguuaagggccaguuau

SEQ ID NO: 474226 - RNA, 19 nt, Artificial Sequence
  Description of Artificial Sequence: Synthetic oligonucleotide
  Antisense Strand to SEQ ID NO: 474225
auaacuggcccuuaacaca

SEQ ID NO: 474227 - RNA, 19 nt, Artificial Sequence
  Description of Artificial Sequence: Synthetic oligonucleotide
  Sense strand starting at position 3727 of SEQ ID NO: 317225
cagguuauguauuccugau

SEQ ID NO: 474228 - RNA, 19 nt, Artificial Sequence
  Description of Artificial Sequence: Synthetic oligonucleotide
  Antisense Strand to SEQ ID NO: 474227
aucaggaauacauaaccug

SEQ ID NO: 474229 - RNA, 19 nt, Artificial Sequence
  Description of Artificial Sequence: Synthetic oligonucleotide
  Sense strand starting at position 3729 of SEQ ID NO: 317225
gguuauguauuccugauug

SEQ ID NO: 474230 - RNA, 19 nt, Artificial Sequence
  Description of Artificial Sequence: Synthetic oligonucleotide
  Antisense Strand to SEQ ID NO: 474229
caaucaggaauacauaacc

SEQ ID NO: 474231 - RNA, 19 nt, Artificial Sequence
  Description of Artificial Sequence: Synthetic oligonucleotide
  Sense strand starting at position 3731 of SEQ ID NO: 317225
uuauguauuccugauugua

SEQ ID NO: 474232 - RNA, 19 nt, Artificial Sequence
  Description of Artificial Sequence: Synthetic oligonucleotide
  Antisense Strand to SEQ ID NO: 474231
uacaaucaggaauacauaa

SEQ ID NO: 474233 - RNA, 19 nt, Artificial Sequence
  Description of Artificial Sequence: Synthetic oligonucleotide
  Sense strand starting at position 3733 of SEQ ID NO: 317225
auguauuccugauuguaau

SEQ ID NO: 474234 - RNA, 19 nt, Artificial Sequence
  Description of Artificial Sequence: Synthetic oligonucleotide
  Antisense Strand to SEQ ID NO: 474233
auuacaaucaggaauacau

SEQ ID NO: 474235 - RNA, 19 nt, Artificial Sequence
  Description of Artificial Sequence: Synthetic oligonucleotide
  Sense strand starting at position 3734 of SEQ ID NO: 317225
uguauuccugauuguaaua

SEQ ID NO: 474236 - RNA, 19 nt, Artificial Sequence
  Description of Artificial Sequence: Synthetic oligonucleotide
  Antisense Strand to SEQ ID NO: 474235
uauuacaaucaggaauaca

SEQ ID NO: 474237 - RNA, 19 nt, Artificial Sequence
  Description of Artificial Sequence: Synthetic oligonucleotide
  Sense strand starting at position 3764 of SEQ ID NO: 317225
agguuauauucuuuccaag

SEQ ID NO: 474238 - RNA, 19 nt, Artificial Sequence
  Description of Artificial Sequence: Synthetic oligonucleotide
  Antisense Strand to SEQ ID NO: 474237
cuuggaaagaauauaaccu

SEQ ID NO: 474239 - RNA, 19 nt, Artificial Sequence
  Description of Artificial Sequence: Synthetic oligonucleotide
  Sense strand starting at position 3811 of SEQ ID NO: 317225
uuugucucucauuagugau

SEQ ID NO: 474240 - RNA, 19 nt, Artificial Sequence
  Description of Artificial Sequence: Synthetic oligonucleotide
  Antisense Strand to SEQ ID NO: 474239
aucacuaaugagagacaaa

SEQ ID NO: 474241 - RNA, 19 nt, Artificial Sequence
  Description of Artificial Sequence: Synthetic oligonucleotide
  Sense strand starting at position 3826 of SEQ ID NO: 317225
ugauguuaauuugauccca

SEQ ID NO: 474242 - RNA, 19 nt, Artificial Sequence
  Description of Artificial Sequence: Synthetic oligonucleotide
  Antisense Strand to SEQ ID NO: 474241
ugggaucaaauuaacauca

SEQ ID NO: 474243 - RNA, 19 nt, Artificial Sequence
  Description of Artificial Sequence: Synthetic oligonucleotide
  Sense strand starting at position 3845 of SEQ ID NO: 317225
guuucuccacuguauaaau

SEQ ID NO: 474244 - RNA, 19 nt, Artificial Sequence
  Description of Artificial Sequence: Synthetic oligonucleotide
  Antisense Strand to SEQ ID NO: 474243
auuuauacaguggagaaac

SEQ ID NO: 474245 - RNA, 19 nt, Artificial Sequence
  Description of Artificial Sequence: Synthetic oligonucleotide
  Sense strand starting at position 148 of SEQ ID NO: 317226
cagagagggugcuugguaa

SEQ ID NO: 474246 - RNA, 19 nt, Artificial Sequence
  Description of Artificial Sequence: Synthetic oligonucleotide
  Antisense Strand to SEQ ID NO: 474245
uuaccaagcacccucucug

SEQ ID NO: 474247 - RNA, 19 nt, Artificial Sequence
  Description of Artificial Sequence: Synthetic oligonucleotide
  Sense strand starting at position 292 of SEQ ID NO: 317226
uucuaagugguuuagauaa

SEQ ID NO: 474248 - RNA, 19 nt, Artificial Sequence
  Description of Artificial Sequence: Synthetic oligonucleotide
  Antisense Strand to SEQ ID NO: 474247
uuaucuaaaccacuuagaa

SEQ ID NO: 474249 - RNA, 19 nt, Artificial Sequence
  Description of Artificial Sequence: Synthetic oligonucleotide
  Sense strand starting at position 930 of SEQ ID NO: 317226
auguuuauguuacuccuau

SEQ ID NO: 474250 - RNA, 19 nt, Artificial Sequence
  Description of Artificial Sequence: Synthetic oligonucleotide
  Antisense Strand to SEQ ID NO: 474249
auaggaguaacauaaacau

SEQ ID NO: 474251 - RNA, 19 nt, Artificial Sequence
  Description of Artificial Sequence: Synthetic oligonucleotide
  Sense strand starting at position 931 of SEQ ID NO: 317226
uguuuauguuacuccuauu

SEQ ID NO: 474252 - RNA, 19 nt, Artificial Sequence
  Description of Artificial Sequence: Synthetic oligonucleotide
  Antisense Strand to SEQ ID NO: 474251
aauaggaguaacauaaaca

SEQ ID NO: 474253 - RNA, 19 nt, Artificial Sequence
  Description of Artificial Sequence: Synthetic oligonucleotide
  Sense strand starting at position 945 of SEQ ID NO: 317226
cuauuaggcugacuucuaa

SEQ ID NO: 474254 - RNA, 19 nt, Artificial Sequence
  Description of Artificial Sequence: Synthetic oligonucleotide
  Antisense Strand to SEQ ID NO: 474253
uuagaagucagccuaauag

SEQ ID NO: 474255 - RNA, 19 nt, Artificial Sequence
  Description of Artificial Sequence: Synthetic oligonucleotide
  Sense strand starting at position 1038 of SEQ ID NO: 317226
uuaguugauuucuacucau

SEQ ID NO: 474256 - RNA, 19 nt, Artificial Sequence
  Description of Artificial Sequence: Synthetic oligonucleotide
  Antisense Strand to SEQ ID NO: 474255
augaguagaaaucaacuaa

SEQ ID NO: 474257 - RNA, 19 nt, Artificial Sequence
  Description of Artificial Sequence: Synthetic oligonucleotide
  Sense strand starting at position 1183 of SEQ ID NO: 317226
uugucuucugccuauguaa

SEQ ID NO: 474258 - RNA, 19 nt, Artificial Sequence
  Description of Artificial Sequence: Synthetic oligonucleotide
  Antisense Strand to SEQ ID NO: 474257
uuacauaggcagaagacaa

SEQ ID NO: 474259 - RNA, 19 nt, Artificial Sequence
  Description of Artificial Sequence: Synthetic oligonucleotide
  Sense strand starting at position 1197 of SEQ ID NO: 317226
uguaaaguguuccuuacac

SEQ ID NO: 474260 - RNA, 19 nt, Artificial Sequence
  Description of Artificial Sequence: Synthetic oligonucleotide
  Antisense Strand to SEQ ID NO: 474259
guguaaggaacacuuuaca

SEQ ID NO: 474261 - RNA, 19 nt, Artificial Sequence
  Description of Artificial Sequence: Synthetic oligonucleotide
  Sense strand starting at position 1232 of SEQ ID NO: 317226
gcuaguagacaaggaguuu

SEQ ID NO: 474262 - RNA, 19 nt, Artificial Sequence
  Description of Artificial Sequence: Synthetic oligonucleotide
  Antisense Strand to SEQ ID NO: 474261
aaacuccuugucuacuagc

SEQ ID NO: 474263 - RNA, 19 nt, Artificial Sequence
  Description of Artificial Sequence: Synthetic oligonucleotide
  Sense strand starting at position 1259 of SEQ ID NO: 317226
ucugauaccucucuaguua

SEQ ID NO: 474264 - RNA, 19 nt, Artificial Sequence
  Description of Artificial Sequence: Synthetic oligonucleotide
  Antisense Strand to SEQ ID NO: 474263
uaacuagagagguaucaga

SEQ ID NO: 474265 - RNA, 19 nt, Artificial Sequence
  Description of Artificial Sequence: Synthetic oligonucleotide
  Sense strand starting at position 1260 of SEQ ID NO: 317226
cugauaccucucuaguuac

SEQ ID NO: 474266 - RNA, 19 nt, Artificial Sequence
  Description of Artificial Sequence: Synthetic oligonucleotide
  Antisense Strand to SEQ ID NO: 474265
guaacuagagagguaucag

SEQ ID NO: 474267 - RNA, 19 nt, Artificial Sequence
  Description of Artificial Sequence: Synthetic oligonucleotide
  Sense strand starting at position 1292 of SEQ ID NO: 317226
gagagaaguugauuaguuu

SEQ ID NO: 474268 - RNA, 19 nt, Artificial Sequence
  Description of Artificial Sequence: Synthetic oligonucleotide
  Antisense Strand to SEQ ID NO: 474267
aaacuaaucaacuucucuc

SEQ ID NO: 474269 - RNA, 19 nt, Artificial Sequence
  Description of Artificial Sequence: Synthetic oligonucleotide
  Sense strand starting at position 1296 of SEQ ID NO: 317226
gaaguugauuaguuuauuc

SEQ ID NO: 474270 - RNA, 19 nt, Artificial Sequence
  Description of Artificial Sequence: Synthetic oligonucleotide
  Antisense Strand to SEQ ID NO: 474269
gaauaaacuaaucaacuuc

SEQ ID NO: 474271 - RNA, 19 nt, Artificial Sequence
  Description of Artificial Sequence: Synthetic oligonucleotide
  Sense strand starting at position 1430 of SEQ ID NO: 317226
uaaagauuaugugugauga

SEQ ID NO: 474272 - RNA, 19 nt, Artificial Sequence
  Description of Artificial Sequence: Synthetic oligonucleotide
  Antisense Strand to SEQ ID NO: 474271
ucaucacacauaaucuuua

SEQ ID NO: 474273 - RNA, 19 nt, Artificial Sequence
  Description of Artificial Sequence: Synthetic oligonucleotide
  Sense strand starting at position 1431 of SEQ ID NO: 317226
aaagauuaugugugaugac

SEQ ID NO: 474274 - RNA, 19 nt, Artificial Sequence
  Description of Artificial Sequence: Synthetic oligonucleotide
  Antisense Strand to SEQ ID NO: 474273
gucaucacacauaaucuuu

SEQ ID NO: 474275 - RNA, 19 nt, Artificial Sequence
  Description of Artificial Sequence: Synthetic oligonucleotide
  Sense strand starting at position 1531 of SEQ ID NO: 317226
gguauuacaccucgaugca

SEQ ID NO: 474276 - RNA, 19 nt, Artificial Sequence
  Description of Artificial Sequence: Synthetic oligonucleotide
  Antisense Strand to SEQ ID NO: 474275
ugcaucgagguguaauacc

SEQ ID NO: 474277 - RNA, 19 nt, Artificial Sequence
  Description of Artificial Sequence: Synthetic oligonucleotide
  Sense strand starting at position 1628 of SEQ ID NO: 317226
gauggugcacccuagugau

SEQ ID NO: 474278 - RNA, 19 nt, Artificial Sequence
  Description of Artificial Sequence: Synthetic oligonucleotide
  Antisense Strand to SEQ ID NO: 474277
aucacuagggugcaccauc

SEQ ID NO: 474279 - RNA, 19 nt, Artificial Sequence
  Description of Artificial Sequence: Synthetic oligonucleotide
  Sense strand starting at position 2513 of SEQ ID NO: 317226
ggaagaacuucugcaagac

SEQ ID NO: 474280 - RNA, 19 nt, Artificial Sequence
  Description of Artificial Sequence: Synthetic oligonucleotide
  Antisense Strand to SEQ ID NO: 474279
gucuugcagaaguucuucc

SEQ ID NO: 474281 - RNA, 19 nt, Artificial Sequence
  Description of Artificial Sequence: Synthetic oligonucleotide
  Sense strand starting at position 2546 of SEQ ID NO: 317226
gccuuaaagaugggacacu

SEQ ID NO: 474282 - RNA, 19 nt, Artificial Sequence
  Description of Artificial Sequence: Synthetic oligonucleotide
  Antisense Strand to SEQ ID NO: 474281
agugucccaucuuuaaggc

SEQ ID NO: 474283 - RNA, 19 nt, Artificial Sequence
  Description of Artificial Sequence: Synthetic oligonucleotide
  Sense strand starting at position 2562 of SEQ ID NO: 317226
acuuauggcugaucgguua

SEQ ID NO: 474284 - RNA, 19 nt, Artificial Sequence
  Description of Artificial Sequence: Synthetic oligonucleotide
  Antisense Strand to SEQ ID NO: 474283
uaaccgaucagccauaagu

SEQ ID NO: 474285 - RNA, 19 nt, Artificial Sequence
  Description of Artificial Sequence: Synthetic oligonucleotide
  Sense strand starting at position 2637 of SEQ ID NO: 317226
augucaagcguuuaagacu

SEQ ID NO: 474286 - RNA, 19 nt, Artificial Sequence
  Description of Artificial Sequence: Synthetic oligonucleotide
  Antisense Strand to SEQ ID NO: 474285
agucuuaaacgcuugacau

SEQ ID NO: 474287 - RNA, 19 nt, Artificial Sequence
  Description of Artificial Sequence: Synthetic oligonucleotide
  Sense strand starting at position 2645 of SEQ ID NO: 317226
cguuuaagacuugacggaa

SEQ ID NO: 474288 - RNA, 19 nt, Artificial Sequence
  Description of Artificial Sequence: Synthetic oligonucleotide
  Antisense Strand to SEQ ID NO: 474287
uuccgucaagucuuaaacg

SEQ ID NO: 474289 - RNA, 19 nt, Artificial Sequence
  Description of Artificial Sequence: Synthetic oligonucleotide
  Sense strand starting at position 2715 of SEQ ID NO: 317226
gcuuauuccguaguuuguu

SEQ ID NO: 474290 - RNA, 19 nt, Artificial Sequence
  Description of Artificial Sequence: Synthetic oligonucleotide
  Antisense Strand to SEQ ID NO: 474289
aacaaacuacggaauaagc

SEQ ID NO: 474291 - RNA, 19 nt, Artificial Sequence
  Description of Artificial Sequence: Synthetic oligonucleotide
  Sense strand starting at position 2745 of SEQ ID NO: 317226
uaauguguacgguaccuua

SEQ ID NO: 474292 - RNA, 19 nt, Artificial Sequence
  Description of Artificial Sequence: Synthetic oligonucleotide
  Antisense Strand to SEQ ID NO: 474291
uaagguaccguacacauua

SEQ ID NO: 474293 - RNA, 19 nt, Artificial Sequence
  Description of Artificial Sequence: Synthetic oligonucleotide
  Sense strand starting at position 2839 of SEQ ID NO: 317226
acaguuagaucucucauac

SEQ ID NO: 474294 - RNA, 19 nt, Artificial Sequence
  Description of Artificial Sequence: Synthetic oligonucleotide
  Antisense Strand to SEQ ID NO: 474293
guaugagagaucuaacugu

SEQ ID NO: 474295 - RNA, 19 nt, Artificial Sequence
  Description of Artificial Sequence: Synthetic oligonucleotide
  Sense strand starting at position 2856 of SEQ ID NO: 317226
acacauaauuuguauggau

SEQ ID NO: 474296 - RNA, 19 nt, Artificial Sequence
  Description of Artificial Sequence: Synthetic oligonucleotide
  Antisense Strand to SEQ ID NO: 474295
auccauacaaauuaugugu

SEQ ID NO: 474297 - RNA, 19 nt, Artificial Sequence
  Description of Artificial Sequence: Synthetic oligonucleotide
  Sense strand starting at position 2878 of SEQ ID NO: 317226
aagagaccucuguaaguuu

SEQ ID NO: 474298 - RNA, 19 nt, Artificial Sequence
  Description of Artificial Sequence: Synthetic oligonucleotide
  Antisense Strand to SEQ ID NO: 474297
aaacuuacagaggucucuu

SEQ ID NO: 474299 - RNA, 19 nt, Artificial Sequence
  Description of Artificial Sequence: Synthetic oligonucleotide
  Sense strand starting at position 2889 of SEQ ID NO: 317226
guaaguuugggaugguguu

SEQ ID NO: 474300 - RNA, 19 nt, Artificial Sequence
  Description of Artificial Sequence: Synthetic oligonucleotide
  Antisense Strand to SEQ ID NO: 474299
aacaccaucccaaacuuac

SEQ ID NO: 474301 - RNA, 19 nt, Artificial Sequence
  Description of Artificial Sequence: Synthetic oligonucleotide
  Sense strand starting at position 2921 of SEQ ID NO: 317226
aagugugaugcuuaaggaa

SEQ ID NO: 474302 - RNA, 19 nt, Artificial Sequence
  Description of Artificial Sequence: Synthetic oligonucleotide
  Antisense Strand to SEQ ID NO: 474301
uuccuuaagcaucacacuu

SEQ ID NO: 474303 - RNA, 19 nt, Artificial Sequence
  Description of Artificial Sequence: Synthetic oligonucleotide
  Sense strand starting at position 2928 of SEQ ID NO: 317226
augcuuaaggaaggauauu

SEQ ID NO: 474304 - RNA, 19 nt, Artificial Sequence
  Description of Artificial Sequence: Synthetic oligonucleotide
  Antisense Strand to SEQ ID NO: 474303
aauauccuuccuuaagcau

SEQ ID NO: 474305 - RNA, 19 nt, Artificial Sequence
  Description of Artificial Sequence: Synthetic oligonucleotide
  Sense strand starting at position 2971 of SEQ ID NO: 317226
cuuagaucuucuguuauua

SEQ ID NO: 474306 - RNA, 19 nt, Artificial Sequence
  Description of Artificial Sequence: Synthetic oligonucleotide
  Antisense Strand to SEQ ID NO: 474305
uaauaacagaagaucuaag

SEQ ID NO: 474307 - RNA, 19 nt, Artificial Sequence
  Description of Artificial Sequence: Synthetic oligonucleotide
  Sense strand starting at position 2975 of SEQ ID NO: 317226
gaucuucuguuauuaagug

SEQ ID NO: 474308 - RNA, 19 nt, Artificial Sequence
  Description of Artificial Sequence: Synthetic oligonucleotide
  Antisense Strand to SEQ ID NO: 474307
cacuuaauaacagaagauc

SEQ ID NO: 474309 - RNA, 19 nt, Artificial Sequence
  Description of Artificial Sequence: Synthetic oligonucleotide
  Sense strand starting at position 2979 of SEQ ID NO: 317226
uucuguuauuaagugaaag

SEQ ID NO: 474310 - RNA, 19 nt, Artificial Sequence
  Description of Artificial Sequence: Synthetic oligonucleotide
  Antisense Strand to SEQ ID NO: 474309
cuuucacuuaauaacagaa

SEQ ID NO: 474311 - RNA, 19 nt, Artificial Sequence
  Description of Artificial Sequence: Synthetic oligonucleotide
  Sense strand starting at position 3009 of SEQ ID NO: 317226
gauguuaguguguauuucu

SEQ ID NO: 474312 - RNA, 19 nt, Artificial Sequence
  Description of Artificial Sequence: Synthetic oligonucleotide
  Antisense Strand to SEQ ID NO: 474311
agaaauacacacuaacauc

SEQ ID NO: 474313 - RNA, 19 nt, Artificial Sequence
  Description of Artificial Sequence: Synthetic oligonucleotide
  Sense strand starting at position 3409 of SEQ ID NO: 317226
uguuguccuuuacucagau

SEQ ID NO: 474314 - RNA, 19 nt, Artificial Sequence
  Description of Artificial Sequence: Synthetic oligonucleotide
  Antisense Strand to SEQ ID NO: 474313
aucugaguaaaggacaaca

SEQ ID NO: 474315 - RNA, 19 nt, Artificial Sequence
  Description of Artificial Sequence: Synthetic oligonucleotide
  Sense strand starting at position 3410 of SEQ ID NO: 317226
guuguccuuuacucagauu

SEQ ID NO: 474316 - RNA, 19 nt, Artificial Sequence
  Description of Artificial Sequence: Synthetic oligonucleotide
  Antisense Strand to SEQ ID NO: 474315
aaucugaguaaaggacaac

SEQ ID NO: 474317 - RNA, 19 nt, Artificial Sequence
  Description of Artificial Sequence: Synthetic oligonucleotide
  Sense strand starting at position 3581 of SEQ ID NO: 317226
gugugaauuucuuaagaac

SEQ ID NO: 474318 - RNA, 19 nt, Artificial Sequence
  Description of Artificial Sequence: Synthetic oligonucleotide
  Antisense Strand to SEQ ID NO: 474317
guucuuaagaaauucacac

SEQ ID NO: 474319 - RNA, 19 nt, Artificial Sequence
  Description of Artificial Sequence: Synthetic oligonucleotide
  Sense strand starting at position 3608 of SEQ ID NO: 317226
ccucuuguauguuuaucaa

SEQ ID NO: 474320 - RNA, 19 nt, Artificial Sequence
  Description of Artificial Sequence: Synthetic oligonucleotide
  Antisense Strand to SEQ ID NO: 474319
uugauaaacauacaagagg

SEQ ID NO: 474321 - RNA, 19 nt, Artificial Sequence
  Description of Artificial Sequence: Synthetic oligonucleotide
  Sense strand starting at position 3765 of SEQ ID NO: 317226
cguauuuaguuaccauauc

SEQ ID NO: 474322 - RNA, 19 nt, Artificial Sequence
  Description of Artificial Sequence: Synthetic oligonucleotide
  Antisense Strand to SEQ ID NO: 474321
gauaugguaacuaaauacg

SEQ ID NO: 474323 - RNA, 19 nt, Artificial Sequence
  Description of Artificial Sequence: Synthetic oligonucleotide
  Sense strand starting at position 3804 of SEQ ID NO: 317226
ggaagaguuccucagcauu

SEQ ID NO: 474324 - RNA, 19 nt, Artificial Sequence
  Description of Artificial Sequence: Synthetic oligonucleotide
  Antisense Strand to SEQ ID NO: 474323
aaugcugaggaacucuucc

SEQ ID NO: 474325 - RNA, 19 nt, Artificial Sequence
  Description of Artificial Sequence: Synthetic oligonucleotide
  Sense strand starting at position 281 of SEQ ID NO: 317227
uugaauaauuagcccauga

SEQ ID NO: 474326 - RNA, 19 nt, Artificial Sequence
  Description of Artificial Sequence: Synthetic oligonucleotide
  Antisense Strand to SEQ ID NO: 474325
ucaugggcuaauuauucaa

SEQ ID NO: 474327 - RNA, 19 nt, Artificial Sequence
  Description of Artificial Sequence: Synthetic oligonucleotide
  Sense strand starting at position 285 of SEQ ID NO: 317227
auaauuagcccaugacuag

SEQ ID NO: 474328 - RNA, 19 nt, Artificial Sequence
  Description of Artificial Sequence: Synthetic oligonucleotide
  Antisense Strand to SEQ ID NO: 474327
cuagucaugggcuaauuau

SEQ ID NO: 474329 - RNA, 19 nt, Artificial Sequence
  Description of Artificial Sequence: Synthetic oligonucleotide
  Sense strand starting at position 300 of SEQ ID NO: 317227
cuagcuuaucuuuaaagga

SEQ ID NO: 474330 - RNA, 19 nt, Artificial Sequence
  Description of Artificial Sequence: Synthetic oligonucleotide
  Antisense Strand to SEQ ID NO: 474329
uccuuuaaagauaagcuag

SEQ ID NO: 474331 - RNA, 19 nt, Artificial Sequence
  Description of Artificial Sequence: Synthetic oligonucleotide
  Sense strand starting at position 342 of SEQ ID NO: 317227
cuaguauuagaauguuaag

SEQ ID NO: 474332 - RNA, 19 nt, Artificial Sequence
  Description of Artificial Sequence: Synthetic oligonucleotide
  Antisense Strand to SEQ ID NO: 474331
cuuaacauucuaauacuag

SEQ ID NO: 474333 - RNA, 19 nt, Artificial Sequence
  Description of Artificial Sequence: Synthetic oligonucleotide
  Sense strand starting at position 480 of SEQ ID NO: 317227
uguacagaauguuucugua

SEQ ID NO: 474334 - RNA, 19 nt, Artificial Sequence
  Description of Artificial Sequence: Synthetic oligonucleotide
  Antisense Strand to SEQ ID NO: 474333
uacagaaacauucuguaca

SEQ ID NO: 474335 - RNA, 19 nt, Artificial Sequence
  Description of Artificial Sequence: Synthetic oligonucleotide
  Sense strand starting at position 680 of SEQ ID NO: 317227
uggcuagaaccucagguuu

SEQ ID NO: 474336 - RNA, 19 nt, Artificial Sequence
  Description of Artificial Sequence: Synthetic oligonucleotide
  Antisense Strand to SEQ ID NO: 474335
aaaccugagguucuagcca

SEQ ID NO: 474337 - RNA, 19 nt, Artificial Sequence
  Description of Artificial Sequence: Synthetic oligonucleotide
  Sense strand starting at position 693 of SEQ ID NO: 317227
agguuuagcaacugaguga

SEQ ID NO: 474338 - RNA, 19 nt, Artificial Sequence
  Description of Artificial Sequence: Synthetic oligonucleotide
  Antisense Strand to SEQ ID NO: 474337
ucacucaguugcuaaaccu

SEQ ID NO: 474339 - RNA, 19 nt, Artificial Sequence
  Description of Artificial Sequence: Synthetic oligonucleotide
  Sense strand starting at position 694 of SEQ ID NO: 317227
gguuuagcaacugagugau

SEQ ID NO: 474340 - RNA, 19 nt, Artificial Sequence
  Description of Artificial Sequence: Synthetic oligonucleotide
  Antisense Strand to SEQ ID NO: 474339
aucacucaguugcuaaacc

SEQ ID NO: 474341 - RNA, 19 nt, Artificial Sequence
  Description of Artificial Sequence: Synthetic oligonucleotide
  Sense strand starting at position 769 of SEQ ID NO: 317227
gguauugugcuagaaucuc

SEQ ID NO: 474342 - RNA, 19 nt, Artificial Sequence
  Description of Artificial Sequence: Synthetic oligonucleotide
  Antisense Strand to SEQ ID NO: 474341
gagauucuagcacaauacc

SEQ ID NO: 474343 - RNA, 19 nt, Artificial Sequence
  Description of Artificial Sequence: Synthetic oligonucleotide
  Sense strand starting at position 818 of SEQ ID NO: 317227
cccugugcucaagaggaaa

SEQ ID NO: 474344 - RNA, 19 nt, Artificial Sequence
  Description of Artificial Sequence: Synthetic oligonucleotide
  Antisense Strand to SEQ ID NO: 474343
uuuccucuugagcacaggg

SEQ ID NO: 474345 - RNA, 19 nt, Artificial Sequence
  Description of Artificial Sequence: Synthetic oligonucleotide
  Sense strand starting at position 900 of SEQ ID NO: 317227
cgcugagucagggaaugaa

SEQ ID NO: 474346 - RNA, 19 nt, Artificial Sequence
  Description of Artificial Sequence: Synthetic oligonucleotide
  Antisense Strand to SEQ ID NO: 474345
uucauucccugacucagcg

SEQ ID NO: 474347 - RNA, 19 nt, Artificial Sequence
  Description of Artificial Sequence: Synthetic oligonucleotide
  Sense strand starting at position 920 of SEQ ID NO: 317227
gacuaaguauaauugugaa

SEQ ID NO: 474348 - RNA, 19 nt, Artificial Sequence
  Description of Artificial Sequence: Synthetic oligonucleotide
  Antisense Strand to SEQ ID NO: 474347
uucacaauuauacuuaguc

SEQ ID NO: 474349 - RNA, 19 nt, Artificial Sequence
  Description of Artificial Sequence: Synthetic oligonucleotide
  Sense strand starting at position 944 of SEQ ID NO: 317227
ucacuaaggugauauuuaa

SEQ ID NO: 474350 - RNA, 19 nt, Artificial Sequence
  Description of Artificial Sequence: Synthetic oligonucleotide
  Antisense Strand to SEQ ID NO: 474349
uuaaauaucaccuuaguga

SEQ ID NO: 474351 - RNA, 19 nt, Artificial Sequence
  Description of Artificial Sequence: Synthetic oligonucleotide
  Sense strand starting at position 1010 of SEQ ID NO: 317227
ggcugauggaaaugucaug

SEQ ID NO: 474352 - RNA, 19 nt, Artificial Sequence
  Description of Artificial Sequence: Synthetic oligonucleotide
  Antisense Strand to SEQ ID NO: 474351
caugacauuuccaucagcc

SEQ ID NO: 474353 - RNA, 19 nt, Artificial Sequence
  Description of Artificial Sequence: Synthetic oligonucleotide
  Sense strand starting at position 1089 of SEQ ID NO: 317227
augagauggugcuuuguag

SEQ ID NO: 474354 - RNA, 19 nt, Artificial Sequence
  Description of Artificial Sequence: Synthetic oligonucleotide
  Antisense Strand to SEQ ID NO: 474353
cuacaaagcaccaucucau

SEQ ID NO: 474355 - RNA, 19 nt, Artificial Sequence
  Description of Artificial Sequence: Synthetic oligonucleotide
  Sense strand starting at position 1179 of SEQ ID NO: 317227
gcaacauagggucaguaaa

SEQ ID NO: 474356 - RNA, 19 nt, Artificial Sequence
  Description of Artificial Sequence: Synthetic oligonucleotide
  Antisense Strand to SEQ ID NO: 474355
uuuacugacccuauguugc

SEQ ID NO: 474357 - RNA, 19 nt, Artificial Sequence
  Description of Artificial Sequence: Synthetic oligonucleotide
  Sense strand starting at position 1294 of SEQ ID NO: 317227
ugcaccaguccaggugaaa

SEQ ID NO: 474358 - RNA, 19 nt, Artificial Sequence
  Description of Artificial Sequence: Synthetic oligonucleotide
  Antisense Strand to SEQ ID NO: 474357
uuucaccuggacuggugca

SEQ ID NO: 474359 - RNA, 19 nt, Artificial Sequence
  Description of Artificial Sequence: Synthetic oligonucleotide
  Sense strand starting at position 1312 of SEQ ID NO: 317227
agaugauguuggucucaau

SEQ ID NO: 474360 - RNA, 19 nt, Artificial Sequence
  Description of Artificial Sequence: Synthetic oligonucleotide
  Antisense Strand to SEQ ID NO: 474359
auugagaccaacaucaucu

SEQ ID NO: 474361 - RNA, 19 nt, Artificial Sequence
  Description of Artificial Sequence: Synthetic oligonucleotide
  Sense strand starting at position 1420 of SEQ ID NO: 317227
uguucaugccagggaaaga

SEQ ID NO: 474362 - RNA, 19 nt, Artificial Sequence
  Description of Artificial Sequence: Synthetic oligonucleotide
  Antisense Strand to SEQ ID NO: 474361
ucuuucccuggcaugaaca

SEQ ID NO: 474363 - RNA, 19 nt, Artificial Sequence
  Description of Artificial Sequence: Synthetic oligonucleotide
  Sense strand starting at position 2184 of SEQ ID NO: 317227
cugguuguucgugcuguau

SEQ ID NO: 474364 - RNA, 19 nt, Artificial Sequence
  Description of Artificial Sequence: Synthetic oligonucleotide
  Antisense Strand to SEQ ID NO: 474363
auacagcacgaacaaccag

SEQ ID NO: 474365 - RNA, 19 nt, Artificial Sequence
  Description of Artificial Sequence: Synthetic oligonucleotide
  Sense strand starting at position 2287 of SEQ ID NO: 317227
cuaccuugaucucuuugga

SEQ ID NO: 474366 - RNA, 19 nt, Artificial Sequence
  Description of Artificial Sequence: Synthetic oligonucleotide
  Antisense Strand to SEQ ID NO: 474365
uccaaagagaucaagguag

SEQ ID NO: 474367 - RNA, 19 nt, Artificial Sequence
  Description of Artificial Sequence: Synthetic oligonucleotide
  Sense strand starting at position 2290 of SEQ ID NO: 317227
ccuugaucucuuuggaggu

SEQ ID NO: 474368 - RNA, 19 nt, Artificial Sequence
  Description of Artificial Sequence: Synthetic oligonucleotide
  Antisense Strand to SEQ ID NO: 474367
accuccaaagagaucaagg

SEQ ID NO: 474369 - RNA, 19 nt, Artificial Sequence
  Description of Artificial Sequence: Synthetic oligonucleotide
  Sense strand starting at position 2393 of SEQ ID NO: 317227
gcuuaaacaguccaguaaa

SEQ ID NO: 474370 - RNA, 19 nt, Artificial Sequence
  Description of Artificial Sequence: Synthetic oligonucleotide
  Antisense Strand to SEQ ID NO: 474369
uuuacuggacuguuuaagc

SEQ ID NO: 474371 - RNA, 19 nt, Artificial Sequence
  Description of Artificial Sequence: Synthetic oligonucleotide
  Sense strand starting at position 2418 of SEQ ID NO: 317227
uuaagugaacguugaggaa

SEQ ID NO: 474372 - RNA, 19 nt, Artificial Sequence
  Description of Artificial Sequence: Synthetic oligonucleotide
  Antisense Strand to SEQ ID NO: 474371
uuccucaacguucacuuaa

SEQ ID NO: 474373 - RNA, 19 nt, Artificial Sequence
  Description of Artificial Sequence: Synthetic oligonucleotide
  Sense strand starting at position 2459 of SEQ ID NO: 317227
uuugacauguaguuauaac

SEQ ID NO: 474374 - RNA, 19 nt, Artificial Sequence
  Description of Artificial Sequence: Synthetic oligonucleotide
  Antisense Strand to SEQ ID NO: 474373
guuauaacuacaugucaaa

SEQ ID NO: 474375 - RNA, 19 nt, Artificial Sequence
  Description of Artificial Sequence: Synthetic oligonucleotide
  Sense strand starting at position 2662 of SEQ ID NO: 317227
gugccaaguauugguauuu

SEQ ID NO: 474376 - RNA, 19 nt, Artificial Sequence
  Description of Artificial Sequence: Synthetic oligonucleotide
  Antisense Strand to SEQ ID NO: 474375
aaauaccaauacuuggcac

SEQ ID NO: 474377 - RNA, 19 nt, Artificial Sequence
  Description of Artificial Sequence: Synthetic oligonucleotide
  Sense strand starting at position 2705 of SEQ ID NO: 317227
gugguuugugaucaacccu

SEQ ID NO: 474378 - RNA, 19 nt, Artificial Sequence
  Description of Artificial Sequence: Synthetic oligonucleotide
  Antisense Strand to SEQ ID NO: 474377
aggguugaucacaaaccac

SEQ ID NO: 474379 - RNA, 19 nt, Artificial Sequence
  Description of Artificial Sequence: Synthetic oligonucleotide
  Sense strand starting at position 2821 of SEQ ID NO: 317227
uaauccuguccugagagca

SEQ ID NO: 474380 - RNA, 19 nt, Artificial Sequence
  Description of Artificial Sequence: Synthetic oligonucleotide
  Antisense Strand to SEQ ID NO: 474379
ugcucucaggacaggauua

SEQ ID NO: 474381 - RNA, 19 nt, Artificial Sequence
  Description of Artificial Sequence: Synthetic oligonucleotide
  Sense strand starting at position 2834 of SEQ ID NO: 317227
agagcauacugcuuacacu

SEQ ID NO: 474382 - RNA, 19 nt, Artificial Sequence
  Description of Artificial Sequence: Synthetic oligonucleotide
  Antisense Strand to SEQ ID NO: 474381
aguguaagcaguaugcucu

SEQ ID NO: 474383 - RNA, 19 nt, Artificial Sequence
  Description of Artificial Sequence: Synthetic oligonucleotide
  Sense strand starting at position 3267 of SEQ ID NO: 317227
gaauuuaacugugaguuug

SEQ ID NO: 474384 - RNA, 19 nt, Artificial Sequence
  Description of Artificial Sequence: Synthetic oligonucleotide
  Antisense Strand to SEQ ID NO: 474383
caaacucacaguuaaauuc

SEQ ID NO: 474385 - RNA, 19 nt, Artificial Sequence
  Description of Artificial Sequence: Synthetic oligonucleotide
  Sense strand starting at position 3277 of SEQ ID NO: 317227
gugaguuuggccuaagaau

SEQ ID NO: 474386 - RNA, 19 nt, Artificial Sequence
  Description of Artificial Sequence: Synthetic oligonucleotide
  Antisense Strand to SEQ ID NO: 474385
auucuuaggccaaacucac

SEQ ID NO: 474387 - RNA, 19 nt, Artificial Sequence
  Description of Artificial Sequence: Synthetic oligonucleotide
  Sense strand starting at position 3515 of SEQ ID NO: 317227
auuuaaucauccuggagac

SEQ ID NO: 474388 - RNA, 19 nt, Artificial Sequence
  Description of Artificial Sequence: Synthetic oligonucleotide
  Antisense Strand to SEQ ID NO: 474387
gucuccaggaugauuaaau

SEQ ID NO: 474389 - RNA, 19 nt, Artificial Sequence
  Description of Artificial Sequence: Synthetic oligonucleotide
  Sense strand starting at position 3516 of SEQ ID NO: 317227
uuuaaucauccuggagaca

SEQ ID NO: 474390 - RNA, 19 nt, Artificial Sequence
  Description of Artificial Sequence: Synthetic oligonucleotide
  Antisense Strand to SEQ ID NO: 474389
ugucuccaggaugauuaaa

SEQ ID NO: 474391 - RNA, 19 nt, Artificial Sequence
  Description of Artificial Sequence: Synthetic oligonucleotide
  Sense strand starting at position 3558 of SEQ ID NO: 317227
caugguaaugauugaggua

SEQ ID NO: 474392 - RNA, 19 nt, Artificial Sequence
  Description of Artificial Sequence: Synthetic oligonucleotide
  Antisense Strand to SEQ ID NO: 474391
uaccucaaucauuaccaug

SEQ ID NO: 474393 - RNA, 19 nt, Artificial Sequence
  Description of Artificial Sequence: Synthetic oligonucleotide
  Sense strand starting at position 3570 of SEQ ID NO: 317227
ugagguaaauugccucgaa

SEQ ID NO: 474394 - RNA, 19 nt, Artificial Sequence
  Description of Artificial Sequence: Synthetic oligonucleotide
  Antisense Strand to SEQ ID NO: 474393
uucgaggcaauuuaccuca

SEQ ID NO: 474395 - RNA, 19 nt, Artificial Sequence
  Description of Artificial Sequence: Synthetic oligonucleotide
  Sense strand starting at position 3571 of SEQ ID NO: 317227
gagguaaauugccucgaau

SEQ ID NO: 474396 - RNA, 19 nt, Artificial Sequence
  Description of Artificial Sequence: Synthetic oligonucleotide
  Antisense Strand to SEQ ID NO: 474395
auucgaggcaauuuaccuc

SEQ ID NO: 474397 - RNA, 19 nt, Artificial Sequence
  Description of Artificial Sequence: Synthetic oligonucleotide
  Sense strand starting at position 3573 of SEQ ID NO: 317227
gguaaauugccucgaauuu

SEQ ID NO: 474398 - RNA, 19 nt, Artificial Sequence
  Description of Artificial Sequence: Synthetic oligonucleotide
  Antisense Strand to SEQ ID NO: 474397
aaauucgaggcaauuuacc

SEQ ID NO: 474399 - RNA, 19 nt, Artificial Sequence
  Description of Artificial Sequence: Synthetic oligonucleotide
  Sense strand starting at position 3735 of SEQ ID NO: 317227
guauuuauaugggaauaug

SEQ ID NO: 474400 - RNA, 19 nt, Artificial Sequence
  Description of Artificial Sequence: Synthetic oligonucleotide
  Antisense Strand to SEQ ID NO: 474399
cauauucccauauaaauac

SEQ ID NO: 474401 - RNA, 19 nt, Artificial Sequence
  Description of Artificial Sequence: Synthetic oligonucleotide
  Sense strand starting at position 3776 of SEQ ID NO: 317227
ccacaaguuuaauuggauu

SEQ ID NO: 474402 - RNA, 19 nt, Artificial Sequence
  Description of Artificial Sequence: Synthetic oligonucleotide
  Antisense Strand to SEQ ID NO: 474401
aauccaauuaaacuugugg

SEQ ID NO: 474403 - RNA, 19 nt, Artificial Sequence
  Description of Artificial Sequence: Synthetic oligonucleotide
  Sense strand starting at position 3890 of SEQ ID NO: 317227
cagggcuguccuuaaagca

SEQ ID NO: 474404 - RNA, 19 nt, Artificial Sequence
  Description of Artificial Sequence: Synthetic oligonucleotide
  Antisense Strand to SEQ ID NO: 474403
ugcuuuaaggacagcccug

SEQ ID NO: 474405 - RNA, 19 nt, Artificial Sequence
  Description of Artificial Sequence: Synthetic oligonucleotide
  Sense strand starting at position 39 of SEQ ID NO: 317228
cugagacccuuggucugaa

SEQ ID NO: 474406 - RNA, 19 nt, Artificial Sequence
  Description of Artificial Sequence: Synthetic oligonucleotide
  Antisense Strand to SEQ ID NO: 474405
uucagaccaagggucucag

SEQ ID NO: 474407 - RNA, 19 nt, Artificial Sequence
  Description of Artificial Sequence: Synthetic oligonucleotide
  Sense strand starting at position 40 of SEQ ID NO: 317228
ugagacccuuggucugaaa

SEQ ID NO: 474408 - RNA, 19 nt, Artificial Sequence
  Description of Artificial Sequence: Synthetic oligonucleotide
  Antisense Strand to SEQ ID NO: 474407
uuucagaccaagggucuca

SEQ ID NO: 474409 - RNA, 19 nt, Artificial Sequence
  Description of Artificial Sequence: Synthetic oligonucleotide
  Sense strand starting at position 42 of SEQ ID NO: 317228
agacccuuggucugaaagu

SEQ ID NO: 474410 - RNA, 19 nt, Artificial Sequence
  Description of Artificial Sequence: Synthetic oligonucleotide
  Antisense Strand to SEQ ID NO: 474409
acuuucagaccaagggucu

SEQ ID NO: 474411 - RNA, 19 nt, Artificial Sequence
  Description of Artificial Sequence: Synthetic oligonucleotide
  Sense strand starting at position 243 of SEQ ID NO: 317228
agccaauaaguuuguauua

SEQ ID NO: 474412 - RNA, 19 nt, Artificial Sequence
  Description of Artificial Sequence: Synthetic oligonucleotide
  Antisense Strand to SEQ ID NO: 474411
uaauacaaacuuauuggcu

SEQ ID NO: 474413 - RNA, 19 nt, Artificial Sequence
  Description of Artificial Sequence: Synthetic oligonucleotide
  Sense strand starting at position 244 of SEQ ID NO: 317228
gccaauaaguuuguauuaa

SEQ ID NO: 474414 - RNA, 19 nt, Artificial Sequence
  Description of Artificial Sequence: Synthetic oligonucleotide
  Antisense Strand to SEQ ID NO: 474413
uuaauacaaacuuauuggc

SEQ ID NO: 474415 - RNA, 19 nt, Artificial Sequence
  Description of Artificial Sequence: Synthetic oligonucleotide
  Sense strand starting at position 476 of SEQ ID NO: 317228
cgucccaggcauuaacaau

SEQ ID NO: 474416 - RNA, 19 nt, Artificial Sequence
  Description of Artificial Sequence: Synthetic oligonucleotide
  Antisense Strand to SEQ ID NO: 474415
auuguuaaugccugggacg

SEQ ID NO: 474417 - RNA, 19 nt, Artificial Sequence
  Description of Artificial Sequence: Synthetic oligonucleotide
  Sense strand starting at position 613 of SEQ ID NO: 317228
ggaguauauuuccaccucu

SEQ ID NO: 474418 - RNA, 19 nt, Artificial Sequence
  Description of Artificial Sequence: Synthetic oligonucleotide
  Antisense Strand to SEQ ID NO: 474417
agagguggaaauauacucc

SEQ ID NO: 474419 - RNA, 19 nt, Artificial Sequence
  Description of Artificial Sequence: Synthetic oligonucleotide
  Sense strand starting at position 637 of SEQ ID NO: 317228
guaugcacccucuauuauu

SEQ ID NO: 474420 - RNA, 19 nt, Artificial Sequence
  Description of Artificial Sequence: Synthetic oligonucleotide
  Antisense Strand to SEQ ID NO: 474419
aauaauagagggugcauac

SEQ ID NO: 474421 - RNA, 19 nt, Artificial Sequence
  Description of Artificial Sequence: Synthetic oligonucleotide
  Sense strand starting at position 679 of SEQ ID NO: 317228
uuaugauagugucuuacac

SEQ ID NO: 474422 - RNA, 19 nt, Artificial Sequence
  Description of Artificial Sequence: Synthetic oligonucleotide
  Antisense Strand to SEQ ID NO: 474421
guguaagacacuaucauaa

SEQ ID NO: 474423 - RNA, 19 nt, Artificial Sequence
  Description of Artificial Sequence: Synthetic oligonucleotide
  Sense strand starting at position 686 of SEQ ID NO: 317228
agugucuuacacuaucaau

SEQ ID NO: 474424 - RNA, 19 nt, Artificial Sequence
  Description of Artificial Sequence: Synthetic oligonucleotide
  Antisense Strand to SEQ ID NO: 474423
auugauaguguaagacacu

SEQ ID NO: 474425 - RNA, 19 nt, Artificial Sequence
  Description of Artificial Sequence: Synthetic oligonucleotide
  Sense strand starting at position 699 of SEQ ID NO: 317228
aucaauugcuaggcaugua

SEQ ID NO: 474426 - RNA, 19 nt, Artificial Sequence
  Description of Artificial Sequence: Synthetic oligonucleotide
  Antisense Strand to SEQ ID NO: 474425
uacaugccuagcaauugau

SEQ ID NO: 474427 - RNA, 19 nt, Artificial Sequence
  Description of Artificial Sequence: Synthetic oligonucleotide
  Sense strand starting at position 702 of SEQ ID NO: 317228
aauugcuaggcauguaauu

SEQ ID NO: 474428 - RNA, 19 nt, Artificial Sequence
  Description of Artificial Sequence: Synthetic oligonucleotide
  Antisense Strand to SEQ ID NO: 474427
aauuacaugccuagcaauu

SEQ ID NO: 474429 - RNA, 19 nt, Artificial Sequence
  Description of Artificial Sequence: Synthetic oligonucleotide
  Sense strand starting at position 738 of SEQ ID NO: 317228
accaguuuauuagugacuu

SEQ ID NO: 474430 - RNA, 19 nt, Artificial Sequence
  Description of Artificial Sequence: Synthetic oligonucleotide
  Antisense Strand to SEQ ID NO: 474429
aagucacuaauaaacuggu

SEQ ID NO: 474431 - RNA, 19 nt, Artificial Sequence
  Description of Artificial Sequence: Synthetic oligonucleotide
  Sense strand starting at position 777 of SEQ ID NO: 317228
agcaacagaugccucaaua

SEQ ID NO: 474432 - RNA, 19 nt, Artificial Sequence
  Description of Artificial Sequence: Synthetic oligonucleotide
  Antisense Strand to SEQ ID NO: 474431
uauugaggcaucuguugcu

SEQ ID NO: 474433 - RNA, 19 nt, Artificial Sequence
  Description of Artificial Sequence: Synthetic oligonucleotide
  Sense strand starting at position 807 of SEQ ID NO: 317228
aaacguuaagugcaaaugu

SEQ ID NO: 474434 - RNA, 19 nt, Artificial Sequence
  Description of Artificial Sequence: Synthetic oligonucleotide
  Antisense Strand to SEQ ID NO: 474433
acauuugcacuuaacguuu

SEQ ID NO: 474435 - RNA, 19 nt, Artificial Sequence
  Description of Artificial Sequence: Synthetic oligonucleotide
  Sense strand starting at position 816 of SEQ ID NO: 317228
gugcaaauguaucuuaauc

SEQ ID NO: 474436 - RNA, 19 nt, Artificial Sequence
  Description of Artificial Sequence: Synthetic oligonucleotide
  Antisense Strand to SEQ ID NO: 474435
gauuaagauacauuugcac

SEQ ID NO: 474437 - RNA, 19 nt, Artificial Sequence
  Description of Artificial Sequence: Synthetic oligonucleotide
  Sense strand starting at position 860 of SEQ ID NO: 317228
gcuaauauucggcaauacu

SEQ ID NO: 474438 - RNA, 19 nt, Artificial Sequence
  Description of Artificial Sequence: Synthetic oligonucleotide
  Antisense Strand to SEQ ID NO: 474437
aguauugccgaauauuagc

SEQ ID NO: 474439 - RNA, 19 nt, Artificial Sequence
  Description of Artificial Sequence: Synthetic oligonucleotide
  Sense strand starting at position 1558 of SEQ ID NO: 317228
cagguuugaugaccugaga

SEQ ID NO: 474440 - RNA, 19 nt, Artificial Sequence
  Description of Artificial Sequence: Synthetic oligonucleotide
  Antisense Strand to SEQ ID NO: 474439
ucucaggucaucaaaccug

SEQ ID NO: 474441 - RNA, 19 nt, Artificial Sequence
  Description of Artificial Sequence: Synthetic oligonucleotide
  Sense strand starting at position 1621 of SEQ ID NO: 317228
ccagauucuaagggaaugu

SEQ ID NO: 474442 - RNA, 19 nt, Artificial Sequence
  Description of Artificial Sequence: Synthetic oligonucleotide
  Antisense Strand to SEQ ID NO: 474441
acauucccuuagaaucugg

SEQ ID NO: 474443 - RNA, 19 nt, Artificial Sequence
  Description of Artificial Sequence: Synthetic oligonucleotide
  Sense strand starting at position 1625 of SEQ ID NO: 317228
auucuaagggaauguuuga

SEQ ID NO: 474444 - RNA, 19 nt, Artificial Sequence
  Description of Artificial Sequence: Synthetic oligonucleotide
  Antisense Strand to SEQ ID NO: 474443
ucaaacauucccuuagaau

SEQ ID NO: 474445 - RNA, 19 nt, Artificial Sequence
  Description of Artificial Sequence: Synthetic oligonucleotide
  Sense strand starting at position 1630 of SEQ ID NO: 317228
aagggaauguuugacagaa

SEQ ID NO: 474446 - RNA, 19 nt, Artificial Sequence
  Description of Artificial Sequence: Synthetic oligonucleotide
  Antisense Strand to SEQ ID NO: 474445
uucugucaaacauucccuu

SEQ ID NO: 474447 - RNA, 19 nt, Artificial Sequence
  Description of Artificial Sequence: Synthetic oligonucleotide
  Sense strand starting at position 1662 of SEQ ID NO: 317228
ggaagagaguguuacauuu

SEQ ID NO: 474448 - RNA, 19 nt, Artificial Sequence
  Description of Artificial Sequence: Synthetic oligonucleotide
  Antisense Strand to SEQ ID NO: 474447
aaauguaacacucucuucc

SEQ ID NO: 474449 - RNA, 19 nt, Artificial Sequence
  Description of Artificial Sequence: Synthetic oligonucleotide
  Sense strand starting at position 1727 of SEQ ID NO: 317228
cucagucugcacugaauga

SEQ ID NO: 474450 - RNA, 19 nt, Artificial Sequence
  Description of Artificial Sequence: Synthetic oligonucleotide
  Antisense Strand to SEQ ID NO: 474449
ucauucagugcagacugag

SEQ ID NO: 474451 - RNA, 19 nt, Artificial Sequence
  Description of Artificial Sequence: Synthetic oligonucleotide
  Sense strand starting at position 1734 of SEQ ID NO: 317228
ugcacugaaugaguguaaa

SEQ ID NO: 474452 - RNA, 19 nt, Artificial Sequence
  Description of Artificial Sequence: Synthetic oligonucleotide
  Antisense Strand to SEQ ID NO: 474451
uuuacacucauucagugca

SEQ ID NO: 474453 - RNA, 19 nt, Artificial Sequence
  Description of Artificial Sequence: Synthetic oligonucleotide
  Sense strand starting at position 1946 of SEQ ID NO: 317228
uggagagcgguguauuaca

SEQ ID NO: 474454 - RNA, 19 nt, Artificial Sequence
  Description of Artificial Sequence: Synthetic oligonucleotide
  Antisense Strand to SEQ ID NO: 474453
uguaauacaccgcucucca

SEQ ID NO: 474455 - RNA, 19 nt, Artificial Sequence
  Description of Artificial Sequence: Synthetic oligonucleotide
  Sense strand starting at position 1953 of SEQ ID NO: 317228
cgguguauuacagagauca

SEQ ID NO: 474456 - RNA, 19 nt, Artificial Sequence
  Description of Artificial Sequence: Synthetic oligonucleotide
  Antisense Strand to SEQ ID NO: 474455
ugaucucuguaauacaccg

SEQ ID NO: 474457 - RNA, 19 nt, Artificial Sequence
  Description of Artificial Sequence: Synthetic oligonucleotide
  Sense strand starting at position 2195 of SEQ ID NO: 317228
agaggcuuaauccagguau

SEQ ID NO: 474458 - RNA, 19 nt, Artificial Sequence
  Description of Artificial Sequence: Synthetic oligonucleotide
  Antisense Strand to SEQ ID NO: 474457
auaccuggauuaagccucu

SEQ ID NO: 474459 - RNA, 19 nt, Artificial Sequence
  Description of Artificial Sequence: Synthetic oligonucleotide
  Sense strand starting at position 2197 of SEQ ID NO: 317228
aggcuuaauccagguauca

SEQ ID NO: 474460 - RNA, 19 nt, Artificial Sequence
  Description of Artificial Sequence: Synthetic oligonucleotide
  Antisense Strand to SEQ ID NO: 474459
ugauaccuggauuaagccu

SEQ ID NO: 474461 - RNA, 19 nt, Artificial Sequence
  Description of Artificial Sequence: Synthetic oligonucleotide
  Sense strand starting at position 2643 of SEQ ID NO: 317228
cuaguaacacaacgauuau

SEQ ID NO: 474462 - RNA, 19 nt, Artificial Sequence
  Description of Artificial Sequence: Synthetic oligonucleotide
  Antisense Strand to SEQ ID NO: 474461
auaaucguuguguuacuag

SEQ ID NO: 474463 - RNA, 19 nt, Artificial Sequence
  Description of Artificial Sequence: Synthetic oligonucleotide
  Sense strand starting at position 2661 of SEQ ID NO: 317228
uaaguaacuuggguaauua

SEQ ID NO: 474464 - RNA, 19 nt, Artificial Sequence
  Description of Artificial Sequence: Synthetic oligonucleotide
  Antisense Strand to SEQ ID NO: 474463
uaauuacccaaguuacuua

SEQ ID NO: 474465 - RNA, 19 nt, Artificial Sequence
  Description of Artificial Sequence: Synthetic oligonucleotide
  Sense strand starting at position 3148 of SEQ ID NO: 317228
gaaaccaggugacauauuu

SEQ ID NO: 474466 - RNA, 19 nt, Artificial Sequence
  Description of Artificial Sequence: Synthetic oligonucleotide
  Antisense Strand to SEQ ID NO: 474465
aaauaugucaccugguuuc

SEQ ID NO: 474467 - RNA, 19 nt, Artificial Sequence
  Description of Artificial Sequence: Synthetic oligonucleotide
  Sense strand starting at position 3564 of SEQ ID NO: 317228
guauaaauugggcacucaa

SEQ ID NO: 474468 - RNA, 19 nt, Artificial Sequence
  Description of Artificial Sequence: Synthetic oligonucleotide
  Antisense Strand to SEQ ID NO: 474467
uugagugcccaauuuauac

SEQ ID NO: 474469 - RNA, 19 nt, Artificial Sequence
  Description of Artificial Sequence: Synthetic oligonucleotide
  Sense strand starting at position 3781 of SEQ ID NO: 317228
uaugauguguaagucacau

SEQ ID NO: 474470 - RNA, 19 nt, Artificial Sequence
  Description of Artificial Sequence: Synthetic oligonucleotide
  Antisense Strand to SEQ ID NO: 474469
augugacuuacacaucaua

SEQ ID NO: 474471 - RNA, 19 nt, Artificial Sequence
  Description of Artificial Sequence: Synthetic oligonucleotide
  Sense strand starting at position 3783 of SEQ ID NO: 317228
ugauguguaagucacauua

SEQ ID NO: 474472 - RNA, 19 nt, Artificial Sequence
  Description of Artificial Sequence: Synthetic oligonucleotide
  Antisense Strand to SEQ ID NO: 474471
uaaugugacuuacacauca

SEQ ID NO: 474473 - RNA, 19 nt, Artificial Sequence
  Description of Artificial Sequence: Synthetic oligonucleotide
  Sense strand starting at position 3819 of SEQ ID NO: 317228
agcugucuuguagaaacuu

SEQ ID NO: 474474 - RNA, 19 nt, Artificial Sequence
  Description of Artificial Sequence: Synthetic oligonucleotide
  Antisense Strand to SEQ ID NO: 474473
aaguuucuacaagacagcu

SEQ ID NO: 474475 - RNA, 19 nt, Artificial Sequence
  Description of Artificial Sequence: Synthetic oligonucleotide
  Sense strand starting at position 3890 of SEQ ID NO: 317228
ccuaauacucugugguaca

SEQ ID NO: 474476 - RNA, 19 nt, Artificial Sequence
  Description of Artificial Sequence: Synthetic oligonucleotide
  Antisense Strand to SEQ ID NO: 474475
uguaccacagaguauuagg

SEQ ID NO: 474477 - RNA, 19 nt, Artificial Sequence
  Description of Artificial Sequence: Synthetic oligonucleotide
  Sense strand starting at position 3926 of SEQ ID NO: 317228
agccuaaaggucuauagca

SEQ ID NO: 474478 - RNA, 19 nt, Artificial Sequence
  Description of Artificial Sequence: Synthetic oligonucleotide
  Antisense Strand to SEQ ID NO: 474477
ugcuauagaccuuuaggcu

SEQ ID NO: 474479 - RNA, 19 nt, Artificial Sequence
  Description of Artificial Sequence: Synthetic oligonucleotide
  Sense strand starting at position 3933 of SEQ ID NO: 317228
aggucuauagcagggaauu

SEQ ID NO: 474480 - RNA, 19 nt, Artificial Sequence
  Description of Artificial Sequence: Synthetic oligonucleotide
  Antisense Strand to SEQ ID NO: 474479
aauucccugcuauagaccu

SEQ ID NO: 474481 - RNA, 19 nt, Artificial Sequence
  Description of Artificial Sequence: Synthetic oligonucleotide
  Sense strand starting at position 3934 of SEQ ID NO: 317228
ggucuauagcagggaauua

SEQ ID NO: 474482 - RNA, 19 nt, Artificial Sequence
  Description of Artificial Sequence: Synthetic oligonucleotide
  Antisense Strand to SEQ ID NO: 474481
uaauucccugcuauagacc

SEQ ID NO: 474483 - RNA, 19 nt, Artificial Sequence
  Description of Artificial Sequence: Synthetic oligonucleotide
  Sense strand starting at position 3935 of SEQ ID NO: 317228
gucuauagcagggaauuau

SEQ ID NO: 474484 - RNA, 19 nt, Artificial Sequence
  Description of Artificial Sequence: Synthetic oligonucleotide
  Antisense Strand to SEQ ID NO: 474483
auaauucccugcuauagac

SEQ ID NO: 474485 - RNA, 19 nt, Artificial Sequence
  Description of Artificial Sequence: Synthetic oligonucleotide
  Sense strand starting at position 131 of SEQ ID NO: 317229
gaaacuguggagugauaag

SEQ ID NO: 474486 - RNA, 19 nt, Artificial Sequence
  Description of Artificial Sequence: Synthetic oligonucleotide
  Antisense Strand to SEQ ID NO: 474485
cuuaucacuccacaguuuc

SEQ ID NO: 474487 - RNA, 19 nt, Artificial Sequence
  Description of Artificial Sequence: Synthetic oligonucleotide
  Sense strand starting at position 203 of SEQ ID NO: 317229
ggcagaugguggguaagaa

SEQ ID NO: 474488 - RNA, 19 nt, Artificial Sequence
  Description of Artificial Sequence: Synthetic oligonucleotide
  Antisense Strand to SEQ ID NO: 474487
uucuuacccaccaucugcc

SEQ ID NO: 474489 - RNA, 19 nt, Artificial Sequence
  Description of Artificial Sequence: Synthetic oligonucleotide
  Sense strand starting at position 228 of SEQ ID NO: 317229
gugacacuuuaacuuguuu

SEQ ID NO: 474490 - RNA, 19 nt, Artificial Sequence
  Description of Artificial Sequence: Synthetic oligonucleotide
  Antisense Strand to SEQ ID NO: 474489
aaacaaguuaaagugucac

SEQ ID NO: 474491 - RNA, 19 nt, Artificial Sequence
  Description of Artificial Sequence: Synthetic oligonucleotide
  Sense strand starting at position 276 of SEQ ID NO: 317229
agcucauagcagugucaac

SEQ ID NO: 474492 - RNA, 19 nt, Artificial Sequence
  Description of Artificial Sequence: Synthetic oligonucleotide
  Antisense Strand to SEQ ID NO: 474491
guugacacugcuaugagcu

SEQ ID NO: 474493 - RNA, 19 nt, Artificial Sequence
  Description of Artificial Sequence: Synthetic oligonucleotide
  Sense strand starting at position 529 of SEQ ID NO: 317229
ucuggcuugugagcuauga

SEQ ID NO: 474494 - RNA, 19 nt, Artificial Sequence
  Description of Artificial Sequence: Synthetic oligonucleotide
  Antisense Strand to SEQ ID NO: 474493
ucauagcucacaagccaga

SEQ ID NO: 474495 - RNA, 19 nt, Artificial Sequence
  Description of Artificial Sequence: Synthetic oligonucleotide
  Sense strand starting at position 531 of SEQ ID NO: 317229
uggcuugugagcuaugaga

SEQ ID NO: 474496 - RNA, 19 nt, Artificial Sequence
  Description of Artificial Sequence: Synthetic oligonucleotide
  Antisense Strand to SEQ ID NO: 474495
ucucauagcucacaagcca

SEQ ID NO: 474497 - RNA, 19 nt, Artificial Sequence
  Description of Artificial Sequence: Synthetic oligonucleotide
  Sense strand starting at position 533 of SEQ ID NO: 317229
gcuugugagcuaugagaau

SEQ ID NO: 474498 - RNA, 19 nt, Artificial Sequence
  Description of Artificial Sequence: Synthetic oligonucleotide
  Antisense Strand to SEQ ID NO: 474497
auucucauagcucacaagc

SEQ ID NO: 474499 - RNA, 19 nt, Artificial Sequence
  Description of Artificial Sequence: Synthetic oligonucleotide
  Sense strand starting at position 601 of SEQ ID NO: 317229
uucuucuacugagauagua

SEQ ID NO: 474500 - RNA, 19 nt, Artificial Sequence
  Description of Artificial Sequence: Synthetic oligonucleotide
  Antisense Strand to SEQ ID NO: 474499
uacuaucucaguagaagaa

SEQ ID NO: 474501 - RNA, 19 nt, Artificial Sequence
  Description of Artificial Sequence: Synthetic oligonucleotide
  Sense strand starting at position 635 of SEQ ID NO: 317229
ggaauauaaugaugcuaau

SEQ ID NO: 474502 - RNA, 19 nt, Artificial Sequence
  Description of Artificial Sequence: Synthetic oligonucleotide
  Antisense Strand to SEQ ID NO: 474501
auuagcaucauuauauucc

SEQ ID NO: 474503 - RNA, 19 nt, Artificial Sequence
  Description of Artificial Sequence: Synthetic oligonucleotide
  Sense strand starting at position 670 of SEQ ID NO: 317229
agauauaaaugagacagaa

SEQ ID NO: 474504 - RNA, 19 nt, Artificial Sequence
  Description of Artificial Sequence: Synthetic oligonucleotide
  Antisense Strand to SEQ ID NO: 474503
uucugucucauuuauaucu

SEQ ID NO: 474505 - RNA, 19 nt, Artificial Sequence
  Description of Artificial Sequence: Synthetic oligonucleotide
  Sense strand starting at position 773 of SEQ ID NO: 317229
ggcagaugguuugaccuca

SEQ ID NO: 474506 - RNA, 19 nt, Artificial Sequence
  Description of Artificial Sequence: Synthetic oligonucleotide
  Antisense Strand to SEQ ID NO: 474505
ugaggucaaaccaucugcc

SEQ ID NO: 474507 - RNA, 19 nt, Artificial Sequence
  Description of Artificial Sequence: Synthetic oligonucleotide
  Sense strand starting at position 881 of SEQ ID NO: 317229
ucugauuuaucagaaguac

SEQ ID NO: 474508 - RNA, 19 nt, Artificial Sequence
  Description of Artificial Sequence: Synthetic oligonucleotide
  Antisense Strand to SEQ ID NO: 474507
guacuucugauaaaucaga

SEQ ID NO: 474509 - RNA, 19 nt, Artificial Sequence
  Description of Artificial Sequence: Synthetic oligonucleotide
  Sense strand starting at position 892 of SEQ ID NO: 317229
agaaguaccugagggaaua

SEQ ID NO: 474510 - RNA, 19 nt, Artificial Sequence
  Description of Artificial Sequence: Synthetic oligonucleotide
  Antisense Strand to SEQ ID NO: 474509
uauucccucagguacuucu

SEQ ID NO: 474511 - RNA, 19 nt, Artificial Sequence
  Description of Artificial Sequence: Synthetic oligonucleotide
  Sense strand starting at position 962 of SEQ ID NO: 317229
agguuugaauuagcagaua

SEQ ID NO: 474512 - RNA, 19 nt, Artificial Sequence
  Description of Artificial Sequence: Synthetic oligonucleotide
  Antisense Strand to SEQ ID NO: 474511
uaucugcuaauucaaaccu

SEQ ID NO: 474513 - RNA, 19 nt, Artificial Sequence
  Description of Artificial Sequence: Synthetic oligonucleotide
  Sense strand starting at position 970 of SEQ ID NO: 317229
auuagcagauauggagaau

SEQ ID NO: 474514 - RNA, 19 nt, Artificial Sequence
  Description of Artificial Sequence: Synthetic oligonucleotide
  Antisense Strand to SEQ ID NO: 474513
auucuccauaucugcuaau

SEQ ID NO: 474515 - RNA, 19 nt, Artificial Sequence
  Description of Artificial Sequence: Synthetic oligonucleotide
  Sense strand starting at position 1312 of SEQ ID NO: 317229
agaauuccauaugcgcaaa

SEQ ID NO: 474516 - RNA, 19 nt, Artificial Sequence
  Description of Artificial Sequence: Synthetic oligonucleotide
  Antisense Strand to SEQ ID NO: 474515
uuugcgcauauggaauucu

SEQ ID NO: 474517 - RNA, 19 nt, Artificial Sequence
  Description of Artificial Sequence: Synthetic oligonucleotide
  Sense strand starting at position 1315 of SEQ ID NO: 317229
auuccauaugcgcaaacaa

SEQ ID NO: 474518 - RNA, 19 nt, Artificial Sequence
  Description of Artificial Sequence: Synthetic oligonucleotide
  Antisense Strand to SEQ ID NO: 474517
uuguuugcgcauauggaau

SEQ ID NO: 474519 - RNA, 19 nt, Artificial Sequence
  Description of Artificial Sequence: Synthetic oligonucleotide
  Sense strand starting at position 1337 of SEQ ID NO: 317229
gguauuauacauuggccca

SEQ ID NO: 474520 - RNA, 19 nt, Artificial Sequence
  Description of Artificial Sequence: Synthetic oligonucleotide
  Antisense Strand to SEQ ID NO: 474519
ugggccaauguauaauacc

SEQ ID NO: 474521 - RNA, 19 nt, Artificial Sequence
  Description of Artificial Sequence: Synthetic oligonucleotide
  Sense strand starting at position 1375 of SEQ ID NO: 317229
aucugagaacugugacauu

SEQ ID NO: 474522 - RNA, 19 nt, Artificial Sequence
  Description of Artificial Sequence: Synthetic oligonucleotide
  Antisense Strand to SEQ ID NO: 474521
aaugucacaguucucagau

SEQ ID NO: 474523 - RNA, 19 nt, Artificial Sequence
  Description of Artificial Sequence: Synthetic oligonucleotide
  Sense strand starting at position 1384 of SEQ ID NO: 317229
cugugacauugugagaaga

SEQ ID NO: 474524 - RNA, 19 nt, Artificial Sequence
  Description of Artificial Sequence: Synthetic oligonucleotide
  Antisense Strand to SEQ ID NO: 474523
ucuucucacaaugucacag

SEQ ID NO: 474525 - RNA, 19 nt, Artificial Sequence
  Description of Artificial Sequence: Synthetic oligonucleotide
  Sense strand starting at position 1503 of SEQ ID NO: 317229
gauauucucugucccggaa

SEQ ID NO: 474526 - RNA, 19 nt, Artificial Sequence
  Description of Artificial Sequence: Synthetic oligonucleotide
  Antisense Strand to SEQ ID NO: 474525
uuccgggacagagaauauc

SEQ ID NO: 474527 - RNA, 19 nt, Artificial Sequence
  Description of Artificial Sequence: Synthetic oligonucleotide
  Sense strand starting at position 1507 of SEQ ID NO: 317229
uucucugucccggaauauu

SEQ ID NO: 474528 - RNA, 19 nt, Artificial Sequence
  Description of Artificial Sequence: Synthetic oligonucleotide
  Antisense Strand to SEQ ID NO: 474527
aauauuccgggacagagaa

SEQ ID NO: 474529 - RNA, 19 nt, Artificial Sequence
  Description of Artificial Sequence: Synthetic oligonucleotide
  Sense strand starting at position 1570 of SEQ ID NO: 317229
uugagcuauucguuaaguc

SEQ ID NO: 474530 - RNA, 19 nt, Artificial Sequence
  Description of Artificial Sequence: Synthetic oligonucleotide
  Antisense Strand to SEQ ID NO: 474529
gacuuaacgaauagcucaa

SEQ ID NO: 474531 - RNA, 19 nt, Artificial Sequence
  Description of Artificial Sequence: Synthetic oligonucleotide
  Sense strand starting at position 1643 of SEQ ID NO: 317229
cguaauuuaucuuacgauu

SEQ ID NO: 474532 - RNA, 19 nt, Artificial Sequence
  Description of Artificial Sequence: Synthetic oligonucleotide
  Antisense Strand to SEQ ID NO: 474531
aaucguaagauaaauuacg

SEQ ID NO: 474533 - RNA, 19 nt, Artificial Sequence
  Description of Artificial Sequence: Synthetic oligonucleotide
  Sense strand starting at position 1684 of SEQ ID NO: 317229
aaacgaggaucagaucuaa

SEQ ID NO: 474534 - RNA, 19 nt, Artificial Sequence
  Description of Artificial Sequence: Synthetic oligonucleotide
  Antisense Strand to SEQ ID NO: 474533
uuagaucugauccucguuu

SEQ ID NO: 474535 - RNA, 19 nt, Artificial Sequence
  Description of Artificial Sequence: Synthetic oligonucleotide
  Sense strand starting at position 1805 of SEQ ID NO: 317229
cugguaagugugggaacaa

SEQ ID NO: 474536 - RNA, 19 nt, Artificial Sequence
  Description of Artificial Sequence: Synthetic oligonucleotide
  Antisense Strand to SEQ ID NO: 474535
uuguucccacacuuaccag

SEQ ID NO: 474537 - RNA, 19 nt, Artificial Sequence
  Description of Artificial Sequence: Synthetic oligonucleotide
  Sense strand starting at position 1886 of SEQ ID NO: 317229
acgcuuuccugcuuaaaug

SEQ ID NO: 474538 - RNA, 19 nt, Artificial Sequence
  Description of Artificial Sequence: Synthetic oligonucleotide
  Antisense Strand to SEQ ID NO: 474537
cauuuaagcaggaaagcgu

SEQ ID NO: 474539 - RNA, 19 nt, Artificial Sequence
  Description of Artificial Sequence: Synthetic oligonucleotide
  Sense strand starting at position 2169 of SEQ ID NO: 317229
gguugcacacgcguaaauu

SEQ ID NO: 474540 - RNA, 19 nt, Artificial Sequence
  Description of Artificial Sequence: Synthetic oligonucleotide
  Antisense Strand to SEQ ID NO: 474539
aauuuacgcgugugcaacc

SEQ ID NO: 474541 - RNA, 19 nt, Artificial Sequence
  Description of Artificial Sequence: Synthetic oligonucleotide
  Sense strand starting at position 2226 of SEQ ID NO: 317229
ccgcaaucugcggucguau

SEQ ID NO: 474542 - RNA, 19 nt, Artificial Sequence
  Description of Artificial Sequence: Synthetic oligonucleotide
  Antisense Strand to SEQ ID NO: 474541
auacgaccgcagauugcgg

SEQ ID NO: 474543 - RNA, 19 nt, Artificial Sequence
  Description of Artificial Sequence: Synthetic oligonucleotide
  Sense strand starting at position 2237 of SEQ ID NO: 317229
ggucguauccguuccguca

SEQ ID NO: 474544 - RNA, 19 nt, Artificial Sequence
  Description of Artificial Sequence: Synthetic oligonucleotide
  Antisense Strand to SEQ ID NO: 474543
ugacggaacggauacgacc

SEQ ID NO: 474545 - RNA, 19 nt, Artificial Sequence
  Description of Artificial Sequence: Synthetic oligonucleotide
  Sense strand starting at position 2238 of SEQ ID NO: 317229
gucguauccguuccgucaa

SEQ ID NO: 474546 - RNA, 19 nt, Artificial Sequence
  Description of Artificial Sequence: Synthetic oligonucleotide
  Antisense Strand to SEQ ID NO: 474545
uugacggaacggauacgac

SEQ ID NO: 474547 - RNA, 19 nt, Artificial Sequence
  Description of Artificial Sequence: Synthetic oligonucleotide
  Sense strand starting at position 2241 of SEQ ID NO: 317229
guauccguuccgucaaugu

SEQ ID NO: 474548 - RNA, 19 nt, Artificial Sequence
  Description of Artificial Sequence: Synthetic oligonucleotide
  Antisense Strand to SEQ ID NO: 474547
acauugacggaacggauac

SEQ ID NO: 474549 - RNA, 19 nt, Artificial Sequence
  Description of Artificial Sequence: Synthetic oligonucleotide
  Sense strand starting at position 2347 of SEQ ID NO: 317229
uccugugaauccgcaacau

SEQ ID NO: 474550 - RNA, 19 nt, Artificial Sequence
  Description of Artificial Sequence: Synthetic oligonucleotide
  Antisense Strand to SEQ ID NO: 474549
auguugcggauucacagga

SEQ ID NO: 474551 - RNA, 19 nt, Artificial Sequence
  Description of Artificial Sequence: Synthetic oligonucleotide
  Sense strand starting at position 3078 of SEQ ID NO: 317229
cggcuugugcuagcaguga

SEQ ID NO: 474552 - RNA, 19 nt, Artificial Sequence
  Description of Artificial Sequence: Synthetic oligonucleotide
  Antisense Strand to SEQ ID NO: 474551
ucacugcuagcacaagccg

SEQ ID NO: 474553 - RNA, 19 nt, Artificial Sequence
  Description of Artificial Sequence: Synthetic oligonucleotide
  Sense strand starting at position 3096 of SEQ ID NO: 317229
aggcguuaagccugaaagu

SEQ ID NO: 474554 - RNA, 19 nt, Artificial Sequence
  Description of Artificial Sequence: Synthetic oligonucleotide
  Antisense Strand to SEQ ID NO: 474553
acuuucaggcuuaacgccu

SEQ ID NO: 474555 - RNA, 19 nt, Artificial Sequence
  Description of Artificial Sequence: Synthetic oligonucleotide
  Sense strand starting at position 3208 of SEQ ID NO: 317229
agcuuaaaucgcgagaacu

SEQ ID NO: 474556 - RNA, 19 nt, Artificial Sequence
  Description of Artificial Sequence: Synthetic oligonucleotide
  Antisense Strand to SEQ ID NO: 474555
aguucucgcgauuuaagcu

SEQ ID NO: 474557 - RNA, 19 nt, Artificial Sequence
  Description of Artificial Sequence: Synthetic oligonucleotide
  Sense strand starting at position 3210 of SEQ ID NO: 317229
cuuaaaucgcgagaacuga

SEQ ID NO: 474558 - RNA, 19 nt, Artificial Sequence
  Description of Artificial Sequence: Synthetic oligonucleotide
  Antisense Strand to SEQ ID NO: 474557
ucaguucucgcgauuuaag

SEQ ID NO: 474559 - RNA, 19 nt, Artificial Sequence
  Description of Artificial Sequence: Synthetic oligonucleotide
  Sense strand starting at position 3218 of SEQ ID NO: 317229
gcgagaacugacgggauua

SEQ ID NO: 474560 - RNA, 19 nt, Artificial Sequence
  Description of Artificial Sequence: Synthetic oligonucleotide
  Antisense Strand to SEQ ID NO: 474559
uaaucccgucaguucucgc

SEQ ID NO: 474561 - RNA, 19 nt, Artificial Sequence
  Description of Artificial Sequence: Synthetic oligonucleotide
  Sense strand starting at position 3219 of SEQ ID NO: 317229
cgagaacugacgggauuag

SEQ ID NO: 474562 - RNA, 19 nt, Artificial Sequence
  Description of Artificial Sequence: Synthetic oligonucleotide
  Antisense Strand to SEQ ID NO: 474561
cuaaucccgucaguucucg

SEQ ID NO: 474563 - RNA, 19 nt, Artificial Sequence
  Description of Artificial Sequence: Synthetic oligonucleotide
  Sense strand starting at position 3505 of SEQ ID NO: 317229
acgcgagcuuccuuaugac

SEQ ID NO: 474564 - RNA, 19 nt, Artificial Sequence
  Description of Artificial Sequence: Synthetic oligonucleotide
  Antisense Strand to SEQ ID NO: 474563
gucauaaggaagcucgcgu

SEQ ID NO: 474565 - RNA, 19 nt, Artificial Sequence
  Description of Artificial Sequence: Synthetic oligonucleotide
  Sense strand starting at position 1015 of SEQ ID NO: 317230
cgaauauauugcucugcaa

SEQ ID NO: 474566 - RNA, 19 nt, Artificial Sequence
  Description of Artificial Sequence: Synthetic oligonucleotide
  Antisense Strand to SEQ ID NO: 474565
uugcagagcaauauauucg

SEQ ID NO: 474567 - RNA, 19 nt, Artificial Sequence
  Description of Artificial Sequence: Synthetic oligonucleotide
  Sense strand starting at position 1018 of SEQ ID NO: 317230
auauauugcucugcaauug

SEQ ID NO: 474568 - RNA, 19 nt, Artificial Sequence
  Description of Artificial Sequence: Synthetic oligonucleotide
  Antisense Strand to SEQ ID NO: 474567
caauugcagagcaauauau

SEQ ID NO: 474569 - RNA, 19 nt, Artificial Sequence
  Description of Artificial Sequence: Synthetic oligonucleotide
  Sense strand starting at position 1028 of SEQ ID NO: 317230
cugcaauuguaaguagaag

SEQ ID NO: 474570 - RNA, 19 nt, Artificial Sequence
  Description of Artificial Sequence: Synthetic oligonucleotide
  Antisense Strand to SEQ ID NO: 474569
cuucuacuuacaauugcag

SEQ ID NO: 474571 - RNA, 19 nt, Artificial Sequence
  Description of Artificial Sequence: Synthetic oligonucleotide
  Sense strand starting at position 1127 of SEQ ID NO: 317230
acaacauucccagaucguu

SEQ ID NO: 474572 - RNA, 19 nt, Artificial Sequence
  Description of Artificial Sequence: Synthetic oligonucleotide
  Antisense Strand to SEQ ID NO: 474571
aacgaucugggaauguugu

SEQ ID NO: 474573 - RNA, 19 nt, Artificial Sequence
  Description of Artificial Sequence: Synthetic oligonucleotide
  Sense strand starting at position 1130 of SEQ ID NO: 317230
acauucccagaucguuaaa

SEQ ID NO: 474574 - RNA, 19 nt, Artificial Sequence
  Description of Artificial Sequence: Synthetic oligonucleotide
  Antisense Strand to SEQ ID NO: 474573
uuuaacgaucugggaaugu

SEQ ID NO: 474575 - RNA, 19 nt, Artificial Sequence
  Description of Artificial Sequence: Synthetic oligonucleotide
  Sense strand starting at position 1281 of SEQ ID NO: 317230
ggcaacaucccaggucaua

SEQ ID NO: 474576 - RNA, 19 nt, Artificial Sequence
  Description of Artificial Sequence: Synthetic oligonucleotide
  Antisense Strand to SEQ ID NO: 474575
uaugaccugggauguugcc

SEQ ID NO: 474577 - RNA, 19 nt, Artificial Sequence
  Description of Artificial Sequence: Synthetic oligonucleotide
  Sense strand starting at position 1316 of SEQ ID NO: 317230
gcaagaccugcugaauacu

SEQ ID NO: 474578 - RNA, 19 nt, Artificial Sequence
  Description of Artificial Sequence: Synthetic oligonucleotide
  Antisense Strand to SEQ ID NO: 474577
aguauucagcaggucuugc

SEQ ID NO: 474579 - RNA, 19 nt, Artificial Sequence
  Description of Artificial Sequence: Synthetic oligonucleotide
  Sense strand starting at position 1372 of SEQ ID NO: 317230
ggugauuugcugugcagac

SEQ ID NO: 474580 - RNA, 19 nt, Artificial Sequence
  Description of Artificial Sequence: Synthetic oligonucleotide
  Antisense Strand to SEQ ID NO: 474579
gucugcacagcaaaucacc

SEQ ID NO: 474581 - RNA, 19 nt, Artificial Sequence
  Description of Artificial Sequence: Synthetic oligonucleotide
  Sense strand starting at position 1373 of SEQ ID NO: 317230
gugauuugcugugcagaca

SEQ ID NO: 474582 - RNA, 19 nt, Artificial Sequence
  Description of Artificial Sequence: Synthetic oligonucleotide
  Antisense Strand to SEQ ID NO: 474581
ugucugcacagcaaaucac

SEQ ID NO: 474583 - RNA, 19 nt, Artificial Sequence
  Description of Artificial Sequence: Synthetic oligonucleotide
  Sense strand starting at position 1431 of SEQ ID NO: 317230
gugccuuuaagcggugauu

SEQ ID NO: 474584 - RNA, 19 nt, Artificial Sequence
  Description of Artificial Sequence: Synthetic oligonucleotide
  Antisense Strand to SEQ ID NO: 474583
aaucaccgcuuaaaggcac

SEQ ID NO: 474585 - RNA, 19 nt, Artificial Sequence
  Description of Artificial Sequence: Synthetic oligonucleotide
  Sense strand starting at position 1433 of SEQ ID NO: 317230
gccuuuaagcggugauuau

SEQ ID NO: 474586 - RNA, 19 nt, Artificial Sequence
  Description of Artificial Sequence: Synthetic oligonucleotide
  Antisense Strand to SEQ ID NO: 474585
auaaucaccgcuuaaaggc

SEQ ID NO: 474587 - RNA, 19 nt, Artificial Sequence
  Description of Artificial Sequence: Synthetic oligonucleotide
  Sense strand starting at position 1434 of SEQ ID NO: 317230
ccuuuaagcggugauuaug

SEQ ID NO: 474588 - RNA, 19 nt, Artificial Sequence
  Description of Artificial Sequence: Synthetic oligonucleotide
  Antisense Strand to SEQ ID NO: 474587
cauaaucaccgcuuaaagg

SEQ ID NO: 474589 - RNA, 19 nt, Artificial Sequence
  Description of Artificial Sequence: Synthetic oligonucleotide
  Sense strand starting at position 1440 of SEQ ID NO: 317230
agcggugauuaugcagaaa

SEQ ID NO: 474590 - RNA, 19 nt, Artificial Sequence
  Description of Artificial Sequence: Synthetic oligonucleotide
  Antisense Strand to SEQ ID NO: 474589
uuucugcauaaucaccgcu

SEQ ID NO: 474591 - RNA, 19 nt, Artificial Sequence
  Description of Artificial Sequence: Synthetic oligonucleotide
  Sense strand starting at position 2175 of SEQ ID NO: 317230
gcuugaguccuuucugcuc

SEQ ID NO: 474592 - RNA, 19 nt, Artificial Sequence
  Description of Artificial Sequence: Synthetic oligonucleotide
  Antisense Strand to SEQ ID NO: 474591
gagcagaaaggacucaagc

SEQ ID NO: 474593 - RNA, 19 nt, Artificial Sequence
  Description of Artificial Sequence: Synthetic oligonucleotide
  Sense strand starting at position 2412 of SEQ ID NO: 317230
gucucugucucaccggaaa

SEQ ID NO: 474594 - RNA, 19 nt, Artificial Sequence
  Description of Artificial Sequence: Synthetic oligonucleotide
  Antisense Strand to SEQ ID NO: 474593
uuuccggugagacagagac

SEQ ID NO: 474595 - RNA, 19 nt, Artificial Sequence
  Description of Artificial Sequence: Synthetic oligonucleotide
  Sense strand starting at position 2463 of SEQ ID NO: 317230
cagcguuggguagguaaga

SEQ ID NO: 474596 - RNA, 19 nt, Artificial Sequence
  Description of Artificial Sequence: Synthetic oligonucleotide
  Antisense Strand to SEQ ID NO: 474595
ucuuaccuacccaacgcug

SEQ ID NO: 474597 - RNA, 19 nt, Artificial Sequence
  Description of Artificial Sequence: Synthetic oligonucleotide
  Sense strand starting at position 2760 of SEQ ID NO: 317230
ggcuuucucucacucgauu

SEQ ID NO: 474598 - RNA, 19 nt, Artificial Sequence
  Description of Artificial Sequence: Synthetic oligonucleotide
  Antisense Strand to SEQ ID NO: 474597
aaucgagugagagaaagcc

SEQ ID NO: 474599 - RNA, 19 nt, Artificial Sequence
  Description of Artificial Sequence: Synthetic oligonucleotide
  Sense strand starting at position 2772 of SEQ ID NO: 317230
cucgauuucucgcagcucu

SEQ ID NO: 474600 - RNA, 19 nt, Artificial Sequence
  Description of Artificial Sequence: Synthetic oligonucleotide
  Antisense Strand to SEQ ID NO: 474599
agagcugcgagaaaucgag

SEQ ID NO: 474601 - RNA, 19 nt, Artificial Sequence
  Description of Artificial Sequence: Synthetic oligonucleotide
  Sense strand starting at position 2946 of SEQ ID NO: 317230
cccuguauccaguacaguu

SEQ ID NO: 474602 - RNA, 19 nt, Artificial Sequence
  Description of Artificial Sequence: Synthetic oligonucleotide
  Antisense Strand to SEQ ID NO: 474601
aacuguacuggauacaggg

SEQ ID NO: 474603 - RNA, 19 nt, Artificial Sequence
  Description of Artificial Sequence: Synthetic oligonucleotide
  Sense strand starting at position 2954 of SEQ ID NO: 317230
ccaguacaguucgaguuga

SEQ ID NO: 474604 - RNA, 19 nt, Artificial Sequence
  Description of Artificial Sequence: Synthetic oligonucleotide
  Antisense Strand to SEQ ID NO: 474603
ucaacucgaacuguacugg

SEQ ID NO: 474605 - RNA, 19 nt, Artificial Sequence
  Description of Artificial Sequence: Synthetic oligonucleotide
  Sense strand starting at position 2958 of SEQ ID NO: 317230
uacaguucgaguugagucu

SEQ ID NO: 474606 - RNA, 19 nt, Artificial Sequence
  Description of Artificial Sequence: Synthetic oligonucleotide
  Antisense Strand to SEQ ID NO: 474605
agacucaacucgaacugua

SEQ ID NO: 474607 - RNA, 19 nt, Artificial Sequence
  Description of Artificial Sequence: Synthetic oligonucleotide
  Sense strand starting at position 2965 of SEQ ID NO: 317230
cgaguugagucuuggaagg

SEQ ID NO: 474608 - RNA, 19 nt, Artificial Sequence
  Description of Artificial Sequence: Synthetic oligonucleotide
  Antisense Strand to SEQ ID NO: 474607
ccuuccaagacucaacucg

SEQ ID NO: 474609 - RNA, 19 nt, Artificial Sequence
  Description of Artificial Sequence: Synthetic oligonucleotide
  Sense strand starting at position 2967 of SEQ ID NO: 317230
aguugagucuuggaaggau

SEQ ID NO: 474610 - RNA, 19 nt, Artificial Sequence
  Description of Artificial Sequence: Synthetic oligonucleotide
  Antisense Strand to SEQ ID NO: 474609
auccuuccaagacucaacu

SEQ ID NO: 474611 - RNA, 19 nt, Artificial Sequence
  Description of Artificial Sequence: Synthetic oligonucleotide
  Sense strand starting at position 3063 of SEQ ID NO: 317230
gagggaaggucagaaauua

SEQ ID NO: 474612 - RNA, 19 nt, Artificial Sequence
  Description of Artificial Sequence: Synthetic oligonucleotide
  Antisense Strand to SEQ ID NO: 474611
uaauuucugaccuucccuc

SEQ ID NO: 474613 - RNA, 19 nt, Artificial Sequence
  Description of Artificial Sequence: Synthetic oligonucleotide
  Sense strand starting at position 3085 of SEQ ID NO: 317230
agcgcauaugcugcugaau

SEQ ID NO: 474614 - RNA, 19 nt, Artificial Sequence
  Description of Artificial Sequence: Synthetic oligonucleotide
  Antisense Strand to SEQ ID NO: 474613
auucagcagcauaugcgcu

SEQ ID NO: 474615 - RNA, 19 nt, Artificial Sequence
  Description of Artificial Sequence: Synthetic oligonucleotide
  Sense strand starting at position 3086 of SEQ ID NO: 317230
gcgcauaugcugcugaaua

SEQ ID NO: 474616 - RNA, 19 nt, Artificial Sequence
  Description of Artificial Sequence: Synthetic oligonucleotide
  Antisense Strand to SEQ ID NO: 474615
uauucagcagcauaugcgc

SEQ ID NO: 474617 - RNA, 19 nt, Artificial Sequence
  Description of Artificial Sequence: Synthetic oligonucleotide
  Sense strand starting at position 3087 of SEQ ID NO: 317230
cgcauaugcugcugaauac

SEQ ID NO: 474618 - RNA, 19 nt, Artificial Sequence
  Description of Artificial Sequence: Synthetic oligonucleotide
  Antisense Strand to SEQ ID NO: 474617
guauucagcagcauaugcg

SEQ ID NO: 474619 - RNA, 19 nt, Artificial Sequence
  Description of Artificial Sequence: Synthetic oligonucleotide
  Sense strand starting at position 3088 of SEQ ID NO: 317230
gcauaugcugcugaauaca

SEQ ID NO: 474620 - RNA, 19 nt, Artificial Sequence
  Description of Artificial Sequence: Synthetic oligonucleotide
  Antisense Strand to SEQ ID NO: 474619
uguauucagcagcauaugc

SEQ ID NO: 474621 - RNA, 19 nt, Artificial Sequence
  Description of Artificial Sequence: Synthetic oligonucleotide
  Sense strand starting at position 3423 of SEQ ID NO: 317230
gcugucaccucccuagaga

SEQ ID NO: 474622 - RNA, 19 nt, Artificial Sequence
  Description of Artificial Sequence: Synthetic oligonucleotide
  Antisense Strand to SEQ ID NO: 474621
ucucuagggaggugacagc

SEQ ID NO: 474623 - RNA, 19 nt, Artificial Sequence
  Description of Artificial Sequence: Synthetic oligonucleotide
  Sense strand starting at position 3931 of SEQ ID NO: 317230
gcaguguugccggguguga

SEQ ID NO: 474624 - RNA, 19 nt, Artificial Sequence
  Description of Artificial Sequence: Synthetic oligonucleotide
  Antisense Strand to SEQ ID NO: 474623
ucacacccggcaacacugc

SEQ ID NO: 474625 - RNA, 19 nt, Artificial Sequence
  Description of Artificial Sequence: Synthetic oligonucleotide
  Sense strand starting at position 3942 of SEQ ID NO: 317230
gggugugagcucagcgaaa

SEQ ID NO: 474626 - RNA, 19 nt, Artificial Sequence
  Description of Artificial Sequence: Synthetic oligonucleotide
  Antisense Strand to SEQ ID NO: 474625
uuucgcugagcucacaccc

SEQ ID NO: 474627 - RNA, 19 nt, Artificial Sequence
  Description of Artificial Sequence: Synthetic oligonucleotide
  Sense strand starting at position 64 of SEQ ID NO: 317231
ugaggaucaucguuucaag

SEQ ID NO: 474628 - RNA, 19 nt, Artificial Sequence
  Description of Artificial Sequence: Synthetic oligonucleotide
  Antisense Strand to SEQ ID NO: 474627
cuugaaacgaugauccuca

SEQ ID NO: 474629 - RNA, 19 nt, Artificial Sequence
  Description of Artificial Sequence: Synthetic oligonucleotide
  Sense strand starting at position 108 of SEQ ID NO: 317231
agaaacuggcucugugaga

SEQ ID NO: 474630 - RNA, 19 nt, Artificial Sequence
  Description of Artificial Sequence: Synthetic oligonucleotide
  Antisense Strand to SEQ ID NO: 474629
ucucacagagccaguuucu

SEQ ID NO: 474631 - RNA, 19 nt, Artificial Sequence
  Description of Artificial Sequence: Synthetic oligonucleotide
  Sense strand starting at position 109 of SEQ ID NO: 317231
gaaacuggcucugugagaa

SEQ ID NO: 474632 - RNA, 19 nt, Artificial Sequence
  Description of Artificial Sequence: Synthetic oligonucleotide
  Antisense Strand to SEQ ID NO: 474631
uucucacagagccaguuuc

SEQ ID NO: 474633 - RNA, 19 nt, Artificial Sequence
  Description of Artificial Sequence: Synthetic oligonucleotide
  Sense strand starting at position 179 of SEQ ID NO: 317231
ccaagauuauggccuagga

SEQ ID NO: 474634 - RNA, 19 nt, Artificial Sequence
  Description of Artificial Sequence: Synthetic oligonucleotide
  Antisense Strand to SEQ ID NO: 474633
uccuaggccauaaucuugg

SEQ ID NO: 474635 - RNA, 19 nt, Artificial Sequence
  Description of Artificial Sequence: Synthetic oligonucleotide
  Sense strand starting at position 263 of SEQ ID NO: 317231
uugcucaaccaguguauuu

SEQ ID NO: 474636 - RNA, 19 nt, Artificial Sequence
  Description of Artificial Sequence: Synthetic oligonucleotide
  Antisense Strand to SEQ ID NO: 474635
aaauacacugguugagcaa

SEQ ID NO: 474637 - RNA, 19 nt, Artificial Sequence
  Description of Artificial Sequence: Synthetic oligonucleotide
  Sense strand starting at position 306 of SEQ ID NO: 317231
uugugaaucucuguacuau

SEQ ID NO: 474638 - RNA, 19 nt, Artificial Sequence
  Description of Artificial Sequence: Synthetic oligonucleotide
  Antisense Strand to SEQ ID NO: 474637
auaguacagagauucacaa

SEQ ID NO: 474639 - RNA, 19 nt, Artificial Sequence
  Description of Artificial Sequence: Synthetic oligonucleotide
  Sense strand starting at position 307 of SEQ ID NO: 317231
ugugaaucucuguacuaug

SEQ ID NO: 474640 - RNA, 19 nt, Artificial Sequence
  Description of Artificial Sequence: Synthetic oligonucleotide
  Antisense Strand to SEQ ID NO: 474639
cauaguacagagauucaca

SEQ ID NO: 474641 - RNA, 19 nt, Artificial Sequence
  Description of Artificial Sequence: Synthetic oligonucleotide
  Sense strand starting at position 316 of SEQ ID NO: 317231
cuguacuaugccuaacagu

SEQ ID NO: 474642 - RNA, 19 nt, Artificial Sequence
  Description of Artificial Sequence: Synthetic oligonucleotide
  Antisense Strand to SEQ ID NO: 474641
acuguuaggcauaguacag

SEQ ID NO: 474643 - RNA, 19 nt, Artificial Sequence
  Description of Artificial Sequence: Synthetic oligonucleotide
  Sense strand starting at position 708 of SEQ ID NO: 317231
guagcauaacugcaaaucu

SEQ ID NO: 474644 - RNA, 19 nt, Artificial Sequence
  Description of Artificial Sequence: Synthetic oligonucleotide
  Antisense Strand to SEQ ID NO: 474643
agauuugcaguuaugcuac

SEQ ID NO: 474645 - RNA, 19 nt, Artificial Sequence
  Description of Artificial Sequence: Synthetic oligonucleotide
  Sense strand starting at position 745 of SEQ ID NO: 317231
cuauaaugauuaucgguau

SEQ ID NO: 474646 - RNA, 19 nt, Artificial Sequence
  Description of Artificial Sequence: Synthetic oligonucleotide
  Antisense Strand to SEQ ID NO: 474645
auaccgauaaucauuauag

SEQ ID NO: 474647 - RNA, 19 nt, Artificial Sequence
  Description of Artificial Sequence: Synthetic oligonucleotide
  Sense strand starting at position 749 of SEQ ID NO: 317231
aaugauuaucgguauuaac

SEQ ID NO: 474648 - RNA, 19 nt, Artificial Sequence
  Description of Artificial Sequence: Synthetic oligonucleotide
  Antisense Strand to SEQ ID NO: 474647
guuaauaccgauaaucauu

SEQ ID NO: 474649 - RNA, 19 nt, Artificial Sequence
  Description of Artificial Sequence: Synthetic oligonucleotide
  Sense strand starting at position 758 of SEQ ID NO: 317231
cgguauuaacaauaguaau

SEQ ID NO: 474650 - RNA, 19 nt, Artificial Sequence
  Description of Artificial Sequence: Synthetic oligonucleotide
  Antisense Strand to SEQ ID NO: 474649
auuacuauuguuaauaccg

SEQ ID NO: 474651 - RNA, 19 nt, Artificial Sequence
  Description of Artificial Sequence: Synthetic oligonucleotide
  Sense strand starting at position 789 of SEQ ID NO: 317231
cccugugacuaaucaguuu

SEQ ID NO: 474652 - RNA, 19 nt, Artificial Sequence
  Description of Artificial Sequence: Synthetic oligonucleotide
  Antisense Strand to SEQ ID NO: 474651
aaacugauuagucacaggg

SEQ ID NO: 474653 - RNA, 19 nt, Artificial Sequence
  Description of Artificial Sequence: Synthetic oligonucleotide
  Sense strand starting at position 792 of SEQ ID NO: 317231
ugugacuaaucaguuuaca

SEQ ID NO: 474654 - RNA, 19 nt, Artificial Sequence
  Description of Artificial Sequence: Synthetic oligonucleotide
  Antisense Strand to SEQ ID NO: 474653
uguaaacugauuagucaca

SEQ ID NO: 474655 - RNA, 19 nt, Artificial Sequence
  Description of Artificial Sequence: Synthetic oligonucleotide
  Sense strand starting at position 895 of SEQ ID NO: 317231
agaguuaagacgugaagaa

SEQ ID NO: 474656 - RNA, 19 nt, Artificial Sequence
  Description of Artificial Sequence: Synthetic oligonucleotide
  Antisense Strand to SEQ ID NO: 474655
uucuucacgucuuaacucu

SEQ ID NO: 474657 - RNA, 19 nt, Artificial Sequence
  Description of Artificial Sequence: Synthetic oligonucleotide
  Sense strand starting at position 1067 of SEQ ID NO: 317231
uaacguacacagugaaaca

SEQ ID NO: 474658 - RNA, 19 nt, Artificial Sequence
  Description of Artificial Sequence: Synthetic oligonucleotide
  Antisense Strand to SEQ ID NO: 474657
uguuucacuguguacguua

SEQ ID NO: 474659 - RNA, 19 nt, Artificial Sequence
  Description of Artificial Sequence: Synthetic oligonucleotide
  Sense strand starting at position 1250 of SEQ ID NO: 317231
ggguguaaacuugugcgua

SEQ ID NO: 474660 - RNA, 19 nt, Artificial Sequence
  Description of Artificial Sequence: Synthetic oligonucleotide
  Antisense Strand to SEQ ID NO: 474659
uacgcacaaguuuacaccc

SEQ ID NO: 474661 - RNA, 19 nt, Artificial Sequence
  Description of Artificial Sequence: Synthetic oligonucleotide
  Sense strand starting at position 1331 of SEQ ID NO: 317231
ggauuaggcauccgcaaag

SEQ ID NO: 474662 - RNA, 19 nt, Artificial Sequence
  Description of Artificial Sequence: Synthetic oligonucleotide
  Antisense Strand to SEQ ID NO: 474661
cuuugcggaugccuaaucc

SEQ ID NO: 474663 - RNA, 19 nt, Artificial Sequence
  Description of Artificial Sequence: Synthetic oligonucleotide
  Sense strand starting at position 1809 of SEQ ID NO: 317231
ccgggagcuacuuacuaaa

SEQ ID NO: 474664 - RNA, 19 nt, Artificial Sequence
  Description of Artificial Sequence: Synthetic oligonucleotide
  Antisense Strand to SEQ ID NO: 474663
uuuaguaaguagcucccgg

SEQ ID NO: 474665 - RNA, 19 nt, Artificial Sequence
  Description of Artificial Sequence: Synthetic oligonucleotide
  Sense strand starting at position 1811 of SEQ ID NO: 317231
gggagcuacuuacuaaaga

SEQ ID NO: 474666 - RNA, 19 nt, Artificial Sequence
  Description of Artificial Sequence: Synthetic oligonucleotide
  Antisense Strand to SEQ ID NO: 474665
ucuuuaguaaguagcuccc

SEQ ID NO: 474667 - RNA, 19 nt, Artificial Sequence
  Description of Artificial Sequence: Synthetic oligonucleotide
  Sense strand starting at position 1824 of SEQ ID NO: 317231
uaaagaagaggcgguaauu

SEQ ID NO: 474668 - RNA, 19 nt, Artificial Sequence
  Description of Artificial Sequence: Synthetic oligonucleotide
  Antisense Strand to SEQ ID NO: 474667
aauuaccgccucuucuuua

SEQ ID NO: 474669 - RNA, 19 nt, Artificial Sequence
  Description of Artificial Sequence: Synthetic oligonucleotide
  Sense strand starting at position 1973 of SEQ ID NO: 317231
gcgcucauggcgucaauga

SEQ ID NO: 474670 - RNA, 19 nt, Artificial Sequence
  Description of Artificial Sequence: Synthetic oligonucleotide
  Antisense Strand to SEQ ID NO: 474669
ucauugacgccaugagcgc

SEQ ID NO: 474671 - RNA, 19 nt, Artificial Sequence
  Description of Artificial Sequence: Synthetic oligonucleotide
  Sense strand starting at position 2108 of SEQ ID NO: 317231
gccaguggaaucuggaaca

SEQ ID NO: 474672 - RNA, 19 nt, Artificial Sequence
  Description of Artificial Sequence: Synthetic oligonucleotide
  Antisense Strand to SEQ ID NO: 474671
uguuccagauuccacuggc

SEQ ID NO: 474673 - RNA, 19 nt, Artificial Sequence
  Description of Artificial Sequence: Synthetic oligonucleotide
  Sense strand starting at position 2256 of SEQ ID NO: 317231
cgucaagaauuacuaucau

SEQ ID NO: 474674 - RNA, 19 nt, Artificial Sequence
  Description of Artificial Sequence: Synthetic oligonucleotide
  Antisense Strand to SEQ ID NO: 474673
augauaguaauucuugacg

SEQ ID NO: 474675 - RNA, 19 nt, Artificial Sequence
  Description of Artificial Sequence: Synthetic oligonucleotide
  Sense strand starting at position 2293 of SEQ ID NO: 317231
uguaauauugagugauuac

SEQ ID NO: 474676 - RNA, 19 nt, Artificial Sequence
  Description of Artificial Sequence: Synthetic oligonucleotide
  Antisense Strand to SEQ ID NO: 474675
guaaucacucaauauuaca

SEQ ID NO: 474677 - RNA, 19 nt, Artificial Sequence
  Description of Artificial Sequence: Synthetic oligonucleotide
  Sense strand starting at position 2418 of SEQ ID NO: 317231
ggacguugacaccgacuua

SEQ ID NO: 474678 - RNA, 19 nt, Artificial Sequence
  Description of Artificial Sequence: Synthetic oligonucleotide
  Antisense Strand to SEQ ID NO: 474677
uaagucggugucaacgucc

SEQ ID NO: 474679 - RNA, 19 nt, Artificial Sequence
  Description of Artificial Sequence: Synthetic oligonucleotide
  Sense strand starting at position 2977 of SEQ ID NO: 317231
guccaucuucuuugggacu

SEQ ID NO: 474680 - RNA, 19 nt, Artificial Sequence
  Description of Artificial Sequence: Synthetic oligonucleotide
  Antisense Strand to SEQ ID NO: 474679
agucccaaagaagauggac

SEQ ID NO: 474681 - RNA, 19 nt, Artificial Sequence
  Description of Artificial Sequence: Synthetic oligonucleotide
  Sense strand starting at position 2988 of SEQ ID NO: 317231
uugggacuaucaucaucua

SEQ ID NO: 474682 - RNA, 19 nt, Artificial Sequence
  Description of Artificial Sequence: Synthetic oligonucleotide
  Antisense Strand to SEQ ID NO: 474681
uagaugaugauagucccaa

SEQ ID NO: 474683 - RNA, 19 nt, Artificial Sequence
  Description of Artificial Sequence: Synthetic oligonucleotide
  Sense strand starting at position 3047 of SEQ ID NO: 317231
ccaauuaucgugugaucau

SEQ ID NO: 474684 - RNA, 19 nt, Artificial Sequence
  Description of Artificial Sequence: Synthetic oligonucleotide
  Antisense Strand to SEQ ID NO: 474683
augaucacacgauaauugg

SEQ ID NO: 474685 - RNA, 19 nt, Artificial Sequence
  Description of Artificial Sequence: Synthetic oligonucleotide
  Sense strand starting at position 3050 of SEQ ID NO: 317231
auuaucgugugaucauuaa

SEQ ID NO: 474686 - RNA, 19 nt, Artificial Sequence
  Description of Artificial Sequence: Synthetic oligonucleotide
  Antisense Strand to SEQ ID NO: 474685
uuaaugaucacacgauaau

SEQ ID NO: 474687 - RNA, 19 nt, Artificial Sequence
  Description of Artificial Sequence: Synthetic oligonucleotide
  Sense strand starting at position 3100 of SEQ ID NO: 317231
aaggauuccuaggagauau

SEQ ID NO: 474688 - RNA, 19 nt, Artificial Sequence
  Description of Artificial Sequence: Synthetic oligonucleotide
  Antisense Strand to SEQ ID NO: 474687
auaucuccuaggaauccuu

SEQ ID NO: 474689 - RNA, 19 nt, Artificial Sequence
  Description of Artificial Sequence: Synthetic oligonucleotide
  Sense strand starting at position 3112 of SEQ ID NO: 317231
gagauauugugacuagcua

SEQ ID NO: 474690 - RNA, 19 nt, Artificial Sequence
  Description of Artificial Sequence: Synthetic oligonucleotide
  Antisense Strand to SEQ ID NO: 474689
uagcuagucacaauaucuc

SEQ ID NO: 474691 - RNA, 19 nt, Artificial Sequence
  Description of Artificial Sequence: Synthetic oligonucleotide
  Sense strand starting at position 3120 of SEQ ID NO: 317231
gugacuagcuacuuagaga

SEQ ID NO: 474692 - RNA, 19 nt, Artificial Sequence
  Description of Artificial Sequence: Synthetic oligonucleotide
  Antisense Strand to SEQ ID NO: 474691
ucucuaaguagcuagucac

SEQ ID NO: 474693 - RNA, 19 nt, Artificial Sequence
  Description of Artificial Sequence: Synthetic oligonucleotide
  Sense strand starting at position 3254 of SEQ ID NO: 317231
aucucuucugugcauauau

SEQ ID NO: 474694 - RNA, 19 nt, Artificial Sequence
  Description of Artificial Sequence: Synthetic oligonucleotide
  Antisense Strand to SEQ ID NO: 474693
auauaugcacagaagagau

SEQ ID NO: 474695 - RNA, 19 nt, Artificial Sequence
  Description of Artificial Sequence: Synthetic oligonucleotide
  Sense strand starting at position 3256 of SEQ ID NO: 317231
cucuucugugcauauauca

SEQ ID NO: 474696 - RNA, 19 nt, Artificial Sequence
  Description of Artificial Sequence: Synthetic oligonucleotide
  Antisense Strand to SEQ ID NO: 474695
ugauauaugcacagaagag

SEQ ID NO: 474697 - RNA, 19 nt, Artificial Sequence
  Description of Artificial Sequence: Synthetic oligonucleotide
  Sense strand starting at position 3378 of SEQ ID NO: 317231
guuguaggcuaauuucuaa

SEQ ID NO: 474698 - RNA, 19 nt, Artificial Sequence
  Description of Artificial Sequence: Synthetic oligonucleotide
  Antisense Strand to SEQ ID NO: 474697
uuagaaauuagccuacaac

SEQ ID NO: 474699 - RNA, 19 nt, Artificial Sequence
  Description of Artificial Sequence: Synthetic oligonucleotide
  Sense strand starting at position 3391 of SEQ ID NO: 317231
uucuaaugaucuguggaua

SEQ ID NO: 474700 - RNA, 19 nt, Artificial Sequence
  Description of Artificial Sequence: Synthetic oligonucleotide
  Antisense Strand to SEQ ID NO: 474699
uauccacagaucauuagaa

SEQ ID NO: 474701 - RNA, 19 nt, Artificial Sequence
  Description of Artificial Sequence: Synthetic oligonucleotide
  Sense strand starting at position 3392 of SEQ ID NO: 317231
ucuaaugaucuguggauac

SEQ ID NO: 474702 - RNA, 19 nt, Artificial Sequence
  Description of Artificial Sequence: Synthetic oligonucleotide
  Antisense Strand to SEQ ID NO: 474701
guauccacagaucauuaga

SEQ ID NO: 474703 - RNA, 19 nt, Artificial Sequence
  Description of Artificial Sequence: Synthetic oligonucleotide
  Sense strand starting at position 3399 of SEQ ID NO: 317231
aucuguggauacuuaaagu

SEQ ID NO: 474704 - RNA, 19 nt, Artificial Sequence
  Description of Artificial Sequence: Synthetic oligonucleotide
  Antisense Strand to SEQ ID NO: 474703
acuuuaaguauccacagau

SEQ ID NO: 474705 - RNA, 19 nt, Artificial Sequence
  Description of Artificial Sequence: Synthetic oligonucleotide
  Sense strand starting at position 3979 of SEQ ID NO: 317231
uuuguuaaguagguuuaca

SEQ ID NO: 474706 - RNA, 19 nt, Artificial Sequence
  Description of Artificial Sequence: Synthetic oligonucleotide
  Antisense Strand to SEQ ID NO: 474705
uguaaaccuacuuaacaaa

SEQ ID NO: 474707 - RNA, 19 nt, Artificial Sequence
  Description of Artificial Sequence: Synthetic oligonucleotide
  Sense strand starting at position 122 of SEQ ID NO: 317232
cagagaagugacuggccaa

SEQ ID NO: 474708 - RNA, 19 nt, Artificial Sequence
  Description of Artificial Sequence: Synthetic oligonucleotide
  Antisense Strand to SEQ ID NO: 474707
uuggccagucacuucucug

SEQ ID NO: 474709 - RNA, 19 nt, Artificial Sequence
  Description of Artificial Sequence: Synthetic oligonucleotide
  Sense strand starting at position 123 of SEQ ID NO: 317232
agagaagugacuggccaau

SEQ ID NO: 474710 - RNA, 19 nt, Artificial Sequence
  Description of Artificial Sequence: Synthetic oligonucleotide
  Antisense Strand to SEQ ID NO: 474709
auuggccagucacuucucu

SEQ ID NO: 474711 - RNA, 19 nt, Artificial Sequence
  Description of Artificial Sequence: Synthetic oligonucleotide
  Sense strand starting at position 472 of SEQ ID NO: 317232
ggcuacagggcauaugaau

SEQ ID NO: 474712 - RNA, 19 nt, Artificial Sequence
  Description of Artificial Sequence: Synthetic oligonucleotide
  Antisense Strand to SEQ ID NO: 474711
auucauaugcccuguagcc

SEQ ID NO: 474713 - RNA, 19 nt, Artificial Sequence
  Description of Artificial Sequence: Synthetic oligonucleotide
  Sense strand starting at position 505 of SEQ ID NO: 317232
ccgccuuaccaagaaauca

SEQ ID NO: 474714 - RNA, 19 nt, Artificial Sequence
  Description of Artificial Sequence: Synthetic oligonucleotide
  Antisense Strand to SEQ ID NO: 474713
ugauuucuugguaaggcgg

SEQ ID NO: 474715 - RNA, 19 nt, Artificial Sequence
  Description of Artificial Sequence: Synthetic oligonucleotide
  Sense strand starting at position 622 of SEQ ID NO: 317232
cgggcaugccucgcuagau

SEQ ID NO: 474716 - RNA, 19 nt, Artificial Sequence
  Description of Artificial Sequence: Synthetic oligonucleotide
  Antisense Strand to SEQ ID NO: 474715
aucuagcgaggcaugcccg

SEQ ID NO: 474717 - RNA, 19 nt, Artificial Sequence
  Description of Artificial Sequence: Synthetic oligonucleotide
  Sense strand starting at position 825 of SEQ ID NO: 317232
ugggauccuccaugcaauu

SEQ ID NO: 474718 - RNA, 19 nt, Artificial Sequence
  Description of Artificial Sequence: Synthetic oligonucleotide
  Antisense Strand to SEQ ID NO: 474717
aauugcauggaggauccca

SEQ ID NO: 474719 - RNA, 19 nt, Artificial Sequence
  Description of Artificial Sequence: Synthetic oligonucleotide
  Sense strand starting at position 906 of SEQ ID NO: 317232
cuuuccuuccgagagcauu

SEQ ID NO: 474720 - RNA, 19 nt, Artificial Sequence
  Description of Artificial Sequence: Synthetic oligonucleotide
  Antisense Strand to SEQ ID NO: 474719
aaugcucucggaaggaaag

SEQ ID NO: 474721 - RNA, 19 nt, Artificial Sequence
  Description of Artificial Sequence: Synthetic oligonucleotide
  Sense strand starting at position 990 of SEQ ID NO: 317232
gaaacugcuugcguuauuu

SEQ ID NO: 474722 - RNA, 19 nt, Artificial Sequence
  Description of Artificial Sequence: Synthetic oligonucleotide
  Antisense Strand to SEQ ID NO: 474721
aaauaacgcaagcaguuuc

SEQ ID NO: 474723 - RNA, 19 nt, Artificial Sequence
  Description of Artificial Sequence: Synthetic oligonucleotide
  Sense strand starting at position 1019 of SEQ ID NO: 317232
augaauuguagccagcaga

SEQ ID NO: 474724 - RNA, 19 nt, Artificial Sequence
  Description of Artificial Sequence: Synthetic oligonucleotide
  Antisense Strand to SEQ ID NO: 474723
ucugcuggcuacaauucau

SEQ ID NO: 474725 - RNA, 19 nt, Artificial Sequence
  Description of Artificial Sequence: Synthetic oligonucleotide
  Sense strand starting at position 1038 of SEQ ID NO: 317232
gacuguggaauugauguau

SEQ ID NO: 474726 - RNA, 19 nt, Artificial Sequence
  Description of Artificial Sequence: Synthetic oligonucleotide
  Antisense Strand to SEQ ID NO: 474725
auacaucaauuccacaguc

SEQ ID NO: 474727 - RNA, 19 nt, Artificial Sequence
  Description of Artificial Sequence: Synthetic oligonucleotide
  Sense strand starting at position 1042 of SEQ ID NO: 317232
guggaauugauguauugcu

SEQ ID NO: 474728 - RNA, 19 nt, Artificial Sequence
  Description of Artificial Sequence: Synthetic oligonucleotide
  Antisense Strand to SEQ ID NO: 474727
agcaauacaucaauuccac

SEQ ID NO: 474729 - RNA, 19 nt, Artificial Sequence
  Description of Artificial Sequence: Synthetic oligonucleotide
  Sense strand starting at position 1340 of SEQ ID NO: 317232
uaaguucucugucugauga

SEQ ID NO: 474730 - RNA, 19 nt, Artificial Sequence
  Description of Artificial Sequence: Synthetic oligonucleotide
  Antisense Strand to SEQ ID NO: 474729
ucaucagacagagaacuua

SEQ ID NO: 474731 - RNA, 19 nt, Artificial Sequence
  Description of Artificial Sequence: Synthetic oligonucleotide
  Sense strand starting at position 1341 of SEQ ID NO: 317232
aaguucucugucugaugaa

SEQ ID NO: 474732 - RNA, 19 nt, Artificial Sequence
  Description of Artificial Sequence: Synthetic oligonucleotide
  Antisense Strand to SEQ ID NO: 474731
uucaucagacagagaacuu

SEQ ID NO: 474733 - RNA, 19 nt, Artificial Sequence
  Description of Artificial Sequence: Synthetic oligonucleotide
  Sense strand starting at position 1399 of SEQ ID NO: 317232
cggacuauauuugaacaca

SEQ ID NO: 474734 - RNA, 19 nt, Artificial Sequence
  Description of Artificial Sequence: Synthetic oligonucleotide
  Antisense Strand to SEQ ID NO: 474733
uguguucaaauauaguccg

SEQ ID NO: 474735 - RNA, 19 nt, Artificial Sequence
  Description of Artificial Sequence: Synthetic oligonucleotide
  Sense strand starting at position 1540 of SEQ ID NO: 317232
uauugcauaugaguagaaa

SEQ ID NO: 474736 - RNA, 19 nt, Artificial Sequence
  Description of Artificial Sequence: Synthetic oligonucleotide
  Antisense Strand to SEQ ID NO: 474735
uuucuacucauaugcaaua

SEQ ID NO: 474737 - RNA, 19 nt, Artificial Sequence
  Description of Artificial Sequence: Synthetic oligonucleotide
  Sense strand starting at position 1563 of SEQ ID NO: 317232
gccaaagucacauggaaag

SEQ ID NO: 474738 - RNA, 19 nt, Artificial Sequence
  Description of Artificial Sequence: Synthetic oligonucleotide
  Antisense Strand to SEQ ID NO: 474737
cuuuccaugugacuuuggc

SEQ ID NO: 474739 - RNA, 19 nt, Artificial Sequence
  Description of Artificial Sequence: Synthetic oligonucleotide
  Sense strand starting at position 1575 of SEQ ID NO: 317232
uggaaagaguuucuaacug

SEQ ID NO: 474740 - RNA, 19 nt, Artificial Sequence
  Description of Artificial Sequence: Synthetic oligonucleotide
  Antisense Strand to SEQ ID NO: 474739
caguuagaaacucuuucca

SEQ ID NO: 474741 - RNA, 19 nt, Artificial Sequence
  Description of Artificial Sequence: Synthetic oligonucleotide
  Sense strand starting at position 1658 of SEQ ID NO: 317232
auagcaaacuuauuggagu

SEQ ID NO: 474742 - RNA, 19 nt, Artificial Sequence
  Description of Artificial Sequence: Synthetic oligonucleotide
  Antisense Strand to SEQ ID NO: 474741
acuccaauaaguuugcuau

SEQ ID NO: 474743 - RNA, 19 nt, Artificial Sequence
  Description of Artificial Sequence: Synthetic oligonucleotide
  Sense strand starting at position 1982 of SEQ ID NO: 317232
gaaggcaccugucuuacua

SEQ ID NO: 474744 - RNA, 19 nt, Artificial Sequence
  Description of Artificial Sequence: Synthetic oligonucleotide
  Antisense Strand to SEQ ID NO: 474743
uaguaagacaggugccuuc

SEQ ID NO: 474745 - RNA, 19 nt, Artificial Sequence
  Description of Artificial Sequence: Synthetic oligonucleotide
  Sense strand starting at position 2380 of SEQ ID NO: 317232
aaacguguauucccuaaga

SEQ ID NO: 474746 - RNA, 19 nt, Artificial Sequence
  Description of Artificial Sequence: Synthetic oligonucleotide
  Antisense Strand to SEQ ID NO: 474745
ucuuagggaauacacguuu

SEQ ID NO: 474747 - RNA, 19 nt, Artificial Sequence
  Description of Artificial Sequence: Synthetic oligonucleotide
  Sense strand starting at position 2382 of SEQ ID NO: 317232
acguguauucccuaagaac

SEQ ID NO: 474748 - RNA, 19 nt, Artificial Sequence
  Description of Artificial Sequence: Synthetic oligonucleotide
  Antisense Strand to SEQ ID NO: 474747
guucuuagggaauacacgu

SEQ ID NO: 474749 - RNA, 19 nt, Artificial Sequence
  Description of Artificial Sequence: Synthetic oligonucleotide
  Sense strand starting at position 2407 of SEQ ID NO: 317232
auucuaagaucuccaagug

SEQ ID NO: 474750 - RNA, 19 nt, Artificial Sequence
  Description of Artificial Sequence: Synthetic oligonucleotide
  Antisense Strand to SEQ ID NO: 474749
cacuuggagaucuuagaau

SEQ ID NO: 474751 - RNA, 19 nt, Artificial Sequence
  Description of Artificial Sequence: Synthetic oligonucleotide
  Sense strand starting at position 2435 of SEQ ID NO: 317232
ucaguuugggacuaaagca

SEQ ID NO: 474752 - RNA, 19 nt, Artificial Sequence
  Description of Artificial Sequence: Synthetic oligonucleotide
  Antisense Strand to SEQ ID NO: 474751
ugcuuuagucccaaacuga

SEQ ID NO: 474753 - RNA, 19 nt, Artificial Sequence
  Description of Artificial Sequence: Synthetic oligonucleotide
  Sense strand starting at position 2456 of SEQ ID NO: 317232
agcuuaucacaugaugcau

SEQ ID NO: 474754 - RNA, 19 nt, Artificial Sequence
  Description of Artificial Sequence: Synthetic oligonucleotide
  Antisense Strand to SEQ ID NO: 474753
augcaucaugugauaagcu

SEQ ID NO: 474755 - RNA, 19 nt, Artificial Sequence
  Description of Artificial Sequence: Synthetic oligonucleotide
  Sense strand starting at position 2489 of SEQ ID NO: 317232
uucucauugagggaguguu

SEQ ID NO: 474756 - RNA, 19 nt, Artificial Sequence
  Description of Artificial Sequence: Synthetic oligonucleotide
  Antisense Strand to SEQ ID NO: 474755
aacacucccucaaugagaa

SEQ ID NO: 474757 - RNA, 19 nt, Artificial Sequence
  Description of Artificial Sequence: Synthetic oligonucleotide
  Sense strand starting at position 2579 of SEQ ID NO: 317232
uguguuaagguauaaacaa

SEQ ID NO: 474758 - RNA, 19 nt, Artificial Sequence
  Description of Artificial Sequence: Synthetic oligonucleotide
  Antisense Strand to SEQ ID NO: 474757
uuguuuauaccuuaacaca

SEQ ID NO: 474759 - RNA, 19 nt, Artificial Sequence
  Description of Artificial Sequence: Synthetic oligonucleotide
  Sense strand starting at position 2640 of SEQ ID NO: 317232
auaccagcucccgaagagu

SEQ ID NO: 474760 - RNA, 19 nt, Artificial Sequence
  Description of Artificial Sequence: Synthetic oligonucleotide
  Antisense Strand to SEQ ID NO: 474759
acucuucgggagcugguau

SEQ ID NO: 474761 - RNA, 19 nt, Artificial Sequence
  Description of Artificial Sequence: Synthetic oligonucleotide
  Sense strand starting at position 2929 of SEQ ID NO: 317232
aaucaagaaugucugugaa

SEQ ID NO: 474762 - RNA, 19 nt, Artificial Sequence
  Description of Artificial Sequence: Synthetic oligonucleotide
  Antisense Strand to SEQ ID NO: 474761
uucacagacauucuugauu

SEQ ID NO: 474763 - RNA, 19 nt, Artificial Sequence
  Description of Artificial Sequence: Synthetic oligonucleotide
  Sense strand starting at position 2931 of SEQ ID NO: 317232
ucaagaaugucugugaacu

SEQ ID NO: 474764 - RNA, 19 nt, Artificial Sequence
  Description of Artificial Sequence: Synthetic oligonucleotide
  Antisense Strand to SEQ ID NO: 474763
aguucacagacauucuuga

SEQ ID NO: 474765 - RNA, 19 nt, Artificial Sequence
  Description of Artificial Sequence: Synthetic oligonucleotide
  Sense strand starting at position 2932 of SEQ ID NO: 317232
caagaaugucugugaacug

SEQ ID NO: 474766 - RNA, 19 nt, Artificial Sequence
  Description of Artificial Sequence: Synthetic oligonucleotide
  Antisense Strand to SEQ ID NO: 474765
caguucacagacauucuug

SEQ ID NO: 474767 - RNA, 19 nt, Artificial Sequence
  Description of Artificial Sequence: Synthetic oligonucleotide
  Sense strand starting at position 3140 of SEQ ID NO: 317232
acaugacaguggucugacu

SEQ ID NO: 474768 - RNA, 19 nt, Artificial Sequence
  Description of Artificial Sequence: Synthetic oligonucleotide
  Antisense Strand to SEQ ID NO: 474767
agucagaccacugucaugu

SEQ ID NO: 474769 - RNA, 19 nt, Artificial Sequence
  Description of Artificial Sequence: Synthetic oligonucleotide
  Sense strand starting at position 3142 of SEQ ID NO: 317232
augacaguggucugacuua

SEQ ID NO: 474770 - RNA, 19 nt, Artificial Sequence
  Description of Artificial Sequence: Synthetic oligonucleotide
  Antisense Strand to SEQ ID NO: 474769
uaagucagaccacugucau

SEQ ID NO: 474771 - RNA, 19 nt, Artificial Sequence
  Description of Artificial Sequence: Synthetic oligonucleotide
  Sense strand starting at position 3167 of SEQ ID NO: 317232
ccaaguucccaggagaugu

SEQ ID NO: 474772 - RNA, 19 nt, Artificial Sequence
  Description of Artificial Sequence: Synthetic oligonucleotide
  Antisense Strand to SEQ ID NO: 474771
acaucuccugggaacuugg

SEQ ID NO: 474773 - RNA, 19 nt, Artificial Sequence
  Description of Artificial Sequence: Synthetic oligonucleotide
  Sense strand starting at position 3342 of SEQ ID NO: 317232
guuaauuuacacuguucuu

SEQ ID NO: 474774 - RNA, 19 nt, Artificial Sequence
  Description of Artificial Sequence: Synthetic oligonucleotide
  Antisense Strand to SEQ ID NO: 474773
aagaacaguguaaauuaac

SEQ ID NO: 474775 - RNA, 19 nt, Artificial Sequence
  Description of Artificial Sequence: Synthetic oligonucleotide
  Sense strand starting at position 3509 of SEQ ID NO: 317232
aagagauuugugugcugug

SEQ ID NO: 474776 - RNA, 19 nt, Artificial Sequence
  Description of Artificial Sequence: Synthetic oligonucleotide
  Antisense Strand to SEQ ID NO: 474775
cacagcacacaaaucucuu

SEQ ID NO: 474777 - RNA, 19 nt, Artificial Sequence
  Description of Artificial Sequence: Synthetic oligonucleotide
  Sense strand starting at position 3864 of SEQ ID NO: 317232
uggcucugcccucaaggau

SEQ ID NO: 474778 - RNA, 19 nt, Artificial Sequence
  Description of Artificial Sequence: Synthetic oligonucleotide
  Antisense Strand to SEQ ID NO: 474777
auccuugagggcagagcca

SEQ ID NO: 474779 - RNA, 19 nt, Artificial Sequence
  Description of Artificial Sequence: Synthetic oligonucleotide
  Sense strand starting at position 3941 of SEQ ID NO: 317232
ucaugugauucuuccauug

SEQ ID NO: 474780 - RNA, 19 nt, Artificial Sequence
  Description of Artificial Sequence: Synthetic oligonucleotide
  Antisense Strand to SEQ ID NO: 474779
caauggaagaaucacauga

SEQ ID NO: 474781 - RNA, 19 nt, Artificial Sequence
  Description of Artificial Sequence: Synthetic oligonucleotide
  Sense strand starting at position 3946 of SEQ ID NO: 317232
ugauucuuccauugugaua

SEQ ID NO: 474782 - RNA, 19 nt, Artificial Sequence
  Description of Artificial Sequence: Synthetic oligonucleotide
  Antisense Strand to SEQ ID NO: 474781
uaucacaauggaagaauca

SEQ ID NO: 474783 - RNA, 19 nt, Artificial Sequence
  Description of Artificial Sequence: Synthetic oligonucleotide
  Sense strand starting at position 3974 of SEQ ID NO: 317232
accuuuauuuguguuuauc

SEQ ID NO: 474784 - RNA, 19 nt, Artificial Sequence
  Description of Artificial Sequence: Synthetic oligonucleotide
  Antisense Strand to SEQ ID NO: 474783
gauaaacacaaauaaaggu

SEQ ID NO: 474785 - RNA, 19 nt, Artificial Sequence
  Description of Artificial Sequence: Synthetic oligonucleotide
  Sense strand starting at position 3976 of SEQ ID NO: 317232
cuuuauuuguguuuaucca

SEQ ID NO: 474786 - RNA, 19 nt, Artificial Sequence
  Description of Artificial Sequence: Synthetic oligonucleotide
  Antisense Strand to SEQ ID NO: 474785
uggauaaacacaaauaaag

SEQ ID NO: 474787 - RNA, 19 nt, Artificial Sequence
  Description of Artificial Sequence: Synthetic oligonucleotide
  Sense strand starting at position 356 of SEQ ID NO: 317233
aguuucuaagaauguuaca

SEQ ID NO: 474788 - RNA, 19 nt, Artificial Sequence
  Description of Artificial Sequence: Synthetic oligonucleotide
  Antisense Strand to SEQ ID NO: 474787
uguaacauucuuagaaacu

SEQ ID NO: 474789 - RNA, 19 nt, Artificial Sequence
  Description of Artificial Sequence: Synthetic oligonucleotide
  Sense strand starting at position 471 of SEQ ID NO: 317233
agaaaucuauuauggucaa

SEQ ID NO: 474790 - RNA, 19 nt, Artificial Sequence
  Description of Artificial Sequence: Synthetic oligonucleotide
  Antisense Strand to SEQ ID NO: 474789
uugaccauaauagauuucu

SEQ ID NO: 474791 - RNA, 19 nt, Artificial Sequence
  Description of Artificial Sequence: Synthetic oligonucleotide
  Sense strand starting at position 642 of SEQ ID NO: 317233
auuuaaguuugguggagga

SEQ ID NO: 474792 - RNA, 19 nt, Artificial Sequence
  Description of Artificial Sequence: Synthetic oligonucleotide
  Antisense Strand to SEQ ID NO: 474791
uccuccaccaaacuuaaau

SEQ ID NO: 474793 - RNA, 19 nt, Artificial Sequence
  Description of Artificial Sequence: Synthetic oligonucleotide
  Sense strand starting at position 673 of SEQ ID NO: 317233
uuggaaugcguuuauacgu

SEQ ID NO: 474794 - RNA, 19 nt, Artificial Sequence
  Description of Artificial Sequence: Synthetic oligonucleotide
  Antisense Strand to SEQ ID NO: 474793
acguauaaacgcauuccaa

SEQ ID NO: 474795 - RNA, 19 nt, Artificial Sequence
  Description of Artificial Sequence: Synthetic oligonucleotide
  Sense strand starting at position 710 of SEQ ID NO: 317233
uuacguguuauugccaagu

SEQ ID NO: 474796 - RNA, 19 nt, Artificial Sequence
  Description of Artificial Sequence: Synthetic oligonucleotide
  Antisense Strand to SEQ ID NO: 474795
acuuggcaauaacacguaa

SEQ ID NO: 474797 - RNA, 19 nt, Artificial Sequence
  Description of Artificial Sequence: Synthetic oligonucleotide
  Sense strand starting at position 721 of SEQ ID NO: 317233
ugccaaguuccuuaacugu

SEQ ID NO: 474798 - RNA, 19 nt, Artificial Sequence
  Description of Artificial Sequence: Synthetic oligonucleotide
  Antisense Strand to SEQ ID NO: 474797
acaguuaaggaacuuggca

SEQ ID NO: 474799 - RNA, 19 nt, Artificial Sequence
  Description of Artificial Sequence: Synthetic oligonucleotide
  Sense strand starting at position 727 of SEQ ID NO: 317233
guuccuuaacuguagugua

SEQ ID NO: 474800 - RNA, 19 nt, Artificial Sequence
  Description of Artificial Sequence: Synthetic oligonucleotide
  Antisense Strand to SEQ ID NO: 474799
uacacuacaguuaaggaac

SEQ ID NO: 474801 - RNA, 19 nt, Artificial Sequence
  Description of Artificial Sequence: Synthetic oligonucleotide
  Sense strand starting at position 735 of SEQ ID NO: 317233
acuguaguguaaguuguua

SEQ ID NO: 474802 - RNA, 19 nt, Artificial Sequence
  Description of Artificial Sequence: Synthetic oligonucleotide
  Antisense Strand to SEQ ID NO: 474801
uaacaacuuacacuacagu

SEQ ID NO: 474803 - RNA, 19 nt, Artificial Sequence
  Description of Artificial Sequence: Synthetic oligonucleotide
  Sense strand starting at position 756 of SEQ ID NO: 317233
acuguauugccuuauggaa

SEQ ID NO: 474804 - RNA, 19 nt, Artificial Sequence
  Description of Artificial Sequence: Synthetic oligonucleotide
  Antisense Strand to SEQ ID NO: 474803
uuccauaaggcaauacagu

SEQ ID NO: 474805 - RNA, 19 nt, Artificial Sequence
  Description of Artificial Sequence: Synthetic oligonucleotide
  Sense strand starting at position 819 of SEQ ID NO: 317233
cuuauccuaguguaauaau

SEQ ID NO: 474806 - RNA, 19 nt, Artificial Sequence
  Description of Artificial Sequence: Synthetic oligonucleotide
  Antisense Strand to SEQ ID NO: 474805
auuauuacacuaggauaag

SEQ ID NO: 474807 - RNA, 19 nt, Artificial Sequence
  Description of Artificial Sequence: Synthetic oligonucleotide
  Sense strand starting at position 852 of SEQ ID NO: 317233
aguuaagucagguaguaag

SEQ ID NO: 474808 - RNA, 19 nt, Artificial Sequence
  Description of Artificial Sequence: Synthetic oligonucleotide
  Antisense Strand to SEQ ID NO: 474807
cuuacuaccugacuuaacu

SEQ ID NO: 474809 - RNA, 19 nt, Artificial Sequence
  Description of Artificial Sequence: Synthetic oligonucleotide
  Sense strand starting at position 855 of SEQ ID NO: 317233
uaagucagguaguaagaaa

SEQ ID NO: 474810 - RNA, 19 nt, Artificial Sequence
  Description of Artificial Sequence: Synthetic oligonucleotide
  Antisense Strand to SEQ ID NO: 474809
uuucuuacuaccugacuua

SEQ ID NO: 474811 - RNA, 19 nt, Artificial Sequence
  Description of Artificial Sequence: Synthetic oligonucleotide
  Sense strand starting at position 910 of SEQ ID NO: 317233
ucgaaaggaucucccaauu

SEQ ID NO: 474812 - RNA, 19 nt, Artificial Sequence
  Description of Artificial Sequence: Synthetic oligonucleotide
  Antisense Strand to SEQ ID NO: 474811
aauugggagauccuuucga

SEQ ID NO: 474813 - RNA, 19 nt, Artificial Sequence
  Description of Artificial Sequence: Synthetic oligonucleotide
  Sense strand starting at position 944 of SEQ ID NO: 317233
uauggaucuuggcauagag

SEQ ID NO: 474814 - RNA, 19 nt, Artificial Sequence
  Description of Artificial Sequence: Synthetic oligonucleotide
  Antisense Strand to SEQ ID NO: 474813
cucuaugccaagauccaua

SEQ ID NO: 474815 - RNA, 19 nt, Artificial Sequence
  Description of Artificial Sequence: Synthetic oligonucleotide
  Sense strand starting at position 1004 of SEQ ID NO: 317233
uuugucauguuauuaccaa

SEQ ID NO: 474816 - RNA, 19 nt, Artificial Sequence
  Description of Artificial Sequence: Synthetic oligonucleotide
  Antisense Strand to SEQ ID NO: 474815
uugguaauaacaugacaaa

SEQ ID NO: 474817 - RNA, 19 nt, Artificial Sequence
  Description of Artificial Sequence: Synthetic oligonucleotide
  Sense strand starting at position 1037 of SEQ ID NO: 317233
aggcaagacgucuaccaau

SEQ ID NO: 474818 - RNA, 19 nt, Artificial Sequence
  Description of Artificial Sequence: Synthetic oligonucleotide
  Antisense Strand to SEQ ID NO: 474817
auugguagacgucuugccu

SEQ ID NO: 474819 - RNA, 19 nt, Artificial Sequence
  Description of Artificial Sequence: Synthetic oligonucleotide
  Sense strand starting at position 1043 of SEQ ID NO: 317233
gacgucuaccaaugaaucu

SEQ ID NO: 474820 - RNA, 19 nt, Artificial Sequence
  Description of Artificial Sequence: Synthetic oligonucleotide
  Antisense Strand to SEQ ID NO: 474819
agauucauugguagacguc

SEQ ID NO: 474821 - RNA, 19 nt, Artificial Sequence
  Description of Artificial Sequence: Synthetic oligonucleotide
  Sense strand starting at position 1070 of SEQ ID NO: 317233
ugcacuguucccuaugguu

SEQ ID NO: 474822 - RNA, 19 nt, Artificial Sequence
  Description of Artificial Sequence: Synthetic oligonucleotide
  Antisense Strand to SEQ ID NO: 474821
aaccauagggaacagugca

SEQ ID NO: 474823 - RNA, 19 nt, Artificial Sequence
  Description of Artificial Sequence: Synthetic oligonucleotide
  Sense strand starting at position 1078 of SEQ ID NO: 317233
ucccuaugguuggcuuauu

SEQ ID NO: 474824 - RNA, 19 nt, Artificial Sequence
  Description of Artificial Sequence: Synthetic oligonucleotide
  Antisense Strand to SEQ ID NO: 474823
aauaagccaaccauaggga

SEQ ID NO: 474825 - RNA, 19 nt, Artificial Sequence
  Description of Artificial Sequence: Synthetic oligonucleotide
  Sense strand starting at position 1098 of SEQ ID NO: 317233
ccauuuaauuuaugugaga

SEQ ID NO: 474826 - RNA, 19 nt, Artificial Sequence
  Description of Artificial Sequence: Synthetic oligonucleotide
  Antisense Strand to SEQ ID NO: 474825
ucucacauaaauuaaaugg

SEQ ID NO: 474827 - RNA, 19 nt, Artificial Sequence
  Description of Artificial Sequence: Synthetic oligonucleotide
  Sense strand starting at position 1116 of SEQ ID NO: 317233
aucuacuaccaguagucau

SEQ ID NO: 474828 - RNA, 19 nt, Artificial Sequence
  Description of Artificial Sequence: Synthetic oligonucleotide
  Antisense Strand to SEQ ID NO: 474827
augacuacugguaguagau

SEQ ID NO: 474829 - RNA, 19 nt, Artificial Sequence
  Description of Artificial Sequence: Synthetic oligonucleotide
  Sense strand starting at position 1171 of SEQ ID NO: 317233
agucuagcauccucaaguu

SEQ ID NO: 474830 - RNA, 19 nt, Artificial Sequence
  Description of Artificial Sequence: Synthetic oligonucleotide
  Antisense Strand to SEQ ID NO: 474829
aacuugaggaugcuagacu

SEQ ID NO: 474831 - RNA, 19 nt, Artificial Sequence
  Description of Artificial Sequence: Synthetic oligonucleotide
  Sense strand starting at position 1224 of SEQ ID NO: 317233
gcucaauagcucugcccuu

SEQ ID NO: 474832 - RNA, 19 nt, Artificial Sequence
  Description of Artificial Sequence: Synthetic oligonucleotide
  Antisense Strand to SEQ ID NO: 474831
aagggcagagcuauugagc

SEQ ID NO: 474833 - RNA, 19 nt, Artificial Sequence
  Description of Artificial Sequence: Synthetic oligonucleotide
  Sense strand starting at position 1727 of SEQ ID NO: 317233
ccacgagucccagagugau

SEQ ID NO: 474834 - RNA, 19 nt, Artificial Sequence
  Description of Artificial Sequence: Synthetic oligonucleotide
  Antisense Strand to SEQ ID NO: 474833
aucacucugggacucgugg

SEQ ID NO: 474835 - RNA, 19 nt, Artificial Sequence
  Description of Artificial Sequence: Synthetic oligonucleotide
  Sense strand starting at position 2919 of SEQ ID NO: 317233
uggaaaggugccuggaagu

SEQ ID NO: 474836 - RNA, 19 nt, Artificial Sequence
  Description of Artificial Sequence: Synthetic oligonucleotide
  Antisense Strand to SEQ ID NO: 474835
acuuccaggcaccuuucca

SEQ ID NO: 474837 - RNA, 19 nt, Artificial Sequence
  Description of Artificial Sequence: Synthetic oligonucleotide
  Sense strand starting at position 2925 of SEQ ID NO: 317233
ggugccuggaaguauuauu

SEQ ID NO: 474838 - RNA, 19 nt, Artificial Sequence
  Description of Artificial Sequence: Synthetic oligonucleotide
  Antisense Strand to SEQ ID NO: 474837
aauaauacuuccaggcacc

SEQ ID NO: 474839 - RNA, 19 nt, Artificial Sequence
  Description of Artificial Sequence: Synthetic oligonucleotide
  Sense strand starting at position 3005 of SEQ ID NO: 317233
uugcuuugcccguuagguu

SEQ ID NO: 474840 - RNA, 19 nt, Artificial Sequence
  Description of Artificial Sequence: Synthetic oligonucleotide
  Antisense Strand to SEQ ID NO: 474839
aaccuaacgggcaaagcaa

SEQ ID NO: 474841 - RNA, 19 nt, Artificial Sequence
  Description of Artificial Sequence: Synthetic oligonucleotide
  Sense strand starting at position 3006 of SEQ ID NO: 317233
ugcuuugcccguuagguua

SEQ ID NO: 474842 - RNA, 19 nt, Artificial Sequence
  Description of Artificial Sequence: Synthetic oligonucleotide
  Antisense Strand to SEQ ID NO: 474841
uaaccuaacgggcaaagca

SEQ ID NO: 474843 - RNA, 19 nt, Artificial Sequence
  Description of Artificial Sequence: Synthetic oligonucleotide
  Sense strand starting at position 3026 of SEQ ID NO: 317233
ugaccuuucuaagaagguu

SEQ ID NO: 474844 - RNA, 19 nt, Artificial Sequence
  Description of Artificial Sequence: Synthetic oligonucleotide
  Antisense Strand to SEQ ID NO: 474843
aaccuucuuagaaagguca

SEQ ID NO: 474845 - RNA, 19 nt, Artificial Sequence
  Description of Artificial Sequence: Synthetic oligonucleotide
  Sense strand starting at position 3029 of SEQ ID NO: 317233
ccuuucuaagaagguuaau

SEQ ID NO: 474846 - RNA, 19 nt, Artificial Sequence
  Description of Artificial Sequence: Synthetic oligonucleotide
  Antisense Strand to SEQ ID NO: 474845
auuaaccuucuuagaaagg

SEQ ID NO: 474847 - RNA, 19 nt, Artificial Sequence
  Description of Artificial Sequence: Synthetic oligonucleotide
  Sense strand starting at position 3395 of SEQ ID NO: 317233
guguguaaguagucuuuga

SEQ ID NO: 474848 - RNA, 19 nt, Artificial Sequence
  Description of Artificial Sequence: Synthetic oligonucleotide
  Antisense Strand to SEQ ID NO: 474847
ucaaagacuacuuacacac

SEQ ID NO: 474849 - RNA, 19 nt, Artificial Sequence
  Description of Artificial Sequence: Synthetic oligonucleotide
  Sense strand starting at position 3491 of SEQ ID NO: 317233
ugcgugugcguguuuaagu

SEQ ID NO: 474850 - RNA, 19 nt, Artificial Sequence
  Description of Artificial Sequence: Synthetic oligonucleotide
  Antisense Strand to SEQ ID NO: 474849
acuuaaacacgcacacgca

SEQ ID NO: 474851 - RNA, 19 nt, Artificial Sequence
  Description of Artificial Sequence: Synthetic oligonucleotide
  Sense strand starting at position 3500 of SEQ ID NO: 317233
guguuuaaguagucuuuga

SEQ ID NO: 474852 - RNA, 19 nt, Artificial Sequence
  Description of Artificial Sequence: Synthetic oligonucleotide
  Antisense Strand to SEQ ID NO: 474851
ucaaagacuacuuaaacac

SEQ ID NO: 474853 - RNA, 19 nt, Artificial Sequence
  Description of Artificial Sequence: Synthetic oligonucleotide
  Sense strand starting at position 3504 of SEQ ID NO: 317233
uuaaguagucuuugauguc

SEQ ID NO: 474854 - RNA, 19 nt, Artificial Sequence
  Description of Artificial Sequence: Synthetic oligonucleotide
  Antisense Strand to SEQ ID NO: 474853
gacaucaaagacuacuuaa

SEQ ID NO: 474855 - RNA, 19 nt, Artificial Sequence
  Description of Artificial Sequence: Synthetic oligonucleotide
  Sense strand starting at position 3554 of SEQ ID NO: 317233
gaaguagucugauuccaug

SEQ ID NO: 474856 - RNA, 19 nt, Artificial Sequence
  Description of Artificial Sequence: Synthetic oligonucleotide
  Antisense Strand to SEQ ID NO: 474855
cauggaaucagacuacuuc

SEQ ID NO: 474857 - RNA, 19 nt, Artificial Sequence
  Description of Artificial Sequence: Synthetic oligonucleotide
  Sense strand starting at position 3659 of SEQ ID NO: 317233
guguucguuccaguagucu

SEQ ID NO: 474858 - RNA, 19 nt, Artificial Sequence
  Description of Artificial Sequence: Synthetic oligonucleotide
  Antisense Strand to SEQ ID NO: 474857
agacuacuggaacgaacac

SEQ ID NO: 474859 - RNA, 19 nt, Artificial Sequence
  Description of Artificial Sequence: Synthetic oligonucleotide
  Sense strand starting at position 3684 of SEQ ID NO: 317233
ccacgauggcuuugaagaa

SEQ ID NO: 474860 - RNA, 19 nt, Artificial Sequence
  Description of Artificial Sequence: Synthetic oligonucleotide
  Antisense Strand to SEQ ID NO: 474859
uucuucaaagccaucgugg

SEQ ID NO: 474861 - RNA, 19 nt, Artificial Sequence
  Description of Artificial Sequence: Synthetic oligonucleotide
  Sense strand starting at position 3737 of SEQ ID NO: 317233
aggaaagauuguucuugcu

SEQ ID NO: 474862 - RNA, 19 nt, Artificial Sequence
  Description of Artificial Sequence: Synthetic oligonucleotide
  Antisense Strand to SEQ ID NO: 474861
agcaagaacaaucuuuccu

SEQ ID NO: 474863 - RNA, 19 nt, Artificial Sequence
  Description of Artificial Sequence: Synthetic oligonucleotide
  Sense strand starting at position 3739 of SEQ ID NO: 317233
gaaagauuguucuugcuau

SEQ ID NO: 474864 - RNA, 19 nt, Artificial Sequence
  Description of Artificial Sequence: Synthetic oligonucleotide
  Antisense Strand to SEQ ID NO: 474863
auagcaagaacaaucuuuc

SEQ ID NO: 474865 - RNA, 19 nt, Artificial Sequence
  Description of Artificial Sequence: Synthetic oligonucleotide
  Sense strand starting at position 3750 of SEQ ID NO: 317233
cuugcuauuuaugcuggaa

SEQ ID NO: 474866 - RNA, 19 nt, Artificial Sequence
  Description of Artificial Sequence: Synthetic oligonucleotide
  Antisense Strand to SEQ ID NO: 474865
uuccagcauaaauagcaag

SEQ ID NO: 474867 - RNA, 19 nt, Artificial Sequence
  Description of Artificial Sequence: Synthetic oligonucleotide
  Sense strand starting at position 59 of SEQ ID NO: 317234
guauuccuggcauauuaaa

SEQ ID NO: 474868 - RNA, 19 nt, Artificial Sequence
  Description of Artificial Sequence: Synthetic oligonucleotide
  Antisense Strand to SEQ ID NO: 474867
uuuaauaugccaggaauac

SEQ ID NO: 474869 - RNA, 19 nt, Artificial Sequence
  Description of Artificial Sequence: Synthetic oligonucleotide
  Sense strand starting at position 90 of SEQ ID NO: 317234
uuggaacuguuaucauacu

SEQ ID NO: 474870 - RNA, 19 nt, Artificial Sequence
  Description of Artificial Sequence: Synthetic oligonucleotide
  Antisense Strand to SEQ ID NO: 474869
aguaugauaacaguuccaa

SEQ ID NO: 474871 - RNA, 19 nt, Artificial Sequence
  Description of Artificial Sequence: Synthetic oligonucleotide
  Sense strand starting at position 286 of SEQ ID NO: 317234
aagaauaguguggguauaa

SEQ ID NO: 474872 - RNA, 19 nt, Artificial Sequence
  Description of Artificial Sequence: Synthetic oligonucleotide
  Antisense Strand to SEQ ID NO: 474871
uuauacccacacuauucuu

SEQ ID NO: 474873 - RNA, 19 nt, Artificial Sequence
  Description of Artificial Sequence: Synthetic oligonucleotide
  Sense strand starting at position 287 of SEQ ID NO: 317234
agaauaguguggguauaag

SEQ ID NO: 474874 - RNA, 19 nt, Artificial Sequence
  Description of Artificial Sequence: Synthetic oligonucleotide
  Antisense Strand to SEQ ID NO: 474873
cuuauacccacacuauucu

SEQ ID NO: 474875 - RNA, 19 nt, Artificial Sequence
  Description of Artificial Sequence: Synthetic oligonucleotide
  Sense strand starting at position 325 of SEQ ID NO: 317234
aaugaaaguucuguugaug

SEQ ID NO: 474876 - RNA, 19 nt, Artificial Sequence
  Description of Artificial Sequence: Synthetic oligonucleotide
  Antisense Strand to SEQ ID NO: 474875
caucaacagaacuuucauu

SEQ ID NO: 474877 - RNA, 19 nt, Artificial Sequence
  Description of Artificial Sequence: Synthetic oligonucleotide
  Sense strand starting at position 379 of SEQ ID NO: 317234
guugaaguccuauauugua

SEQ ID NO: 474878 - RNA, 19 nt, Artificial Sequence
  Description of Artificial Sequence: Synthetic oligonucleotide
  Antisense Strand to SEQ ID NO: 474877
uacaauauaggacuucaac

SEQ ID NO: 474879 - RNA, 19 nt, Artificial Sequence
  Description of Artificial Sequence: Synthetic oligonucleotide
  Sense strand starting at position 746 of SEQ ID NO: 317234
ccaugaguaugucuaauaa

SEQ ID NO: 474880 - RNA, 19 nt, Artificial Sequence
  Description of Artificial Sequence: Synthetic oligonucleotide
  Antisense Strand to SEQ ID NO: 474879
uuauuagacauacucaugg

SEQ ID NO: 474881 - RNA, 19 nt, Artificial Sequence
  Description of Artificial Sequence: Synthetic oligonucleotide
  Sense strand starting at position 853 of SEQ ID NO: 317234
gcaagaauuagaggguuga

SEQ ID NO: 474882 - RNA, 19 nt, Artificial Sequence
  Description of Artificial Sequence: Synthetic oligonucleotide
  Antisense Strand to SEQ ID NO: 474881
ucaacccucuaauucuugc

SEQ ID NO: 474883 - RNA, 19 nt, Artificial Sequence
  Description of Artificial Sequence: Synthetic oligonucleotide
  Sense strand starting at position 1251 of SEQ ID NO: 317234
ggaggaaacgagugcauau

SEQ ID NO: 474884 - RNA, 19 nt, Artificial Sequence
  Description of Artificial Sequence: Synthetic oligonucleotide
  Antisense Strand to SEQ ID NO: 474883
auaugcacucguuuccucc

SEQ ID NO: 474885 - RNA, 19 nt, Artificial Sequence
  Description of Artificial Sequence: Synthetic oligonucleotide
  Sense strand starting at position 1401 of SEQ ID NO: 317234
agagguugucuuuauacac

SEQ ID NO: 474886 - RNA, 19 nt, Artificial Sequence
  Description of Artificial Sequence: Synthetic oligonucleotide
  Antisense Strand to SEQ ID NO: 474885
guguauaaagacaaccucu

SEQ ID NO: 474887 - RNA, 19 nt, Artificial Sequence
  Description of Artificial Sequence: Synthetic oligonucleotide
  Sense strand starting at position 1452 of SEQ ID NO: 317234
uagacuuuccucuagggua

SEQ ID NO: 474888 - RNA, 19 nt, Artificial Sequence
  Description of Artificial Sequence: Synthetic oligonucleotide
  Antisense Strand to SEQ ID NO: 474887
uacccuagaggaaagucua

SEQ ID NO: 474889 - RNA, 19 nt, Artificial Sequence
  Description of Artificial Sequence: Synthetic oligonucleotide
  Sense strand starting at position 1454 of SEQ ID NO: 317234
gacuuuccucuaggguaga

SEQ ID NO: 474890 - RNA, 19 nt, Artificial Sequence
  Description of Artificial Sequence: Synthetic oligonucleotide
  Antisense Strand to SEQ ID NO: 474889
ucuacccuagaggaaaguc

SEQ ID NO: 474891 - RNA, 19 nt, Artificial Sequence
  Description of Artificial Sequence: Synthetic oligonucleotide
  Sense strand starting at position 1480 of SEQ ID NO: 317234
accuauugguggucaugaa

SEQ ID NO: 474892 - RNA, 19 nt, Artificial Sequence
  Description of Artificial Sequence: Synthetic oligonucleotide
  Antisense Strand to SEQ ID NO: 474891
uucaugaccaccaauaggu

SEQ ID NO: 474893 - RNA, 19 nt, Artificial Sequence
  Description of Artificial Sequence: Synthetic oligonucleotide
  Sense strand starting at position 1481 of SEQ ID NO: 317234
ccuauugguggucaugaau

SEQ ID NO: 474894 - RNA, 19 nt, Artificial Sequence
  Description of Artificial Sequence: Synthetic oligonucleotide
  Antisense Strand to SEQ ID NO: 474893
auucaugaccaccaauagg

SEQ ID NO: 474895 - RNA, 19 nt, Artificial Sequence
  Description of Artificial Sequence: Synthetic oligonucleotide
  Sense strand starting at position 1484 of SEQ ID NO: 317234
auugguggucaugaauauu

SEQ ID NO: 474896 - RNA, 19 nt, Artificial Sequence
  Description of Artificial Sequence: Synthetic oligonucleotide
  Antisense Strand to SEQ ID NO: 474895
aauauucaugaccaccaau

SEQ ID NO: 474897 - RNA, 19 nt, Artificial Sequence
  Description of Artificial Sequence: Synthetic oligonucleotide
  Sense strand starting at position 1510 of SEQ ID NO: 317234
ggucucuuauuugcagauu

SEQ ID NO: 474898 - RNA, 19 nt, Artificial Sequence
  Description of Artificial Sequence: Synthetic oligonucleotide
  Antisense Strand to SEQ ID NO: 474897
aaucugcaaauaagagacc

SEQ ID NO: 474899 - RNA, 19 nt, Artificial Sequence
  Description of Artificial Sequence: Synthetic oligonucleotide
  Sense strand starting at position 1522 of SEQ ID NO: 317234
gcagauugagggcaauugu

SEQ ID NO: 474900 - RNA, 19 nt, Artificial Sequence
  Description of Artificial Sequence: Synthetic oligonucleotide
  Antisense Strand to SEQ ID NO: 474899
acaauugcccucaaucugc

SEQ ID NO: 474901 - RNA, 19 nt, Artificial Sequence
  Description of Artificial Sequence: Synthetic oligonucleotide
  Sense strand starting at position 1563 of SEQ ID NO: 317234
gaauaugaucuguaacgcu

SEQ ID NO: 474902 - RNA, 19 nt, Artificial Sequence
  Description of Artificial Sequence: Synthetic oligonucleotide
  Antisense Strand to SEQ ID NO: 474901
agcguuacagaucauauuc

SEQ ID NO: 474903 - RNA, 19 nt, Artificial Sequence
  Description of Artificial Sequence: Synthetic oligonucleotide
  Sense strand starting at position 1583 of SEQ ID NO: 317234
uaguaaagugcccagaaga

SEQ ID NO: 474904 - RNA, 19 nt, Artificial Sequence
  Description of Artificial Sequence: Synthetic oligonucleotide
  Antisense Strand to SEQ ID NO: 474903
ucuucugggcacuuuacua

SEQ ID NO: 474905 - RNA, 19 nt, Artificial Sequence
  Description of Artificial Sequence: Synthetic oligonucleotide
  Sense strand starting at position 1948 of SEQ ID NO: 317234
ccagaagaccucugaguga

SEQ ID NO: 474906 - RNA, 19 nt, Artificial Sequence
  Description of Artificial Sequence: Synthetic oligonucleotide
  Antisense Strand to SEQ ID NO: 474905
ucacucagaggucuucugg

SEQ ID NO: 474907 - RNA, 19 nt, Artificial Sequence
  Description of Artificial Sequence: Synthetic oligonucleotide
  Sense strand starting at position 1980 of SEQ ID NO: 317234
ccuacaagucugcagauaa

SEQ ID NO: 474908 - RNA, 19 nt, Artificial Sequence
  Description of Artificial Sequence: Synthetic oligonucleotide
  Antisense Strand to SEQ ID NO: 474907
uuaucugcagacuuguagg

SEQ ID NO: 474909 - RNA, 19 nt, Artificial Sequence
  Description of Artificial Sequence: Synthetic oligonucleotide
  Sense strand starting at position 2004 of SEQ ID NO: 317234
uucucaugcccugaagaug

SEQ ID NO: 474910 - RNA, 19 nt, Artificial Sequence
  Description of Artificial Sequence: Synthetic oligonucleotide
  Antisense Strand to SEQ ID NO: 474909
caucuucagggcaugagaa

SEQ ID NO: 474911 - RNA, 19 nt, Artificial Sequence
  Description of Artificial Sequence: Synthetic oligonucleotide
  Sense strand starting at position 2374 of SEQ ID NO: 317234
acauguggcccuugaaaga

SEQ ID NO: 474912 - RNA, 19 nt, Artificial Sequence
  Description of Artificial Sequence: Synthetic oligonucleotide
  Antisense Strand to SEQ ID NO: 474911
ucuuucaagggccacaugu

SEQ ID NO: 474913 - RNA, 19 nt, Artificial Sequence
  Description of Artificial Sequence: Synthetic oligonucleotide
  Sense strand starting at position 2457 of SEQ ID NO: 317234
auugguuuggagcauguaa

SEQ ID NO: 474914 - RNA, 19 nt, Artificial Sequence
  Description of Artificial Sequence: Synthetic oligonucleotide
  Antisense Strand to SEQ ID NO: 474913
uuacaugcuccaaaccaau

SEQ ID NO: 474915 - RNA, 19 nt, Artificial Sequence
  Description of Artificial Sequence: Synthetic oligonucleotide
  Sense strand starting at position 2799 of SEQ ID NO: 317234
gugguaaacacugguaaca

SEQ ID NO: 474916 - RNA, 19 nt, Artificial Sequence
  Description of Artificial Sequence: Synthetic oligonucleotide
  Antisense Strand to SEQ ID NO: 474915
uguuaccaguguuuaccac

SEQ ID NO: 474917 - RNA, 19 nt, Artificial Sequence
  Description of Artificial Sequence: Synthetic oligonucleotide
  Sense strand starting at position 2883 of SEQ ID NO: 317234
acguuuaagacauagaggu

SEQ ID NO: 474918 - RNA, 19 nt, Artificial Sequence
  Description of Artificial Sequence: Synthetic oligonucleotide
  Antisense Strand to SEQ ID NO: 474917
accucuaugucuuaaacgu

SEQ ID NO: 474919 - RNA, 19 nt, Artificial Sequence
  Description of Artificial Sequence: Synthetic oligonucleotide
  Sense strand starting at position 2923 of SEQ ID NO: 317234
guauauggaucacuauaca

SEQ ID NO: 474920 - RNA, 19 nt, Artificial Sequence
  Description of Artificial Sequence: Synthetic oligonucleotide
  Antisense Strand to SEQ ID NO: 474919
uguauagugauccauauac

SEQ ID NO: 474921 - RNA, 19 nt, Artificial Sequence
  Description of Artificial Sequence: Synthetic oligonucleotide
  Sense strand starting at position 3014 of SEQ ID NO: 317234
cuucuuaaugaccauguga

SEQ ID NO: 474922 - RNA, 19 nt, Artificial Sequence
  Description of Artificial Sequence: Synthetic oligonucleotide
  Antisense Strand to SEQ ID NO: 474921
ucacauggucauuaagaag

SEQ ID NO: 474923 - RNA, 19 nt, Artificial Sequence
  Description of Artificial Sequence: Synthetic oligonucleotide
  Sense strand starting at position 3107 of SEQ ID NO: 317234
auuagaaauugugcaagaa

SEQ ID NO: 474924 - RNA, 19 nt, Artificial Sequence
  Description of Artificial Sequence: Synthetic oligonucleotide
  Antisense Strand to SEQ ID NO: 474923
uucuugcacaauuucuaau

SEQ ID NO: 474925 - RNA, 19 nt, Artificial Sequence
  Description of Artificial Sequence: Synthetic oligonucleotide
  Sense strand starting at position 3111 of SEQ ID NO: 317234
gaaauugugcaagaaaugu

SEQ ID NO: 474926 - RNA, 19 nt, Artificial Sequence
  Description of Artificial Sequence: Synthetic oligonucleotide
  Antisense Strand to SEQ ID NO: 474925
acauuucuugcacaauuuc

SEQ ID NO: 474927 - RNA, 19 nt, Artificial Sequence
  Description of Artificial Sequence: Synthetic oligonucleotide
  Sense strand starting at position 3265 of SEQ ID NO: 317234
cugucccaucuguaagacu

SEQ ID NO: 474928 - RNA, 19 nt, Artificial Sequence
  Description of Artificial Sequence: Synthetic oligonucleotide
  Antisense Strand to SEQ ID NO: 474927
agucuuacagaugggacag

SEQ ID NO: 474929 - RNA, 19 nt, Artificial Sequence
  Description of Artificial Sequence: Synthetic oligonucleotide
  Sense strand starting at position 3322 of SEQ ID NO: 317234
gcauguccuguguuuguuu

SEQ ID NO: 474930 - RNA, 19 nt, Artificial Sequence
  Description of Artificial Sequence: Synthetic oligonucleotide
  Antisense Strand to SEQ ID NO: 474929
aaacaaacacaggacaugc

SEQ ID NO: 474931 - RNA, 19 nt, Artificial Sequence
  Description of Artificial Sequence: Synthetic oligonucleotide
  Sense strand starting at position 3417 of SEQ ID NO: 317234
uacguaucacaugaaagcu

SEQ ID NO: 474932 - RNA, 19 nt, Artificial Sequence
  Description of Artificial Sequence: Synthetic oligonucleotide
  Antisense Strand to SEQ ID NO: 474931
agcuuucaugugauacgua

SEQ ID NO: 474933 - RNA, 19 nt, Artificial Sequence
  Description of Artificial Sequence: Synthetic oligonucleotide
  Sense strand starting at position 3512 of SEQ ID NO: 317234
uuuggaagauugucaauaa

SEQ ID NO: 474934 - RNA, 19 nt, Artificial Sequence
  Description of Artificial Sequence: Synthetic oligonucleotide
  Antisense Strand to SEQ ID NO: 474933
uuauugacaaucuuccaaa

SEQ ID NO: 474935 - RNA, 19 nt, Artificial Sequence
  Description of Artificial Sequence: Synthetic oligonucleotide
  Sense strand starting at position 3531 of SEQ ID NO: 317234
agaagaggcagauguaagu

SEQ ID NO: 474936 - RNA, 19 nt, Artificial Sequence
  Description of Artificial Sequence: Synthetic oligonucleotide
  Antisense Strand to SEQ ID NO: 474935
acuuacaucugccucuucu

SEQ ID NO: 474937 - RNA, 19 nt, Artificial Sequence
  Description of Artificial Sequence: Synthetic oligonucleotide
  Sense strand starting at position 3838 of SEQ ID NO: 317234
gacaguuuacuuuagaagu

SEQ ID NO: 474938 - RNA, 19 nt, Artificial Sequence
  Description of Artificial Sequence: Synthetic oligonucleotide
  Antisense Strand to SEQ ID NO: 474937
acuucuaaaguaaacuguc

SEQ ID NO: 474939 - RNA, 19 nt, Artificial Sequence
  Description of Artificial Sequence: Synthetic oligonucleotide
  Sense strand starting at position 3906 of SEQ ID NO: 317234
gugacauucuaucucugag

SEQ ID NO: 474940 - RNA, 19 nt, Artificial Sequence
  Description of Artificial Sequence: Synthetic oligonucleotide
  Antisense Strand to SEQ ID NO: 474939
cucagagauagaaugucac

SEQ ID NO: 474941 - RNA, 19 nt, Artificial Sequence
  Description of Artificial Sequence: Synthetic oligonucleotide
  Sense strand starting at position 3913 of SEQ ID NO: 317234
ucuaucucugaguaaagua

SEQ ID NO: 474942 - RNA, 19 nt, Artificial Sequence
  Description of Artificial Sequence: Synthetic oligonucleotide
  Antisense Strand to SEQ ID NO: 474941
uacuuuacucagagauaga

SEQ ID NO: 474943 - RNA, 19 nt, Artificial Sequence
  Description of Artificial Sequence: Synthetic oligonucleotide
  Sense strand starting at position 3937 of SEQ ID NO: 317234
uuacgaguuccucaaauga

SEQ ID NO: 474944 - RNA, 19 nt, Artificial Sequence
  Description of Artificial Sequence: Synthetic oligonucleotide
  Antisense Strand to SEQ ID NO: 474943
ucauuugaggaacucguaa

SEQ ID NO: 474945 - RNA, 19 nt, Artificial Sequence
  Description of Artificial Sequence: Synthetic oligonucleotide
  Sense strand starting at position 3945 of SEQ ID NO: 317234
uccucaaaugauugaugua

SEQ ID NO: 474946 - RNA, 19 nt, Artificial Sequence
  Description of Artificial Sequence: Synthetic oligonucleotide
  Antisense Strand to SEQ ID NO: 474945
uacaucaaucauuugagga

SEQ ID NO: 474947 - RNA, 19 nt, Artificial Sequence
  Description of Artificial Sequence: Synthetic oligonucleotide
  Sense strand starting at position 313 of SEQ ID NO: 317235
aaggcaagucgauauguaa

SEQ ID NO: 474948 - RNA, 19 nt, Artificial Sequence
  Description of Artificial Sequence: Synthetic oligonucleotide
  Antisense Strand to SEQ ID NO: 474947
uuacauaucgacuugccuu

SEQ ID NO: 474949 - RNA, 19 nt, Artificial Sequence
  Description of Artificial Sequence: Synthetic oligonucleotide
  Sense strand starting at position 401 of SEQ ID NO: 317235
gugauaucaucuguauaaa

SEQ ID NO: 474950 - RNA, 19 nt, Artificial Sequence
  Description of Artificial Sequence: Synthetic oligonucleotide
  Antisense Strand to SEQ ID NO: 474949
uuuauacagaugauaucac

SEQ ID NO: 474951 - RNA, 19 nt, Artificial Sequence
  Description of Artificial Sequence: Synthetic oligonucleotide
  Sense strand starting at position 470 of SEQ ID NO: 317235
aguaauuaccucuggagaa

SEQ ID NO: 474952 - RNA, 19 nt, Artificial Sequence
  Description of Artificial Sequence: Synthetic oligonucleotide
  Antisense Strand to SEQ ID NO: 474951
uucuccagagguaauuacu

SEQ ID NO: 474953 - RNA, 19 nt, Artificial Sequence
  Description of Artificial Sequence: Synthetic oligonucleotide
  Sense strand starting at position 619 of SEQ ID NO: 317235
auagguaucccauauggcu

SEQ ID NO: 474954 - RNA, 19 nt, Artificial Sequence
  Description of Artificial Sequence: Synthetic oligonucleotide
  Antisense Strand to SEQ ID NO: 474953
agccauaugggauaccuau

SEQ ID NO: 474955 - RNA, 19 nt, Artificial Sequence
  Description of Artificial Sequence: Synthetic oligonucleotide
  Sense strand starting at position 652 of SEQ ID NO: 317235
gauggagucaucuacggac

SEQ ID NO: 474956 - RNA, 19 nt, Artificial Sequence
  Description of Artificial Sequence: Synthetic oligonucleotide
  Antisense Strand to SEQ ID NO: 474955
guccguagaugacuccauc

SEQ ID NO: 474957 - RNA, 19 nt, Artificial Sequence
  Description of Artificial Sequence: Synthetic oligonucleotide
  Sense strand starting at position 654 of SEQ ID NO: 317235
uggagucaucuacggacaa

SEQ ID NO: 474958 - RNA, 19 nt, Artificial Sequence
  Description of Artificial Sequence: Synthetic oligonucleotide
  Antisense Strand to SEQ ID NO: 474957
uuguccguagaugacucca

SEQ ID NO: 474959 - RNA, 19 nt, Artificial Sequence
  Description of Artificial Sequence: Synthetic oligonucleotide
  Sense strand starting at position 1097 of SEQ ID NO: 317235
gagggagcccgagauuguu

SEQ ID NO: 474960 - RNA, 19 nt, Artificial Sequence
  Description of Artificial Sequence: Synthetic oligonucleotide
  Antisense Strand to SEQ ID NO: 474959
aacaaucucgggcucccuc

SEQ ID NO: 474961 - RNA, 19 nt, Artificial Sequence
  Description of Artificial Sequence: Synthetic oligonucleotide
  Sense strand starting at position 1173 of SEQ ID NO: 317235
gagccaucucuccagguga

SEQ ID NO: 474962 - RNA, 19 nt, Artificial Sequence
  Description of Artificial Sequence: Synthetic oligonucleotide
  Antisense Strand to SEQ ID NO: 474961
ucaccuggagagauggcuc

SEQ ID NO: 474963 - RNA, 19 nt, Artificial Sequence
  Description of Artificial Sequence: Synthetic oligonucleotide
  Sense strand starting at position 1466 of SEQ ID NO: 317235
uguuuaucuguccacuaag

SEQ ID NO: 474964 - RNA, 19 nt, Artificial Sequence
  Description of Artificial Sequence: Synthetic oligonucleotide
  Antisense Strand to SEQ ID NO: 474963
cuuaguggacagauaaaca

SEQ ID NO: 474965 - RNA, 19 nt, Artificial Sequence
  Description of Artificial Sequence: Synthetic oligonucleotide
  Sense strand starting at position 1469 of SEQ ID NO: 317235
uuaucuguccacuaaguga

SEQ ID NO: 474966 - RNA, 19 nt, Artificial Sequence
  Description of Artificial Sequence: Synthetic oligonucleotide
  Antisense Strand to SEQ ID NO: 474965
ucacuuaguggacagauaa

SEQ ID NO: 474967 - RNA, 19 nt, Artificial Sequence
  Description of Artificial Sequence: Synthetic oligonucleotide
  Sense strand starting at position 1556 of SEQ ID NO: 317235
ccaucuggaugaguugaua

SEQ ID NO: 474968 - RNA, 19 nt, Artificial Sequence
  Description of Artificial Sequence: Synthetic oligonucleotide
  Antisense Strand to SEQ ID NO: 474967
uaucaacucauccagaugg

SEQ ID NO: 474969 - RNA, 19 nt, Artificial Sequence
  Description of Artificial Sequence: Synthetic oligonucleotide
  Sense strand starting at position 1619 of SEQ ID NO: 317235
guauuuauuuccuagguaa

SEQ ID NO: 474970 - RNA, 19 nt, Artificial Sequence
  Description of Artificial Sequence: Synthetic oligonucleotide
  Antisense Strand to SEQ ID NO: 474969
uuaccuaggaaauaaauac

SEQ ID NO: 474971 - RNA, 19 nt, Artificial Sequence
  Description of Artificial Sequence: Synthetic oligonucleotide
  Sense strand starting at position 1803 of SEQ ID NO: 317235
aucccaggcugaucugauu

SEQ ID NO: 474972 - RNA, 19 nt, Artificial Sequence
  Description of Artificial Sequence: Synthetic oligonucleotide
  Antisense Strand to SEQ ID NO: 474971
aaucagaucagccugggau

SEQ ID NO: 474973 - RNA, 19 nt, Artificial Sequence
  Description of Artificial Sequence: Synthetic oligonucleotide
  Sense strand starting at position 2055 of SEQ ID NO: 317235
ggagauggguuucucuaac

SEQ ID NO: 474974 - RNA, 19 nt, Artificial Sequence
  Description of Artificial Sequence: Synthetic oligonucleotide
  Antisense Strand to SEQ ID NO: 474973
guuagagaaacccaucucc

SEQ ID NO: 474975 - RNA, 19 nt, Artificial Sequence
  Description of Artificial Sequence: Synthetic oligonucleotide
  Sense strand starting at position 2110 of SEQ ID NO: 317235
ggauuagaagacuguguuu

SEQ ID NO: 474976 - RNA, 19 nt, Artificial Sequence
  Description of Artificial Sequence: Synthetic oligonucleotide
  Antisense Strand to SEQ ID NO: 474975
aaacacagucuucuaaucc

SEQ ID NO: 474977 - RNA, 19 nt, Artificial Sequence
  Description of Artificial Sequence: Synthetic oligonucleotide
  Sense strand starting at position 2155 of SEQ ID NO: 317235
cuccuuagcccugaaauag

SEQ ID NO: 474978 - RNA, 19 nt, Artificial Sequence
  Description of Artificial Sequence: Synthetic oligonucleotide
  Antisense Strand to SEQ ID NO: 474977
cuauuucagggcuaaggag

SEQ ID NO: 474979 - RNA, 19 nt, Artificial Sequence
  Description of Artificial Sequence: Synthetic oligonucleotide
  Sense strand starting at position 2313 of SEQ ID NO: 317235
uggacacuuuccuuaggau

SEQ ID NO: 474980 - RNA, 19 nt, Artificial Sequence
  Description of Artificial Sequence: Synthetic oligonucleotide
  Antisense Strand to SEQ ID NO: 474979
auccuaaggaaagugucca

SEQ ID NO: 474981 - RNA, 19 nt, Artificial Sequence
  Description of Artificial Sequence: Synthetic oligonucleotide
  Sense strand starting at position 2332 of SEQ ID NO: 317235
auaaccuaaucugugguua

SEQ ID NO: 474982 - RNA, 19 nt, Artificial Sequence
  Description of Artificial Sequence: Synthetic oligonucleotide
  Antisense Strand to SEQ ID NO: 474981
uaaccacagauuagguuau

SEQ ID NO: 474983 - RNA, 19 nt, Artificial Sequence
  Description of Artificial Sequence: Synthetic oligonucleotide
  Sense strand starting at position 2347 of SEQ ID NO: 317235
guuaaucacuauucuugga

SEQ ID NO: 474984 - RNA, 19 nt, Artificial Sequence
  Description of Artificial Sequence: Synthetic oligonucleotide
  Antisense Strand to SEQ ID NO: 474983
uccaagaauagugauuaac

SEQ ID NO: 474985 - RNA, 19 nt, Artificial Sequence
  Description of Artificial Sequence: Synthetic oligonucleotide
  Sense strand starting at position 2402 of SEQ ID NO: 317235
guguguucugguagguacu

SEQ ID NO: 474986 - RNA, 19 nt, Artificial Sequence
  Description of Artificial Sequence: Synthetic oligonucleotide
  Antisense Strand to SEQ ID NO: 474985
aguaccuaccagaacacac

SEQ ID NO: 474987 - RNA, 19 nt, Artificial Sequence
  Description of Artificial Sequence: Synthetic oligonucleotide
  Sense strand starting at position 2405 of SEQ ID NO: 317235
uguucugguagguacuaaa

SEQ ID NO: 474988 - RNA, 19 nt, Artificial Sequence
  Description of Artificial Sequence: Synthetic oligonucleotide
  Antisense Strand to SEQ ID NO: 474987
uuuaguaccuaccagaaca

SEQ ID NO: 474989 - RNA, 19 nt, Artificial Sequence
  Description of Artificial Sequence: Synthetic oligonucleotide
  Sense strand starting at position 2419 of SEQ ID NO: 317235
cuaaaugcaccauggaaau

SEQ ID NO: 474990 - RNA, 19 nt, Artificial Sequence
  Description of Artificial Sequence: Synthetic oligonucleotide
  Antisense Strand to SEQ ID NO: 474989
auuuccauggugcauuuag

SEQ ID NO: 474991 - RNA, 19 nt, Artificial Sequence
  Description of Artificial Sequence: Synthetic oligonucleotide
  Sense strand starting at position 2468 of SEQ ID NO: 317235
uaucuaguaggucaaguuu

SEQ ID NO: 474992 - RNA, 19 nt, Artificial Sequence
  Description of Artificial Sequence: Synthetic oligonucleotide
  Antisense Strand to SEQ ID NO: 474991
aaacuugaccuacuagaua

SEQ ID NO: 474993 - RNA, 19 nt, Artificial Sequence
  Description of Artificial Sequence: Synthetic oligonucleotide
  Sense strand starting at position 2797 of SEQ ID NO: 317235
cggccuaaauuuguuaauu

SEQ ID NO: 474994 - RNA, 19 nt, Artificial Sequence
  Description of Artificial Sequence: Synthetic oligonucleotide
  Antisense Strand to SEQ ID NO: 474993
aauuaacaaauuuaggccg

SEQ ID NO: 474995 - RNA, 19 nt, Artificial Sequence
  Description of Artificial Sequence: Synthetic oligonucleotide
  Sense strand starting at position 2858 of SEQ ID NO: 317235
ucugaccaucuuugaaaga

SEQ ID NO: 474996 - RNA, 19 nt, Artificial Sequence
  Description of Artificial Sequence: Synthetic oligonucleotide
  Antisense Strand to SEQ ID NO: 474995
ucuuucaaagauggucaga

SEQ ID NO: 474997 - RNA, 19 nt, Artificial Sequence
  Description of Artificial Sequence: Synthetic oligonucleotide
  Sense strand starting at position 2882 of SEQ ID NO: 317235
uuugaagauuucuaugaca

SEQ ID NO: 474998 - RNA, 19 nt, Artificial Sequence
  Description of Artificial Sequence: Synthetic oligonucleotide
  Antisense Strand to SEQ ID NO: 474997
ugucauagaaaucuucaaa

SEQ ID NO: 474999 - RNA, 19 nt, Artificial Sequence
  Description of Artificial Sequence: Synthetic oligonucleotide
  Sense strand starting at position 2885 of SEQ ID NO: 317235
gaagauuucuaugacaagu

SEQ ID NO: 475000 - RNA, 19 nt, Artificial Sequence
  Description of Artificial Sequence: Synthetic oligonucleotide
  Antisense Strand to SEQ ID NO: 474999
acuugucauagaaaucuuc

SEQ ID NO: 475001 - RNA, 19 nt, Artificial Sequence
  Description of Artificial Sequence: Synthetic oligonucleotide
  Sense strand starting at position 2887 of SEQ ID NO: 317235
agauuucuaugacaaguac

SEQ ID NO: 475002 - RNA, 19 nt, Artificial Sequence
  Description of Artificial Sequence: Synthetic oligonucleotide
  Antisense Strand to SEQ ID NO: 475001
guacuugucauagaaaucu

SEQ ID NO: 475003 - RNA, 19 nt, Artificial Sequence
  Description of Artificial Sequence: Synthetic oligonucleotide
  Sense strand starting at position 2926 of SEQ ID NO: 317235
guauuugagucuuugcauu

SEQ ID NO: 475004 - RNA, 19 nt, Artificial Sequence
  Description of Artificial Sequence: Synthetic oligonucleotide
  Antisense Strand to SEQ ID NO: 475003
aaugcaaagacucaaauac

SEQ ID NO: 475005 - RNA, 19 nt, Artificial Sequence
  Description of Artificial Sequence: Synthetic oligonucleotide
  Sense strand starting at position 2928 of SEQ ID NO: 317235
auuugagucuuugcauuac

SEQ ID NO: 475006 - RNA, 19 nt, Artificial Sequence
  Description of Artificial Sequence: Synthetic oligonucleotide
  Antisense Strand to SEQ ID NO: 475005
guaaugcaaagacucaaau

SEQ ID NO: 475007 - RNA, 19 nt, Artificial Sequence
  Description of Artificial Sequence: Synthetic oligonucleotide
  Sense strand starting at position 3023 of SEQ ID NO: 317235
gaagccguauugucauuua

SEQ ID NO: 475008 - RNA, 19 nt, Artificial Sequence
  Description of Artificial Sequence: Synthetic oligonucleotide
  Antisense Strand to SEQ ID NO: 475007
uaaaugacaauacggcuuc

SEQ ID NO: 475009 - RNA, 19 nt, Artificial Sequence
  Description of Artificial Sequence: Synthetic oligonucleotide
  Sense strand starting at position 3026 of SEQ ID NO: 317235
gccguauugucauuuaacu

SEQ ID NO: 475010 - RNA, 19 nt, Artificial Sequence
  Description of Artificial Sequence: Synthetic oligonucleotide
  Antisense Strand to SEQ ID NO: 475009
aguuaaaugacaauacggc

SEQ ID NO: 475011 - RNA, 19 nt, Artificial Sequence
  Description of Artificial Sequence: Synthetic oligonucleotide
  Sense strand starting at position 3028 of SEQ ID NO: 317235
cguauugucauuuaacugu

SEQ ID NO: 475012 - RNA, 19 nt, Artificial Sequence
  Description of Artificial Sequence: Synthetic oligonucleotide
  Antisense Strand to SEQ ID NO: 475011
acaguuaaaugacaauacg

SEQ ID NO: 475013 - RNA, 19 nt, Artificial Sequence
  Description of Artificial Sequence: Synthetic oligonucleotide
  Sense strand starting at position 3047 of SEQ ID NO: 317235
cuugguagagggugacaua

SEQ ID NO: 475014 - RNA, 19 nt, Artificial Sequence
  Description of Artificial Sequence: Synthetic oligonucleotide
  Antisense Strand to SEQ ID NO: 475013
uaugucacccucuaccaag

SEQ ID NO: 475015 - RNA, 19 nt, Artificial Sequence
  Description of Artificial Sequence: Synthetic oligonucleotide
  Sense strand starting at position 3249 of SEQ ID NO: 317235
cauauacuauugcugggau

SEQ ID NO: 475016 - RNA, 19 nt, Artificial Sequence
  Description of Artificial Sequence: Synthetic oligonucleotide
  Antisense Strand to SEQ ID NO: 475015
aucccagcaauaguauaug

SEQ ID NO: 475017 - RNA, 19 nt, Artificial Sequence
  Description of Artificial Sequence: Synthetic oligonucleotide
  Sense strand starting at position 3508 of SEQ ID NO: 317235
ccauauugaugcuuugaca

SEQ ID NO: 475018 - RNA, 19 nt, Artificial Sequence
  Description of Artificial Sequence: Synthetic oligonucleotide
  Antisense Strand to SEQ ID NO: 475017
ugucaaagcaucaauaugg

SEQ ID NO: 475019 - RNA, 19 nt, Artificial Sequence
  Description of Artificial Sequence: Synthetic oligonucleotide
  Sense strand starting at position 3554 of SEQ ID NO: 317235
acuacaccuccugggauua

SEQ ID NO: 475020 - RNA, 19 nt, Artificial Sequence
  Description of Artificial Sequence: Synthetic oligonucleotide
  Antisense Strand to SEQ ID NO: 475019
uaaucccaggagguguagu

SEQ ID NO: 475021 - RNA, 19 nt, Artificial Sequence
  Description of Artificial Sequence: Synthetic oligonucleotide
  Sense strand starting at position 3566 of SEQ ID NO: 317235
gggauuagcugaucccuga

SEQ ID NO: 475022 - RNA, 19 nt, Artificial Sequence
  Description of Artificial Sequence: Synthetic oligonucleotide
  Antisense Strand to SEQ ID NO: 475021
ucagggaucagcuaauccc

SEQ ID NO: 475023 - RNA, 19 nt, Artificial Sequence
  Description of Artificial Sequence: Synthetic oligonucleotide
  Sense strand starting at position 3569 of SEQ ID NO: 317235
auuagcugaucccugagau

SEQ ID NO: 475024 - RNA, 19 nt, Artificial Sequence
  Description of Artificial Sequence: Synthetic oligonucleotide
  Antisense Strand to SEQ ID NO: 475023
aucucagggaucagcuaau

SEQ ID NO: 475025 - RNA, 19 nt, Artificial Sequence
  Description of Artificial Sequence: Synthetic oligonucleotide
  Sense strand starting at position 3570 of SEQ ID NO: 317235
uuagcugaucccugagaug

SEQ ID NO: 475026 - RNA, 19 nt, Artificial Sequence
  Description of Artificial Sequence: Synthetic oligonucleotide
  Antisense Strand to SEQ ID NO: 475025
caucucagggaucagcuaa

SEQ ID NO: 475027 - RNA, 19 nt, Artificial Sequence
  Description of Artificial Sequence: Synthetic oligonucleotide
  Sense strand starting at position 45 of SEQ ID NO: 317236
guacgauaucugcaaacaa

SEQ ID NO: 475028 - RNA, 19 nt, Artificial Sequence
  Description of Artificial Sequence: Synthetic oligonucleotide
  Antisense Strand to SEQ ID NO: 475027
uuguuugcagauaucguac

SEQ ID NO: 475029 - RNA, 19 nt, Artificial Sequence
  Description of Artificial Sequence: Synthetic oligonucleotide
  Sense strand starting at position 159 of SEQ ID NO: 317236
augguagcagaucaaucau

SEQ ID NO: 475030 - RNA, 19 nt, Artificial Sequence
  Description of Artificial Sequence: Synthetic oligonucleotide
  Antisense Strand to SEQ ID NO: 475029
augauugaucugcuaccau

SEQ ID NO: 475031 - RNA, 19 nt, Artificial Sequence
  Description of Artificial Sequence: Synthetic oligonucleotide
  Sense strand starting at position 309 of SEQ ID NO: 317236
uaggucucucgugaucaac

SEQ ID NO: 475032 - RNA, 19 nt, Artificial Sequence
  Description of Artificial Sequence: Synthetic oligonucleotide
  Antisense Strand to SEQ ID NO: 475031
guugaucacgagagaccua

SEQ ID NO: 475033 - RNA, 19 nt, Artificial Sequence
  Description of Artificial Sequence: Synthetic oligonucleotide
  Sense strand starting at position 562 of SEQ ID NO: 317236
auggaaaccuaguuugauu

SEQ ID NO: 475034 - RNA, 19 nt, Artificial Sequence
  Description of Artificial Sequence: Synthetic oligonucleotide
  Antisense Strand to SEQ ID NO: 475033
aaucaaacuagguuuccau

SEQ ID NO: 475035 - RNA, 19 nt, Artificial Sequence
  Description of Artificial Sequence: Synthetic oligonucleotide
  Sense strand starting at position 672 of SEQ ID NO: 317236
ucacuagaauuagugaauc

SEQ ID NO: 475036 - RNA, 19 nt, Artificial Sequence
  Description of Artificial Sequence: Synthetic oligonucleotide
  Antisense Strand to SEQ ID NO: 475035
gauucacuaauucuaguga

SEQ ID NO: 475037 - RNA, 19 nt, Artificial Sequence
  Description of Artificial Sequence: Synthetic oligonucleotide
  Sense strand starting at position 795 of SEQ ID NO: 317236
agauuagcaccauguaaga

SEQ ID NO: 475038 - RNA, 19 nt, Artificial Sequence
  Description of Artificial Sequence: Synthetic oligonucleotide
  Antisense Strand to SEQ ID NO: 475037
ucuuacauggugcuaaucu

SEQ ID NO: 475039 - RNA, 19 nt, Artificial Sequence
  Description of Artificial Sequence: Synthetic oligonucleotide
  Sense strand starting at position 955 of SEQ ID NO: 317236
agccuuugugcucugagca

SEQ ID NO: 475040 - RNA, 19 nt, Artificial Sequence
  Description of Artificial Sequence: Synthetic oligonucleotide
  Antisense Strand to SEQ ID NO: 475039
ugcucagagcacaaaggcu

SEQ ID NO: 475041 - RNA, 19 nt, Artificial Sequence
  Description of Artificial Sequence: Synthetic oligonucleotide
  Sense strand starting at position 1030 of SEQ ID NO: 317236
agcuaagacaggugagauu

SEQ ID NO: 475042 - RNA, 19 nt, Artificial Sequence
  Description of Artificial Sequence: Synthetic oligonucleotide
  Antisense Strand to SEQ ID NO: 475041
aaucucaccugucuuagcu

SEQ ID NO: 475043 - RNA, 19 nt, Artificial Sequence
  Description of Artificial Sequence: Synthetic oligonucleotide
  Sense strand starting at position 1145 of SEQ ID NO: 317236
caacguguuccagaacaag

SEQ ID NO: 475044 - RNA, 19 nt, Artificial Sequence
  Description of Artificial Sequence: Synthetic oligonucleotide
  Antisense Strand to SEQ ID NO: 475043
cuuguucuggaacacguug

SEQ ID NO: 475045 - RNA, 19 nt, Artificial Sequence
  Description of Artificial Sequence: Synthetic oligonucleotide
  Sense strand starting at position 1224 of SEQ ID NO: 317236
ggcuauguaaccuaggcaa

SEQ ID NO: 475046 - RNA, 19 nt, Artificial Sequence
  Description of Artificial Sequence: Synthetic oligonucleotide
  Antisense Strand to SEQ ID NO: 475045
uugccuagguuacauagcc

SEQ ID NO: 475047 - RNA, 19 nt, Artificial Sequence
  Description of Artificial Sequence: Synthetic oligonucleotide
  Sense strand starting at position 1226 of SEQ ID NO: 317236
cuauguaaccuaggcaaca

SEQ ID NO: 475048 - RNA, 19 nt, Artificial Sequence
  Description of Artificial Sequence: Synthetic oligonucleotide
  Antisense Strand to SEQ ID NO: 475047
uguugccuagguuacauag

SEQ ID NO: 475049 - RNA, 19 nt, Artificial Sequence
  Description of Artificial Sequence: Synthetic oligonucleotide
  Sense strand starting at position 1390 of SEQ ID NO: 317236
gcugauauauuaucucaug

SEQ ID NO: 475050 - RNA, 19 nt, Artificial Sequence
  Description of Artificial Sequence: Synthetic oligonucleotide
  Antisense Strand to SEQ ID NO: 475049
caugagauaauauaucagc

SEQ ID NO: 475051 - RNA, 19 nt, Artificial Sequence
  Description of Artificial Sequence: Synthetic oligonucleotide
  Sense strand starting at position 1391 of SEQ ID NO: 317236
cugauauauuaucucaugu

SEQ ID NO: 475052 - RNA, 19 nt, Artificial Sequence
  Description of Artificial Sequence: Synthetic oligonucleotide
  Antisense Strand to SEQ ID NO: 475051
acaugagauaauauaucag

SEQ ID NO: 475053 - RNA, 19 nt, Artificial Sequence
  Description of Artificial Sequence: Synthetic oligonucleotide
  Sense strand starting at position 1439 of SEQ ID NO: 317236
acgcauaucccaggauaug

SEQ ID NO: 475054 - RNA, 19 nt, Artificial Sequence
  Description of Artificial Sequence: Synthetic oligonucleotide
  Antisense Strand to SEQ ID NO: 475053
cauauccugggauaugcgu

SEQ ID NO: 475055 - RNA, 19 nt, Artificial Sequence
  Description of Artificial Sequence: Synthetic oligonucleotide
  Sense strand starting at position 1450 of SEQ ID NO: 317236
aggauaugcuuuccgaacu

SEQ ID NO: 475056 - RNA, 19 nt, Artificial Sequence
  Description of Artificial Sequence: Synthetic oligonucleotide
  Antisense Strand to SEQ ID NO: 475055
aguucggaaagcauauccu

SEQ ID NO: 475057 - RNA, 19 nt, Artificial Sequence
  Description of Artificial Sequence: Synthetic oligonucleotide
  Sense strand starting at position 1602 of SEQ ID NO: 317236
caccgauggcauugauaca

SEQ ID NO: 475058 - RNA, 19 nt, Artificial Sequence
  Description of Artificial Sequence: Synthetic oligonucleotide
  Antisense Strand to SEQ ID NO: 475057
uguaucaaugccaucggug

SEQ ID NO: 475059 - RNA, 19 nt, Artificial Sequence
  Description of Artificial Sequence: Synthetic oligonucleotide
  Sense strand starting at position 1603 of SEQ ID NO: 317236
accgauggcauugauacaa

SEQ ID NO: 475060 - RNA, 19 nt, Artificial Sequence
  Description of Artificial Sequence: Synthetic oligonucleotide
  Antisense Strand to SEQ ID NO: 475059
uuguaucaaugccaucggu

SEQ ID NO: 475061 - RNA, 19 nt, Artificial Sequence
  Description of Artificial Sequence: Synthetic oligonucleotide
  Sense strand starting at position 1722 of SEQ ID NO: 317236
cgcauuccgcccuuggaau

SEQ ID NO: 475062 - RNA, 19 nt, Artificial Sequence
  Description of Artificial Sequence: Synthetic oligonucleotide
  Antisense Strand to SEQ ID NO: 475061
auuccaagggcggaaugcg

SEQ ID NO: 475063 - RNA, 19 nt, Artificial Sequence
  Description of Artificial Sequence: Synthetic oligonucleotide
  Sense strand starting at position 1816 of SEQ ID NO: 317236
cgauguccacgucaaagaa

SEQ ID NO: 475064 - RNA, 19 nt, Artificial Sequence
  Description of Artificial Sequence: Synthetic oligonucleotide
  Antisense Strand to SEQ ID NO: 475063
uucuuugacguggacaucg

SEQ ID NO: 475065 - RNA, 19 nt, Artificial Sequence
  Description of Artificial Sequence: Synthetic oligonucleotide
  Sense strand starting at position 1831 of SEQ ID NO: 317236
agaagacucgaggguuacu

SEQ ID NO: 475066 - RNA, 19 nt, Artificial Sequence
  Description of Artificial Sequence: Synthetic oligonucleotide
  Antisense Strand to SEQ ID NO: 475065
aguaacccucgagucuucu

SEQ ID NO: 475067 - RNA, 19 nt, Artificial Sequence
  Description of Artificial Sequence: Synthetic oligonucleotide
  Sense strand starting at position 1903 of SEQ ID NO: 317236
guguuuaguacggaauauc

SEQ ID NO: 475068 - RNA, 19 nt, Artificial Sequence
  Description of Artificial Sequence: Synthetic oligonucleotide
  Antisense Strand to SEQ ID NO: 475067
gauauuccguacuaaacac

SEQ ID NO: 475069 - RNA, 19 nt, Artificial Sequence
  Description of Artificial Sequence: Synthetic oligonucleotide
  Sense strand starting at position 2120 of SEQ ID NO: 317236
guuccuggcuucucauuua

SEQ ID NO: 475070 - RNA, 19 nt, Artificial Sequence
  Description of Artificial Sequence: Synthetic oligonucleotide
  Antisense Strand to SEQ ID NO: 475069
uaaaugagaagccaggaac

SEQ ID NO: 475071 - RNA, 19 nt, Artificial Sequence
  Description of Artificial Sequence: Synthetic oligonucleotide
  Sense strand starting at position 2260 of SEQ ID NO: 317236
gggugugacuucucagaaa

SEQ ID NO: 475072 - RNA, 19 nt, Artificial Sequence
  Description of Artificial Sequence: Synthetic oligonucleotide
  Antisense Strand to SEQ ID NO: 475071
uuucugagaagucacaccc

SEQ ID NO: 475073 - RNA, 19 nt, Artificial Sequence
  Description of Artificial Sequence: Synthetic oligonucleotide
  Sense strand starting at position 2435 of SEQ ID NO: 317236
auuacaauguaagugguaa

SEQ ID NO: 475074 - RNA, 19 nt, Artificial Sequence
  Description of Artificial Sequence: Synthetic oligonucleotide
  Antisense Strand to SEQ ID NO: 475073
uuaccacuuacauuguaau

SEQ ID NO: 475075 - RNA, 19 nt, Artificial Sequence
  Description of Artificial Sequence: Synthetic oligonucleotide
  Sense strand starting at position 2446 of SEQ ID NO: 317236
agugguaaggcuuagacua

SEQ ID NO: 475076 - RNA, 19 nt, Artificial Sequence
  Description of Artificial Sequence: Synthetic oligonucleotide
  Antisense Strand to SEQ ID NO: 475075
uagucuaagccuuaccacu

SEQ ID NO: 475077 - RNA, 19 nt, Artificial Sequence
  Description of Artificial Sequence: Synthetic oligonucleotide
  Sense strand starting at position 3045 of SEQ ID NO: 317236
ucuauuggagcucagcaau

SEQ ID NO: 475078 - RNA, 19 nt, Artificial Sequence
  Description of Artificial Sequence: Synthetic oligonucleotide
  Antisense Strand to SEQ ID NO: 475077
auugcugagcuccaauaga

SEQ ID NO: 475079 - RNA, 19 nt, Artificial Sequence
  Description of Artificial Sequence: Synthetic oligonucleotide
  Sense strand starting at position 3071 of SEQ ID NO: 317236
cagccugaggcuuacuuua

SEQ ID NO: 475080 - RNA, 19 nt, Artificial Sequence
  Description of Artificial Sequence: Synthetic oligonucleotide
  Antisense Strand to SEQ ID NO: 475079
uaaaguaagccucaggcug

SEQ ID NO: 475081 - RNA, 19 nt, Artificial Sequence
  Description of Artificial Sequence: Synthetic oligonucleotide
  Sense strand starting at position 3076 of SEQ ID NO: 317236
ugaggcuuacuuuaucaau

SEQ ID NO: 475082 - RNA, 19 nt, Artificial Sequence
  Description of Artificial Sequence: Synthetic oligonucleotide
  Antisense Strand to SEQ ID NO: 475081
auugauaaaguaagccuca

SEQ ID NO: 475083 - RNA, 19 nt, Artificial Sequence
  Description of Artificial Sequence: Synthetic oligonucleotide
  Sense strand starting at position 3233 of SEQ ID NO: 317236
aggaaagaccagugcuaau

SEQ ID NO: 475084 - RNA, 19 nt, Artificial Sequence
  Description of Artificial Sequence: Synthetic oligonucleotide
  Antisense Strand to SEQ ID NO: 475083
auuagcacuggucuuuccu

SEQ ID NO: 475085 - RNA, 19 nt, Artificial Sequence
  Description of Artificial Sequence: Synthetic oligonucleotide
  Sense strand starting at position 3311 of SEQ ID NO: 317236
ccggucuuaggauaaguaa

SEQ ID NO: 475086 - RNA, 19 nt, Artificial Sequence
  Description of Artificial Sequence: Synthetic oligonucleotide
  Antisense Strand to SEQ ID NO: 475085
uuacuuauccuaagaccgg

SEQ ID NO: 475087 - RNA, 19 nt, Artificial Sequence
  Description of Artificial Sequence: Synthetic oligonucleotide
  Sense strand starting at position 3378 of SEQ ID NO: 317236
ugaauuugccugugauguu

SEQ ID NO: 475088 - RNA, 19 nt, Artificial Sequence
  Description of Artificial Sequence: Synthetic oligonucleotide
  Antisense Strand to SEQ ID NO: 475087
aacaucacaggcaaauuca

SEQ ID NO: 475089 - RNA, 19 nt, Artificial Sequence
  Description of Artificial Sequence: Synthetic oligonucleotide
  Sense strand starting at position 3391 of SEQ ID NO: 317236
gauguuauacacuggacua

SEQ ID NO: 475090 - RNA, 19 nt, Artificial Sequence
  Description of Artificial Sequence: Synthetic oligonucleotide
  Antisense Strand to SEQ ID NO: 475089
uaguccaguguauaacauc

SEQ ID NO: 475091 - RNA, 19 nt, Artificial Sequence
  Description of Artificial Sequence: Synthetic oligonucleotide
  Sense strand starting at position 3403 of SEQ ID NO: 317236
uggacuaagcacgaaaguu

SEQ ID NO: 475092 - RNA, 19 nt, Artificial Sequence
  Description of Artificial Sequence: Synthetic oligonucleotide
  Antisense Strand to SEQ ID NO: 475091
aacuuucgugcuuagucca

SEQ ID NO: 475093 - RNA, 19 nt, Artificial Sequence
  Description of Artificial Sequence: Synthetic oligonucleotide
  Sense strand starting at position 3456 of SEQ ID NO: 317236
ucaaguucugacuacaugu

SEQ ID NO: 475094 - RNA, 19 nt, Artificial Sequence
  Description of Artificial Sequence: Synthetic oligonucleotide
  Antisense Strand to SEQ ID NO: 475093
acauguagucagaacuuga

SEQ ID NO: 475095 - RNA, 19 nt, Artificial Sequence
  Description of Artificial Sequence: Synthetic oligonucleotide
  Sense strand starting at position 3478 of SEQ ID NO: 317236
cuaggcauguuaccaaaga

SEQ ID NO: 475096 - RNA, 19 nt, Artificial Sequence
  Description of Artificial Sequence: Synthetic oligonucleotide
  Antisense Strand to SEQ ID NO: 475095
ucuuugguaacaugccuag

SEQ ID NO: 475097 - RNA, 19 nt, Artificial Sequence
  Description of Artificial Sequence: Synthetic oligonucleotide
  Sense strand starting at position 3573 of SEQ ID NO: 317236
aaagauaauguguaagcau

SEQ ID NO: 475098 - RNA, 19 nt, Artificial Sequence
  Description of Artificial Sequence: Synthetic oligonucleotide
  Antisense Strand to SEQ ID NO: 475097
augcuuacacauuaucuuu

SEQ ID NO: 475099 - RNA, 19 nt, Artificial Sequence
  Description of Artificial Sequence: Synthetic oligonucleotide
  Sense strand starting at position 3584 of SEQ ID NO: 317236
guaagcauuugccuuguaa

SEQ ID NO: 475100 - RNA, 19 nt, Artificial Sequence
  Description of Artificial Sequence: Synthetic oligonucleotide
  Antisense Strand to SEQ ID NO: 475099
uuacaaggcaaaugcuuac

SEQ ID NO: 475101 - RNA, 19 nt, Artificial Sequence
  Description of Artificial Sequence: Synthetic oligonucleotide
  Sense strand starting at position 3700 of SEQ ID NO: 317236
gguuggguuguggaugaaa

SEQ ID NO: 475102 - RNA, 19 nt, Artificial Sequence
  Description of Artificial Sequence: Synthetic oligonucleotide
  Antisense Strand to SEQ ID NO: 475101
uuucauccacaacccaacc

SEQ ID NO: 475103 - RNA, 19 nt, Artificial Sequence
  Description of Artificial Sequence: Synthetic oligonucleotide
  Sense strand starting at position 3702 of SEQ ID NO: 317236
uuggguuguggaugaaaca

SEQ ID NO: 475104 - RNA, 19 nt, Artificial Sequence
  Description of Artificial Sequence: Synthetic oligonucleotide
  Antisense Strand to SEQ ID NO: 475103
uguuucauccacaacccaa

SEQ ID NO: 475105 - RNA, 19 nt, Artificial Sequence
  Description of Artificial Sequence: Synthetic oligonucleotide
  Sense strand starting at position 3858 of SEQ ID NO: 317236
auuuguuggccggguguga

SEQ ID NO: 475106 - RNA, 19 nt, Artificial Sequence
  Description of Artificial Sequence: Synthetic oligonucleotide
  Antisense Strand to SEQ ID NO: 475105
ucacacccggccaacaaau

SEQ ID NO: 475107 - RNA, 19 nt, Artificial Sequence
  Description of Artificial Sequence: Synthetic oligonucleotide
  Sense strand starting at position 53 of SEQ ID NO: 317237
ucuauuaugucaccagcca

SEQ ID NO: 475108 - RNA, 19 nt, Artificial Sequence
  Description of Artificial Sequence: Synthetic oligonucleotide
  Antisense Strand to SEQ ID NO: 475107
uggcuggugacauaauaga

SEQ ID NO: 475109 - RNA, 19 nt, Artificial Sequence
  Description of Artificial Sequence: Synthetic oligonucleotide
  Sense strand starting at position 85 of SEQ ID NO: 317237
uuuccucgucucuaaggau

SEQ ID NO: 475110 - RNA, 19 nt, Artificial Sequence
  Description of Artificial Sequence: Synthetic oligonucleotide
  Antisense Strand to SEQ ID NO: 475109
auccuuagagacgaggaaa

SEQ ID NO: 475111 - RNA, 19 nt, Artificial Sequence
  Description of Artificial Sequence: Synthetic oligonucleotide
  Sense strand starting at position 122 of SEQ ID NO: 317237
cugggugaucaguaguaau

SEQ ID NO: 475112 - RNA, 19 nt, Artificial Sequence
  Description of Artificial Sequence: Synthetic oligonucleotide
  Antisense Strand to SEQ ID NO: 475111
auuacuacugaucacccag

SEQ ID NO: 475113 - RNA, 19 nt, Artificial Sequence
  Description of Artificial Sequence: Synthetic oligonucleotide
  Sense strand starting at position 132 of SEQ ID NO: 317237
aguaguaaugacuaagguu

SEQ ID NO: 475114 - RNA, 19 nt, Artificial Sequence
  Description of Artificial Sequence: Synthetic oligonucleotide
  Antisense Strand to SEQ ID NO: 475113
aaccuuagucauuacuacu

SEQ ID NO: 475115 - RNA, 19 nt, Artificial Sequence
  Description of Artificial Sequence: Synthetic oligonucleotide
  Sense strand starting at position 168 of SEQ ID NO: 317237
gcgagaacucacuacucaa

SEQ ID NO: 475116 - RNA, 19 nt, Artificial Sequence
  Description of Artificial Sequence: Synthetic oligonucleotide
  Antisense Strand to SEQ ID NO: 475115
uugaguagugaguucucgc

SEQ ID NO: 475117 - RNA, 19 nt, Artificial Sequence
  Description of Artificial Sequence: Synthetic oligonucleotide
  Sense strand starting at position 732 of SEQ ID NO: 317237
cugcaaauucccuggcuau

SEQ ID NO: 475118 - RNA, 19 nt, Artificial Sequence
  Description of Artificial Sequence: Synthetic oligonucleotide
  Antisense Strand to SEQ ID NO: 475117
auagccagggaauuugcag

SEQ ID NO: 475119 - RNA, 19 nt, Artificial Sequence
  Description of Artificial Sequence: Synthetic oligonucleotide
  Sense strand starting at position 733 of SEQ ID NO: 317237
ugcaaauucccuggcuauu

SEQ ID NO: 475120 - RNA, 19 nt, Artificial Sequence
  Description of Artificial Sequence: Synthetic oligonucleotide
  Antisense Strand to SEQ ID NO: 475119
aauagccagggaauuugca

SEQ ID NO: 475121 - RNA, 19 nt, Artificial Sequence
  Description of Artificial Sequence: Synthetic oligonucleotide
  Sense strand starting at position 766 of SEQ ID NO: 317237
cuuugucacauccggugaa

SEQ ID NO: 475122 - RNA, 19 nt, Artificial Sequence
  Description of Artificial Sequence: Synthetic oligonucleotide
  Antisense Strand to SEQ ID NO: 475121
uucaccggaugugacaaag

SEQ ID NO: 475123 - RNA, 19 nt, Artificial Sequence
  Description of Artificial Sequence: Synthetic oligonucleotide
  Sense strand starting at position 769 of SEQ ID NO: 317237
ugucacauccggugaauuc

SEQ ID NO: 475124 - RNA, 19 nt, Artificial Sequence
  Description of Artificial Sequence: Synthetic oligonucleotide
  Antisense Strand to SEQ ID NO: 475123
gaauucaccggaugugaca

SEQ ID NO: 475125 - RNA, 19 nt, Artificial Sequence
  Description of Artificial Sequence: Synthetic oligonucleotide
  Sense strand starting at position 1475 of SEQ ID NO: 317237
gggaaacccuucuccguuu

SEQ ID NO: 475126 - RNA, 19 nt, Artificial Sequence
  Description of Artificial Sequence: Synthetic oligonucleotide
  Antisense Strand to SEQ ID NO: 475125
aaacggagaaggguuuccc

SEQ ID NO: 475127 - RNA, 19 nt, Artificial Sequence
  Description of Artificial Sequence: Synthetic oligonucleotide
  Sense strand starting at position 1527 of SEQ ID NO: 317237
cauacaugguuagcagaaa

SEQ ID NO: 475128 - RNA, 19 nt, Artificial Sequence
  Description of Artificial Sequence: Synthetic oligonucleotide
  Antisense Strand to SEQ ID NO: 475127
uuucugcuaaccauguaug

SEQ ID NO: 475129 - RNA, 19 nt, Artificial Sequence
  Description of Artificial Sequence: Synthetic oligonucleotide
  Sense strand starting at position 1635 of SEQ ID NO: 317237
cuuucuuggucgguaaaua

SEQ ID NO: 475130 - RNA, 19 nt, Artificial Sequence
  Description of Artificial Sequence: Synthetic oligonucleotide
  Antisense Strand to SEQ ID NO: 475129
uauuuaccgaccaagaaag

SEQ ID NO: 475131 - RNA, 19 nt, Artificial Sequence
  Description of Artificial Sequence: Synthetic oligonucleotide
  Sense strand starting at position 1636 of SEQ ID NO: 317237
uuucuuggucgguaaauaa

SEQ ID NO: 475132 - RNA, 19 nt, Artificial Sequence
  Description of Artificial Sequence: Synthetic oligonucleotide
  Antisense Strand to SEQ ID NO: 475131
uuauuuaccgaccaagaaa

SEQ ID NO: 475133 - RNA, 19 nt, Artificial Sequence
  Description of Artificial Sequence: Synthetic oligonucleotide
  Sense strand starting at position 2086 of SEQ ID NO: 317237
gggcuaagggacuguaguu

SEQ ID NO: 475134 - RNA, 19 nt, Artificial Sequence
  Description of Artificial Sequence: Synthetic oligonucleotide
  Antisense Strand to SEQ ID NO: 475133
aacuacagucccuuagccc

SEQ ID NO: 475135 - RNA, 19 nt, Artificial Sequence
  Description of Artificial Sequence: Synthetic oligonucleotide
  Sense strand starting at position 2092 of SEQ ID NO: 317237
agggacuguaguugugaca

SEQ ID NO: 475136 - RNA, 19 nt, Artificial Sequence
  Description of Artificial Sequence: Synthetic oligonucleotide
  Antisense Strand to SEQ ID NO: 475135
ugucacaacuacagucccu

SEQ ID NO: 475137 - RNA, 19 nt, Artificial Sequence
  Description of Artificial Sequence: Synthetic oligonucleotide
  Sense strand starting at position 2101 of SEQ ID NO: 317237
aguugugacagccaggaaa

SEQ ID NO: 475138 - RNA, 19 nt, Artificial Sequence
  Description of Artificial Sequence: Synthetic oligonucleotide
  Antisense Strand to SEQ ID NO: 475137
uuuccuggcugucacaacu

SEQ ID NO: 475139 - RNA, 19 nt, Artificial Sequence
  Description of Artificial Sequence: Synthetic oligonucleotide
  Sense strand starting at position 2139 of SEQ ID NO: 317237
acugcuuaggcuuagaguu

SEQ ID NO: 475140 - RNA, 19 nt, Artificial Sequence
  Description of Artificial Sequence: Synthetic oligonucleotide
  Antisense Strand to SEQ ID NO: 475139
aacucuaagccuaagcagu

SEQ ID NO: 475141 - RNA, 19 nt, Artificial Sequence
  Description of Artificial Sequence: Synthetic oligonucleotide
  Sense strand starting at position 2176 of SEQ ID NO: 317237
acugccaugucuuugaaca

SEQ ID NO: 475142 - RNA, 19 nt, Artificial Sequence
  Description of Artificial Sequence: Synthetic oligonucleotide
  Antisense Strand to SEQ ID NO: 475141
uguucaaagacauggcagu

SEQ ID NO: 475143 - RNA, 19 nt, Artificial Sequence
  Description of Artificial Sequence: Synthetic oligonucleotide
  Sense strand starting at position 2177 of SEQ ID NO: 317237
cugccaugucuuugaacag

SEQ ID NO: 475144 - RNA, 19 nt, Artificial Sequence
  Description of Artificial Sequence: Synthetic oligonucleotide
  Antisense Strand to SEQ ID NO: 475143
cuguucaaagacauggcag

SEQ ID NO: 475145 - RNA, 19 nt, Artificial Sequence
  Description of Artificial Sequence: Synthetic oligonucleotide
  Sense strand starting at position 2230 of SEQ ID NO: 317237
gguaucuugugaucuuuag

SEQ ID NO: 475146 - RNA, 19 nt, Artificial Sequence
  Description of Artificial Sequence: Synthetic oligonucleotide
  Antisense Strand to SEQ ID NO: 475145
cuaaagaucacaagauacc

SEQ ID NO: 475147 - RNA, 19 nt, Artificial Sequence
  Description of Artificial Sequence: Synthetic oligonucleotide
  Sense strand starting at position 2241 of SEQ ID NO: 317237
aucuuuagggaaugucuau

SEQ ID NO: 475148 - RNA, 19 nt, Artificial Sequence
  Description of Artificial Sequence: Synthetic oligonucleotide
  Antisense Strand to SEQ ID NO: 475147
auagacauucccuaaagau

SEQ ID NO: 475149 - RNA, 19 nt, Artificial Sequence
  Description of Artificial Sequence: Synthetic oligonucleotide
  Sense strand starting at position 2271 of SEQ ID NO: 317237
acaaguauuucuguguuua

SEQ ID NO: 475150 - RNA, 19 nt, Artificial Sequence
  Description of Artificial Sequence: Synthetic oligonucleotide
  Antisense Strand to SEQ ID NO: 475149
uaaacacagaaauacuugu

SEQ ID NO: 475151 - RNA, 19 nt, Artificial Sequence
  Description of Artificial Sequence: Synthetic oligonucleotide
  Sense strand starting at position 2491 of SEQ ID NO: 317237
cagauaagauuguuauaug

SEQ ID NO: 475152 - RNA, 19 nt, Artificial Sequence
  Description of Artificial Sequence: Synthetic oligonucleotide
  Antisense Strand to SEQ ID NO: 475151
cauauaacaaucuuaucug

SEQ ID NO: 475153 - RNA, 19 nt, Artificial Sequence
  Description of Artificial Sequence: Synthetic oligonucleotide
  Sense strand starting at position 2507 of SEQ ID NO: 317237
augagaacuuuauaagaug

SEQ ID NO: 475154 - RNA, 19 nt, Artificial Sequence
  Description of Artificial Sequence: Synthetic oligonucleotide
  Antisense Strand to SEQ ID NO: 475153
caucuuauaaaguucucau

SEQ ID NO: 475155 - RNA, 19 nt, Artificial Sequence
  Description of Artificial Sequence: Synthetic oligonucleotide
  Sense strand starting at position 2602 of SEQ ID NO: 317237
aaggucucucggugagaca

SEQ ID NO: 475156 - RNA, 19 nt, Artificial Sequence
  Description of Artificial Sequence: Synthetic oligonucleotide
  Antisense Strand to SEQ ID NO: 475155
ugucucaccgagagaccuu

SEQ ID NO: 475157 - RNA, 19 nt, Artificial Sequence
  Description of Artificial Sequence: Synthetic oligonucleotide
  Sense strand starting at position 2755 of SEQ ID NO: 317237
cuucuauugaggcauucga

SEQ ID NO: 475158 - RNA, 19 nt, Artificial Sequence
  Description of Artificial Sequence: Synthetic oligonucleotide
  Antisense Strand to SEQ ID NO: 475157
ucgaaugccucaauagaag

SEQ ID NO: 475159 - RNA, 19 nt, Artificial Sequence
  Description of Artificial Sequence: Synthetic oligonucleotide
  Sense strand starting at position 2782 of SEQ ID NO: 317237
agugaaagggucuggguuu

SEQ ID NO: 475160 - RNA, 19 nt, Artificial Sequence
  Description of Artificial Sequence: Synthetic oligonucleotide
  Antisense Strand to SEQ ID NO: 475159
aaacccagacccuuucacu

SEQ ID NO: 475161 - RNA, 19 nt, Artificial Sequence
  Description of Artificial Sequence: Synthetic oligonucleotide
  Sense strand starting at position 2815 of SEQ ID NO: 317237
uuugguuagugugcaaaga

SEQ ID NO: 475162 - RNA, 19 nt, Artificial Sequence
  Description of Artificial Sequence: Synthetic oligonucleotide
  Antisense Strand to SEQ ID NO: 475161
ucuuugcacacuaaccaaa

SEQ ID NO: 475163 - RNA, 19 nt, Artificial Sequence
  Description of Artificial Sequence: Synthetic oligonucleotide
  Sense strand starting at position 2816 of SEQ ID NO: 317237
uugguuagugugcaaagaa

SEQ ID NO: 475164 - RNA, 19 nt, Artificial Sequence
  Description of Artificial Sequence: Synthetic oligonucleotide
  Antisense Strand to SEQ ID NO: 475163
uucuuugcacacuaaccaa

SEQ ID NO: 475165 - RNA, 19 nt, Artificial Sequence
  Description of Artificial Sequence: Synthetic oligonucleotide
  Sense strand starting at position 2855 of SEQ ID NO: 317237
gaaacugauuaggagauga

SEQ ID NO: 475166 - RNA, 19 nt, Artificial Sequence
  Description of Artificial Sequence: Synthetic oligonucleotide
  Antisense Strand to SEQ ID NO: 475165
ucaucuccuaaucaguuuc

SEQ ID NO: 475167 - RNA, 19 nt, Artificial Sequence
  Description of Artificial Sequence: Synthetic oligonucleotide
  Sense strand starting at position 2865 of SEQ ID NO: 317237
aggagaugaugacagauga

SEQ ID NO: 475168 - RNA, 19 nt, Artificial Sequence
  Description of Artificial Sequence: Synthetic oligonucleotide
  Antisense Strand to SEQ ID NO: 475167
ucaucugucaucaucuccu

SEQ ID NO: 475169 - RNA, 19 nt, Artificial Sequence
  Description of Artificial Sequence: Synthetic oligonucleotide
  Sense strand starting at position 3049 of SEQ ID NO: 317237
guuagagagugacucucau

SEQ ID NO: 475170 - RNA, 19 nt, Artificial Sequence
  Description of Artificial Sequence: Synthetic oligonucleotide
  Antisense Strand to SEQ ID NO: 475169
augagagucacucucuaac

SEQ ID NO: 475171 - RNA, 19 nt, Artificial Sequence
  Description of Artificial Sequence: Synthetic oligonucleotide
  Sense strand starting at position 3100 of SEQ ID NO: 317237
gaguaauauuauguugagu

SEQ ID NO: 475172 - RNA, 19 nt, Artificial Sequence
  Description of Artificial Sequence: Synthetic oligonucleotide
  Antisense Strand to SEQ ID NO: 475171
acucaacauaauauuacuc

SEQ ID NO: 475173 - RNA, 19 nt, Artificial Sequence
  Description of Artificial Sequence: Synthetic oligonucleotide
  Sense strand starting at position 3105 of SEQ ID NO: 317237
auauuauguugaguugaug

SEQ ID NO: 475174 - RNA, 19 nt, Artificial Sequence
  Description of Artificial Sequence: Synthetic oligonucleotide
  Antisense Strand to SEQ ID NO: 475173
caucaacucaacauaauau

SEQ ID NO: 475175 - RNA, 19 nt, Artificial Sequence
  Description of Artificial Sequence: Synthetic oligonucleotide
  Sense strand starting at position 3239 of SEQ ID NO: 317237
gcuaucugagcucacugaa

SEQ ID NO: 475176 - RNA, 19 nt, Artificial Sequence
  Description of Artificial Sequence: Synthetic oligonucleotide
  Antisense Strand to SEQ ID NO: 475175
uucagugagcucagauagc

SEQ ID NO: 475177 - RNA, 19 nt, Artificial Sequence
  Description of Artificial Sequence: Synthetic oligonucleotide
  Sense strand starting at position 3503 of SEQ ID NO: 317237
auugaaacaugugucuuaa

SEQ ID NO: 475178 - RNA, 19 nt, Artificial Sequence
  Description of Artificial Sequence: Synthetic oligonucleotide
  Antisense Strand to SEQ ID NO: 475177
uuaagacacauguuucaau

SEQ ID NO: 475179 - RNA, 19 nt, Artificial Sequence
  Description of Artificial Sequence: Synthetic oligonucleotide
  Sense strand starting at position 3670 of SEQ ID NO: 317237
gggaguuucuaugcugacu

SEQ ID NO: 475180 - RNA, 19 nt, Artificial Sequence
  Description of Artificial Sequence: Synthetic oligonucleotide
  Antisense Strand to SEQ ID NO: 475179
agucagcauagaaacuccc

SEQ ID NO: 475181 - RNA, 19 nt, Artificial Sequence
  Description of Artificial Sequence: Synthetic oligonucleotide
  Sense strand starting at position 3814 of SEQ ID NO: 317237
uaugcaguuguagaucauu

SEQ ID NO: 475182 - RNA, 19 nt, Artificial Sequence
  Description of Artificial Sequence: Synthetic oligonucleotide
  Antisense Strand to SEQ ID NO: 475181
aaugaucuacaacugcaua

SEQ ID NO: 475183 - RNA, 19 nt, Artificial Sequence
  Description of Artificial Sequence: Synthetic oligonucleotide
  Sense strand starting at position 3929 of SEQ ID NO: 317237
ugcuacuaugagcauucua

SEQ ID NO: 475184 - RNA, 19 nt, Artificial Sequence
  Description of Artificial Sequence: Synthetic oligonucleotide
  Antisense Strand to SEQ ID NO: 475183
uagaaugcucauaguagca

SEQ ID NO: 475185 - RNA, 19 nt, Artificial Sequence
  Description of Artificial Sequence: Synthetic oligonucleotide
  Sense strand starting at position 3949 of SEQ ID NO: 317237
uacauaucuguuggugaug

SEQ ID NO: 475186 - RNA, 19 nt, Artificial Sequence
  Description of Artificial Sequence: Synthetic oligonucleotide
  Antisense Strand to SEQ ID NO: 475185
caucaccaacagauaugua

SEQ ID NO: 475187 - RNA, 19 nt, Artificial Sequence
  Description of Artificial Sequence: Synthetic oligonucleotide
  Sense strand starting at position 165 of SEQ ID NO: 317238
gcccaaagaucuuccguga

SEQ ID NO: 475188 - RNA, 19 nt, Artificial Sequence
  Description of Artificial Sequence: Synthetic oligonucleotide
  Antisense Strand to SEQ ID NO: 475187
ucacggaagaucuuugggc

SEQ ID NO: 475189 - RNA, 19 nt, Artificial Sequence
  Description of Artificial Sequence: Synthetic oligonucleotide
  Sense strand starting at position 169 of SEQ ID NO: 317238
aaagaucuuccgugaccca

SEQ ID NO: 475190 - RNA, 19 nt, Artificial Sequence
  Description of Artificial Sequence: Synthetic oligonucleotide
  Antisense Strand to SEQ ID NO: 475189
ugggucacggaagaucuuu

SEQ ID NO: 475191 - RNA, 19 nt, Artificial Sequence
  Description of Artificial Sequence: Synthetic oligonucleotide
  Sense strand starting at position 170 of SEQ ID NO: 317238
aagaucuuccgugacccau

SEQ ID NO: 475192 - RNA, 19 nt, Artificial Sequence
  Description of Artificial Sequence: Synthetic oligonucleotide
  Antisense Strand to SEQ ID NO: 475191
augggucacggaagaucuu

SEQ ID NO: 475193 - RNA, 19 nt, Artificial Sequence
  Description of Artificial Sequence: Synthetic oligonucleotide
  Sense strand starting at position 309 of SEQ ID NO: 317238
cucacuaaucgacagucaa

SEQ ID NO: 475194 - RNA, 19 nt, Artificial Sequence
  Description of Artificial Sequence: Synthetic oligonucleotide
  Antisense Strand to SEQ ID NO: 475193
uugacugucgauuagugag

SEQ ID NO: 475195 - RNA, 19 nt, Artificial Sequence
  Description of Artificial Sequence: Synthetic oligonucleotide
  Sense strand starting at position 365 of SEQ ID NO: 317238
gucaguguccugcagacau

SEQ ID NO: 475196 - RNA, 19 nt, Artificial Sequence
  Description of Artificial Sequence: Synthetic oligonucleotide
  Antisense Strand to SEQ ID NO: 475195
augucugcaggacacugac

SEQ ID NO: 475197 - RNA, 19 nt, Artificial Sequence
  Description of Artificial Sequence: Synthetic oligonucleotide
  Sense strand starting at position 367 of SEQ ID NO: 317238
caguguccugcagacauga

SEQ ID NO: 475198 - RNA, 19 nt, Artificial Sequence
  Description of Artificial Sequence: Synthetic oligonucleotide
  Antisense Strand to SEQ ID NO: 475197
ucaugucugcaggacacug

SEQ ID NO: 475199 - RNA, 19 nt, Artificial Sequence
  Description of Artificial Sequence: Synthetic oligonucleotide
  Sense strand starting at position 375 of SEQ ID NO: 317238
ugcagacaugaccggauau

SEQ ID NO: 475200 - RNA, 19 nt, Artificial Sequence
  Description of Artificial Sequence: Synthetic oligonucleotide
  Antisense Strand to SEQ ID NO: 475199
auauccggucaugucugca

SEQ ID NO: 475201 - RNA, 19 nt, Artificial Sequence
  Description of Artificial Sequence: Synthetic oligonucleotide
  Sense strand starting at position 376 of SEQ ID NO: 317238
gcagacaugaccggauaua

SEQ ID NO: 475202 - RNA, 19 nt, Artificial Sequence
  Description of Artificial Sequence: Synthetic oligonucleotide
  Antisense Strand to SEQ ID NO: 475201
uauauccggucaugucugc

SEQ ID NO: 475203 - RNA, 19 nt, Artificial Sequence
  Description of Artificial Sequence: Synthetic oligonucleotide
  Sense strand starting at position 677 of SEQ ID NO: 317238
ccuccauguugcugacagu

SEQ ID NO: 475204 - RNA, 19 nt, Artificial Sequence
  Description of Artificial Sequence: Synthetic oligonucleotide
  Antisense Strand to SEQ ID NO: 475203
acugucagcaacauggagg

SEQ ID NO: 475205 - RNA, 19 nt, Artificial Sequence
  Description of Artificial Sequence: Synthetic oligonucleotide
  Sense strand starting at position 688 of SEQ ID NO: 317238
cugacagugucccugugau

SEQ ID NO: 475206 - RNA, 19 nt, Artificial Sequence
  Description of Artificial Sequence: Synthetic oligonucleotide
  Antisense Strand to SEQ ID NO: 475205
aucacagggacacugucag

SEQ ID NO: 475207 - RNA, 19 nt, Artificial Sequence
  Description of Artificial Sequence: Synthetic oligonucleotide
  Sense strand starting at position 704 of SEQ ID NO: 317238
gaugucuucccgugacagu

SEQ ID NO: 475208 - RNA, 19 nt, Artificial Sequence
  Description of Artificial Sequence: Synthetic oligonucleotide
  Antisense Strand to SEQ ID NO: 475207
acugucacgggaagacauc

SEQ ID NO: 475209 - RNA, 19 nt, Artificial Sequence
  Description of Artificial Sequence: Synthetic oligonucleotide
  Sense strand starting at position 887 of SEQ ID NO: 317238
uuugaaagcucuuggaaca

SEQ ID NO: 475210 - RNA, 19 nt, Artificial Sequence
  Description of Artificial Sequence: Synthetic oligonucleotide
  Antisense Strand to SEQ ID NO: 475209
uguuccaagagcuuucaaa

SEQ ID NO: 475211 - RNA, 19 nt, Artificial Sequence
  Description of Artificial Sequence: Synthetic oligonucleotide
  Sense strand starting at position 900 of SEQ ID NO: 317238
ggaacaguguguuuguuau

SEQ ID NO: 475212 - RNA, 19 nt, Artificial Sequence
  Description of Artificial Sequence: Synthetic oligonucleotide
  Antisense Strand to SEQ ID NO: 475211
auaacaaacacacuguucc

SEQ ID NO: 475213 - RNA, 19 nt, Artificial Sequence
  Description of Artificial Sequence: Synthetic oligonucleotide
  Sense strand starting at position 902 of SEQ ID NO: 317238
aacaguguguuuguuauau

SEQ ID NO: 475214 - RNA, 19 nt, Artificial Sequence
  Description of Artificial Sequence: Synthetic oligonucleotide
  Antisense Strand to SEQ ID NO: 475213
auauaacaaacacacuguu

SEQ ID NO: 475215 - RNA, 19 nt, Artificial Sequence
  Description of Artificial Sequence: Synthetic oligonucleotide
  Sense strand starting at position 904 of SEQ ID NO: 317238
caguguguuuguuauauaa

SEQ ID NO: 475216 - RNA, 19 nt, Artificial Sequence
  Description of Artificial Sequence: Synthetic oligonucleotide
  Antisense Strand to SEQ ID NO: 475215
uuauauaacaaacacacug

SEQ ID NO: 475217 - RNA, 19 nt, Artificial Sequence
  Description of Artificial Sequence: Synthetic oligonucleotide
  Sense strand starting at position 906 of SEQ ID NO: 317238
guguguuuguuauauaaag

SEQ ID NO: 475218 - RNA, 19 nt, Artificial Sequence
  Description of Artificial Sequence: Synthetic oligonucleotide
  Antisense Strand to SEQ ID NO: 475217
cuuuauauaacaaacacac

SEQ ID NO: 475219 - RNA, 19 nt, Artificial Sequence
  Description of Artificial Sequence: Synthetic oligonucleotide
  Sense strand starting at position 908 of SEQ ID NO: 317238
guguuuguuauauaaagug

SEQ ID NO: 475220 - RNA, 19 nt, Artificial Sequence
  Description of Artificial Sequence: Synthetic oligonucleotide
  Antisense Strand to SEQ ID NO: 475219
cacuuuauauaacaaacac

SEQ ID NO: 475221 - RNA, 19 nt, Artificial Sequence
  Description of Artificial Sequence: Synthetic oligonucleotide
  Sense strand starting at position 1176 of SEQ ID NO: 317238
gggcgaagcuaggauucaa

SEQ ID NO: 475222 - RNA, 19 nt, Artificial Sequence
  Description of Artificial Sequence: Synthetic oligonucleotide
  Antisense Strand to SEQ ID NO: 475221
uugaauccuagcuucgccc

SEQ ID NO: 475223 - RNA, 19 nt, Artificial Sequence
  Description of Artificial Sequence: Synthetic oligonucleotide
  Sense strand starting at position 1950 of SEQ ID NO: 317238
ccgcgcuuaccuucggaaa

SEQ ID NO: 475224 - RNA, 19 nt, Artificial Sequence
  Description of Artificial Sequence: Synthetic oligonucleotide
  Antisense Strand to SEQ ID NO: 475223
uuuccgaagguaagcgcgg

SEQ ID NO: 475225 - RNA, 19 nt, Artificial Sequence
  Description of Artificial Sequence: Synthetic oligonucleotide
  Sense strand starting at position 1952 of SEQ ID NO: 317238
gcgcuuaccuucggaaacu

SEQ ID NO: 475226 - RNA, 19 nt, Artificial Sequence
  Description of Artificial Sequence: Synthetic oligonucleotide
  Antisense Strand to SEQ ID NO: 475225
aguuuccgaagguaagcgc

SEQ ID NO: 475227 - RNA, 19 nt, Artificial Sequence
  Description of Artificial Sequence: Synthetic oligonucleotide
  Sense strand starting at position 1953 of SEQ ID NO: 317238
cgcuuaccuucggaaacuu

SEQ ID NO: 475228 - RNA, 19 nt, Artificial Sequence
  Description of Artificial Sequence: Synthetic oligonucleotide
  Antisense Strand to SEQ ID NO: 475227
aaguuuccgaagguaagcg

SEQ ID NO: 475229 - RNA, 19 nt, Artificial Sequence
  Description of Artificial Sequence: Synthetic oligonucleotide
  Sense strand starting at position 2656 of SEQ ID NO: 317238
gauugcgauucugguuuga

SEQ ID NO: 475230 - RNA, 19 nt, Artificial Sequence
  Description of Artificial Sequence: Synthetic oligonucleotide
  Antisense Strand to SEQ ID NO: 475229
ucaaaccagaaucgcaauc

SEQ ID NO: 475231 - RNA, 19 nt, Artificial Sequence
  Description of Artificial Sequence: Synthetic oligonucleotide
  Sense strand starting at position 2768 of SEQ ID NO: 317238
caaucaaugccaugaggag

SEQ ID NO: 475232 - RNA, 19 nt, Artificial Sequence
  Description of Artificial Sequence: Synthetic oligonucleotide
  Antisense Strand to SEQ ID NO: 475231
cuccucauggcauugauug

SEQ ID NO: 475233 - RNA, 19 nt, Artificial Sequence
  Description of Artificial Sequence: Synthetic oligonucleotide
  Sense strand starting at position 3328 of SEQ ID NO: 317238
ccuucuuggccuugaaagu

SEQ ID NO: 475234 - RNA, 19 nt, Artificial Sequence
  Description of Artificial Sequence: Synthetic oligonucleotide
  Antisense Strand to SEQ ID NO: 475233
acuuucaaggccaagaagg

SEQ ID NO: 475235 - RNA, 19 nt, Artificial Sequence
  Description of Artificial Sequence: Synthetic oligonucleotide
  Sense strand starting at position 3429 of SEQ ID NO: 317238
ggcagugccugucuuccaa

SEQ ID NO: 475236 - RNA, 19 nt, Artificial Sequence
  Description of Artificial Sequence: Synthetic oligonucleotide
  Antisense Strand to SEQ ID NO: 475235
uuggaagacaggcacugcc

SEQ ID NO: 475237 - RNA, 19 nt, Artificial Sequence
  Description of Artificial Sequence: Synthetic oligonucleotide
  Sense strand starting at position 3642 of SEQ ID NO: 317238
cccuaugaauaggcauaaa

SEQ ID NO: 475238 - RNA, 19 nt, Artificial Sequence
  Description of Artificial Sequence: Synthetic oligonucleotide
  Antisense Strand to SEQ ID NO: 475237
uuuaugccuauucauaggg

SEQ ID NO: 475239 - RNA, 19 nt, Artificial Sequence
  Description of Artificial Sequence: Synthetic oligonucleotide
  Sense strand starting at position 3741 of SEQ ID NO: 317238
gguuaagugacuugcucac

SEQ ID NO: 475240 - RNA, 19 nt, Artificial Sequence
  Description of Artificial Sequence: Synthetic oligonucleotide
  Antisense Strand to SEQ ID NO: 475239
gugagcaagucacuuaacc

SEQ ID NO: 475241 - RNA, 19 nt, Artificial Sequence
  Description of Artificial Sequence: Synthetic oligonucleotide
  Sense strand starting at position 3825 of SEQ ID NO: 317238
ggcccauuuccuugagugu

SEQ ID NO: 475242 - RNA, 19 nt, Artificial Sequence
  Description of Artificial Sequence: Synthetic oligonucleotide
  Antisense Strand to SEQ ID NO: 475241
acacucaaggaaaugggcc

SEQ ID NO: 475243 - RNA, 19 nt, Artificial Sequence
  Description of Artificial Sequence: Synthetic oligonucleotide
  Sense strand starting at position 3829 of SEQ ID NO: 317238
cauuuccuugagugugcaa

SEQ ID NO: 475244 - RNA, 19 nt, Artificial Sequence
  Description of Artificial Sequence: Synthetic oligonucleotide
  Antisense Strand to SEQ ID NO: 475243
uugcacacucaaggaaaug

SEQ ID NO: 475245 - RNA, 19 nt, Artificial Sequence
  Description of Artificial Sequence: Synthetic oligonucleotide
  Sense strand starting at position 3857 of SEQ ID NO: 317238
gcaugcagguaauaauaca

SEQ ID NO: 475246 - RNA, 19 nt, Artificial Sequence
  Description of Artificial Sequence: Synthetic oligonucleotide
  Antisense Strand to SEQ ID NO: 475245
uguauuauuaccugcaugc

SEQ ID NO: 475247 - RNA, 19 nt, Artificial Sequence
  Description of Artificial Sequence: Synthetic oligonucleotide
  Sense strand starting at position 3878 of SEQ ID NO: 317238
cauuuauucuuucgacgga

SEQ ID NO: 475248 - RNA, 19 nt, Artificial Sequence
  Description of Artificial Sequence: Synthetic oligonucleotide
  Antisense Strand to SEQ ID NO: 475247
uccgucgaaagaauaaaug

SEQ ID NO: 475249 - RNA, 19 nt, Artificial Sequence
  Description of Artificial Sequence: Synthetic oligonucleotide
  Sense strand starting at position 3879 of SEQ ID NO: 317238
auuuauucuuucgacggaa

SEQ ID NO: 475250 - RNA, 19 nt, Artificial Sequence
  Description of Artificial Sequence: Synthetic oligonucleotide
  Antisense Strand to SEQ ID NO: 475249
uuccgucgaaagaauaaau

SEQ ID NO: 475251 - RNA, 19 nt, Artificial Sequence
  Description of Artificial Sequence: Synthetic oligonucleotide
  Sense strand starting at position 3882 of SEQ ID NO: 317238
uauucuuucgacggaaggu

SEQ ID NO: 475252 - RNA, 19 nt, Artificial Sequence
  Description of Artificial Sequence: Synthetic oligonucleotide
  Antisense Strand to SEQ ID NO: 475251
accuuccgucgaaagaaua

SEQ ID NO: 475253 - RNA, 19 nt, Artificial Sequence
  Description of Artificial Sequence: Synthetic oligonucleotide
  Sense strand starting at position 3883 of SEQ ID NO: 317238
auucuuucgacggaaggua

SEQ ID NO: 475254 - RNA, 19 nt, Artificial Sequence
  Description of Artificial Sequence: Synthetic oligonucleotide
  Antisense Strand to SEQ ID NO: 475253
uaccuuccgucgaaagaau

SEQ ID NO: 475255 - RNA, 19 nt, Artificial Sequence
  Description of Artificial Sequence: Synthetic oligonucleotide
  Sense strand starting at position 3925 of SEQ ID NO: 317238
ugccaaaucugguagugaa

SEQ ID NO: 475256 - RNA, 19 nt, Artificial Sequence
  Description of Artificial Sequence: Synthetic oligonucleotide
  Antisense Strand to SEQ ID NO: 475255
uucacuaccagauuuggca

SEQ ID NO: 475257 - RNA, 19 nt, Artificial Sequence
  Description of Artificial Sequence: Synthetic oligonucleotide
  Sense strand starting at position 3928 of SEQ ID NO: 317238
caaaucugguagugaacaa

SEQ ID NO: 475258 - RNA, 19 nt, Artificial Sequence
  Description of Artificial Sequence: Synthetic oligonucleotide
  Antisense Strand to SEQ ID NO: 475257
uuguucacuaccagauuug

SEQ ID NO: 475259 - RNA, 19 nt, Artificial Sequence
  Description of Artificial Sequence: Synthetic oligonucleotide
  Sense strand starting at position 3949 of SEQ ID NO: 317238
cgaagucucacggagcgua

SEQ ID NO: 475260 - RNA, 19 nt, Artificial Sequence
  Description of Artificial Sequence: Synthetic oligonucleotide
  Antisense Strand to SEQ ID NO: 475259
uacgcuccgugagacuucg

SEQ ID NO: 475261 - RNA, 19 nt, Artificial Sequence
  Description of Artificial Sequence: Synthetic oligonucleotide
  Sense strand starting at position 3975 of SEQ ID NO: 317238
gcgggugaggaagauguua

SEQ ID NO: 475262 - RNA, 19 nt, Artificial Sequence
  Description of Artificial Sequence: Synthetic oligonucleotide
  Antisense Strand to SEQ ID NO: 475261
uaacaucuuccucacccgc

SEQ ID NO: 475263 - RNA, 19 nt, Artificial Sequence
  Description of Artificial Sequence: Synthetic oligonucleotide
  Sense strand starting at position 3977 of SEQ ID NO: 317238
gggugaggaagauguuaac

SEQ ID NO: 475264 - RNA, 19 nt, Artificial Sequence
  Description of Artificial Sequence: Synthetic oligonucleotide
  Antisense Strand to SEQ ID NO: 475263
guuaacaucuuccucaccc

SEQ ID NO: 475265 - RNA, 19 nt, Artificial Sequence
  Description of Artificial Sequence: Synthetic oligonucleotide
  Sense strand starting at position 3980 of SEQ ID NO: 317238
ugaggaagauguuaaccaa

SEQ ID NO: 475266 - RNA, 19 nt, Artificial Sequence
  Description of Artificial Sequence: Synthetic oligonucleotide
  Antisense Strand to SEQ ID NO: 475265
uugguuaacaucuuccuca

SEQ ID NO: 475267 - RNA, 19 nt, Artificial Sequence
  Description of Artificial Sequence: Synthetic oligonucleotide
  Sense strand starting at position 82 of SEQ ID NO: 317239
aucagaugucagugcuaag

SEQ ID NO: 475268 - RNA, 19 nt, Artificial Sequence
  Description of Artificial Sequence: Synthetic oligonucleotide
  Antisense Strand to SEQ ID NO: 475267
cuuagcacugacaucugau

SEQ ID NO: 475269 - RNA, 19 nt, Artificial Sequence
  Description of Artificial Sequence: Synthetic oligonucleotide
  Sense strand starting at position 150 of SEQ ID NO: 317239
ucauuuauccuugguagcu

SEQ ID NO: 475270 - RNA, 19 nt, Artificial Sequence
  Description of Artificial Sequence: Synthetic oligonucleotide
  Antisense Strand to SEQ ID NO: 475269
agcuaccaaggauaaauga

SEQ ID NO: 475271 - RNA, 19 nt, Artificial Sequence
  Description of Artificial Sequence: Synthetic oligonucleotide
  Sense strand starting at position 378 of SEQ ID NO: 317239
gugacugcuauggguugaa

SEQ ID NO: 475272 - RNA, 19 nt, Artificial Sequence
  Description of Artificial Sequence: Synthetic oligonucleotide
  Antisense Strand to SEQ ID NO: 475271
uucaacccauagcagucac

SEQ ID NO: 475273 - RNA, 19 nt, Artificial Sequence
  Description of Artificial Sequence: Synthetic oligonucleotide
  Sense strand starting at position 755 of SEQ ID NO: 317239
cugccagaaccaugagaca

SEQ ID NO: 475274 - RNA, 19 nt, Artificial Sequence
  Description of Artificial Sequence: Synthetic oligonucleotide
  Antisense Strand to SEQ ID NO: 475273
ugucucaugguucuggcag

SEQ ID NO: 475275 - RNA, 19 nt, Artificial Sequence
  Description of Artificial Sequence: Synthetic oligonucleotide
  Sense strand starting at position 801 of SEQ ID NO: 317239
guguguagugcuuuguuaa

SEQ ID NO: 475276 - RNA, 19 nt, Artificial Sequence
  Description of Artificial Sequence: Synthetic oligonucleotide
  Antisense Strand to SEQ ID NO: 475275
uuaacaaagcacuacacac

SEQ ID NO: 475277 - RNA, 19 nt, Artificial Sequence
  Description of Artificial Sequence: Synthetic oligonucleotide
  Sense strand starting at position 854 of SEQ ID NO: 317239
accuuagacugaguaguuu

SEQ ID NO: 475278 - RNA, 19 nt, Artificial Sequence
  Description of Artificial Sequence: Synthetic oligonucleotide
  Antisense Strand to SEQ ID NO: 475277
aaacuacucagucuaaggu

SEQ ID NO: 475279 - RNA, 19 nt, Artificial Sequence
  Description of Artificial Sequence: Synthetic oligonucleotide
  Sense strand starting at position 858 of SEQ ID NO: 317239
uagacugaguaguuuauga

SEQ ID NO: 475280 - RNA, 19 nt, Artificial Sequence
  Description of Artificial Sequence: Synthetic oligonucleotide
  Antisense Strand to SEQ ID NO: 475279
ucauaaacuacucagucua

SEQ ID NO: 475281 - RNA, 19 nt, Artificial Sequence
  Description of Artificial Sequence: Synthetic oligonucleotide
  Sense strand starting at position 1393 of SEQ ID NO: 317239
cgauucagugucugacaag

SEQ ID NO: 475282 - RNA, 19 nt, Artificial Sequence
  Description of Artificial Sequence: Synthetic oligonucleotide
  Antisense Strand to SEQ ID NO: 475281
cuugucagacacugaaucg

SEQ ID NO: 475283 - RNA, 19 nt, Artificial Sequence
  Description of Artificial Sequence: Synthetic oligonucleotide
  Sense strand starting at position 1412 of SEQ ID NO: 317239
ggcucugugcuucaaggau

SEQ ID NO: 475284 - RNA, 19 nt, Artificial Sequence
  Description of Artificial Sequence: Synthetic oligonucleotide
  Antisense Strand to SEQ ID NO: 475283
auccuugaagcacagagcc

SEQ ID NO: 475285 - RNA, 19 nt, Artificial Sequence
  Description of Artificial Sequence: Synthetic oligonucleotide
  Sense strand starting at position 1544 of SEQ ID NO: 317239
cucuguugguggguagauu

SEQ ID NO: 475286 - RNA, 19 nt, Artificial Sequence
  Description of Artificial Sequence: Synthetic oligonucleotide
  Antisense Strand to SEQ ID NO: 475285
aaucuacccaccaacagag

SEQ ID NO: 475287 - RNA, 19 nt, Artificial Sequence
  Description of Artificial Sequence: Synthetic oligonucleotide
  Sense strand starting at position 1726 of SEQ ID NO: 317239
gugauuauaagccagugaa

SEQ ID NO: 475288 - RNA, 19 nt, Artificial Sequence
  Description of Artificial Sequence: Synthetic oligonucleotide
  Antisense Strand to SEQ ID NO: 475287
uucacuggcuuauaaucac

SEQ ID NO: 475289 - RNA, 19 nt, Artificial Sequence
  Description of Artificial Sequence: Synthetic oligonucleotide
  Sense strand starting at position 1769 of SEQ ID NO: 317239
gguccucaaaccuguguau

SEQ ID NO: 475290 - RNA, 19 nt, Artificial Sequence
  Description of Artificial Sequence: Synthetic oligonucleotide
  Antisense Strand to SEQ ID NO: 475289
auacacagguuugaggacc

SEQ ID NO: 475291 - RNA, 19 nt, Artificial Sequence
  Description of Artificial Sequence: Synthetic oligonucleotide
  Sense strand starting at position 1815 of SEQ ID NO: 317239
cagucagccgcugaucuaa

SEQ ID NO: 475292 - RNA, 19 nt, Artificial Sequence
  Description of Artificial Sequence: Synthetic oligonucleotide
  Antisense Strand to SEQ ID NO: 475291
uuagaucagcggcugacug

SEQ ID NO: 475293 - RNA, 19 nt, Artificial Sequence
  Description of Artificial Sequence: Synthetic oligonucleotide
  Sense strand starting at position 1915 of SEQ ID NO: 317239
cccugcuucugggugauga

SEQ ID NO: 475294 - RNA, 19 nt, Artificial Sequence
  Description of Artificial Sequence: Synthetic oligonucleotide
  Antisense Strand to SEQ ID NO: 475293
ucaucacccagaagcaggg

SEQ ID NO: 475295 - RNA, 19 nt, Artificial Sequence
  Description of Artificial Sequence: Synthetic oligonucleotide
  Sense strand starting at position 1917 of SEQ ID NO: 317239
cugcuucugggugaugaga

SEQ ID NO: 475296 - RNA, 19 nt, Artificial Sequence
  Description of Artificial Sequence: Synthetic oligonucleotide
  Antisense Strand to SEQ ID NO: 475295
ucucaucacccagaagcag

SEQ ID NO: 475297 - RNA, 19 nt, Artificial Sequence
  Description of Artificial Sequence: Synthetic oligonucleotide
  Sense strand starting at position 1981 of SEQ ID NO: 317239
gcaggaauccuuugaauga

SEQ ID NO: 475298 - RNA, 19 nt, Artificial Sequence
  Description of Artificial Sequence: Synthetic oligonucleotide
  Antisense Strand to SEQ ID NO: 475297
ucauucaaaggauuccugc

SEQ ID NO: 475299 - RNA, 19 nt, Artificial Sequence
  Description of Artificial Sequence: Synthetic oligonucleotide
  Sense strand starting at position 1990 of SEQ ID NO: 317239
cuuugaaugaugugaugcu

SEQ ID NO: 475300 - RNA, 19 nt, Artificial Sequence
  Description of Artificial Sequence: Synthetic oligonucleotide
  Antisense Strand to SEQ ID NO: 475299
agcaucacaucauucaaag

SEQ ID NO: 475301 - RNA, 19 nt, Artificial Sequence
  Description of Artificial Sequence: Synthetic oligonucleotide
  Sense strand starting at position 2081 of SEQ ID NO: 317239
cuguaucuggcuuaugcau

SEQ ID NO: 475302 - RNA, 19 nt, Artificial Sequence
  Description of Artificial Sequence: Synthetic oligonucleotide
  Antisense Strand to SEQ ID NO: 475301
augcauaagccagauacag

SEQ ID NO: 475303 - RNA, 19 nt, Artificial Sequence
  Description of Artificial Sequence: Synthetic oligonucleotide
  Sense strand starting at position 2232 of SEQ ID NO: 317239
agcucagcccuggagaguu

SEQ ID NO: 475304 - RNA, 19 nt, Artificial Sequence
  Description of Artificial Sequence: Synthetic oligonucleotide
  Antisense Strand to SEQ ID NO: 475303
aacucuccagggcugagcu

SEQ ID NO: 475305 - RNA, 19 nt, Artificial Sequence
  Description of Artificial Sequence: Synthetic oligonucleotide
  Sense strand starting at position 2242 of SEQ ID NO: 317239
uggagaguugaaggccaua

SEQ ID NO: 475306 - RNA, 19 nt, Artificial Sequence
  Description of Artificial Sequence: Synthetic oligonucleotide
  Antisense Strand to SEQ ID NO: 475305
uauggccuucaacucucca

SEQ ID NO: 475307 - RNA, 19 nt, Artificial Sequence
  Description of Artificial Sequence: Synthetic oligonucleotide
  Sense strand starting at position 2472 of SEQ ID NO: 317239
acgggaugcccagauauca

SEQ ID NO: 475308 - RNA, 19 nt, Artificial Sequence
  Description of Artificial Sequence: Synthetic oligonucleotide
  Antisense Strand to SEQ ID NO: 475307
ugauaucugggcaucccgu

SEQ ID NO: 475309 - RNA, 19 nt, Artificial Sequence
  Description of Artificial Sequence: Synthetic oligonucleotide
  Sense strand starting at position 2497 of SEQ ID NO: 317239
acaucauuuccaggugugu

SEQ ID NO: 475310 - RNA, 19 nt, Artificial Sequence
  Description of Artificial Sequence: Synthetic oligonucleotide
  Antisense Strand to SEQ ID NO: 475309
acacaccuggaaaugaugu

SEQ ID NO: 475311 - RNA, 19 nt, Artificial Sequence
  Description of Artificial Sequence: Synthetic oligonucleotide
  Sense strand starting at position 2524 of SEQ ID NO: 317239
guguuuccaguagagauga

SEQ ID NO: 475312 - RNA, 19 nt, Artificial Sequence
  Description of Artificial Sequence: Synthetic oligonucleotide
  Antisense Strand to SEQ ID NO: 475311
ucaucucuacuggaaacac

SEQ ID NO: 475313 - RNA, 19 nt, Artificial Sequence
  Description of Artificial Sequence: Synthetic oligonucleotide
  Sense strand starting at position 2562 of SEQ ID NO: 317239
aaguaaucccacuguggau

SEQ ID NO: 475314 - RNA, 19 nt, Artificial Sequence
  Description of Artificial Sequence: Synthetic oligonucleotide
  Antisense Strand to SEQ ID NO: 475313
auccacagugggauuacuu

SEQ ID NO: 475315 - RNA, 19 nt, Artificial Sequence
  Description of Artificial Sequence: Synthetic oligonucleotide
  Sense strand starting at position 2862 of SEQ ID NO: 317239
ggcccuguuucucugaaga

SEQ ID NO: 475316 - RNA, 19 nt, Artificial Sequence
  Description of Artificial Sequence: Synthetic oligonucleotide
  Antisense Strand to SEQ ID NO: 475315
ucuucagagaaacagggcc

SEQ ID NO: 475317 - RNA, 19 nt, Artificial Sequence
  Description of Artificial Sequence: Synthetic oligonucleotide
  Sense strand starting at position 3026 of SEQ ID NO: 317239
aguguagaucccuacucca

SEQ ID NO: 475318 - RNA, 19 nt, Artificial Sequence
  Description of Artificial Sequence: Synthetic oligonucleotide
  Antisense Strand to SEQ ID NO: 475317
uggaguagggaucuacacu

SEQ ID NO: 475319 - RNA, 19 nt, Artificial Sequence
  Description of Artificial Sequence: Synthetic oligonucleotide
  Sense strand starting at position 3136 of SEQ ID NO: 317239
cccugaguugguuauuauc

SEQ ID NO: 475320 - RNA, 19 nt, Artificial Sequence
  Description of Artificial Sequence: Synthetic oligonucleotide
  Antisense Strand to SEQ ID NO: 475319
gauaauaaccaacucaggg

SEQ ID NO: 475321 - RNA, 19 nt, Artificial Sequence
  Description of Artificial Sequence: Synthetic oligonucleotide
  Sense strand starting at position 3291 of SEQ ID NO: 317239
ggcagagauccagguggua

SEQ ID NO: 475322 - RNA, 19 nt, Artificial Sequence
  Description of Artificial Sequence: Synthetic oligonucleotide
  Antisense Strand to SEQ ID NO: 475321
uaccaccuggaucucugcc

SEQ ID NO: 475323 - RNA, 19 nt, Artificial Sequence
  Description of Artificial Sequence: Synthetic oligonucleotide
  Sense strand starting at position 3293 of SEQ ID NO: 317239
cagagauccaggugguaaa

SEQ ID NO: 475324 - RNA, 19 nt, Artificial Sequence
  Description of Artificial Sequence: Synthetic oligonucleotide
  Antisense Strand to SEQ ID NO: 475323
uuuaccaccuggaucucug

SEQ ID NO: 475325 - RNA, 19 nt, Artificial Sequence
  Description of Artificial Sequence: Synthetic oligonucleotide
  Sense strand starting at position 3294 of SEQ ID NO: 317239
agagauccaggugguaaau

SEQ ID NO: 475326 - RNA, 19 nt, Artificial Sequence
  Description of Artificial Sequence: Synthetic oligonucleotide
  Antisense Strand to SEQ ID NO: 475325
auuuaccaccuggaucucu

SEQ ID NO: 475327 - RNA, 19 nt, Artificial Sequence
  Description of Artificial Sequence: Synthetic oligonucleotide
  Sense strand starting at position 3296 of SEQ ID NO: 317239
agauccaggugguaaauuu

SEQ ID NO: 475328 - RNA, 19 nt, Artificial Sequence
  Description of Artificial Sequence: Synthetic oligonucleotide
  Antisense Strand to SEQ ID NO: 475327
aaauuuaccaccuggaucu

SEQ ID NO: 475329 - RNA, 19 nt, Artificial Sequence
  Description of Artificial Sequence: Synthetic oligonucleotide
  Sense strand starting at position 3303 of SEQ ID NO: 317239
ggugguaaauuugacagga

SEQ ID NO: 475330 - RNA, 19 nt, Artificial Sequence
  Description of Artificial Sequence: Synthetic oligonucleotide
  Antisense Strand to SEQ ID NO: 475329
uccugucaaauuuaccacc

SEQ ID NO: 475331 - RNA, 19 nt, Artificial Sequence
  Description of Artificial Sequence: Synthetic oligonucleotide
  Sense strand starting at position 3305 of SEQ ID NO: 317239
ugguaaauuugacaggauc

SEQ ID NO: 475332 - RNA, 19 nt, Artificial Sequence
  Description of Artificial Sequence: Synthetic oligonucleotide
  Antisense Strand to SEQ ID NO: 475331
gauccugucaaauuuacca

SEQ ID NO: 475333 - RNA, 19 nt, Artificial Sequence
  Description of Artificial Sequence: Synthetic oligonucleotide
  Sense strand starting at position 3379 of SEQ ID NO: 317239
guacaagccuccuuagaag

SEQ ID NO: 475334 - RNA, 19 nt, Artificial Sequence
  Description of Artificial Sequence: Synthetic oligonucleotide
  Antisense Strand to SEQ ID NO: 475333
cuucuaaggaggcuuguac

SEQ ID NO: 475335 - RNA, 19 nt, Artificial Sequence
  Description of Artificial Sequence: Synthetic oligonucleotide
  Sense strand starting at position 3463 of SEQ ID NO: 317239
auagguuccuuuccugaga

SEQ ID NO: 475336 - RNA, 19 nt, Artificial Sequence
  Description of Artificial Sequence: Synthetic oligonucleotide
  Antisense Strand to SEQ ID NO: 475335
ucucaggaaaggaaccuau

SEQ ID NO: 475337 - RNA, 19 nt, Artificial Sequence
  Description of Artificial Sequence: Synthetic oligonucleotide
  Sense strand starting at position 3464 of SEQ ID NO: 317239
uagguuccuuuccugagaa

SEQ ID NO: 475338 - RNA, 19 nt, Artificial Sequence
  Description of Artificial Sequence: Synthetic oligonucleotide
  Antisense Strand to SEQ ID NO: 475337
uucucaggaaaggaaccua

SEQ ID NO: 475339 - RNA, 19 nt, Artificial Sequence
  Description of Artificial Sequence: Synthetic oligonucleotide
  Sense strand starting at position 3645 of SEQ ID NO: 317239
gaacacagaugaguucuua

SEQ ID NO: 475340 - RNA, 19 nt, Artificial Sequence
  Description of Artificial Sequence: Synthetic oligonucleotide
  Antisense Strand to SEQ ID NO: 475339
uaagaacucaucuguguuc

SEQ ID NO: 475341 - RNA, 19 nt, Artificial Sequence
  Description of Artificial Sequence: Synthetic oligonucleotide
  Sense strand starting at position 3649 of SEQ ID NO: 317239
acagaugaguucuuacaga

SEQ ID NO: 475342 - RNA, 19 nt, Artificial Sequence
  Description of Artificial Sequence: Synthetic oligonucleotide
  Antisense Strand to SEQ ID NO: 475341
ucuguaagaacucaucugu

SEQ ID NO: 475343 - RNA, 19 nt, Artificial Sequence
  Description of Artificial Sequence: Synthetic oligonucleotide
  Sense strand starting at position 3785 of SEQ ID NO: 317239
cguauuuagcugggaggca

SEQ ID NO: 475344 - RNA, 19 nt, Artificial Sequence
  Description of Artificial Sequence: Synthetic oligonucleotide
  Antisense Strand to SEQ ID NO: 475343
ugccucccagcuaaauacg

SEQ ID NO: 475345 - RNA, 19 nt, Artificial Sequence
  Description of Artificial Sequence: Synthetic oligonucleotide
  Sense strand starting at position 3837 of SEQ ID NO: 317239
cgaccugaaggaugaguua

SEQ ID NO: 475346 - RNA, 19 nt, Artificial Sequence
  Description of Artificial Sequence: Synthetic oligonucleotide
  Antisense Strand to SEQ ID NO: 475345
uaacucauccuucaggucg

SEQ ID NO: 475347 - RNA, 19 nt, Artificial Sequence
  Description of Artificial Sequence: Synthetic oligonucleotide
  Sense strand starting at position 473 of SEQ ID NO: 317240
acuccucuucugggauguu

SEQ ID NO: 475348 - RNA, 19 nt, Artificial Sequence
  Description of Artificial Sequence: Synthetic oligonucleotide
  Antisense Strand to SEQ ID NO: 475347
aacaucccagaagaggagu

SEQ ID NO: 475349 - RNA, 19 nt, Artificial Sequence
  Description of Artificial Sequence: Synthetic oligonucleotide
  Sense strand starting at position 500 of SEQ ID NO: 317240
ggaugugucuggguaucag

SEQ ID NO: 475350 - RNA, 19 nt, Artificial Sequence
  Description of Artificial Sequence: Synthetic oligonucleotide
  Antisense Strand to SEQ ID NO: 475349
cugauacccagacacaucc

SEQ ID NO: 475351 - RNA, 19 nt, Artificial Sequence
  Description of Artificial Sequence: Synthetic oligonucleotide
  Sense strand starting at position 879 of SEQ ID NO: 317240
guuccaaguggacauuauu

SEQ ID NO: 475352 - RNA, 19 nt, Artificial Sequence
  Description of Artificial Sequence: Synthetic oligonucleotide
  Antisense Strand to SEQ ID NO: 475351
aauaauguccacuuggaac

SEQ ID NO: 475353 - RNA, 19 nt, Artificial Sequence
  Description of Artificial Sequence: Synthetic oligonucleotide
  Sense strand starting at position 948 of SEQ ID NO: 317240
uucugcauccucuggagaa

SEQ ID NO: 475354 - RNA, 19 nt, Artificial Sequence
  Description of Artificial Sequence: Synthetic oligonucleotide
  Antisense Strand to SEQ ID NO: 475353
uucuccagaggaugcagaa

SEQ ID NO: 475355 - RNA, 19 nt, Artificial Sequence
  Description of Artificial Sequence: Synthetic oligonucleotide
  Sense strand starting at position 950 of SEQ ID NO: 317240
cugcauccucuggagaacu

SEQ ID NO: 475356 - RNA, 19 nt, Artificial Sequence
  Description of Artificial Sequence: Synthetic oligonucleotide
  Antisense Strand to SEQ ID NO: 475355
aguucuccagaggaugcag

SEQ ID NO: 475357 - RNA, 19 nt, Artificial Sequence
  Description of Artificial Sequence: Synthetic oligonucleotide
  Sense strand starting at position 952 of SEQ ID NO: 317240
gcauccucuggagaacuau

SEQ ID NO: 475358 - RNA, 19 nt, Artificial Sequence
  Description of Artificial Sequence: Synthetic oligonucleotide
  Antisense Strand to SEQ ID NO: 475357
auaguucuccagaggaugc

SEQ ID NO: 475359 - RNA, 19 nt, Artificial Sequence
  Description of Artificial Sequence: Synthetic oligonucleotide
  Sense strand starting at position 1072 of SEQ ID NO: 317240
gagcaagacuucccaagga

SEQ ID NO: 475360 - RNA, 19 nt, Artificial Sequence
  Description of Artificial Sequence: Synthetic oligonucleotide
  Antisense Strand to SEQ ID NO: 475359
uccuugggaagucuugcuc

SEQ ID NO: 475361 - RNA, 19 nt, Artificial Sequence
  Description of Artificial Sequence: Synthetic oligonucleotide
  Sense strand starting at position 1115 of SEQ ID NO: 317240
ggcacacagccaugacaaa

SEQ ID NO: 475362 - RNA, 19 nt, Artificial Sequence
  Description of Artificial Sequence: Synthetic oligonucleotide
  Antisense Strand to SEQ ID NO: 475361
uuugucauggcugugugcc

SEQ ID NO: 475363 - RNA, 19 nt, Artificial Sequence
  Description of Artificial Sequence: Synthetic oligonucleotide
  Sense strand starting at position 1116 of SEQ ID NO: 317240
gcacacagccaugacaaau

SEQ ID NO: 475364 - RNA, 19 nt, Artificial Sequence
  Description of Artificial Sequence: Synthetic oligonucleotide
  Antisense Strand to SEQ ID NO: 475363
auuugucauggcugugugc

SEQ ID NO: 475365 - RNA, 19 nt, Artificial Sequence
  Description of Artificial Sequence: Synthetic oligonucleotide
  Sense strand starting at position 1166 of SEQ ID NO: 317240
gucuccuuccaucagaaug

SEQ ID NO: 475366 - RNA, 19 nt, Artificial Sequence
  Description of Artificial Sequence: Synthetic oligonucleotide
  Antisense Strand to SEQ ID NO: 475365
cauucugauggaaggagac

SEQ ID NO: 475367 - RNA, 19 nt, Artificial Sequence
  Description of Artificial Sequence: Synthetic oligonucleotide
  Sense strand starting at position 1182 of SEQ ID NO: 317240
augugccaccagugauaaa

SEQ ID NO: 475368 - RNA, 19 nt, Artificial Sequence
  Description of Artificial Sequence: Synthetic oligonucleotide
  Antisense Strand to SEQ ID NO: 475367
uuuaucacugguggcacau

SEQ ID NO: 475369 - RNA, 19 nt, Artificial Sequence
  Description of Artificial Sequence: Synthetic oligonucleotide
  Sense strand starting at position 1471 of SEQ ID NO: 317240
ccugcuuaggucuggaaag

SEQ ID NO: 475370 - RNA, 19 nt, Artificial Sequence
  Description of Artificial Sequence: Synthetic oligonucleotide
  Antisense Strand to SEQ ID NO: 475369
cuuuccagaccuaagcagg

SEQ ID NO: 475371 - RNA, 19 nt, Artificial Sequence
  Description of Artificial Sequence: Synthetic oligonucleotide
  Sense strand starting at position 1538 of SEQ ID NO: 317240
aggaaauuaugggcuuggu

SEQ ID NO: 475372 - RNA, 19 nt, Artificial Sequence
  Description of Artificial Sequence: Synthetic oligonucleotide
  Antisense Strand to SEQ ID NO: 475371
accaagcccauaauuuccu

SEQ ID NO: 475373 - RNA, 19 nt, Artificial Sequence
  Description of Artificial Sequence: Synthetic oligonucleotide
  Sense strand starting at position 1610 of SEQ ID NO: 317240
caguaagaggacugguuaa

SEQ ID NO: 475374 - RNA, 19 nt, Artificial Sequence
  Description of Artificial Sequence: Synthetic oligonucleotide
  Antisense Strand to SEQ ID NO: 475373
uuaaccaguccucuuacug

SEQ ID NO: 475375 - RNA, 19 nt, Artificial Sequence
  Description of Artificial Sequence: Synthetic oligonucleotide
  Sense strand starting at position 1685 of SEQ ID NO: 317240
auaaguauuugacauggaa

SEQ ID NO: 475376 - RNA, 19 nt, Artificial Sequence
  Description of Artificial Sequence: Synthetic oligonucleotide
  Antisense Strand to SEQ ID NO: 475375
uuccaugucaaauacuuau

SEQ ID NO: 475377 - RNA, 19 nt, Artificial Sequence
  Description of Artificial Sequence: Synthetic oligonucleotide
  Sense strand starting at position 1747 of SEQ ID NO: 317240
acacuuguuggauguuacu

SEQ ID NO: 475378 - RNA, 19 nt, Artificial Sequence
  Description of Artificial Sequence: Synthetic oligonucleotide
  Antisense Strand to SEQ ID NO: 475377
aguaacauccaacaagugu

SEQ ID NO: 475379 - RNA, 19 nt, Artificial Sequence
  Description of Artificial Sequence: Synthetic oligonucleotide
  Sense strand starting at position 1757 of SEQ ID NO: 317240
gauguuacugaugggaugu

SEQ ID NO: 475380 - RNA, 19 nt, Artificial Sequence
  Description of Artificial Sequence: Synthetic oligonucleotide
  Antisense Strand to SEQ ID NO: 475379
acaucccaucaguaacauc

SEQ ID NO: 475381 - RNA, 19 nt, Artificial Sequence
  Description of Artificial Sequence: Synthetic oligonucleotide
  Sense strand starting at position 1776 of SEQ ID NO: 317240
gguagaugaugucccauca

SEQ ID NO: 475382 - RNA, 19 nt, Artificial Sequence
  Description of Artificial Sequence: Synthetic oligonucleotide
  Antisense Strand to SEQ ID NO: 475381
ugaugggacaucaucuacc

SEQ ID NO: 475383 - RNA, 19 nt, Artificial Sequence
  Description of Artificial Sequence: Synthetic oligonucleotide
  Sense strand starting at position 2331 of SEQ ID NO: 317240
gugacaccuaaguguuuga

SEQ ID NO: 475384 - RNA, 19 nt, Artificial Sequence
  Description of Artificial Sequence: Synthetic oligonucleotide
  Antisense Strand to SEQ ID NO: 475383
ucaaacacuuaggugucac

SEQ ID NO: 475385 - RNA, 19 nt, Artificial Sequence
  Description of Artificial Sequence: Synthetic oligonucleotide
  Sense strand starting at position 2334 of SEQ ID NO: 317240
acaccuaaguguuugauaa

SEQ ID NO: 475386 - RNA, 19 nt, Artificial Sequence
  Description of Artificial Sequence: Synthetic oligonucleotide
  Antisense Strand to SEQ ID NO: 475385
uuaucaaacacuuaggugu

SEQ ID NO: 475387 - RNA, 19 nt, Artificial Sequence
  Description of Artificial Sequence: Synthetic oligonucleotide
  Sense strand starting at position 2335 of SEQ ID NO: 317240
caccuaaguguuugauaag

SEQ ID NO: 475388 - RNA, 19 nt, Artificial Sequence
  Description of Artificial Sequence: Synthetic oligonucleotide
  Antisense Strand to SEQ ID NO: 475387
cuuaucaaacacuuaggug

SEQ ID NO: 475389 - RNA, 19 nt, Artificial Sequence
  Description of Artificial Sequence: Synthetic oligonucleotide
  Sense strand starting at position 2345 of SEQ ID NO: 317240
uuugauaaguguuugugga

SEQ ID NO: 475390 - RNA, 19 nt, Artificial Sequence
  Description of Artificial Sequence: Synthetic oligonucleotide
  Antisense Strand to SEQ ID NO: 475389
uccacaaacacuuaucaaa

SEQ ID NO: 475391 - RNA, 19 nt, Artificial Sequence
  Description of Artificial Sequence: Synthetic oligonucleotide
  Sense strand starting at position 2347 of SEQ ID NO: 317240
ugauaaguguuuguggauu

SEQ ID NO: 475392 - RNA, 19 nt, Artificial Sequence
  Description of Artificial Sequence: Synthetic oligonucleotide
  Antisense Strand to SEQ ID NO: 475391
aauccacaaacacuuauca

SEQ ID NO: 475393 - RNA, 19 nt, Artificial Sequence
  Description of Artificial Sequence: Synthetic oligonucleotide
  Sense strand starting at position 2381 of SEQ ID NO: 317240
ucuagauacugagugucau

SEQ ID NO: 475394 - RNA, 19 nt, Artificial Sequence
  Description of Artificial Sequence: Synthetic oligonucleotide
  Antisense Strand to SEQ ID NO: 475393
augacacucaguaucuaga

SEQ ID NO: 475395 - RNA, 19 nt, Artificial Sequence
  Description of Artificial Sequence: Synthetic oligonucleotide
  Sense strand starting at position 2382 of SEQ ID NO: 317240
cuagauacugagugucauc

SEQ ID NO: 475396 - RNA, 19 nt, Artificial Sequence
  Description of Artificial Sequence: Synthetic oligonucleotide
  Antisense Strand to SEQ ID NO: 475395
gaugacacucaguaucuag

SEQ ID NO: 475397 - RNA, 19 nt, Artificial Sequence
  Description of Artificial Sequence: Synthetic oligonucleotide
  Sense strand starting at position 2391 of SEQ ID NO: 317240
gagugucauccgcuuugca

SEQ ID NO: 475398 - RNA, 19 nt, Artificial Sequence
  Description of Artificial Sequence: Synthetic oligonucleotide
  Antisense Strand to SEQ ID NO: 475397
ugcaaagcggaugacacuc

SEQ ID NO: 475399 - RNA, 19 nt, Artificial Sequence
  Description of Artificial Sequence: Synthetic oligonucleotide
  Sense strand starting at position 2753 of SEQ ID NO: 317240
caauaauaggguugucauc

SEQ ID NO: 475400 - RNA, 19 nt, Artificial Sequence
  Description of Artificial Sequence: Synthetic oligonucleotide
  Antisense Strand to SEQ ID NO: 475399
gaugacaacccuauuauug

SEQ ID NO: 475401 - RNA, 19 nt, Artificial Sequence
  Description of Artificial Sequence: Synthetic oligonucleotide
  Sense strand starting at position 2755 of SEQ ID NO: 317240
auaauaggguugucaucuu

SEQ ID NO: 475402 - RNA, 19 nt, Artificial Sequence
  Description of Artificial Sequence: Synthetic oligonucleotide
  Antisense Strand to SEQ ID NO: 475401
aagaugacaacccuauuau

SEQ ID NO: 475403 - RNA, 19 nt, Artificial Sequence
  Description of Artificial Sequence: Synthetic oligonucleotide
  Sense strand starting at position 2812 of SEQ ID NO: 317240
agcagaauguaagugaagu

SEQ ID NO: 475404 - RNA, 19 nt, Artificial Sequence
  Description of Artificial Sequence: Synthetic oligonucleotide
  Antisense Strand to SEQ ID NO: 475403
acuucacuuacauucugcu

SEQ ID NO: 475405 - RNA, 19 nt, Artificial Sequence
  Description of Artificial Sequence: Synthetic oligonucleotide
  Sense strand starting at position 2813 of SEQ ID NO: 317240
gcagaauguaagugaaguc

SEQ ID NO: 475406 - RNA, 19 nt, Artificial Sequence
  Description of Artificial Sequence: Synthetic oligonucleotide
  Antisense Strand to SEQ ID NO: 475405
gacuucacuuacauucugc

SEQ ID NO: 475407 - RNA, 19 nt, Artificial Sequence
  Description of Artificial Sequence: Synthetic oligonucleotide
  Sense strand starting at position 2953 of SEQ ID NO: 317240
uagagucuugaguagucaa

SEQ ID NO: 475408 - RNA, 19 nt, Artificial Sequence
  Description of Artificial Sequence: Synthetic oligonucleotide
  Antisense Strand to SEQ ID NO: 475407
uugacuacucaagacucua

SEQ ID NO: 475409 - RNA, 19 nt, Artificial Sequence
  Description of Artificial Sequence: Synthetic oligonucleotide
  Sense strand starting at position 3038 of SEQ ID NO: 317240
caagacuugggagguugau

SEQ ID NO: 475410 - RNA, 19 nt, Artificial Sequence
  Description of Artificial Sequence: Synthetic oligonucleotide
  Antisense Strand to SEQ ID NO: 475409
aucaaccucccaagucuug

SEQ ID NO: 475411 - RNA, 19 nt, Artificial Sequence
  Description of Artificial Sequence: Synthetic oligonucleotide
  Sense strand starting at position 3301 of SEQ ID NO: 317240
gggaaauacuuugcugcua

SEQ ID NO: 475412 - RNA, 19 nt, Artificial Sequence
  Description of Artificial Sequence: Synthetic oligonucleotide
  Antisense Strand to SEQ ID NO: 475411
uagcagcaaaguauuuccc

SEQ ID NO: 475413 - RNA, 19 nt, Artificial Sequence
  Description of Artificial Sequence: Synthetic oligonucleotide
  Sense strand starting at position 3461 of SEQ ID NO: 317240
gcaggaugguuucuucuga

SEQ ID NO: 475414 - RNA, 19 nt, Artificial Sequence
  Description of Artificial Sequence: Synthetic oligonucleotide
  Antisense Strand to SEQ ID NO: 475413
ucagaagaaaccauccugc

SEQ ID NO: 475415 - RNA, 19 nt, Artificial Sequence
  Description of Artificial Sequence: Synthetic oligonucleotide
  Sense strand starting at position 3462 of SEQ ID NO: 317240
caggaugguuucuucugaa

SEQ ID NO: 475416 - RNA, 19 nt, Artificial Sequence
  Description of Artificial Sequence: Synthetic oligonucleotide
  Antisense Strand to SEQ ID NO: 475415
uucagaagaaaccauccug

SEQ ID NO: 475417 - RNA, 19 nt, Artificial Sequence
  Description of Artificial Sequence: Synthetic oligonucleotide
  Sense strand starting at position 3744 of SEQ ID NO: 317240
guaggaccucaguauaugu

SEQ ID NO: 475418 - RNA, 19 nt, Artificial Sequence
  Description of Artificial Sequence: Synthetic oligonucleotide
  Antisense Strand to SEQ ID NO: 475417
acauauacugagguccuac

SEQ ID NO: 475419 - RNA, 19 nt, Artificial Sequence
  Description of Artificial Sequence: Synthetic oligonucleotide
  Sense strand starting at position 3757 of SEQ ID NO: 317240
auaugucaugcuuacuuga

SEQ ID NO: 475420 - RNA, 19 nt, Artificial Sequence
  Description of Artificial Sequence: Synthetic oligonucleotide
  Antisense Strand to SEQ ID NO: 475419
ucaaguaagcaugacauau

SEQ ID NO: 475421 - RNA, 19 nt, Artificial Sequence
  Description of Artificial Sequence: Synthetic oligonucleotide
  Sense strand starting at position 3762 of SEQ ID NO: 317240
ucaugcuuacuugauuaga

SEQ ID NO: 475422 - RNA, 19 nt, Artificial Sequence
  Description of Artificial Sequence: Synthetic oligonucleotide
  Antisense Strand to SEQ ID NO: 475421
ucuaaucaaguaagcauga

SEQ ID NO: 475423 - RNA, 19 nt, Artificial Sequence
  Description of Artificial Sequence: Synthetic oligonucleotide
  Sense strand starting at position 3764 of SEQ ID NO: 317240
augcuuacuugauuagagu

SEQ ID NO: 475424 - RNA, 19 nt, Artificial Sequence
  Description of Artificial Sequence: Synthetic oligonucleotide
  Antisense Strand to SEQ ID NO: 475423
acucuaaucaaguaagcau

SEQ ID NO: 475425 - RNA, 19 nt, Artificial Sequence
  Description of Artificial Sequence: Synthetic oligonucleotide
  Sense strand starting at position 3765 of SEQ ID NO: 317240
ugcuuacuugauuagaguu

SEQ ID NO: 475426 - RNA, 19 nt, Artificial Sequence
  Description of Artificial Sequence: Synthetic oligonucleotide
  Antisense Strand to SEQ ID NO: 475425
aacucuaaucaaguaagca

SEQ ID NO: 475427 - RNA, 19 nt, Artificial Sequence
  Description of Artificial Sequence: Synthetic oligonucleotide
  Sense strand starting at position 782 of SEQ ID NO: 317241
aaguuccaggccuguaaga

SEQ ID NO: 475428 - RNA, 19 nt, Artificial Sequence
  Description of Artificial Sequence: Synthetic oligonucleotide
  Antisense Strand to SEQ ID NO: 475427
ucuuacaggccuggaacuu

SEQ ID NO: 475429 - RNA, 19 nt, Artificial Sequence
  Description of Artificial Sequence: Synthetic oligonucleotide
  Sense strand starting at position 784 of SEQ ID NO: 317241
guuccaggccuguaagaga

SEQ ID NO: 475430 - RNA, 19 nt, Artificial Sequence
  Description of Artificial Sequence: Synthetic oligonucleotide
  Antisense Strand to SEQ ID NO: 475429
ucucuuacaggccuggaac

SEQ ID NO: 475431 - RNA, 19 nt, Artificial Sequence
  Description of Artificial Sequence: Synthetic oligonucleotide
  Sense strand starting at position 938 of SEQ ID NO: 317241
agcugcuccugucucaaua

SEQ ID NO: 475432 - RNA, 19 nt, Artificial Sequence
  Description of Artificial Sequence: Synthetic oligonucleotide
  Antisense Strand to SEQ ID NO: 475431
uauugagacaggagcagcu

SEQ ID NO: 475433 - RNA, 19 nt, Artificial Sequence
  Description of Artificial Sequence: Synthetic oligonucleotide
  Sense strand starting at position 1068 of SEQ ID NO: 317241
aggaucuggcaauggauua

SEQ ID NO: 475434 - RNA, 19 nt, Artificial Sequence
  Description of Artificial Sequence: Synthetic oligonucleotide
  Antisense Strand to SEQ ID NO: 475433
uaauccauugccagauccu

SEQ ID NO: 475435 - RNA, 19 nt, Artificial Sequence
  Description of Artificial Sequence: Synthetic oligonucleotide
  Sense strand starting at position 1069 of SEQ ID NO: 317241
ggaucuggcaauggauuau

SEQ ID NO: 475436 - RNA, 19 nt, Artificial Sequence
  Description of Artificial Sequence: Synthetic oligonucleotide
  Antisense Strand to SEQ ID NO: 475435
auaauccauugccagaucc

SEQ ID NO: 475437 - RNA, 19 nt, Artificial Sequence
  Description of Artificial Sequence: Synthetic oligonucleotide
  Sense strand starting at position 1585 of SEQ ID NO: 317241
gcaggaagcugugguuaau

SEQ ID NO: 475438 - RNA, 19 nt, Artificial Sequence
  Description of Artificial Sequence: Synthetic oligonucleotide
  Antisense Strand to SEQ ID NO: 475437
auuaaccacagcuuccugc

SEQ ID NO: 475439 - RNA, 19 nt, Artificial Sequence
  Description of Artificial Sequence: Synthetic oligonucleotide
  Sense strand starting at position 1616 of SEQ ID NO: 317241
cguguccucgcccauugaa

SEQ ID NO: 475440 - RNA, 19 nt, Artificial Sequence
  Description of Artificial Sequence: Synthetic oligonucleotide
  Antisense Strand to SEQ ID NO: 475439
uucaaugggcgaggacacg

SEQ ID NO: 475441 - RNA, 19 nt, Artificial Sequence
  Description of Artificial Sequence: Synthetic oligonucleotide
  Sense strand starting at position 2259 of SEQ ID NO: 317241
gugcuccaguuaugggaga

SEQ ID NO: 475442 - RNA, 19 nt, Artificial Sequence
  Description of Artificial Sequence: Synthetic oligonucleotide
  Antisense Strand to SEQ ID NO: 475441
ucucccauaacuggagcac

SEQ ID NO: 475443 - RNA, 19 nt, Artificial Sequence
  Description of Artificial Sequence: Synthetic oligonucleotide
  Sense strand starting at position 2261 of SEQ ID NO: 317241
gcuccaguuaugggagaga

SEQ ID NO: 475444 - RNA, 19 nt, Artificial Sequence
  Description of Artificial Sequence: Synthetic oligonucleotide
  Antisense Strand to SEQ ID NO: 475443
ucucucccauaacuggagc

SEQ ID NO: 475445 - RNA, 19 nt, Artificial Sequence
  Description of Artificial Sequence: Synthetic oligonucleotide
  Sense strand starting at position 2478 of SEQ ID NO: 317241
gggagcauuaaguacaugu

SEQ ID NO: 475446 - RNA, 19 nt, Artificial Sequence
  Description of Artificial Sequence: Synthetic oligonucleotide
  Antisense Strand to SEQ ID NO: 475445
acauguacuuaaugcuccc

SEQ ID NO: 475447 - RNA, 19 nt, Artificial Sequence
  Description of Artificial Sequence: Synthetic oligonucleotide
  Sense strand starting at position 2480 of SEQ ID NO: 317241
gagcauuaaguacauguga

SEQ ID NO: 475448 - RNA, 19 nt, Artificial Sequence
  Description of Artificial Sequence: Synthetic oligonucleotide
  Antisense Strand to SEQ ID NO: 475447
ucacauguacuuaaugcuc

SEQ ID NO: 475449 - RNA, 19 nt, Artificial Sequence
  Description of Artificial Sequence: Synthetic oligonucleotide
  Sense strand starting at position 2482 of SEQ ID NO: 317241
gcauuaaguacaugugaag

SEQ ID NO: 475450 - RNA, 19 nt, Artificial Sequence
  Description of Artificial Sequence: Synthetic oligonucleotide
  Antisense Strand to SEQ ID NO: 475449
cuucacauguacuuaaugc

SEQ ID NO: 475451 - RNA, 19 nt, Artificial Sequence
  Description of Artificial Sequence: Synthetic oligonucleotide
  Sense strand starting at position 2611 of SEQ ID NO: 317241
ucuccugacgagugagaaa

SEQ ID NO: 475452 - RNA, 19 nt, Artificial Sequence
  Description of Artificial Sequence: Synthetic oligonucleotide
  Antisense Strand to SEQ ID NO: 475451
uuucucacucgucaggaga

SEQ ID NO: 475453 - RNA, 19 nt, Artificial Sequence
  Description of Artificial Sequence: Synthetic oligonucleotide
  Sense strand starting at position 2732 of SEQ ID NO: 317241
ggaaccucccucugguaau

SEQ ID NO: 475454 - RNA, 19 nt, Artificial Sequence
  Description of Artificial Sequence: Synthetic oligonucleotide
  Antisense Strand to SEQ ID NO: 475453
auuaccagagggagguucc

SEQ ID NO: 475455 - RNA, 19 nt, Artificial Sequence
  Description of Artificial Sequence: Synthetic oligonucleotide
  Sense strand starting at position 2744 of SEQ ID NO: 317241
ugguaaucagccuggcaca

SEQ ID NO: 475456 - RNA, 19 nt, Artificial Sequence
  Description of Artificial Sequence: Synthetic oligonucleotide
  Antisense Strand to SEQ ID NO: 475455
ugugccaggcugauuacca

SEQ ID NO: 475457 - RNA, 19 nt, Artificial Sequence
  Description of Artificial Sequence: Synthetic oligonucleotide
  Sense strand starting at position 2745 of SEQ ID NO: 317241
gguaaucagccuggcacau

SEQ ID NO: 475458 - RNA, 19 nt, Artificial Sequence
  Description of Artificial Sequence: Synthetic oligonucleotide
  Antisense Strand to SEQ ID NO: 475457
augugccaggcugauuacc

SEQ ID NO: 475459 - RNA, 19 nt, Artificial Sequence
  Description of Artificial Sequence: Synthetic oligonucleotide
  Sense strand starting at position 3196 of SEQ ID NO: 317241
ucagauuucuuggagauug

SEQ ID NO: 475460 - RNA, 19 nt, Artificial Sequence
  Description of Artificial Sequence: Synthetic oligonucleotide
  Antisense Strand to SEQ ID NO: 475459
caaucuccaagaaaucuga

SEQ ID NO: 475461 - RNA, 19 nt, Artificial Sequence
  Description of Artificial Sequence: Synthetic oligonucleotide
  Sense strand starting at position 3234 of SEQ ID NO: 317241
acagcuuucgugccuuuga

SEQ ID NO: 475462 - RNA, 19 nt, Artificial Sequence
  Description of Artificial Sequence: Synthetic oligonucleotide
  Antisense Strand to SEQ ID NO: 475461
ucaaaggcacgaaagcugu

SEQ ID NO: 475463 - RNA, 19 nt, Artificial Sequence
  Description of Artificial Sequence: Synthetic oligonucleotide
  Sense strand starting at position 3235 of SEQ ID NO: 317241
cagcuuucgugccuuugaa

SEQ ID NO: 475464 - RNA, 19 nt, Artificial Sequence
  Description of Artificial Sequence: Synthetic oligonucleotide
  Antisense Strand to SEQ ID NO: 475463
uucaaaggcacgaaagcug

SEQ ID NO: 475465 - RNA, 19 nt, Artificial Sequence
  Description of Artificial Sequence: Synthetic oligonucleotide
  Sense strand starting at position 3237 of SEQ ID NO: 317241
gcuuucgugccuuugaaau

SEQ ID NO: 475466 - RNA, 19 nt, Artificial Sequence
  Description of Artificial Sequence: Synthetic oligonucleotide
  Antisense Strand to SEQ ID NO: 475465
auuucaaaggcacgaaagc

SEQ ID NO: 475467 - RNA, 19 nt, Artificial Sequence
  Description of Artificial Sequence: Synthetic oligonucleotide
  Sense strand starting at position 3480 of SEQ ID NO: 317241
gaaggaugugcuuguucuu

SEQ ID NO: 475468 - RNA, 19 nt, Artificial Sequence
  Description of Artificial Sequence: Synthetic oligonucleotide
  Antisense Strand to SEQ ID NO: 475467
aagaacaagcacauccuuc

SEQ ID NO: 475469 - RNA, 19 nt, Artificial Sequence
  Description of Artificial Sequence: Synthetic oligonucleotide
  Sense strand starting at position 3485 of SEQ ID NO: 317241
augugcuuguucuuuguca

SEQ ID NO: 475470 - RNA, 19 nt, Artificial Sequence
  Description of Artificial Sequence: Synthetic oligonucleotide
  Antisense Strand to SEQ ID NO: 475469
ugacaaagaacaagcacau

SEQ ID NO: 475471 - RNA, 19 nt, Artificial Sequence
  Description of Artificial Sequence: Synthetic oligonucleotide
  Sense strand starting at position 3487 of SEQ ID NO: 317241
gugcuuguucuuugucacu

SEQ ID NO: 475472 - RNA, 19 nt, Artificial Sequence
  Description of Artificial Sequence: Synthetic oligonucleotide
  Antisense Strand to SEQ ID NO: 475471
agugacaaagaacaagcac

SEQ ID NO: 475473 - RNA, 19 nt, Artificial Sequence
  Description of Artificial Sequence: Synthetic oligonucleotide
  Sense strand starting at position 3489 of SEQ ID NO: 317241
gcuuguucuuugucacuuu

SEQ ID NO: 475474 - RNA, 19 nt, Artificial Sequence
  Description of Artificial Sequence: Synthetic oligonucleotide
  Antisense Strand to SEQ ID NO: 475473
aaagugacaaagaacaagc

SEQ ID NO: 475475 - RNA, 19 nt, Artificial Sequence
  Description of Artificial Sequence: Synthetic oligonucleotide
  Sense strand starting at position 3492 of SEQ ID NO: 317241
uguucuuugucacuuucua

SEQ ID NO: 475476 - RNA, 19 nt, Artificial Sequence
  Description of Artificial Sequence: Synthetic oligonucleotide
  Antisense Strand to SEQ ID NO: 475475
uagaaagugacaaagaaca

SEQ ID NO: 475477 - RNA, 19 nt, Artificial Sequence
  Description of Artificial Sequence: Synthetic oligonucleotide
  Sense strand starting at position 3674 of SEQ ID NO: 317241
auggcuaugcugggagaaa

SEQ ID NO: 475478 - RNA, 19 nt, Artificial Sequence
  Description of Artificial Sequence: Synthetic oligonucleotide
  Antisense Strand to SEQ ID NO: 475477
uuucucccagcauagccau

SEQ ID NO: 475479 - RNA, 19 nt, Artificial Sequence
  Description of Artificial Sequence: Synthetic oligonucleotide
  Sense strand starting at position 3675 of SEQ ID NO: 317241
uggcuaugcugggagaaag

SEQ ID NO: 475480 - RNA, 19 nt, Artificial Sequence
  Description of Artificial Sequence: Synthetic oligonucleotide
  Antisense Strand to SEQ ID NO: 475479
cuuucucccagcauagcca

SEQ ID NO: 475481 - RNA, 19 nt, Artificial Sequence
  Description of Artificial Sequence: Synthetic oligonucleotide
  Sense strand starting at position 3731 of SEQ ID NO: 317241
ggcacaaccucaucuguaa

SEQ ID NO: 475482 - RNA, 19 nt, Artificial Sequence
  Description of Artificial Sequence: Synthetic oligonucleotide
  Antisense Strand to SEQ ID NO: 475481
uuacagaugagguugugcc

SEQ ID NO: 475483 - RNA, 19 nt, Artificial Sequence
  Description of Artificial Sequence: Synthetic oligonucleotide
  Sense strand starting at position 3734 of SEQ ID NO: 317241
acaaccucaucuguaaagu

SEQ ID NO: 475484 - RNA, 19 nt, Artificial Sequence
  Description of Artificial Sequence: Synthetic oligonucleotide
  Antisense Strand to SEQ ID NO: 475483
acuuuacagaugagguugu

SEQ ID NO: 475485 - RNA, 19 nt, Artificial Sequence
  Description of Artificial Sequence: Synthetic oligonucleotide
  Sense strand starting at position 3744 of SEQ ID NO: 317241
cuguaaaguggaugugaug

SEQ ID NO: 475486 - RNA, 19 nt, Artificial Sequence
  Description of Artificial Sequence: Synthetic oligonucleotide
  Antisense Strand to SEQ ID NO: 475485
caucacauccacuuuacag

SEQ ID NO: 475487 - RNA, 19 nt, Artificial Sequence
  Description of Artificial Sequence: Synthetic oligonucleotide
  Sense strand starting at position 3824 of SEQ ID NO: 317241
ggagcucucuuguuaucau

SEQ ID NO: 475488 - RNA, 19 nt, Artificial Sequence
  Description of Artificial Sequence: Synthetic oligonucleotide
  Antisense Strand to SEQ ID NO: 475487
augauaacaagagagcucc

SEQ ID NO: 475489 - RNA, 19 nt, Artificial Sequence
  Description of Artificial Sequence: Synthetic oligonucleotide
  Sense strand starting at position 3825 of SEQ ID NO: 317241
gagcucucuuguuaucaug

SEQ ID NO: 475490 - RNA, 19 nt, Artificial Sequence
  Description of Artificial Sequence: Synthetic oligonucleotide
  Antisense Strand to SEQ ID NO: 475489
caugauaacaagagagcuc

SEQ ID NO: 475491 - RNA, 19 nt, Artificial Sequence
  Description of Artificial Sequence: Synthetic oligonucleotide
  Sense strand starting at position 3878 of SEQ ID NO: 317241
ccucucugaucauggagaa

SEQ ID NO: 475492 - RNA, 19 nt, Artificial Sequence
  Description of Artificial Sequence: Synthetic oligonucleotide
  Antisense Strand to SEQ ID NO: 475491
uucuccaugaucagagagg

SEQ ID NO: 475493 - RNA, 19 nt, Artificial Sequence
  Description of Artificial Sequence: Synthetic oligonucleotide
  Sense strand starting at position 3952 of SEQ ID NO: 317241
gccucaucucccgggaugu

SEQ ID NO: 475494 - RNA, 19 nt, Artificial Sequence
  Description of Artificial Sequence: Synthetic oligonucleotide
  Antisense Strand to SEQ ID NO: 475493
acaucccgggagaugaggc

SEQ ID NO: 475495 - RNA, 19 nt, Artificial Sequence
  Description of Artificial Sequence: Synthetic oligonucleotide
  Sense strand starting at position 3963 of SEQ ID NO: 317241
cgggauguccuggacuaca

SEQ ID NO: 475496 - RNA, 19 nt, Artificial Sequence
  Description of Artificial Sequence: Synthetic oligonucleotide
  Antisense Strand to SEQ ID NO: 475495
uguaguccaggacaucccg

SEQ ID NO: 475497 - RNA, 19 nt, Artificial Sequence
  Description of Artificial Sequence: Synthetic oligonucleotide
  Sense strand starting at position 15 of SEQ ID NO: 317242
ggccaugcucaggagugaa

SEQ ID NO: 475498 - RNA, 19 nt, Artificial Sequence
  Description of Artificial Sequence: Synthetic oligonucleotide
  Antisense Strand to SEQ ID NO: 475497
uucacuccugagcauggcc

SEQ ID NO: 475499 - RNA, 19 nt, Artificial Sequence
  Description of Artificial Sequence: Synthetic oligonucleotide
  Sense strand starting at position 184 of SEQ ID NO: 317242
ggaugucuucugcaucuaa

SEQ ID NO: 475500 - RNA, 19 nt, Artificial Sequence
  Description of Artificial Sequence: Synthetic oligonucleotide
  Antisense Strand to SEQ ID NO: 475499
uuagaugcagaagacaucc

SEQ ID NO: 475501 - RNA, 19 nt, Artificial Sequence
  Description of Artificial Sequence: Synthetic oligonucleotide
  Sense strand starting at position 315 of SEQ ID NO: 317242
cuggguggcuucucugagu

SEQ ID NO: 475502 - RNA, 19 nt, Artificial Sequence
  Description of Artificial Sequence: Synthetic oligonucleotide
  Antisense Strand to SEQ ID NO: 475501
acucagagaagccacccag

SEQ ID NO: 475503 - RNA, 19 nt, Artificial Sequence
  Description of Artificial Sequence: Synthetic oligonucleotide
  Sense strand starting at position 374 of SEQ ID NO: 317242
gugagcagugcagaguaaa

SEQ ID NO: 475504 - RNA, 19 nt, Artificial Sequence
  Description of Artificial Sequence: Synthetic oligonucleotide
  Antisense Strand to SEQ ID NO: 475503
uuuacucugcacugcucac

SEQ ID NO: 475505 - RNA, 19 nt, Artificial Sequence
  Description of Artificial Sequence: Synthetic oligonucleotide
  Sense strand starting at position 413 of SEQ ID NO: 317242
cuuagcaaguguucucagu

SEQ ID NO: 475506 - RNA, 19 nt, Artificial Sequence
  Description of Artificial Sequence: Synthetic oligonucleotide
  Antisense Strand to SEQ ID NO: 475505
acugagaacacuugcuaag

SEQ ID NO: 475507 - RNA, 19 nt, Artificial Sequence
  Description of Artificial Sequence: Synthetic oligonucleotide
  Sense strand starting at position 415 of SEQ ID NO: 317242
uagcaaguguucucaguaa

SEQ ID NO: 475508 - RNA, 19 nt, Artificial Sequence
  Description of Artificial Sequence: Synthetic oligonucleotide
  Antisense Strand to SEQ ID NO: 475507
uuacugagaacacuugcua

SEQ ID NO: 475509 - RNA, 19 nt, Artificial Sequence
  Description of Artificial Sequence: Synthetic oligonucleotide
  Sense strand starting at position 419 of SEQ ID NO: 317242
aaguguucucaguaaaugg

SEQ ID NO: 475510 - RNA, 19 nt, Artificial Sequence
  Description of Artificial Sequence: Synthetic oligonucleotide
  Antisense Strand to SEQ ID NO: 475509
ccauuuacugagaacacuu

SEQ ID NO: 475511 - RNA, 19 nt, Artificial Sequence
  Description of Artificial Sequence: Synthetic oligonucleotide
  Sense strand starting at position 504 of SEQ ID NO: 317242
cugucuuacccagaguucu

SEQ ID NO: 475512 - RNA, 19 nt, Artificial Sequence
  Description of Artificial Sequence: Synthetic oligonucleotide
  Antisense Strand to SEQ ID NO: 475511
agaacucuggguaagacag

SEQ ID NO: 475513 - RNA, 19 nt, Artificial Sequence
  Description of Artificial Sequence: Synthetic oligonucleotide
  Sense strand starting at position 514 of SEQ ID NO: 317242
cagaguucugcuggacaac

SEQ ID NO: 475514 - RNA, 19 nt, Artificial Sequence
  Description of Artificial Sequence: Synthetic oligonucleotide
  Antisense Strand to SEQ ID NO: 475513
guuguccagcagaacucug

SEQ ID NO: 475515 - RNA, 19 nt, Artificial Sequence
  Description of Artificial Sequence: Synthetic oligonucleotide
  Sense strand starting at position 515 of SEQ ID NO: 317242
agaguucugcuggacaaca

SEQ ID NO: 475516 - RNA, 19 nt, Artificial Sequence
  Description of Artificial Sequence: Synthetic oligonucleotide
  Antisense Strand to SEQ ID NO: 475515
uguuguccagcagaacucu

SEQ ID NO: 475517 - RNA, 19 nt, Artificial Sequence
  Description of Artificial Sequence: Synthetic oligonucleotide
  Sense strand starting at position 731 of SEQ ID NO: 317242
gugccacauccugaccauu

SEQ ID NO: 475518 - RNA, 19 nt, Artificial Sequence
  Description of Artificial Sequence: Synthetic oligonucleotide
  Antisense Strand to SEQ ID NO: 475517
aauggucaggauguggcac

SEQ ID NO: 475519 - RNA, 19 nt, Artificial Sequence
  Description of Artificial Sequence: Synthetic oligonucleotide
  Sense strand starting at position 782 of SEQ ID NO: 317242
ggcagcucuccgcaaacau

SEQ ID NO: 475520 - RNA, 19 nt, Artificial Sequence
  Description of Artificial Sequence: Synthetic oligonucleotide
  Antisense Strand to SEQ ID NO: 475519
auguuugcggagagcugcc

SEQ ID NO: 475521 - RNA, 19 nt, Artificial Sequence
  Description of Artificial Sequence: Synthetic oligonucleotide
  Sense strand starting at position 932 of SEQ ID NO: 317242
agaugugauccaggcaaga

SEQ ID NO: 475522 - RNA, 19 nt, Artificial Sequence
  Description of Artificial Sequence: Synthetic oligonucleotide
  Antisense Strand to SEQ ID NO: 475521
ucuugccuggaucacaucu

SEQ ID NO: 475523 - RNA, 19 nt, Artificial Sequence
  Description of Artificial Sequence: Synthetic oligonucleotide
  Sense strand starting at position 979 of SEQ ID NO: 317242
ccucuuguggguuggagua

SEQ ID NO: 475524 - RNA, 19 nt, Artificial Sequence
  Description of Artificial Sequence: Synthetic oligonucleotide
  Antisense Strand to SEQ ID NO: 475523
uacuccaacccacaagagg

SEQ ID NO: 475525 - RNA, 19 nt, Artificial Sequence
  Description of Artificial Sequence: Synthetic oligonucleotide
  Sense strand starting at position 1128 of SEQ ID NO: 317242
ucugguucccgcuggaaga

SEQ ID NO: 475526 - RNA, 19 nt, Artificial Sequence
  Description of Artificial Sequence: Synthetic oligonucleotide
  Antisense Strand to SEQ ID NO: 475525
ucuuccagcgggaaccaga

SEQ ID NO: 475527 - RNA, 19 nt, Artificial Sequence
  Description of Artificial Sequence: Synthetic oligonucleotide
  Sense strand starting at position 1129 of SEQ ID NO: 317242
cugguucccgcuggaagau

SEQ ID NO: 475528 - RNA, 19 nt, Artificial Sequence
  Description of Artificial Sequence: Synthetic oligonucleotide
  Antisense Strand to SEQ ID NO: 475527
aucuuccagcgggaaccag

SEQ ID NO: 475529 - RNA, 19 nt, Artificial Sequence
  Description of Artificial Sequence: Synthetic oligonucleotide
  Sense strand starting at position 1195 of SEQ ID NO: 317242
gguugaacucaacgguaga

SEQ ID NO: 475530 - RNA, 19 nt, Artificial Sequence
  Description of Artificial Sequence: Synthetic oligonucleotide
  Antisense Strand to SEQ ID NO: 475529
ucuaccguugaguucaacc

SEQ ID NO: 475531 - RNA, 19 nt, Artificial Sequence
  Description of Artificial Sequence: Synthetic oligonucleotide
  Sense strand starting at position 1438 of SEQ ID NO: 317242
ggcagagaucucgggacuu

SEQ ID NO: 475532 - RNA, 19 nt, Artificial Sequence
  Description of Artificial Sequence: Synthetic oligonucleotide
  Antisense Strand to SEQ ID NO: 475531
aagucccgagaucucugcc

SEQ ID NO: 475533 - RNA, 19 nt, Artificial Sequence
  Description of Artificial Sequence: Synthetic oligonucleotide
  Sense strand starting at position 1483 of SEQ ID NO: 317242
gcuggcagacuuuauagua

SEQ ID NO: 475534 - RNA, 19 nt, Artificial Sequence
  Description of Artificial Sequence: Synthetic oligonucleotide
  Antisense Strand to SEQ ID NO: 475533
uacuauaaagucugccagc

SEQ ID NO: 475535 - RNA, 19 nt, Artificial Sequence
  Description of Artificial Sequence: Synthetic oligonucleotide
  Sense strand starting at position 1491 of SEQ ID NO: 317242
acuuuauaguaacuggaca

SEQ ID NO: 475536 - RNA, 19 nt, Artificial Sequence
  Description of Artificial Sequence: Synthetic oligonucleotide
  Antisense Strand to SEQ ID NO: 475535
uguccaguuacuauaaagu

SEQ ID NO: 475537 - RNA, 19 nt, Artificial Sequence
  Description of Artificial Sequence: Synthetic oligonucleotide
  Sense strand starting at position 1705 of SEQ ID NO: 317242
guaggacagaggugaauua

SEQ ID NO: 475538 - RNA, 19 nt, Artificial Sequence
  Description of Artificial Sequence: Synthetic oligonucleotide
  Antisense Strand to SEQ ID NO: 475537
uaauucaccucuguccuac

SEQ ID NO: 475539 - RNA, 19 nt, Artificial Sequence
  Description of Artificial Sequence: Synthetic oligonucleotide
  Sense strand starting at position 1775 of SEQ ID NO: 317242
ugggaucgcucucuaaucu

SEQ ID NO: 475540 - RNA, 19 nt, Artificial Sequence
  Description of Artificial Sequence: Synthetic oligonucleotide
  Antisense Strand to SEQ ID NO: 475539
agauuagagagcgauccca

SEQ ID NO: 475541 - RNA, 19 nt, Artificial Sequence
  Description of Artificial Sequence: Synthetic oligonucleotide
  Sense strand starting at position 1786 of SEQ ID NO: 317242
ucuaaucucugcucgcaga

SEQ ID NO: 475542 - RNA, 19 nt, Artificial Sequence
  Description of Artificial Sequence: Synthetic oligonucleotide
  Antisense Strand to SEQ ID NO: 475541
ucugcgagcagagauuaga

SEQ ID NO: 475543 - RNA, 19 nt, Artificial Sequence
  Description of Artificial Sequence: Synthetic oligonucleotide
  Sense strand starting at position 1787 of SEQ ID NO: 317242
cuaaucucugcucgcagaa

SEQ ID NO: 475544 - RNA, 19 nt, Artificial Sequence
  Description of Artificial Sequence: Synthetic oligonucleotide
  Antisense Strand to SEQ ID NO: 475543
uucugcgagcagagauuag

SEQ ID NO: 475545 - RNA, 19 nt, Artificial Sequence
  Description of Artificial Sequence: Synthetic oligonucleotide
  Sense strand starting at position 1943 of SEQ ID NO: 317242
ugggcaaguguuuggagaa

SEQ ID NO: 475546 - RNA, 19 nt, Artificial Sequence
  Description of Artificial Sequence: Synthetic oligonucleotide
  Antisense Strand to SEQ ID NO: 475545
uucuccaaacacuugccca

SEQ ID NO: 475547 - RNA, 19 nt, Artificial Sequence
  Description of Artificial Sequence: Synthetic oligonucleotide
  Sense strand starting at position 2047 of SEQ ID NO: 317242
acgagucacagagaugagu

SEQ ID NO: 475548 - RNA, 19 nt, Artificial Sequence
  Description of Artificial Sequence: Synthetic oligonucleotide
  Antisense Strand to SEQ ID NO: 475547
acucaucucugugacucgu

SEQ ID NO: 475549 - RNA, 19 nt, Artificial Sequence
  Description of Artificial Sequence: Synthetic oligonucleotide
  Sense strand starting at position 2058 of SEQ ID NO: 317242
agaugaguggccugcacau

SEQ ID NO: 475550 - RNA, 19 nt, Artificial Sequence
  Description of Artificial Sequence: Synthetic oligonucleotide
  Antisense Strand to SEQ ID NO: 475549
augugcaggccacucaucu

SEQ ID NO: 475551 - RNA, 19 nt, Artificial Sequence
  Description of Artificial Sequence: Synthetic oligonucleotide
  Sense strand starting at position 2288 of SEQ ID NO: 317242
uuuccaguaugucuuggaa

SEQ ID NO: 475552 - RNA, 19 nt, Artificial Sequence
  Description of Artificial Sequence: Synthetic oligonucleotide
  Antisense Strand to SEQ ID NO: 475551
uuccaagacauacuggaaa

SEQ ID NO: 475553 - RNA, 19 nt, Artificial Sequence
  Description of Artificial Sequence: Synthetic oligonucleotide
  Sense strand starting at position 2291 of SEQ ID NO: 317242
ccaguaugucuuggaagau

SEQ ID NO: 475554 - RNA, 19 nt, Artificial Sequence
  Description of Artificial Sequence: Synthetic oligonucleotide
  Antisense Strand to SEQ ID NO: 475553
aucuuccaagacauacugg

SEQ ID NO: 475555 - RNA, 19 nt, Artificial Sequence
  Description of Artificial Sequence: Synthetic oligonucleotide
  Sense strand starting at position 2307 of SEQ ID NO: 317242
gauggaaaguucuagaaua

SEQ ID NO: 475556 - RNA, 19 nt, Artificial Sequence
  Description of Artificial Sequence: Synthetic oligonucleotide
  Antisense Strand to SEQ ID NO: 475555
uauucuagaacuuuccauc

SEQ ID NO: 475557 - RNA, 19 nt, Artificial Sequence
  Description of Artificial Sequence: Synthetic oligonucleotide
  Sense strand starting at position 2420 of SEQ ID NO: 317242
uggauucuguagucuccaa

SEQ ID NO: 475558 - RNA, 19 nt, Artificial Sequence
  Description of Artificial Sequence: Synthetic oligonucleotide
  Antisense Strand to SEQ ID NO: 475557
uuggagacuacagaaucca

SEQ ID NO: 475559 - RNA, 19 nt, Artificial Sequence
  Description of Artificial Sequence: Synthetic oligonucleotide
  Sense strand starting at position 2700 of SEQ ID NO: 317242
ugaugacagcucuauuguu

SEQ ID NO: 475560 - RNA, 19 nt, Artificial Sequence
  Description of Artificial Sequence: Synthetic oligonucleotide
  Antisense Strand to SEQ ID NO: 475559
aacaauagagcugucauca

SEQ ID NO: 475561 - RNA, 19 nt, Artificial Sequence
  Description of Artificial Sequence: Synthetic oligonucleotide
  Sense strand starting at position 2729 of SEQ ID NO: 317242
ggcccaagccuuggaguuu

SEQ ID NO: 475562 - RNA, 19 nt, Artificial Sequence
  Description of Artificial Sequence: Synthetic oligonucleotide
  Antisense Strand to SEQ ID NO: 475561
aaacuccaaggcuugggcc

SEQ ID NO: 475563 - RNA, 19 nt, Artificial Sequence
  Description of Artificial Sequence: Synthetic oligonucleotide
  Sense strand starting at position 3038 of SEQ ID NO: 317242
cccauuguguacucagaga

SEQ ID NO: 475564 - RNA, 19 nt, Artificial Sequence
  Description of Artificial Sequence: Synthetic oligonucleotide
  Antisense Strand to SEQ ID NO: 475563
ucucugaguacacaauggg

SEQ ID NO: 475565 - RNA, 19 nt, Artificial Sequence
  Description of Artificial Sequence: Synthetic oligonucleotide
  Sense strand starting at position 3059 of SEQ ID NO: 317242
agcacagaguguucuaaag

SEQ ID NO: 475566 - RNA, 19 nt, Artificial Sequence
  Description of Artificial Sequence: Synthetic oligonucleotide
  Antisense Strand to SEQ ID NO: 475565
cuuuagaacacucugugcu

SEQ ID NO: 475567 - RNA, 19 nt, Artificial Sequence
  Description of Artificial Sequence: Synthetic oligonucleotide
  Sense strand starting at position 3448 of SEQ ID NO: 317242
cacagaaucgcagaugcaa

SEQ ID NO: 475568 - RNA, 19 nt, Artificial Sequence
  Description of Artificial Sequence: Synthetic oligonucleotide
  Antisense Strand to SEQ ID NO: 475567
uugcaucugcgauucugug

SEQ ID NO: 475569 - RNA, 19 nt, Artificial Sequence
  Description of Artificial Sequence: Synthetic oligonucleotide
  Sense strand starting at position 3457 of SEQ ID NO: 317242
gcagaugcaagaugaugaa

SEQ ID NO: 475570 - RNA, 19 nt, Artificial Sequence
  Description of Artificial Sequence: Synthetic oligonucleotide
  Antisense Strand to SEQ ID NO: 475569
uucaucaucuugcaucugc

SEQ ID NO: 475571 - RNA, 19 nt, Artificial Sequence
  Description of Artificial Sequence: Synthetic oligonucleotide
  Sense strand starting at position 3735 of SEQ ID NO: 317242
cuuggaucaccuugcugaa

SEQ ID NO: 475572 - RNA, 19 nt, Artificial Sequence
  Description of Artificial Sequence: Synthetic oligonucleotide
  Antisense Strand to SEQ ID NO: 475571
uucagcaaggugauccaag

SEQ ID NO: 475573 - RNA, 19 nt, Artificial Sequence
  Description of Artificial Sequence: Synthetic oligonucleotide
  Sense strand starting at position 3856 of SEQ ID NO: 317242
ggcucucuuccuggccaga

SEQ ID NO: 475574 - RNA, 19 nt, Artificial Sequence
  Description of Artificial Sequence: Synthetic oligonucleotide
  Antisense Strand to SEQ ID NO: 475573
ucuggccaggaagagagcc

SEQ ID NO: 475575 - RNA, 19 nt, Artificial Sequence
  Description of Artificial Sequence: Synthetic oligonucleotide
  Sense strand starting at position 3940 of SEQ ID NO: 317242
guagccaggccagagauau

SEQ ID NO: 475576 - RNA, 19 nt, Artificial Sequence
  Description of Artificial Sequence: Synthetic oligonucleotide
  Antisense Strand to SEQ ID NO: 475575
auaucucuggccuggcuac

SEQ ID NO: 475577 - RNA, 19 nt, Artificial Sequence
  Description of Artificial Sequence: Synthetic oligonucleotide
  Sense strand starting at position 100 of SEQ ID NO: 317243
ccaggaaugugagauacua

SEQ ID NO: 475578 - RNA, 19 nt, Artificial Sequence
  Description of Artificial Sequence: Synthetic oligonucleotide
  Antisense Strand to SEQ ID NO: 475577
uaguaucucacauuccugg

SEQ ID NO: 475579 - RNA, 19 nt, Artificial Sequence
  Description of Artificial Sequence: Synthetic oligonucleotide
  Sense strand starting at position 108 of SEQ ID NO: 317243
gugagauacuacuuaaucc

SEQ ID NO: 475580 - RNA, 19 nt, Artificial Sequence
  Description of Artificial Sequence: Synthetic oligonucleotide
  Antisense Strand to SEQ ID NO: 475579
ggauuaaguaguaucucac

SEQ ID NO: 475581 - RNA, 19 nt, Artificial Sequence
  Description of Artificial Sequence: Synthetic oligonucleotide
  Sense strand starting at position 145 of SEQ ID NO: 317243
gccucagccuuccaggauu

SEQ ID NO: 475582 - RNA, 19 nt, Artificial Sequence
  Description of Artificial Sequence: Synthetic oligonucleotide
  Antisense Strand to SEQ ID NO: 475581
aauccuggaaggcugaggc

SEQ ID NO: 475583 - RNA, 19 nt, Artificial Sequence
  Description of Artificial Sequence: Synthetic oligonucleotide
  Sense strand starting at position 208 of SEQ ID NO: 317243
ccgauagauucccgugcga

SEQ ID NO: 475584 - RNA, 19 nt, Artificial Sequence
  Description of Artificial Sequence: Synthetic oligonucleotide
  Antisense Strand to SEQ ID NO: 475583
ucgcacgggaaucuaucgg

SEQ ID NO: 475585 - RNA, 19 nt, Artificial Sequence
  Description of Artificial Sequence: Synthetic oligonucleotide
  Sense strand starting at position 210 of SEQ ID NO: 317243
gauagauucccgugcgaca

SEQ ID NO: 475586 - RNA, 19 nt, Artificial Sequence
  Description of Artificial Sequence: Synthetic oligonucleotide
  Antisense Strand to SEQ ID NO: 475585
ugucgcacgggaaucuauc

SEQ ID NO: 475587 - RNA, 19 nt, Artificial Sequence
  Description of Artificial Sequence: Synthetic oligonucleotide
  Sense strand starting at position 212 of SEQ ID NO: 317243
uagauucccgugcgacaga

SEQ ID NO: 475588 - RNA, 19 nt, Artificial Sequence
  Description of Artificial Sequence: Synthetic oligonucleotide
  Antisense Strand to SEQ ID NO: 475587
ucugucgcacgggaaucua

SEQ ID NO: 475589 - RNA, 19 nt, Artificial Sequence
  Description of Artificial Sequence: Synthetic oligonucleotide
  Sense strand starting at position 223 of SEQ ID NO: 317243
gcgacagagugaucaacca

SEQ ID NO: 475590 - RNA, 19 nt, Artificial Sequence
  Description of Artificial Sequence: Synthetic oligonucleotide
  Antisense Strand to SEQ ID NO: 475589
ugguugaucacucugucgc

SEQ ID NO: 475591 - RNA, 19 nt, Artificial Sequence
  Description of Artificial Sequence: Synthetic oligonucleotide
  Sense strand starting at position 300 of SEQ ID NO: 317243
gcauccuugccaggaguuu

SEQ ID NO: 475592 - RNA, 19 nt, Artificial Sequence
  Description of Artificial Sequence: Synthetic oligonucleotide
  Antisense Strand to SEQ ID NO: 475591
aaacuccuggcaaggaugc

SEQ ID NO: 475593 - RNA, 19 nt, Artificial Sequence
  Description of Artificial Sequence: Synthetic oligonucleotide
  Sense strand starting at position 301 of SEQ ID NO: 317243
cauccuugccaggaguuua

SEQ ID NO: 475594 - RNA, 19 nt, Artificial Sequence
  Description of Artificial Sequence: Synthetic oligonucleotide
  Antisense Strand to SEQ ID NO: 475593
uaaacuccuggcaaggaug

SEQ ID NO: 475595 - RNA, 19 nt, Artificial Sequence
  Description of Artificial Sequence: Synthetic oligonucleotide
  Sense strand starting at position 311 of SEQ ID NO: 317243
aggaguuuaucaucccgua

SEQ ID NO: 475596 - RNA, 19 nt, Artificial Sequence
  Description of Artificial Sequence: Synthetic oligonucleotide
  Antisense Strand to SEQ ID NO: 475595
uacgggaugauaaacuccu

SEQ ID NO: 475597 - RNA, 19 nt, Artificial Sequence
  Description of Artificial Sequence: Synthetic oligonucleotide
  Sense strand starting at position 404 of SEQ ID NO: 317243
gcggaaugagguuaucacu

SEQ ID NO: 475598 - RNA, 19 nt, Artificial Sequence
  Description of Artificial Sequence: Synthetic oligonucleotide
  Antisense Strand to SEQ ID NO: 475597
agugauaaccucauuccgc

SEQ ID NO: 475599 - RNA, 19 nt, Artificial Sequence
  Description of Artificial Sequence: Synthetic oligonucleotide
  Sense strand starting at position 411 of SEQ ID NO: 317243
gagguuaucacuugggagg

SEQ ID NO: 475600 - RNA, 19 nt, Artificial Sequence
  Description of Artificial Sequence: Synthetic oligonucleotide
  Antisense Strand to SEQ ID NO: 475599
ccucccaagugauaaccuc

SEQ ID NO: 475601 - RNA, 19 nt, Artificial Sequence
  Description of Artificial Sequence: Synthetic oligonucleotide
  Sense strand starting at position 412 of SEQ ID NO: 317243
agguuaucacuugggaggu

SEQ ID NO: 475602 - RNA, 19 nt, Artificial Sequence
  Description of Artificial Sequence: Synthetic oligonucleotide
  Antisense Strand to SEQ ID NO: 475601
accucccaagugauaaccu

SEQ ID NO: 475603 - RNA, 19 nt, Artificial Sequence
  Description of Artificial Sequence: Synthetic oligonucleotide
  Sense strand starting at position 743 of SEQ ID NO: 317243
agggaauugcugcaaugga

SEQ ID NO: 475604 - RNA, 19 nt, Artificial Sequence
  Description of Artificial Sequence: Synthetic oligonucleotide
  Antisense Strand to SEQ ID NO: 475603
uccauugcagcaauucccu

SEQ ID NO: 475605 - RNA, 19 nt, Artificial Sequence
  Description of Artificial Sequence: Synthetic oligonucleotide
  Sense strand starting at position 920 of SEQ ID NO: 317243
uccuauuucugucacagca

SEQ ID NO: 475606 - RNA, 19 nt, Artificial Sequence
  Description of Artificial Sequence: Synthetic oligonucleotide
  Antisense Strand to SEQ ID NO: 475605
ugcugugacagaaauagga

SEQ ID NO: 475607 - RNA, 19 nt, Artificial Sequence
  Description of Artificial Sequence: Synthetic oligonucleotide
  Sense strand starting at position 1288 of SEQ ID NO: 317243
gucgacaacuugggaucaa

SEQ ID NO: 475608 - RNA, 19 nt, Artificial Sequence
  Description of Artificial Sequence: Synthetic oligonucleotide
  Antisense Strand to SEQ ID NO: 475607
uugaucccaaguugucgac

SEQ ID NO: 475609 - RNA, 19 nt, Artificial Sequence
  Description of Artificial Sequence: Synthetic oligonucleotide
  Sense strand starting at position 1289 of SEQ ID NO: 317243
ucgacaacuugggaucaau

SEQ ID NO: 475610 - RNA, 19 nt, Artificial Sequence
  Description of Artificial Sequence: Synthetic oligonucleotide
  Antisense Strand to SEQ ID NO: 475609
auugaucccaaguugucga

SEQ ID NO: 475611 - RNA, 19 nt, Artificial Sequence
  Description of Artificial Sequence: Synthetic oligonucleotide
  Sense strand starting at position 1465 of SEQ ID NO: 317243
cugagcuggcuuuaaaguu

SEQ ID NO: 475612 - RNA, 19 nt, Artificial Sequence
  Description of Artificial Sequence: Synthetic oligonucleotide
  Antisense Strand to SEQ ID NO: 475611
aacuuuaaagccagcucag

SEQ ID NO: 475613 - RNA, 19 nt, Artificial Sequence
  Description of Artificial Sequence: Synthetic oligonucleotide
  Sense strand starting at position 1573 of SEQ ID NO: 317243
gcgcguguguggugguuau

SEQ ID NO: 475614 - RNA, 19 nt, Artificial Sequence
  Description of Artificial Sequence: Synthetic oligonucleotide
  Antisense Strand to SEQ ID NO: 475613
auaaccaccacacacgcgc

SEQ ID NO: 475615 - RNA, 19 nt, Artificial Sequence
  Description of Artificial Sequence: Synthetic oligonucleotide
  Sense strand starting at position 1574 of SEQ ID NO: 317243
cgcguguguggugguuauu

SEQ ID NO: 475616 - RNA, 19 nt, Artificial Sequence
  Description of Artificial Sequence: Synthetic oligonucleotide
  Antisense Strand to SEQ ID NO: 475615
aauaaccaccacacacgcg

SEQ ID NO: 475617 - RNA, 19 nt, Artificial Sequence
  Description of Artificial Sequence: Synthetic oligonucleotide
  Sense strand starting at position 1576 of SEQ ID NO: 317243
cguguguggugguuauuua

SEQ ID NO: 475618 - RNA, 19 nt, Artificial Sequence
  Description of Artificial Sequence: Synthetic oligonucleotide
  Antisense Strand to SEQ ID NO: 475617
uaaauaaccaccacacacg

SEQ ID NO: 475619 - RNA, 19 nt, Artificial Sequence
  Description of Artificial Sequence: Synthetic oligonucleotide
  Sense strand starting at position 1577 of SEQ ID NO: 317243
guguguggugguuauuuau

SEQ ID NO: 475620 - RNA, 19 nt, Artificial Sequence
  Description of Artificial Sequence: Synthetic oligonucleotide
  Antisense Strand to SEQ ID NO: 475619
auaaauaaccaccacacac

SEQ ID NO: 475621 - RNA, 19 nt, Artificial Sequence
  Description of Artificial Sequence: Synthetic oligonucleotide
  Sense strand starting at position 2196 of SEQ ID NO: 317243
cggaguuccucgcguucau

SEQ ID NO: 475622 - RNA, 19 nt, Artificial Sequence
  Description of Artificial Sequence: Synthetic oligonucleotide
  Antisense Strand to SEQ ID NO: 475621
augaacgcgaggaacuccg

SEQ ID NO: 475623 - RNA, 19 nt, Artificial Sequence
  Description of Artificial Sequence: Synthetic oligonucleotide
  Sense strand starting at position 2197 of SEQ ID NO: 317243
ggaguuccucgcguucauu

SEQ ID NO: 475624 - RNA, 19 nt, Artificial Sequence
  Description of Artificial Sequence: Synthetic oligonucleotide
  Antisense Strand to SEQ ID NO: 475623
aaugaacgcgaggaacucc

SEQ ID NO: 475625 - RNA, 19 nt, Artificial Sequence
  Description of Artificial Sequence: Synthetic oligonucleotide
  Sense strand starting at position 2524 of SEQ ID NO: 317243
ggguuaagccgcaguguga

SEQ ID NO: 475626 - RNA, 19 nt, Artificial Sequence
  Description of Artificial Sequence: Synthetic oligonucleotide
  Antisense Strand to SEQ ID NO: 475625
ucacacugcggcuuaaccc

SEQ ID NO: 475627 - RNA, 19 nt, Artificial Sequence
  Description of Artificial Sequence: Synthetic oligonucleotide
  Sense strand starting at position 2713 of SEQ ID NO: 317243
gcagcuguccagggaggau

SEQ ID NO: 475628 - RNA, 19 nt, Artificial Sequence
  Description of Artificial Sequence: Synthetic oligonucleotide
  Antisense Strand to SEQ ID NO: 475627
auccucccuggacagcugc

SEQ ID NO: 475629 - RNA, 19 nt, Artificial Sequence
  Description of Artificial Sequence: Synthetic oligonucleotide
  Sense strand starting at position 2754 of SEQ ID NO: 317243
caacuuaccuugcggagaa

SEQ ID NO: 475630 - RNA, 19 nt, Artificial Sequence
  Description of Artificial Sequence: Synthetic oligonucleotide
  Antisense Strand to SEQ ID NO: 475629
uucuccgcaagguaaguug

SEQ ID NO: 475631 - RNA, 19 nt, Artificial Sequence
  Description of Artificial Sequence: Synthetic oligonucleotide
  Sense strand starting at position 3601 of SEQ ID NO: 317243
agacaaggauuagauuaaa

SEQ ID NO: 475632 - RNA, 19 nt, Artificial Sequence
  Description of Artificial Sequence: Synthetic oligonucleotide
  Antisense Strand to SEQ ID NO: 475631
uuuaaucuaauccuugucu

SEQ ID NO: 475633 - RNA, 19 nt, Artificial Sequence
  Description of Artificial Sequence: Synthetic oligonucleotide
  Sense strand starting at position 3642 of SEQ ID NO: 317243
ugaguaagagacugauugu

SEQ ID NO: 475634 - RNA, 19 nt, Artificial Sequence
  Description of Artificial Sequence: Synthetic oligonucleotide
  Antisense Strand to SEQ ID NO: 475633
acaaucagucucuuacuca

SEQ ID NO: 475635 - RNA, 19 nt, Artificial Sequence
  Description of Artificial Sequence: Synthetic oligonucleotide
  Sense strand starting at position 3645 of SEQ ID NO: 317243
guaagagacugauugugcu

SEQ ID NO: 475636 - RNA, 19 nt, Artificial Sequence
  Description of Artificial Sequence: Synthetic oligonucleotide
  Antisense Strand to SEQ ID NO: 475635
agcacaaucagucucuuac

SEQ ID NO: 475637 - RNA, 19 nt, Artificial Sequence
  Description of Artificial Sequence: Synthetic oligonucleotide
  Sense strand starting at position 3667 of SEQ ID NO: 317243
gcgugacuuugauguggac

SEQ ID NO: 475638 - RNA, 19 nt, Artificial Sequence
  Description of Artificial Sequence: Synthetic oligonucleotide
  Antisense Strand to SEQ ID NO: 475637
guccacaucaaagucacgc

SEQ ID NO: 475639 - RNA, 19 nt, Artificial Sequence
  Description of Artificial Sequence: Synthetic oligonucleotide
  Sense strand starting at position 3786 of SEQ ID NO: 317243
cugagauucugcugcccaa

SEQ ID NO: 475640 - RNA, 19 nt, Artificial Sequence
  Description of Artificial Sequence: Synthetic oligonucleotide
  Antisense Strand to SEQ ID NO: 475639
uugggcagcagaaucucag

SEQ ID NO: 475641 - RNA, 19 nt, Artificial Sequence
  Description of Artificial Sequence: Synthetic oligonucleotide
  Sense strand starting at position 3885 of SEQ ID NO: 317243
cagacuuugugguggguaa

SEQ ID NO: 475642 - RNA, 19 nt, Artificial Sequence
  Description of Artificial Sequence: Synthetic oligonucleotide
  Antisense Strand to SEQ ID NO: 475641
uuacccaccacaaagucug

SEQ ID NO: 475643 - RNA, 19 nt, Artificial Sequence
  Description of Artificial Sequence: Synthetic oligonucleotide
  Sense strand starting at position 3886 of SEQ ID NO: 317243
agacuuugugguggguaau

SEQ ID NO: 475644 - RNA, 19 nt, Artificial Sequence
  Description of Artificial Sequence: Synthetic oligonucleotide
  Antisense Strand to SEQ ID NO: 475643
auuacccaccacaaagucu

SEQ ID NO: 475645 - RNA, 19 nt, Artificial Sequence
  Description of Artificial Sequence: Synthetic oligonucleotide
  Sense strand starting at position 3887 of SEQ ID NO: 317243
gacuuugugguggguaauu

SEQ ID NO: 475646 - RNA, 19 nt, Artificial Sequence
  Description of Artificial Sequence: Synthetic oligonucleotide
  Antisense Strand to SEQ ID NO: 475645
aauuacccaccacaaaguc

SEQ ID NO: 475647 - RNA, 19 nt, Artificial Sequence
  Description of Artificial Sequence: Synthetic oligonucleotide
  Sense strand starting at position 369 of SEQ ID NO: 317244
ucauuuggugaugguugua

SEQ ID NO: 475648 - RNA, 19 nt, Artificial Sequence
  Description of Artificial Sequence: Synthetic oligonucleotide
  Antisense Strand to SEQ ID NO: 475647
uacaaccaucaccaaauga

SEQ ID NO: 475649 - RNA, 19 nt, Artificial Sequence
  Description of Artificial Sequence: Synthetic oligonucleotide
  Sense strand starting at position 372 of SEQ ID NO: 317244
uuuggugaugguuguauuu

SEQ ID NO: 475650 - RNA, 19 nt, Artificial Sequence
  Description of Artificial Sequence: Synthetic oligonucleotide
  Antisense Strand to SEQ ID NO: 475649
aaauacaaccaucaccaaa

SEQ ID NO: 475651 - RNA, 19 nt, Artificial Sequence
  Description of Artificial Sequence: Synthetic oligonucleotide
  Sense strand starting at position 658 of SEQ ID NO: 317244
guuauaugcagaugaaagg

SEQ ID NO: 475652 - RNA, 19 nt, Artificial Sequence
  Description of Artificial Sequence: Synthetic oligonucleotide
  Antisense Strand to SEQ ID NO: 475651
ccuuucaucugcauauaac

SEQ ID NO: 475653 - RNA, 19 nt, Artificial Sequence
  Description of Artificial Sequence: Synthetic oligonucleotide
  Sense strand starting at position 955 of SEQ ID NO: 317244
guaacuuucuggcuggaga

SEQ ID NO: 475654 - RNA, 19 nt, Artificial Sequence
  Description of Artificial Sequence: Synthetic oligonucleotide
  Antisense Strand to SEQ ID NO: 475653
ucuccagccagaaaguuac

SEQ ID NO: 475655 - RNA, 19 nt, Artificial Sequence
  Description of Artificial Sequence: Synthetic oligonucleotide
  Sense strand starting at position 957 of SEQ ID NO: 317244
aacuuucuggcuggagaga

SEQ ID NO: 475656 - RNA, 19 nt, Artificial Sequence
  Description of Artificial Sequence: Synthetic oligonucleotide
  Antisense Strand to SEQ ID NO: 475655
ucucuccagccagaaaguu

SEQ ID NO: 475657 - RNA, 19 nt, Artificial Sequence
  Description of Artificial Sequence: Synthetic oligonucleotide
  Sense strand starting at position 958 of SEQ ID NO: 317244
acuuucuggcuggagagau

SEQ ID NO: 475658 - RNA, 19 nt, Artificial Sequence
  Description of Artificial Sequence: Synthetic oligonucleotide
  Antisense Strand to SEQ ID NO: 475657
aucucuccagccagaaagu

SEQ ID NO: 475659 - RNA, 19 nt, Artificial Sequence
  Description of Artificial Sequence: Synthetic oligonucleotide
  Sense strand starting at position 970 of SEQ ID NO: 317244
gagagaucgaaccgauguu

SEQ ID NO: 475660 - RNA, 19 nt, Artificial Sequence
  Description of Artificial Sequence: Synthetic oligonucleotide
  Antisense Strand to SEQ ID NO: 475659
aacaucgguucgaucucuc

SEQ ID NO: 475661 - RNA, 19 nt, Artificial Sequence
  Description of Artificial Sequence: Synthetic oligonucleotide
  Sense strand starting at position 1034 of SEQ ID NO: 317244
acucaaagaucaucugguu

SEQ ID NO: 475662 - RNA, 19 nt, Artificial Sequence
  Description of Artificial Sequence: Synthetic oligonucleotide
  Antisense Strand to SEQ ID NO: 475661
aaccagaugaucuuugagu

SEQ ID NO: 475663 - RNA, 19 nt, Artificial Sequence
  Description of Artificial Sequence: Synthetic oligonucleotide
  Sense strand starting at position 1095 of SEQ ID NO: 317244
gaaggaaauccugggcgua

SEQ ID NO: 475664 - RNA, 19 nt, Artificial Sequence
  Description of Artificial Sequence: Synthetic oligonucleotide
  Antisense Strand to SEQ ID NO: 475663
uacgcccaggauuuccuuc

SEQ ID NO: 475665 - RNA, 19 nt, Artificial Sequence
  Description of Artificial Sequence: Synthetic oligonucleotide
  Sense strand starting at position 1096 of SEQ ID NO: 317244
aaggaaauccugggcguau

SEQ ID NO: 475666 - RNA, 19 nt, Artificial Sequence
  Description of Artificial Sequence: Synthetic oligonucleotide
  Antisense Strand to SEQ ID NO: 475665
auacgcccaggauuuccuu

SEQ ID NO: 475667 - RNA, 19 nt, Artificial Sequence
  Description of Artificial Sequence: Synthetic oligonucleotide
  Sense strand starting at position 1100 of SEQ ID NO: 317244
aaauccugggcguaugaau

SEQ ID NO: 475668 - RNA, 19 nt, Artificial Sequence
  Description of Artificial Sequence: Synthetic oligonucleotide
  Antisense Strand to SEQ ID NO: 475667
auucauacgcccaggauuu

SEQ ID NO: 475669 - RNA, 19 nt, Artificial Sequence
  Description of Artificial Sequence: Synthetic oligonucleotide
  Sense strand starting at position 1107 of SEQ ID NO: 317244
gggcguaugaaugagauuc

SEQ ID NO: 475670 - RNA, 19 nt, Artificial Sequence
  Description of Artificial Sequence: Synthetic oligonucleotide
  Antisense Strand to SEQ ID NO: 475669
gaaucucauucauacgccc

SEQ ID NO: 475671 - RNA, 19 nt, Artificial Sequence
  Description of Artificial Sequence: Synthetic oligonucleotide
  Sense strand starting at position 2309 of SEQ ID NO: 317244
ucaaguuccugacucugaa

SEQ ID NO: 475672 - RNA, 19 nt, Artificial Sequence
  Description of Artificial Sequence: Synthetic oligonucleotide
  Antisense Strand to SEQ ID NO: 475671
uucagagucaggaacuuga

SEQ ID NO: 475673 - RNA, 19 nt, Artificial Sequence
  Description of Artificial Sequence: Synthetic oligonucleotide
  Sense strand starting at position 2369 of SEQ ID NO: 317244
uaggaaauuuccgugcuuc

SEQ ID NO: 475674 - RNA, 19 nt, Artificial Sequence
  Description of Artificial Sequence: Synthetic oligonucleotide
  Antisense Strand to SEQ ID NO: 475673
gaagcacggaaauuuccua

SEQ ID NO: 475675 - RNA, 19 nt, Artificial Sequence
  Description of Artificial Sequence: Synthetic oligonucleotide
  Sense strand starting at position 2370 of SEQ ID NO: 317244
aggaaauuuccgugcuucu

SEQ ID NO: 475676 - RNA, 19 nt, Artificial Sequence
  Description of Artificial Sequence: Synthetic oligonucleotide
  Antisense Strand to SEQ ID NO: 475675
agaagcacggaaauuuccu

SEQ ID NO: 475677 - RNA, 19 nt, Artificial Sequence
  Description of Artificial Sequence: Synthetic oligonucleotide
  Sense strand starting at position 2388 of SEQ ID NO: 317244
ucacauuugaguuaugcgu

SEQ ID NO: 475678 - RNA, 19 nt, Artificial Sequence
  Description of Artificial Sequence: Synthetic oligonucleotide
  Antisense Strand to SEQ ID NO: 475677
acgcauaacucaaauguga

SEQ ID NO: 475679 - RNA, 19 nt, Artificial Sequence
  Description of Artificial Sequence: Synthetic oligonucleotide
  Sense strand starting at position 2392 of SEQ ID NO: 317244
auuugaguuaugcgucuuu

SEQ ID NO: 475680 - RNA, 19 nt, Artificial Sequence
  Description of Artificial Sequence: Synthetic oligonucleotide
  Antisense Strand to SEQ ID NO: 475679
aaagacgcauaacucaaau

SEQ ID NO: 475681 - RNA, 19 nt, Artificial Sequence
  Description of Artificial Sequence: Synthetic oligonucleotide
  Sense strand starting at position 2395 of SEQ ID NO: 317244
ugaguuaugcgucuuugcu

SEQ ID NO: 475682 - RNA, 19 nt, Artificial Sequence
  Description of Artificial Sequence: Synthetic oligonucleotide
  Antisense Strand to SEQ ID NO: 475681
agcaaagacgcauaacuca

SEQ ID NO: 475683 - RNA, 19 nt, Artificial Sequence
  Description of Artificial Sequence: Synthetic oligonucleotide
  Sense strand starting at position 2396 of SEQ ID NO: 317244
gaguuaugcgucuuugcuu

SEQ ID NO: 475684 - RNA, 19 nt, Artificial Sequence
  Description of Artificial Sequence: Synthetic oligonucleotide
  Antisense Strand to SEQ ID NO: 475683
aagcaaagacgcauaacuc

SEQ ID NO: 475685 - RNA, 19 nt, Artificial Sequence
  Description of Artificial Sequence: Synthetic oligonucleotide
  Sense strand starting at position 2444 of SEQ ID NO: 317244
uuaauaagggaucgcaaag

SEQ ID NO: 475686 - RNA, 19 nt, Artificial Sequence
  Description of Artificial Sequence: Synthetic oligonucleotide
  Antisense Strand to SEQ ID NO: 475685
cuuugcgaucccuuauuaa

SEQ ID NO: 475687 - RNA, 19 nt, Artificial Sequence
  Description of Artificial Sequence: Synthetic oligonucleotide
  Sense strand starting at position 2460 of SEQ ID NO: 317244
aaguauguugauuaacgua

SEQ ID NO: 475688 - RNA, 19 nt, Artificial Sequence
  Description of Artificial Sequence: Synthetic oligonucleotide
  Antisense Strand to SEQ ID NO: 475687
uacguuaaucaacauacuu

SEQ ID NO: 475689 - RNA, 19 nt, Artificial Sequence
  Description of Artificial Sequence: Synthetic oligonucleotide
  Sense strand starting at position 2465 of SEQ ID NO: 317244
uguugauuaacguacggaa

SEQ ID NO: 475690 - RNA, 19 nt, Artificial Sequence
  Description of Artificial Sequence: Synthetic oligonucleotide
  Antisense Strand to SEQ ID NO: 475689
uuccguacguuaaucaaca

SEQ ID NO: 475691 - RNA, 19 nt, Artificial Sequence
  Description of Artificial Sequence: Synthetic oligonucleotide
  Sense strand starting at position 2541 of SEQ ID NO: 317244
acauaaccucugggaaguu

SEQ ID NO: 475692 - RNA, 19 nt, Artificial Sequence
  Description of Artificial Sequence: Synthetic oligonucleotide
  Antisense Strand to SEQ ID NO: 475691
aacuucccagagguuaugu

SEQ ID NO: 475693 - RNA, 19 nt, Artificial Sequence
  Description of Artificial Sequence: Synthetic oligonucleotide
  Sense strand starting at position 2574 of SEQ ID NO: 317244
gguacaauauuccugagac

SEQ ID NO: 475694 - RNA, 19 nt, Artificial Sequence
  Description of Artificial Sequence: Synthetic oligonucleotide
  Antisense Strand to SEQ ID NO: 475693
gucucaggaauauuguacc

SEQ ID NO: 475695 - RNA, 19 nt, Artificial Sequence
  Description of Artificial Sequence: Synthetic oligonucleotide
  Sense strand starting at position 2589 of SEQ ID NO: 317244
agaccucccuugcuugaua

SEQ ID NO: 475696 - RNA, 19 nt, Artificial Sequence
  Description of Artificial Sequence: Synthetic oligonucleotide
  Antisense Strand to SEQ ID NO: 475695
uaucaagcaagggaggucu

SEQ ID NO: 475697 - RNA, 19 nt, Artificial Sequence
  Description of Artificial Sequence: Synthetic oligonucleotide
  Sense strand starting at position 2600 of SEQ ID NO: 317244
gcuugauaaucauuagacg

SEQ ID NO: 475698 - RNA, 19 nt, Artificial Sequence
  Description of Artificial Sequence: Synthetic oligonucleotide
  Antisense Strand to SEQ ID NO: 475697
cgucuaaugauuaucaagc

SEQ ID NO: 475699 - RNA, 19 nt, Artificial Sequence
  Description of Artificial Sequence: Synthetic oligonucleotide
  Sense strand starting at position 2601 of SEQ ID NO: 317244
cuugauaaucauuagacgu

SEQ ID NO: 475700 - RNA, 19 nt, Artificial Sequence
  Description of Artificial Sequence: Synthetic oligonucleotide
  Antisense Strand to SEQ ID NO: 475699
acgucuaaugauuaucaag

SEQ ID NO: 475701 - RNA, 19 nt, Artificial Sequence
  Description of Artificial Sequence: Synthetic oligonucleotide
  Sense strand starting at position 2645 of SEQ ID NO: 317244
guggauuugugggagacag

SEQ ID NO: 475702 - RNA, 19 nt, Artificial Sequence
  Description of Artificial Sequence: Synthetic oligonucleotide
  Antisense Strand to SEQ ID NO: 475701
cugucucccacaaauccac

SEQ ID NO: 475703 - RNA, 19 nt, Artificial Sequence
  Description of Artificial Sequence: Synthetic oligonucleotide
  Sense strand starting at position 2981 of SEQ ID NO: 317244
gcaggaaacccuuggaaca

SEQ ID NO: 475704 - RNA, 19 nt, Artificial Sequence
  Description of Artificial Sequence: Synthetic oligonucleotide
  Antisense Strand to SEQ ID NO: 475703
uguuccaaggguuuccugc

SEQ ID NO: 475705 - RNA, 19 nt, Artificial Sequence
  Description of Artificial Sequence: Synthetic oligonucleotide
  Sense strand starting at position 2994 of SEQ ID NO: 317244
ggaacauaguuccuaagca

SEQ ID NO: 475706 - RNA, 19 nt, Artificial Sequence
  Description of Artificial Sequence: Synthetic oligonucleotide
  Antisense Strand to SEQ ID NO: 475705
ugcuuaggaacuauguucc

SEQ ID NO: 475707 - RNA, 19 nt, Artificial Sequence
  Description of Artificial Sequence: Synthetic oligonucleotide
  Sense strand starting at position 3054 of SEQ ID NO: 317244
cucccagguugaucuugaa

SEQ ID NO: 475708 - RNA, 19 nt, Artificial Sequence
  Description of Artificial Sequence: Synthetic oligonucleotide
  Antisense Strand to SEQ ID NO: 475707
uucaagaucaaccugggag

SEQ ID NO: 475709 - RNA, 19 nt, Artificial Sequence
  Description of Artificial Sequence: Synthetic oligonucleotide
  Sense strand starting at position 3099 of SEQ ID NO: 317244
ggcguuggccuccugaagu

SEQ ID NO: 475710 - RNA, 19 nt, Artificial Sequence
  Description of Artificial Sequence: Synthetic oligonucleotide
  Antisense Strand to SEQ ID NO: 475709
acuucaggaggccaacgcc

SEQ ID NO: 475711 - RNA, 19 nt, Artificial Sequence
  Description of Artificial Sequence: Synthetic oligonucleotide
  Sense strand starting at position 3237 of SEQ ID NO: 317244
gcaauauucggagacuuua

SEQ ID NO: 475712 - RNA, 19 nt, Artificial Sequence
  Description of Artificial Sequence: Synthetic oligonucleotide
  Antisense Strand to SEQ ID NO: 475711
uaaagucuccgaauauugc

SEQ ID NO: 475713 - RNA, 19 nt, Artificial Sequence
  Description of Artificial Sequence: Synthetic oligonucleotide
  Sense strand starting at position 3358 of SEQ ID NO: 317244
uuugacuucccauggaaga

SEQ ID NO: 475714 - RNA, 19 nt, Artificial Sequence
  Description of Artificial Sequence: Synthetic oligonucleotide
  Antisense Strand to SEQ ID NO: 475713
ucuuccaugggaagucaaa

SEQ ID NO: 475715 - RNA, 19 nt, Artificial Sequence
  Description of Artificial Sequence: Synthetic oligonucleotide
  Sense strand starting at position 3359 of SEQ ID NO: 317244
uugacuucccauggaagau

SEQ ID NO: 475716 - RNA, 19 nt, Artificial Sequence
  Description of Artificial Sequence: Synthetic oligonucleotide
  Antisense Strand to SEQ ID NO: 475715
aucuuccaugggaagucaa

SEQ ID NO: 475717 - RNA, 19 nt, Artificial Sequence
  Description of Artificial Sequence: Synthetic oligonucleotide
  Sense strand starting at position 3439 of SEQ ID NO: 317244
ggaguuccauggccuugaa

SEQ ID NO: 475718 - RNA, 19 nt, Artificial Sequence
  Description of Artificial Sequence: Synthetic oligonucleotide
  Antisense Strand to SEQ ID NO: 475717
uucaaggccauggaacucc

SEQ ID NO: 475719 - RNA, 19 nt, Artificial Sequence
  Description of Artificial Sequence: Synthetic oligonucleotide
  Sense strand starting at position 3478 of SEQ ID NO: 317244
auaugucuugaaugaaagu

SEQ ID NO: 475720 - RNA, 19 nt, Artificial Sequence
  Description of Artificial Sequence: Synthetic oligonucleotide
  Antisense Strand to SEQ ID NO: 475719
acuuucauucaagacauau

SEQ ID NO: 475721 - RNA, 19 nt, Artificial Sequence
  Description of Artificial Sequence: Synthetic oligonucleotide
  Sense strand starting at position 3487 of SEQ ID NO: 317244
gaaugaaagucacuucuga

SEQ ID NO: 475722 - RNA, 19 nt, Artificial Sequence
  Description of Artificial Sequence: Synthetic oligonucleotide
  Antisense Strand to SEQ ID NO: 475721
ucagaagugacuuucauuc

SEQ ID NO: 475723 - RNA, 19 nt, Artificial Sequence
  Description of Artificial Sequence: Synthetic oligonucleotide
  Sense strand starting at position 3596 of SEQ ID NO: 317244
uuuccaggguuccuuagaa

SEQ ID NO: 475724 - RNA, 19 nt, Artificial Sequence
  Description of Artificial Sequence: Synthetic oligonucleotide
  Antisense Strand to SEQ ID NO: 475723
uucuaaggaacccuggaaa

SEQ ID NO: 475725 - RNA, 19 nt, Artificial Sequence
  Description of Artificial Sequence: Synthetic oligonucleotide
  Sense strand starting at position 3770 of SEQ ID NO: 317244
cucuuugggcacgagaauu

SEQ ID NO: 475726 - RNA, 19 nt, Artificial Sequence
  Description of Artificial Sequence: Synthetic oligonucleotide
  Antisense Strand to SEQ ID NO: 475725
aauucucgugcccaaagag

SEQ ID NO: 475727 - RNA, 19 nt, Artificial Sequence
  Description of Artificial Sequence: Synthetic oligonucleotide
  Sense strand starting at position 4 of SEQ ID NO: 317245
gaaugucagggccacuaau

SEQ ID NO: 475728 - RNA, 19 nt, Artificial Sequence
  Description of Artificial Sequence: Synthetic oligonucleotide
  Antisense Strand to SEQ ID NO: 475727
auuaguggcccugacauuc

SEQ ID NO: 475729 - RNA, 19 nt, Artificial Sequence
  Description of Artificial Sequence: Synthetic oligonucleotide
  Sense strand starting at position 67 of SEQ ID NO: 317245
augucugcucauuaccaua

SEQ ID NO: 475730 - RNA, 19 nt, Artificial Sequence
  Description of Artificial Sequence: Synthetic oligonucleotide
  Antisense Strand to SEQ ID NO: 475729
uaugguaaugagcagacau

SEQ ID NO: 475731 - RNA, 19 nt, Artificial Sequence
  Description of Artificial Sequence: Synthetic oligonucleotide
  Sense strand starting at position 158 of SEQ ID NO: 317245
auuuauggaugagagugaa

SEQ ID NO: 475732 - RNA, 19 nt, Artificial Sequence
  Description of Artificial Sequence: Synthetic oligonucleotide
  Antisense Strand to SEQ ID NO: 475731
uucacucucauccauaaau

SEQ ID NO: 475733 - RNA, 19 nt, Artificial Sequence
  Description of Artificial Sequence: Synthetic oligonucleotide
  Sense strand starting at position 202 of SEQ ID NO: 317245
gguggauugagucacaugu

SEQ ID NO: 475734 - RNA, 19 nt, Artificial Sequence
  Description of Artificial Sequence: Synthetic oligonucleotide
  Antisense Strand to SEQ ID NO: 475733
acaugugacucaauccacc

SEQ ID NO: 475735 - RNA, 19 nt, Artificial Sequence
  Description of Artificial Sequence: Synthetic oligonucleotide
  Sense strand starting at position 206 of SEQ ID NO: 317245
gauugagucacauguggcu

SEQ ID NO: 475736 - RNA, 19 nt, Artificial Sequence
  Description of Artificial Sequence: Synthetic oligonucleotide
  Antisense Strand to SEQ ID NO: 475735
agccacaugugacucaauc

SEQ ID NO: 475737 - RNA, 19 nt, Artificial Sequence
  Description of Artificial Sequence: Synthetic oligonucleotide
  Sense strand starting at position 267 of SEQ ID NO: 317245
ucugaaauacuguguguaa

SEQ ID NO: 475738 - RNA, 19 nt, Artificial Sequence
  Description of Artificial Sequence: Synthetic oligonucleotide
  Antisense Strand to SEQ ID NO: 475737
uuacacacaguauuucaga

SEQ ID NO: 475739 - RNA, 19 nt, Artificial Sequence
  Description of Artificial Sequence: Synthetic oligonucleotide
  Sense strand starting at position 268 of SEQ ID NO: 317245
cugaaauacuguguguaau

SEQ ID NO: 475740 - RNA, 19 nt, Artificial Sequence
  Description of Artificial Sequence: Synthetic oligonucleotide
  Antisense Strand to SEQ ID NO: 475739
auuacacacaguauuucag

SEQ ID NO: 475741 - RNA, 19 nt, Artificial Sequence
  Description of Artificial Sequence: Synthetic oligonucleotide
  Sense strand starting at position 269 of SEQ ID NO: 317245
ugaaauacuguguguaaug

SEQ ID NO: 475742 - RNA, 19 nt, Artificial Sequence
  Description of Artificial Sequence: Synthetic oligonucleotide
  Antisense Strand to SEQ ID NO: 475741
cauuacacacaguauuuca

SEQ ID NO: 475743 - RNA, 19 nt, Artificial Sequence
  Description of Artificial Sequence: Synthetic oligonucleotide
  Sense strand starting at position 270 of SEQ ID NO: 317245
gaaauacuguguguaauga

SEQ ID NO: 475744 - RNA, 19 nt, Artificial Sequence
  Description of Artificial Sequence: Synthetic oligonucleotide
  Antisense Strand to SEQ ID NO: 475743
ucauuacacacaguauuuc

SEQ ID NO: 475745 - RNA, 19 nt, Artificial Sequence
  Description of Artificial Sequence: Synthetic oligonucleotide
  Sense strand starting at position 278 of SEQ ID NO: 317245
guguguaaugacugguaaa

SEQ ID NO: 475746 - RNA, 19 nt, Artificial Sequence
  Description of Artificial Sequence: Synthetic oligonucleotide
  Antisense Strand to SEQ ID NO: 475745
uuuaccagucauuacacac

SEQ ID NO: 475747 - RNA, 19 nt, Artificial Sequence
  Description of Artificial Sequence: Synthetic oligonucleotide
  Sense strand starting at position 279 of SEQ ID NO: 317245
uguguaaugacugguaaau

SEQ ID NO: 475748 - RNA, 19 nt, Artificial Sequence
  Description of Artificial Sequence: Synthetic oligonucleotide
  Antisense Strand to SEQ ID NO: 475747
auuuaccagucauuacaca

SEQ ID NO: 475749 - RNA, 19 nt, Artificial Sequence
  Description of Artificial Sequence: Synthetic oligonucleotide
  Sense strand starting at position 281 of SEQ ID NO: 317245
uguaaugacugguaaauuu

SEQ ID NO: 475750 - RNA, 19 nt, Artificial Sequence
  Description of Artificial Sequence: Synthetic oligonucleotide
  Antisense Strand to SEQ ID NO: 475749
aaauuuaccagucauuaca

SEQ ID NO: 475751 - RNA, 19 nt, Artificial Sequence
  Description of Artificial Sequence: Synthetic oligonucleotide
  Sense strand starting at position 430 of SEQ ID NO: 317245
ggugucauaaagggacauu

SEQ ID NO: 475752 - RNA, 19 nt, Artificial Sequence
  Description of Artificial Sequence: Synthetic oligonucleotide
  Antisense Strand to SEQ ID NO: 475751
aaugucccuuuaugacacc

SEQ ID NO: 475753 - RNA, 19 nt, Artificial Sequence
  Description of Artificial Sequence: Synthetic oligonucleotide
  Sense strand starting at position 615 of SEQ ID NO: 317245
uuuguuguucccuaauaau

SEQ ID NO: 475754 - RNA, 19 nt, Artificial Sequence
  Description of Artificial Sequence: Synthetic oligonucleotide
  Antisense Strand to SEQ ID NO: 475753
auuauuagggaacaacaaa

SEQ ID NO: 475755 - RNA, 19 nt, Artificial Sequence
  Description of Artificial Sequence: Synthetic oligonucleotide
  Sense strand starting at position 632 of SEQ ID NO: 317245
augucacuguuggcaauua

SEQ ID NO: 475756 - RNA, 19 nt, Artificial Sequence
  Description of Artificial Sequence: Synthetic oligonucleotide
  Antisense Strand to SEQ ID NO: 475755
uaauugccaacagugacau

SEQ ID NO: 475757 - RNA, 19 nt, Artificial Sequence
  Description of Artificial Sequence: Synthetic oligonucleotide
  Sense strand starting at position 640 of SEQ ID NO: 317245
guuggcaauuauuuaugua

SEQ ID NO: 475758 - RNA, 19 nt, Artificial Sequence
  Description of Artificial Sequence: Synthetic oligonucleotide
  Antisense Strand to SEQ ID NO: 475757
uacauaaauaauugccaac

SEQ ID NO: 475759 - RNA, 19 nt, Artificial Sequence
  Description of Artificial Sequence: Synthetic oligonucleotide
  Sense strand starting at position 726 of SEQ ID NO: 317245
ggaauaaugucagugacau

SEQ ID NO: 475760 - RNA, 19 nt, Artificial Sequence
  Description of Artificial Sequence: Synthetic oligonucleotide
  Antisense Strand to SEQ ID NO: 475759
augucacugacauuauucc

SEQ ID NO: 475761 - RNA, 19 nt, Artificial Sequence
  Description of Artificial Sequence: Synthetic oligonucleotide
  Sense strand starting at position 727 of SEQ ID NO: 317245
gaauaaugucagugacauc

SEQ ID NO: 475762 - RNA, 19 nt, Artificial Sequence
  Description of Artificial Sequence: Synthetic oligonucleotide
  Antisense Strand to SEQ ID NO: 475761
gaugucacugacauuauuc

SEQ ID NO: 475763 - RNA, 19 nt, Artificial Sequence
  Description of Artificial Sequence: Synthetic oligonucleotide
  Sense strand starting at position 963 of SEQ ID NO: 317245
aucaucuaucccuggucau

SEQ ID NO: 475764 - RNA, 19 nt, Artificial Sequence
  Description of Artificial Sequence: Synthetic oligonucleotide
  Antisense Strand to SEQ ID NO: 475763
augaccagggauagaugau

SEQ ID NO: 475765 - RNA, 19 nt, Artificial Sequence
  Description of Artificial Sequence: Synthetic oligonucleotide
  Sense strand starting at position 964 of SEQ ID NO: 317245
ucaucuaucccuggucauu

SEQ ID NO: 475766 - RNA, 19 nt, Artificial Sequence
  Description of Artificial Sequence: Synthetic oligonucleotide
  Antisense Strand to SEQ ID NO: 475765
aaugaccagggauagauga

SEQ ID NO: 475767 - RNA, 19 nt, Artificial Sequence
  Description of Artificial Sequence: Synthetic oligonucleotide
  Sense strand starting at position 1272 of SEQ ID NO: 317245
cgcuaauagcggucggagu

SEQ ID NO: 475768 - RNA, 19 nt, Artificial Sequence
  Description of Artificial Sequence: Synthetic oligonucleotide
  Antisense Strand to SEQ ID NO: 475767
acuccgaccgcuauuagcg

SEQ ID NO: 475769 - RNA, 19 nt, Artificial Sequence
  Description of Artificial Sequence: Synthetic oligonucleotide
  Sense strand starting at position 1551 of SEQ ID NO: 317245
ccggcuucuccggcaaagu

SEQ ID NO: 475770 - RNA, 19 nt, Artificial Sequence
  Description of Artificial Sequence: Synthetic oligonucleotide
  Antisense Strand to SEQ ID NO: 475769
acuuugccggagaagccgg

SEQ ID NO: 475771 - RNA, 19 nt, Artificial Sequence
  Description of Artificial Sequence: Synthetic oligonucleotide
  Sense strand starting at position 2261 of SEQ ID NO: 317245
ucguuucaggauuggaaag

SEQ ID NO: 475772 - RNA, 19 nt, Artificial Sequence
  Description of Artificial Sequence: Synthetic oligonucleotide
  Antisense Strand to SEQ ID NO: 475771
cuuuccaauccugaaacga

SEQ ID NO: 475773 - RNA, 19 nt, Artificial Sequence
  Description of Artificial Sequence: Synthetic oligonucleotide
  Sense strand starting at position 2560 of SEQ ID NO: 317245
augcgcuuuggugagaacu

SEQ ID NO: 475774 - RNA, 19 nt, Artificial Sequence
  Description of Artificial Sequence: Synthetic oligonucleotide
  Antisense Strand to SEQ ID NO: 475773
aguucucaccaaagcgcau

SEQ ID NO: 475775 - RNA, 19 nt, Artificial Sequence
  Description of Artificial Sequence: Synthetic oligonucleotide
  Sense strand starting at position 2604 of SEQ ID NO: 317245
agaugagguuggagugaga

SEQ ID NO: 475776 - RNA, 19 nt, Artificial Sequence
  Description of Artificial Sequence: Synthetic oligonucleotide
  Antisense Strand to SEQ ID NO: 475775
ucucacuccaaccucaucu

SEQ ID NO: 475777 - RNA, 19 nt, Artificial Sequence
  Description of Artificial Sequence: Synthetic oligonucleotide
  Sense strand starting at position 3164 of SEQ ID NO: 317245
aaggccuuugagugguaua

SEQ ID NO: 475778 - RNA, 19 nt, Artificial Sequence
  Description of Artificial Sequence: Synthetic oligonucleotide
  Antisense Strand to SEQ ID NO: 475777
uauaccacucaaaggccuu

SEQ ID NO: 475779 - RNA, 19 nt, Artificial Sequence
  Description of Artificial Sequence: Synthetic oligonucleotide
  Sense strand starting at position 3165 of SEQ ID NO: 317245
aggccuuugagugguauag

SEQ ID NO: 475780 - RNA, 19 nt, Artificial Sequence
  Description of Artificial Sequence: Synthetic oligonucleotide
  Antisense Strand to SEQ ID NO: 475779
cuauaccacucaaaggccu

SEQ ID NO: 475781 - RNA, 19 nt, Artificial Sequence
  Description of Artificial Sequence: Synthetic oligonucleotide
  Sense strand starting at position 3171 of SEQ ID NO: 317245
uugagugguauagacaguu

SEQ ID NO: 475782 - RNA, 19 nt, Artificial Sequence
  Description of Artificial Sequence: Synthetic oligonucleotide
  Antisense Strand to SEQ ID NO: 475781
aacugucuauaccacucaa

SEQ ID NO: 475783 - RNA, 19 nt, Artificial Sequence
  Description of Artificial Sequence: Synthetic oligonucleotide
  Sense strand starting at position 3239 of SEQ ID NO: 317245
aucugucagcauuaggaua

SEQ ID NO: 475784 - RNA, 19 nt, Artificial Sequence
  Description of Artificial Sequence: Synthetic oligonucleotide
  Antisense Strand to SEQ ID NO: 475783
uauccuaaugcugacagau

SEQ ID NO: 475785 - RNA, 19 nt, Artificial Sequence
  Description of Artificial Sequence: Synthetic oligonucleotide
  Sense strand starting at position 3250 of SEQ ID NO: 317245
uuaggauaaaucggauugu

SEQ ID NO: 475786 - RNA, 19 nt, Artificial Sequence
  Description of Artificial Sequence: Synthetic oligonucleotide
  Antisense Strand to SEQ ID NO: 475785
acaauccgauuuauccuaa

SEQ ID NO: 475787 - RNA, 19 nt, Artificial Sequence
  Description of Artificial Sequence: Synthetic oligonucleotide
  Sense strand starting at position 3254 of SEQ ID NO: 317245
gauaaaucggauuguguag

SEQ ID NO: 475788 - RNA, 19 nt, Artificial Sequence
  Description of Artificial Sequence: Synthetic oligonucleotide
  Antisense Strand to SEQ ID NO: 475787
cuacacaauccgauuuauc

SEQ ID NO: 475789 - RNA, 19 nt, Artificial Sequence
  Description of Artificial Sequence: Synthetic oligonucleotide
  Sense strand starting at position 3329 of SEQ ID NO: 317245
uuuccuaguguugaaauaa

SEQ ID NO: 475790 - RNA, 19 nt, Artificial Sequence
  Description of Artificial Sequence: Synthetic oligonucleotide
  Antisense Strand to SEQ ID NO: 475789
uuauuucaacacuaggaaa

SEQ ID NO: 475791 - RNA, 19 nt, Artificial Sequence
  Description of Artificial Sequence: Synthetic oligonucleotide
  Sense strand starting at position 3376 of SEQ ID NO: 317245
uuaccauguuaguuugauc

SEQ ID NO: 475792 - RNA, 19 nt, Artificial Sequence
  Description of Artificial Sequence: Synthetic oligonucleotide
  Antisense Strand to SEQ ID NO: 475791
gaucaaacuaacaugguaa

SEQ ID NO: 475793 - RNA, 19 nt, Artificial Sequence
  Description of Artificial Sequence: Synthetic oligonucleotide
  Sense strand starting at position 3511 of SEQ ID NO: 317245
aggacuuucccaugaaguu

SEQ ID NO: 475794 - RNA, 19 nt, Artificial Sequence
  Description of Artificial Sequence: Synthetic oligonucleotide
  Antisense Strand to SEQ ID NO: 475793
aacuucaugggaaaguccu

SEQ ID NO: 475795 - RNA, 19 nt, Artificial Sequence
  Description of Artificial Sequence: Synthetic oligonucleotide
  Sense strand starting at position 3512 of SEQ ID NO: 317245
ggacuuucccaugaaguuc

SEQ ID NO: 475796 - RNA, 19 nt, Artificial Sequence
  Description of Artificial Sequence: Synthetic oligonucleotide
  Antisense Strand to SEQ ID NO: 475795
gaacuucaugggaaagucc

SEQ ID NO: 475797 - RNA, 19 nt, Artificial Sequence
  Description of Artificial Sequence: Synthetic oligonucleotide
  Sense strand starting at position 3641 of SEQ ID NO: 317245
cgaauugcugccuagaauu

SEQ ID NO: 475798 - RNA, 19 nt, Artificial Sequence
  Description of Artificial Sequence: Synthetic oligonucleotide
  Antisense Strand to SEQ ID NO: 475797
aauucuaggcagcaauucg

SEQ ID NO: 475799 - RNA, 19 nt, Artificial Sequence
  Description of Artificial Sequence: Synthetic oligonucleotide
  Sense strand starting at position 3835 of SEQ ID NO: 317245
gaccaaggcucagugcaau

SEQ ID NO: 475800 - RNA, 19 nt, Artificial Sequence
  Description of Artificial Sequence: Synthetic oligonucleotide
  Antisense Strand to SEQ ID NO: 475799
auugcacugagccuugguc

SEQ ID NO: 475801 - RNA, 19 nt, Artificial Sequence
  Description of Artificial Sequence: Synthetic oligonucleotide
  Sense strand starting at position 3863 of SEQ ID NO: 317245
cucacaugccuguauguaa

SEQ ID NO: 475802 - RNA, 19 nt, Artificial Sequence
  Description of Artificial Sequence: Synthetic oligonucleotide
  Antisense Strand to SEQ ID NO: 475801
uuacauacaggcaugugag

SEQ ID NO: 475803 - RNA, 19 nt, Artificial Sequence
  Description of Artificial Sequence: Synthetic oligonucleotide
  Sense strand starting at position 3876 of SEQ ID NO: 317245
auguaagaaucugcagcua

SEQ ID NO: 475804 - RNA, 19 nt, Artificial Sequence
  Description of Artificial Sequence: Synthetic oligonucleotide
  Antisense Strand to SEQ ID NO: 475803
uagcugcagauucuuacau

SEQ ID NO: 475805 - RNA, 19 nt, Artificial Sequence
  Description of Artificial Sequence: Synthetic oligonucleotide
  Sense strand starting at position 3925 of SEQ ID NO: 317245
ugcuccauugaauacuaga

SEQ ID NO: 475806 - RNA, 19 nt, Artificial Sequence
  Description of Artificial Sequence: Synthetic oligonucleotide
  Antisense Strand to SEQ ID NO: 475805
ucuaguauucaauggagca

SEQ ID NO: 475807 - RNA, 19 nt, Artificial Sequence
  Description of Artificial Sequence: Synthetic oligonucleotide
  Sense strand starting at position 32 of SEQ ID NO: 317246
agagaaugcugauacagca

SEQ ID NO: 475808 - RNA, 19 nt, Artificial Sequence
  Description of Artificial Sequence: Synthetic oligonucleotide
  Antisense Strand to SEQ ID NO: 475807
ugcuguaucagcauucucu

SEQ ID NO: 475809 - RNA, 19 nt, Artificial Sequence
  Description of Artificial Sequence: Synthetic oligonucleotide
  Sense strand starting at position 139 of SEQ ID NO: 317246
ccaauuccucaguguucua

SEQ ID NO: 475810 - RNA, 19 nt, Artificial Sequence
  Description of Artificial Sequence: Synthetic oligonucleotide
  Antisense Strand to SEQ ID NO: 475809
uagaacacugaggaauugg

SEQ ID NO: 475811 - RNA, 19 nt, Artificial Sequence
  Description of Artificial Sequence: Synthetic oligonucleotide
  Sense strand starting at position 170 of SEQ ID NO: 317246
aggagacauuggugagaag

SEQ ID NO: 475812 - RNA, 19 nt, Artificial Sequence
  Description of Artificial Sequence: Synthetic oligonucleotide
  Antisense Strand to SEQ ID NO: 475811
cuucucaccaaugucuccu

SEQ ID NO: 475813 - RNA, 19 nt, Artificial Sequence
  Description of Artificial Sequence: Synthetic oligonucleotide
  Sense strand starting at position 251 of SEQ ID NO: 317246
cccaacgaagcaugauaaa

SEQ ID NO: 475814 - RNA, 19 nt, Artificial Sequence
  Description of Artificial Sequence: Synthetic oligonucleotide
  Antisense Strand to SEQ ID NO: 475813
uuuaucaugcuucguuggg

SEQ ID NO: 475815 - RNA, 19 nt, Artificial Sequence
  Description of Artificial Sequence: Synthetic oligonucleotide
  Sense strand starting at position 292 of SEQ ID NO: 317246
guauuagagccacaaagcu

SEQ ID NO: 475816 - RNA, 19 nt, Artificial Sequence
  Description of Artificial Sequence: Synthetic oligonucleotide
  Antisense Strand to SEQ ID NO: 475815
agcuuuguggcucuaauac

SEQ ID NO: 475817 - RNA, 19 nt, Artificial Sequence
  Description of Artificial Sequence: Synthetic oligonucleotide
  Sense strand starting at position 435 of SEQ ID NO: 317246
ccuuguguaucuguaucua

SEQ ID NO: 475818 - RNA, 19 nt, Artificial Sequence
  Description of Artificial Sequence: Synthetic oligonucleotide
  Antisense Strand to SEQ ID NO: 475817
uagauacagauacacaagg

SEQ ID NO: 475819 - RNA, 19 nt, Artificial Sequence
  Description of Artificial Sequence: Synthetic oligonucleotide
  Sense strand starting at position 439 of SEQ ID NO: 317246
guguaucuguaucuauaga

SEQ ID NO: 475820 - RNA, 19 nt, Artificial Sequence
  Description of Artificial Sequence: Synthetic oligonucleotide
  Antisense Strand to SEQ ID NO: 475819
ucuauagauacagauacac

SEQ ID NO: 475821 - RNA, 19 nt, Artificial Sequence
  Description of Artificial Sequence: Synthetic oligonucleotide
  Sense strand starting at position 465 of SEQ ID NO: 317246
gaagaaaggccgcauuaua

SEQ ID NO: 475822 - RNA, 19 nt, Artificial Sequence
  Description of Artificial Sequence: Synthetic oligonucleotide
  Antisense Strand to SEQ ID NO: 475821
uauaaugcggccuuucuuc

SEQ ID NO: 475823 - RNA, 19 nt, Artificial Sequence
  Description of Artificial Sequence: Synthetic oligonucleotide
  Sense strand starting at position 529 of SEQ ID NO: 317246
ggcaauaucgcaugcauca

SEQ ID NO: 475824 - RNA, 19 nt, Artificial Sequence
  Description of Artificial Sequence: Synthetic oligonucleotide
  Antisense Strand to SEQ ID NO: 475823
ugaugcaugcgauauugcc

SEQ ID NO: 475825 - RNA, 19 nt, Artificial Sequence
  Description of Artificial Sequence: Synthetic oligonucleotide
  Sense strand starting at position 632 of SEQ ID NO: 317246
agcugugaagaguggcaaa

SEQ ID NO: 475826 - RNA, 19 nt, Artificial Sequence
  Description of Artificial Sequence: Synthetic oligonucleotide
  Antisense Strand to SEQ ID NO: 475825
uuugccacucuucacagcu

SEQ ID NO: 475827 - RNA, 19 nt, Artificial Sequence
  Description of Artificial Sequence: Synthetic oligonucleotide
  Sense strand starting at position 643 of SEQ ID NO: 317246
guggcaaagugcucuccuu

SEQ ID NO: 475828 - RNA, 19 nt, Artificial Sequence
  Description of Artificial Sequence: Synthetic oligonucleotide
  Antisense Strand to SEQ ID NO: 475827
aaggagagcacuuugccac

SEQ ID NO: 475829 - RNA, 19 nt, Artificial Sequence
  Description of Artificial Sequence: Synthetic oligonucleotide
  Sense strand starting at position 676 of SEQ ID NO: 317246
cgugaucgauuucaugaag

SEQ ID NO: 475830 - RNA, 19 nt, Artificial Sequence
  Description of Artificial Sequence: Synthetic oligonucleotide
  Antisense Strand to SEQ ID NO: 475829
cuucaugaaaucgaucacg

SEQ ID NO: 475831 - RNA, 19 nt, Artificial Sequence
  Description of Artificial Sequence: Synthetic oligonucleotide
  Sense strand starting at position 772 of SEQ ID NO: 317246
ccucuuuggccagggaguu

SEQ ID NO: 475832 - RNA, 19 nt, Artificial Sequence
  Description of Artificial Sequence: Synthetic oligonucleotide
  Antisense Strand to SEQ ID NO: 475831
aacucccuggccaaagagg

SEQ ID NO: 475833 - RNA, 19 nt, Artificial Sequence
  Description of Artificial Sequence: Synthetic oligonucleotide
  Sense strand starting at position 773 of SEQ ID NO: 317246
cucuuuggccagggaguua

SEQ ID NO: 475834 - RNA, 19 nt, Artificial Sequence
  Description of Artificial Sequence: Synthetic oligonucleotide
  Antisense Strand to SEQ ID NO: 475833
uaacucccuggccaaagag

SEQ ID NO: 475835 - RNA, 19 nt, Artificial Sequence
  Description of Artificial Sequence: Synthetic oligonucleotide
  Sense strand starting at position 785 of SEQ ID NO: 317246
ggaguuaacugaucugauc

SEQ ID NO: 475836 - RNA, 19 nt, Artificial Sequence
  Description of Artificial Sequence: Synthetic oligonucleotide
  Antisense Strand to SEQ ID NO: 475835
gaucagaucaguuaacucc

SEQ ID NO: 475837 - RNA, 19 nt, Artificial Sequence
  Description of Artificial Sequence: Synthetic oligonucleotide
  Sense strand starting at position 793 of SEQ ID NO: 317246
cugaucugaucuugacaau

SEQ ID NO: 475838 - RNA, 19 nt, Artificial Sequence
  Description of Artificial Sequence: Synthetic oligonucleotide
  Antisense Strand to SEQ ID NO: 475837
auugucaagaucagaucag

SEQ ID NO: 475839 - RNA, 19 nt, Artificial Sequence
  Description of Artificial Sequence: Synthetic oligonucleotide
  Sense strand starting at position 1028 of SEQ ID NO: 317246
uagggaggccucugaaagu

SEQ ID NO: 475840 - RNA, 19 nt, Artificial Sequence
  Description of Artificial Sequence: Synthetic oligonucleotide
  Antisense Strand to SEQ ID NO: 475839
acuuucagaggccucccua

SEQ ID NO: 475841 - RNA, 19 nt, Artificial Sequence
  Description of Artificial Sequence: Synthetic oligonucleotide
  Sense strand starting at position 1048 of SEQ ID NO: 317246
acaggagucugacucuuau

SEQ ID NO: 475842 - RNA, 19 nt, Artificial Sequence
  Description of Artificial Sequence: Synthetic oligonucleotide
  Antisense Strand to SEQ ID NO: 475841
auaagagucagacuccugu

SEQ ID NO: 475843 - RNA, 19 nt, Artificial Sequence
  Description of Artificial Sequence: Synthetic oligonucleotide
  Sense strand starting at position 1148 of SEQ ID NO: 317246
acaggagucucuccaccua

SEQ ID NO: 475844 - RNA, 19 nt, Artificial Sequence
  Description of Artificial Sequence: Synthetic oligonucleotide
  Antisense Strand to SEQ ID NO: 475843
uagguggagagacuccugu

SEQ ID NO: 475845 - RNA, 19 nt, Artificial Sequence
  Description of Artificial Sequence: Synthetic oligonucleotide
  Sense strand starting at position 1198 of SEQ ID NO: 317246
ggguuuauuucagagugga

SEQ ID NO: 475846 - RNA, 19 nt, Artificial Sequence
  Description of Artificial Sequence: Synthetic oligonucleotide
  Antisense Strand to SEQ ID NO: 475845
uccacucugaaauaaaccc

SEQ ID NO: 475847 - RNA, 19 nt, Artificial Sequence
  Description of Artificial Sequence: Synthetic oligonucleotide
  Sense strand starting at position 1250 of SEQ ID NO: 317246
cuuaacgccuuccugagaa

SEQ ID NO: 475848 - RNA, 19 nt, Artificial Sequence
  Description of Artificial Sequence: Synthetic oligonucleotide
  Antisense Strand to SEQ ID NO: 475847
uucucaggaaggcguuaag

SEQ ID NO: 475849 - RNA, 19 nt, Artificial Sequence
  Description of Artificial Sequence: Synthetic oligonucleotide
  Sense strand starting at position 1393 of SEQ ID NO: 317246
ucggcuuccuaauuaauca

SEQ ID NO: 475850 - RNA, 19 nt, Artificial Sequence
  Description of Artificial Sequence: Synthetic oligonucleotide
  Antisense Strand to SEQ ID NO: 475849
ugauuaauuaggaagccga

SEQ ID NO: 475851 - RNA, 19 nt, Artificial Sequence
  Description of Artificial Sequence: Synthetic oligonucleotide
  Sense strand starting at position 1435 of SEQ ID NO: 317246
uuacgauuaugagggaacu

SEQ ID NO: 475852 - RNA, 19 nt, Artificial Sequence
  Description of Artificial Sequence: Synthetic oligonucleotide
  Antisense Strand to SEQ ID NO: 475851
aguucccucauaaucguaa

SEQ ID NO: 475853 - RNA, 19 nt, Artificial Sequence
  Description of Artificial Sequence: Synthetic oligonucleotide
  Sense strand starting at position 1491 of SEQ ID NO: 317246
ugauuaauugaacgacaug

SEQ ID NO: 475854 - RNA, 19 nt, Artificial Sequence
  Description of Artificial Sequence: Synthetic oligonucleotide
  Antisense Strand to SEQ ID NO: 475853
caugucguucaauuaauca

SEQ ID NO: 475855 - RNA, 19 nt, Artificial Sequence
  Description of Artificial Sequence: Synthetic oligonucleotide
  Sense strand starting at position 1514 of SEQ ID NO: 317246
ugaaaucucaagugcgaga

SEQ ID NO: 475856 - RNA, 19 nt, Artificial Sequence
  Description of Artificial Sequence: Synthetic oligonucleotide
  Antisense Strand to SEQ ID NO: 475855
ucucgcacuugagauuuca

SEQ ID NO: 475857 - RNA, 19 nt, Artificial Sequence
  Description of Artificial Sequence: Synthetic oligonucleotide
  Sense strand starting at position 1516 of SEQ ID NO: 317246
aaaucucaagugcgagaaa

SEQ ID NO: 475858 - RNA, 19 nt, Artificial Sequence
  Description of Artificial Sequence: Synthetic oligonucleotide
  Antisense Strand to SEQ ID NO: 475857
uuucucgcacuugagauuu

SEQ ID NO: 475859 - RNA, 19 nt, Artificial Sequence
  Description of Artificial Sequence: Synthetic oligonucleotide
  Sense strand starting at position 1546 of SEQ ID NO: 317246
ggaucaaacucugaacuca

SEQ ID NO: 475860 - RNA, 19 nt, Artificial Sequence
  Description of Artificial Sequence: Synthetic oligonucleotide
  Antisense Strand to SEQ ID NO: 475859
ugaguucagaguuugaucc

SEQ ID NO: 475861 - RNA, 19 nt, Artificial Sequence
  Description of Artificial Sequence: Synthetic oligonucleotide
  Sense strand starting at position 1557 of SEQ ID NO: 317246
ugaacucauccguauugca

SEQ ID NO: 475862 - RNA, 19 nt, Artificial Sequence
  Description of Artificial Sequence: Synthetic oligonucleotide
  Antisense Strand to SEQ ID NO: 475861
ugcaauacggaugaguuca

SEQ ID NO: 475863 - RNA, 19 nt, Artificial Sequence
  Description of Artificial Sequence: Synthetic oligonucleotide
  Sense strand starting at position 1640 of SEQ ID NO: 317246
guccuaagccuucggaaga

SEQ ID NO: 475864 - RNA, 19 nt, Artificial Sequence
  Description of Artificial Sequence: Synthetic oligonucleotide
  Antisense Strand to SEQ ID NO: 475863
ucuuccgaaggcuuaggac

SEQ ID NO: 475865 - RNA, 19 nt, Artificial Sequence
  Description of Artificial Sequence: Synthetic oligonucleotide
  Sense strand starting at position 2002 of SEQ ID NO: 317246
uagaauuacguucgggauu

SEQ ID NO: 475866 - RNA, 19 nt, Artificial Sequence
  Description of Artificial Sequence: Synthetic oligonucleotide
  Antisense Strand to SEQ ID NO: 475865
aaucccgaacguaauucua

SEQ ID NO: 475867 - RNA, 19 nt, Artificial Sequence
  Description of Artificial Sequence: Synthetic oligonucleotide
  Sense strand starting at position 2005 of SEQ ID NO: 317246
aauuacguucgggauuaaa

SEQ ID NO: 475868 - RNA, 19 nt, Artificial Sequence
  Description of Artificial Sequence: Synthetic oligonucleotide
  Antisense Strand to SEQ ID NO: 475867
uuuaaucccgaacguaauu

SEQ ID NO: 475869 - RNA, 19 nt, Artificial Sequence
  Description of Artificial Sequence: Synthetic oligonucleotide
  Sense strand starting at position 2111 of SEQ ID NO: 317246
acgugcucucugggucuaa

SEQ ID NO: 475870 - RNA, 19 nt, Artificial Sequence
  Description of Artificial Sequence: Synthetic oligonucleotide
  Antisense Strand to SEQ ID NO: 475869
uuagacccagagagcacgu

SEQ ID NO: 475871 - RNA, 19 nt, Artificial Sequence
  Description of Artificial Sequence: Synthetic oligonucleotide
  Sense strand starting at position 2112 of SEQ ID NO: 317246
cgugcucucugggucuaaa

SEQ ID NO: 475872 - RNA, 19 nt, Artificial Sequence
  Description of Artificial Sequence: Synthetic oligonucleotide
  Antisense Strand to SEQ ID NO: 475871
uuuagacccagagagcacg

SEQ ID NO: 475873 - RNA, 19 nt, Artificial Sequence
  Description of Artificial Sequence: Synthetic oligonucleotide
  Sense strand starting at position 2325 of SEQ ID NO: 317246
ggaggcugucuuuaggguu

SEQ ID NO: 475874 - RNA, 19 nt, Artificial Sequence
  Description of Artificial Sequence: Synthetic oligonucleotide
  Antisense Strand to SEQ ID NO: 475873
aacccuaaagacagccucc

SEQ ID NO: 475875 - RNA, 19 nt, Artificial Sequence
  Description of Artificial Sequence: Synthetic oligonucleotide
  Sense strand starting at position 2433 of SEQ ID NO: 317246
gccacugaacuuuaagcau

SEQ ID NO: 475876 - RNA, 19 nt, Artificial Sequence
  Description of Artificial Sequence: Synthetic oligonucleotide
  Antisense Strand to SEQ ID NO: 475875
augcuuaaaguucaguggc

SEQ ID NO: 475877 - RNA, 19 nt, Artificial Sequence
  Description of Artificial Sequence: Synthetic oligonucleotide
  Sense strand starting at position 2643 of SEQ ID NO: 317246
agaaccugagcgugaaaca

SEQ ID NO: 475878 - RNA, 19 nt, Artificial Sequence
  Description of Artificial Sequence: Synthetic oligonucleotide
  Antisense Strand to SEQ ID NO: 475877
uguuucacgcucagguucu

SEQ ID NO: 475879 - RNA, 19 nt, Artificial Sequence
  Description of Artificial Sequence: Synthetic oligonucleotide
  Sense strand starting at position 3071 of SEQ ID NO: 317246
ggugcucugguccagaaac

SEQ ID NO: 475880 - RNA, 19 nt, Artificial Sequence
  Description of Artificial Sequence: Synthetic oligonucleotide
  Antisense Strand to SEQ ID NO: 475879
guuucuggaccagagcacc

SEQ ID NO: 475881 - RNA, 19 nt, Artificial Sequence
  Description of Artificial Sequence: Synthetic oligonucleotide
  Sense strand starting at position 3782 of SEQ ID NO: 317246
cccgcuguccgucagaagu

SEQ ID NO: 475882 - RNA, 19 nt, Artificial Sequence
  Description of Artificial Sequence: Synthetic oligonucleotide
  Antisense Strand to SEQ ID NO: 475881
acuucugacggacagcggg

SEQ ID NO: 475883 - RNA, 19 nt, Artificial Sequence
  Description of Artificial Sequence: Synthetic oligonucleotide
  Sense strand starting at position 3793 of SEQ ID NO: 317246
ucagaagugguuugcucau

SEQ ID NO: 475884 - RNA, 19 nt, Artificial Sequence
  Description of Artificial Sequence: Synthetic oligonucleotide
  Antisense Strand to SEQ ID NO: 475883
augagcaaaccacuucuga

SEQ ID NO: 475885 - RNA, 19 nt, Artificial Sequence
  Description of Artificial Sequence: Synthetic oligonucleotide
  Sense strand starting at position 3795 of SEQ ID NO: 317246
agaagugguuugcucauuu

SEQ ID NO: 475886 - RNA, 19 nt, Artificial Sequence
  Description of Artificial Sequence: Synthetic oligonucleotide
  Antisense Strand to SEQ ID NO: 475885
aaaugagcaaaccacuucu

SEQ ID NO: 475887 - RNA, 19 nt, Artificial Sequence
  Description of Artificial Sequence: Synthetic oligonucleotide
  Sense strand starting at position 9 of SEQ ID NO: 317247
ugcuaaugcuugcuaauuu

SEQ ID NO: 475888 - RNA, 19 nt, Artificial Sequence
  Description of Artificial Sequence: Synthetic oligonucleotide
  Antisense Strand to SEQ ID NO: 475887
aaauuagcaagcauuagca

SEQ ID NO: 475889 - RNA, 19 nt, Artificial Sequence
  Description of Artificial Sequence: Synthetic oligonucleotide
  Sense strand starting at position 18 of SEQ ID NO: 317247
uugcuaauuuggcaagaaa

SEQ ID NO: 475890 - RNA, 19 nt, Artificial Sequence
  Description of Artificial Sequence: Synthetic oligonucleotide
  Antisense Strand to SEQ ID NO: 475889
uuucuugccaaauuagcaa

SEQ ID NO: 475891 - RNA, 19 nt, Artificial Sequence
  Description of Artificial Sequence: Synthetic oligonucleotide
  Sense strand starting at position 52 of SEQ ID NO: 317247
ggguuugggcaucacaaua

SEQ ID NO: 475892 - RNA, 19 nt, Artificial Sequence
  Description of Artificial Sequence: Synthetic oligonucleotide
  Antisense Strand to SEQ ID NO: 475891
uauugugaugcccaaaccc

SEQ ID NO: 475893 - RNA, 19 nt, Artificial Sequence
  Description of Artificial Sequence: Synthetic oligonucleotide
  Sense strand starting at position 130 of SEQ ID NO: 317247
cacuguuaagguugggagu

SEQ ID NO: 475894 - RNA, 19 nt, Artificial Sequence
  Description of Artificial Sequence: Synthetic oligonucleotide
  Antisense Strand to SEQ ID NO: 475893
acucccaaccuuaacagug

SEQ ID NO: 475895 - RNA, 19 nt, Artificial Sequence
  Description of Artificial Sequence: Synthetic oligonucleotide
  Sense strand starting at position 149 of SEQ ID NO: 317247
ggguccuauuucucaguuu

SEQ ID NO: 475896 - RNA, 19 nt, Artificial Sequence
  Description of Artificial Sequence: Synthetic oligonucleotide
  Antisense Strand to SEQ ID NO: 475895
aaacugagaaauaggaccc

SEQ ID NO: 475897 - RNA, 19 nt, Artificial Sequence
  Description of Artificial Sequence: Synthetic oligonucleotide
  Sense strand starting at position 664 of SEQ ID NO: 317247
uuccuaucccgagggauug

SEQ ID NO: 475898 - RNA, 19 nt, Artificial Sequence
  Description of Artificial Sequence: Synthetic oligonucleotide
  Antisense Strand to SEQ ID NO: 475897
caaucccucgggauaggaa

SEQ ID NO: 475899 - RNA, 19 nt, Artificial Sequence
  Description of Artificial Sequence: Synthetic oligonucleotide
  Sense strand starting at position 768 of SEQ ID NO: 317247
guauauuucugugcagaau

SEQ ID NO: 475900 - RNA, 19 nt, Artificial Sequence
  Description of Artificial Sequence: Synthetic oligonucleotide
  Antisense Strand to SEQ ID NO: 475899
auucugcacagaaauauac

SEQ ID NO: 475901 - RNA, 19 nt, Artificial Sequence
  Description of Artificial Sequence: Synthetic oligonucleotide
  Sense strand starting at position 779 of SEQ ID NO: 317247
ugcagaauauagucccuau

SEQ ID NO: 475902 - RNA, 19 nt, Artificial Sequence
  Description of Artificial Sequence: Synthetic oligonucleotide
  Antisense Strand to SEQ ID NO: 475901
auagggacuauauucugca

SEQ ID NO: 475903 - RNA, 19 nt, Artificial Sequence
  Description of Artificial Sequence: Synthetic oligonucleotide
  Sense strand starting at position 782 of SEQ ID NO: 317247
agaauauagucccuauagu

SEQ ID NO: 475904 - RNA, 19 nt, Artificial Sequence
  Description of Artificial Sequence: Synthetic oligonucleotide
  Antisense Strand to SEQ ID NO: 475903
acuauagggacuauauucu

SEQ ID NO: 475905 - RNA, 19 nt, Artificial Sequence
  Description of Artificial Sequence: Synthetic oligonucleotide
  Sense strand starting at position 788 of SEQ ID NO: 317247
uagucccuauagucgaaua

SEQ ID NO: 475906 - RNA, 19 nt, Artificial Sequence
  Description of Artificial Sequence: Synthetic oligonucleotide
  Antisense Strand to SEQ ID NO: 475905
uauucgacuauagggacua

SEQ ID NO: 475907 - RNA, 19 nt, Artificial Sequence
  Description of Artificial Sequence: Synthetic oligonucleotide
  Sense strand starting at position 800 of SEQ ID NO: 317247
ucgaauaggcgcaaguguu

SEQ ID NO: 475908 - RNA, 19 nt, Artificial Sequence
  Description of Artificial Sequence: Synthetic oligonucleotide
  Antisense Strand to SEQ ID NO: 475907
aacacuugcgccuauucga

SEQ ID NO: 475909 - RNA, 19 nt, Artificial Sequence
  Description of Artificial Sequence: Synthetic oligonucleotide
  Sense strand starting at position 801 of SEQ ID NO: 317247
cgaauaggcgcaaguguua

SEQ ID NO: 475910 - RNA, 19 nt, Artificial Sequence
  Description of Artificial Sequence: Synthetic oligonucleotide
  Antisense Strand to SEQ ID NO: 475909
uaacacuugcgccuauucg

SEQ ID NO: 475911 - RNA, 19 nt, Artificial Sequence
  Description of Artificial Sequence: Synthetic oligonucleotide
  Sense strand starting at position 842 of SEQ ID NO: 317247
cccugaaucugacuucuga

SEQ ID NO: 475912 - RNA, 19 nt, Artificial Sequence
  Description of Artificial Sequence: Synthetic oligonucleotide
  Antisense Strand to SEQ ID NO: 475911
ucagaagucagauucaggg

SEQ ID NO: 475913 - RNA, 19 nt, Artificial Sequence
  Description of Artificial Sequence: Synthetic oligonucleotide
  Sense strand starting at position 850 of SEQ ID NO: 317247
cugacuucugaaugucaag

SEQ ID NO: 475914 - RNA, 19 nt, Artificial Sequence
  Description of Artificial Sequence: Synthetic oligonucleotide
  Antisense Strand to SEQ ID NO: 475913
cuugacauucagaagucag

SEQ ID NO: 475915 - RNA, 19 nt, Artificial Sequence
  Description of Artificial Sequence: Synthetic oligonucleotide
  Sense strand starting at position 903 of SEQ ID NO: 317247
acauguguuggugaauucu

SEQ ID NO: 475916 - RNA, 19 nt, Artificial Sequence
  Description of Artificial Sequence: Synthetic oligonucleotide
  Antisense Strand to SEQ ID NO: 475915
agaauucaccaacacaugu

SEQ ID NO: 475917 - RNA, 19 nt, Artificial Sequence
  Description of Artificial Sequence: Synthetic oligonucleotide
  Sense strand starting at position 1001 of SEQ ID NO: 317247
guguauauagcacaccauu

SEQ ID NO: 475918 - RNA, 19 nt, Artificial Sequence
  Description of Artificial Sequence: Synthetic oligonucleotide
  Antisense Strand to SEQ ID NO: 475917
aauggugugcuauauacac

SEQ ID NO: 475919 - RNA, 19 nt, Artificial Sequence
  Description of Artificial Sequence: Synthetic oligonucleotide
  Sense strand starting at position 1377 of SEQ ID NO: 317247
ugggaugcuuaacuuguaa

SEQ ID NO: 475920 - RNA, 19 nt, Artificial Sequence
  Description of Artificial Sequence: Synthetic oligonucleotide
  Antisense Strand to SEQ ID NO: 475919
uuacaaguuaagcauccca

SEQ ID NO: 475921 - RNA, 19 nt, Artificial Sequence
  Description of Artificial Sequence: Synthetic oligonucleotide
  Sense strand starting at position 1475 of SEQ ID NO: 317247
ccagcaagugcugagaacu

SEQ ID NO: 475922 - RNA, 19 nt, Artificial Sequence
  Description of Artificial Sequence: Synthetic oligonucleotide
  Antisense Strand to SEQ ID NO: 475921
aguucucagcacuugcugg

SEQ ID NO: 475923 - RNA, 19 nt, Artificial Sequence
  Description of Artificial Sequence: Synthetic oligonucleotide
  Sense strand starting at position 1589 of SEQ ID NO: 317247
gguuauuucuagccuggca

SEQ ID NO: 475924 - RNA, 19 nt, Artificial Sequence
  Description of Artificial Sequence: Synthetic oligonucleotide
  Antisense Strand to SEQ ID NO: 475923
ugccaggcuagaaauaacc

SEQ ID NO: 475925 - RNA, 19 nt, Artificial Sequence
  Description of Artificial Sequence: Synthetic oligonucleotide
  Sense strand starting at position 2326 of SEQ ID NO: 317247
ucuggaaggcggaguguuu

SEQ ID NO: 475926 - RNA, 19 nt, Artificial Sequence
  Description of Artificial Sequence: Synthetic oligonucleotide
  Antisense Strand to SEQ ID NO: 475925
aaacacuccgccuuccaga

SEQ ID NO: 475927 - RNA, 19 nt, Artificial Sequence
  Description of Artificial Sequence: Synthetic oligonucleotide
  Sense strand starting at position 2806 of SEQ ID NO: 317247
gggugcugacugugagaua

SEQ ID NO: 475928 - RNA, 19 nt, Artificial Sequence
  Description of Artificial Sequence: Synthetic oligonucleotide
  Antisense Strand to SEQ ID NO: 475927
uaucucacagucagcaccc

SEQ ID NO: 475929 - RNA, 19 nt, Artificial Sequence
  Description of Artificial Sequence: Synthetic oligonucleotide
  Sense strand starting at position 2895 of SEQ ID NO: 317247
cuggauuaucccggguuga

SEQ ID NO: 475930 - RNA, 19 nt, Artificial Sequence
  Description of Artificial Sequence: Synthetic oligonucleotide
  Antisense Strand to SEQ ID NO: 475929
ucaacccgggauaauccag

SEQ ID NO: 475931 - RNA, 19 nt, Artificial Sequence
  Description of Artificial Sequence: Synthetic oligonucleotide
  Sense strand starting at position 2896 of SEQ ID NO: 317247
uggauuaucccggguugac

SEQ ID NO: 475932 - RNA, 19 nt, Artificial Sequence
  Description of Artificial Sequence: Synthetic oligonucleotide
  Antisense Strand to SEQ ID NO: 475931
gucaacccgggauaaucca

SEQ ID NO: 475933 - RNA, 19 nt, Artificial Sequence
  Description of Artificial Sequence: Synthetic oligonucleotide
  Sense strand starting at position 2923 of SEQ ID NO: 317247
uuagcucuuccagagagau

SEQ ID NO: 475934 - RNA, 19 nt, Artificial Sequence
  Description of Artificial Sequence: Synthetic oligonucleotide
  Antisense Strand to SEQ ID NO: 475933
aucucucuggaagagcuaa

SEQ ID NO: 475935 - RNA, 19 nt, Artificial Sequence
  Description of Artificial Sequence: Synthetic oligonucleotide
  Sense strand starting at position 2937 of SEQ ID NO: 317247
gagauaguugcaggguuua

SEQ ID NO: 475936 - RNA, 19 nt, Artificial Sequence
  Description of Artificial Sequence: Synthetic oligonucleotide
  Antisense Strand to SEQ ID NO: 475935
uaaacccugcaacuaucuc

SEQ ID NO: 475937 - RNA, 19 nt, Artificial Sequence
  Description of Artificial Sequence: Synthetic oligonucleotide
  Sense strand starting at position 3038 of SEQ ID NO: 317247
gguuggcgucgccuugaaa

SEQ ID NO: 475938 - RNA, 19 nt, Artificial Sequence
  Description of Artificial Sequence: Synthetic oligonucleotide
  Antisense Strand to SEQ ID NO: 475937
uuucaaggcgacgccaacc

SEQ ID NO: 475939 - RNA, 19 nt, Artificial Sequence
  Description of Artificial Sequence: Synthetic oligonucleotide
  Sense strand starting at position 3039 of SEQ ID NO: 317247
guuggcgucgccuugaaau

SEQ ID NO: 475940 - RNA, 19 nt, Artificial Sequence
  Description of Artificial Sequence: Synthetic oligonucleotide
  Antisense Strand to SEQ ID NO: 475939
auuucaaggcgacgccaac

SEQ ID NO: 475941 - RNA, 19 nt, Artificial Sequence
  Description of Artificial Sequence: Synthetic oligonucleotide
  Sense strand starting at position 3251 of SEQ ID NO: 317247
aaaugucugccagaucugu

SEQ ID NO: 475942 - RNA, 19 nt, Artificial Sequence
  Description of Artificial Sequence: Synthetic oligonucleotide
  Antisense Strand to SEQ ID NO: 475941
acagaucuggcagacauuu

SEQ ID NO: 475943 - RNA, 19 nt, Artificial Sequence
  Description of Artificial Sequence: Synthetic oligonucleotide
  Sense strand starting at position 3431 of SEQ ID NO: 317247
gguuaaacccagcacuuaa

SEQ ID NO: 475944 - RNA, 19 nt, Artificial Sequence
  Description of Artificial Sequence: Synthetic oligonucleotide
  Antisense Strand to SEQ ID NO: 475943
uuaagugcuggguuuaacc

SEQ ID NO: 475945 - RNA, 19 nt, Artificial Sequence
  Description of Artificial Sequence: Synthetic oligonucleotide
  Sense strand starting at position 3469 of SEQ ID NO: 317247
cguguguuggguccugagu

SEQ ID NO: 475946 - RNA, 19 nt, Artificial Sequence
  Description of Artificial Sequence: Synthetic oligonucleotide
  Antisense Strand to SEQ ID NO: 475945
acucaggacccaacacacg

SEQ ID NO: 475947 - RNA, 19 nt, Artificial Sequence
  Description of Artificial Sequence: Synthetic oligonucleotide
  Sense strand starting at position 3517 of SEQ ID NO: 317247
guucgauuucugcacggca

SEQ ID NO: 475948 - RNA, 19 nt, Artificial Sequence
  Description of Artificial Sequence: Synthetic oligonucleotide
  Antisense Strand to SEQ ID NO: 475947
ugccgugcagaaaucgaac

SEQ ID NO: 475949 - RNA, 19 nt, Artificial Sequence
  Description of Artificial Sequence: Synthetic oligonucleotide
  Sense strand starting at position 3519 of SEQ ID NO: 317247
ucgauuucugcacggcaau

SEQ ID NO: 475950 - RNA, 19 nt, Artificial Sequence
  Description of Artificial Sequence: Synthetic oligonucleotide
  Antisense Strand to SEQ ID NO: 475949
auugccgugcagaaaucga

SEQ ID NO: 475951 - RNA, 19 nt, Artificial Sequence
  Description of Artificial Sequence: Synthetic oligonucleotide
  Sense strand starting at position 3643 of SEQ ID NO: 317247
acaguuuaagguuaaaucu

SEQ ID NO: 475952 - RNA, 19 nt, Artificial Sequence
  Description of Artificial Sequence: Synthetic oligonucleotide
  Antisense Strand to SEQ ID NO: 475951
agauuuaaccuuaaacugu

SEQ ID NO: 475953 - RNA, 19 nt, Artificial Sequence
  Description of Artificial Sequence: Synthetic oligonucleotide
  Sense strand starting at position 3685 of SEQ ID NO: 317247
gccagcauucccuaagaga

SEQ ID NO: 475954 - RNA, 19 nt, Artificial Sequence
  Description of Artificial Sequence: Synthetic oligonucleotide
  Antisense Strand to SEQ ID NO: 475953
ucucuuagggaaugcuggc

SEQ ID NO: 475955 - RNA, 19 nt, Artificial Sequence
  Description of Artificial Sequence: Synthetic oligonucleotide
  Sense strand starting at position 3694 of SEQ ID NO: 317247
cccuaagagagauguguca

SEQ ID NO: 475956 - RNA, 19 nt, Artificial Sequence
  Description of Artificial Sequence: Synthetic oligonucleotide
  Antisense Strand to SEQ ID NO: 475955
ugacacaucucucuuaggg

SEQ ID NO: 475957 - RNA, 19 nt, Artificial Sequence
  Description of Artificial Sequence: Synthetic oligonucleotide
  Sense strand starting at position 3696 of SEQ ID NO: 317247
cuaagagagaugugucaua

SEQ ID NO: 475958 - RNA, 19 nt, Artificial Sequence
  Description of Artificial Sequence: Synthetic oligonucleotide
  Antisense Strand to SEQ ID NO: 475957
uaugacacaucucucuuag

SEQ ID NO: 475959 - RNA, 19 nt, Artificial Sequence
  Description of Artificial Sequence: Synthetic oligonucleotide
  Sense strand starting at position 3771 of SEQ ID NO: 317247
gagggacggacuugguuua

SEQ ID NO: 475960 - RNA, 19 nt, Artificial Sequence
  Description of Artificial Sequence: Synthetic oligonucleotide
  Antisense Strand to SEQ ID NO: 475959
uaaaccaaguccgucccuc

SEQ ID NO: 475961 - RNA, 19 nt, Artificial Sequence
  Description of Artificial Sequence: Synthetic oligonucleotide
  Sense strand starting at position 3844 of SEQ ID NO: 317247
augcccauccauuguauuu

SEQ ID NO: 475962 - RNA, 19 nt, Artificial Sequence
  Description of Artificial Sequence: Synthetic oligonucleotide
  Antisense Strand to SEQ ID NO: 475961
aaauacaauggaugggcau

SEQ ID NO: 475963 - RNA, 19 nt, Artificial Sequence
  Description of Artificial Sequence: Synthetic oligonucleotide
  Sense strand starting at position 3889 of SEQ ID NO: 317247
guagaccugguuuaggauu

SEQ ID NO: 475964 - RNA, 19 nt, Artificial Sequence
  Description of Artificial Sequence: Synthetic oligonucleotide
  Antisense Strand to SEQ ID NO: 475963
aauccuaaaccaggucuac

SEQ ID NO: 475965 - RNA, 19 nt, Artificial Sequence
  Description of Artificial Sequence: Synthetic oligonucleotide
  Sense strand starting at position 3954 of SEQ ID NO: 317247
gagucacugaaacgaugua

SEQ ID NO: 475966 - RNA, 19 nt, Artificial Sequence
  Description of Artificial Sequence: Synthetic oligonucleotide
  Antisense Strand to SEQ ID NO: 475965
uacaucguuucagugacuc

SEQ ID NO: 475967 - RNA, 19 nt, Artificial Sequence
  Description of Artificial Sequence: Synthetic oligonucleotide
  Sense strand starting at position 31 of SEQ ID NO: 317248
uaugguaauuaggacaauu

SEQ ID NO: 475968 - RNA, 19 nt, Artificial Sequence
  Description of Artificial Sequence: Synthetic oligonucleotide
  Antisense Strand to SEQ ID NO: 475967
aauuguccuaauuaccaua

SEQ ID NO: 475969 - RNA, 19 nt, Artificial Sequence
  Description of Artificial Sequence: Synthetic oligonucleotide
  Sense strand starting at position 78 of SEQ ID NO: 317248
ugggaaguccuauggucua

SEQ ID NO: 475970 - RNA, 19 nt, Artificial Sequence
  Description of Artificial Sequence: Synthetic oligonucleotide
  Antisense Strand to SEQ ID NO: 475969
uagaccauaggacuuccca

SEQ ID NO: 475971 - RNA, 19 nt, Artificial Sequence
  Description of Artificial Sequence: Synthetic oligonucleotide
  Sense strand starting at position 81 of SEQ ID NO: 317248
gaaguccuauggucuaaua

SEQ ID NO: 475972 - RNA, 19 nt, Artificial Sequence
  Description of Artificial Sequence: Synthetic oligonucleotide
  Antisense Strand to SEQ ID NO: 475971
uauuagaccauaggacuuc

SEQ ID NO: 475973 - RNA, 19 nt, Artificial Sequence
  Description of Artificial Sequence: Synthetic oligonucleotide
  Sense strand starting at position 83 of SEQ ID NO: 317248
aguccuauggucuaauauu

SEQ ID NO: 475974 - RNA, 19 nt, Artificial Sequence
  Description of Artificial Sequence: Synthetic oligonucleotide
  Antisense Strand to SEQ ID NO: 475973
aauauuagaccauaggacu

SEQ ID NO: 475975 - RNA, 19 nt, Artificial Sequence
  Description of Artificial Sequence: Synthetic oligonucleotide
  Sense strand starting at position 171 of SEQ ID NO: 317248
augugaauccagugauucc

SEQ ID NO: 475976 - RNA, 19 nt, Artificial Sequence
  Description of Artificial Sequence: Synthetic oligonucleotide
  Antisense Strand to SEQ ID NO: 475975
ggaaucacuggauucacau

SEQ ID NO: 475977 - RNA, 19 nt, Artificial Sequence
  Description of Artificial Sequence: Synthetic oligonucleotide
  Sense strand starting at position 178 of SEQ ID NO: 317248
uccagugauuccuucugag

SEQ ID NO: 475978 - RNA, 19 nt, Artificial Sequence
  Description of Artificial Sequence: Synthetic oligonucleotide
  Antisense Strand to SEQ ID NO: 475977
cucagaaggaaucacugga

SEQ ID NO: 475979 - RNA, 19 nt, Artificial Sequence
  Description of Artificial Sequence: Synthetic oligonucleotide
  Sense strand starting at position 217 of SEQ ID NO: 317248
aauggucuugugggaacuu

SEQ ID NO: 475980 - RNA, 19 nt, Artificial Sequence
  Description of Artificial Sequence: Synthetic oligonucleotide
  Antisense Strand to SEQ ID NO: 475979
aaguucccacaagaccauu

SEQ ID NO: 475981 - RNA, 19 nt, Artificial Sequence
  Description of Artificial Sequence: Synthetic oligonucleotide
  Sense strand starting at position 250 of SEQ ID NO: 317248
agccuaauauaguugacaa

SEQ ID NO: 475982 - RNA, 19 nt, Artificial Sequence
  Description of Artificial Sequence: Synthetic oligonucleotide
  Antisense Strand to SEQ ID NO: 475981
uugucaacuauauuaggcu

SEQ ID NO: 475983 - RNA, 19 nt, Artificial Sequence
  Description of Artificial Sequence: Synthetic oligonucleotide
  Sense strand starting at position 284 of SEQ ID NO: 317248
gguugaguaucaguaguuc

SEQ ID NO: 475984 - RNA, 19 nt, Artificial Sequence
  Description of Artificial Sequence: Synthetic oligonucleotide
  Antisense Strand to SEQ ID NO: 475983
gaacuacugauacucaacc

SEQ ID NO: 475985 - RNA, 19 nt, Artificial Sequence
  Description of Artificial Sequence: Synthetic oligonucleotide
  Sense strand starting at position 408 of SEQ ID NO: 317248
agcaaucuguugcccagaa

SEQ ID NO: 475986 - RNA, 19 nt, Artificial Sequence
  Description of Artificial Sequence: Synthetic oligonucleotide
  Antisense Strand to SEQ ID NO: 475985
uucugggcaacagauugcu

SEQ ID NO: 475987 - RNA, 19 nt, Artificial Sequence
  Description of Artificial Sequence: Synthetic oligonucleotide
  Sense strand starting at position 409 of SEQ ID NO: 317248
gcaaucuguugcccagaaa

SEQ ID NO: 475988 - RNA, 19 nt, Artificial Sequence
  Description of Artificial Sequence: Synthetic oligonucleotide
  Antisense Strand to SEQ ID NO: 475987
uuucugggcaacagauugc

SEQ ID NO: 475989 - RNA, 19 nt, Artificial Sequence
  Description of Artificial Sequence: Synthetic oligonucleotide
  Sense strand starting at position 410 of SEQ ID NO: 317248
caaucuguugcccagaaag

SEQ ID NO: 475990 - RNA, 19 nt, Artificial Sequence
  Description of Artificial Sequence: Synthetic oligonucleotide
  Antisense Strand to SEQ ID NO: 475989
cuuucugggcaacagauug

SEQ ID NO: 475991 - RNA, 19 nt, Artificial Sequence
  Description of Artificial Sequence: Synthetic oligonucleotide
  Sense strand starting at position 470 of SEQ ID NO: 317248
ccuguuuguggcuagaguu

SEQ ID NO: 475992 - RNA, 19 nt, Artificial Sequence
  Description of Artificial Sequence: Synthetic oligonucleotide
  Antisense Strand to SEQ ID NO: 475991
aacucuagccacaaacagg

SEQ ID NO: 475993 - RNA, 19 nt, Artificial Sequence
  Description of Artificial Sequence: Synthetic oligonucleotide
  Sense strand starting at position 478 of SEQ ID NO: 317248
uggcuagaguuauuccaau

SEQ ID NO: 475994 - RNA, 19 nt, Artificial Sequence
  Description of Artificial Sequence: Synthetic oligonucleotide
  Antisense Strand to SEQ ID NO: 475993
auuggaauaacucuagcca

SEQ ID NO: 475995 - RNA, 19 nt, Artificial Sequence
  Description of Artificial Sequence: Synthetic oligonucleotide
  Sense strand starting at position 530 of SEQ ID NO: 317248
uagaaauucuguuuggcau

SEQ ID NO: 475996 - RNA, 19 nt, Artificial Sequence
  Description of Artificial Sequence: Synthetic oligonucleotide
  Antisense Strand to SEQ ID NO: 475995
augccaaacagaauuucua

SEQ ID NO: 475997 - RNA, 19 nt, Artificial Sequence
  Description of Artificial Sequence: Synthetic oligonucleotide
  Sense strand starting at position 544 of SEQ ID NO: 317248
ggcauuuauguaugucaca

SEQ ID NO: 475998 - RNA, 19 nt, Artificial Sequence
  Description of Artificial Sequence: Synthetic oligonucleotide
  Antisense Strand to SEQ ID NO: 475997
ugugacauacauaaaugcc

SEQ ID NO: 475999 - RNA, 19 nt, Artificial Sequence
  Description of Artificial Sequence: Synthetic oligonucleotide
  Sense strand starting at position 659 of SEQ ID NO: 317248
guuccuaguguugaagagu

SEQ ID NO: 476000 - RNA, 19 nt, Artificial Sequence
  Description of Artificial Sequence: Synthetic oligonucleotide
  Antisense Strand to SEQ ID NO: 475999
acucuucaacacuaggaac

SEQ ID NO: 476001 - RNA, 19 nt, Artificial Sequence
  Description of Artificial Sequence: Synthetic oligonucleotide
  Sense strand starting at position 768 of SEQ ID NO: 317248
gccugacucccugauggua

SEQ ID NO: 476002 - RNA, 19 nt, Artificial Sequence
  Description of Artificial Sequence: Synthetic oligonucleotide
  Antisense Strand to SEQ ID NO: 476001
uaccaucagggagucaggc

SEQ ID NO: 476003 - RNA, 19 nt, Artificial Sequence
  Description of Artificial Sequence: Synthetic oligonucleotide
  Sense strand starting at position 828 of SEQ ID NO: 317248
cacacaggugcucaagaau

SEQ ID NO: 476004 - RNA, 19 nt, Artificial Sequence
  Description of Artificial Sequence: Synthetic oligonucleotide
  Antisense Strand to SEQ ID NO: 476003
auucuugagcaccugugug

SEQ ID NO: 476005 - RNA, 19 nt, Artificial Sequence
  Description of Artificial Sequence: Synthetic oligonucleotide
  Sense strand starting at position 889 of SEQ ID NO: 317248
aguaauacuguugagucaa

SEQ ID NO: 476006 - RNA, 19 nt, Artificial Sequence
  Description of Artificial Sequence: Synthetic oligonucleotide
  Antisense Strand to SEQ ID NO: 476005
uugacucaacaguauuacu

SEQ ID NO: 476007 - RNA, 19 nt, Artificial Sequence
  Description of Artificial Sequence: Synthetic oligonucleotide
  Sense strand starting at position 899 of SEQ ID NO: 317248
uugagucaacauuggaaca

SEQ ID NO: 476008 - RNA, 19 nt, Artificial Sequence
  Description of Artificial Sequence: Synthetic oligonucleotide
  Antisense Strand to SEQ ID NO: 476007
uguuccaauguugacucaa

SEQ ID NO: 476009 - RNA, 19 nt, Artificial Sequence
  Description of Artificial Sequence: Synthetic oligonucleotide
  Sense strand starting at position 959 of SEQ ID NO: 317248
agacuuauuguacauguua

SEQ ID NO: 476010 - RNA, 19 nt, Artificial Sequence
  Description of Artificial Sequence: Synthetic oligonucleotide
  Antisense Strand to SEQ ID NO: 476009
uaacauguacaauaagucu

SEQ ID NO: 476011 - RNA, 19 nt, Artificial Sequence
  Description of Artificial Sequence: Synthetic oligonucleotide
  Sense strand starting at position 1028 of SEQ ID NO: 317248
uugaaauucugagccauau

SEQ ID NO: 476012 - RNA, 19 nt, Artificial Sequence
  Description of Artificial Sequence: Synthetic oligonucleotide
  Antisense Strand to SEQ ID NO: 476011
auauggcucagaauuucaa

SEQ ID NO: 476013 - RNA, 19 nt, Artificial Sequence
  Description of Artificial Sequence: Synthetic oligonucleotide
  Sense strand starting at position 1032 of SEQ ID NO: 317248
aauucugagccauauuggu

SEQ ID NO: 476014 - RNA, 19 nt, Artificial Sequence
  Description of Artificial Sequence: Synthetic oligonucleotide
  Antisense Strand to SEQ ID NO: 476013
accaauauggcucagaauu

SEQ ID NO: 476015 - RNA, 19 nt, Artificial Sequence
  Description of Artificial Sequence: Synthetic oligonucleotide
  Sense strand starting at position 1037 of SEQ ID NO: 317248
ugagccauauugguucuau

SEQ ID NO: 476016 - RNA, 19 nt, Artificial Sequence
  Description of Artificial Sequence: Synthetic oligonucleotide
  Antisense Strand to SEQ ID NO: 476015
auagaaccaauauggcuca

SEQ ID NO: 476017 - RNA, 19 nt, Artificial Sequence
  Description of Artificial Sequence: Synthetic oligonucleotide
  Sense strand starting at position 1038 of SEQ ID NO: 317248
gagccauauugguucuaua

SEQ ID NO: 476018 - RNA, 19 nt, Artificial Sequence
  Description of Artificial Sequence: Synthetic oligonucleotide
  Antisense Strand to SEQ ID NO: 476017
uauagaaccaauauggcuc

SEQ ID NO: 476019 - RNA, 19 nt, Artificial Sequence
  Description of Artificial Sequence: Synthetic oligonucleotide
  Sense strand starting at position 1049 of SEQ ID NO: 317248
guucuauaagccugauacc

SEQ ID NO: 476020 - RNA, 19 nt, Artificial Sequence
  Description of Artificial Sequence: Synthetic oligonucleotide
  Antisense Strand to SEQ ID NO: 476019
gguaucaggcuuauagaac

SEQ ID NO: 476021 - RNA, 19 nt, Artificial Sequence
  Description of Artificial Sequence: Synthetic oligonucleotide
  Sense strand starting at position 1117 of SEQ ID NO: 317248
ucauaucuauuggauaaga

SEQ ID NO: 476022 - RNA, 19 nt, Artificial Sequence
  Description of Artificial Sequence: Synthetic oligonucleotide
  Antisense Strand to SEQ ID NO: 476021
ucuuauccaauagauauga

SEQ ID NO: 476023 - RNA, 19 nt, Artificial Sequence
  Description of Artificial Sequence: Synthetic oligonucleotide
  Sense strand starting at position 1145 of SEQ ID NO: 317248
aguacugaucuuggaaucu

SEQ ID NO: 476024 - RNA, 19 nt, Artificial Sequence
  Description of Artificial Sequence: Synthetic oligonucleotide
  Antisense Strand to SEQ ID NO: 476023
agauuccaagaucaguacu

SEQ ID NO: 476025 - RNA, 19 nt, Artificial Sequence
  Description of Artificial Sequence: Synthetic oligonucleotide
  Sense strand starting at position 1340 of SEQ ID NO: 317248
aacagaauugcaugggacu

SEQ ID NO: 476026 - RNA, 19 nt, Artificial Sequence
  Description of Artificial Sequence: Synthetic oligonucleotide
  Antisense Strand to SEQ ID NO: 476025
agucccaugcaauucuguu

SEQ ID NO: 476027 - RNA, 19 nt, Artificial Sequence
  Description of Artificial Sequence: Synthetic oligonucleotide
  Sense strand starting at position 1352 of SEQ ID NO: 317248
ugggacucuacugguagaa

SEQ ID NO: 476028 - RNA, 19 nt, Artificial Sequence
  Description of Artificial Sequence: Synthetic oligonucleotide
  Antisense Strand to SEQ ID NO: 476027
uucuaccaguagaguccca

SEQ ID NO: 476029 - RNA, 19 nt, Artificial Sequence
  Description of Artificial Sequence: Synthetic oligonucleotide
  Sense strand starting at position 1364 of SEQ ID NO: 317248
gguagaagcuccuuuaucu

SEQ ID NO: 476030 - RNA, 19 nt, Artificial Sequence
  Description of Artificial Sequence: Synthetic oligonucleotide
  Antisense Strand to SEQ ID NO: 476029
agauaaaggagcuucuacc

SEQ ID NO: 476031 - RNA, 19 nt, Artificial Sequence
  Description of Artificial Sequence: Synthetic oligonucleotide
  Sense strand starting at position 1373 of SEQ ID NO: 317248
uccuuuaucuguccaaagu

SEQ ID NO: 476032 - RNA, 19 nt, Artificial Sequence
  Description of Artificial Sequence: Synthetic oligonucleotide
  Antisense Strand to SEQ ID NO: 476031
acuuuggacagauaaagga

SEQ ID NO: 476033 - RNA, 19 nt, Artificial Sequence
  Description of Artificial Sequence: Synthetic oligonucleotide
  Sense strand starting at position 1374 of SEQ ID NO: 317248
ccuuuaucuguccaaagug

SEQ ID NO: 476034 - RNA, 19 nt, Artificial Sequence
  Description of Artificial Sequence: Synthetic oligonucleotide
  Antisense Strand to SEQ ID NO: 476033
cacuuuggacagauaaagg

SEQ ID NO: 476035 - RNA, 19 nt, Artificial Sequence
  Description of Artificial Sequence: Synthetic oligonucleotide
  Sense strand starting at position 1412 of SEQ ID NO: 317248
caaagcauaguugaguuua

SEQ ID NO: 476036 - RNA, 19 nt, Artificial Sequence
  Description of Artificial Sequence: Synthetic oligonucleotide
  Antisense Strand to SEQ ID NO: 476035
uaaacucaacuaugcuuug

SEQ ID NO: 476037 - RNA, 19 nt, Artificial Sequence
  Description of Artificial Sequence: Synthetic oligonucleotide
  Sense strand starting at position 1417 of SEQ ID NO: 317248
cauaguugaguuuauggca

SEQ ID NO: 476038 - RNA, 19 nt, Artificial Sequence
  Description of Artificial Sequence: Synthetic oligonucleotide
  Antisense Strand to SEQ ID NO: 476037
ugccauaaacucaacuaug

SEQ ID NO: 476039 - RNA, 19 nt, Artificial Sequence
  Description of Artificial Sequence: Synthetic oligonucleotide
  Sense strand starting at position 1540 of SEQ ID NO: 317248
uguaaucuccuuugucaua

SEQ ID NO: 476040 - RNA, 19 nt, Artificial Sequence
  Description of Artificial Sequence: Synthetic oligonucleotide
  Antisense Strand to SEQ ID NO: 476039
uaugacaaaggagauuaca

SEQ ID NO: 476041 - RNA, 19 nt, Artificial Sequence
  Description of Artificial Sequence: Synthetic oligonucleotide
  Sense strand starting at position 1541 of SEQ ID NO: 317248
guaaucuccuuugucauag

SEQ ID NO: 476042 - RNA, 19 nt, Artificial Sequence
  Description of Artificial Sequence: Synthetic oligonucleotide
  Antisense Strand to SEQ ID NO: 476041
cuaugacaaaggagauuac

SEQ ID NO: 476043 - RNA, 19 nt, Artificial Sequence
  Description of Artificial Sequence: Synthetic oligonucleotide
  Sense strand starting at position 1551 of SEQ ID NO: 317248
uugucauaguauuccuguu

SEQ ID NO: 476044 - RNA, 19 nt, Artificial Sequence
  Description of Artificial Sequence: Synthetic oligonucleotide
  Antisense Strand to SEQ ID NO: 476043
aacaggaauacuaugacaa

SEQ ID NO: 476045 - RNA, 19 nt, Artificial Sequence
  Description of Artificial Sequence: Synthetic oligonucleotide
  Sense strand starting at position 1558 of SEQ ID NO: 317248
aguauuccuguugggauga

SEQ ID NO: 476046 - RNA, 19 nt, Artificial Sequence
  Description of Artificial Sequence: Synthetic oligonucleotide
  Antisense Strand to SEQ ID NO: 476045
ucaucccaacaggaauacu

SEQ ID NO: 476047 - RNA, 19 nt, Artificial Sequence
  Description of Artificial Sequence: Synthetic oligonucleotide
  Sense strand starting at position 37 of SEQ ID NO: 317249
gugggucaucaugaugcaa

SEQ ID NO: 476048 - RNA, 19 nt, Artificial Sequence
  Description of Artificial Sequence: Synthetic oligonucleotide
  Antisense Strand to SEQ ID NO: 476047
uugcaucaugaugacccac

SEQ ID NO: 476049 - RNA, 19 nt, Artificial Sequence
  Description of Artificial Sequence: Synthetic oligonucleotide
  Sense strand starting at position 54 of SEQ ID NO: 317249
aaaugucuagcagguagaa

SEQ ID NO: 476050 - RNA, 19 nt, Artificial Sequence
  Description of Artificial Sequence: Synthetic oligonucleotide
  Antisense Strand to SEQ ID NO: 476049
uucuaccugcuagacauuu

SEQ ID NO: 476051 - RNA, 19 nt, Artificial Sequence
  Description of Artificial Sequence: Synthetic oligonucleotide
  Sense strand starting at position 92 of SEQ ID NO: 317249
ggaagagauugcuccauag

SEQ ID NO: 476052 - RNA, 19 nt, Artificial Sequence
  Description of Artificial Sequence: Synthetic oligonucleotide
  Antisense Strand to SEQ ID NO: 476051
cuauggagcaaucucuucc

SEQ ID NO: 476053 - RNA, 19 nt, Artificial Sequence
  Description of Artificial Sequence: Synthetic oligonucleotide
  Sense strand starting at position 126 of SEQ ID NO: 317249
auuuguagaugagaucacu

SEQ ID NO: 476054 - RNA, 19 nt, Artificial Sequence
  Description of Artificial Sequence: Synthetic oligonucleotide
  Antisense Strand to SEQ ID NO: 476053
agugaucucaucuacaaau

SEQ ID NO: 476055 - RNA, 19 nt, Artificial Sequence
  Description of Artificial Sequence: Synthetic oligonucleotide
  Sense strand starting at position 152 of SEQ ID NO: 317249
guaagaaaggaaugucucu

SEQ ID NO: 476056 - RNA, 19 nt, Artificial Sequence
  Description of Artificial Sequence: Synthetic oligonucleotide
  Antisense Strand to SEQ ID NO: 476055
agagacauuccuuucuuac

SEQ ID NO: 476057 - RNA, 19 nt, Artificial Sequence
  Description of Artificial Sequence: Synthetic oligonucleotide
  Sense strand starting at position 157 of SEQ ID NO: 317249
aaaggaaugucucuauugu

SEQ ID NO: 476058 - RNA, 19 nt, Artificial Sequence
  Description of Artificial Sequence: Synthetic oligonucleotide
  Antisense Strand to SEQ ID NO: 476057
acaauagagacauuccuuu

SEQ ID NO: 476059 - RNA, 19 nt, Artificial Sequence
  Description of Artificial Sequence: Synthetic oligonucleotide
  Sense strand starting at position 158 of SEQ ID NO: 317249
aaggaaugucucuauuguu

SEQ ID NO: 476060 - RNA, 19 nt, Artificial Sequence
  Description of Artificial Sequence: Synthetic oligonucleotide
  Antisense Strand to SEQ ID NO: 476059
aacaauagagacauuccuu

SEQ ID NO: 476061 - RNA, 19 nt, Artificial Sequence
  Description of Artificial Sequence: Synthetic oligonucleotide
  Sense strand starting at position 166 of SEQ ID NO: 317249
ucucuauuguuaccuauga

SEQ ID NO: 476062 - RNA, 19 nt, Artificial Sequence
  Description of Artificial Sequence: Synthetic oligonucleotide
  Antisense Strand to SEQ ID NO: 476061
ucauagguaacaauagaga

SEQ ID NO: 476063 - RNA, 19 nt, Artificial Sequence
  Description of Artificial Sequence: Synthetic oligonucleotide
  Sense strand starting at position 189 of SEQ ID NO: 317249
auagguaauaucuguggau

SEQ ID NO: 476064 - RNA, 19 nt, Artificial Sequence
  Description of Artificial Sequence: Synthetic oligonucleotide
  Antisense Strand to SEQ ID NO: 476063
auccacagauauuaccuau

SEQ ID NO: 476065 - RNA, 19 nt, Artificial Sequence
  Description of Artificial Sequence: Synthetic oligonucleotide
  Sense strand starting at position 190 of SEQ ID NO: 317249
uagguaauaucuguggaua

SEQ ID NO: 476066 - RNA, 19 nt, Artificial Sequence
  Description of Artificial Sequence: Synthetic oligonucleotide
  Antisense Strand to SEQ ID NO: 476065
uauccacagauauuaccua

SEQ ID NO: 476067 - RNA, 19 nt, Artificial Sequence
  Description of Artificial Sequence: Synthetic oligonucleotide
  Sense strand starting at position 191 of SEQ ID NO: 317249
agguaauaucuguggauau

SEQ ID NO: 476068 - RNA, 19 nt, Artificial Sequence
  Description of Artificial Sequence: Synthetic oligonucleotide
  Antisense Strand to SEQ ID NO: 476067
auauccacagauauuaccu

SEQ ID NO: 476069 - RNA, 19 nt, Artificial Sequence
  Description of Artificial Sequence: Synthetic oligonucleotide
  Sense strand starting at position 193 of SEQ ID NO: 317249
guaauaucuguggauauua

SEQ ID NO: 476070 - RNA, 19 nt, Artificial Sequence
  Description of Artificial Sequence: Synthetic oligonucleotide
  Antisense Strand to SEQ ID NO: 476069
uaauauccacagauauuac

SEQ ID NO: 476071 - RNA, 19 nt, Artificial Sequence
  Description of Artificial Sequence: Synthetic oligonucleotide
  Sense strand starting at position 205 of SEQ ID NO: 317249
gauauuauuugugggagaa

SEQ ID NO: 476072 - RNA, 19 nt, Artificial Sequence
  Description of Artificial Sequence: Synthetic oligonucleotide
  Antisense Strand to SEQ ID NO: 476071
uucucccacaaauaauauc

SEQ ID NO: 476073 - RNA, 19 nt, Artificial Sequence
  Description of Artificial Sequence: Synthetic oligonucleotide
  Sense strand starting at position 207 of SEQ ID NO: 317249
uauuauuugugggagaaga

SEQ ID NO: 476074 - RNA, 19 nt, Artificial Sequence
  Description of Artificial Sequence: Synthetic oligonucleotide
  Antisense Strand to SEQ ID NO: 476073
ucuucucccacaaauaaua

SEQ ID NO: 476075 - RNA, 19 nt, Artificial Sequence
  Description of Artificial Sequence: Synthetic oligonucleotide
  Sense strand starting at position 455 of SEQ ID NO: 317249
aagaguagagccugcaaga

SEQ ID NO: 476076 - RNA, 19 nt, Artificial Sequence
  Description of Artificial Sequence: Synthetic oligonucleotide
  Antisense Strand to SEQ ID NO: 476075
ucuugcaggcucuacucuu

SEQ ID NO: 476077 - RNA, 19 nt, Artificial Sequence
  Description of Artificial Sequence: Synthetic oligonucleotide
  Sense strand starting at position 526 of SEQ ID NO: 317249
ucuguagcuccaggauaau

SEQ ID NO: 476078 - RNA, 19 nt, Artificial Sequence
  Description of Artificial Sequence: Synthetic oligonucleotide
  Antisense Strand to SEQ ID NO: 476077
auuauccuggagcuacaga

SEQ ID NO: 476079 - RNA, 19 nt, Artificial Sequence
  Description of Artificial Sequence: Synthetic oligonucleotide
  Sense strand starting at position 678 of SEQ ID NO: 317249
ugaggugaauucucauuag

SEQ ID NO: 476080 - RNA, 19 nt, Artificial Sequence
  Description of Artificial Sequence: Synthetic oligonucleotide
  Antisense Strand to SEQ ID NO: 476079
cuaaugagaauucaccuca

SEQ ID NO: 476081 - RNA, 19 nt, Artificial Sequence
  Description of Artificial Sequence: Synthetic oligonucleotide
  Sense strand starting at position 682 of SEQ ID NO: 317249
gugaauucucauuagccuc

SEQ ID NO: 476082 - RNA, 19 nt, Artificial Sequence
  Description of Artificial Sequence: Synthetic oligonucleotide
  Antisense Strand to SEQ ID NO: 476081
gaggcuaaugagaauucac

SEQ ID NO: 476083 - RNA, 19 nt, Artificial Sequence
  Description of Artificial Sequence: Synthetic oligonucleotide
  Sense strand starting at position 747 of SEQ ID NO: 317249
gagaaagaucccugggcau

SEQ ID NO: 476084 - RNA, 19 nt, Artificial Sequence
  Description of Artificial Sequence: Synthetic oligonucleotide
  Antisense Strand to SEQ ID NO: 476083
augcccagggaucuuucuc

SEQ ID NO: 476085 - RNA, 19 nt, Artificial Sequence
  Description of Artificial Sequence: Synthetic oligonucleotide
  Sense strand starting at position 749 of SEQ ID NO: 317249
gaaagaucccugggcauca

SEQ ID NO: 476086 - RNA, 19 nt, Artificial Sequence
  Description of Artificial Sequence: Synthetic oligonucleotide
  Antisense Strand to SEQ ID NO: 476085
ugaugcccagggaucuuuc

SEQ ID NO: 476087 - RNA, 19 nt, Artificial Sequence
  Description of Artificial Sequence: Synthetic oligonucleotide
  Sense strand starting at position 2661 of SEQ ID NO: 317249
ucgaguuucgagggacaga

SEQ ID NO: 476088 - RNA, 19 nt, Artificial Sequence
  Description of Artificial Sequence: Synthetic oligonucleotide
  Antisense Strand to SEQ ID NO: 476087
ucugucccucgaaacucga

SEQ ID NO: 476089 - RNA, 19 nt, Artificial Sequence
  Description of Artificial Sequence: Synthetic oligonucleotide
  Sense strand starting at position 2676 of SEQ ID NO: 317249
cagagauuauaccuuccga

SEQ ID NO: 476090 - RNA, 19 nt, Artificial Sequence
  Description of Artificial Sequence: Synthetic oligonucleotide
  Antisense Strand to SEQ ID NO: 476089
ucggaagguauaaucucug

SEQ ID NO: 476091 - RNA, 19 nt, Artificial Sequence
  Description of Artificial Sequence: Synthetic oligonucleotide
  Sense strand starting at position 2712 of SEQ ID NO: 317249
aagggagcuuucuugauca

SEQ ID NO: 476092 - RNA, 19 nt, Artificial Sequence
  Description of Artificial Sequence: Synthetic oligonucleotide
  Antisense Strand to SEQ ID NO: 476091
ugaucaagaaagcucccuu

SEQ ID NO: 476093 - RNA, 19 nt, Artificial Sequence
  Description of Artificial Sequence: Synthetic oligonucleotide
  Sense strand starting at position 2776 of SEQ ID NO: 317249
uuuccugaagggugcaaua

SEQ ID NO: 476094 - RNA, 19 nt, Artificial Sequence
  Description of Artificial Sequence: Synthetic oligonucleotide
  Antisense Strand to SEQ ID NO: 476093
uauugcacccuucaggaaa

SEQ ID NO: 476095 - RNA, 19 nt, Artificial Sequence
  Description of Artificial Sequence: Synthetic oligonucleotide
  Sense strand starting at position 2789 of SEQ ID NO: 317249
gcaauaugguuuccuaaau

SEQ ID NO: 476096 - RNA, 19 nt, Artificial Sequence
  Description of Artificial Sequence: Synthetic oligonucleotide
  Antisense Strand to SEQ ID NO: 476095
auuuaggaaaccauauugc

SEQ ID NO: 476097 - RNA, 19 nt, Artificial Sequence
  Description of Artificial Sequence: Synthetic oligonucleotide
  Sense strand starting at position 2930 of SEQ ID NO: 317249
aguuucuguguugagagau

SEQ ID NO: 476098 - RNA, 19 nt, Artificial Sequence
  Description of Artificial Sequence: Synthetic oligonucleotide
  Antisense Strand to SEQ ID NO: 476097
aucucucaacacagaaacu

SEQ ID NO: 476099 - RNA, 19 nt, Artificial Sequence
  Description of Artificial Sequence: Synthetic oligonucleotide
  Sense strand starting at position 2936 of SEQ ID NO: 317249
uguguugagagauggaaag

SEQ ID NO: 476100 - RNA, 19 nt, Artificial Sequence
  Description of Artificial Sequence: Synthetic oligonucleotide
  Antisense Strand to SEQ ID NO: 476099
cuuuccaucucucaacaca

SEQ ID NO: 476101 - RNA, 19 nt, Artificial Sequence
  Description of Artificial Sequence: Synthetic oligonucleotide
  Sense strand starting at position 2952 of SEQ ID NO: 317249
aaguauagugagggucuau

SEQ ID NO: 476102 - RNA, 19 nt, Artificial Sequence
  Description of Artificial Sequence: Synthetic oligonucleotide
  Antisense Strand to SEQ ID NO: 476101
auagacccucacuauacuu

SEQ ID NO: 476103 - RNA, 19 nt, Artificial Sequence
  Description of Artificial Sequence: Synthetic oligonucleotide
  Sense strand starting at position 2978 of SEQ ID NO: 317249
ugugcaucuagagaauguu

SEQ ID NO: 476104 - RNA, 19 nt, Artificial Sequence
  Description of Artificial Sequence: Synthetic oligonucleotide
  Antisense Strand to SEQ ID NO: 476103
aacauucucuagaugcaca

SEQ ID NO: 476105 - RNA, 19 nt, Artificial Sequence
  Description of Artificial Sequence: Synthetic oligonucleotide
  Sense strand starting at position 2981 of SEQ ID NO: 317249
gcaucuagagaauguuaca

SEQ ID NO: 476106 - RNA, 19 nt, Artificial Sequence
  Description of Artificial Sequence: Synthetic oligonucleotide
  Antisense Strand to SEQ ID NO: 476105
uguaacauucucuagaugc

SEQ ID NO: 476107 - RNA, 19 nt, Artificial Sequence
  Description of Artificial Sequence: Synthetic oligonucleotide
  Sense strand starting at position 3140 of SEQ ID NO: 317249
ggaggaauauaguccuguu

SEQ ID NO: 476108 - RNA, 19 nt, Artificial Sequence
  Description of Artificial Sequence: Synthetic oligonucleotide
  Antisense Strand to SEQ ID NO: 476107
aacaggacuauauuccucc

SEQ ID NO: 476109 - RNA, 19 nt, Artificial Sequence
  Description of Artificial Sequence: Synthetic oligonucleotide
  Sense strand starting at position 3219 of SEQ ID NO: 317249
aucccagagucuguacauu

SEQ ID NO: 476110 - RNA, 19 nt, Artificial Sequence
  Description of Artificial Sequence: Synthetic oligonucleotide
  Antisense Strand to SEQ ID NO: 476109
aauguacagacucugggau

SEQ ID NO: 476111 - RNA, 19 nt, Artificial Sequence
  Description of Artificial Sequence: Synthetic oligonucleotide
  Sense strand starting at position 3281 of SEQ ID NO: 317249
gaggaagaauuccacaaga

SEQ ID NO: 476112 - RNA, 19 nt, Artificial Sequence
  Description of Artificial Sequence: Synthetic oligonucleotide
  Antisense Strand to SEQ ID NO: 476111
ucuuguggaauucuuccuc

SEQ ID NO: 476113 - RNA, 19 nt, Artificial Sequence
  Description of Artificial Sequence: Synthetic oligonucleotide
  Sense strand starting at position 3343 of SEQ ID NO: 317249
uuaaguugaugggcugaau

SEQ ID NO: 476114 - RNA, 19 nt, Artificial Sequence
  Description of Artificial Sequence: Synthetic oligonucleotide
  Antisense Strand to SEQ ID NO: 476113
auucagcccaucaacuuaa

SEQ ID NO: 476115 - RNA, 19 nt, Artificial Sequence
  Description of Artificial Sequence: Synthetic oligonucleotide
  Sense strand starting at position 3443 of SEQ ID NO: 317249
guacaagugcagucgcauu

SEQ ID NO: 476116 - RNA, 19 nt, Artificial Sequence
  Description of Artificial Sequence: Synthetic oligonucleotide
  Antisense Strand to SEQ ID NO: 476115
aaugcgacugcacuuguac

SEQ ID NO: 476117 - RNA, 19 nt, Artificial Sequence
  Description of Artificial Sequence: Synthetic oligonucleotide
  Sense strand starting at position 3455 of SEQ ID NO: 317249
ucgcauuacacggacauaa

SEQ ID NO: 476118 - RNA, 19 nt, Artificial Sequence
  Description of Artificial Sequence: Synthetic oligonucleotide
  Antisense Strand to SEQ ID NO: 476117
uuauguccguguaaugcga

SEQ ID NO: 476119 - RNA, 19 nt, Artificial Sequence
  Description of Artificial Sequence: Synthetic oligonucleotide
  Sense strand starting at position 3514 of SEQ ID NO: 317249
ccuaauaaugugcacugua

SEQ ID NO: 476120 - RNA, 19 nt, Artificial Sequence
  Description of Artificial Sequence: Synthetic oligonucleotide
  Antisense Strand to SEQ ID NO: 476119
uacagugcacauuauuagg

SEQ ID NO: 476121 - RNA, 19 nt, Artificial Sequence
  Description of Artificial Sequence: Synthetic oligonucleotide
  Sense strand starting at position 3649 of SEQ ID NO: 317249
auaagagauucugcaguuu

SEQ ID NO: 476122 - RNA, 19 nt, Artificial Sequence
  Description of Artificial Sequence: Synthetic oligonucleotide
  Antisense Strand to SEQ ID NO: 476121
aaacugcagaaucucuuau

SEQ ID NO: 476123 - RNA, 19 nt, Artificial Sequence
  Description of Artificial Sequence: Synthetic oligonucleotide
  Sense strand starting at position 3672 of SEQ ID NO: 317249
cuuuguuucugaguaauuu

SEQ ID NO: 476124 - RNA, 19 nt, Artificial Sequence
  Description of Artificial Sequence: Synthetic oligonucleotide
  Antisense Strand to SEQ ID NO: 476123
aaauuacucagaaacaaag

SEQ ID NO: 476125 - RNA, 19 nt, Artificial Sequence
  Description of Artificial Sequence: Synthetic oligonucleotide
  Sense strand starting at position 3856 of SEQ ID NO: 317249
gugauagguacacagugua

SEQ ID NO: 476126 - RNA, 19 nt, Artificial Sequence
  Description of Artificial Sequence: Synthetic oligonucleotide
  Antisense Strand to SEQ ID NO: 476125
uacacuguguaccuaucac

SEQ ID NO: 476127 - RNA, 19 nt, Artificial Sequence
  Description of Artificial Sequence: Synthetic oligonucleotide
  Sense strand starting at position 557 of SEQ ID NO: 317250
acaaguaacugaggaaaga

SEQ ID NO: 476128 - RNA, 19 nt, Artificial Sequence
  Description of Artificial Sequence: Synthetic oligonucleotide
  Antisense Strand to SEQ ID NO: 476127
ucuuuccucaguuacuugu

SEQ ID NO: 476129 - RNA, 19 nt, Artificial Sequence
  Description of Artificial Sequence: Synthetic oligonucleotide
  Sense strand starting at position 994 of SEQ ID NO: 317250
ugauaaucacuuuaggcua

SEQ ID NO: 476130 - RNA, 19 nt, Artificial Sequence
  Description of Artificial Sequence: Synthetic oligonucleotide
  Antisense Strand to SEQ ID NO: 476129
uagccuaaagugauuauca

SEQ ID NO: 476131 - RNA, 19 nt, Artificial Sequence
  Description of Artificial Sequence: Synthetic oligonucleotide
  Sense strand starting at position 1223 of SEQ ID NO: 317250
aaagcuagcuauguugaca

SEQ ID NO: 476132 - RNA, 19 nt, Artificial Sequence
  Description of Artificial Sequence: Synthetic oligonucleotide
  Antisense Strand to SEQ ID NO: 476131
ugucaacauagcuagcuuu

SEQ ID NO: 476133 - RNA, 19 nt, Artificial Sequence
  Description of Artificial Sequence: Synthetic oligonucleotide
  Sense strand starting at position 1326 of SEQ ID NO: 317250
gauggugagaacugguaag

SEQ ID NO: 476134 - RNA, 19 nt, Artificial Sequence
  Description of Artificial Sequence: Synthetic oligonucleotide
  Antisense Strand to SEQ ID NO: 476133
cuuaccaguucucaccauc

SEQ ID NO: 476135 - RNA, 19 nt, Artificial Sequence
  Description of Artificial Sequence: Synthetic oligonucleotide
  Sense strand starting at position 1391 of SEQ ID NO: 317250
gcuggucguaggugugaau

SEQ ID NO: 476136 - RNA, 19 nt, Artificial Sequence
  Description of Artificial Sequence: Synthetic oligonucleotide
  Antisense Strand to SEQ ID NO: 476135
auucacaccuacgaccagc

SEQ ID NO: 476137 - RNA, 19 nt, Artificial Sequence
  Description of Artificial Sequence: Synthetic oligonucleotide
  Sense strand starting at position 1411 of SEQ ID NO: 317250
aacgaaagaugucaagguu

SEQ ID NO: 476138 - RNA, 19 nt, Artificial Sequence
  Description of Artificial Sequence: Synthetic oligonucleotide
  Antisense Strand to SEQ ID NO: 476137
aaccuugacaucuuucguu

SEQ ID NO: 476139 - RNA, 19 nt, Artificial Sequence
  Description of Artificial Sequence: Synthetic oligonucleotide
  Sense strand starting at position 1846 of SEQ ID NO: 317250
gcgaguucgacauggcagu

SEQ ID NO: 476140 - RNA, 19 nt, Artificial Sequence
  Description of Artificial Sequence: Synthetic oligonucleotide
  Antisense Strand to SEQ ID NO: 476139
acugccaugucgaacucgc

SEQ ID NO: 476141 - RNA, 19 nt, Artificial Sequence
  Description of Artificial Sequence: Synthetic oligonucleotide
  Sense strand starting at position 2161 of SEQ ID NO: 317250
accacugugcgugagcaua

SEQ ID NO: 476142 - RNA, 19 nt, Artificial Sequence
  Description of Artificial Sequence: Synthetic oligonucleotide
  Antisense Strand to SEQ ID NO: 476141
uaugcucacgcacaguggu

SEQ ID NO: 476143 - RNA, 19 nt, Artificial Sequence
  Description of Artificial Sequence: Synthetic oligonucleotide
  Sense strand starting at position 2269 of SEQ ID NO: 317250
gaguguguggcuuucgacu

SEQ ID NO: 476144 - RNA, 19 nt, Artificial Sequence
  Description of Artificial Sequence: Synthetic oligonucleotide
  Antisense Strand to SEQ ID NO: 476143
agucgaaagccacacacuc

SEQ ID NO: 476145 - RNA, 19 nt, Artificial Sequence
  Description of Artificial Sequence: Synthetic oligonucleotide
  Sense strand starting at position 2275 of SEQ ID NO: 317250
guggcuuucgacugcaaga

SEQ ID NO: 476146 - RNA, 19 nt, Artificial Sequence
  Description of Artificial Sequence: Synthetic oligonucleotide
  Antisense Strand to SEQ ID NO: 476145
ucuugcagucgaaagccac

SEQ ID NO: 476147 - RNA, 19 nt, Artificial Sequence
  Description of Artificial Sequence: Synthetic oligonucleotide
  Sense strand starting at position 2285 of SEQ ID NO: 317250
acugcaagacccuguugua

SEQ ID NO: 476148 - RNA, 19 nt, Artificial Sequence
  Description of Artificial Sequence: Synthetic oligonucleotide
  Antisense Strand to SEQ ID NO: 476147
uacaacagggucuugcagu

SEQ ID NO: 476149 - RNA, 19 nt, Artificial Sequence
  Description of Artificial Sequence: Synthetic oligonucleotide
  Sense strand starting at position 2344 of SEQ ID NO: 317250
cggucaagcauuugugaug

SEQ ID NO: 476150 - RNA, 19 nt, Artificial Sequence
  Description of Artificial Sequence: Synthetic oligonucleotide
  Antisense Strand to SEQ ID NO: 476149
caucacaaaugcuugaccg

SEQ ID NO: 476151 - RNA, 19 nt, Artificial Sequence
  Description of Artificial Sequence: Synthetic oligonucleotide
  Sense strand starting at position 2349 of SEQ ID NO: 317250
aagcauuugugaugaugcu

SEQ ID NO: 476152 - RNA, 19 nt, Artificial Sequence
  Description of Artificial Sequence: Synthetic oligonucleotide
  Antisense Strand to SEQ ID NO: 476151
agcaucaucacaaaugcuu

SEQ ID NO: 476153 - RNA, 19 nt, Artificial Sequence
  Description of Artificial Sequence: Synthetic oligonucleotide
  Sense strand starting at position 2355 of SEQ ID NO: 317250
uugugaugaugcuuaagac

SEQ ID NO: 476154 - RNA, 19 nt, Artificial Sequence
  Description of Artificial Sequence: Synthetic oligonucleotide
  Antisense Strand to SEQ ID NO: 476153
gucuuaagcaucaucacaa

SEQ ID NO: 476155 - RNA, 19 nt, Artificial Sequence
  Description of Artificial Sequence: Synthetic oligonucleotide
  Sense strand starting at position 2356 of SEQ ID NO: 317250
ugugaugaugcuuaagaca

SEQ ID NO: 476156 - RNA, 19 nt, Artificial Sequence
  Description of Artificial Sequence: Synthetic oligonucleotide
  Antisense Strand to SEQ ID NO: 476155
ugucuuaagcaucaucaca

SEQ ID NO: 476157 - RNA, 19 nt, Artificial Sequence
  Description of Artificial Sequence: Synthetic oligonucleotide
  Sense strand starting at position 2429 of SEQ ID NO: 317250
aagcaucucagacguggua

SEQ ID NO: 476158 - RNA, 19 nt, Artificial Sequence
  Description of Artificial Sequence: Synthetic oligonucleotide
  Antisense Strand to SEQ ID NO: 476157
uaccacgucugagaugcuu

SEQ ID NO: 476159 - RNA, 19 nt, Artificial Sequence
  Description of Artificial Sequence: Synthetic oligonucleotide
  Sense strand starting at position 2431 of SEQ ID NO: 317250
gcaucucagacgugguaga

SEQ ID NO: 476160 - RNA, 19 nt, Artificial Sequence
  Description of Artificial Sequence: Synthetic oligonucleotide
  Antisense Strand to SEQ ID NO: 476159
ucuaccacgucugagaugc

SEQ ID NO: 476161 - RNA, 19 nt, Artificial Sequence
  Description of Artificial Sequence: Synthetic oligonucleotide
  Sense strand starting at position 2509 of SEQ ID NO: 317250
ggaucacacucgucuuaau

SEQ ID NO: 476162 - RNA, 19 nt, Artificial Sequence
  Description of Artificial Sequence: Synthetic oligonucleotide
  Antisense Strand to SEQ ID NO: 476161
auuaagacgagugugaucc

SEQ ID NO: 476163 - RNA, 19 nt, Artificial Sequence
  Description of Artificial Sequence: Synthetic oligonucleotide
  Sense strand starting at position 2519 of SEQ ID NO: 317250
cgucuuaaugauggcaaac

SEQ ID NO: 476164 - RNA, 19 nt, Artificial Sequence
  Description of Artificial Sequence: Synthetic oligonucleotide
  Antisense Strand to SEQ ID NO: 476163
guuugccaucauuaagacg

SEQ ID NO: 476165 - RNA, 19 nt, Artificial Sequence
  Description of Artificial Sequence: Synthetic oligonucleotide
  Sense strand starting at position 2537 of SEQ ID NO: 317250
cgugguaucuugagaagug

SEQ ID NO: 476166 - RNA, 19 nt, Artificial Sequence
  Description of Artificial Sequence: Synthetic oligonucleotide
  Antisense Strand to SEQ ID NO: 476165
cacuucucaagauaccacg

SEQ ID NO: 476167 - RNA, 19 nt, Artificial Sequence
  Description of Artificial Sequence: Synthetic oligonucleotide
  Sense strand starting at position 2547 of SEQ ID NO: 317250
ugagaagugacuugcugga

SEQ ID NO: 476168 - RNA, 19 nt, Artificial Sequence
  Description of Artificial Sequence: Synthetic oligonucleotide
  Antisense Strand to SEQ ID NO: 476167
uccagcaagucacuucuca

SEQ ID NO: 476169 - RNA, 19 nt, Artificial Sequence
  Description of Artificial Sequence: Synthetic oligonucleotide
  Sense strand starting at position 2583 of SEQ ID NO: 317250
guggcauaggcaugguuca

SEQ ID NO: 476170 - RNA, 19 nt, Artificial Sequence
  Description of Artificial Sequence: Synthetic oligonucleotide
  Antisense Strand to SEQ ID NO: 476169
ugaaccaugccuaugccac

SEQ ID NO: 476171 - RNA, 19 nt, Artificial Sequence
  Description of Artificial Sequence: Synthetic oligonucleotide
  Sense strand starting at position 2584 of SEQ ID NO: 317250
uggcauaggcaugguucaa

SEQ ID NO: 476172 - RNA, 19 nt, Artificial Sequence
  Description of Artificial Sequence: Synthetic oligonucleotide
  Antisense Strand to SEQ ID NO: 476171
uugaaccaugccuaugcca

SEQ ID NO: 476173 - RNA, 19 nt, Artificial Sequence
  Description of Artificial Sequence: Synthetic oligonucleotide
  Sense strand starting at position 2631 of SEQ ID NO: 317250
caguuauaagaugagcuua

SEQ ID NO: 476174 - RNA, 19 nt, Artificial Sequence
  Description of Artificial Sequence: Synthetic oligonucleotide
  Antisense Strand to SEQ ID NO: 476173
uaagcucaucuuauaacug

SEQ ID NO: 476175 - RNA, 19 nt, Artificial Sequence
  Description of Artificial Sequence: Synthetic oligonucleotide
  Sense strand starting at position 2651 of SEQ ID NO: 317250
ggguuauuucacuguucgu

SEQ ID NO: 476176 - RNA, 19 nt, Artificial Sequence
  Description of Artificial Sequence: Synthetic oligonucleotide
  Antisense Strand to SEQ ID NO: 476175
acgaacagugaaauaaccc

SEQ ID NO: 476177 - RNA, 19 nt, Artificial Sequence
  Description of Artificial Sequence: Synthetic oligonucleotide
  Sense strand starting at position 2660 of SEQ ID NO: 317250
cacuguucgugucuuauca

SEQ ID NO: 476178 - RNA, 19 nt, Artificial Sequence
  Description of Artificial Sequence: Synthetic oligonucleotide
  Antisense Strand to SEQ ID NO: 476177
ugauaagacacgaacagug

SEQ ID NO: 476179 - RNA, 19 nt, Artificial Sequence
  Description of Artificial Sequence: Synthetic oligonucleotide
  Sense strand starting at position 2664 of SEQ ID NO: 317250
guucgugucuuaucacugu

SEQ ID NO: 476180 - RNA, 19 nt, Artificial Sequence
  Description of Artificial Sequence: Synthetic oligonucleotide
  Antisense Strand to SEQ ID NO: 476179
acagugauaagacacgaac

SEQ ID NO: 476181 - RNA, 19 nt, Artificial Sequence
  Description of Artificial Sequence: Synthetic oligonucleotide
  Sense strand starting at position 2667 of SEQ ID NO: 317250
cgugucuuaucacuguaua

SEQ ID NO: 476182 - RNA, 19 nt, Artificial Sequence
  Description of Artificial Sequence: Synthetic oligonucleotide
  Antisense Strand to SEQ ID NO: 476181
uauacagugauaagacacg

SEQ ID NO: 476183 - RNA, 19 nt, Artificial Sequence
  Description of Artificial Sequence: Synthetic oligonucleotide
  Sense strand starting at position 2668 of SEQ ID NO: 317250
gugucuuaucacuguauag

SEQ ID NO: 476184 - RNA, 19 nt, Artificial Sequence
  Description of Artificial Sequence: Synthetic oligonucleotide
  Antisense Strand to SEQ ID NO: 476183
cuauacagugauaagacac

SEQ ID NO: 476185 - RNA, 19 nt, Artificial Sequence
  Description of Artificial Sequence: Synthetic oligonucleotide
  Sense strand starting at position 2670 of SEQ ID NO: 317250
gucuuaucacuguauagug

SEQ ID NO: 476186 - RNA, 19 nt, Artificial Sequence
  Description of Artificial Sequence: Synthetic oligonucleotide
  Antisense Strand to SEQ ID NO: 476185
cacuauacagugauaagac

SEQ ID NO: 476187 - RNA, 19 nt, Artificial Sequence
  Description of Artificial Sequence: Synthetic oligonucleotide
  Sense strand starting at position 2678 of SEQ ID NO: 317250
acuguauaguguuuacauu

SEQ ID NO: 476188 - RNA, 19 nt, Artificial Sequence
  Description of Artificial Sequence: Synthetic oligonucleotide
  Antisense Strand to SEQ ID NO: 476187
aauguaaacacuauacagu

SEQ ID NO: 476189 - RNA, 19 nt, Artificial Sequence
  Description of Artificial Sequence: Synthetic oligonucleotide
  Sense strand starting at position 2679 of SEQ ID NO: 317250
cuguauaguguuuacauua

SEQ ID NO: 476190 - RNA, 19 nt, Artificial Sequence
  Description of Artificial Sequence: Synthetic oligonucleotide
  Antisense Strand to SEQ ID NO: 476189
uaauguaaacacuauacag

SEQ ID NO: 476191 - RNA, 19 nt, Artificial Sequence
  Description of Artificial Sequence: Synthetic oligonucleotide
  Sense strand starting at position 2719 of SEQ ID NO: 317250
aaguguggccucuaagaua

SEQ ID NO: 476192 - RNA, 19 nt, Artificial Sequence
  Description of Artificial Sequence: Synthetic oligonucleotide
  Antisense Strand to SEQ ID NO: 476191
uaucuuagaggccacacuu

SEQ ID NO: 476193 - RNA, 19 nt, Artificial Sequence
  Description of Artificial Sequence: Synthetic oligonucleotide
  Sense strand starting at position 2869 of SEQ ID NO: 317250
gggcuccucuaauucucaa

SEQ ID NO: 476194 - RNA, 19 nt, Artificial Sequence
  Description of Artificial Sequence: Synthetic oligonucleotide
  Antisense Strand to SEQ ID NO: 476193
uugagaauuagaggagccc

SEQ ID NO: 476195 - RNA, 19 nt, Artificial Sequence
  Description of Artificial Sequence: Synthetic oligonucleotide
  Sense strand starting at position 2948 of SEQ ID NO: 317250
ugagcacucgccuguguaa

SEQ ID NO: 476196 - RNA, 19 nt, Artificial Sequence
  Description of Artificial Sequence: Synthetic oligonucleotide
  Antisense Strand to SEQ ID NO: 476195
uuacacaggcgagugcuca

SEQ ID NO: 476197 - RNA, 19 nt, Artificial Sequence
  Description of Artificial Sequence: Synthetic oligonucleotide
  Sense strand starting at position 2950 of SEQ ID NO: 317250
agcacucgccuguguaaau

SEQ ID NO: 476198 - RNA, 19 nt, Artificial Sequence
  Description of Artificial Sequence: Synthetic oligonucleotide
  Antisense Strand to SEQ ID NO: 476197
auuuacacaggcgagugcu

SEQ ID NO: 476199 - RNA, 19 nt, Artificial Sequence
  Description of Artificial Sequence: Synthetic oligonucleotide
  Sense strand starting at position 2962 of SEQ ID NO: 317250
uguaaauccuaauccguuu

SEQ ID NO: 476200 - RNA, 19 nt, Artificial Sequence
  Description of Artificial Sequence: Synthetic oligonucleotide
  Antisense Strand to SEQ ID NO: 476199
aaacggauuaggauuuaca

SEQ ID NO: 476201 - RNA, 19 nt, Artificial Sequence
  Description of Artificial Sequence: Synthetic oligonucleotide
  Sense strand starting at position 3044 of SEQ ID NO: 317250
cggauuaugaugcaaagua

SEQ ID NO: 476202 - RNA, 19 nt, Artificial Sequence
  Description of Artificial Sequence: Synthetic oligonucleotide
  Antisense Strand to SEQ ID NO: 476201
uacuuugcaucauaauccg

SEQ ID NO: 476203 - RNA, 19 nt, Artificial Sequence
  Description of Artificial Sequence: Synthetic oligonucleotide
  Sense strand starting at position 3436 of SEQ ID NO: 317250
uuucgugguuuaucuauaa

SEQ ID NO: 476204 - RNA, 19 nt, Artificial Sequence
  Description of Artificial Sequence: Synthetic oligonucleotide
  Antisense Strand to SEQ ID NO: 476203
uuauagauaaaccacgaaa

SEQ ID NO: 476205 - RNA, 19 nt, Artificial Sequence
  Description of Artificial Sequence: Synthetic oligonucleotide
  Sense strand starting at position 3440 of SEQ ID NO: 317250
gugguuuaucuauaacuuc

SEQ ID NO: 476206 - RNA, 19 nt, Artificial Sequence
  Description of Artificial Sequence: Synthetic oligonucleotide
  Antisense Strand to SEQ ID NO: 476205
gaaguuauagauaaaccac

SEQ ID NO: 476207 - RNA, 19 nt, Artificial Sequence
  Description of Artificial Sequence: Synthetic oligonucleotide
  Sense strand starting at position 368 of SEQ ID NO: 317251
cugacuagaugguuaguca

SEQ ID NO: 476208 - RNA, 19 nt, Artificial Sequence
  Description of Artificial Sequence: Synthetic oligonucleotide
  Antisense Strand to SEQ ID NO: 476207
ugacuaaccaucuagucag

SEQ ID NO: 476209 - RNA, 19 nt, Artificial Sequence
  Description of Artificial Sequence: Synthetic oligonucleotide
  Sense strand starting at position 369 of SEQ ID NO: 317251
ugacuagaugguuagucau

SEQ ID NO: 476210 - RNA, 19 nt, Artificial Sequence
  Description of Artificial Sequence: Synthetic oligonucleotide
  Antisense Strand to SEQ ID NO: 476209
augacuaaccaucuaguca

SEQ ID NO: 476211 - RNA, 19 nt, Artificial Sequence
  Description of Artificial Sequence: Synthetic oligonucleotide
  Sense strand starting at position 371 of SEQ ID NO: 317251
acuagaugguuagucauaa

SEQ ID NO: 476212 - RNA, 19 nt, Artificial Sequence
  Description of Artificial Sequence: Synthetic oligonucleotide
  Antisense Strand to SEQ ID NO: 476211
uuaugacuaaccaucuagu

SEQ ID NO: 476213 - RNA, 19 nt, Artificial Sequence
  Description of Artificial Sequence: Synthetic oligonucleotide
  Sense strand starting at position 372 of SEQ ID NO: 317251
cuagaugguuagucauaaa

SEQ ID NO: 476214 - RNA, 19 nt, Artificial Sequence
  Description of Artificial Sequence: Synthetic oligonucleotide
  Antisense Strand to SEQ ID NO: 476213
uuuaugacuaaccaucuag

SEQ ID NO: 476215 - RNA, 19 nt, Artificial Sequence
  Description of Artificial Sequence: Synthetic oligonucleotide
  Sense strand starting at position 412 of SEQ ID NO: 317251
agagcaaguccauaauuau

SEQ ID NO: 476216 - RNA, 19 nt, Artificial Sequence
  Description of Artificial Sequence: Synthetic oligonucleotide
  Antisense Strand to SEQ ID NO: 476215
auaauuauggacuugcucu

SEQ ID NO: 476217 - RNA, 19 nt, Artificial Sequence
  Description of Artificial Sequence: Synthetic oligonucleotide
  Sense strand starting at position 623 of SEQ ID NO: 317251
gccaaagauuauccacagu

SEQ ID NO: 476218 - RNA, 19 nt, Artificial Sequence
  Description of Artificial Sequence: Synthetic oligonucleotide
  Antisense Strand to SEQ ID NO: 476217
acuguggauaaucuuuggc

SEQ ID NO: 476219 - RNA, 19 nt, Artificial Sequence
  Description of Artificial Sequence: Synthetic oligonucleotide
  Sense strand starting at position 643 of SEQ ID NO: 317251
agccaaaucgaucaacagu

SEQ ID NO: 476220 - RNA, 19 nt, Artificial Sequence
  Description of Artificial Sequence: Synthetic oligonucleotide
  Antisense Strand to SEQ ID NO: 476219
acuguugaucgauuuggcu

SEQ ID NO: 476221 - RNA, 19 nt, Artificial Sequence
  Description of Artificial Sequence: Synthetic oligonucleotide
  Sense strand starting at position 771 of SEQ ID NO: 317251
agcauagaugcacagcaau

SEQ ID NO: 476222 - RNA, 19 nt, Artificial Sequence
  Description of Artificial Sequence: Synthetic oligonucleotide
  Antisense Strand to SEQ ID NO: 476221
auugcugugcaucuaugcu

SEQ ID NO: 476223 - RNA, 19 nt, Artificial Sequence
  Description of Artificial Sequence: Synthetic oligonucleotide
  Sense strand starting at position 912 of SEQ ID NO: 317251
aguggugacuacuuuggaa

SEQ ID NO: 476224 - RNA, 19 nt, Artificial Sequence
  Description of Artificial Sequence: Synthetic oligonucleotide
  Antisense Strand to SEQ ID NO: 476223
uuccaaaguagucaccacu

SEQ ID NO: 476225 - RNA, 19 nt, Artificial Sequence
  Description of Artificial Sequence: Synthetic oligonucleotide
  Sense strand starting at position 914 of SEQ ID NO: 317251
uggugacuacuuuggaaca

SEQ ID NO: 476226 - RNA, 19 nt, Artificial Sequence
  Description of Artificial Sequence: Synthetic oligonucleotide
  Antisense Strand to SEQ ID NO: 476225
uguuccaaaguagucacca

SEQ ID NO: 476227 - RNA, 19 nt, Artificial Sequence
  Description of Artificial Sequence: Synthetic oligonucleotide
  Sense strand starting at position 972 of SEQ ID NO: 317251
uuagucaaagcuuacagau

SEQ ID NO: 476228 - RNA, 19 nt, Artificial Sequence
  Description of Artificial Sequence: Synthetic oligonucleotide
  Antisense Strand to SEQ ID NO: 476227
aucuguaagcuuugacuaa

SEQ ID NO: 476229 - RNA, 19 nt, Artificial Sequence
  Description of Artificial Sequence: Synthetic oligonucleotide
  Sense strand starting at position 1188 of SEQ ID NO: 317251
ucaauuauugucuaucagu

SEQ ID NO: 476230 - RNA, 19 nt, Artificial Sequence
  Description of Artificial Sequence: Synthetic oligonucleotide
  Antisense Strand to SEQ ID NO: 476229
acugauagacaauaauuga

SEQ ID NO: 476231 - RNA, 19 nt, Artificial Sequence
  Description of Artificial Sequence: Synthetic oligonucleotide
  Sense strand starting at position 1308 of SEQ ID NO: 317251
agcacauaggcugacagau

SEQ ID NO: 476232 - RNA, 19 nt, Artificial Sequence
  Description of Artificial Sequence: Synthetic oligonucleotide
  Antisense Strand to SEQ ID NO: 476231
aucugucagccuaugugcu

SEQ ID NO: 476233 - RNA, 19 nt, Artificial Sequence
  Description of Artificial Sequence: Synthetic oligonucleotide
  Sense strand starting at position 1363 of SEQ ID NO: 317251
agccuugaaagugauguaa

SEQ ID NO: 476234 - RNA, 19 nt, Artificial Sequence
  Description of Artificial Sequence: Synthetic oligonucleotide
  Antisense Strand to SEQ ID NO: 476233
uuacaucacuuucaaggcu

SEQ ID NO: 476235 - RNA, 19 nt, Artificial Sequence
  Description of Artificial Sequence: Synthetic oligonucleotide
  Sense strand starting at position 1461 of SEQ ID NO: 317251
uagaaagcaguuugacaau

SEQ ID NO: 476236 - RNA, 19 nt, Artificial Sequence
  Description of Artificial Sequence: Synthetic oligonucleotide
  Antisense Strand to SEQ ID NO: 476235
auugucaaacugcuuucua

SEQ ID NO: 476237 - RNA, 19 nt, Artificial Sequence
  Description of Artificial Sequence: Synthetic oligonucleotide
  Sense strand starting at position 1467 of SEQ ID NO: 317251
gcaguuugacaauacauaa

SEQ ID NO: 476238 - RNA, 19 nt, Artificial Sequence
  Description of Artificial Sequence: Synthetic oligonucleotide
  Antisense Strand to SEQ ID NO: 476237
uuauguauugucaaacugc

SEQ ID NO: 476239 - RNA, 19 nt, Artificial Sequence
  Description of Artificial Sequence: Synthetic oligonucleotide
  Sense strand starting at position 1597 of SEQ ID NO: 317251
aagucaauagauugugaaa

SEQ ID NO: 476240 - RNA, 19 nt, Artificial Sequence
  Description of Artificial Sequence: Synthetic oligonucleotide
  Antisense Strand to SEQ ID NO: 476239
uuucacaaucuauugacuu

SEQ ID NO: 476241 - RNA, 19 nt, Artificial Sequence
  Description of Artificial Sequence: Synthetic oligonucleotide
  Sense strand starting at position 1606 of SEQ ID NO: 317251
gauugugaaauuggaugua

SEQ ID NO: 476242 - RNA, 19 nt, Artificial Sequence
  Description of Artificial Sequence: Synthetic oligonucleotide
  Antisense Strand to SEQ ID NO: 476241
uacauccaauuucacaauc

SEQ ID NO: 476243 - RNA, 19 nt, Artificial Sequence
  Description of Artificial Sequence: Synthetic oligonucleotide
  Sense strand starting at position 1609 of SEQ ID NO: 317251
ugugaaauuggauguaaau

SEQ ID NO: 476244 - RNA, 19 nt, Artificial Sequence
  Description of Artificial Sequence: Synthetic oligonucleotide
  Antisense Strand to SEQ ID NO: 476243
auuuacauccaauuucaca

SEQ ID NO: 476245 - RNA, 19 nt, Artificial Sequence
  Description of Artificial Sequence: Synthetic oligonucleotide
  Sense strand starting at position 1642 of SEQ ID NO: 317251
auaugaauguucuugacau

SEQ ID NO: 476246 - RNA, 19 nt, Artificial Sequence
  Description of Artificial Sequence: Synthetic oligonucleotide
  Antisense Strand to SEQ ID NO: 476245
augucaagaacauucauau

SEQ ID NO: 476247 - RNA, 19 nt, Artificial Sequence
  Description of Artificial Sequence: Synthetic oligonucleotide
  Sense strand starting at position 2021 of SEQ ID NO: 317251
gguaaaguucuguauugau

SEQ ID NO: 476248 - RNA, 19 nt, Artificial Sequence
  Description of Artificial Sequence: Synthetic oligonucleotide
  Antisense Strand to SEQ ID NO: 476247
aucaauacagaacuuuacc

SEQ ID NO: 476249 - RNA, 19 nt, Artificial Sequence
  Description of Artificial Sequence: Synthetic oligonucleotide
  Sense strand starting at position 2056 of SEQ ID NO: 317251
aagaaauaauaguugcagu

SEQ ID NO: 476250 - RNA, 19 nt, Artificial Sequence
  Description of Artificial Sequence: Synthetic oligonucleotide
  Antisense Strand to SEQ ID NO: 476249
acugcaacuauuauuucuu

SEQ ID NO: 476251 - RNA, 19 nt, Artificial Sequence
  Description of Artificial Sequence: Synthetic oligonucleotide
  Sense strand starting at position 2094 of SEQ ID NO: 317251
ucuauagaacugugaucca

SEQ ID NO: 476252 - RNA, 19 nt, Artificial Sequence
  Description of Artificial Sequence: Synthetic oligonucleotide
  Antisense Strand to SEQ ID NO: 476251
uggaucacaguucuauaga

SEQ ID NO: 476253 - RNA, 19 nt, Artificial Sequence
  Description of Artificial Sequence: Synthetic oligonucleotide
  Sense strand starting at position 2097 of SEQ ID NO: 317251
auagaacugugauccaauc

SEQ ID NO: 476254 - RNA, 19 nt, Artificial Sequence
  Description of Artificial Sequence: Synthetic oligonucleotide
  Antisense Strand to SEQ ID NO: 476253
gauuggaucacaguucuau

SEQ ID NO: 476255 - RNA, 19 nt, Artificial Sequence
  Description of Artificial Sequence: Synthetic oligonucleotide
  Sense strand starting at position 2717 of SEQ ID NO: 317251
guuguuaaaggcuauagau

SEQ ID NO: 476256 - RNA, 19 nt, Artificial Sequence
  Description of Artificial Sequence: Synthetic oligonucleotide
  Antisense Strand to SEQ ID NO: 476255
aucuauagccuuuaacaac

SEQ ID NO: 476257 - RNA, 19 nt, Artificial Sequence
  Description of Artificial Sequence: Synthetic oligonucleotide
  Sense strand starting at position 2719 of SEQ ID NO: 317251
uguuaaaggcuauagauac

SEQ ID NO: 476258 - RNA, 19 nt, Artificial Sequence
  Description of Artificial Sequence: Synthetic oligonucleotide
  Antisense Strand to SEQ ID NO: 476257
guaucuauagccuuuaaca

SEQ ID NO: 476259 - RNA, 19 nt, Artificial Sequence
  Description of Artificial Sequence: Synthetic oligonucleotide
  Sense strand starting at position 2801 of SEQ ID NO: 317251
ugguuuauuugagaagaag

SEQ ID NO: 476260 - RNA, 19 nt, Artificial Sequence
  Description of Artificial Sequence: Synthetic oligonucleotide
  Antisense Strand to SEQ ID NO: 476259
cuucuucucaaauaaacca

SEQ ID NO: 476261 - RNA, 19 nt, Artificial Sequence
  Description of Artificial Sequence: Synthetic oligonucleotide
  Sense strand starting at position 2817 of SEQ ID NO: 317251
aagcuuauuugggaagaag

SEQ ID NO: 476262 - RNA, 19 nt, Artificial Sequence
  Description of Artificial Sequence: Synthetic oligonucleotide
  Antisense Strand to SEQ ID NO: 476261
cuucuucccaaauaagcuu

SEQ ID NO: 476263 - RNA, 19 nt, Artificial Sequence
  Description of Artificial Sequence: Synthetic oligonucleotide
  Sense strand starting at position 2902 of SEQ ID NO: 317251
aagauaucuagugguggga

SEQ ID NO: 476264 - RNA, 19 nt, Artificial Sequence
  Description of Artificial Sequence: Synthetic oligonucleotide
  Antisense Strand to SEQ ID NO: 476263
ucccaccacuagauaucuu

SEQ ID NO: 476265 - RNA, 19 nt, Artificial Sequence
  Description of Artificial Sequence: Synthetic oligonucleotide
  Sense strand starting at position 2905 of SEQ ID NO: 317251
auaucuaguggugggagau

SEQ ID NO: 476266 - RNA, 19 nt, Artificial Sequence
  Description of Artificial Sequence: Synthetic oligonucleotide
  Antisense Strand to SEQ ID NO: 476265
aucucccaccacuagauau

SEQ ID NO: 476267 - RNA, 19 nt, Artificial Sequence
  Description of Artificial Sequence: Synthetic oligonucleotide
  Sense strand starting at position 2906 of SEQ ID NO: 317251
uaucuaguggugggagaua

SEQ ID NO: 476268 - RNA, 19 nt, Artificial Sequence
  Description of Artificial Sequence: Synthetic oligonucleotide
  Antisense Strand to SEQ ID NO: 476267
uaucucccaccacuagaua

SEQ ID NO: 476269 - RNA, 19 nt, Artificial Sequence
  Description of Artificial Sequence: Synthetic oligonucleotide
  Sense strand starting at position 2918 of SEQ ID NO: 317251
ggagauaauuaggaaauag

SEQ ID NO: 476270 - RNA, 19 nt, Artificial Sequence
  Description of Artificial Sequence: Synthetic oligonucleotide
  Antisense Strand to SEQ ID NO: 476269
cuauuuccuaauuaucucc

SEQ ID NO: 476271 - RNA, 19 nt, Artificial Sequence
  Description of Artificial Sequence: Synthetic oligonucleotide
  Sense strand starting at position 3141 of SEQ ID NO: 317251
guguuaucccauuaucuaa

SEQ ID NO: 476272 - RNA, 19 nt, Artificial Sequence
  Description of Artificial Sequence: Synthetic oligonucleotide
  Antisense Strand to SEQ ID NO: 476271
uuagauaaugggauaacac

SEQ ID NO: 476273 - RNA, 19 nt, Artificial Sequence
  Description of Artificial Sequence: Synthetic oligonucleotide
  Sense strand starting at position 3179 of SEQ ID NO: 317251
uguacacuugucuaccaaa

SEQ ID NO: 476274 - RNA, 19 nt, Artificial Sequence
  Description of Artificial Sequence: Synthetic oligonucleotide
  Antisense Strand to SEQ ID NO: 476273
uuugguagacaaguguaca

SEQ ID NO: 476275 - RNA, 19 nt, Artificial Sequence
  Description of Artificial Sequence: Synthetic oligonucleotide
  Sense strand starting at position 3413 of SEQ ID NO: 317251
ugcuaaucacuuuauguag

SEQ ID NO: 476276 - RNA, 19 nt, Artificial Sequence
  Description of Artificial Sequence: Synthetic oligonucleotide
  Antisense Strand to SEQ ID NO: 476275
cuacauaaagugauuagca

SEQ ID NO: 476277 - RNA, 19 nt, Artificial Sequence
  Description of Artificial Sequence: Synthetic oligonucleotide
  Sense strand starting at position 3480 of SEQ ID NO: 317251
uuaucagaucacugauuag

SEQ ID NO: 476278 - RNA, 19 nt, Artificial Sequence
  Description of Artificial Sequence: Synthetic oligonucleotide
  Antisense Strand to SEQ ID NO: 476277
cuaaucagugaucugauaa

SEQ ID NO: 476279 - RNA, 19 nt, Artificial Sequence
  Description of Artificial Sequence: Synthetic oligonucleotide
  Sense strand starting at position 3498 of SEQ ID NO: 317251
gauaauaaauuagagagga

SEQ ID NO: 476280 - RNA, 19 nt, Artificial Sequence
  Description of Artificial Sequence: Synthetic oligonucleotide
  Antisense Strand to SEQ ID NO: 476279
uccucucuaauuuauuauc

SEQ ID NO: 476281 - RNA, 19 nt, Artificial Sequence
  Description of Artificial Sequence: Synthetic oligonucleotide
  Sense strand starting at position 3511 of SEQ ID NO: 317251
agaggagucacguaaguug

SEQ ID NO: 476282 - RNA, 19 nt, Artificial Sequence
  Description of Artificial Sequence: Synthetic oligonucleotide
  Antisense Strand to SEQ ID NO: 476281
caacuuacgugacuccucu

SEQ ID NO: 476283 - RNA, 19 nt, Artificial Sequence
  Description of Artificial Sequence: Synthetic oligonucleotide
  Sense strand starting at position 3610 of SEQ ID NO: 317251
cgcugcuuugucucucaaa

SEQ ID NO: 476284 - RNA, 19 nt, Artificial Sequence
  Description of Artificial Sequence: Synthetic oligonucleotide
  Antisense Strand to SEQ ID NO: 476283
uuugagagacaaagcagcg

SEQ ID NO: 476285 - RNA, 19 nt, Artificial Sequence
  Description of Artificial Sequence: Synthetic oligonucleotide
  Sense strand starting at position 3835 of SEQ ID NO: 317251
gguguacuggguuauuaug

SEQ ID NO: 476286 - RNA, 19 nt, Artificial Sequence
  Description of Artificial Sequence: Synthetic oligonucleotide
  Antisense Strand to SEQ ID NO: 476285
cauaauaacccaguacacc

SEQ ID NO: 476287 - RNA, 19 nt, Artificial Sequence
  Description of Artificial Sequence: Synthetic oligonucleotide
  Sense strand starting at position 34 of SEQ ID NO: 317252
agaugacaguuguuugaau

SEQ ID NO: 476288 - RNA, 19 nt, Artificial Sequence
  Description of Artificial Sequence: Synthetic oligonucleotide
  Antisense Strand to SEQ ID NO: 476287
auucaaacaacugucaucu

SEQ ID NO: 476289 - RNA, 19 nt, Artificial Sequence
  Description of Artificial Sequence: Synthetic oligonucleotide
  Sense strand starting at position 35 of SEQ ID NO: 317252
gaugacaguuguuugaauu

SEQ ID NO: 476290 - RNA, 19 nt, Artificial Sequence
  Description of Artificial Sequence: Synthetic oligonucleotide
  Antisense Strand to SEQ ID NO: 476289
aauucaaacaacugucauc

SEQ ID NO: 476291 - RNA, 19 nt, Artificial Sequence
  Description of Artificial Sequence: Synthetic oligonucleotide
  Sense strand starting at position 36 of SEQ ID NO: 317252
augacaguuguuugaauuc

SEQ ID NO: 476292 - RNA, 19 nt, Artificial Sequence
  Description of Artificial Sequence: Synthetic oligonucleotide
  Antisense Strand to SEQ ID NO: 476291
gaauucaaacaacugucau

SEQ ID NO: 476293 - RNA, 19 nt, Artificial Sequence
  Description of Artificial Sequence: Synthetic oligonucleotide
  Sense strand starting at position 112 of SEQ ID NO: 317252
agcgaucuaauagguaaag

SEQ ID NO: 476294 - RNA, 19 nt, Artificial Sequence
  Description of Artificial Sequence: Synthetic oligonucleotide
  Antisense Strand to SEQ ID NO: 476293
cuuuaccuauuagaucgcu

SEQ ID NO: 476295 - RNA, 19 nt, Artificial Sequence
  Description of Artificial Sequence: Synthetic oligonucleotide
  Sense strand starting at position 114 of SEQ ID NO: 317252
cgaucuaauagguaaagca

SEQ ID NO: 476296 - RNA, 19 nt, Artificial Sequence
  Description of Artificial Sequence: Synthetic oligonucleotide
  Antisense Strand to SEQ ID NO: 476295
ugcuuuaccuauuagaucg

SEQ ID NO: 476297 - RNA, 19 nt, Artificial Sequence
  Description of Artificial Sequence: Synthetic oligonucleotide
  Sense strand starting at position 180 of SEQ ID NO: 317252
gcaucaauacucugagcuc

SEQ ID NO: 476298 - RNA, 19 nt, Artificial Sequence
  Description of Artificial Sequence: Synthetic oligonucleotide
  Antisense Strand to SEQ ID NO: 476297
gagcucagaguauugaugc

SEQ ID NO: 476299 - RNA, 19 nt, Artificial Sequence
  Description of Artificial Sequence: Synthetic oligonucleotide
  Sense strand starting at position 272 of SEQ ID NO: 317252
aguugaaucauaugagguu

SEQ ID NO: 476300 - RNA, 19 nt, Artificial Sequence
  Description of Artificial Sequence: Synthetic oligonucleotide
  Antisense Strand to SEQ ID NO: 476299
aaccucauaugauucaacu

SEQ ID NO: 476301 - RNA, 19 nt, Artificial Sequence
  Description of Artificial Sequence: Synthetic oligonucleotide
  Sense strand starting at position 278 of SEQ ID NO: 317252
aucauaugagguugacgau

SEQ ID NO: 476302 - RNA, 19 nt, Artificial Sequence
  Description of Artificial Sequence: Synthetic oligonucleotide
  Antisense Strand to SEQ ID NO: 476301
aucgucaaccucauaugau

SEQ ID NO: 476303 - RNA, 19 nt, Artificial Sequence
  Description of Artificial Sequence: Synthetic oligonucleotide
  Sense strand starting at position 320 of SEQ ID NO: 317252
ccgacaauuucuuaugauu

SEQ ID NO: 476304 - RNA, 19 nt, Artificial Sequence
  Description of Artificial Sequence: Synthetic oligonucleotide
  Antisense Strand to SEQ ID NO: 476303
aaucauaagaaauugucgg

SEQ ID NO: 476305 - RNA, 19 nt, Artificial Sequence
  Description of Artificial Sequence: Synthetic oligonucleotide
  Sense strand starting at position 405 of SEQ ID NO: 317252
cgugcacuugcuuucuuaa

SEQ ID NO: 476306 - RNA, 19 nt, Artificial Sequence
  Description of Artificial Sequence: Synthetic oligonucleotide
  Antisense Strand to SEQ ID NO: 476305
uuaagaaagcaagugcacg

SEQ ID NO: 476307 - RNA, 19 nt, Artificial Sequence
  Description of Artificial Sequence: Synthetic oligonucleotide
  Sense strand starting at position 780 of SEQ ID NO: 317252
gcgaucuugccagagagaa

SEQ ID NO: 476308 - RNA, 19 nt, Artificial Sequence
  Description of Artificial Sequence: Synthetic oligonucleotide
  Antisense Strand to SEQ ID NO: 476307
uucucucuggcaagaucgc

SEQ ID NO: 476309 - RNA, 19 nt, Artificial Sequence
  Description of Artificial Sequence: Synthetic oligonucleotide
  Sense strand starting at position 1211 of SEQ ID NO: 317252
uagaguuuccuuuaccgca

SEQ ID NO: 476310 - RNA, 19 nt, Artificial Sequence
  Description of Artificial Sequence: Synthetic oligonucleotide
  Antisense Strand to SEQ ID NO: 476309
ugcgguaaaggaaacucua

SEQ ID NO: 476311 - RNA, 19 nt, Artificial Sequence
  Description of Artificial Sequence: Synthetic oligonucleotide
  Sense strand starting at position 1770 of SEQ ID NO: 317252
gcucgugaauuauuuauga

SEQ ID NO: 476312 - RNA, 19 nt, Artificial Sequence
  Description of Artificial Sequence: Synthetic oligonucleotide
  Antisense Strand to SEQ ID NO: 476311
ucauaaauaauucacgagc

SEQ ID NO: 476313 - RNA, 19 nt, Artificial Sequence
  Description of Artificial Sequence: Synthetic oligonucleotide
  Sense strand starting at position 2060 of SEQ ID NO: 317252
ucacuuaaagaucgcgaaa

SEQ ID NO: 476314 - RNA, 19 nt, Artificial Sequence
  Description of Artificial Sequence: Synthetic oligonucleotide
  Antisense Strand to SEQ ID NO: 476313
uuucgcgaucuuuaaguga

SEQ ID NO: 476315 - RNA, 19 nt, Artificial Sequence
  Description of Artificial Sequence: Synthetic oligonucleotide
  Sense strand starting at position 2235 of SEQ ID NO: 317252
cgcagagucccuuacuuag

SEQ ID NO: 476316 - RNA, 19 nt, Artificial Sequence
  Description of Artificial Sequence: Synthetic oligonucleotide
  Antisense Strand to SEQ ID NO: 476315
cuaaguaagggacucugcg

SEQ ID NO: 476317 - RNA, 19 nt, Artificial Sequence
  Description of Artificial Sequence: Synthetic oligonucleotide
  Sense strand starting at position 2238 of SEQ ID NO: 317252
agagucccuuacuuagaau

SEQ ID NO: 476318 - RNA, 19 nt, Artificial Sequence
  Description of Artificial Sequence: Synthetic oligonucleotide
  Antisense Strand to SEQ ID NO: 476317
auucuaaguaagggacucu

SEQ ID NO: 476319 - RNA, 19 nt, Artificial Sequence
  Description of Artificial Sequence: Synthetic oligonucleotide
  Sense strand starting at position 2449 of SEQ ID NO: 317252
gccauauucgcucccaugu

SEQ ID NO: 476320 - RNA, 19 nt, Artificial Sequence
  Description of Artificial Sequence: Synthetic oligonucleotide
  Antisense Strand to SEQ ID NO: 476319
acaugggagcgaauauggc

SEQ ID NO: 476321 - RNA, 19 nt, Artificial Sequence
  Description of Artificial Sequence: Synthetic oligonucleotide
  Sense strand starting at position 2527 of SEQ ID NO: 317252
uggucuucccgcucuguga

SEQ ID NO: 476322 - RNA, 19 nt, Artificial Sequence
  Description of Artificial Sequence: Synthetic oligonucleotide
  Antisense Strand to SEQ ID NO: 476321
ucacagagcgggaagacca

SEQ ID NO: 476323 - RNA, 19 nt, Artificial Sequence
  Description of Artificial Sequence: Synthetic oligonucleotide
  Sense strand starting at position 2736 of SEQ ID NO: 317252
ucaggauggugucuagcau

SEQ ID NO: 476324 - RNA, 19 nt, Artificial Sequence
  Description of Artificial Sequence: Synthetic oligonucleotide
  Antisense Strand to SEQ ID NO: 476323
augcuagacaccauccuga

SEQ ID NO: 476325 - RNA, 19 nt, Artificial Sequence
  Description of Artificial Sequence: Synthetic oligonucleotide
  Sense strand starting at position 2737 of SEQ ID NO: 317252
caggauggugucuagcaua

SEQ ID NO: 476326 - RNA, 19 nt, Artificial Sequence
  Description of Artificial Sequence: Synthetic oligonucleotide
  Antisense Strand to SEQ ID NO: 476325
uaugcuagacaccauccug

SEQ ID NO: 476327 - RNA, 19 nt, Artificial Sequence
  Description of Artificial Sequence: Synthetic oligonucleotide
  Sense strand starting at position 2773 of SEQ ID NO: 317252
auguuugugauauggauag

SEQ ID NO: 476328 - RNA, 19 nt, Artificial Sequence
  Description of Artificial Sequence: Synthetic oligonucleotide
  Antisense Strand to SEQ ID NO: 476327
cuauccauaucacaaacau

SEQ ID NO: 476329 - RNA, 19 nt, Artificial Sequence
  Description of Artificial Sequence: Synthetic oligonucleotide
  Sense strand starting at position 2775 of SEQ ID NO: 317252
guuugugauauggauagac

SEQ ID NO: 476330 - RNA, 19 nt, Artificial Sequence
  Description of Artificial Sequence: Synthetic oligonucleotide
  Antisense Strand to SEQ ID NO: 476329
gucuauccauaucacaaac

SEQ ID NO: 476331 - RNA, 19 nt, Artificial Sequence
  Description of Artificial Sequence: Synthetic oligonucleotide
  Sense strand starting at position 2840 of SEQ ID NO: 317252
acauuaagucaguaccuuu

SEQ ID NO: 476332 - RNA, 19 nt, Artificial Sequence
  Description of Artificial Sequence: Synthetic oligonucleotide
  Antisense Strand to SEQ ID NO: 476331
aaagguacugacuuaaugu

SEQ ID NO: 476333 - RNA, 19 nt, Artificial Sequence
  Description of Artificial Sequence: Synthetic oligonucleotide
  Sense strand starting at position 2922 of SEQ ID NO: 317252
uaguuagauugaucuugag

SEQ ID NO: 476334 - RNA, 19 nt, Artificial Sequence
  Description of Artificial Sequence: Synthetic oligonucleotide
  Antisense Strand to SEQ ID NO: 476333
cucaagaucaaucuaacua

SEQ ID NO: 476335 - RNA, 19 nt, Artificial Sequence
  Description of Artificial Sequence: Synthetic oligonucleotide
  Sense strand starting at position 2926 of SEQ ID NO: 317252
uagauugaucuugagugug

SEQ ID NO: 476336 - RNA, 19 nt, Artificial Sequence
  Description of Artificial Sequence: Synthetic oligonucleotide
  Antisense Strand to SEQ ID NO: 476335
cacacucaagaucaaucua

SEQ ID NO: 476337 - RNA, 19 nt, Artificial Sequence
  Description of Artificial Sequence: Synthetic oligonucleotide
  Sense strand starting at position 2928 of SEQ ID NO: 317252
gauugaucuugagugugua

SEQ ID NO: 476338 - RNA, 19 nt, Artificial Sequence
  Description of Artificial Sequence: Synthetic oligonucleotide
  Antisense Strand to SEQ ID NO: 476337
uacacacucaagaucaauc

SEQ ID NO: 476339 - RNA, 19 nt, Artificial Sequence
  Description of Artificial Sequence: Synthetic oligonucleotide
  Sense strand starting at position 2929 of SEQ ID NO: 317252
auugaucuugaguguguau

SEQ ID NO: 476340 - RNA, 19 nt, Artificial Sequence
  Description of Artificial Sequence: Synthetic oligonucleotide
  Antisense Strand to SEQ ID NO: 476339
auacacacucaagaucaau

SEQ ID NO: 476341 - RNA, 19 nt, Artificial Sequence
  Description of Artificial Sequence: Synthetic oligonucleotide
  Sense strand starting at position 2931 of SEQ ID NO: 317252
ugaucuugaguguguauau

SEQ ID NO: 476342 - RNA, 19 nt, Artificial Sequence
  Description of Artificial Sequence: Synthetic oligonucleotide
  Antisense Strand to SEQ ID NO: 476341
auauacacacucaagauca

SEQ ID NO: 476343 - RNA, 19 nt, Artificial Sequence
  Description of Artificial Sequence: Synthetic oligonucleotide
  Sense strand starting at position 2932 of SEQ ID NO: 317252
gaucuugaguguguauauu

SEQ ID NO: 476344 - RNA, 19 nt, Artificial Sequence
  Description of Artificial Sequence: Synthetic oligonucleotide
  Antisense Strand to SEQ ID NO: 476343
aauauacacacucaagauc

SEQ ID NO: 476345 - RNA, 19 nt, Artificial Sequence
  Description of Artificial Sequence: Synthetic oligonucleotide
  Sense strand starting at position 2941 of SEQ ID NO: 317252
uguguauauuucuagacaa

SEQ ID NO: 476346 - RNA, 19 nt, Artificial Sequence
  Description of Artificial Sequence: Synthetic oligonucleotide
  Antisense Strand to SEQ ID NO: 476345
uugucuagaaauauacaca

SEQ ID NO: 476347 - RNA, 19 nt, Artificial Sequence
  Description of Artificial Sequence: Synthetic oligonucleotide
  Sense strand starting at position 2996 of SEQ ID NO: 317252
aggacauggcaagguuaga

SEQ ID NO: 476348 - RNA, 19 nt, Artificial Sequence
  Description of Artificial Sequence: Synthetic oligonucleotide
  Antisense Strand to SEQ ID NO: 476347
ucuaaccuugccauguccu

SEQ ID NO: 476349 - RNA, 19 nt, Artificial Sequence
  Description of Artificial Sequence: Synthetic oligonucleotide
  Sense strand starting at position 3147 of SEQ ID NO: 317252
caggauaucugaugauuua

SEQ ID NO: 476350 - RNA, 19 nt, Artificial Sequence
  Description of Artificial Sequence: Synthetic oligonucleotide
  Antisense Strand to SEQ ID NO: 476349
uaaaucaucagauauccug

SEQ ID NO: 476351 - RNA, 19 nt, Artificial Sequence
  Description of Artificial Sequence: Synthetic oligonucleotide
  Sense strand starting at position 3366 of SEQ ID NO: 317252
ucuucuaaucagggcagau

SEQ ID NO: 476352 - RNA, 19 nt, Artificial Sequence
  Description of Artificial Sequence: Synthetic oligonucleotide
  Antisense Strand to SEQ ID NO: 476351
aucugcccugauuagaaga

SEQ ID NO: 476353 - RNA, 19 nt, Artificial Sequence
  Description of Artificial Sequence: Synthetic oligonucleotide
  Sense strand starting at position 3410 of SEQ ID NO: 317252
agaaguuucugguugaaca

SEQ ID NO: 476354 - RNA, 19 nt, Artificial Sequence
  Description of Artificial Sequence: Synthetic oligonucleotide
  Antisense Strand to SEQ ID NO: 476353
uguucaaccagaaacuucu

SEQ ID NO: 476355 - RNA, 19 nt, Artificial Sequence
  Description of Artificial Sequence: Synthetic oligonucleotide
  Sense strand starting at position 3411 of SEQ ID NO: 317252
gaaguuucugguugaacau

SEQ ID NO: 476356 - RNA, 19 nt, Artificial Sequence
  Description of Artificial Sequence: Synthetic oligonucleotide
  Antisense Strand to SEQ ID NO: 476355
auguucaaccagaaacuuc

SEQ ID NO: 476357 - RNA, 19 nt, Artificial Sequence
  Description of Artificial Sequence: Synthetic oligonucleotide
  Sense strand starting at position 3513 of SEQ ID NO: 317252
ccugaucuccgucaaaguu

SEQ ID NO: 476358 - RNA, 19 nt, Artificial Sequence
  Description of Artificial Sequence: Synthetic oligonucleotide
  Antisense Strand to SEQ ID NO: 476357
aacuuugacggagaucagg

SEQ ID NO: 476359 - RNA, 19 nt, Artificial Sequence
  Description of Artificial Sequence: Synthetic oligonucleotide
  Sense strand starting at position 3567 of SEQ ID NO: 317252
gcuuaauauuucucugagc

SEQ ID NO: 476360 - RNA, 19 nt, Artificial Sequence
  Description of Artificial Sequence: Synthetic oligonucleotide
  Antisense Strand to SEQ ID NO: 476359
gcucagagaaauauuaagc

SEQ ID NO: 476361 - RNA, 19 nt, Artificial Sequence
  Description of Artificial Sequence: Synthetic oligonucleotide
  Sense strand starting at position 3684 of SEQ ID NO: 317252
gaagcaagauggucaaaua

SEQ ID NO: 476362 - RNA, 19 nt, Artificial Sequence
  Description of Artificial Sequence: Synthetic oligonucleotide
  Antisense Strand to SEQ ID NO: 476361
uauuugaccaucuugcuuc

SEQ ID NO: 476363 - RNA, 19 nt, Artificial Sequence
  Description of Artificial Sequence: Synthetic oligonucleotide
  Sense strand starting at position 3694 of SEQ ID NO: 317252
ggucaaauagaagguuuga

SEQ ID NO: 476364 - RNA, 19 nt, Artificial Sequence
  Description of Artificial Sequence: Synthetic oligonucleotide
  Antisense Strand to SEQ ID NO: 476363
ucaaaccuucuauuugacc

SEQ ID NO: 476365 - RNA, 19 nt, Artificial Sequence
  Description of Artificial Sequence: Synthetic oligonucleotide
  Sense strand starting at position 3794 of SEQ ID NO: 317252
ucaggugaguaaccacaau

SEQ ID NO: 476366 - RNA, 19 nt, Artificial Sequence
  Description of Artificial Sequence: Synthetic oligonucleotide
  Antisense Strand to SEQ ID NO: 476365
auugugguuacucaccuga

SEQ ID NO: 476367 - RNA, 19 nt, Artificial Sequence
  Description of Artificial Sequence: Synthetic oligonucleotide
  Sense strand starting at position 5 of SEQ ID NO: 317253
agaugacaguuguuugaau

SEQ ID NO: 476368 - RNA, 19 nt, Artificial Sequence
  Description of Artificial Sequence: Synthetic oligonucleotide
  Antisense Strand to SEQ ID NO: 476367
auucaaacaacugucaucu

SEQ ID NO: 476369 - RNA, 19 nt, Artificial Sequence
  Description of Artificial Sequence: Synthetic oligonucleotide
  Sense strand starting at position 6 of SEQ ID NO: 317253
gaugacaguuguuugaauu

SEQ ID NO: 476370 - RNA, 19 nt, Artificial Sequence
  Description of Artificial Sequence: Synthetic oligonucleotide
  Antisense Strand to SEQ ID NO: 476369
aauucaaacaacugucauc

SEQ ID NO: 476371 - RNA, 19 nt, Artificial Sequence
  Description of Artificial Sequence: Synthetic oligonucleotide
  Sense strand starting at position 7 of SEQ ID NO: 317253
augacaguuguuugaauuc

SEQ ID NO: 476372 - RNA, 19 nt, Artificial Sequence
  Description of Artificial Sequence: Synthetic oligonucleotide
  Antisense Strand to SEQ ID NO: 476371
gaauucaaacaacugucau

SEQ ID NO: 476373 - RNA, 19 nt, Artificial Sequence
  Description of Artificial Sequence: Synthetic oligonucleotide
  Sense strand starting at position 83 of SEQ ID NO: 317253
agcgaucuaauagguaaag

SEQ ID NO: 476374 - RNA, 19 nt, Artificial Sequence
  Description of Artificial Sequence: Synthetic oligonucleotide
  Antisense Strand to SEQ ID NO: 476373
cuuuaccuauuagaucgcu

SEQ ID NO: 476375 - RNA, 19 nt, Artificial Sequence
  Description of Artificial Sequence: Synthetic oligonucleotide
  Sense strand starting at position 85 of SEQ ID NO: 317253
cgaucuaauagguaaagca

SEQ ID NO: 476376 - RNA, 19 nt, Artificial Sequence
  Description of Artificial Sequence: Synthetic oligonucleotide
  Antisense Strand to SEQ ID NO: 476375
ugcuuuaccuauuagaucg

SEQ ID NO: 476377 - RNA, 19 nt, Artificial Sequence
  Description of Artificial Sequence: Synthetic oligonucleotide
  Sense strand starting at position 151 of SEQ ID NO: 317253
gcaucaauacucugagcuc

SEQ ID NO: 476378 - RNA, 19 nt, Artificial Sequence
  Description of Artificial Sequence: Synthetic oligonucleotide
  Antisense Strand to SEQ ID NO: 476377
gagcucagaguauugaugc

SEQ ID NO: 476379 - RNA, 19 nt, Artificial Sequence
  Description of Artificial Sequence: Synthetic oligonucleotide
  Sense strand starting at position 243 of SEQ ID NO: 317253
aguugaaucauaugagguu

SEQ ID NO: 476380 - RNA, 19 nt, Artificial Sequence
  Description of Artificial Sequence: Synthetic oligonucleotide
  Antisense Strand to SEQ ID NO: 476379
aaccucauaugauucaacu

SEQ ID NO: 476381 - RNA, 19 nt, Artificial Sequence
  Description of Artificial Sequence: Synthetic oligonucleotide
  Sense strand starting at position 249 of SEQ ID NO: 317253
aucauaugagguugacgau

SEQ ID NO: 476382 - RNA, 19 nt, Artificial Sequence
  Description of Artificial Sequence: Synthetic oligonucleotide
  Antisense Strand to SEQ ID NO: 476381
aucgucaaccucauaugau

SEQ ID NO: 476383 - RNA, 19 nt, Artificial Sequence
  Description of Artificial Sequence: Synthetic oligonucleotide
  Sense strand starting at position 291 of SEQ ID NO: 317253
ccgacaauuucuuaugauu

SEQ ID NO: 476384 - RNA, 19 nt, Artificial Sequence
  Description of Artificial Sequence: Synthetic oligonucleotide
  Antisense Strand to SEQ ID NO: 476383
aaucauaagaaauugucgg

SEQ ID NO: 476385 - RNA, 19 nt, Artificial Sequence
  Description of Artificial Sequence: Synthetic oligonucleotide
  Sense strand starting at position 376 of SEQ ID NO: 317253
cgugcacuugcuuucuuaa

SEQ ID NO: 476386 - RNA, 19 nt, Artificial Sequence
  Description of Artificial Sequence: Synthetic oligonucleotide
  Antisense Strand to SEQ ID NO: 476385
uuaagaaagcaagugcacg

SEQ ID NO: 476387 - RNA, 19 nt, Artificial Sequence
  Description of Artificial Sequence: Synthetic oligonucleotide
  Sense strand starting at position 751 of SEQ ID NO: 317253
gcgaucuugccagagagaa

SEQ ID NO: 476388 - RNA, 19 nt, Artificial Sequence
  Description of Artificial Sequence: Synthetic oligonucleotide
  Antisense Strand to SEQ ID NO: 476387
uucucucuggcaagaucgc

SEQ ID NO: 476389 - RNA, 19 nt, Artificial Sequence
  Description of Artificial Sequence: Synthetic oligonucleotide
  Sense strand starting at position 1182 of SEQ ID NO: 317253
uagaguuuccuuuaccgca

SEQ ID NO: 476390 - RNA, 19 nt, Artificial Sequence
  Description of Artificial Sequence: Synthetic oligonucleotide
  Antisense Strand to SEQ ID NO: 476389
ugcgguaaaggaaacucua

SEQ ID NO: 476391 - RNA, 19 nt, Artificial Sequence
  Description of Artificial Sequence: Synthetic oligonucleotide
  Sense strand starting at position 1741 of SEQ ID NO: 317253
gcucgugaauuauuuauga

SEQ ID NO: 476392 - RNA, 19 nt, Artificial Sequence
  Description of Artificial Sequence: Synthetic oligonucleotide
  Antisense Strand to SEQ ID NO: 476391
ucauaaauaauucacgagc

SEQ ID NO: 476393 - RNA, 19 nt, Artificial Sequence
  Description of Artificial Sequence: Synthetic oligonucleotide
  Sense strand starting at position 2031 of SEQ ID NO: 317253
ucacuuaaagaucgcgaaa

SEQ ID NO: 476394 - RNA, 19 nt, Artificial Sequence
  Description of Artificial Sequence: Synthetic oligonucleotide
  Antisense Strand to SEQ ID NO: 476393
uuucgcgaucuuuaaguga

SEQ ID NO: 476395 - RNA, 19 nt, Artificial Sequence
  Description of Artificial Sequence: Synthetic oligonucleotide
  Sense strand starting at position 2206 of SEQ ID NO: 317253
cgcagagucccuuacuuag

SEQ ID NO: 476396 - RNA, 19 nt, Artificial Sequence
  Description of Artificial Sequence: Synthetic oligonucleotide
  Antisense Strand to SEQ ID NO: 476395
cuaaguaagggacucugcg

SEQ ID NO: 476397 - RNA, 19 nt, Artificial Sequence
  Description of Artificial Sequence: Synthetic oligonucleotide
  Sense strand starting at position 2209 of SEQ ID NO: 317253
agagucccuuacuuagaau

SEQ ID NO: 476398 - RNA, 19 nt, Artificial Sequence
  Description of Artificial Sequence: Synthetic oligonucleotide
  Antisense Strand to SEQ ID NO: 476397
auucuaaguaagggacucu

SEQ ID NO: 476399 - RNA, 19 nt, Artificial Sequence
  Description of Artificial Sequence: Synthetic oligonucleotide
  Sense strand starting at position 2420 of SEQ ID NO: 317253
gccauauucgcucccaugu

SEQ ID NO: 476400 - RNA, 19 nt, Artificial Sequence
  Description of Artificial Sequence: Synthetic oligonucleotide
  Antisense Strand to SEQ ID NO: 476399
acaugggagcgaauauggc

SEQ ID NO: 476401 - RNA, 19 nt, Artificial Sequence
  Description of Artificial Sequence: Synthetic oligonucleotide
  Sense strand starting at position 2498 of SEQ ID NO: 317253
uggucuucccgcucuguga

SEQ ID NO: 476402 - RNA, 19 nt, Artificial Sequence
  Description of Artificial Sequence: Synthetic oligonucleotide
  Antisense Strand to SEQ ID NO: 476401
ucacagagcgggaagacca

SEQ ID NO: 476403 - RNA, 19 nt, Artificial Sequence
  Description of Artificial Sequence: Synthetic oligonucleotide
  Sense strand starting at position 2707 of SEQ ID NO: 317253
ucaggauggugucuagcau

SEQ ID NO: 476404 - RNA, 19 nt, Artificial Sequence
  Description of Artificial Sequence: Synthetic oligonucleotide
  Antisense Strand to SEQ ID NO: 476403
augcuagacaccauccuga

SEQ ID NO: 476405 - RNA, 19 nt, Artificial Sequence
  Description of Artificial Sequence: Synthetic oligonucleotide
  Sense strand starting at position 2708 of SEQ ID NO: 317253
caggauggugucuagcaua

SEQ ID NO: 476406 - RNA, 19 nt, Artificial Sequence
  Description of Artificial Sequence: Synthetic oligonucleotide
  Antisense Strand to SEQ ID NO: 476405
uaugcuagacaccauccug

SEQ ID NO: 476407 - RNA, 19 nt, Artificial Sequence
  Description of Artificial Sequence: Synthetic oligonucleotide
  Sense strand starting at position 2744 of SEQ ID NO: 317253
auguuugugauauggauag

SEQ ID NO: 476408 - RNA, 19 nt, Artificial Sequence
  Description of Artificial Sequence: Synthetic oligonucleotide
  Antisense Strand to SEQ ID NO: 476407
cuauccauaucacaaacau

SEQ ID NO: 476409 - RNA, 19 nt, Artificial Sequence
  Description of Artificial Sequence: Synthetic oligonucleotide
  Sense strand starting at position 2746 of SEQ ID NO: 317253
guuugugauauggauagac

SEQ ID NO: 476410 - RNA, 19 nt, Artificial Sequence
  Description of Artificial Sequence: Synthetic oligonucleotide
  Antisense Strand to SEQ ID NO: 476409
gucuauccauaucacaaac

SEQ ID NO: 476411 - RNA, 19 nt, Artificial Sequence
  Description of Artificial Sequence: Synthetic oligonucleotide
  Sense strand starting at position 2811 of SEQ ID NO: 317253
acauuaagucaguaccuuu

SEQ ID NO: 476412 - RNA, 19 nt, Artificial Sequence
  Description of Artificial Sequence: Synthetic oligonucleotide
  Antisense Strand to SEQ ID NO: 476411
aaagguacugacuuaaugu

SEQ ID NO: 476413 - RNA, 19 nt, Artificial Sequence
  Description of Artificial Sequence: Synthetic oligonucleotide
  Sense strand starting at position 2893 of SEQ ID NO: 317253
uaguuagauugaucuugag

SEQ ID NO: 476414 - RNA, 19 nt, Artificial Sequence
  Description of Artificial Sequence: Synthetic oligonucleotide
  Antisense Strand to SEQ ID NO: 476413
cucaagaucaaucuaacua

SEQ ID NO: 476415 - RNA, 19 nt, Artificial Sequence
  Description of Artificial Sequence: Synthetic oligonucleotide
  Sense strand starting at position 2897 of SEQ ID NO: 317253
uagauugaucuugagugug

SEQ ID NO: 476416 - RNA, 19 nt, Artificial Sequence
  Description of Artificial Sequence: Synthetic oligonucleotide
  Antisense Strand to SEQ ID NO: 476415
cacacucaagaucaaucua

SEQ ID NO: 476417 - RNA, 19 nt, Artificial Sequence
  Description of Artificial Sequence: Synthetic oligonucleotide
  Sense strand starting at position 2899 of SEQ ID NO: 317253
gauugaucuugagugugua

SEQ ID NO: 476418 - RNA, 19 nt, Artificial Sequence
  Description of Artificial Sequence: Synthetic oligonucleotide
  Antisense Strand to SEQ ID NO: 476417
uacacacucaagaucaauc

SEQ ID NO: 476419 - RNA, 19 nt, Artificial Sequence
  Description of Artificial Sequence: Synthetic oligonucleotide
  Sense strand starting at position 2900 of SEQ ID NO: 317253
auugaucuugaguguguau

SEQ ID NO: 476420 - RNA, 19 nt, Artificial Sequence
  Description of Artificial Sequence: Synthetic oligonucleotide
  Antisense Strand to SEQ ID NO: 476419
auacacacucaagaucaau

SEQ ID NO: 476421 - RNA, 19 nt, Artificial Sequence
  Description of Artificial Sequence: Synthetic oligonucleotide
  Sense strand starting at position 2902 of SEQ ID NO: 317253
ugaucuugaguguguauau

SEQ ID NO: 476422 - RNA, 19 nt, Artificial Sequence
  Description of Artificial Sequence: Synthetic oligonucleotide
  Antisense Strand to SEQ ID NO: 476421
auauacacacucaagauca

SEQ ID NO: 476423 - RNA, 19 nt, Artificial Sequence
  Description of Artificial Sequence: Synthetic oligonucleotide
  Sense strand starting at position 2903 of SEQ ID NO: 317253
gaucuugaguguguauauu

SEQ ID NO: 476424 - RNA, 19 nt, Artificial Sequence
  Description of Artificial Sequence: Synthetic oligonucleotide
  Antisense Strand to SEQ ID NO: 476423
aauauacacacucaagauc

SEQ ID NO: 476425 - RNA, 19 nt, Artificial Sequence
  Description of Artificial Sequence: Synthetic oligonucleotide
  Sense strand starting at position 2912 of SEQ ID NO: 317253
uguguauauuucuagacaa

SEQ ID NO: 476426 - RNA, 19 nt, Artificial Sequence
  Description of Artificial Sequence: Synthetic oligonucleotide
  Antisense Strand to SEQ ID NO: 476425
uugucuagaaauauacaca

SEQ ID NO: 476427 - RNA, 19 nt, Artificial Sequence
  Description of Artificial Sequence: Synthetic oligonucleotide
  Sense strand starting at position 2967 of SEQ ID NO: 317253
aggacauggcaagguuaga

SEQ ID NO: 476428 - RNA, 19 nt, Artificial Sequence
  Description of Artificial Sequence: Synthetic oligonucleotide
  Antisense Strand to SEQ ID NO: 476427
ucuaaccuugccauguccu

SEQ ID NO: 476429 - RNA, 19 nt, Artificial Sequence
  Description of Artificial Sequence: Synthetic oligonucleotide
  Sense strand starting at position 3118 of SEQ ID NO: 317253
caggauaucugaugauuua

SEQ ID NO: 476430 - RNA, 19 nt, Artificial Sequence
  Description of Artificial Sequence: Synthetic oligonucleotide
  Antisense Strand to SEQ ID NO: 476429
uaaaucaucagauauccug

SEQ ID NO: 476431 - RNA, 19 nt, Artificial Sequence
  Description of Artificial Sequence: Synthetic oligonucleotide
  Sense strand starting at position 3337 of SEQ ID NO: 317253
ucuucuaaucagggcagau

SEQ ID NO: 476432 - RNA, 19 nt, Artificial Sequence
  Description of Artificial Sequence: Synthetic oligonucleotide
  Antisense Strand to SEQ ID NO: 476431
aucugcccugauuagaaga

SEQ ID NO: 476433 - RNA, 19 nt, Artificial Sequence
  Description of Artificial Sequence: Synthetic oligonucleotide
  Sense strand starting at position 3381 of SEQ ID NO: 317253
agaaguuucugguugaaca

SEQ ID NO: 476434 - RNA, 19 nt, Artificial Sequence
  Description of Artificial Sequence: Synthetic oligonucleotide
  Antisense Strand to SEQ ID NO: 476433
uguucaaccagaaacuucu

SEQ ID NO: 476435 - RNA, 19 nt, Artificial Sequence
  Description of Artificial Sequence: Synthetic oligonucleotide
  Sense strand starting at position 3382 of SEQ ID NO: 317253
gaaguuucugguugaacau

SEQ ID NO: 476436 - RNA, 19 nt, Artificial Sequence
  Description of Artificial Sequence: Synthetic oligonucleotide
  Antisense Strand to SEQ ID NO: 476435
auguucaaccagaaacuuc

SEQ ID NO: 476437 - RNA, 19 nt, Artificial Sequence
  Description of Artificial Sequence: Synthetic oligonucleotide
  Sense strand starting at position 3484 of SEQ ID NO: 317253
ccugaucuccgucaaaguu

SEQ ID NO: 476438 - RNA, 19 nt, Artificial Sequence
  Description of Artificial Sequence: Synthetic oligonucleotide
  Antisense Strand to SEQ ID NO: 476437
aacuuugacggagaucagg

SEQ ID NO: 476439 - RNA, 19 nt, Artificial Sequence
  Description of Artificial Sequence: Synthetic oligonucleotide
  Sense strand starting at position 3538 of SEQ ID NO: 317253
gcuuaauauuucucugagc

SEQ ID NO: 476440 - RNA, 19 nt, Artificial Sequence
  Description of Artificial Sequence: Synthetic oligonucleotide
  Antisense Strand to SEQ ID NO: 476439
gcucagagaaauauuaagc

SEQ ID NO: 476441 - RNA, 19 nt, Artificial Sequence
  Description of Artificial Sequence: Synthetic oligonucleotide
  Sense strand starting at position 3655 of SEQ ID NO: 317253
gaagcaagauggucaaaua

SEQ ID NO: 476442 - RNA, 19 nt, Artificial Sequence
  Description of Artificial Sequence: Synthetic oligonucleotide
  Antisense Strand to SEQ ID NO: 476441
uauuugaccaucuugcuuc

SEQ ID NO: 476443 - RNA, 19 nt, Artificial Sequence
  Description of Artificial Sequence: Synthetic oligonucleotide
  Sense strand starting at position 3665 of SEQ ID NO: 317253
ggucaaauagaagguuuga

SEQ ID NO: 476444 - RNA, 19 nt, Artificial Sequence
  Description of Artificial Sequence: Synthetic oligonucleotide
  Antisense Strand to SEQ ID NO: 476443
ucaaaccuucuauuugacc

SEQ ID NO: 476445 - RNA, 19 nt, Artificial Sequence
  Description of Artificial Sequence: Synthetic oligonucleotide
  Sense strand starting at position 3765 of SEQ ID NO: 317253
ucaggugaguaaccacaau

SEQ ID NO: 476446 - RNA, 19 nt, Artificial Sequence
  Description of Artificial Sequence: Synthetic oligonucleotide
  Antisense Strand to SEQ ID NO: 476445
auugugguuacucaccuga

SEQ ID NO: 476447 - RNA, 19 nt, Artificial Sequence
  Description of Artificial Sequence: Synthetic oligonucleotide
  Sense strand starting at position 380 of SEQ ID NO: 317254
cuacuucugucuuuggaau

SEQ ID NO: 476448 - RNA, 19 nt, Artificial Sequence
  Description of Artificial Sequence: Synthetic oligonucleotide
  Antisense Strand to SEQ ID NO: 476447
auuccaaagacagaaguag

SEQ ID NO: 476449 - RNA, 19 nt, Artificial Sequence
  Description of Artificial Sequence: Synthetic oligonucleotide
  Sense strand starting at position 438 of SEQ ID NO: 317254
guagcauucguucaggauu

SEQ ID NO: 476450 - RNA, 19 nt, Artificial Sequence
  Description of Artificial Sequence: Synthetic oligonucleotide
  Antisense Strand to SEQ ID NO: 476449
aauccugaacgaaugcuac

SEQ ID NO: 476451 - RNA, 19 nt, Artificial Sequence
  Description of Artificial Sequence: Synthetic oligonucleotide
  Sense strand starting at position 706 of SEQ ID NO: 317254
guaggacucuuacaaacag

SEQ ID NO: 476452 - RNA, 19 nt, Artificial Sequence
  Description of Artificial Sequence: Synthetic oligonucleotide
  Antisense Strand to SEQ ID NO: 476451
cuguuuguaagaguccuac

SEQ ID NO: 476453 - RNA, 19 nt, Artificial Sequence
  Description of Artificial Sequence: Synthetic oligonucleotide
  Sense strand starting at position 752 of SEQ ID NO: 317254
gaaagauuacagcgaauuc

SEQ ID NO: 476454 - RNA, 19 nt, Artificial Sequence
  Description of Artificial Sequence: Synthetic oligonucleotide
  Antisense Strand to SEQ ID NO: 476453
gaauucgcuguaaucuuuc

SEQ ID NO: 476455 - RNA, 19 nt, Artificial Sequence
  Description of Artificial Sequence: Synthetic oligonucleotide
  Sense strand starting at position 764 of SEQ ID NO: 317254
cgaauucuauaaucaauga

SEQ ID NO: 476456 - RNA, 19 nt, Artificial Sequence
  Description of Artificial Sequence: Synthetic oligonucleotide
  Antisense Strand to SEQ ID NO: 476455
ucauugauuauagaauucg

SEQ ID NO: 476457 - RNA, 19 nt, Artificial Sequence
  Description of Artificial Sequence: Synthetic oligonucleotide
  Sense strand starting at position 1009 of SEQ ID NO: 317254
gcacuauggcaugacaguu

SEQ ID NO: 476458 - RNA, 19 nt, Artificial Sequence
  Description of Artificial Sequence: Synthetic oligonucleotide
  Antisense Strand to SEQ ID NO: 476457
aacugucaugccauagugc

SEQ ID NO: 476459 - RNA, 19 nt, Artificial Sequence
  Description of Artificial Sequence: Synthetic oligonucleotide
  Sense strand starting at position 1091 of SEQ ID NO: 317254
aguaaacauguuuguccuu

SEQ ID NO: 476460 - RNA, 19 nt, Artificial Sequence
  Description of Artificial Sequence: Synthetic oligonucleotide
  Antisense Strand to SEQ ID NO: 476459
aaggacaaacauguuuacu

SEQ ID NO: 476461 - RNA, 19 nt, Artificial Sequence
  Description of Artificial Sequence: Synthetic oligonucleotide
  Sense strand starting at position 1096 of SEQ ID NO: 317254
acauguuuguccuuacccu

SEQ ID NO: 476462 - RNA, 19 nt, Artificial Sequence
  Description of Artificial Sequence: Synthetic oligonucleotide
  Antisense Strand to SEQ ID NO: 476461
aggguaaggacaaacaugu

SEQ ID NO: 476463 - RNA, 19 nt, Artificial Sequence
  Description of Artificial Sequence: Synthetic oligonucleotide
  Sense strand starting at position 1132 of SEQ ID NO: 317254
gcauauuguggugggcaga

SEQ ID NO: 476464 - RNA, 19 nt, Artificial Sequence
  Description of Artificial Sequence: Synthetic oligonucleotide
  Antisense Strand to SEQ ID NO: 476463
ucugcccaccacaauaugc

SEQ ID NO: 476465 - RNA, 19 nt, Artificial Sequence
  Description of Artificial Sequence: Synthetic oligonucleotide
  Sense strand starting at position 1197 of SEQ ID NO: 317254
auucguuucuccuuugaug

SEQ ID NO: 476466 - RNA, 19 nt, Artificial Sequence
  Description of Artificial Sequence: Synthetic oligonucleotide
  Antisense Strand to SEQ ID NO: 476465
caucaaaggagaaacgaau

SEQ ID NO: 476467 - RNA, 19 nt, Artificial Sequence
  Description of Artificial Sequence: Synthetic oligonucleotide
  Sense strand starting at position 1199 of SEQ ID NO: 317254
ucguuucuccuuugaugac

SEQ ID NO: 476468 - RNA, 19 nt, Artificial Sequence
  Description of Artificial Sequence: Synthetic oligonucleotide
  Antisense Strand to SEQ ID NO: 476467
gucaucaaaggagaaacga

SEQ ID NO: 476469 - RNA, 19 nt, Artificial Sequence
  Description of Artificial Sequence: Synthetic oligonucleotide
  Sense strand starting at position 1261 of SEQ ID NO: 317254
uuugguaagugccuuagaa

SEQ ID NO: 476470 - RNA, 19 nt, Artificial Sequence
  Description of Artificial Sequence: Synthetic oligonucleotide
  Antisense Strand to SEQ ID NO: 476469
uucuaaggcacuuaccaaa

SEQ ID NO: 476471 - RNA, 19 nt, Artificial Sequence
  Description of Artificial Sequence: Synthetic oligonucleotide
  Sense strand starting at position 1263 of SEQ ID NO: 317254
ugguaagugccuuagaaua

SEQ ID NO: 476472 - RNA, 19 nt, Artificial Sequence
  Description of Artificial Sequence: Synthetic oligonucleotide
  Antisense Strand to SEQ ID NO: 476471
uauucuaaggcacuuacca

SEQ ID NO: 476473 - RNA, 19 nt, Artificial Sequence
  Description of Artificial Sequence: Synthetic oligonucleotide
  Sense strand starting at position 1407 of SEQ ID NO: 317254
ugguacaagucuucuuaac

SEQ ID NO: 476474 - RNA, 19 nt, Artificial Sequence
  Description of Artificial Sequence: Synthetic oligonucleotide
  Antisense Strand to SEQ ID NO: 476473
guuaagaagacuuguacca

SEQ ID NO: 476475 - RNA, 19 nt, Artificial Sequence
  Description of Artificial Sequence: Synthetic oligonucleotide
  Sense strand starting at position 1409 of SEQ ID NO: 317254
guacaagucuucuuaacuu

SEQ ID NO: 476476 - RNA, 19 nt, Artificial Sequence
  Description of Artificial Sequence: Synthetic oligonucleotide
  Antisense Strand to SEQ ID NO: 476475
aaguuaagaagacuuguac

SEQ ID NO: 476477 - RNA, 19 nt, Artificial Sequence
  Description of Artificial Sequence: Synthetic oligonucleotide
  Sense strand starting at position 1531 of SEQ ID NO: 317254
ggagauaaauccuaucuuu

SEQ ID NO: 476478 - RNA, 19 nt, Artificial Sequence
  Description of Artificial Sequence: Synthetic oligonucleotide
  Antisense Strand to SEQ ID NO: 476477
aaagauaggauuuaucucc

SEQ ID NO: 476479 - RNA, 19 nt, Artificial Sequence
  Description of Artificial Sequence: Synthetic oligonucleotide
  Sense strand starting at position 1665 of SEQ ID NO: 317254
cauaauuuguugcaggcaa

SEQ ID NO: 476480 - RNA, 19 nt, Artificial Sequence
  Description of Artificial Sequence: Synthetic oligonucleotide
  Antisense Strand to SEQ ID NO: 476479
uugccugcaacaaauuaug

SEQ ID NO: 476481 - RNA, 19 nt, Artificial Sequence
  Description of Artificial Sequence: Synthetic oligonucleotide
  Sense strand starting at position 1667 of SEQ ID NO: 317254
uaauuuguugcaggcaauu

SEQ ID NO: 476482 - RNA, 19 nt, Artificial Sequence
  Description of Artificial Sequence: Synthetic oligonucleotide
  Antisense Strand to SEQ ID NO: 476481
aauugccugcaacaaauua

SEQ ID NO: 476483 - RNA, 19 nt, Artificial Sequence
  Description of Artificial Sequence: Synthetic oligonucleotide
  Sense strand starting at position 1869 of SEQ ID NO: 317254
cguguuccugggcagaaga

SEQ ID NO: 476484 - RNA, 19 nt, Artificial Sequence
  Description of Artificial Sequence: Synthetic oligonucleotide
  Antisense Strand to SEQ ID NO: 476483
ucuucugcccaggaacacg

SEQ ID NO: 476485 - RNA, 19 nt, Artificial Sequence
  Description of Artificial Sequence: Synthetic oligonucleotide
  Sense strand starting at position 1900 of SEQ ID NO: 317254
acuggaucugcugaaucuu

SEQ ID NO: 476486 - RNA, 19 nt, Artificial Sequence
  Description of Artificial Sequence: Synthetic oligonucleotide
  Antisense Strand to SEQ ID NO: 476485
aagauucagcagauccagu

SEQ ID NO: 476487 - RNA, 19 nt, Artificial Sequence
  Description of Artificial Sequence: Synthetic oligonucleotide
  Sense strand starting at position 1946 of SEQ ID NO: 317254
gcgagggaugcggaagaau

SEQ ID NO: 476488 - RNA, 19 nt, Artificial Sequence
  Description of Artificial Sequence: Synthetic oligonucleotide
  Antisense Strand to SEQ ID NO: 476487
auucuuccgcaucccucgc

SEQ ID NO: 476489 - RNA, 19 nt, Artificial Sequence
  Description of Artificial Sequence: Synthetic oligonucleotide
  Sense strand starting at position 1955 of SEQ ID NO: 317254
gcggaagaauguucuccaa

SEQ ID NO: 476490 - RNA, 19 nt, Artificial Sequence
  Description of Artificial Sequence: Synthetic oligonucleotide
  Antisense Strand to SEQ ID NO: 476489
uuggagaacauucuuccgc

SEQ ID NO: 476491 - RNA, 19 nt, Artificial Sequence
  Description of Artificial Sequence: Synthetic oligonucleotide
  Sense strand starting at position 2026 of SEQ ID NO: 317254
agucaucaaugcguguaaa

SEQ ID NO: 476492 - RNA, 19 nt, Artificial Sequence
  Description of Artificial Sequence: Synthetic oligonucleotide
  Antisense Strand to SEQ ID NO: 476491
uuuacacgcauugaugacu

SEQ ID NO: 476493 - RNA, 19 nt, Artificial Sequence
  Description of Artificial Sequence: Synthetic oligonucleotide
  Sense strand starting at position 2029 of SEQ ID NO: 317254
caucaaugcguguaaacug

SEQ ID NO: 476494 - RNA, 19 nt, Artificial Sequence
  Description of Artificial Sequence: Synthetic oligonucleotide
  Antisense Strand to SEQ ID NO: 476493
caguuuacacgcauugaug

SEQ ID NO: 476495 - RNA, 19 nt, Artificial Sequence
  Description of Artificial Sequence: Synthetic oligonucleotide
  Sense strand starting at position 2171 of SEQ ID NO: 317254
gcaucaaagccaugacuca

SEQ ID NO: 476496 - RNA, 19 nt, Artificial Sequence
  Description of Artificial Sequence: Synthetic oligonucleotide
  Antisense Strand to SEQ ID NO: 476495
ugagucauggcuuugaugc

SEQ ID NO: 476497 - RNA, 19 nt, Artificial Sequence
  Description of Artificial Sequence: Synthetic oligonucleotide
  Sense strand starting at position 2232 of SEQ ID NO: 317254
ccuuuauggguucgggaaa

SEQ ID NO: 476498 - RNA, 19 nt, Artificial Sequence
  Description of Artificial Sequence: Synthetic oligonucleotide
  Antisense Strand to SEQ ID NO: 476497
uuucccgaacccauaaagg

SEQ ID NO: 476499 - RNA, 19 nt, Artificial Sequence
  Description of Artificial Sequence: Synthetic oligonucleotide
  Sense strand starting at position 2271 of SEQ ID NO: 317254
gcuugagaucuuggaaacu

SEQ ID NO: 476500 - RNA, 19 nt, Artificial Sequence
  Description of Artificial Sequence: Synthetic oligonucleotide
  Antisense Strand to SEQ ID NO: 476499
aguuuccaagaucucaagc

SEQ ID NO: 476501 - RNA, 19 nt, Artificial Sequence
  Description of Artificial Sequence: Synthetic oligonucleotide
  Sense strand starting at position 2362 of SEQ ID NO: 317254
uguuuaaggcauuauucca

SEQ ID NO: 476502 - RNA, 19 nt, Artificial Sequence
  Description of Artificial Sequence: Synthetic oligonucleotide
  Antisense Strand to SEQ ID NO: 476501
uggaauaaugccuuaaaca

SEQ ID NO: 476503 - RNA, 19 nt, Artificial Sequence
  Description of Artificial Sequence: Synthetic oligonucleotide
  Sense strand starting at position 2432 of SEQ ID NO: 317254
gucacaggugauuaaccau

SEQ ID NO: 476504 - RNA, 19 nt, Artificial Sequence
  Description of Artificial Sequence: Synthetic oligonucleotide
  Antisense Strand to SEQ ID NO: 476503
augguuaaucaccugugac

SEQ ID NO: 476505 - RNA, 19 nt, Artificial Sequence
  Description of Artificial Sequence: Synthetic oligonucleotide
  Sense strand starting at position 2444 of SEQ ID NO: 317254
uaaccauguggccaagagu

SEQ ID NO: 476506 - RNA, 19 nt, Artificial Sequence
  Description of Artificial Sequence: Synthetic oligonucleotide
  Antisense Strand to SEQ ID NO: 476505
acucuuggccacaugguua

SEQ ID NO: 476507 - RNA, 19 nt, Artificial Sequence
  Description of Artificial Sequence: Synthetic oligonucleotide
  Sense strand starting at position 2447 of SEQ ID NO: 317254
ccauguggccaagagucaa

SEQ ID NO: 476508 - RNA, 19 nt, Artificial Sequence
  Description of Artificial Sequence: Synthetic oligonucleotide
  Antisense Strand to SEQ ID NO: 476507
uugacucuuggccacaugg

SEQ ID NO: 476509 - RNA, 19 nt, Artificial Sequence
  Description of Artificial Sequence: Synthetic oligonucleotide
  Sense strand starting at position 3173 of SEQ ID NO: 317254
cauugagauguuuaugggu

SEQ ID NO: 476510 - RNA, 19 nt, Artificial Sequence
  Description of Artificial Sequence: Synthetic oligonucleotide
  Antisense Strand to SEQ ID NO: 476509
acccauaaacaucucaaug

SEQ ID NO: 476511 - RNA, 19 nt, Artificial Sequence
  Description of Artificial Sequence: Synthetic oligonucleotide
  Sense strand starting at position 3178 of SEQ ID NO: 317254
agauguuuauggguaugca

SEQ ID NO: 476512 - RNA, 19 nt, Artificial Sequence
  Description of Artificial Sequence: Synthetic oligonucleotide
  Antisense Strand to SEQ ID NO: 476511
ugcauacccauaaacaucu

SEQ ID NO: 476513 - RNA, 19 nt, Artificial Sequence
  Description of Artificial Sequence: Synthetic oligonucleotide
  Sense strand starting at position 3179 of SEQ ID NO: 317254
gauguuuauggguaugcau

SEQ ID NO: 476514 - RNA, 19 nt, Artificial Sequence
  Description of Artificial Sequence: Synthetic oligonucleotide
  Antisense Strand to SEQ ID NO: 476513
augcauacccauaaacauc

SEQ ID NO: 476515 - RNA, 19 nt, Artificial Sequence
  Description of Artificial Sequence: Synthetic oligonucleotide
  Sense strand starting at position 3181 of SEQ ID NO: 317254
uguuuauggguaugcauau

SEQ ID NO: 476516 - RNA, 19 nt, Artificial Sequence
  Description of Artificial Sequence: Synthetic oligonucleotide
  Antisense Strand to SEQ ID NO: 476515
auaugcauacccauaaaca

SEQ ID NO: 476517 - RNA, 19 nt, Artificial Sequence
  Description of Artificial Sequence: Synthetic oligonucleotide
  Sense strand starting at position 3229 of SEQ ID NO: 317254
gucuaugaugcagaaaccu

SEQ ID NO: 476518 - RNA, 19 nt, Artificial Sequence
  Description of Artificial Sequence: Synthetic oligonucleotide
  Antisense Strand to SEQ ID NO: 476517
agguuucugcaucauagac

SEQ ID NO: 476519 - RNA, 19 nt, Artificial Sequence
  Description of Artificial Sequence: Synthetic oligonucleotide
  Sense strand starting at position 3706 of SEQ ID NO: 317254
ggagauauaucuuacucug

SEQ ID NO: 476520 - RNA, 19 nt, Artificial Sequence
  Description of Artificial Sequence: Synthetic oligonucleotide
  Antisense Strand to SEQ ID NO: 476519
cagaguaagauauaucucc

SEQ ID NO: 476521 - RNA, 19 nt, Artificial Sequence
  Description of Artificial Sequence: Synthetic oligonucleotide
  Sense strand starting at position 3860 of SEQ ID NO: 317254
uggaaccugucuuucuaau

SEQ ID NO: 476522 - RNA, 19 nt, Artificial Sequence
  Description of Artificial Sequence: Synthetic oligonucleotide
  Antisense Strand to SEQ ID NO: 476521
auuagaaagacagguucca

SEQ ID NO: 476523 - RNA, 19 nt, Artificial Sequence
  Description of Artificial Sequence: Synthetic oligonucleotide
  Sense strand starting at position 3889 of SEQ ID NO: 317254
aguaauccugauggaaauc

SEQ ID NO: 476524 - RNA, 19 nt, Artificial Sequence
  Description of Artificial Sequence: Synthetic oligonucleotide
  Antisense Strand to SEQ ID NO: 476523
gauuuccaucaggauuacu

SEQ ID NO: 476525 - RNA, 19 nt, Artificial Sequence
  Description of Artificial Sequence: Synthetic oligonucleotide
  Sense strand starting at position 3964 of SEQ ID NO: 317254
gagggagacucuuaccuac

SEQ ID NO: 476526 - RNA, 19 nt, Artificial Sequence
  Description of Artificial Sequence: Synthetic oligonucleotide
  Antisense Strand to SEQ ID NO: 476525
guagguaagagucucccuc

SEQ ID NO: 476527 - RNA, 19 nt, Artificial Sequence
  Description of Artificial Sequence: Synthetic oligonucleotide
  Sense strand starting at position 79 of SEQ ID NO: 317255
uauacuugcguguaaagaa

SEQ ID NO: 476528 - RNA, 19 nt, Artificial Sequence
  Description of Artificial Sequence: Synthetic oligonucleotide
  Antisense Strand to SEQ ID NO: 476527
uucuuuacacgcaaguaua

SEQ ID NO: 476529 - RNA, 19 nt, Artificial Sequence
  Description of Artificial Sequence: Synthetic oligonucleotide
  Sense strand starting at position 222 of SEQ ID NO: 317255
gcuuaauaauacuuauggu

SEQ ID NO: 476530 - RNA, 19 nt, Artificial Sequence
  Description of Artificial Sequence: Synthetic oligonucleotide
  Antisense Strand to SEQ ID NO: 476529
accauaaguauuauuaagc

SEQ ID NO: 476531 - RNA, 19 nt, Artificial Sequence
  Description of Artificial Sequence: Synthetic oligonucleotide
  Sense strand starting at position 340 of SEQ ID NO: 317255
uuacuuuggcuggauggau

SEQ ID NO: 476532 - RNA, 19 nt, Artificial Sequence
  Description of Artificial Sequence: Synthetic oligonucleotide
  Antisense Strand to SEQ ID NO: 476531
auccauccagccaaaguaa

SEQ ID NO: 476533 - RNA, 19 nt, Artificial Sequence
  Description of Artificial Sequence: Synthetic oligonucleotide
  Sense strand starting at position 908 of SEQ ID NO: 317255
ucaauaugguuugugaauu

SEQ ID NO: 476534 - RNA, 19 nt, Artificial Sequence
  Description of Artificial Sequence: Synthetic oligonucleotide
  Antisense Strand to SEQ ID NO: 476533
aauucacaaaccauauuga

SEQ ID NO: 476535 - RNA, 19 nt, Artificial Sequence
  Description of Artificial Sequence: Synthetic oligonucleotide
  Sense strand starting at position 1222 of SEQ ID NO: 317255
agucacuggcuaggauuaa

SEQ ID NO: 476536 - RNA, 19 nt, Artificial Sequence
  Description of Artificial Sequence: Synthetic oligonucleotide
  Antisense Strand to SEQ ID NO: 476535
uuaauccuagccagugacu

SEQ ID NO: 476537 - RNA, 19 nt, Artificial Sequence
  Description of Artificial Sequence: Synthetic oligonucleotide
  Sense strand starting at position 1237 of SEQ ID NO: 317255
uuaagaauuugccaucaga

SEQ ID NO: 476538 - RNA, 19 nt, Artificial Sequence
  Description of Artificial Sequence: Synthetic oligonucleotide
  Antisense Strand to SEQ ID NO: 476537
ucugauggcaaauucuuaa

SEQ ID NO: 476539 - RNA, 19 nt, Artificial Sequence
  Description of Artificial Sequence: Synthetic oligonucleotide
  Sense strand starting at position 1253 of SEQ ID NO: 317255
agauuugucuuacauuaga

SEQ ID NO: 476540 - RNA, 19 nt, Artificial Sequence
  Description of Artificial Sequence: Synthetic oligonucleotide
  Antisense Strand to SEQ ID NO: 476539
ucuaauguaagacaaaucu

SEQ ID NO: 476541 - RNA, 19 nt, Artificial Sequence
  Description of Artificial Sequence: Synthetic oligonucleotide
  Sense strand starting at position 1256 of SEQ ID NO: 317255
uuugucuuacauuagaguu

SEQ ID NO: 476542 - RNA, 19 nt, Artificial Sequence
  Description of Artificial Sequence: Synthetic oligonucleotide
  Antisense Strand to SEQ ID NO: 476541
aacucuaauguaagacaaa

SEQ ID NO: 476543 - RNA, 19 nt, Artificial Sequence
  Description of Artificial Sequence: Synthetic oligonucleotide
  Sense strand starting at position 1322 of SEQ ID NO: 317255
guuacaguccacuaaaggu

SEQ ID NO: 476544 - RNA, 19 nt, Artificial Sequence
  Description of Artificial Sequence: Synthetic oligonucleotide
  Antisense Strand to SEQ ID NO: 476543
accuuuaguggacuguaac

SEQ ID NO: 476545 - RNA, 19 nt, Artificial Sequence
  Description of Artificial Sequence: Synthetic oligonucleotide
  Sense strand starting at position 1373 of SEQ ID NO: 317255
ucccuaaugucuguacaua

SEQ ID NO: 476546 - RNA, 19 nt, Artificial Sequence
  Description of Artificial Sequence: Synthetic oligonucleotide
  Antisense Strand to SEQ ID NO: 476545
uauguacagacauuaggga

SEQ ID NO: 476547 - RNA, 19 nt, Artificial Sequence
  Description of Artificial Sequence: Synthetic oligonucleotide
  Sense strand starting at position 1374 of SEQ ID NO: 317255
cccuaaugucuguacauaa

SEQ ID NO: 476548 - RNA, 19 nt, Artificial Sequence
  Description of Artificial Sequence: Synthetic oligonucleotide
  Antisense Strand to SEQ ID NO: 476547
uuauguacagacauuaggg

SEQ ID NO: 476549 - RNA, 19 nt, Artificial Sequence
  Description of Artificial Sequence: Synthetic oligonucleotide
  Sense strand starting at position 1465 of SEQ ID NO: 317255
cuguuaagauaaucuacgu

SEQ ID NO: 476550 - RNA, 19 nt, Artificial Sequence
  Description of Artificial Sequence: Synthetic oligonucleotide
  Antisense Strand to SEQ ID NO: 476549
acguagauuaucuuaacag

SEQ ID NO: 476551 - RNA, 19 nt, Artificial Sequence
  Description of Artificial Sequence: Synthetic oligonucleotide
  Sense strand starting at position 1469 of SEQ ID NO: 317255
uaagauaaucuacguggga

SEQ ID NO: 476552 - RNA, 19 nt, Artificial Sequence
  Description of Artificial Sequence: Synthetic oligonucleotide
  Antisense Strand to SEQ ID NO: 476551
ucccacguagauuaucuua

SEQ ID NO: 476553 - RNA, 19 nt, Artificial Sequence
  Description of Artificial Sequence: Synthetic oligonucleotide
  Sense strand starting at position 1470 of SEQ ID NO: 317255
aagauaaucuacgugggau

SEQ ID NO: 476554 - RNA, 19 nt, Artificial Sequence
  Description of Artificial Sequence: Synthetic oligonucleotide
  Antisense Strand to SEQ ID NO: 476553
aucccacguagauuaucuu

SEQ ID NO: 476555 - RNA, 19 nt, Artificial Sequence
  Description of Artificial Sequence: Synthetic oligonucleotide
  Sense strand starting at position 1471 of SEQ ID NO: 317255
agauaaucuacgugggauc

SEQ ID NO: 476556 - RNA, 19 nt, Artificial Sequence
  Description of Artificial Sequence: Synthetic oligonucleotide
  Antisense Strand to SEQ ID NO: 476555
gaucccacguagauuaucu

SEQ ID NO: 476557 - RNA, 19 nt, Artificial Sequence
  Description of Artificial Sequence: Synthetic oligonucleotide
  Sense strand starting at position 1647 of SEQ ID NO: 317255
gucucucugcugcuuuauu

SEQ ID NO: 476558 - RNA, 19 nt, Artificial Sequence
  Description of Artificial Sequence: Synthetic oligonucleotide
  Antisense Strand to SEQ ID NO: 476557
aauaaagcagcagagagac

SEQ ID NO: 476559 - RNA, 19 nt, Artificial Sequence
  Description of Artificial Sequence: Synthetic oligonucleotide
  Sense strand starting at position 1711 of SEQ ID NO: 317255
auuagcaaaugguuauaca

SEQ ID NO: 476560 - RNA, 19 nt, Artificial Sequence
  Description of Artificial Sequence: Synthetic oligonucleotide
  Antisense Strand to SEQ ID NO: 476559
uguauaaccauuugcuaau

SEQ ID NO: 476561 - RNA, 19 nt, Artificial Sequence
  Description of Artificial Sequence: Synthetic oligonucleotide
  Sense strand starting at position 1712 of SEQ ID NO: 317255
uuagcaaaugguuauacaa

SEQ ID NO: 476562 - RNA, 19 nt, Artificial Sequence
  Description of Artificial Sequence: Synthetic oligonucleotide
  Antisense Strand to SEQ ID NO: 476561
uuguauaaccauuugcuaa

SEQ ID NO: 476563 - RNA, 19 nt, Artificial Sequence
  Description of Artificial Sequence: Synthetic oligonucleotide
  Sense strand starting at position 2228 of SEQ ID NO: 317255
gguaucaccuacuuagaaa

SEQ ID NO: 476564 - RNA, 19 nt, Artificial Sequence
  Description of Artificial Sequence: Synthetic oligonucleotide
  Antisense Strand to SEQ ID NO: 476563
uuucuaaguaggugauacc

SEQ ID NO: 476565 - RNA, 19 nt, Artificial Sequence
  Description of Artificial Sequence: Synthetic oligonucleotide
  Sense strand starting at position 2256 of SEQ ID NO: 317255
ucuuaaacuugaucguaau

SEQ ID NO: 476566 - RNA, 19 nt, Artificial Sequence
  Description of Artificial Sequence: Synthetic oligonucleotide
  Antisense Strand to SEQ ID NO: 476565
auuacgaucaaguuuaaga

SEQ ID NO: 476567 - RNA, 19 nt, Artificial Sequence
  Description of Artificial Sequence: Synthetic oligonucleotide
  Sense strand starting at position 2392 of SEQ ID NO: 317255
guguauggcuucuuauuuc

SEQ ID NO: 476568 - RNA, 19 nt, Artificial Sequence
  Description of Artificial Sequence: Synthetic oligonucleotide
  Antisense Strand to SEQ ID NO: 476567
gaaauaagaagccauacac

SEQ ID NO: 476569 - RNA, 19 nt, Artificial Sequence
  Description of Artificial Sequence: Synthetic oligonucleotide
  Sense strand starting at position 2636 of SEQ ID NO: 317255
aauacaguuggaggucauu

SEQ ID NO: 476570 - RNA, 19 nt, Artificial Sequence
  Description of Artificial Sequence: Synthetic oligonucleotide
  Antisense Strand to SEQ ID NO: 476569
aaugaccuccaacuguauu

SEQ ID NO: 476571 - RNA, 19 nt, Artificial Sequence
  Description of Artificial Sequence: Synthetic oligonucleotide
  Sense strand starting at position 2706 of SEQ ID NO: 317255
cccuuauaacugggagcua

SEQ ID NO: 476572 - RNA, 19 nt, Artificial Sequence
  Description of Artificial Sequence: Synthetic oligonucleotide
  Antisense Strand to SEQ ID NO: 476571
uagcucccaguuauaaggg

SEQ ID NO: 476573 - RNA, 19 nt, Artificial Sequence
  Description of Artificial Sequence: Synthetic oligonucleotide
  Sense strand starting at position 2832 of SEQ ID NO: 317255
ugcucaauaccugggugaa

SEQ ID NO: 476574 - RNA, 19 nt, Artificial Sequence
  Description of Artificial Sequence: Synthetic oligonucleotide
  Antisense Strand to SEQ ID NO: 476573
uucacccagguauugagca

SEQ ID NO: 476575 - RNA, 19 nt, Artificial Sequence
  Description of Artificial Sequence: Synthetic oligonucleotide
  Sense strand starting at position 2833 of SEQ ID NO: 317255
gcucaauaccugggugaag

SEQ ID NO: 476576 - RNA, 19 nt, Artificial Sequence
  Description of Artificial Sequence: Synthetic oligonucleotide
  Antisense Strand to SEQ ID NO: 476575
cuucacccagguauugagc

SEQ ID NO: 476577 - RNA, 19 nt, Artificial Sequence
  Description of Artificial Sequence: Synthetic oligonucleotide
  Sense strand starting at position 3135 of SEQ ID NO: 317255
auuagaagaucaguuuguu

SEQ ID NO: 476578 - RNA, 19 nt, Artificial Sequence
  Description of Artificial Sequence: Synthetic oligonucleotide
  Antisense Strand to SEQ ID NO: 476577
aacaaacugaucuucuaau

SEQ ID NO: 476579 - RNA, 19 nt, Artificial Sequence
  Description of Artificial Sequence: Synthetic oligonucleotide
  Sense strand starting at position 3210 of SEQ ID NO: 317255
gagaauguauugcuuauau

SEQ ID NO: 476580 - RNA, 19 nt, Artificial Sequence
  Description of Artificial Sequence: Synthetic oligonucleotide
  Antisense Strand to SEQ ID NO: 476579
auauaagcaauacauucuc

SEQ ID NO: 476581 - RNA, 19 nt, Artificial Sequence
  Description of Artificial Sequence: Synthetic oligonucleotide
  Sense strand starting at position 3278 of SEQ ID NO: 317255
gauuguggauucuuuccua

SEQ ID NO: 476582 - RNA, 19 nt, Artificial Sequence
  Description of Artificial Sequence: Synthetic oligonucleotide
  Antisense Strand to SEQ ID NO: 476581
uaggaaagaauccacaauc

SEQ ID NO: 476583 - RNA, 19 nt, Artificial Sequence
  Description of Artificial Sequence: Synthetic oligonucleotide
  Sense strand starting at position 3282 of SEQ ID NO: 317255
guggauucuuuccuaccua

SEQ ID NO: 476584 - RNA, 19 nt, Artificial Sequence
  Description of Artificial Sequence: Synthetic oligonucleotide
  Antisense Strand to SEQ ID NO: 476583
uagguaggaaagaauccac

SEQ ID NO: 476585 - RNA, 19 nt, Artificial Sequence
  Description of Artificial Sequence: Synthetic oligonucleotide
  Sense strand starting at position 3409 of SEQ ID NO: 317255
ugaccuuugcuuuagugau

SEQ ID NO: 476586 - RNA, 19 nt, Artificial Sequence
  Description of Artificial Sequence: Synthetic oligonucleotide
  Antisense Strand to SEQ ID NO: 476585
aucacuaaagcaaagguca

SEQ ID NO: 476587 - RNA, 19 nt, Artificial Sequence
  Description of Artificial Sequence: Synthetic oligonucleotide
  Sense strand starting at position 3432 of SEQ ID NO: 317255
gauauuguacaucagguuu

SEQ ID NO: 476588 - RNA, 19 nt, Artificial Sequence
  Description of Artificial Sequence: Synthetic oligonucleotide
  Antisense Strand to SEQ ID NO: 476587
aaaccugauguacaauauc

SEQ ID NO: 476589 - RNA, 19 nt, Artificial Sequence
  Description of Artificial Sequence: Synthetic oligonucleotide
  Sense strand starting at position 3510 of SEQ ID NO: 317255
cuugaaauagcauguuaaa

SEQ ID NO: 476590 - RNA, 19 nt, Artificial Sequence
  Description of Artificial Sequence: Synthetic oligonucleotide
  Antisense Strand to SEQ ID NO: 476589
uuuaacaugcuauuucaag

SEQ ID NO: 476591 - RNA, 19 nt, Artificial Sequence
  Description of Artificial Sequence: Synthetic oligonucleotide
  Sense strand starting at position 3615 of SEQ ID NO: 317255
uuaugugaauucuugaguc

SEQ ID NO: 476592 - RNA, 19 nt, Artificial Sequence
  Description of Artificial Sequence: Synthetic oligonucleotide
  Antisense Strand to SEQ ID NO: 476591
gacucaagaauucacauaa

SEQ ID NO: 476593 - RNA, 19 nt, Artificial Sequence
  Description of Artificial Sequence: Synthetic oligonucleotide
  Sense strand starting at position 3617 of SEQ ID NO: 317255
augugaauucuugagucca

SEQ ID NO: 476594 - RNA, 19 nt, Artificial Sequence
  Description of Artificial Sequence: Synthetic oligonucleotide
  Antisense Strand to SEQ ID NO: 476593
uggacucaagaauucacau

SEQ ID NO: 476595 - RNA, 19 nt, Artificial Sequence
  Description of Artificial Sequence: Synthetic oligonucleotide
  Sense strand starting at position 3730 of SEQ ID NO: 317255
agacuagauugugucauca

SEQ ID NO: 476596 - RNA, 19 nt, Artificial Sequence
  Description of Artificial Sequence: Synthetic oligonucleotide
  Antisense Strand to SEQ ID NO: 476595
ugaugacacaaucuagucu

SEQ ID NO: 476597 - RNA, 19 nt, Artificial Sequence
  Description of Artificial Sequence: Synthetic oligonucleotide
  Sense strand starting at position 3741 of SEQ ID NO: 317255
ugucaucaaucucuggaaa

SEQ ID NO: 476598 - RNA, 19 nt, Artificial Sequence
  Description of Artificial Sequence: Synthetic oligonucleotide
  Antisense Strand to SEQ ID NO: 476597
uuuccagagauugaugaca

SEQ ID NO: 476599 - RNA, 19 nt, Artificial Sequence
  Description of Artificial Sequence: Synthetic oligonucleotide
  Sense strand starting at position 3742 of SEQ ID NO: 317255
gucaucaaucucuggaaac

SEQ ID NO: 476600 - RNA, 19 nt, Artificial Sequence
  Description of Artificial Sequence: Synthetic oligonucleotide
  Antisense Strand to SEQ ID NO: 476599
guuuccagagauugaugac

SEQ ID NO: 476601 - RNA, 19 nt, Artificial Sequence
  Description of Artificial Sequence: Synthetic oligonucleotide
  Sense strand starting at position 3799 of SEQ ID NO: 317255
gcuauuaaaguccaucuga

SEQ ID NO: 476602 - RNA, 19 nt, Artificial Sequence
  Description of Artificial Sequence: Synthetic oligonucleotide
  Antisense Strand to SEQ ID NO: 476601
ucagauggacuuuaauagc

SEQ ID NO: 476603 - RNA, 19 nt, Artificial Sequence
  Description of Artificial Sequence: Synthetic oligonucleotide
  Sense strand starting at position 3807 of SEQ ID NO: 317255
aguccaucugacugaaauc

SEQ ID NO: 476604 - RNA, 19 nt, Artificial Sequence
  Description of Artificial Sequence: Synthetic oligonucleotide
  Antisense Strand to SEQ ID NO: 476603
gauuucagucagauggacu

SEQ ID NO: 476605 - RNA, 19 nt, Artificial Sequence
  Description of Artificial Sequence: Synthetic oligonucleotide
  Sense strand starting at position 3814 of SEQ ID NO: 317255
cugacugaaaucugguaga

SEQ ID NO: 476606 - RNA, 19 nt, Artificial Sequence
  Description of Artificial Sequence: Synthetic oligonucleotide
  Antisense Strand to SEQ ID NO: 476605
ucuaccagauuucagucag

SEQ ID NO: 476607 - RNA, 19 nt, Artificial Sequence
  Description of Artificial Sequence: Synthetic oligonucleotide
  Sense strand starting at position 26 of SEQ ID NO: 317256
uuucuugagucugugcuua

SEQ ID NO: 476608 - RNA, 19 nt, Artificial Sequence
  Description of Artificial Sequence: Synthetic oligonucleotide
  Antisense Strand to SEQ ID NO: 476607
uaagcacagacucaagaaa

SEQ ID NO: 476609 - RNA, 19 nt, Artificial Sequence
  Description of Artificial Sequence: Synthetic oligonucleotide
  Sense strand starting at position 28 of SEQ ID NO: 317256
ucuugagucugugcuuaug

SEQ ID NO: 476610 - RNA, 19 nt, Artificial Sequence
  Description of Artificial Sequence: Synthetic oligonucleotide
  Antisense Strand to SEQ ID NO: 476609
cauaagcacagacucaaga

SEQ ID NO: 476611 - RNA, 19 nt, Artificial Sequence
  Description of Artificial Sequence: Synthetic oligonucleotide
  Sense strand starting at position 30 of SEQ ID NO: 317256
uugagucugugcuuaugua

SEQ ID NO: 476612 - RNA, 19 nt, Artificial Sequence
  Description of Artificial Sequence: Synthetic oligonucleotide
  Antisense Strand to SEQ ID NO: 476611
uacauaagcacagacucaa

SEQ ID NO: 476613 - RNA, 19 nt, Artificial Sequence
  Description of Artificial Sequence: Synthetic oligonucleotide
  Sense strand starting at position 38 of SEQ ID NO: 317256
gugcuuauguacuuaaaga

SEQ ID NO: 476614 - RNA, 19 nt, Artificial Sequence
  Description of Artificial Sequence: Synthetic oligonucleotide
  Antisense Strand to SEQ ID NO: 476613
ucuuuaaguacauaagcac

SEQ ID NO: 476615 - RNA, 19 nt, Artificial Sequence
  Description of Artificial Sequence: Synthetic oligonucleotide
  Sense strand starting at position 54 of SEQ ID NO: 317256
agagaaguuguauauucuc

SEQ ID NO: 476616 - RNA, 19 nt, Artificial Sequence
  Description of Artificial Sequence: Synthetic oligonucleotide
  Antisense Strand to SEQ ID NO: 476615
gagaauauacaacuucucu

SEQ ID NO: 476617 - RNA, 19 nt, Artificial Sequence
  Description of Artificial Sequence: Synthetic oligonucleotide
  Sense strand starting at position 59 of SEQ ID NO: 317256
aguuguauauucucuccua

SEQ ID NO: 476618 - RNA, 19 nt, Artificial Sequence
  Description of Artificial Sequence: Synthetic oligonucleotide
  Antisense Strand to SEQ ID NO: 476617
uaggagagaauauacaacu

SEQ ID NO: 476619 - RNA, 19 nt, Artificial Sequence
  Description of Artificial Sequence: Synthetic oligonucleotide
  Sense strand starting at position 60 of SEQ ID NO: 317256
guuguauauucucuccuac

SEQ ID NO: 476620 - RNA, 19 nt, Artificial Sequence
  Description of Artificial Sequence: Synthetic oligonucleotide
  Antisense Strand to SEQ ID NO: 476619
guaggagagaauauacaac

SEQ ID NO: 476621 - RNA, 19 nt, Artificial Sequence
  Description of Artificial Sequence: Synthetic oligonucleotide
  Sense strand starting at position 209 of SEQ ID NO: 317256
gcuagcacucuuuguuuga

SEQ ID NO: 476622 - RNA, 19 nt, Artificial Sequence
  Description of Artificial Sequence: Synthetic oligonucleotide
  Antisense Strand to SEQ ID NO: 476621
ucaaacaaagagugcuagc

SEQ ID NO: 476623 - RNA, 19 nt, Artificial Sequence
  Description of Artificial Sequence: Synthetic oligonucleotide
  Sense strand starting at position 212 of SEQ ID NO: 317256
agcacucuuuguuugacau

SEQ ID NO: 476624 - RNA, 19 nt, Artificial Sequence
  Description of Artificial Sequence: Synthetic oligonucleotide
  Antisense Strand to SEQ ID NO: 476623
augucaaacaaagagugcu

SEQ ID NO: 476625 - RNA, 19 nt, Artificial Sequence
  Description of Artificial Sequence: Synthetic oligonucleotide
  Sense strand starting at position 213 of SEQ ID NO: 317256
gcacucuuuguuugacauc

SEQ ID NO: 476626 - RNA, 19 nt, Artificial Sequence
  Description of Artificial Sequence: Synthetic oligonucleotide
  Antisense Strand to SEQ ID NO: 476625
gaugucaaacaaagagugc

SEQ ID NO: 476627 - RNA, 19 nt, Artificial Sequence
  Description of Artificial Sequence: Synthetic oligonucleotide
  Sense strand starting at position 277 of SEQ ID NO: 317256
caaguaaagcgaugacuuc

SEQ ID NO: 476628 - RNA, 19 nt, Artificial Sequence
  Description of Artificial Sequence: Synthetic oligonucleotide
  Antisense Strand to SEQ ID NO: 476627
gaagucaucgcuuuacuug

SEQ ID NO: 476629 - RNA, 19 nt, Artificial Sequence
  Description of Artificial Sequence: Synthetic oligonucleotide
  Sense strand starting at position 403 of SEQ ID NO: 317256
gaaugacauugugacagau

SEQ ID NO: 476630 - RNA, 19 nt, Artificial Sequence
  Description of Artificial Sequence: Synthetic oligonucleotide
  Antisense Strand to SEQ ID NO: 476629
aucugucacaaugucauuc

SEQ ID NO: 476631 - RNA, 19 nt, Artificial Sequence
  Description of Artificial Sequence: Synthetic oligonucleotide
  Sense strand starting at position 405 of SEQ ID NO: 317256
augacauugugacagauaa

SEQ ID NO: 476632 - RNA, 19 nt, Artificial Sequence
  Description of Artificial Sequence: Synthetic oligonucleotide
  Antisense Strand to SEQ ID NO: 476631
uuaucugucacaaugucau

SEQ ID NO: 476633 - RNA, 19 nt, Artificial Sequence
  Description of Artificial Sequence: Synthetic oligonucleotide
  Sense strand starting at position 662 of SEQ ID NO: 317256
aauuuauuagugugaugcu

SEQ ID NO: 476634 - RNA, 19 nt, Artificial Sequence
  Description of Artificial Sequence: Synthetic oligonucleotide
  Antisense Strand to SEQ ID NO: 476633
agcaucacacuaauaaauu

SEQ ID NO: 476635 - RNA, 19 nt, Artificial Sequence
  Description of Artificial Sequence: Synthetic oligonucleotide
  Sense strand starting at position 712 of SEQ ID NO: 317256
ccuuuaucuccugauguua

SEQ ID NO: 476636 - RNA, 19 nt, Artificial Sequence
  Description of Artificial Sequence: Synthetic oligonucleotide
  Antisense Strand to SEQ ID NO: 476635
uaacaucaggagauaaagg

SEQ ID NO: 476637 - RNA, 19 nt, Artificial Sequence
  Description of Artificial Sequence: Synthetic oligonucleotide
  Sense strand starting at position 872 of SEQ ID NO: 317256
accauacugagcuggagua

SEQ ID NO: 476638 - RNA, 19 nt, Artificial Sequence
  Description of Artificial Sequence: Synthetic oligonucleotide
  Antisense Strand to SEQ ID NO: 476637
uacuccagcucaguauggu

SEQ ID NO: 476639 - RNA, 19 nt, Artificial Sequence
  Description of Artificial Sequence: Synthetic oligonucleotide
  Sense strand starting at position 873 of SEQ ID NO: 317256
ccauacugagcuggaguau

SEQ ID NO: 476640 - RNA, 19 nt, Artificial Sequence
  Description of Artificial Sequence: Synthetic oligonucleotide
  Antisense Strand to SEQ ID NO: 476639
auacuccagcucaguaugg

SEQ ID NO: 476641 - RNA, 19 nt, Artificial Sequence
  Description of Artificial Sequence: Synthetic oligonucleotide
  Sense strand starting at position 879 of SEQ ID NO: 317256
ugagcuggaguaugugaau

SEQ ID NO: 476642 - RNA, 19 nt, Artificial Sequence
  Description of Artificial Sequence: Synthetic oligonucleotide
  Antisense Strand to SEQ ID NO: 476641
auucacauacuccagcuca

SEQ ID NO: 476643 - RNA, 19 nt, Artificial Sequence
  Description of Artificial Sequence: Synthetic oligonucleotide
  Sense strand starting at position 885 of SEQ ID NO: 317256
ggaguaugugaauauggcu

SEQ ID NO: 476644 - RNA, 19 nt, Artificial Sequence
  Description of Artificial Sequence: Synthetic oligonucleotide
  Antisense Strand to SEQ ID NO: 476643
agccauauucacauacucc

SEQ ID NO: 476645 - RNA, 19 nt, Artificial Sequence
  Description of Artificial Sequence: Synthetic oligonucleotide
  Sense strand starting at position 1016 of SEQ ID NO: 317256
uauugauugccacguuaau

SEQ ID NO: 476646 - RNA, 19 nt, Artificial Sequence
  Description of Artificial Sequence: Synthetic oligonucleotide
  Antisense Strand to SEQ ID NO: 476645
auuaacguggcaaucaaua

SEQ ID NO: 476647 - RNA, 19 nt, Artificial Sequence
  Description of Artificial Sequence: Synthetic oligonucleotide
  Sense strand starting at position 1491 of SEQ ID NO: 317256
gggcgucuccguagaaaca

SEQ ID NO: 476648 - RNA, 19 nt, Artificial Sequence
  Description of Artificial Sequence: Synthetic oligonucleotide
  Antisense Strand to SEQ ID NO: 476647
uguuucuacggagacgccc

SEQ ID NO: 476649 - RNA, 19 nt, Artificial Sequence
  Description of Artificial Sequence: Synthetic oligonucleotide
  Sense strand starting at position 1869 of SEQ ID NO: 317256
gggaaucauugaggacaga

SEQ ID NO: 476650 - RNA, 19 nt, Artificial Sequence
  Description of Artificial Sequence: Synthetic oligonucleotide
  Antisense Strand to SEQ ID NO: 476649
ucuguccucaaugauuccc

SEQ ID NO: 476651 - RNA, 19 nt, Artificial Sequence
  Description of Artificial Sequence: Synthetic oligonucleotide
  Sense strand starting at position 2589 of SEQ ID NO: 317256
ugcagcucuucccugacaa

SEQ ID NO: 476652 - RNA, 19 nt, Artificial Sequence
  Description of Artificial Sequence: Synthetic oligonucleotide
  Antisense Strand to SEQ ID NO: 476651
uugucagggaagagcugca

SEQ ID NO: 476653 - RNA, 19 nt, Artificial Sequence
  Description of Artificial Sequence: Synthetic oligonucleotide
  Sense strand starting at position 2590 of SEQ ID NO: 317256
gcagcucuucccugacaac

SEQ ID NO: 476654 - RNA, 19 nt, Artificial Sequence
  Description of Artificial Sequence: Synthetic oligonucleotide
  Antisense Strand to SEQ ID NO: 476653
guugucagggaagagcugc

SEQ ID NO: 476655 - RNA, 19 nt, Artificial Sequence
  Description of Artificial Sequence: Synthetic oligonucleotide
  Sense strand starting at position 2600 of SEQ ID NO: 317256
ccugacaacucccaggaua

SEQ ID NO: 476656 - RNA, 19 nt, Artificial Sequence
  Description of Artificial Sequence: Synthetic oligonucleotide
  Antisense Strand to SEQ ID NO: 476655
uauccugggaguugucagg

SEQ ID NO: 476657 - RNA, 19 nt, Artificial Sequence
  Description of Artificial Sequence: Synthetic oligonucleotide
  Sense strand starting at position 2631 of SEQ ID NO: 317256
acccacgaggaauguuaaa

SEQ ID NO: 476658 - RNA, 19 nt, Artificial Sequence
  Description of Artificial Sequence: Synthetic oligonucleotide
  Antisense Strand to SEQ ID NO: 476657
uuuaacauuccucgugggu

SEQ ID NO: 476659 - RNA, 19 nt, Artificial Sequence
  Description of Artificial Sequence: Synthetic oligonucleotide
  Sense strand starting at position 2703 of SEQ ID NO: 317256
uugauaucaccgugcuuaa

SEQ ID NO: 476660 - RNA, 19 nt, Artificial Sequence
  Description of Artificial Sequence: Synthetic oligonucleotide
  Antisense Strand to SEQ ID NO: 476659
uuaagcacggugauaucaa

SEQ ID NO: 476661 - RNA, 19 nt, Artificial Sequence
  Description of Artificial Sequence: Synthetic oligonucleotide
  Sense strand starting at position 2734 of SEQ ID NO: 317256
auaaacauuggcugaaauu

SEQ ID NO: 476662 - RNA, 19 nt, Artificial Sequence
  Description of Artificial Sequence: Synthetic oligonucleotide
  Antisense Strand to SEQ ID NO: 476661
aauuucagccaauguuuau

SEQ ID NO: 476663 - RNA, 19 nt, Artificial Sequence
  Description of Artificial Sequence: Synthetic oligonucleotide
  Sense strand starting at position 2833 of SEQ ID NO: 317256
acaccaguuguuugguuau

SEQ ID NO: 476664 - RNA, 19 nt, Artificial Sequence
  Description of Artificial Sequence: Synthetic oligonucleotide
  Antisense Strand to SEQ ID NO: 476663
auaaccaaacaacuggugu

SEQ ID NO: 476665 - RNA, 19 nt, Artificial Sequence
  Description of Artificial Sequence: Synthetic oligonucleotide
  Sense strand starting at position 2835 of SEQ ID NO: 317256
accaguuguuugguuauua

SEQ ID NO: 476666 - RNA, 19 nt, Artificial Sequence
  Description of Artificial Sequence: Synthetic oligonucleotide
  Antisense Strand to SEQ ID NO: 476665
uaauaaccaaacaacuggu

SEQ ID NO: 476667 - RNA, 19 nt, Artificial Sequence
  Description of Artificial Sequence: Synthetic oligonucleotide
  Sense strand starting at position 2836 of SEQ ID NO: 317256
ccaguuguuugguuauuau

SEQ ID NO: 476668 - RNA, 19 nt, Artificial Sequence
  Description of Artificial Sequence: Synthetic oligonucleotide
  Antisense Strand to SEQ ID NO: 476667
auaauaaccaaacaacugg

SEQ ID NO: 476669 - RNA, 19 nt, Artificial Sequence
  Description of Artificial Sequence: Synthetic oligonucleotide
  Sense strand starting at position 2862 of SEQ ID NO: 317256
cagugaggcucucuuaaua

SEQ ID NO: 476670 - RNA, 19 nt, Artificial Sequence
  Description of Artificial Sequence: Synthetic oligonucleotide
  Antisense Strand to SEQ ID NO: 476669
uauuaagagagccucacug

SEQ ID NO: 476671 - RNA, 19 nt, Artificial Sequence
  Description of Artificial Sequence: Synthetic oligonucleotide
  Sense strand starting at position 3186 of SEQ ID NO: 317256
aguuguuucugacuaugcu

SEQ ID NO: 476672 - RNA, 19 nt, Artificial Sequence
  Description of Artificial Sequence: Synthetic oligonucleotide
  Antisense Strand to SEQ ID NO: 476671
agcauagucagaaacaacu

SEQ ID NO: 476673 - RNA, 19 nt, Artificial Sequence
  Description of Artificial Sequence: Synthetic oligonucleotide
  Sense strand starting at position 3187 of SEQ ID NO: 317256
guuguuucugacuaugcua

SEQ ID NO: 476674 - RNA, 19 nt, Artificial Sequence
  Description of Artificial Sequence: Synthetic oligonucleotide
  Antisense Strand to SEQ ID NO: 476673
uagcauagucagaaacaac

SEQ ID NO: 476675 - RNA, 19 nt, Artificial Sequence
  Description of Artificial Sequence: Synthetic oligonucleotide
  Sense strand starting at position 3679 of SEQ ID NO: 317256
gggagacguugucucaaga

SEQ ID NO: 476676 - RNA, 19 nt, Artificial Sequence
  Description of Artificial Sequence: Synthetic oligonucleotide
  Antisense Strand to SEQ ID NO: 476675
ucuugagacaacgucuccc

SEQ ID NO: 476677 - RNA, 19 nt, Artificial Sequence
  Description of Artificial Sequence: Synthetic oligonucleotide
  Sense strand starting at position 3801 of SEQ ID NO: 317256
aagaaaugauguuaagagu

SEQ ID NO: 476678 - RNA, 19 nt, Artificial Sequence
  Description of Artificial Sequence: Synthetic oligonucleotide
  Antisense Strand to SEQ ID NO: 476677
acucuuaacaucauuucuu

SEQ ID NO: 476679 - RNA, 19 nt, Artificial Sequence
  Description of Artificial Sequence: Synthetic oligonucleotide
  Sense strand starting at position 3804 of SEQ ID NO: 317256
aaaugauguuaagagucca

SEQ ID NO: 476680 - RNA, 19 nt, Artificial Sequence
  Description of Artificial Sequence: Synthetic oligonucleotide
  Antisense Strand to SEQ ID NO: 476679
uggacucuuaacaucauuu

SEQ ID NO: 476681 - RNA, 19 nt, Artificial Sequence
  Description of Artificial Sequence: Synthetic oligonucleotide
  Sense strand starting at position 3812 of SEQ ID NO: 317256
uuaagaguccagggaugua

SEQ ID NO: 476682 - RNA, 19 nt, Artificial Sequence
  Description of Artificial Sequence: Synthetic oligonucleotide
  Antisense Strand to SEQ ID NO: 476681
uacaucccuggacucuuaa

SEQ ID NO: 476683 - RNA, 19 nt, Artificial Sequence
  Description of Artificial Sequence: Synthetic oligonucleotide
  Sense strand starting at position 3824 of SEQ ID NO: 317256
ggauguauuugucaaaucu

SEQ ID NO: 476684 - RNA, 19 nt, Artificial Sequence
  Description of Artificial Sequence: Synthetic oligonucleotide
  Antisense Strand to SEQ ID NO: 476683
agauuugacaaauacaucc

SEQ ID NO: 476685 - RNA, 19 nt, Artificial Sequence
  Description of Artificial Sequence: Synthetic oligonucleotide
  Sense strand starting at position 3958 of SEQ ID NO: 317256
auauaucuggaguagucua

SEQ ID NO: 476686 - RNA, 19 nt, Artificial Sequence
  Description of Artificial Sequence: Synthetic oligonucleotide
  Antisense Strand to SEQ ID NO: 476685
uagacuacuccagauauau

SEQ ID NO: 476687 - RNA, 19 nt, Artificial Sequence
  Description of Artificial Sequence: Synthetic oligonucleotide
  Sense strand starting at position 10 of SEQ ID NO: 317257
uguuguagauggccaagau

SEQ ID NO: 476688 - RNA, 19 nt, Artificial Sequence
  Description of Artificial Sequence: Synthetic oligonucleotide
  Antisense Strand to SEQ ID NO: 476687
aucuuggccaucuacaaca

SEQ ID NO: 476689 - RNA, 19 nt, Artificial Sequence
  Description of Artificial Sequence: Synthetic oligonucleotide
  Sense strand starting at position 170 of SEQ ID NO: 317257
acagacagguucucaguga

SEQ ID NO: 476690 - RNA, 19 nt, Artificial Sequence
  Description of Artificial Sequence: Synthetic oligonucleotide
  Antisense Strand to SEQ ID NO: 476689
ucacugagaaccugucugu

SEQ ID NO: 476691 - RNA, 19 nt, Artificial Sequence
  Description of Artificial Sequence: Synthetic oligonucleotide
  Sense strand starting at position 174 of SEQ ID NO: 317257
acagguucucagugaauau

SEQ ID NO: 476692 - RNA, 19 nt, Artificial Sequence
  Description of Artificial Sequence: Synthetic oligonucleotide
  Antisense Strand to SEQ ID NO: 476691
auauucacugagaaccugu

SEQ ID NO: 476693 - RNA, 19 nt, Artificial Sequence
  Description of Artificial Sequence: Synthetic oligonucleotide
  Sense strand starting at position 234 of SEQ ID NO: 317257
guaagauugacugggcaca

SEQ ID NO: 476694 - RNA, 19 nt, Artificial Sequence
  Description of Artificial Sequence: Synthetic oligonucleotide
  Antisense Strand to SEQ ID NO: 476693
ugugcccagucaaucuuac

SEQ ID NO: 476695 - RNA, 19 nt, Artificial Sequence
  Description of Artificial Sequence: Synthetic oligonucleotide
  Sense strand starting at position 458 of SEQ ID NO: 317257
ggaggaugcggugaguuua

SEQ ID NO: 476696 - RNA, 19 nt, Artificial Sequence
  Description of Artificial Sequence: Synthetic oligonucleotide
  Antisense Strand to SEQ ID NO: 476695
uaaacucaccgcauccucc

SEQ ID NO: 476697 - RNA, 19 nt, Artificial Sequence
  Description of Artificial Sequence: Synthetic oligonucleotide
  Sense strand starting at position 641 of SEQ ID NO: 317257
guuggagacaggugcuaua

SEQ ID NO: 476698 - RNA, 19 nt, Artificial Sequence
  Description of Artificial Sequence: Synthetic oligonucleotide
  Antisense Strand to SEQ ID NO: 476697
uauagcaccugucuccaac

SEQ ID NO: 476699 - RNA, 19 nt, Artificial Sequence
  Description of Artificial Sequence: Synthetic oligonucleotide
  Sense strand starting at position 693 of SEQ ID NO: 317257
ccuaaauacuagucagggu

SEQ ID NO: 476700 - RNA, 19 nt, Artificial Sequence
  Description of Artificial Sequence: Synthetic oligonucleotide
  Antisense Strand to SEQ ID NO: 476699
acccugacuaguauuuagg

SEQ ID NO: 476701 - RNA, 19 nt, Artificial Sequence
  Description of Artificial Sequence: Synthetic oligonucleotide
  Sense strand starting at position 952 of SEQ ID NO: 317257
gaauaugaaguauguuagu

SEQ ID NO: 476702 - RNA, 19 nt, Artificial Sequence
  Description of Artificial Sequence: Synthetic oligonucleotide
  Antisense Strand to SEQ ID NO: 476701
acuaacauacuucauauuc

SEQ ID NO: 476703 - RNA, 19 nt, Artificial Sequence
  Description of Artificial Sequence: Synthetic oligonucleotide
  Sense strand starting at position 977 of SEQ ID NO: 317257
auacaaugaugcccucaga

SEQ ID NO: 476704 - RNA, 19 nt, Artificial Sequence
  Description of Artificial Sequence: Synthetic oligonucleotide
  Antisense Strand to SEQ ID NO: 476703
ucugagggcaucauuguau

SEQ ID NO: 476705 - RNA, 19 nt, Artificial Sequence
  Description of Artificial Sequence: Synthetic oligonucleotide
  Sense strand starting at position 1025 of SEQ ID NO: 317257
ugugcuauuugguuuaacu

SEQ ID NO: 476706 - RNA, 19 nt, Artificial Sequence
  Description of Artificial Sequence: Synthetic oligonucleotide
  Antisense Strand to SEQ ID NO: 476705
aguuaaaccaaauagcaca

SEQ ID NO: 476707 - RNA, 19 nt, Artificial Sequence
  Description of Artificial Sequence: Synthetic oligonucleotide
  Sense strand starting at position 1056 of SEQ ID NO: 317257
ugcaguauuuguguaucuu

SEQ ID NO: 476708 - RNA, 19 nt, Artificial Sequence
  Description of Artificial Sequence: Synthetic oligonucleotide
  Antisense Strand to SEQ ID NO: 476707
aagauacacaaauacugca

SEQ ID NO: 476709 - RNA, 19 nt, Artificial Sequence
  Description of Artificial Sequence: Synthetic oligonucleotide
  Sense strand starting at position 1057 of SEQ ID NO: 317257
gcaguauuuguguaucuuu

SEQ ID NO: 476710 - RNA, 19 nt, Artificial Sequence
  Description of Artificial Sequence: Synthetic oligonucleotide
  Antisense Strand to SEQ ID NO: 476709
aaagauacacaaauacugc

SEQ ID NO: 476711 - RNA, 19 nt, Artificial Sequence
  Description of Artificial Sequence: Synthetic oligonucleotide
  Sense strand starting at position 1060 of SEQ ID NO: 317257
guauuuguguaucuuucuu

SEQ ID NO: 476712 - RNA, 19 nt, Artificial Sequence
  Description of Artificial Sequence: Synthetic oligonucleotide
  Antisense Strand to SEQ ID NO: 476711
aagaaagauacacaaauac

SEQ ID NO: 476713 - RNA, 19 nt, Artificial Sequence
  Description of Artificial Sequence: Synthetic oligonucleotide
  Sense strand starting at position 1426 of SEQ ID NO: 317257
uccuuuaaaucccugugga

SEQ ID NO: 476714 - RNA, 19 nt, Artificial Sequence
  Description of Artificial Sequence: Synthetic oligonucleotide
  Antisense Strand to SEQ ID NO: 476713
uccacagggauuuaaagga

SEQ ID NO: 476715 - RNA, 19 nt, Artificial Sequence
  Description of Artificial Sequence: Synthetic oligonucleotide
  Sense strand starting at position 1427 of SEQ ID NO: 317257
ccuuuaaaucccuguggac

SEQ ID NO: 476716 - RNA, 19 nt, Artificial Sequence
  Description of Artificial Sequence: Synthetic oligonucleotide
  Antisense Strand to SEQ ID NO: 476715
guccacagggauuuaaagg

SEQ ID NO: 476717 - RNA, 19 nt, Artificial Sequence
  Description of Artificial Sequence: Synthetic oligonucleotide
  Sense strand starting at position 1487 of SEQ ID NO: 317257
uaguguuugcucuuccagu

SEQ ID NO: 476718 - RNA, 19 nt, Artificial Sequence
  Description of Artificial Sequence: Synthetic oligonucleotide
  Antisense Strand to SEQ ID NO: 476717
acuggaagagcaaacacua

SEQ ID NO: 476719 - RNA, 19 nt, Artificial Sequence
  Description of Artificial Sequence: Synthetic oligonucleotide
  Sense strand starting at position 1713 of SEQ ID NO: 317257
augugcauugauuauaagu

SEQ ID NO: 476720 - RNA, 19 nt, Artificial Sequence
  Description of Artificial Sequence: Synthetic oligonucleotide
  Antisense Strand to SEQ ID NO: 476719
acuuauaaucaaugcacau

SEQ ID NO: 476721 - RNA, 19 nt, Artificial Sequence
  Description of Artificial Sequence: Synthetic oligonucleotide
  Sense strand starting at position 1724 of SEQ ID NO: 317257
uuauaagucccacgaagau

SEQ ID NO: 476722 - RNA, 19 nt, Artificial Sequence
  Description of Artificial Sequence: Synthetic oligonucleotide
  Antisense Strand to SEQ ID NO: 476721
aucuucgugggacuuauaa

SEQ ID NO: 476723 - RNA, 19 nt, Artificial Sequence
  Description of Artificial Sequence: Synthetic oligonucleotide
  Sense strand starting at position 1764 of SEQ ID NO: 317257
guguacugcuauuuccaau

SEQ ID NO: 476724 - RNA, 19 nt, Artificial Sequence
  Description of Artificial Sequence: Synthetic oligonucleotide
  Antisense Strand to SEQ ID NO: 476723
auuggaaauagcaguacac

SEQ ID NO: 476725 - RNA, 19 nt, Artificial Sequence
  Description of Artificial Sequence: Synthetic oligonucleotide
  Sense strand starting at position 1792 of SEQ ID NO: 317257
uggaauggugcuggguaua

SEQ ID NO: 476726 - RNA, 19 nt, Artificial Sequence
  Description of Artificial Sequence: Synthetic oligonucleotide
  Antisense Strand to SEQ ID NO: 476725
uauacccagcaccauucca

SEQ ID NO: 476727 - RNA, 19 nt, Artificial Sequence
  Description of Artificial Sequence: Synthetic oligonucleotide
  Sense strand starting at position 1852 of SEQ ID NO: 317257
cuaacaucccaugggugaa

SEQ ID NO: 476728 - RNA, 19 nt, Artificial Sequence
  Description of Artificial Sequence: Synthetic oligonucleotide
  Antisense Strand to SEQ ID NO: 476727
uucacccaugggauguuag

SEQ ID NO: 476729 - RNA, 19 nt, Artificial Sequence
  Description of Artificial Sequence: Synthetic oligonucleotide
  Sense strand starting at position 1875 of SEQ ID NO: 317257
cacauuguucuaugugaug

SEQ ID NO: 476730 - RNA, 19 nt, Artificial Sequence
  Description of Artificial Sequence: Synthetic oligonucleotide
  Antisense Strand to SEQ ID NO: 476729
caucacauagaacaaugug

SEQ ID NO: 476731 - RNA, 19 nt, Artificial Sequence
  Description of Artificial Sequence: Synthetic oligonucleotide
  Sense strand starting at position 1889 of SEQ ID NO: 317257
ugaugcccucuuuaguaaa

SEQ ID NO: 476732 - RNA, 19 nt, Artificial Sequence
  Description of Artificial Sequence: Synthetic oligonucleotide
  Antisense Strand to SEQ ID NO: 476731
uuuacuaaagagggcauca

SEQ ID NO: 476733 - RNA, 19 nt, Artificial Sequence
  Description of Artificial Sequence: Synthetic oligonucleotide
  Sense strand starting at position 2080 of SEQ ID NO: 317257
agaacuagcuucuccuaga

SEQ ID NO: 476734 - RNA, 19 nt, Artificial Sequence
  Description of Artificial Sequence: Synthetic oligonucleotide
  Antisense Strand to SEQ ID NO: 476733
ucuaggagaagcuaguucu

SEQ ID NO: 476735 - RNA, 19 nt, Artificial Sequence
  Description of Artificial Sequence: Synthetic oligonucleotide
  Sense strand starting at position 2085 of SEQ ID NO: 317257
uagcuucuccuagauggau

SEQ ID NO: 476736 - RNA, 19 nt, Artificial Sequence
  Description of Artificial Sequence: Synthetic oligonucleotide
  Antisense Strand to SEQ ID NO: 476735
auccaucuaggagaagcua

SEQ ID NO: 476737 - RNA, 19 nt, Artificial Sequence
  Description of Artificial Sequence: Synthetic oligonucleotide
  Sense strand starting at position 2310 of SEQ ID NO: 317257
ugucucuagcaaggagaua

SEQ ID NO: 476738 - RNA, 19 nt, Artificial Sequence
  Description of Artificial Sequence: Synthetic oligonucleotide
  Antisense Strand to SEQ ID NO: 476737
uaucuccuugcuagagaca

SEQ ID NO: 476739 - RNA, 19 nt, Artificial Sequence
  Description of Artificial Sequence: Synthetic oligonucleotide
  Sense strand starting at position 2454 of SEQ ID NO: 317257
aagucaaguuuccugggaa

SEQ ID NO: 476740 - RNA, 19 nt, Artificial Sequence
  Description of Artificial Sequence: Synthetic oligonucleotide
  Antisense Strand to SEQ ID NO: 476739
uucccaggaaacuugacuu

SEQ ID NO: 476741 - RNA, 19 nt, Artificial Sequence
  Description of Artificial Sequence: Synthetic oligonucleotide
  Sense strand starting at position 2547 of SEQ ID NO: 317257
gguaguaggauugguuaga

SEQ ID NO: 476742 - RNA, 19 nt, Artificial Sequence
  Description of Artificial Sequence: Synthetic oligonucleotide
  Antisense Strand to SEQ ID NO: 476741
ucuaaccaauccuacuacc

SEQ ID NO: 476743 - RNA, 19 nt, Artificial Sequence
  Description of Artificial Sequence: Synthetic oligonucleotide
  Sense strand starting at position 2553 of SEQ ID NO: 317257
aggauugguuagagggaga

SEQ ID NO: 476744 - RNA, 19 nt, Artificial Sequence
  Description of Artificial Sequence: Synthetic oligonucleotide
  Antisense Strand to SEQ ID NO: 476743
ucucccucuaaccaauccu

SEQ ID NO: 476745 - RNA, 19 nt, Artificial Sequence
  Description of Artificial Sequence: Synthetic oligonucleotide
  Sense strand starting at position 2642 of SEQ ID NO: 317257
cucagagacuuucuguacu

SEQ ID NO: 476746 - RNA, 19 nt, Artificial Sequence
  Description of Artificial Sequence: Synthetic oligonucleotide
  Antisense Strand to SEQ ID NO: 476745
aguacagaaagucucugag

SEQ ID NO: 476747 - RNA, 19 nt, Artificial Sequence
  Description of Artificial Sequence: Synthetic oligonucleotide
  Sense strand starting at position 2644 of SEQ ID NO: 317257
cagagacuuucuguacuga

SEQ ID NO: 476748 - RNA, 19 nt, Artificial Sequence
  Description of Artificial Sequence: Synthetic oligonucleotide
  Antisense Strand to SEQ ID NO: 476747
ucaguacagaaagucucug

SEQ ID NO: 476749 - RNA, 19 nt, Artificial Sequence
  Description of Artificial Sequence: Synthetic oligonucleotide
  Sense strand starting at position 2653 of SEQ ID NO: 317257
ucuguacugagcuaagaag

SEQ ID NO: 476750 - RNA, 19 nt, Artificial Sequence
  Description of Artificial Sequence: Synthetic oligonucleotide
  Antisense Strand to SEQ ID NO: 476749
cuucuuagcucaguacaga

SEQ ID NO: 476751 - RNA, 19 nt, Artificial Sequence
  Description of Artificial Sequence: Synthetic oligonucleotide
  Sense strand starting at position 2665 of SEQ ID NO: 317257
uaagaaggaugcguucuua

SEQ ID NO: 476752 - RNA, 19 nt, Artificial Sequence
  Description of Artificial Sequence: Synthetic oligonucleotide
  Antisense Strand to SEQ ID NO: 476751
uaagaacgcauccuucuua

SEQ ID NO: 476753 - RNA, 19 nt, Artificial Sequence
  Description of Artificial Sequence: Synthetic oligonucleotide
  Sense strand starting at position 2751 of SEQ ID NO: 317257
uuggcaguucuuggaauaa

SEQ ID NO: 476754 - RNA, 19 nt, Artificial Sequence
  Description of Artificial Sequence: Synthetic oligonucleotide
  Antisense Strand to SEQ ID NO: 476753
uuauuccaagaacugccaa

SEQ ID NO: 476755 - RNA, 19 nt, Artificial Sequence
  Description of Artificial Sequence: Synthetic oligonucleotide
  Sense strand starting at position 2762 of SEQ ID NO: 317257
uggaauaagacuuagcugu

SEQ ID NO: 476756 - RNA, 19 nt, Artificial Sequence
  Description of Artificial Sequence: Synthetic oligonucleotide
  Antisense Strand to SEQ ID NO: 476755
acagcuaagucuuauucca

SEQ ID NO: 476757 - RNA, 19 nt, Artificial Sequence
  Description of Artificial Sequence: Synthetic oligonucleotide
  Sense strand starting at position 2764 of SEQ ID NO: 317257
gaauaagacuuagcuguga

SEQ ID NO: 476758 - RNA, 19 nt, Artificial Sequence
  Description of Artificial Sequence: Synthetic oligonucleotide
  Antisense Strand to SEQ ID NO: 476757
ucacagcuaagucuuauuc

SEQ ID NO: 476759 - RNA, 19 nt, Artificial Sequence
  Description of Artificial Sequence: Synthetic oligonucleotide
  Sense strand starting at position 2768 of SEQ ID NO: 317257
aagacuuagcugugaacug

SEQ ID NO: 476760 - RNA, 19 nt, Artificial Sequence
  Description of Artificial Sequence: Synthetic oligonucleotide
  Antisense Strand to SEQ ID NO: 476759
caguucacagcuaagucuu

SEQ ID NO: 476761 - RNA, 19 nt, Artificial Sequence
  Description of Artificial Sequence: Synthetic oligonucleotide
  Sense strand starting at position 3571 of SEQ ID NO: 317257
ggcuacaugagcuaugacu

SEQ ID NO: 476762 - RNA, 19 nt, Artificial Sequence
  Description of Artificial Sequence: Synthetic oligonucleotide
  Antisense Strand to SEQ ID NO: 476761
agucauagcucauguagcc

SEQ ID NO: 476763 - RNA, 19 nt, Artificial Sequence
  Description of Artificial Sequence: Synthetic oligonucleotide
  Sense strand starting at position 3615 of SEQ ID NO: 317257
acggaaagaaccugucuca

SEQ ID NO: 476764 - RNA, 19 nt, Artificial Sequence
  Description of Artificial Sequence: Synthetic oligonucleotide
  Antisense Strand to SEQ ID NO: 476763
ugagacagguucuuuccgu

SEQ ID NO: 476765 - RNA, 19 nt, Artificial Sequence
  Description of Artificial Sequence: Synthetic oligonucleotide
  Sense strand starting at position 3691 of SEQ ID NO: 317257
gcaacugaggcucacuuaa

SEQ ID NO: 476766 - RNA, 19 nt, Artificial Sequence
  Description of Artificial Sequence: Synthetic oligonucleotide
  Antisense Strand to SEQ ID NO: 476765
uuaagugagccucaguugc

SEQ ID NO: 476767 - RNA, 19 nt, Artificial Sequence
  Description of Artificial Sequence: Synthetic oligonucleotide
  Sense strand starting at position 59 of SEQ ID NO: 317258
acaucucagccuuggagau

SEQ ID NO: 476768 - RNA, 19 nt, Artificial Sequence
  Description of Artificial Sequence: Synthetic oligonucleotide
  Antisense Strand to SEQ ID NO: 476767
aucuccaaggcugagaugu

SEQ ID NO: 476769 - RNA, 19 nt, Artificial Sequence
  Description of Artificial Sequence: Synthetic oligonucleotide
  Sense strand starting at position 117 of SEQ ID NO: 317258
gaguguguuccgguccagu

SEQ ID NO: 476770 - RNA, 19 nt, Artificial Sequence
  Description of Artificial Sequence: Synthetic oligonucleotide
  Antisense Strand to SEQ ID NO: 476769
acuggaccggaacacacuc

SEQ ID NO: 476771 - RNA, 19 nt, Artificial Sequence
  Description of Artificial Sequence: Synthetic oligonucleotide
  Sense strand starting at position 184 of SEQ ID NO: 317258
ggcuuucgggaucaggaau

SEQ ID NO: 476772 - RNA, 19 nt, Artificial Sequence
  Description of Artificial Sequence: Synthetic oligonucleotide
  Antisense Strand to SEQ ID NO: 476771
auuccugaucccgaaagcc

SEQ ID NO: 476773 - RNA, 19 nt, Artificial Sequence
  Description of Artificial Sequence: Synthetic oligonucleotide
  Sense strand starting at position 363 of SEQ ID NO: 317258
aggugcaucucuuuccaua

SEQ ID NO: 476774 - RNA, 19 nt, Artificial Sequence
  Description of Artificial Sequence: Synthetic oligonucleotide
  Antisense Strand to SEQ ID NO: 476773
uauggaaagagaugcaccu

SEQ ID NO: 476775 - RNA, 19 nt, Artificial Sequence
  Description of Artificial Sequence: Synthetic oligonucleotide
  Sense strand starting at position 365 of SEQ ID NO: 317258
gugcaucucuuuccauaca

SEQ ID NO: 476776 - RNA, 19 nt, Artificial Sequence
  Description of Artificial Sequence: Synthetic oligonucleotide
  Antisense Strand to SEQ ID NO: 476775
uguauggaaagagaugcac

SEQ ID NO: 476777 - RNA, 19 nt, Artificial Sequence
  Description of Artificial Sequence: Synthetic oligonucleotide
  Sense strand starting at position 535 of SEQ ID NO: 317258
ccaucauguccuugagacu

SEQ ID NO: 476778 - RNA, 19 nt, Artificial Sequence
  Description of Artificial Sequence: Synthetic oligonucleotide
  Antisense Strand to SEQ ID NO: 476777
agucucaaggacaugaugg

SEQ ID NO: 476779 - RNA, 19 nt, Artificial Sequence
  Description of Artificial Sequence: Synthetic oligonucleotide
  Sense strand starting at position 586 of SEQ ID NO: 317258
agugcuugcacuggaucau

SEQ ID NO: 476780 - RNA, 19 nt, Artificial Sequence
  Description of Artificial Sequence: Synthetic oligonucleotide
  Antisense Strand to SEQ ID NO: 476779
augauccagugcaagcacu

SEQ ID NO: 476781 - RNA, 19 nt, Artificial Sequence
  Description of Artificial Sequence: Synthetic oligonucleotide
  Sense strand starting at position 587 of SEQ ID NO: 317258
gugcuugcacuggaucaua

SEQ ID NO: 476782 - RNA, 19 nt, Artificial Sequence
  Description of Artificial Sequence: Synthetic oligonucleotide
  Antisense Strand to SEQ ID NO: 476781
uaugauccagugcaagcac

SEQ ID NO: 476783 - RNA, 19 nt, Artificial Sequence
  Description of Artificial Sequence: Synthetic oligonucleotide
  Sense strand starting at position 663 of SEQ ID NO: 317258
gugcucuugcucuccaagu

SEQ ID NO: 476784 - RNA, 19 nt, Artificial Sequence
  Description of Artificial Sequence: Synthetic oligonucleotide
  Antisense Strand to SEQ ID NO: 476783
acuuggagagcaagagcac

SEQ ID NO: 476785 - RNA, 19 nt, Artificial Sequence
  Description of Artificial Sequence: Synthetic oligonucleotide
  Sense strand starting at position 878 of SEQ ID NO: 317258
guagguguccaccaagaug

SEQ ID NO: 476786 - RNA, 19 nt, Artificial Sequence
  Description of Artificial Sequence: Synthetic oligonucleotide
  Antisense Strand to SEQ ID NO: 476785
caucuugguggacaccuac

SEQ ID NO: 476787 - RNA, 19 nt, Artificial Sequence
  Description of Artificial Sequence: Synthetic oligonucleotide
  Sense strand starting at position 896 of SEQ ID NO: 317258
gaugcacuccuucgugaua

SEQ ID NO: 476788 - RNA, 19 nt, Artificial Sequence
  Description of Artificial Sequence: Synthetic oligonucleotide
  Antisense Strand to SEQ ID NO: 476787
uaucacgaaggagugcauc

SEQ ID NO: 476789 - RNA, 19 nt, Artificial Sequence
  Description of Artificial Sequence: Synthetic oligonucleotide
  Sense strand starting at position 899 of SEQ ID NO: 317258
gcacuccuucgugauagag

SEQ ID NO: 476790 - RNA, 19 nt, Artificial Sequence
  Description of Artificial Sequence: Synthetic oligonucleotide
  Antisense Strand to SEQ ID NO: 476789
cucuaucacgaaggagugc

SEQ ID NO: 476791 - RNA, 19 nt, Artificial Sequence
  Description of Artificial Sequence: Synthetic oligonucleotide
  Sense strand starting at position 909 of SEQ ID NO: 317258
gugauagaggcaggcauua

SEQ ID NO: 476792 - RNA, 19 nt, Artificial Sequence
  Description of Artificial Sequence: Synthetic oligonucleotide
  Antisense Strand to SEQ ID NO: 476791
uaaugccugccucuaucac

SEQ ID NO: 476793 - RNA, 19 nt, Artificial Sequence
  Description of Artificial Sequence: Synthetic oligonucleotide
  Sense strand starting at position 952 of SEQ ID NO: 317258
gggugaucaugagcucaga

SEQ ID NO: 476794 - RNA, 19 nt, Artificial Sequence
  Description of Artificial Sequence: Synthetic oligonucleotide
  Antisense Strand to SEQ ID NO: 476793
ucugagcucaugaucaccc

SEQ ID NO: 476795 - RNA, 19 nt, Artificial Sequence
  Description of Artificial Sequence: Synthetic oligonucleotide
  Sense strand starting at position 2151 of SEQ ID NO: 317258
cuagcugauacgugaauga

SEQ ID NO: 476796 - RNA, 19 nt, Artificial Sequence
  Description of Artificial Sequence: Synthetic oligonucleotide
  Antisense Strand to SEQ ID NO: 476795
ucauucacguaucagcuag

SEQ ID NO: 476797 - RNA, 19 nt, Artificial Sequence
  Description of Artificial Sequence: Synthetic oligonucleotide
  Sense strand starting at position 2164 of SEQ ID NO: 317258
gaaugaagcucggcuccua

SEQ ID NO: 476798 - RNA, 19 nt, Artificial Sequence
  Description of Artificial Sequence: Synthetic oligonucleotide
  Antisense Strand to SEQ ID NO: 476797
uaggagccgagcuucauuc

SEQ ID NO: 476799 - RNA, 19 nt, Artificial Sequence
  Description of Artificial Sequence: Synthetic oligonucleotide
  Sense strand starting at position 2387 of SEQ ID NO: 317258
aagaucgaguguucccaau

SEQ ID NO: 476800 - RNA, 19 nt, Artificial Sequence
  Description of Artificial Sequence: Synthetic oligonucleotide
  Antisense Strand to SEQ ID NO: 476799
auugggaacacucgaucuu

SEQ ID NO: 476801 - RNA, 19 nt, Artificial Sequence
  Description of Artificial Sequence: Synthetic oligonucleotide
  Sense strand starting at position 2389 of SEQ ID NO: 317258
gaucgaguguucccaauga

SEQ ID NO: 476802 - RNA, 19 nt, Artificial Sequence
  Description of Artificial Sequence: Synthetic oligonucleotide
  Antisense Strand to SEQ ID NO: 476801
ucauugggaacacucgauc

SEQ ID NO: 476803 - RNA, 19 nt, Artificial Sequence
  Description of Artificial Sequence: Synthetic oligonucleotide
  Sense strand starting at position 2393 of SEQ ID NO: 317258
gaguguucccaaugacugg

SEQ ID NO: 476804 - RNA, 19 nt, Artificial Sequence
  Description of Artificial Sequence: Synthetic oligonucleotide
  Antisense Strand to SEQ ID NO: 476803
ccagucauugggaacacuc

SEQ ID NO: 476805 - RNA, 19 nt, Artificial Sequence
  Description of Artificial Sequence: Synthetic oligonucleotide
  Sense strand starting at position 2495 of SEQ ID NO: 317258
gggaguuagucucuuugag

SEQ ID NO: 476806 - RNA, 19 nt, Artificial Sequence
  Description of Artificial Sequence: Synthetic oligonucleotide
  Antisense Strand to SEQ ID NO: 476805
cucaaagagacuaacuccc

SEQ ID NO: 476807 - RNA, 19 nt, Artificial Sequence
  Description of Artificial Sequence: Synthetic oligonucleotide
  Sense strand starting at position 2497 of SEQ ID NO: 317258
gaguuagucucuuugagcu

SEQ ID NO: 476808 - RNA, 19 nt, Artificial Sequence
  Description of Artificial Sequence: Synthetic oligonucleotide
  Antisense Strand to SEQ ID NO: 476807
agcucaaagagacuaacuc

SEQ ID NO: 476809 - RNA, 19 nt, Artificial Sequence
  Description of Artificial Sequence: Synthetic oligonucleotide
  Sense strand starting at position 2519 of SEQ ID NO: 317258
ggucuuaaacugugaagug

SEQ ID NO: 476810 - RNA, 19 nt, Artificial Sequence
  Description of Artificial Sequence: Synthetic oligonucleotide
  Antisense Strand to SEQ ID NO: 476809
cacuucacaguuuaagacc

SEQ ID NO: 476811 - RNA, 19 nt, Artificial Sequence
  Description of Artificial Sequence: Synthetic oligonucleotide
  Sense strand starting at position 2655 of SEQ ID NO: 317258
guaguaggcguagauuaaa

SEQ ID NO: 476812 - RNA, 19 nt, Artificial Sequence
  Description of Artificial Sequence: Synthetic oligonucleotide
  Antisense Strand to SEQ ID NO: 476811
uuuaaucuacgccuacuac

SEQ ID NO: 476813 - RNA, 19 nt, Artificial Sequence
  Description of Artificial Sequence: Synthetic oligonucleotide
  Sense strand starting at position 2667 of SEQ ID NO: 317258
gauuaaauguuuguugaag

SEQ ID NO: 476814 - RNA, 19 nt, Artificial Sequence
  Description of Artificial Sequence: Synthetic oligonucleotide
  Antisense Strand to SEQ ID NO: 476813
cuucaacaaacauuuaauc

SEQ ID NO: 476815 - RNA, 19 nt, Artificial Sequence
  Description of Artificial Sequence: Synthetic oligonucleotide
  Sense strand starting at position 2705 of SEQ ID NO: 317258
guuuguuucguuucugugu

SEQ ID NO: 476816 - RNA, 19 nt, Artificial Sequence
  Description of Artificial Sequence: Synthetic oligonucleotide
  Antisense Strand to SEQ ID NO: 476815
acacagaaacgaaacaaac

SEQ ID NO: 476817 - RNA, 19 nt, Artificial Sequence
  Description of Artificial Sequence: Synthetic oligonucleotide
  Sense strand starting at position 2721 of SEQ ID NO: 317258
ugucaucuguuaucuuauc

SEQ ID NO: 476818 - RNA, 19 nt, Artificial Sequence
  Description of Artificial Sequence: Synthetic oligonucleotide
  Antisense Strand to SEQ ID NO: 476817
gauaagauaacagaugaca

SEQ ID NO: 476819 - RNA, 19 nt, Artificial Sequence
  Description of Artificial Sequence: Synthetic oligonucleotide
  Sense strand starting at position 2981 of SEQ ID NO: 317258
ggaacacacuucccaguua

SEQ ID NO: 476820 - RNA, 19 nt, Artificial Sequence
  Description of Artificial Sequence: Synthetic oligonucleotide
  Antisense Strand to SEQ ID NO: 476819
uaacugggaaguguguucc

SEQ ID NO: 476821 - RNA, 19 nt, Artificial Sequence
  Description of Artificial Sequence: Synthetic oligonucleotide
  Sense strand starting at position 3042 of SEQ ID NO: 317258
ugaggaaugcaauagugca

SEQ ID NO: 476822 - RNA, 19 nt, Artificial Sequence
  Description of Artificial Sequence: Synthetic oligonucleotide
  Antisense Strand to SEQ ID NO: 476821
ugcacuauugcauuccuca

SEQ ID NO: 476823 - RNA, 19 nt, Artificial Sequence
  Description of Artificial Sequence: Synthetic oligonucleotide
  Sense strand starting at position 3307 of SEQ ID NO: 317258
caagcacguguugauacau

SEQ ID NO: 476824 - RNA, 19 nt, Artificial Sequence
  Description of Artificial Sequence: Synthetic oligonucleotide
  Antisense Strand to SEQ ID NO: 476823
auguaucaacacgugcuug

SEQ ID NO: 476825 - RNA, 19 nt, Artificial Sequence
  Description of Artificial Sequence: Synthetic oligonucleotide
  Sense strand starting at position 3325 of SEQ ID NO: 317258
uuucuaugggcuuaugaug

SEQ ID NO: 476826 - RNA, 19 nt, Artificial Sequence
  Description of Artificial Sequence: Synthetic oligonucleotide
  Antisense Strand to SEQ ID NO: 476825
caucauaagcccauagaaa

SEQ ID NO: 476827 - RNA, 19 nt, Artificial Sequence
  Description of Artificial Sequence: Synthetic oligonucleotide
  Sense strand starting at position 3336 of SEQ ID NO: 317258
uuaugaugggccugccauu

SEQ ID NO: 476828 - RNA, 19 nt, Artificial Sequence
  Description of Artificial Sequence: Synthetic oligonucleotide
  Antisense Strand to SEQ ID NO: 476827
aauggcaggcccaucauaa

SEQ ID NO: 476829 - RNA, 19 nt, Artificial Sequence
  Description of Artificial Sequence: Synthetic oligonucleotide
  Sense strand starting at position 3477 of SEQ ID NO: 317258
uccugcgagucucuugaga

SEQ ID NO: 476830 - RNA, 19 nt, Artificial Sequence
  Description of Artificial Sequence: Synthetic oligonucleotide
  Antisense Strand to SEQ ID NO: 476829
ucucaagagacucgcagga

SEQ ID NO: 476831 - RNA, 19 nt, Artificial Sequence
  Description of Artificial Sequence: Synthetic oligonucleotide
  Sense strand starting at position 3552 of SEQ ID NO: 317258
gccagaauguccuccucau

SEQ ID NO: 476832 - RNA, 19 nt, Artificial Sequence
  Description of Artificial Sequence: Synthetic oligonucleotide
  Antisense Strand to SEQ ID NO: 476831
augaggaggacauucuggc

SEQ ID NO: 476833 - RNA, 19 nt, Artificial Sequence
  Description of Artificial Sequence: Synthetic oligonucleotide
  Sense strand starting at position 3591 of SEQ ID NO: 317258
gcacaacaucccgauaaug

SEQ ID NO: 476834 - RNA, 19 nt, Artificial Sequence
  Description of Artificial Sequence: Synthetic oligonucleotide
  Antisense Strand to SEQ ID NO: 476833
cauuaucgggauguugugc

SEQ ID NO: 476835 - RNA, 19 nt, Artificial Sequence
  Description of Artificial Sequence: Synthetic oligonucleotide
  Sense strand starting at position 3623 of SEQ ID NO: 317258
cucggcauugucuuuguau

SEQ ID NO: 476836 - RNA, 19 nt, Artificial Sequence
  Description of Artificial Sequence: Synthetic oligonucleotide
  Antisense Strand to SEQ ID NO: 476835
auacaaagacaaugccgag

SEQ ID NO: 476837 - RNA, 19 nt, Artificial Sequence
  Description of Artificial Sequence: Synthetic oligonucleotide
  Sense strand starting at position 3626 of SEQ ID NO: 317258
ggcauugucuuuguaugau

SEQ ID NO: 476838 - RNA, 19 nt, Artificial Sequence
  Description of Artificial Sequence: Synthetic oligonucleotide
  Antisense Strand to SEQ ID NO: 476837
aucauacaaagacaaugcc

SEQ ID NO: 476839 - RNA, 19 nt, Artificial Sequence
  Description of Artificial Sequence: Synthetic oligonucleotide
  Sense strand starting at position 3629 of SEQ ID NO: 317258
auugucuuuguaugauuga

SEQ ID NO: 476840 - RNA, 19 nt, Artificial Sequence
  Description of Artificial Sequence: Synthetic oligonucleotide
  Antisense Strand to SEQ ID NO: 476839
ucaaucauacaaagacaau

SEQ ID NO: 476841 - RNA, 19 nt, Artificial Sequence
  Description of Artificial Sequence: Synthetic oligonucleotide
  Sense strand starting at position 3683 of SEQ ID NO: 317258
gucguuucuggguagaauu

SEQ ID NO: 476842 - RNA, 19 nt, Artificial Sequence
  Description of Artificial Sequence: Synthetic oligonucleotide
  Antisense Strand to SEQ ID NO: 476841
aauucuacccagaaacgac

SEQ ID NO: 476843 - RNA, 19 nt, Artificial Sequence
  Description of Artificial Sequence: Synthetic oligonucleotide
  Sense strand starting at position 3694 of SEQ ID NO: 317258
guagaauuccacugggcag

SEQ ID NO: 476844 - RNA, 19 nt, Artificial Sequence
  Description of Artificial Sequence: Synthetic oligonucleotide
  Antisense Strand to SEQ ID NO: 476843
cugcccaguggaauucuac

SEQ ID NO: 476845 - RNA, 19 nt, Artificial Sequence
  Description of Artificial Sequence: Synthetic oligonucleotide
  Sense strand starting at position 3737 of SEQ ID NO: 317258
guguguauuaauuagguca

SEQ ID NO: 476846 - RNA, 19 nt, Artificial Sequence
  Description of Artificial Sequence: Synthetic oligonucleotide
  Antisense Strand to SEQ ID NO: 476845
ugaccuaauuaauacacac

SEQ ID NO: 476847 - RNA, 19 nt, Artificial Sequence
  Description of Artificial Sequence: Synthetic oligonucleotide
  Sense strand starting at position 196 of SEQ ID NO: 317259
aguagaacacaauguuaug

SEQ ID NO: 476848 - RNA, 19 nt, Artificial Sequence
  Description of Artificial Sequence: Synthetic oligonucleotide
  Antisense Strand to SEQ ID NO: 476847
cauaacauuguguucuacu

SEQ ID NO: 476849 - RNA, 19 nt, Artificial Sequence
  Description of Artificial Sequence: Synthetic oligonucleotide
  Sense strand starting at position 246 of SEQ ID NO: 317259
gucagugcgccucuguaua

SEQ ID NO: 476850 - RNA, 19 nt, Artificial Sequence
  Description of Artificial Sequence: Synthetic oligonucleotide
  Antisense Strand to SEQ ID NO: 476849
uauacagaggcgcacugac

SEQ ID NO: 476851 - RNA, 19 nt, Artificial Sequence
  Description of Artificial Sequence: Synthetic oligonucleotide
  Sense strand starting at position 251 of SEQ ID NO: 317259
ugcgccucuguauaaauuu

SEQ ID NO: 476852 - RNA, 19 nt, Artificial Sequence
  Description of Artificial Sequence: Synthetic oligonucleotide
  Antisense Strand to SEQ ID NO: 476851
aaauuuauacagaggcgca

SEQ ID NO: 476853 - RNA, 19 nt, Artificial Sequence
  Description of Artificial Sequence: Synthetic oligonucleotide
  Sense strand starting at position 337 of SEQ ID NO: 317259
guauauuggcaccacuaca

SEQ ID NO: 476854 - RNA, 19 nt, Artificial Sequence
  Description of Artificial Sequence: Synthetic oligonucleotide
  Antisense Strand to SEQ ID NO: 476853
uguaguggugccaauauac

SEQ ID NO: 476855 - RNA, 19 nt, Artificial Sequence
  Description of Artificial Sequence: Synthetic oligonucleotide
  Sense strand starting at position 547 of SEQ ID NO: 317259
cagaucagguguccuacau

SEQ ID NO: 476856 - RNA, 19 nt, Artificial Sequence
  Description of Artificial Sequence: Synthetic oligonucleotide
  Antisense Strand to SEQ ID NO: 476855
auguaggacaccugaucug

SEQ ID NO: 476857 - RNA, 19 nt, Artificial Sequence
  Description of Artificial Sequence: Synthetic oligonucleotide
  Sense strand starting at position 644 of SEQ ID NO: 317259
ugaagucaccgcguuuguu

SEQ ID NO: 476858 - RNA, 19 nt, Artificial Sequence
  Description of Artificial Sequence: Synthetic oligonucleotide
  Antisense Strand to SEQ ID NO: 476857
aacaaacgcggugacuuca

SEQ ID NO: 476859 - RNA, 19 nt, Artificial Sequence
  Description of Artificial Sequence: Synthetic oligonucleotide
  Sense strand starting at position 695 of SEQ ID NO: 317259
aaggcugucgaacagauua

SEQ ID NO: 476860 - RNA, 19 nt, Artificial Sequence
  Description of Artificial Sequence: Synthetic oligonucleotide
  Antisense Strand to SEQ ID NO: 476859
uaaucuguucgacagccuu

SEQ ID NO: 476861 - RNA, 19 nt, Artificial Sequence
  Description of Artificial Sequence: Synthetic oligonucleotide
  Sense strand starting at position 697 of SEQ ID NO: 317259
ggcugucgaacagauuagu

SEQ ID NO: 476862 - RNA, 19 nt, Artificial Sequence
  Description of Artificial Sequence: Synthetic oligonucleotide
  Antisense Strand to SEQ ID NO: 476861
acuaaucuguucgacagcc

SEQ ID NO: 476863 - RNA, 19 nt, Artificial Sequence
  Description of Artificial Sequence: Synthetic oligonucleotide
  Sense strand starting at position 774 of SEQ ID NO: 317259
guaaaucucuuagugauau

SEQ ID NO: 476864 - RNA, 19 nt, Artificial Sequence
  Description of Artificial Sequence: Synthetic oligonucleotide
  Antisense Strand to SEQ ID NO: 476863
auaucacuaagagauuuac

SEQ ID NO: 476865 - RNA, 19 nt, Artificial Sequence
  Description of Artificial Sequence: Synthetic oligonucleotide
  Sense strand starting at position 857 of SEQ ID NO: 317259
ucuugacuuugguuuaacu

SEQ ID NO: 476866 - RNA, 19 nt, Artificial Sequence
  Description of Artificial Sequence: Synthetic oligonucleotide
  Antisense Strand to SEQ ID NO: 476865
aguuaaaccaaagucaaga

SEQ ID NO: 476867 - RNA, 19 nt, Artificial Sequence
  Description of Artificial Sequence: Synthetic oligonucleotide
  Sense strand starting at position 886 of SEQ ID NO: 317259
agcugucugcucuuacagu

SEQ ID NO: 476868 - RNA, 19 nt, Artificial Sequence
  Description of Artificial Sequence: Synthetic oligonucleotide
  Antisense Strand to SEQ ID NO: 476867
acuguaagagcagacagcu

SEQ ID NO: 476869 - RNA, 19 nt, Artificial Sequence
  Description of Artificial Sequence: Synthetic oligonucleotide
  Sense strand starting at position 903 of SEQ ID NO: 317259
guaucacguaaugagcaaa

SEQ ID NO: 476870 - RNA, 19 nt, Artificial Sequence
  Description of Artificial Sequence: Synthetic oligonucleotide
  Antisense Strand to SEQ ID NO: 476869
uuugcucauuacgugauac

SEQ ID NO: 476871 - RNA, 19 nt, Artificial Sequence
  Description of Artificial Sequence: Synthetic oligonucleotide
  Sense strand starting at position 949 of SEQ ID NO: 317259
gaguguuaacuuuagcaag

SEQ ID NO: 476872 - RNA, 19 nt, Artificial Sequence
  Description of Artificial Sequence: Synthetic oligonucleotide
  Antisense Strand to SEQ ID NO: 476871
cuugcuaaaguuaacacuc

SEQ ID NO: 476873 - RNA, 19 nt, Artificial Sequence
  Description of Artificial Sequence: Synthetic oligonucleotide
  Sense strand starting at position 1236 of SEQ ID NO: 317259
uggguuucauucccgagaa

SEQ ID NO: 476874 - RNA, 19 nt, Artificial Sequence
  Description of Artificial Sequence: Synthetic oligonucleotide
  Antisense Strand to SEQ ID NO: 476873
uucucgggaaugaaaccca

SEQ ID NO: 476875 - RNA, 19 nt, Artificial Sequence
  Description of Artificial Sequence: Synthetic oligonucleotide
  Sense strand starting at position 1260 of SEQ ID NO: 317259
cuuucuuccgcagaggaga

SEQ ID NO: 476876 - RNA, 19 nt, Artificial Sequence
  Description of Artificial Sequence: Synthetic oligonucleotide
  Antisense Strand to SEQ ID NO: 476875
ucuccucugcggaagaaag

SEQ ID NO: 476877 - RNA, 19 nt, Artificial Sequence
  Description of Artificial Sequence: Synthetic oligonucleotide
  Sense strand starting at position 1280 of SEQ ID NO: 317259
ggaucuaccuaauuagcaa

SEQ ID NO: 476878 - RNA, 19 nt, Artificial Sequence
  Description of Artificial Sequence: Synthetic oligonucleotide
  Antisense Strand to SEQ ID NO: 476877
uugcuaauuagguagaucc

SEQ ID NO: 476879 - RNA, 19 nt, Artificial Sequence
  Description of Artificial Sequence: Synthetic oligonucleotide
  Sense strand starting at position 1287 of SEQ ID NO: 317259
ccuaauuagcaauggaguu

SEQ ID NO: 476880 - RNA, 19 nt, Artificial Sequence
  Description of Artificial Sequence: Synthetic oligonucleotide
  Antisense Strand to SEQ ID NO: 476879
aacuccauugcuaauuagg

SEQ ID NO: 476881 - RNA, 19 nt, Artificial Sequence
  Description of Artificial Sequence: Synthetic oligonucleotide
  Sense strand starting at position 2293 of SEQ ID NO: 317259
uguggugaacuccaacuuu

SEQ ID NO: 476882 - RNA, 19 nt, Artificial Sequence
  Description of Artificial Sequence: Synthetic oligonucleotide
  Antisense Strand to SEQ ID NO: 476881
aaaguuggaguucaccaca

SEQ ID NO: 476883 - RNA, 19 nt, Artificial Sequence
  Description of Artificial Sequence: Synthetic oligonucleotide
  Sense strand starting at position 2637 of SEQ ID NO: 317259
cgccaaaugcccuagggaa

SEQ ID NO: 476884 - RNA, 19 nt, Artificial Sequence
  Description of Artificial Sequence: Synthetic oligonucleotide
  Antisense Strand to SEQ ID NO: 476883
uucccuagggcauuuggcg

SEQ ID NO: 476885 - RNA, 19 nt, Artificial Sequence
  Description of Artificial Sequence: Synthetic oligonucleotide
  Sense strand starting at position 2757 of SEQ ID NO: 317259
gguuuaacauagucgauaa

SEQ ID NO: 476886 - RNA, 19 nt, Artificial Sequence
  Description of Artificial Sequence: Synthetic oligonucleotide
  Antisense Strand to SEQ ID NO: 476885
uuaucgacuauguuaaacc

SEQ ID NO: 476887 - RNA, 19 nt, Artificial Sequence
  Description of Artificial Sequence: Synthetic oligonucleotide
  Sense strand starting at position 2810 of SEQ ID NO: 317259
aagguauauccagacagcu

SEQ ID NO: 476888 - RNA, 19 nt, Artificial Sequence
  Description of Artificial Sequence: Synthetic oligonucleotide
  Antisense Strand to SEQ ID NO: 476887
agcugucuggauauaccuu

SEQ ID NO: 476889 - RNA, 19 nt, Artificial Sequence
  Description of Artificial Sequence: Synthetic oligonucleotide
  Sense strand starting at position 2812 of SEQ ID NO: 317259
gguauauccagacagcugu

SEQ ID NO: 476890 - RNA, 19 nt, Artificial Sequence
  Description of Artificial Sequence: Synthetic oligonucleotide
  Antisense Strand to SEQ ID NO: 476889
acagcugucuggauauacc

SEQ ID NO: 476891 - RNA, 19 nt, Artificial Sequence
  Description of Artificial Sequence: Synthetic oligonucleotide
  Sense strand starting at position 2878 of SEQ ID NO: 317259
aagagagucuugcugaauu

SEQ ID NO: 476892 - RNA, 19 nt, Artificial Sequence
  Description of Artificial Sequence: Synthetic oligonucleotide
  Antisense Strand to SEQ ID NO: 476891
aauucagcaagacucucuu

SEQ ID NO: 476893 - RNA, 19 nt, Artificial Sequence
  Description of Artificial Sequence: Synthetic oligonucleotide
  Sense strand starting at position 2906 of SEQ ID NO: 317259
auaauauccugugauuuga

SEQ ID NO: 476894 - RNA, 19 nt, Artificial Sequence
  Description of Artificial Sequence: Synthetic oligonucleotide
  Antisense Strand to SEQ ID NO: 476893
ucaaaucacaggauauuau

SEQ ID NO: 476895 - RNA, 19 nt, Artificial Sequence
  Description of Artificial Sequence: Synthetic oligonucleotide
  Sense strand starting at position 3004 of SEQ ID NO: 317259
gucugagacccuuaauguu

SEQ ID NO: 476896 - RNA, 19 nt, Artificial Sequence
  Description of Artificial Sequence: Synthetic oligonucleotide
  Antisense Strand to SEQ ID NO: 476895
aacauuaagggucucagac

SEQ ID NO: 476897 - RNA, 19 nt, Artificial Sequence
  Description of Artificial Sequence: Synthetic oligonucleotide
  Sense strand starting at position 3017 of SEQ ID NO: 317259
aauguugagcccuagguaa

SEQ ID NO: 476898 - RNA, 19 nt, Artificial Sequence
  Description of Artificial Sequence: Synthetic oligonucleotide
  Antisense Strand to SEQ ID NO: 476897
uuaccuagggcucaacauu

SEQ ID NO: 476899 - RNA, 19 nt, Artificial Sequence
  Description of Artificial Sequence: Synthetic oligonucleotide
  Sense strand starting at position 3140 of SEQ ID NO: 317259
gccauacauguaugaugaa

SEQ ID NO: 476900 - RNA, 19 nt, Artificial Sequence
  Description of Artificial Sequence: Synthetic oligonucleotide
  Antisense Strand to SEQ ID NO: 476899
uucaucauacauguauggc

SEQ ID NO: 476901 - RNA, 19 nt, Artificial Sequence
  Description of Artificial Sequence: Synthetic oligonucleotide
  Sense strand starting at position 3178 of SEQ ID NO: 317259
gauuuaucuuuggcgagca

SEQ ID NO: 476902 - RNA, 19 nt, Artificial Sequence
  Description of Artificial Sequence: Synthetic oligonucleotide
  Antisense Strand to SEQ ID NO: 476901
ugcucgccaaagauaaauc

SEQ ID NO: 476903 - RNA, 19 nt, Artificial Sequence
  Description of Artificial Sequence: Synthetic oligonucleotide
  Sense strand starting at position 3278 of SEQ ID NO: 317259
gaaugugauuacucauagg

SEQ ID NO: 476904 - RNA, 19 nt, Artificial Sequence
  Description of Artificial Sequence: Synthetic oligonucleotide
  Antisense Strand to SEQ ID NO: 476903
ccuaugaguaaucacauuc

SEQ ID NO: 476905 - RNA, 19 nt, Artificial Sequence
  Description of Artificial Sequence: Synthetic oligonucleotide
  Sense strand starting at position 3440 of SEQ ID NO: 317259
guagguagcagcuaagaga

SEQ ID NO: 476906 - RNA, 19 nt, Artificial Sequence
  Description of Artificial Sequence: Synthetic oligonucleotide
  Antisense Strand to SEQ ID NO: 476905
ucucuuagcugcuaccuac

SEQ ID NO: 476907 - RNA, 19 nt, Artificial Sequence
  Description of Artificial Sequence: Synthetic oligonucleotide
  Sense strand starting at position 3453 of SEQ ID NO: 317259
aagagaaaguuugcuaugu

SEQ ID NO: 476908 - RNA, 19 nt, Artificial Sequence
  Description of Artificial Sequence: Synthetic oligonucleotide
  Antisense Strand to SEQ ID NO: 476907
acauagcaaacuuucucuu

SEQ ID NO: 476909 - RNA, 19 nt, Artificial Sequence
  Description of Artificial Sequence: Synthetic oligonucleotide
  Sense strand starting at position 3454 of SEQ ID NO: 317259
agagaaaguuugcuaugua

SEQ ID NO: 476910 - RNA, 19 nt, Artificial Sequence
  Description of Artificial Sequence: Synthetic oligonucleotide
  Antisense Strand to SEQ ID NO: 476909
uacauagcaaacuuucucu

SEQ ID NO: 476911 - RNA, 19 nt, Artificial Sequence
  Description of Artificial Sequence: Synthetic oligonucleotide
  Sense strand starting at position 3480 of SEQ ID NO: 317259
cuggauuccucaguuuaug

SEQ ID NO: 476912 - RNA, 19 nt, Artificial Sequence
  Description of Artificial Sequence: Synthetic oligonucleotide
  Antisense Strand to SEQ ID NO: 476911
cauaaacugaggaauccag

SEQ ID NO: 476913 - RNA, 19 nt, Artificial Sequence
  Description of Artificial Sequence: Synthetic oligonucleotide
  Sense strand starting at position 3512 of SEQ ID NO: 317259
uacacugggcuuugaugaa

SEQ ID NO: 476914 - RNA, 19 nt, Artificial Sequence
  Description of Artificial Sequence: Synthetic oligonucleotide
  Antisense Strand to SEQ ID NO: 476913
uucaucaaagcccagugua

SEQ ID NO: 476915 - RNA, 19 nt, Artificial Sequence
  Description of Artificial Sequence: Synthetic oligonucleotide
  Sense strand starting at position 3622 of SEQ ID NO: 317259
gcuccuuggaugggaaaca

SEQ ID NO: 476916 - RNA, 19 nt, Artificial Sequence
  Description of Artificial Sequence: Synthetic oligonucleotide
  Antisense Strand to SEQ ID NO: 476915
uguuucccauccaaggagc

SEQ ID NO: 476917 - RNA, 19 nt, Artificial Sequence
  Description of Artificial Sequence: Synthetic oligonucleotide
  Sense strand starting at position 3684 of SEQ ID NO: 317259
uuaaauguucuggaucauc

SEQ ID NO: 476918 - RNA, 19 nt, Artificial Sequence
  Description of Artificial Sequence: Synthetic oligonucleotide
  Antisense Strand to SEQ ID NO: 476917
gaugauccagaacauuuaa

SEQ ID NO: 476919 - RNA, 19 nt, Artificial Sequence
  Description of Artificial Sequence: Synthetic oligonucleotide
  Sense strand starting at position 3689 of SEQ ID NO: 317259
uguucuggaucaucuauca

SEQ ID NO: 476920 - RNA, 19 nt, Artificial Sequence
  Description of Artificial Sequence: Synthetic oligonucleotide
  Antisense Strand to SEQ ID NO: 476919
ugauagaugauccagaaca

SEQ ID NO: 476921 - RNA, 19 nt, Artificial Sequence
  Description of Artificial Sequence: Synthetic oligonucleotide
  Sense strand starting at position 3697 of SEQ ID NO: 317259
aucaucuaucagggaggua

SEQ ID NO: 476922 - RNA, 19 nt, Artificial Sequence
  Description of Artificial Sequence: Synthetic oligonucleotide
  Antisense Strand to SEQ ID NO: 476921
uaccucccugauagaugau

SEQ ID NO: 476923 - RNA, 19 nt, Artificial Sequence
  Description of Artificial Sequence: Synthetic oligonucleotide
  Sense strand starting at position 3817 of SEQ ID NO: 317259
uuaauuaauggcugcaaua

SEQ ID NO: 476924 - RNA, 19 nt, Artificial Sequence
  Description of Artificial Sequence: Synthetic oligonucleotide
  Antisense Strand to SEQ ID NO: 476923
uauugcagccauuaauuaa

SEQ ID NO: 476925 - RNA, 19 nt, Artificial Sequence
  Description of Artificial Sequence: Synthetic oligonucleotide
  Sense strand starting at position 3877 of SEQ ID NO: 317259
uguuguaaauuuccgcaaa

SEQ ID NO: 476926 - RNA, 19 nt, Artificial Sequence
  Description of Artificial Sequence: Synthetic oligonucleotide
  Antisense Strand to SEQ ID NO: 476925
uuugcggaaauuuacaaca

SEQ ID NO: 476927 - RNA, 19 nt, Artificial Sequence
  Description of Artificial Sequence: Synthetic oligonucleotide
  Sense strand starting at position 24 of SEQ ID NO: 317260
ggagucugacuccaguaau

SEQ ID NO: 476928 - RNA, 19 nt, Artificial Sequence
  Description of Artificial Sequence: Synthetic oligonucleotide
  Antisense Strand to SEQ ID NO: 476927
auuacuggagucagacucc

SEQ ID NO: 476929 - RNA, 19 nt, Artificial Sequence
  Description of Artificial Sequence: Synthetic oligonucleotide
  Sense strand starting at position 27 of SEQ ID NO: 317260
gucugacuccaguaauacu

SEQ ID NO: 476930 - RNA, 19 nt, Artificial Sequence
  Description of Artificial Sequence: Synthetic oligonucleotide
  Antisense Strand to SEQ ID NO: 476929
aguauuacuggagucagac

SEQ ID NO: 476931 - RNA, 19 nt, Artificial Sequence
  Description of Artificial Sequence: Synthetic oligonucleotide
  Sense strand starting at position 60 of SEQ ID NO: 317260
gggauacaccuaugguucu

SEQ ID NO: 476932 - RNA, 19 nt, Artificial Sequence
  Description of Artificial Sequence: Synthetic oligonucleotide
  Antisense Strand to SEQ ID NO: 476931
agaaccauagguguauccc

SEQ ID NO: 476933 - RNA, 19 nt, Artificial Sequence
  Description of Artificial Sequence: Synthetic oligonucleotide
  Sense strand starting at position 223 of SEQ ID NO: 317260
ggaaacuuauccuugaccu

SEQ ID NO: 476934 - RNA, 19 nt, Artificial Sequence
  Description of Artificial Sequence: Synthetic oligonucleotide
  Antisense Strand to SEQ ID NO: 476933
aggucaaggauaaguuucc

SEQ ID NO: 476935 - RNA, 19 nt, Artificial Sequence
  Description of Artificial Sequence: Synthetic oligonucleotide
  Sense strand starting at position 245 of SEQ ID NO: 317260
uggcuacuggcccaagaua

SEQ ID NO: 476936 - RNA, 19 nt, Artificial Sequence
  Description of Artificial Sequence: Synthetic oligonucleotide
  Antisense Strand to SEQ ID NO: 476935
uaucuugggccaguagcca

SEQ ID NO: 476937 - RNA, 19 nt, Artificial Sequence
  Description of Artificial Sequence: Synthetic oligonucleotide
  Sense strand starting at position 371 of SEQ ID NO: 317260
caguuuauuugggaagaca

SEQ ID NO: 476938 - RNA, 19 nt, Artificial Sequence
  Description of Artificial Sequence: Synthetic oligonucleotide
  Antisense Strand to SEQ ID NO: 476937
ugucuucccaaauaaacug

SEQ ID NO: 476939 - RNA, 19 nt, Artificial Sequence
  Description of Artificial Sequence: Synthetic oligonucleotide
  Sense strand starting at position 514 of SEQ ID NO: 317260
uguaacucuucucuaagga

SEQ ID NO: 476940 - RNA, 19 nt, Artificial Sequence
  Description of Artificial Sequence: Synthetic oligonucleotide
  Antisense Strand to SEQ ID NO: 476939
uccuuagagaagaguuaca

SEQ ID NO: 476941 - RNA, 19 nt, Artificial Sequence
  Description of Artificial Sequence: Synthetic oligonucleotide
  Sense strand starting at position 515 of SEQ ID NO: 317260
guaacucuucucuaaggac

SEQ ID NO: 476942 - RNA, 19 nt, Artificial Sequence
  Description of Artificial Sequence: Synthetic oligonucleotide
  Antisense Strand to SEQ ID NO: 476941
guccuuagagaagaguuac

SEQ ID NO: 476943 - RNA, 19 nt, Artificial Sequence
  Description of Artificial Sequence: Synthetic oligonucleotide
  Sense strand starting at position 586 of SEQ ID NO: 317260
gacagcauccuuugauuga

SEQ ID NO: 476944 - RNA, 19 nt, Artificial Sequence
  Description of Artificial Sequence: Synthetic oligonucleotide
  Antisense Strand to SEQ ID NO: 476943
ucaaucaaaggaugcuguc

SEQ ID NO: 476945 - RNA, 19 nt, Artificial Sequence
  Description of Artificial Sequence: Synthetic oligonucleotide
  Sense strand starting at position 589 of SEQ ID NO: 317260
agcauccuuugauugaaga

SEQ ID NO: 476946 - RNA, 19 nt, Artificial Sequence
  Description of Artificial Sequence: Synthetic oligonucleotide
  Antisense Strand to SEQ ID NO: 476945
ucuucaaucaaaggaugcu

SEQ ID NO: 476947 - RNA, 19 nt, Artificial Sequence
  Description of Artificial Sequence: Synthetic oligonucleotide
  Sense strand starting at position 590 of SEQ ID NO: 317260
gcauccuuugauugaagag

SEQ ID NO: 476948 - RNA, 19 nt, Artificial Sequence
  Description of Artificial Sequence: Synthetic oligonucleotide
  Antisense Strand to SEQ ID NO: 476947
cucuucaaucaaaggaugc

SEQ ID NO: 476949 - RNA, 19 nt, Artificial Sequence
  Description of Artificial Sequence: Synthetic oligonucleotide
  Sense strand starting at position 777 of SEQ ID NO: 317260
ucacuaagucuuggaauuc

SEQ ID NO: 476950 - RNA, 19 nt, Artificial Sequence
  Description of Artificial Sequence: Synthetic oligonucleotide
  Antisense Strand to SEQ ID NO: 476949
gaauuccaagacuuaguga

SEQ ID NO: 476951 - RNA, 19 nt, Artificial Sequence
  Description of Artificial Sequence: Synthetic oligonucleotide
  Sense strand starting at position 844 of SEQ ID NO: 317260
accagacaucugugacucu

SEQ ID NO: 476952 - RNA, 19 nt, Artificial Sequence
  Description of Artificial Sequence: Synthetic oligonucleotide
  Antisense Strand to SEQ ID NO: 476951
agagucacagaugucuggu

SEQ ID NO: 476953 - RNA, 19 nt, Artificial Sequence
  Description of Artificial Sequence: Synthetic oligonucleotide
  Sense strand starting at position 911 of SEQ ID NO: 317260
guuguaagacauuagcaga

SEQ ID NO: 476954 - RNA, 19 nt, Artificial Sequence
  Description of Artificial Sequence: Synthetic oligonucleotide
  Antisense Strand to SEQ ID NO: 476953
ucugcuaaugucuuacaac

SEQ ID NO: 476955 - RNA, 19 nt, Artificial Sequence
  Description of Artificial Sequence: Synthetic oligonucleotide
  Sense strand starting at position 975 of SEQ ID NO: 317260
uuaagauaaucaguguuag

SEQ ID NO: 476956 - RNA, 19 nt, Artificial Sequence
  Description of Artificial Sequence: Synthetic oligonucleotide
  Antisense Strand to SEQ ID NO: 476955
cuaacacugauuaucuuaa

SEQ ID NO: 476957 - RNA, 19 nt, Artificial Sequence
  Description of Artificial Sequence: Synthetic oligonucleotide
  Sense strand starting at position 987 of SEQ ID NO: 317260
guguuaguccuagcugcaa

SEQ ID NO: 476958 - RNA, 19 nt, Artificial Sequence
  Description of Artificial Sequence: Synthetic oligonucleotide
  Antisense Strand to SEQ ID NO: 476957
uugcagcuaggacuaacac

SEQ ID NO: 476959 - RNA, 19 nt, Artificial Sequence
  Description of Artificial Sequence: Synthetic oligonucleotide
  Sense strand starting at position 1185 of SEQ ID NO: 317260
ccuguuucucuacagaagu

SEQ ID NO: 476960 - RNA, 19 nt, Artificial Sequence
  Description of Artificial Sequence: Synthetic oligonucleotide
  Antisense Strand to SEQ ID NO: 476959
acuucuguagagaaacagg

SEQ ID NO: 476961 - RNA, 19 nt, Artificial Sequence
  Description of Artificial Sequence: Synthetic oligonucleotide
  Sense strand starting at position 1202 of SEQ ID NO: 317260
guaaaucauguugacauau

SEQ ID NO: 476962 - RNA, 19 nt, Artificial Sequence
  Description of Artificial Sequence: Synthetic oligonucleotide
  Antisense Strand to SEQ ID NO: 476961
auaugucaacaugauuuac

SEQ ID NO: 476963 - RNA, 19 nt, Artificial Sequence
  Description of Artificial Sequence: Synthetic oligonucleotide
  Sense strand starting at position 1235 of SEQ ID NO: 317260
ggcuguaguauggaagaaa

SEQ ID NO: 476964 - RNA, 19 nt, Artificial Sequence
  Description of Artificial Sequence: Synthetic oligonucleotide
  Antisense Strand to SEQ ID NO: 476963
uuucuuccauacuacagcc

SEQ ID NO: 476965 - RNA, 19 nt, Artificial Sequence
  Description of Artificial Sequence: Synthetic oligonucleotide
  Sense strand starting at position 2114 of SEQ ID NO: 317260
ccuagcacaucaucugaga

SEQ ID NO: 476966 - RNA, 19 nt, Artificial Sequence
  Description of Artificial Sequence: Synthetic oligonucleotide
  Antisense Strand to SEQ ID NO: 476965
ucucagaugaugugcuagg

SEQ ID NO: 476967 - RNA, 19 nt, Artificial Sequence
  Description of Artificial Sequence: Synthetic oligonucleotide
  Sense strand starting at position 2123 of SEQ ID NO: 317260
ucaucugagaguuagcaug

SEQ ID NO: 476968 - RNA, 19 nt, Artificial Sequence
  Description of Artificial Sequence: Synthetic oligonucleotide
  Antisense Strand to SEQ ID NO: 476967
caugcuaacucucagauga

SEQ ID NO: 476969 - RNA, 19 nt, Artificial Sequence
  Description of Artificial Sequence: Synthetic oligonucleotide
  Sense strand starting at position 2125 of SEQ ID NO: 317260
aucugagaguuagcaugaa

SEQ ID NO: 476970 - RNA, 19 nt, Artificial Sequence
  Description of Artificial Sequence: Synthetic oligonucleotide
  Antisense Strand to SEQ ID NO: 476969
uucaugcuaacucucagau

SEQ ID NO: 476971 - RNA, 19 nt, Artificial Sequence
  Description of Artificial Sequence: Synthetic oligonucleotide
  Sense strand starting at position 2183 of SEQ ID NO: 317260
gguaggaaucucgggagua

SEQ ID NO: 476972 - RNA, 19 nt, Artificial Sequence
  Description of Artificial Sequence: Synthetic oligonucleotide
  Antisense Strand to SEQ ID NO: 476971
uacucccgagauuccuacc

SEQ ID NO: 476973 - RNA, 19 nt, Artificial Sequence
  Description of Artificial Sequence: Synthetic oligonucleotide
  Sense strand starting at position 2227 of SEQ ID NO: 317260
gggcaaguuagcuaacauc

SEQ ID NO: 476974 - RNA, 19 nt, Artificial Sequence
  Description of Artificial Sequence: Synthetic oligonucleotide
  Antisense Strand to SEQ ID NO: 476973
gauguuagcuaacuugccc

SEQ ID NO: 476975 - RNA, 19 nt, Artificial Sequence
  Description of Artificial Sequence: Synthetic oligonucleotide
  Sense strand starting at position 2593 of SEQ ID NO: 317260
gagcaacgugacuacuaau

SEQ ID NO: 476976 - RNA, 19 nt, Artificial Sequence
  Description of Artificial Sequence: Synthetic oligonucleotide
  Antisense Strand to SEQ ID NO: 476975
auuaguagucacguugcuc

SEQ ID NO: 476977 - RNA, 19 nt, Artificial Sequence
  Description of Artificial Sequence: Synthetic oligonucleotide
  Sense strand starting at position 2636 of SEQ ID NO: 317260
ggacuauggcaaugacuau

SEQ ID NO: 476978 - RNA, 19 nt, Artificial Sequence
  Description of Artificial Sequence: Synthetic oligonucleotide
  Antisense Strand to SEQ ID NO: 476977
auagucauugccauagucc

SEQ ID NO: 476979 - RNA, 19 nt, Artificial Sequence
  Description of Artificial Sequence: Synthetic oligonucleotide
  Sense strand starting at position 2722 of SEQ ID NO: 317260
guuucuaaggccuagagau

SEQ ID NO: 476980 - RNA, 19 nt, Artificial Sequence
  Description of Artificial Sequence: Synthetic oligonucleotide
  Antisense Strand to SEQ ID NO: 476979
aucucuaggccuuagaaac

SEQ ID NO: 476981 - RNA, 19 nt, Artificial Sequence
  Description of Artificial Sequence: Synthetic oligonucleotide
  Sense strand starting at position 2840 of SEQ ID NO: 317260
guacguauuugagcccaua

SEQ ID NO: 476982 - RNA, 19 nt, Artificial Sequence
  Description of Artificial Sequence: Synthetic oligonucleotide
  Antisense Strand to SEQ ID NO: 476981
uaugggcucaaauacguac

SEQ ID NO: 476983 - RNA, 19 nt, Artificial Sequence
  Description of Artificial Sequence: Synthetic oligonucleotide
  Sense strand starting at position 2907 of SEQ ID NO: 317260
ggauccacuuguucucaga

SEQ ID NO: 476984 - RNA, 19 nt, Artificial Sequence
  Description of Artificial Sequence: Synthetic oligonucleotide
  Antisense Strand to SEQ ID NO: 476983
ucugagaacaaguggaucc

SEQ ID NO: 476985 - RNA, 19 nt, Artificial Sequence
  Description of Artificial Sequence: Synthetic oligonucleotide
  Sense strand starting at position 3051 of SEQ ID NO: 317260
ugaauaaugcaauauguuc

SEQ ID NO: 476986 - RNA, 19 nt, Artificial Sequence
  Description of Artificial Sequence: Synthetic oligonucleotide
  Antisense Strand to SEQ ID NO: 476985
gaacauauugcauuauuca

SEQ ID NO: 476987 - RNA, 19 nt, Artificial Sequence
  Description of Artificial Sequence: Synthetic oligonucleotide
  Sense strand starting at position 3178 of SEQ ID NO: 317260
uggugaggucaacggaaga

SEQ ID NO: 476988 - RNA, 19 nt, Artificial Sequence
  Description of Artificial Sequence: Synthetic oligonucleotide
  Antisense Strand to SEQ ID NO: 476987
ucuuccguugaccucacca

SEQ ID NO: 476989 - RNA, 19 nt, Artificial Sequence
  Description of Artificial Sequence: Synthetic oligonucleotide
  Sense strand starting at position 3193 of SEQ ID NO: 317260
aagacuaucgguuaagcuu

SEQ ID NO: 476990 - RNA, 19 nt, Artificial Sequence
  Description of Artificial Sequence: Synthetic oligonucleotide
  Antisense Strand to SEQ ID NO: 476989
aagcuuaaccgauagucuu

SEQ ID NO: 476991 - RNA, 19 nt, Artificial Sequence
  Description of Artificial Sequence: Synthetic oligonucleotide
  Sense strand starting at position 3216 of SEQ ID NO: 317260
ggagucaaagguuauaggu

SEQ ID NO: 476992 - RNA, 19 nt, Artificial Sequence
  Description of Artificial Sequence: Synthetic oligonucleotide
  Antisense Strand to SEQ ID NO: 476991
accuauaaccuuugacucc

SEQ ID NO: 476993 - RNA, 19 nt, Artificial Sequence
  Description of Artificial Sequence: Synthetic oligonucleotide
  Sense strand starting at position 3297 of SEQ ID NO: 317260
gccuguuuauuugcauaag

SEQ ID NO: 476994 - RNA, 19 nt, Artificial Sequence
  Description of Artificial Sequence: Synthetic oligonucleotide
  Antisense Strand to SEQ ID NO: 476993
cuuaugcaaauaaacaggc

SEQ ID NO: 476995 - RNA, 19 nt, Artificial Sequence
  Description of Artificial Sequence: Synthetic oligonucleotide
  Sense strand starting at position 3403 of SEQ ID NO: 317260
augacuuggaccugguaua

SEQ ID NO: 476996 - RNA, 19 nt, Artificial Sequence
  Description of Artificial Sequence: Synthetic oligonucleotide
  Antisense Strand to SEQ ID NO: 476995
uauaccagguccaagucau

SEQ ID NO: 476997 - RNA, 19 nt, Artificial Sequence
  Description of Artificial Sequence: Synthetic oligonucleotide
  Sense strand starting at position 3404 of SEQ ID NO: 317260
ugacuuggaccugguauau

SEQ ID NO: 476998 - RNA, 19 nt, Artificial Sequence
  Description of Artificial Sequence: Synthetic oligonucleotide
  Antisense Strand to SEQ ID NO: 476997
auauaccagguccaaguca

SEQ ID NO: 476999 - RNA, 19 nt, Artificial Sequence
  Description of Artificial Sequence: Synthetic oligonucleotide
  Sense strand starting at position 3419 of SEQ ID NO: 317260
auaucaacugauugaugua

SEQ ID NO: 477000 - RNA, 19 nt, Artificial Sequence
  Description of Artificial Sequence: Synthetic oligonucleotide
  Antisense Strand to SEQ ID NO: 476999
uacaucaaucaguugauau

SEQ ID NO: 477001 - RNA, 19 nt, Artificial Sequence
  Description of Artificial Sequence: Synthetic oligonucleotide
  Sense strand starting at position 3661 of SEQ ID NO: 317260
auaccauuagcaggaauua

SEQ ID NO: 477002 - RNA, 19 nt, Artificial Sequence
  Description of Artificial Sequence: Synthetic oligonucleotide
  Antisense Strand to SEQ ID NO: 477001
uaauuccugcuaaugguau

SEQ ID NO: 477003 - RNA, 19 nt, Artificial Sequence
  Description of Artificial Sequence: Synthetic oligonucleotide
  Sense strand starting at position 3736 of SEQ ID NO: 317260
cuaauaguacucugaauug

SEQ ID NO: 477004 - RNA, 19 nt, Artificial Sequence
  Description of Artificial Sequence: Synthetic oligonucleotide
  Antisense Strand to SEQ ID NO: 477003
caauucagaguacuauuag

SEQ ID NO: 477005 - RNA, 19 nt, Artificial Sequence
  Description of Artificial Sequence: Synthetic oligonucleotide
  Sense strand starting at position 3816 of SEQ ID NO: 317260
gaggucuagaggugugaaa

SEQ ID NO: 477006 - RNA, 19 nt, Artificial Sequence
  Description of Artificial Sequence: Synthetic oligonucleotide
  Antisense Strand to SEQ ID NO: 477005
uuucacaccucuagaccuc

SEQ ID NO: 477007 - RNA, 19 nt, Artificial Sequence
  Description of Artificial Sequence: Synthetic oligonucleotide
  Sense strand starting at position 174 of SEQ ID NO: 317261
uggauaagcuauucccaac

SEQ ID NO: 477008 - RNA, 19 nt, Artificial Sequence
  Description of Artificial Sequence: Synthetic oligonucleotide
  Antisense Strand to SEQ ID NO: 477007
guugggaauagcuuaucca

SEQ ID NO: 477009 - RNA, 19 nt, Artificial Sequence
  Description of Artificial Sequence: Synthetic oligonucleotide
  Sense strand starting at position 704 of SEQ ID NO: 317261
uuucgaaagcacuaagucu

SEQ ID NO: 477010 - RNA, 19 nt, Artificial Sequence
  Description of Artificial Sequence: Synthetic oligonucleotide
  Antisense Strand to SEQ ID NO: 477009
agacuuagugcuuucgaaa

SEQ ID NO: 477011 - RNA, 19 nt, Artificial Sequence
  Description of Artificial Sequence: Synthetic oligonucleotide
  Sense strand starting at position 859 of SEQ ID NO: 317261
uuugguguuuaugcgauuu

SEQ ID NO: 477012 - RNA, 19 nt, Artificial Sequence
  Description of Artificial Sequence: Synthetic oligonucleotide
  Antisense Strand to SEQ ID NO: 477011
aaaucgcauaaacaccaaa

SEQ ID NO: 477013 - RNA, 19 nt, Artificial Sequence
  Description of Artificial Sequence: Synthetic oligonucleotide
  Sense strand starting at position 865 of SEQ ID NO: 317261
guuuaugcgauuuguaaua

SEQ ID NO: 477014 - RNA, 19 nt, Artificial Sequence
  Description of Artificial Sequence: Synthetic oligonucleotide
  Antisense Strand to SEQ ID NO: 477013
uauuacaaaucgcauaaac

SEQ ID NO: 477015 - RNA, 19 nt, Artificial Sequence
  Description of Artificial Sequence: Synthetic oligonucleotide
  Sense strand starting at position 878 of SEQ ID NO: 317261
guaauacuagcguuagugu

SEQ ID NO: 477016 - RNA, 19 nt, Artificial Sequence
  Description of Artificial Sequence: Synthetic oligonucleotide
  Antisense Strand to SEQ ID NO: 477015
acacuaacgcuaguauuac

SEQ ID NO: 477017 - RNA, 19 nt, Artificial Sequence
  Description of Artificial Sequence: Synthetic oligonucleotide
  Sense strand starting at position 886 of SEQ ID NO: 317261
agcguuaguguugucaaua

SEQ ID NO: 477018 - RNA, 19 nt, Artificial Sequence
  Description of Artificial Sequence: Synthetic oligonucleotide
  Antisense Strand to SEQ ID NO: 477017
uauugacaacacuaacgcu

SEQ ID NO: 477019 - RNA, 19 nt, Artificial Sequence
  Description of Artificial Sequence: Synthetic oligonucleotide
  Sense strand starting at position 1012 of SEQ ID NO: 317261
acagcugaauugcuuaaga

SEQ ID NO: 477020 - RNA, 19 nt, Artificial Sequence
  Description of Artificial Sequence: Synthetic oligonucleotide
  Antisense Strand to SEQ ID NO: 477019
ucuuaagcaauucagcugu

SEQ ID NO: 477021 - RNA, 19 nt, Artificial Sequence
  Description of Artificial Sequence: Synthetic oligonucleotide
  Sense strand starting at position 1014 of SEQ ID NO: 317261
agcugaauugcuuaagauu

SEQ ID NO: 477022 - RNA, 19 nt, Artificial Sequence
  Description of Artificial Sequence: Synthetic oligonucleotide
  Antisense Strand to SEQ ID NO: 477021
aaucuuaagcaauucagcu

SEQ ID NO: 477023 - RNA, 19 nt, Artificial Sequence
  Description of Artificial Sequence: Synthetic oligonucleotide
  Sense strand starting at position 1038 of SEQ ID NO: 317261
gcaccaguuguacaagaca

SEQ ID NO: 477024 - RNA, 19 nt, Artificial Sequence
  Description of Artificial Sequence: Synthetic oligonucleotide
  Antisense Strand to SEQ ID NO: 477023
ugucuuguacaacuggugc

SEQ ID NO: 477025 - RNA, 19 nt, Artificial Sequence
  Description of Artificial Sequence: Synthetic oligonucleotide
  Sense strand starting at position 1246 of SEQ ID NO: 317261
ggcugaggcgggaguucua

SEQ ID NO: 477026 - RNA, 19 nt, Artificial Sequence
  Description of Artificial Sequence: Synthetic oligonucleotide
  Antisense Strand to SEQ ID NO: 477025
uagaacucccgccucagcc

SEQ ID NO: 477027 - RNA, 19 nt, Artificial Sequence
  Description of Artificial Sequence: Synthetic oligonucleotide
  Sense strand starting at position 2090 of SEQ ID NO: 317261
ucaucuauaguccggagga

SEQ ID NO: 477028 - RNA, 19 nt, Artificial Sequence
  Description of Artificial Sequence: Synthetic oligonucleotide
  Antisense Strand to SEQ ID NO: 477027
uccuccggacuauagauga

SEQ ID NO: 477029 - RNA, 19 nt, Artificial Sequence
  Description of Artificial Sequence: Synthetic oligonucleotide
  Sense strand starting at position 2254 of SEQ ID NO: 317261
gggaguuaggcuuggaccu

SEQ ID NO: 477030 - RNA, 19 nt, Artificial Sequence
  Description of Artificial Sequence: Synthetic oligonucleotide
  Antisense Strand to SEQ ID NO: 477029
agguccaagccuaacuccc

SEQ ID NO: 477031 - RNA, 19 nt, Artificial Sequence
  Description of Artificial Sequence: Synthetic oligonucleotide
  Sense strand starting at position 2255 of SEQ ID NO: 317261
ggaguuaggcuuggaccua

SEQ ID NO: 477032 - RNA, 19 nt, Artificial Sequence
  Description of Artificial Sequence: Synthetic oligonucleotide
  Antisense Strand to SEQ ID NO: 477031
uagguccaagccuaacucc

SEQ ID NO: 477033 - RNA, 19 nt, Artificial Sequence
  Description of Artificial Sequence: Synthetic oligonucleotide
  Sense strand starting at position 2311 of SEQ ID NO: 317261
auguauuguaccgaaugua

SEQ ID NO: 477034 - RNA, 19 nt, Artificial Sequence
  Description of Artificial Sequence: Synthetic oligonucleotide
  Antisense Strand to SEQ ID NO: 477033
uacauucgguacaauacau

SEQ ID NO: 477035 - RNA, 19 nt, Artificial Sequence
  Description of Artificial Sequence: Synthetic oligonucleotide
  Sense strand starting at position 2326 of SEQ ID NO: 317261
uguauugucauggauguau

SEQ ID NO: 477036 - RNA, 19 nt, Artificial Sequence
  Description of Artificial Sequence: Synthetic oligonucleotide
  Antisense Strand to SEQ ID NO: 477035
auacauccaugacaauaca

SEQ ID NO: 477037 - RNA, 19 nt, Artificial Sequence
  Description of Artificial Sequence: Synthetic oligonucleotide
  Sense strand starting at position 2343 of SEQ ID NO: 317261
auugaaagcgcucauuugu

SEQ ID NO: 477038 - RNA, 19 nt, Artificial Sequence
  Description of Artificial Sequence: Synthetic oligonucleotide
  Antisense Strand to SEQ ID NO: 477037
acaaaugagcgcuuucaau

SEQ ID NO: 477039 - RNA, 19 nt, Artificial Sequence
  Description of Artificial Sequence: Synthetic oligonucleotide
  Sense strand starting at position 2497 of SEQ ID NO: 317261
gagacccagucauugugaa

SEQ ID NO: 477040 - RNA, 19 nt, Artificial Sequence
  Description of Artificial Sequence: Synthetic oligonucleotide
  Antisense Strand to SEQ ID NO: 477039
uucacaaugacugggucuc

SEQ ID NO: 477041 - RNA, 19 nt, Artificial Sequence
  Description of Artificial Sequence: Synthetic oligonucleotide
  Sense strand starting at position 2509 of SEQ ID NO: 317261
uugugaaguauuugcguaa

SEQ ID NO: 477042 - RNA, 19 nt, Artificial Sequence
  Description of Artificial Sequence: Synthetic oligonucleotide
  Antisense Strand to SEQ ID NO: 477041
uuacgcaaauacuucacaa

SEQ ID NO: 477043 - RNA, 19 nt, Artificial Sequence
  Description of Artificial Sequence: Synthetic oligonucleotide
  Sense strand starting at position 2510 of SEQ ID NO: 317261
ugugaaguauuugcguaau

SEQ ID NO: 477044 - RNA, 19 nt, Artificial Sequence
  Description of Artificial Sequence: Synthetic oligonucleotide
  Antisense Strand to SEQ ID NO: 477043
auuacgcaaauacuucaca

SEQ ID NO: 477045 - RNA, 19 nt, Artificial Sequence
  Description of Artificial Sequence: Synthetic oligonucleotide
  Sense strand starting at position 2512 of SEQ ID NO: 317261
ugaaguauuugcguaauaa

SEQ ID NO: 477046 - RNA, 19 nt, Artificial Sequence
  Description of Artificial Sequence: Synthetic oligonucleotide
  Antisense Strand to SEQ ID NO: 477045
uuauuacgcaaauacuuca

SEQ ID NO: 477047 - RNA, 19 nt, Artificial Sequence
  Description of Artificial Sequence: Synthetic oligonucleotide
  Sense strand starting at position 2629 of SEQ ID NO: 317261
caaugagugggugauccau

SEQ ID NO: 477048 - RNA, 19 nt, Artificial Sequence
  Description of Artificial Sequence: Synthetic oligonucleotide
  Antisense Strand to SEQ ID NO: 477047
auggaucacccacucauug

SEQ ID NO: 477049 - RNA, 19 nt, Artificial Sequence
  Description of Artificial Sequence: Synthetic oligonucleotide
  Sense strand starting at position 2684 of SEQ ID NO: 317261
ccaagaaagugaccauguu

SEQ ID NO: 477050 - RNA, 19 nt, Artificial Sequence
  Description of Artificial Sequence: Synthetic oligonucleotide
  Antisense Strand to SEQ ID NO: 477049
aacauggucacuuucuugg

SEQ ID NO: 477051 - RNA, 19 nt, Artificial Sequence
  Description of Artificial Sequence: Synthetic oligonucleotide
  Sense strand starting at position 2710 of SEQ ID NO: 317261
uuucuuacaguguaguaga

SEQ ID NO: 477052 - RNA, 19 nt, Artificial Sequence
  Description of Artificial Sequence: Synthetic oligonucleotide
  Antisense Strand to SEQ ID NO: 477051
ucuacuacacuguaagaaa

SEQ ID NO: 477053 - RNA, 19 nt, Artificial Sequence
  Description of Artificial Sequence: Synthetic oligonucleotide
  Sense strand starting at position 2772 of SEQ ID NO: 317261
acaauuaguagcuggauga

SEQ ID NO: 477054 - RNA, 19 nt, Artificial Sequence
  Description of Artificial Sequence: Synthetic oligonucleotide
  Antisense Strand to SEQ ID NO: 477053
ucauccagcuacuaauugu

SEQ ID NO: 477055 - RNA, 19 nt, Artificial Sequence
  Description of Artificial Sequence: Synthetic oligonucleotide
  Sense strand starting at position 2782 of SEQ ID NO: 317261
gcuggaugacuuuggcaaa

SEQ ID NO: 477056 - RNA, 19 nt, Artificial Sequence
  Description of Artificial Sequence: Synthetic oligonucleotide
  Antisense Strand to SEQ ID NO: 477055
uuugccaaagucauccagc

SEQ ID NO: 477057 - RNA, 19 nt, Artificial Sequence
  Description of Artificial Sequence: Synthetic oligonucleotide
  Sense strand starting at position 2856 of SEQ ID NO: 317261
guagguagggcauaaaugu

SEQ ID NO: 477058 - RNA, 19 nt, Artificial Sequence
  Description of Artificial Sequence: Synthetic oligonucleotide
  Antisense Strand to SEQ ID NO: 477057
acauuuaugcccuaccuac

SEQ ID NO: 477059 - RNA, 19 nt, Artificial Sequence
  Description of Artificial Sequence: Synthetic oligonucleotide
  Sense strand starting at position 2878 of SEQ ID NO: 317261
ugugcauucgaagaacauu

SEQ ID NO: 477060 - RNA, 19 nt, Artificial Sequence
  Description of Artificial Sequence: Synthetic oligonucleotide
  Antisense Strand to SEQ ID NO: 477059
aauguucuucgaaugcaca

SEQ ID NO: 477061 - RNA, 19 nt, Artificial Sequence
  Description of Artificial Sequence: Synthetic oligonucleotide
  Sense strand starting at position 3163 of SEQ ID NO: 317261
cugacaaauguuuauaugu

SEQ ID NO: 477062 - RNA, 19 nt, Artificial Sequence
  Description of Artificial Sequence: Synthetic oligonucleotide
  Antisense Strand to SEQ ID NO: 477061
acauauaaacauuugucag

SEQ ID NO: 477063 - RNA, 19 nt, Artificial Sequence
  Description of Artificial Sequence: Synthetic oligonucleotide
  Sense strand starting at position 3285 of SEQ ID NO: 317261
agguuaauguaguuuauag

SEQ ID NO: 477064 - RNA, 19 nt, Artificial Sequence
  Description of Artificial Sequence: Synthetic oligonucleotide
  Antisense Strand to SEQ ID NO: 477063
cuauaaacuacauuaaccu

SEQ ID NO: 477065 - RNA, 19 nt, Artificial Sequence
  Description of Artificial Sequence: Synthetic oligonucleotide
  Sense strand starting at position 3287 of SEQ ID NO: 317261
guuaauguaguuuauagga

SEQ ID NO: 477066 - RNA, 19 nt, Artificial Sequence
  Description of Artificial Sequence: Synthetic oligonucleotide
  Antisense Strand to SEQ ID NO: 477065
uccuauaaacuacauuaac

SEQ ID NO: 477067 - RNA, 19 nt, Artificial Sequence
  Description of Artificial Sequence: Synthetic oligonucleotide
  Sense strand starting at position 3348 of SEQ ID NO: 317261
uaaugaaagucucugguug

SEQ ID NO: 477068 - RNA, 19 nt, Artificial Sequence
  Description of Artificial Sequence: Synthetic oligonucleotide
  Antisense Strand to SEQ ID NO: 477067
caaccagagacuuucauua

SEQ ID NO: 477069 - RNA, 19 nt, Artificial Sequence
  Description of Artificial Sequence: Synthetic oligonucleotide
  Sense strand starting at position 3406 of SEQ ID NO: 317261
auaacuuuccguuauuaga

SEQ ID NO: 477070 - RNA, 19 nt, Artificial Sequence
  Description of Artificial Sequence: Synthetic oligonucleotide
  Antisense Strand to SEQ ID NO: 477069
ucuaauaacggaaaguuau

SEQ ID NO: 477071 - RNA, 19 nt, Artificial Sequence
  Description of Artificial Sequence: Synthetic oligonucleotide
  Sense strand starting at position 3448 of SEQ ID NO: 317261
ggcaguuaucgggacauac

SEQ ID NO: 477072 - RNA, 19 nt, Artificial Sequence
  Description of Artificial Sequence: Synthetic oligonucleotide
  Antisense Strand to SEQ ID NO: 477071
guaugucccgauaacugcc

SEQ ID NO: 477073 - RNA, 19 nt, Artificial Sequence
  Description of Artificial Sequence: Synthetic oligonucleotide
  Sense strand starting at position 3583 of SEQ ID NO: 317261
gggugagcuguaggaaaga

SEQ ID NO: 477074 - RNA, 19 nt, Artificial Sequence
  Description of Artificial Sequence: Synthetic oligonucleotide
  Antisense Strand to SEQ ID NO: 477073
ucuuuccuacagcucaccc

SEQ ID NO: 477075 - RNA, 19 nt, Artificial Sequence
  Description of Artificial Sequence: Synthetic oligonucleotide
  Sense strand starting at position 3599 of SEQ ID NO: 317261
agauaaguuucugcuuaag

SEQ ID NO: 477076 - RNA, 19 nt, Artificial Sequence
  Description of Artificial Sequence: Synthetic oligonucleotide
  Antisense Strand to SEQ ID NO: 477075
cuuaagcagaaacuuaucu

SEQ ID NO: 477077 - RNA, 19 nt, Artificial Sequence
  Description of Artificial Sequence: Synthetic oligonucleotide
  Sense strand starting at position 3601 of SEQ ID NO: 317261
auaaguuucugcuuaagga

SEQ ID NO: 477078 - RNA, 19 nt, Artificial Sequence
  Description of Artificial Sequence: Synthetic oligonucleotide
  Antisense Strand to SEQ ID NO: 477077
uccuuaagcagaaacuuau

SEQ ID NO: 477079 - RNA, 19 nt, Artificial Sequence
  Description of Artificial Sequence: Synthetic oligonucleotide
  Sense strand starting at position 3602 of SEQ ID NO: 317261
uaaguuucugcuuaaggag

SEQ ID NO: 477080 - RNA, 19 nt, Artificial Sequence
  Description of Artificial Sequence: Synthetic oligonucleotide
  Antisense Strand to SEQ ID NO: 477079
cuccuuaagcagaaacuua

SEQ ID NO: 477081 - RNA, 19 nt, Artificial Sequence
  Description of Artificial Sequence: Synthetic oligonucleotide
  Sense strand starting at position 3716 of SEQ ID NO: 317261
gcugacagaucucuaucaa

SEQ ID NO: 477082 - RNA, 19 nt, Artificial Sequence
  Description of Artificial Sequence: Synthetic oligonucleotide
  Antisense Strand to SEQ ID NO: 477081
uugauagagaucugucagc

SEQ ID NO: 477083 - RNA, 19 nt, Artificial Sequence
  Description of Artificial Sequence: Synthetic oligonucleotide
  Sense strand starting at position 3922 of SEQ ID NO: 317261
ucaccauguguguauuaag

SEQ ID NO: 477084 - RNA, 19 nt, Artificial Sequence
  Description of Artificial Sequence: Synthetic oligonucleotide
  Antisense Strand to SEQ ID NO: 477083
cuuaauacacacaugguga

SEQ ID NO: 477085 - RNA, 19 nt, Artificial Sequence
  Description of Artificial Sequence: Synthetic oligonucleotide
  Sense strand starting at position 3956 of SEQ ID NO: 317261
gcaauaugucccuaaauag

SEQ ID NO: 477086 - RNA, 19 nt, Artificial Sequence
  Description of Artificial Sequence: Synthetic oligonucleotide
  Antisense Strand to SEQ ID NO: 477085
cuauuuagggacauauugc

SEQ ID NO: 477087 - RNA, 19 nt, Artificial Sequence
  Description of Artificial Sequence: Synthetic oligonucleotide
  Sense strand starting at position 85 of SEQ ID NO: 317262
agagguuguuuguugauga

SEQ ID NO: 477088 - RNA, 19 nt, Artificial Sequence
  Description of Artificial Sequence: Synthetic oligonucleotide
  Antisense Strand to SEQ ID NO: 477087
ucaucaacaaacaaccucu

SEQ ID NO: 477089 - RNA, 19 nt, Artificial Sequence
  Description of Artificial Sequence: Synthetic oligonucleotide
  Sense strand starting at position 90 of SEQ ID NO: 317262
uuguuuguugaugauuaac

SEQ ID NO: 477090 - RNA, 19 nt, Artificial Sequence
  Description of Artificial Sequence: Synthetic oligonucleotide
  Antisense Strand to SEQ ID NO: 477089
guuaaucaucaacaaacaa

SEQ ID NO: 477091 - RNA, 19 nt, Artificial Sequence
  Description of Artificial Sequence: Synthetic oligonucleotide
  Sense strand starting at position 92 of SEQ ID NO: 317262
guuuguugaugauuaacag

SEQ ID NO: 477092 - RNA, 19 nt, Artificial Sequence
  Description of Artificial Sequence: Synthetic oligonucleotide
  Antisense Strand to SEQ ID NO: 477091
cuguuaaucaucaacaaac

SEQ ID NO: 477093 - RNA, 19 nt, Artificial Sequence
  Description of Artificial Sequence: Synthetic oligonucleotide
  Sense strand starting at position 99 of SEQ ID NO: 317262
gaugauuaacagggucagu

SEQ ID NO: 477094 - RNA, 19 nt, Artificial Sequence
  Description of Artificial Sequence: Synthetic oligonucleotide
  Antisense Strand to SEQ ID NO: 477093
acugacccuguuaaucauc

SEQ ID NO: 477095 - RNA, 19 nt, Artificial Sequence
  Description of Artificial Sequence: Synthetic oligonucleotide
  Sense strand starting at position 181 of SEQ ID NO: 317262
cagggucucuuggucugaa

SEQ ID NO: 477096 - RNA, 19 nt, Artificial Sequence
  Description of Artificial Sequence: Synthetic oligonucleotide
  Antisense Strand to SEQ ID NO: 477095
uucagaccaagagacccug

SEQ ID NO: 477097 - RNA, 19 nt, Artificial Sequence
  Description of Artificial Sequence: Synthetic oligonucleotide
  Sense strand starting at position 370 of SEQ ID NO: 317262
ccaagagccagagguaaau

SEQ ID NO: 477098 - RNA, 19 nt, Artificial Sequence
  Description of Artificial Sequence: Synthetic oligonucleotide
  Antisense Strand to SEQ ID NO: 477097
auuuaccucuggcucuugg

SEQ ID NO: 477099 - RNA, 19 nt, Artificial Sequence
  Description of Artificial Sequence: Synthetic oligonucleotide
  Sense strand starting at position 393 of SEQ ID NO: 317262
ucuccagauucugccaaga

SEQ ID NO: 477100 - RNA, 19 nt, Artificial Sequence
  Description of Artificial Sequence: Synthetic oligonucleotide
  Antisense Strand to SEQ ID NO: 477099
ucuuggcagaaucuggaga

SEQ ID NO: 477101 - RNA, 19 nt, Artificial Sequence
  Description of Artificial Sequence: Synthetic oligonucleotide
  Sense strand starting at position 661 of SEQ ID NO: 317262
aguggugugacugaauucu

SEQ ID NO: 477102 - RNA, 19 nt, Artificial Sequence
  Description of Artificial Sequence: Synthetic oligonucleotide
  Antisense Strand to SEQ ID NO: 477101
agaauucagucacaccacu

SEQ ID NO: 477103 - RNA, 19 nt, Artificial Sequence
  Description of Artificial Sequence: Synthetic oligonucleotide
  Sense strand starting at position 680 of SEQ ID NO: 317262
ucagaagcauauuccugua

SEQ ID NO: 477104 - RNA, 19 nt, Artificial Sequence
  Description of Artificial Sequence: Synthetic oligonucleotide
  Antisense Strand to SEQ ID NO: 477103
uacaggaauaugcuucuga

SEQ ID NO: 477105 - RNA, 19 nt, Artificial Sequence
  Description of Artificial Sequence: Synthetic oligonucleotide
  Sense strand starting at position 685 of SEQ ID NO: 317262
agcauauuccuguaccaga

SEQ ID NO: 477106 - RNA, 19 nt, Artificial Sequence
  Description of Artificial Sequence: Synthetic oligonucleotide
  Antisense Strand to SEQ ID NO: 477105
ucugguacaggaauaugcu

SEQ ID NO: 477107 - RNA, 19 nt, Artificial Sequence
  Description of Artificial Sequence: Synthetic oligonucleotide
  Sense strand starting at position 698 of SEQ ID NO: 317262
accagauucugagcaacaa

SEQ ID NO: 477108 - RNA, 19 nt, Artificial Sequence
  Description of Artificial Sequence: Synthetic oligonucleotide
  Antisense Strand to SEQ ID NO: 477107
uuguugcucagaaucuggu

SEQ ID NO: 477109 - RNA, 19 nt, Artificial Sequence
  Description of Artificial Sequence: Synthetic oligonucleotide
  Sense strand starting at position 724 of SEQ ID NO: 317262
uugguaaauguacacuauu

SEQ ID NO: 477110 - RNA, 19 nt, Artificial Sequence
  Description of Artificial Sequence: Synthetic oligonucleotide
  Antisense Strand to SEQ ID NO: 477109
aauaguguacauuuaccaa

SEQ ID NO: 477111 - RNA, 19 nt, Artificial Sequence
  Description of Artificial Sequence: Synthetic oligonucleotide
  Sense strand starting at position 999 of SEQ ID NO: 317262
agggucuuuggccauguau

SEQ ID NO: 477112 - RNA, 19 nt, Artificial Sequence
  Description of Artificial Sequence: Synthetic oligonucleotide
  Antisense Strand to SEQ ID NO: 477111
auacauggccaaagacccu

SEQ ID NO: 477113 - RNA, 19 nt, Artificial Sequence
  Description of Artificial Sequence: Synthetic oligonucleotide
  Sense strand starting at position 1062 of SEQ ID NO: 317262
uaugcaaaguaguugaaau

SEQ ID NO: 477114 - RNA, 19 nt, Artificial Sequence
  Description of Artificial Sequence: Synthetic oligonucleotide
  Antisense Strand to SEQ ID NO: 477113
auuucaacuacuuugcaua

SEQ ID NO: 477115 - RNA, 19 nt, Artificial Sequence
  Description of Artificial Sequence: Synthetic oligonucleotide
  Sense strand starting at position 1074 of SEQ ID NO: 317262
uugaaauagucuuugcaga

SEQ ID NO: 477116 - RNA, 19 nt, Artificial Sequence
  Description of Artificial Sequence: Synthetic oligonucleotide
  Antisense Strand to SEQ ID NO: 477115
ucugcaaagacuauuucaa

SEQ ID NO: 477117 - RNA, 19 nt, Artificial Sequence
  Description of Artificial Sequence: Synthetic oligonucleotide
  Sense strand starting at position 1075 of SEQ ID NO: 317262
ugaaauagucuuugcagag

SEQ ID NO: 477118 - RNA, 19 nt, Artificial Sequence
  Description of Artificial Sequence: Synthetic oligonucleotide
  Antisense Strand to SEQ ID NO: 477117
cucugcaaagacuauuuca

SEQ ID NO: 477119 - RNA, 19 nt, Artificial Sequence
  Description of Artificial Sequence: Synthetic oligonucleotide
  Sense strand starting at position 1079 of SEQ ID NO: 317262
auagucuuugcagagcaaa

SEQ ID NO: 477120 - RNA, 19 nt, Artificial Sequence
  Description of Artificial Sequence: Synthetic oligonucleotide
  Antisense Strand to SEQ ID NO: 477119
uuugcucugcaaagacuau

SEQ ID NO: 477121 - RNA, 19 nt, Artificial Sequence
  Description of Artificial Sequence: Synthetic oligonucleotide
  Sense strand starting at position 1216 of SEQ ID NO: 317262
ggcgucagguaauuuaugu

SEQ ID NO: 477122 - RNA, 19 nt, Artificial Sequence
  Description of Artificial Sequence: Synthetic oligonucleotide
  Antisense Strand to SEQ ID NO: 477121
acauaaauuaccugacgcc

SEQ ID NO: 477123 - RNA, 19 nt, Artificial Sequence
  Description of Artificial Sequence: Synthetic oligonucleotide
  Sense strand starting at position 1223 of SEQ ID NO: 317262
gguaauuuaugugcaacga

SEQ ID NO: 477124 - RNA, 19 nt, Artificial Sequence
  Description of Artificial Sequence: Synthetic oligonucleotide
  Antisense Strand to SEQ ID NO: 477123
ucguugcacauaaauuacc

SEQ ID NO: 477125 - RNA, 19 nt, Artificial Sequence
  Description of Artificial Sequence: Synthetic oligonucleotide
  Sense strand starting at position 1312 of SEQ ID NO: 317262
gguccuacggcguuaggua

SEQ ID NO: 477126 - RNA, 19 nt, Artificial Sequence
  Description of Artificial Sequence: Synthetic oligonucleotide
  Antisense Strand to SEQ ID NO: 477125
uaccuaacgccguaggacc

SEQ ID NO: 477127 - RNA, 19 nt, Artificial Sequence
  Description of Artificial Sequence: Synthetic oligonucleotide
  Sense strand starting at position 2439 of SEQ ID NO: 317262
uuaguuauuucugcccaug

SEQ ID NO: 477128 - RNA, 19 nt, Artificial Sequence
  Description of Artificial Sequence: Synthetic oligonucleotide
  Antisense Strand to SEQ ID NO: 477127
caugggcagaaauaacuaa

SEQ ID NO: 477129 - RNA, 19 nt, Artificial Sequence
  Description of Artificial Sequence: Synthetic oligonucleotide
  Sense strand starting at position 2716 of SEQ ID NO: 317262
auagcagaacccuguauua

SEQ ID NO: 477130 - RNA, 19 nt, Artificial Sequence
  Description of Artificial Sequence: Synthetic oligonucleotide
  Antisense Strand to SEQ ID NO: 477129
uaauacaggguucugcuau

SEQ ID NO: 477131 - RNA, 19 nt, Artificial Sequence
  Description of Artificial Sequence: Synthetic oligonucleotide
  Sense strand starting at position 2718 of SEQ ID NO: 317262
agcagaacccuguauuaca

SEQ ID NO: 477132 - RNA, 19 nt, Artificial Sequence
  Description of Artificial Sequence: Synthetic oligonucleotide
  Antisense Strand to SEQ ID NO: 477131
uguaauacaggguucugcu

SEQ ID NO: 477133 - RNA, 19 nt, Artificial Sequence
  Description of Artificial Sequence: Synthetic oligonucleotide
  Sense strand starting at position 2804 of SEQ ID NO: 317262
aaacuugugccagguaaag

SEQ ID NO: 477134 - RNA, 19 nt, Artificial Sequence
  Description of Artificial Sequence: Synthetic oligonucleotide
  Antisense Strand to SEQ ID NO: 477133
cuuuaccuggcacaaguuu

SEQ ID NO: 477135 - RNA, 19 nt, Artificial Sequence
  Description of Artificial Sequence: Synthetic oligonucleotide
  Sense strand starting at position 2813 of SEQ ID NO: 317262
ccagguaaagcaugcagaa

SEQ ID NO: 477136 - RNA, 19 nt, Artificial Sequence
  Description of Artificial Sequence: Synthetic oligonucleotide
  Antisense Strand to SEQ ID NO: 477135
uucugcaugcuuuaccugg

SEQ ID NO: 477137 - RNA, 19 nt, Artificial Sequence
  Description of Artificial Sequence: Synthetic oligonucleotide
  Sense strand starting at position 2815 of SEQ ID NO: 317262
agguaaagcaugcagaaau

SEQ ID NO: 477138 - RNA, 19 nt, Artificial Sequence
  Description of Artificial Sequence: Synthetic oligonucleotide
  Antisense Strand to SEQ ID NO: 477137
auuucugcaugcuuuaccu

SEQ ID NO: 477139 - RNA, 19 nt, Artificial Sequence
  Description of Artificial Sequence: Synthetic oligonucleotide
  Sense strand starting at position 2937 of SEQ ID NO: 317262
ucuauuuagugcuccuuau

SEQ ID NO: 477140 - RNA, 19 nt, Artificial Sequence
  Description of Artificial Sequence: Synthetic oligonucleotide
  Antisense Strand to SEQ ID NO: 477139
auaaggagcacuaaauaga

SEQ ID NO: 477141 - RNA, 19 nt, Artificial Sequence
  Description of Artificial Sequence: Synthetic oligonucleotide
  Sense strand starting at position 2976 of SEQ ID NO: 317262
ugaucugccugugcuauuu

SEQ ID NO: 477142 - RNA, 19 nt, Artificial Sequence
  Description of Artificial Sequence: Synthetic oligonucleotide
  Antisense Strand to SEQ ID NO: 477141
aaauagcacaggcagauca

SEQ ID NO: 477143 - RNA, 19 nt, Artificial Sequence
  Description of Artificial Sequence: Synthetic oligonucleotide
  Sense strand starting at position 3008 of SEQ ID NO: 317262
acgauaauccuaugcagau

SEQ ID NO: 477144 - RNA, 19 nt, Artificial Sequence
  Description of Artificial Sequence: Synthetic oligonucleotide
  Antisense Strand to SEQ ID NO: 477143
aucugcauaggauuaucgu

SEQ ID NO: 477145 - RNA, 19 nt, Artificial Sequence
  Description of Artificial Sequence: Synthetic oligonucleotide
  Sense strand starting at position 3009 of SEQ ID NO: 317262
cgauaauccuaugcagauu

SEQ ID NO: 477146 - RNA, 19 nt, Artificial Sequence
  Description of Artificial Sequence: Synthetic oligonucleotide
  Antisense Strand to SEQ ID NO: 477145
aaucugcauaggauuaucg

SEQ ID NO: 477147 - RNA, 19 nt, Artificial Sequence
  Description of Artificial Sequence: Synthetic oligonucleotide
  Sense strand starting at position 3049 of SEQ ID NO: 317262
cacagacacuugucuggaa

SEQ ID NO: 477148 - RNA, 19 nt, Artificial Sequence
  Description of Artificial Sequence: Synthetic oligonucleotide
  Antisense Strand to SEQ ID NO: 477147
uuccagacaagugucugug

SEQ ID NO: 477149 - RNA, 19 nt, Artificial Sequence
  Description of Artificial Sequence: Synthetic oligonucleotide
  Sense strand starting at position 3051 of SEQ ID NO: 317262
cagacacuugucuggaaga

SEQ ID NO: 477150 - RNA, 19 nt, Artificial Sequence
  Description of Artificial Sequence: Synthetic oligonucleotide
  Antisense Strand to SEQ ID NO: 477149
ucuuccagacaagugucug

SEQ ID NO: 477151 - RNA, 19 nt, Artificial Sequence
  Description of Artificial Sequence: Synthetic oligonucleotide
  Sense strand starting at position 3053 of SEQ ID NO: 317262
gacacuugucuggaagagu

SEQ ID NO: 477152 - RNA, 19 nt, Artificial Sequence
  Description of Artificial Sequence: Synthetic oligonucleotide
  Antisense Strand to SEQ ID NO: 477151
acucuuccagacaaguguc

SEQ ID NO: 477153 - RNA, 19 nt, Artificial Sequence
  Description of Artificial Sequence: Synthetic oligonucleotide
  Sense strand starting at position 3134 of SEQ ID NO: 317262
gacaaaggcuuguugggaa

SEQ ID NO: 477154 - RNA, 19 nt, Artificial Sequence
  Description of Artificial Sequence: Synthetic oligonucleotide
  Antisense Strand to SEQ ID NO: 477153
uucccaacaagccuuuguc

SEQ ID NO: 477155 - RNA, 19 nt, Artificial Sequence
  Description of Artificial Sequence: Synthetic oligonucleotide
  Sense strand starting at position 3155 of SEQ ID NO: 317262
aaguguuucccuuagaguu

SEQ ID NO: 477156 - RNA, 19 nt, Artificial Sequence
  Description of Artificial Sequence: Synthetic oligonucleotide
  Antisense Strand to SEQ ID NO: 477155
aacucuaagggaaacacuu

SEQ ID NO: 477157 - RNA, 19 nt, Artificial Sequence
  Description of Artificial Sequence: Synthetic oligonucleotide
  Sense strand starting at position 3225 of SEQ ID NO: 317262
ccucacugacggcagaaau

SEQ ID NO: 477158 - RNA, 19 nt, Artificial Sequence
  Description of Artificial Sequence: Synthetic oligonucleotide
  Antisense Strand to SEQ ID NO: 477157
auuucugccgucagugagg

SEQ ID NO: 477159 - RNA, 19 nt, Artificial Sequence
  Description of Artificial Sequence: Synthetic oligonucleotide
  Sense strand starting at position 3595 of SEQ ID NO: 317262
gccacucaucuguauauau

SEQ ID NO: 477160 - RNA, 19 nt, Artificial Sequence
  Description of Artificial Sequence: Synthetic oligonucleotide
  Antisense Strand to SEQ ID NO: 477159
auauauacagaugaguggc

SEQ ID NO: 477161 - RNA, 19 nt, Artificial Sequence
  Description of Artificial Sequence: Synthetic oligonucleotide
  Sense strand starting at position 3641 of SEQ ID NO: 317262
cucagaguggcaugaucau

SEQ ID NO: 477162 - RNA, 19 nt, Artificial Sequence
  Description of Artificial Sequence: Synthetic oligonucleotide
  Antisense Strand to SEQ ID NO: 477161
augaucaugccacucugag

SEQ ID NO: 477163 - RNA, 19 nt, Artificial Sequence
  Description of Artificial Sequence: Synthetic oligonucleotide
  Sense strand starting at position 3978 of SEQ ID NO: 317262
aggcuucugugaccaacua

SEQ ID NO: 477164 - RNA, 19 nt, Artificial Sequence
  Description of Artificial Sequence: Synthetic oligonucleotide
  Antisense Strand to SEQ ID NO: 477163
uaguuggucacagaagccu

SEQ ID NO: 477165 - RNA, 19 nt, Artificial Sequence
  Description of Artificial Sequence: Synthetic oligonucleotide
  Sense strand starting at position 3979 of SEQ ID NO: 317262
ggcuucugugaccaacuaa

SEQ ID NO: 477166 - RNA, 19 nt, Artificial Sequence
  Description of Artificial Sequence: Synthetic oligonucleotide
  Antisense Strand to SEQ ID NO: 477165
uuaguuggucacagaagcc

SEQ ID NO: 477167 - RNA, 19 nt, Artificial Sequence
  Description of Artificial Sequence: Synthetic oligonucleotide
  Sense strand starting at position 80 of SEQ ID NO: 317263
aggucuuacuuuccacauu

SEQ ID NO: 477168 - RNA, 19 nt, Artificial Sequence
  Description of Artificial Sequence: Synthetic oligonucleotide
  Antisense Strand to SEQ ID NO: 477167
aauguggaaaguaagaccu

SEQ ID NO: 477169 - RNA, 19 nt, Artificial Sequence
  Description of Artificial Sequence: Synthetic oligonucleotide
  Sense strand starting at position 114 of SEQ ID NO: 317263
gucaaugcucuguacucaa

SEQ ID NO: 477170 - RNA, 19 nt, Artificial Sequence
  Description of Artificial Sequence: Synthetic oligonucleotide
  Antisense Strand to SEQ ID NO: 477169
uugaguacagagcauugac

SEQ ID NO: 477171 - RNA, 19 nt, Artificial Sequence
  Description of Artificial Sequence: Synthetic oligonucleotide
  Sense strand starting at position 210 of SEQ ID NO: 317263
gcaaacucaguuuaagcua

SEQ ID NO: 477172 - RNA, 19 nt, Artificial Sequence
  Description of Artificial Sequence: Synthetic oligonucleotide
  Antisense Strand to SEQ ID NO: 477171
uagcuuaaacugaguuugc

SEQ ID NO: 477173 - RNA, 19 nt, Artificial Sequence
  Description of Artificial Sequence: Synthetic oligonucleotide
  Sense strand starting at position 261 of SEQ ID NO: 317263
uugguaaugguaggaugaa

SEQ ID NO: 477174 - RNA, 19 nt, Artificial Sequence
  Description of Artificial Sequence: Synthetic oligonucleotide
  Antisense Strand to SEQ ID NO: 477173
uucauccuaccauuaccaa

SEQ ID NO: 477175 - RNA, 19 nt, Artificial Sequence
  Description of Artificial Sequence: Synthetic oligonucleotide
  Sense strand starting at position 427 of SEQ ID NO: 317263
accuuaagcacuggugaga

SEQ ID NO: 477176 - RNA, 19 nt, Artificial Sequence
  Description of Artificial Sequence: Synthetic oligonucleotide
  Antisense Strand to SEQ ID NO: 477175
ucucaccagugcuuaaggu

SEQ ID NO: 477177 - RNA, 19 nt, Artificial Sequence
  Description of Artificial Sequence: Synthetic oligonucleotide
  Sense strand starting at position 480 of SEQ ID NO: 317263
ggcauucuccagcuguguu

SEQ ID NO: 477178 - RNA, 19 nt, Artificial Sequence
  Description of Artificial Sequence: Synthetic oligonucleotide
  Antisense Strand to SEQ ID NO: 477177
aacacagcuggagaaugcc

SEQ ID NO: 477179 - RNA, 19 nt, Artificial Sequence
  Description of Artificial Sequence: Synthetic oligonucleotide
  Sense strand starting at position 617 of SEQ ID NO: 317263
aggagaauguuaucucuuc

SEQ ID NO: 477180 - RNA, 19 nt, Artificial Sequence
  Description of Artificial Sequence: Synthetic oligonucleotide
  Antisense Strand to SEQ ID NO: 477179
gaagagauaacauucuccu

SEQ ID NO: 477181 - RNA, 19 nt, Artificial Sequence
  Description of Artificial Sequence: Synthetic oligonucleotide
  Sense strand starting at position 618 of SEQ ID NO: 317263
ggagaauguuaucucuucu

SEQ ID NO: 477182 - RNA, 19 nt, Artificial Sequence
  Description of Artificial Sequence: Synthetic oligonucleotide
  Antisense Strand to SEQ ID NO: 477181
agaagagauaacauucucc

SEQ ID NO: 477183 - RNA, 19 nt, Artificial Sequence
  Description of Artificial Sequence: Synthetic oligonucleotide
  Sense strand starting at position 767 of SEQ ID NO: 317263
agaagcugucugcaagcaa

SEQ ID NO: 477184 - RNA, 19 nt, Artificial Sequence
  Description of Artificial Sequence: Synthetic oligonucleotide
  Antisense Strand to SEQ ID NO: 477183
uugcuugcagacagcuucu

SEQ ID NO: 477185 - RNA, 19 nt, Artificial Sequence
  Description of Artificial Sequence: Synthetic oligonucleotide
  Sense strand starting at position 1048 of SEQ ID NO: 317263
aacuuauguccaggugaac

SEQ ID NO: 477186 - RNA, 19 nt, Artificial Sequence
  Description of Artificial Sequence: Synthetic oligonucleotide
  Antisense Strand to SEQ ID NO: 477185
guucaccuggacauaaguu

SEQ ID NO: 477187 - RNA, 19 nt, Artificial Sequence
  Description of Artificial Sequence: Synthetic oligonucleotide
  Sense strand starting at position 1298 of SEQ ID NO: 317263
ggaaauguucuggagcaug

SEQ ID NO: 477188 - RNA, 19 nt, Artificial Sequence
  Description of Artificial Sequence: Synthetic oligonucleotide
  Antisense Strand to SEQ ID NO: 477187
caugcuccagaacauuucc

SEQ ID NO: 477189 - RNA, 19 nt, Artificial Sequence
  Description of Artificial Sequence: Synthetic oligonucleotide
  Sense strand starting at position 1417 of SEQ ID NO: 317263
cguagaacaccagagcauu

SEQ ID NO: 477190 - RNA, 19 nt, Artificial Sequence
  Description of Artificial Sequence: Synthetic oligonucleotide
  Antisense Strand to SEQ ID NO: 477189
aaugcucugguguucuacg

SEQ ID NO: 477191 - RNA, 19 nt, Artificial Sequence
  Description of Artificial Sequence: Synthetic oligonucleotide
  Sense strand starting at position 1423 of SEQ ID NO: 317263
acaccagagcauugccaaa

SEQ ID NO: 477192 - RNA, 19 nt, Artificial Sequence
  Description of Artificial Sequence: Synthetic oligonucleotide
  Antisense Strand to SEQ ID NO: 477191
uuuggcaaugcucuggugu

SEQ ID NO: 477193 - RNA, 19 nt, Artificial Sequence
  Description of Artificial Sequence: Synthetic oligonucleotide
  Sense strand starting at position 1848 of SEQ ID NO: 317263
acucgaucucagugaccaa

SEQ ID NO: 477194 - RNA, 19 nt, Artificial Sequence
  Description of Artificial Sequence: Synthetic oligonucleotide
  Antisense Strand to SEQ ID NO: 477193
uuggucacugagaucgagu

SEQ ID NO: 477195 - RNA, 19 nt, Artificial Sequence
  Description of Artificial Sequence: Synthetic oligonucleotide
  Sense strand starting at position 2112 of SEQ ID NO: 317263
ggaagacuucccuggcuca

SEQ ID NO: 477196 - RNA, 19 nt, Artificial Sequence
  Description of Artificial Sequence: Synthetic oligonucleotide
  Antisense Strand to SEQ ID NO: 477195
ugagccagggaagucuucc

SEQ ID NO: 477197 - RNA, 19 nt, Artificial Sequence
  Description of Artificial Sequence: Synthetic oligonucleotide
  Sense strand starting at position 2188 of SEQ ID NO: 317263
guaugugaaacuggguauu

SEQ ID NO: 477198 - RNA, 19 nt, Artificial Sequence
  Description of Artificial Sequence: Synthetic oligonucleotide
  Antisense Strand to SEQ ID NO: 477197
aauacccaguuucacauac

SEQ ID NO: 477199 - RNA, 19 nt, Artificial Sequence
  Description of Artificial Sequence: Synthetic oligonucleotide
  Sense strand starting at position 2227 of SEQ ID NO: 317263
guuucuccucuugcguaau

SEQ ID NO: 477200 - RNA, 19 nt, Artificial Sequence
  Description of Artificial Sequence: Synthetic oligonucleotide
  Antisense Strand to SEQ ID NO: 477199
auuacgcaagaggagaaac

SEQ ID NO: 477201 - RNA, 19 nt, Artificial Sequence
  Description of Artificial Sequence: Synthetic oligonucleotide
  Sense strand starting at position 2490 of SEQ ID NO: 317263
ucccguaaccgucaggaua

SEQ ID NO: 477202 - RNA, 19 nt, Artificial Sequence
  Description of Artificial Sequence: Synthetic oligonucleotide
  Antisense Strand to SEQ ID NO: 477201
uauccugacgguuacggga

SEQ ID NO: 477203 - RNA, 19 nt, Artificial Sequence
  Description of Artificial Sequence: Synthetic oligonucleotide
  Sense strand starting at position 2621 of SEQ ID NO: 317263
uugucagaacauuacguaa

SEQ ID NO: 477204 - RNA, 19 nt, Artificial Sequence
  Description of Artificial Sequence: Synthetic oligonucleotide
  Antisense Strand to SEQ ID NO: 477203
uuacguaauguucugacaa

SEQ ID NO: 477205 - RNA, 19 nt, Artificial Sequence
  Description of Artificial Sequence: Synthetic oligonucleotide
  Sense strand starting at position 2992 of SEQ ID NO: 317263
ccaucaaugcaugagaagu

SEQ ID NO: 477206 - RNA, 19 nt, Artificial Sequence
  Description of Artificial Sequence: Synthetic oligonucleotide
  Antisense Strand to SEQ ID NO: 477205
acuucucaugcauugaugg

SEQ ID NO: 477207 - RNA, 19 nt, Artificial Sequence
  Description of Artificial Sequence: Synthetic oligonucleotide
  Sense strand starting at position 3163 of SEQ ID NO: 317263
cuugaaucuucuuugguga

SEQ ID NO: 477208 - RNA, 19 nt, Artificial Sequence
  Description of Artificial Sequence: Synthetic oligonucleotide
  Antisense Strand to SEQ ID NO: 477207
ucaccaaagaagauucaag

SEQ ID NO: 477209 - RNA, 19 nt, Artificial Sequence
  Description of Artificial Sequence: Synthetic oligonucleotide
  Sense strand starting at position 3164 of SEQ ID NO: 317263
uugaaucuucuuuggugaa

SEQ ID NO: 477210 - RNA, 19 nt, Artificial Sequence
  Description of Artificial Sequence: Synthetic oligonucleotide
  Antisense Strand to SEQ ID NO: 477209
uucaccaaagaagauucaa

SEQ ID NO: 477211 - RNA, 19 nt, Artificial Sequence
  Description of Artificial Sequence: Synthetic oligonucleotide
  Sense strand starting at position 3166 of SEQ ID NO: 317263
gaaucuucuuuggugaaau

SEQ ID NO: 477212 - RNA, 19 nt, Artificial Sequence
  Description of Artificial Sequence: Synthetic oligonucleotide
  Antisense Strand to SEQ ID NO: 477211
auuucaccaaagaagauuc

SEQ ID NO: 477213 - RNA, 19 nt, Artificial Sequence
  Description of Artificial Sequence: Synthetic oligonucleotide
  Sense strand starting at position 3179 of SEQ ID NO: 317263
ugaaaugucuuuccaugug

SEQ ID NO: 477214 - RNA, 19 nt, Artificial Sequence
  Description of Artificial Sequence: Synthetic oligonucleotide
  Antisense Strand to SEQ ID NO: 477213
cacauggaaagacauuuca

SEQ ID NO: 477215 - RNA, 19 nt, Artificial Sequence
  Description of Artificial Sequence: Synthetic oligonucleotide
  Sense strand starting at position 3212 of SEQ ID NO: 317263
aauugcaugguuuaguuua

SEQ ID NO: 477216 - RNA, 19 nt, Artificial Sequence
  Description of Artificial Sequence: Synthetic oligonucleotide
  Antisense Strand to SEQ ID NO: 477215
uaaacuaaaccaugcaauu

SEQ ID NO: 477217 - RNA, 19 nt, Artificial Sequence
  Description of Artificial Sequence: Synthetic oligonucleotide
  Sense strand starting at position 3260 of SEQ ID NO: 317263
acauacaaguccuuuguua

SEQ ID NO: 477218 - RNA, 19 nt, Artificial Sequence
  Description of Artificial Sequence: Synthetic oligonucleotide
  Antisense Strand to SEQ ID NO: 477217
uaacaaaggacuuguaugu

SEQ ID NO: 477219 - RNA, 19 nt, Artificial Sequence
  Description of Artificial Sequence: Synthetic oligonucleotide
  Sense strand starting at position 3307 of SEQ ID NO: 317263
gucuguagcuuguuauuua

SEQ ID NO: 477220 - RNA, 19 nt, Artificial Sequence
  Description of Artificial Sequence: Synthetic oligonucleotide
  Antisense Strand to SEQ ID NO: 477219
uaaauaacaagcuacagac

SEQ ID NO: 477221 - RNA, 19 nt, Artificial Sequence
  Description of Artificial Sequence: Synthetic oligonucleotide
  Sense strand starting at position 3311 of SEQ ID NO: 317263
guagcuuguuauuuaucuu

SEQ ID NO: 477222 - RNA, 19 nt, Artificial Sequence
  Description of Artificial Sequence: Synthetic oligonucleotide
  Antisense Strand to SEQ ID NO: 477221
aagauaaauaacaagcuac

SEQ ID NO: 477223 - RNA, 19 nt, Artificial Sequence
  Description of Artificial Sequence: Synthetic oligonucleotide
  Sense strand starting at position 3314 of SEQ ID NO: 317263
gcuuguuauuuaucuucuu

SEQ ID NO: 477224 - RNA, 19 nt, Artificial Sequence
  Description of Artificial Sequence: Synthetic oligonucleotide
  Antisense Strand to SEQ ID NO: 477223
aagaagauaaauaacaagc

SEQ ID NO: 477225 - RNA, 19 nt, Artificial Sequence
  Description of Artificial Sequence: Synthetic oligonucleotide
  Sense strand starting at position 3507 of SEQ ID NO: 317263
cucuauucuguugaauuga

SEQ ID NO: 477226 - RNA, 19 nt, Artificial Sequence
  Description of Artificial Sequence: Synthetic oligonucleotide
  Antisense Strand to SEQ ID NO: 477225
ucaauucaacagaauagag

SEQ ID NO: 477227 - RNA, 19 nt, Artificial Sequence
  Description of Artificial Sequence: Synthetic oligonucleotide
  Sense strand starting at position 3516 of SEQ ID NO: 317263
guugaauugaucuaugugu

SEQ ID NO: 477228 - RNA, 19 nt, Artificial Sequence
  Description of Artificial Sequence: Synthetic oligonucleotide
  Antisense Strand to SEQ ID NO: 477227
acacauagaucaauucaac

SEQ ID NO: 477229 - RNA, 19 nt, Artificial Sequence
  Description of Artificial Sequence: Synthetic oligonucleotide
  Sense strand starting at position 3518 of SEQ ID NO: 317263
ugaauugaucuaugugucu

SEQ ID NO: 477230 - RNA, 19 nt, Artificial Sequence
  Description of Artificial Sequence: Synthetic oligonucleotide
  Antisense Strand to SEQ ID NO: 477229
agacacauagaucaauuca

SEQ ID NO: 477231 - RNA, 19 nt, Artificial Sequence
  Description of Artificial Sequence: Synthetic oligonucleotide
  Sense strand starting at position 3670 of SEQ ID NO: 317263
acaaucaacuugucuaugu

SEQ ID NO: 477232 - RNA, 19 nt, Artificial Sequence
  Description of Artificial Sequence: Synthetic oligonucleotide
  Antisense Strand to SEQ ID NO: 477231
acauagacaaguugauugu

SEQ ID NO: 477233 - RNA, 19 nt, Artificial Sequence
  Description of Artificial Sequence: Synthetic oligonucleotide
  Sense strand starting at position 3753 of SEQ ID NO: 317263
ccaugagaagaaugucuuu

SEQ ID NO: 477234 - RNA, 19 nt, Artificial Sequence
  Description of Artificial Sequence: Synthetic oligonucleotide
  Antisense Strand to SEQ ID NO: 477233
aaagacauucuucucaugg

SEQ ID NO: 477235 - RNA, 19 nt, Artificial Sequence
  Description of Artificial Sequence: Synthetic oligonucleotide
  Sense strand starting at position 3756 of SEQ ID NO: 317263
ugagaagaaugucuuucca

SEQ ID NO: 477236 - RNA, 19 nt, Artificial Sequence
  Description of Artificial Sequence: Synthetic oligonucleotide
  Antisense Strand to SEQ ID NO: 477235
uggaaagacauucuucuca

SEQ ID NO: 477237 - RNA, 19 nt, Artificial Sequence
  Description of Artificial Sequence: Synthetic oligonucleotide
  Sense strand starting at position 3758 of SEQ ID NO: 317263
agaagaaugucuuuccaua

SEQ ID NO: 477238 - RNA, 19 nt, Artificial Sequence
  Description of Artificial Sequence: Synthetic oligonucleotide
  Antisense Strand to SEQ ID NO: 477237
uauggaaagacauucuucu

SEQ ID NO: 477239 - RNA, 19 nt, Artificial Sequence
  Description of Artificial Sequence: Synthetic oligonucleotide
  Sense strand starting at position 3823 of SEQ ID NO: 317263
auguaaguccuguacauau

SEQ ID NO: 477240 - RNA, 19 nt, Artificial Sequence
  Description of Artificial Sequence: Synthetic oligonucleotide
  Antisense Strand to SEQ ID NO: 477239
auauguacaggacuuacau

SEQ ID NO: 477241 - RNA, 19 nt, Artificial Sequence
  Description of Artificial Sequence: Synthetic oligonucleotide
  Sense strand starting at position 3928 of SEQ ID NO: 317263
ucauuacuaguaugcagaa

SEQ ID NO: 477242 - RNA, 19 nt, Artificial Sequence
  Description of Artificial Sequence: Synthetic oligonucleotide
  Antisense Strand to SEQ ID NO: 477241
uucugcauacuaguaauga

SEQ ID NO: 477243 - RNA, 19 nt, Artificial Sequence
  Description of Artificial Sequence: Synthetic oligonucleotide
  Sense strand starting at position 3950 of SEQ ID NO: 317263
caauuuauuucguauguug

SEQ ID NO: 477244 - RNA, 19 nt, Artificial Sequence
  Description of Artificial Sequence: Synthetic oligonucleotide
  Antisense Strand to SEQ ID NO: 477243
caacauacgaaauaaauug

SEQ ID NO: 477245 - RNA, 19 nt, Artificial Sequence
  Description of Artificial Sequence: Synthetic oligonucleotide
  Sense strand starting at position 3977 of SEQ ID NO: 317263
uccuccaauguugaugaau

SEQ ID NO: 477246 - RNA, 19 nt, Artificial Sequence
  Description of Artificial Sequence: Synthetic oligonucleotide
  Antisense Strand to SEQ ID NO: 477245
auucaucaacauuggagga

SEQ ID NO: 477247 - RNA, 19 nt, Artificial Sequence
  Description of Artificial Sequence: Synthetic oligonucleotide
  Sense strand starting at position 71 of SEQ ID NO: 317264
augaguugucauuaucauu

SEQ ID NO: 477248 - RNA, 19 nt, Artificial Sequence
  Description of Artificial Sequence: Synthetic oligonucleotide
  Antisense Strand to SEQ ID NO: 477247
aaugauaaugacaacucau

SEQ ID NO: 477249 - RNA, 19 nt, Artificial Sequence
  Description of Artificial Sequence: Synthetic oligonucleotide
  Sense strand starting at position 212 of SEQ ID NO: 317264
auugaauaaagguguuaga

SEQ ID NO: 477250 - RNA, 19 nt, Artificial Sequence
  Description of Artificial Sequence: Synthetic oligonucleotide
  Antisense Strand to SEQ ID NO: 477249
ucuaacaccuuuauucaau

SEQ ID NO: 477251 - RNA, 19 nt, Artificial Sequence
  Description of Artificial Sequence: Synthetic oligonucleotide
  Sense strand starting at position 348 of SEQ ID NO: 317264
guaaucagagcauauuguu

SEQ ID NO: 477252 - RNA, 19 nt, Artificial Sequence
  Description of Artificial Sequence: Synthetic oligonucleotide
  Antisense Strand to SEQ ID NO: 477251
aacaauaugcucugauuac

SEQ ID NO: 477253 - RNA, 19 nt, Artificial Sequence
  Description of Artificial Sequence: Synthetic oligonucleotide
  Sense strand starting at position 522 of SEQ ID NO: 317264
gccaacugucagggaggau

SEQ ID NO: 477254 - RNA, 19 nt, Artificial Sequence
  Description of Artificial Sequence: Synthetic oligonucleotide
  Antisense Strand to SEQ ID NO: 477253
auccucccugacaguuggc

SEQ ID NO: 477255 - RNA, 19 nt, Artificial Sequence
  Description of Artificial Sequence: Synthetic oligonucleotide
  Sense strand starting at position 632 of SEQ ID NO: 317264
guuucuuuagacuaugguu

SEQ ID NO: 477256 - RNA, 19 nt, Artificial Sequence
  Description of Artificial Sequence: Synthetic oligonucleotide
  Antisense Strand to SEQ ID NO: 477255
aaccauagucuaaagaaac

SEQ ID NO: 477257 - RNA, 19 nt, Artificial Sequence
  Description of Artificial Sequence: Synthetic oligonucleotide
  Sense strand starting at position 637 of SEQ ID NO: 317264
uuuagacuaugguugggau

SEQ ID NO: 477258 - RNA, 19 nt, Artificial Sequence
  Description of Artificial Sequence: Synthetic oligonucleotide
  Antisense Strand to SEQ ID NO: 477257
aucccaaccauagucuaaa

SEQ ID NO: 477259 - RNA, 19 nt, Artificial Sequence
  Description of Artificial Sequence: Synthetic oligonucleotide
  Sense strand starting at position 638 of SEQ ID NO: 317264
uuagacuaugguugggaua

SEQ ID NO: 477260 - RNA, 19 nt, Artificial Sequence
  Description of Artificial Sequence: Synthetic oligonucleotide
  Antisense Strand to SEQ ID NO: 477259
uaucccaaccauagucuaa

SEQ ID NO: 477261 - RNA, 19 nt, Artificial Sequence
  Description of Artificial Sequence: Synthetic oligonucleotide
  Sense strand starting at position 674 of SEQ ID NO: 317264
ggugauaaacuuuagcaau

SEQ ID NO: 477262 - RNA, 19 nt, Artificial Sequence
  Description of Artificial Sequence: Synthetic oligonucleotide
  Antisense Strand to SEQ ID NO: 477261
auugcuaaaguuuaucacc

SEQ ID NO: 477263 - RNA, 19 nt, Artificial Sequence
  Description of Artificial Sequence: Synthetic oligonucleotide
  Sense strand starting at position 688 of SEQ ID NO: 317264
gcaauauucccagaaagug

SEQ ID NO: 477264 - RNA, 19 nt, Artificial Sequence
  Description of Artificial Sequence: Synthetic oligonucleotide
  Antisense Strand to SEQ ID NO: 477263
cacuuucugggaauauugc

SEQ ID NO: 477265 - RNA, 19 nt, Artificial Sequence
  Description of Artificial Sequence: Synthetic oligonucleotide
  Sense strand starting at position 703 of SEQ ID NO: 317264
aguguuggcgccuuugaca

SEQ ID NO: 477266 - RNA, 19 nt, Artificial Sequence
  Description of Artificial Sequence: Synthetic oligonucleotide
  Antisense Strand to SEQ ID NO: 477265
ugucaaaggcgccaacacu

SEQ ID NO: 477267 - RNA, 19 nt, Artificial Sequence
  Description of Artificial Sequence: Synthetic oligonucleotide
  Sense strand starting at position 848 of SEQ ID NO: 317264
ucaggaguuccacagccuu

SEQ ID NO: 477268 - RNA, 19 nt, Artificial Sequence
  Description of Artificial Sequence: Synthetic oligonucleotide
  Antisense Strand to SEQ ID NO: 477267
aaggcuguggaacuccuga

SEQ ID NO: 477269 - RNA, 19 nt, Artificial Sequence
  Description of Artificial Sequence: Synthetic oligonucleotide
  Sense strand starting at position 1058 of SEQ ID NO: 317264
aggugaugaacagguauga

SEQ ID NO: 477270 - RNA, 19 nt, Artificial Sequence
  Description of Artificial Sequence: Synthetic oligonucleotide
  Antisense Strand to SEQ ID NO: 477269
ucauaccuguucaucaccu

SEQ ID NO: 477271 - RNA, 19 nt, Artificial Sequence
  Description of Artificial Sequence: Synthetic oligonucleotide
  Sense strand starting at position 1108 of SEQ ID NO: 317264
gacacugugcucuaaaggu

SEQ ID NO: 477272 - RNA, 19 nt, Artificial Sequence
  Description of Artificial Sequence: Synthetic oligonucleotide
  Antisense Strand to SEQ ID NO: 477271
accuuuagagcacaguguc

SEQ ID NO: 477273 - RNA, 19 nt, Artificial Sequence
  Description of Artificial Sequence: Synthetic oligonucleotide
  Sense strand starting at position 1210 of SEQ ID NO: 317264
agcuuaaacugauuagcaa

SEQ ID NO: 477274 - RNA, 19 nt, Artificial Sequence
  Description of Artificial Sequence: Synthetic oligonucleotide
  Antisense Strand to SEQ ID NO: 477273
uugcuaaucaguuuaagcu

SEQ ID NO: 477275 - RNA, 19 nt, Artificial Sequence
  Description of Artificial Sequence: Synthetic oligonucleotide
  Sense strand starting at position 1211 of SEQ ID NO: 317264
gcuuaaacugauuagcaau

SEQ ID NO: 477276 - RNA, 19 nt, Artificial Sequence
  Description of Artificial Sequence: Synthetic oligonucleotide
  Antisense Strand to SEQ ID NO: 477275
auugcuaaucaguuuaagc

SEQ ID NO: 477277 - RNA, 19 nt, Artificial Sequence
  Description of Artificial Sequence: Synthetic oligonucleotide
  Sense strand starting at position 1367 of SEQ ID NO: 317264
guaagugugacccagacua

SEQ ID NO: 477278 - RNA, 19 nt, Artificial Sequence
  Description of Artificial Sequence: Synthetic oligonucleotide
  Antisense Strand to SEQ ID NO: 477277
uagucugggucacacuuac

SEQ ID NO: 477279 - RNA, 19 nt, Artificial Sequence
  Description of Artificial Sequence: Synthetic oligonucleotide
  Sense strand starting at position 1490 of SEQ ID NO: 317264
gaguuaggaagugacucuu

SEQ ID NO: 477280 - RNA, 19 nt, Artificial Sequence
  Description of Artificial Sequence: Synthetic oligonucleotide
  Antisense Strand to SEQ ID NO: 477279
aagagucacuuccuaacuc

SEQ ID NO: 477281 - RNA, 19 nt, Artificial Sequence
  Description of Artificial Sequence: Synthetic oligonucleotide
  Sense strand starting at position 1916 of SEQ ID NO: 317264
ggagguauucgaggagaau

SEQ ID NO: 477282 - RNA, 19 nt, Artificial Sequence
  Description of Artificial Sequence: Synthetic oligonucleotide
  Antisense Strand to SEQ ID NO: 477281
auucuccucgaauaccucc

SEQ ID NO: 477283 - RNA, 19 nt, Artificial Sequence
  Description of Artificial Sequence: Synthetic oligonucleotide
  Sense strand starting at position 1927 of SEQ ID NO: 317264
aggagaaucacucggcaag

SEQ ID NO: 477284 - RNA, 19 nt, Artificial Sequence
  Description of Artificial Sequence: Synthetic oligonucleotide
  Antisense Strand to SEQ ID NO: 477283
cuugccgagugauucuccu

SEQ ID NO: 477285 - RNA, 19 nt, Artificial Sequence
  Description of Artificial Sequence: Synthetic oligonucleotide
  Sense strand starting at position 2498 of SEQ ID NO: 317264
ucaguagcggccgugaaua

SEQ ID NO: 477286 - RNA, 19 nt, Artificial Sequence
  Description of Artificial Sequence: Synthetic oligonucleotide
  Antisense Strand to SEQ ID NO: 477285
uauucacggccgcuacuga

SEQ ID NO: 477287 - RNA, 19 nt, Artificial Sequence
  Description of Artificial Sequence: Synthetic oligonucleotide
  Sense strand starting at position 2767 of SEQ ID NO: 317264
uaccguuuccuggaggaua

SEQ ID NO: 477288 - RNA, 19 nt, Artificial Sequence
  Description of Artificial Sequence: Synthetic oligonucleotide
  Antisense Strand to SEQ ID NO: 477287
uauccuccaggaaacggua

SEQ ID NO: 477289 - RNA, 19 nt, Artificial Sequence
  Description of Artificial Sequence: Synthetic oligonucleotide
  Sense strand starting at position 2867 of SEQ ID NO: 317264
ugcaguagugauaggugua

SEQ ID NO: 477290 - RNA, 19 nt, Artificial Sequence
  Description of Artificial Sequence: Synthetic oligonucleotide
  Antisense Strand to SEQ ID NO: 477289
uacaccuaucacuacugca

SEQ ID NO: 477291 - RNA, 19 nt, Artificial Sequence
  Description of Artificial Sequence: Synthetic oligonucleotide
  Sense strand starting at position 2872 of SEQ ID NO: 317264
uagugauagguguaaccca

SEQ ID NO: 477292 - RNA, 19 nt, Artificial Sequence
  Description of Artificial Sequence: Synthetic oligonucleotide
  Antisense Strand to SEQ ID NO: 477291
uggguuacaccuaucacua

SEQ ID NO: 477293 - RNA, 19 nt, Artificial Sequence
  Description of Artificial Sequence: Synthetic oligonucleotide
  Sense strand starting at position 2911 of SEQ ID NO: 317264
aggucacaguaauucuuua

SEQ ID NO: 477294 - RNA, 19 nt, Artificial Sequence
  Description of Artificial Sequence: Synthetic oligonucleotide
  Antisense Strand to SEQ ID NO: 477293
uaaagaauuacugugaccu

SEQ ID NO: 477295 - RNA, 19 nt, Artificial Sequence
  Description of Artificial Sequence: Synthetic oligonucleotide
  Sense strand starting at position 3000 of SEQ ID NO: 317264
uuagguaaacggcauaaau

SEQ ID NO: 477296 - RNA, 19 nt, Artificial Sequence
  Description of Artificial Sequence: Synthetic oligonucleotide
  Antisense Strand to SEQ ID NO: 477295
auuuaugccguuuaccuaa

SEQ ID NO: 477297 - RNA, 19 nt, Artificial Sequence
  Description of Artificial Sequence: Synthetic oligonucleotide
  Sense strand starting at position 3267 of SEQ ID NO: 317264
gaggcaucacuggaguuua

SEQ ID NO: 477298 - RNA, 19 nt, Artificial Sequence
  Description of Artificial Sequence: Synthetic oligonucleotide
  Antisense Strand to SEQ ID NO: 477297
uaaacuccagugaugccuc

SEQ ID NO: 477299 - RNA, 19 nt, Artificial Sequence
  Description of Artificial Sequence: Synthetic oligonucleotide
  Sense strand starting at position 3275 of SEQ ID NO: 317264
acuggaguuuaaucucaug

SEQ ID NO: 477300 - RNA, 19 nt, Artificial Sequence
  Description of Artificial Sequence: Synthetic oligonucleotide
  Antisense Strand to SEQ ID NO: 477299
caugagauuaaacuccagu

SEQ ID NO: 477301 - RNA, 19 nt, Artificial Sequence
  Description of Artificial Sequence: Synthetic oligonucleotide
  Sense strand starting at position 3286 of SEQ ID NO: 317264
aucucauguuuacuagaua

SEQ ID NO: 477302 - RNA, 19 nt, Artificial Sequence
  Description of Artificial Sequence: Synthetic oligonucleotide
  Antisense Strand to SEQ ID NO: 477301
uaucuaguaaacaugagau

SEQ ID NO: 477303 - RNA, 19 nt, Artificial Sequence
  Description of Artificial Sequence: Synthetic oligonucleotide
  Sense strand starting at position 3289 of SEQ ID NO: 317264
ucauguuuacuagauaugu

SEQ ID NO: 477304 - RNA, 19 nt, Artificial Sequence
  Description of Artificial Sequence: Synthetic oligonucleotide
  Antisense Strand to SEQ ID NO: 477303
acauaucuaguaaacauga

SEQ ID NO: 477305 - RNA, 19 nt, Artificial Sequence
  Description of Artificial Sequence: Synthetic oligonucleotide
  Sense strand starting at position 3291 of SEQ ID NO: 317264
auguuuacuagauaugugu

SEQ ID NO: 477306 - RNA, 19 nt, Artificial Sequence
  Description of Artificial Sequence: Synthetic oligonucleotide
  Antisense Strand to SEQ ID NO: 477305
acacauaucuaguaaacau

SEQ ID NO: 477307 - RNA, 19 nt, Artificial Sequence
  Description of Artificial Sequence: Synthetic oligonucleotide
  Sense strand starting at position 3374 of SEQ ID NO: 317264
augaaauaaucggcauaaa

SEQ ID NO: 477308 - RNA, 19 nt, Artificial Sequence
  Description of Artificial Sequence: Synthetic oligonucleotide
  Antisense Strand to SEQ ID NO: 477307
uuuaugccgauuauuucau

SEQ ID NO: 477309 - RNA, 19 nt, Artificial Sequence
  Description of Artificial Sequence: Synthetic oligonucleotide
  Sense strand starting at position 3691 of SEQ ID NO: 317264
gaggauauguacuuguuag

SEQ ID NO: 477310 - RNA, 19 nt, Artificial Sequence
  Description of Artificial Sequence: Synthetic oligonucleotide
  Antisense Strand to SEQ ID NO: 477309
cuaacaaguacauauccuc

SEQ ID NO: 477311 - RNA, 19 nt, Artificial Sequence
  Description of Artificial Sequence: Synthetic oligonucleotide
  Sense strand starting at position 3699 of SEQ ID NO: 317264
guacuuguuagugagaaga

SEQ ID NO: 477312 - RNA, 19 nt, Artificial Sequence
  Description of Artificial Sequence: Synthetic oligonucleotide
  Antisense Strand to SEQ ID NO: 477311
ucuucucacuaacaaguac

SEQ ID NO: 477313 - RNA, 19 nt, Artificial Sequence
  Description of Artificial Sequence: Synthetic oligonucleotide
  Sense strand starting at position 3712 of SEQ ID NO: 317264
agaagaaucuacuuccagu

SEQ ID NO: 477314 - RNA, 19 nt, Artificial Sequence
  Description of Artificial Sequence: Synthetic oligonucleotide
  Antisense Strand to SEQ ID NO: 477313
acuggaaguagauucuucu

SEQ ID NO: 477315 - RNA, 19 nt, Artificial Sequence
  Description of Artificial Sequence: Synthetic oligonucleotide
  Sense strand starting at position 3791 of SEQ ID NO: 317264
uccagucuuccuuagauag

SEQ ID NO: 477316 - RNA, 19 nt, Artificial Sequence
  Description of Artificial Sequence: Synthetic oligonucleotide
  Antisense Strand to SEQ ID NO: 477315
cuaucuaaggaagacugga

SEQ ID NO: 477317 - RNA, 19 nt, Artificial Sequence
  Description of Artificial Sequence: Synthetic oligonucleotide
  Sense strand starting at position 3812 of SEQ ID NO: 317264
augugauccaccggacuaa

SEQ ID NO: 477318 - RNA, 19 nt, Artificial Sequence
  Description of Artificial Sequence: Synthetic oligonucleotide
  Antisense Strand to SEQ ID NO: 477317
uuaguccgguggaucacau

SEQ ID NO: 477319 - RNA, 19 nt, Artificial Sequence
  Description of Artificial Sequence: Synthetic oligonucleotide
  Sense strand starting at position 3813 of SEQ ID NO: 317264
ugugauccaccggacuaau

SEQ ID NO: 477320 - RNA, 19 nt, Artificial Sequence
  Description of Artificial Sequence: Synthetic oligonucleotide
  Antisense Strand to SEQ ID NO: 477319
auuaguccgguggaucaca

SEQ ID NO: 477321 - RNA, 19 nt, Artificial Sequence
  Description of Artificial Sequence: Synthetic oligonucleotide
  Sense strand starting at position 3839 of SEQ ID NO: 317264
aagacaguguccuuuggaa

SEQ ID NO: 477322 - RNA, 19 nt, Artificial Sequence
  Description of Artificial Sequence: Synthetic oligonucleotide
  Antisense Strand to SEQ ID NO: 477321
uuccaaaggacacugucuu

SEQ ID NO: 477323 - RNA, 19 nt, Artificial Sequence
  Description of Artificial Sequence: Synthetic oligonucleotide
  Sense strand starting at position 3841 of SEQ ID NO: 317264
gacaguguccuuuggaaga

SEQ ID NO: 477324 - RNA, 19 nt, Artificial Sequence
  Description of Artificial Sequence: Synthetic oligonucleotide
  Antisense Strand to SEQ ID NO: 477323
ucuuccaaaggacacuguc

SEQ ID NO: 477325 - RNA, 19 nt, Artificial Sequence
  Description of Artificial Sequence: Synthetic oligonucleotide
  Sense strand starting at position 3951 of SEQ ID NO: 317264
ugucauuauuagguaagaa

SEQ ID NO: 477326 - RNA, 19 nt, Artificial Sequence
  Description of Artificial Sequence: Synthetic oligonucleotide
  Antisense Strand to SEQ ID NO: 477325
uucuuaccuaauaaugaca

SEQ ID NO: 477327 - RNA, 19 nt, Artificial Sequence
  Description of Artificial Sequence: Synthetic oligonucleotide
  Sense strand starting at position 412 of SEQ ID NO: 317265
ccaagagacugagauaaag

SEQ ID NO: 477328 - RNA, 19 nt, Artificial Sequence
  Description of Artificial Sequence: Synthetic oligonucleotide
  Antisense Strand to SEQ ID NO: 477327
cuuuaucucagucucuugg

SEQ ID NO: 477329 - RNA, 19 nt, Artificial Sequence
  Description of Artificial Sequence: Synthetic oligonucleotide
  Sense strand starting at position 424 of SEQ ID NO: 317265
gauaaagacgaucgcugau

SEQ ID NO: 477330 - RNA, 19 nt, Artificial Sequence
  Description of Artificial Sequence: Synthetic oligonucleotide
  Antisense Strand to SEQ ID NO: 477329
aucagcgaucgucuuuauc

SEQ ID NO: 477331 - RNA, 19 nt, Artificial Sequence
  Description of Artificial Sequence: Synthetic oligonucleotide
  Sense strand starting at position 534 of SEQ ID NO: 317265
gugucuaagguuuauacca

SEQ ID NO: 477332 - RNA, 19 nt, Artificial Sequence
  Description of Artificial Sequence: Synthetic oligonucleotide
  Antisense Strand to SEQ ID NO: 477331
ugguauaaaccuuagacac

SEQ ID NO: 477333 - RNA, 19 nt, Artificial Sequence
  Description of Artificial Sequence: Synthetic oligonucleotide
  Sense strand starting at position 571 of SEQ ID NO: 317265
gucauugauccucauucca

SEQ ID NO: 477334 - RNA, 19 nt, Artificial Sequence
  Description of Artificial Sequence: Synthetic oligonucleotide
  Antisense Strand to SEQ ID NO: 477333
uggaaugaggaucaaugac

SEQ ID NO: 477335 - RNA, 19 nt, Artificial Sequence
  Description of Artificial Sequence: Synthetic oligonucleotide
  Sense strand starting at position 579 of SEQ ID NO: 317265
uccucauuccacuguuaga

SEQ ID NO: 477336 - RNA, 19 nt, Artificial Sequence
  Description of Artificial Sequence: Synthetic oligonucleotide
  Antisense Strand to SEQ ID NO: 477335
ucuaacaguggaaugagga

SEQ ID NO: 477337 - RNA, 19 nt, Artificial Sequence
  Description of Artificial Sequence: Synthetic oligonucleotide
  Sense strand starting at position 784 of SEQ ID NO: 317265
uagaauguuucugcaggaa

SEQ ID NO: 477338 - RNA, 19 nt, Artificial Sequence
  Description of Artificial Sequence: Synthetic oligonucleotide
  Antisense Strand to SEQ ID NO: 477337
uuccugcagaaacauucua

SEQ ID NO: 477339 - RNA, 19 nt, Artificial Sequence
  Description of Artificial Sequence: Synthetic oligonucleotide
  Sense strand starting at position 857 of SEQ ID NO: 317265
gcaagagaauaccuaagua

SEQ ID NO: 477340 - RNA, 19 nt, Artificial Sequence
  Description of Artificial Sequence: Synthetic oligonucleotide
  Antisense Strand to SEQ ID NO: 477339
uacuuagguauucucuugc

SEQ ID NO: 477341 - RNA, 19 nt, Artificial Sequence
  Description of Artificial Sequence: Synthetic oligonucleotide
  Sense strand starting at position 914 of SEQ ID NO: 317265
aaggcacugcucgaaugaa

SEQ ID NO: 477342 - RNA, 19 nt, Artificial Sequence
  Description of Artificial Sequence: Synthetic oligonucleotide
  Antisense Strand to SEQ ID NO: 477341
uucauucgagcagugccuu

SEQ ID NO: 477343 - RNA, 19 nt, Artificial Sequence
  Description of Artificial Sequence: Synthetic oligonucleotide
  Sense strand starting at position 1035 of SEQ ID NO: 317265
aguaaaugggucgguagau

SEQ ID NO: 477344 - RNA, 19 nt, Artificial Sequence
  Description of Artificial Sequence: Synthetic oligonucleotide
  Antisense Strand to SEQ ID NO: 477343
aucuaccgacccauuuacu

SEQ ID NO: 477345 - RNA, 19 nt, Artificial Sequence
  Description of Artificial Sequence: Synthetic oligonucleotide
  Sense strand starting at position 1036 of SEQ ID NO: 317265
guaaaugggucgguagaua

SEQ ID NO: 477346 - RNA, 19 nt, Artificial Sequence
  Description of Artificial Sequence: Synthetic oligonucleotide
  Antisense Strand to SEQ ID NO: 477345
uaucuaccgacccauuuac

SEQ ID NO: 477347 - RNA, 19 nt, Artificial Sequence
  Description of Artificial Sequence: Synthetic oligonucleotide
  Sense strand starting at position 1103 of SEQ ID NO: 317265
ugcaucaucagcgagauua

SEQ ID NO: 477348 - RNA, 19 nt, Artificial Sequence
  Description of Artificial Sequence: Synthetic oligonucleotide
  Antisense Strand to SEQ ID NO: 477347
uaaucucgcugaugaugca

SEQ ID NO: 477349 - RNA, 19 nt, Artificial Sequence
  Description of Artificial Sequence: Synthetic oligonucleotide
  Sense strand starting at position 1105 of SEQ ID NO: 317265
caucaucagcgagauuauu

SEQ ID NO: 477350 - RNA, 19 nt, Artificial Sequence
  Description of Artificial Sequence: Synthetic oligonucleotide
  Antisense Strand to SEQ ID NO: 477349
aauaaucucgcugaugaug

SEQ ID NO: 477351 - RNA, 19 nt, Artificial Sequence
  Description of Artificial Sequence: Synthetic oligonucleotide
  Sense strand starting at position 1186 of SEQ ID NO: 317265
gagaaacgcugccuuagaa

SEQ ID NO: 477352 - RNA, 19 nt, Artificial Sequence
  Description of Artificial Sequence: Synthetic oligonucleotide
  Antisense Strand to SEQ ID NO: 477351
uucuaaggcagcguuucuc

SEQ ID NO: 477353 - RNA, 19 nt, Artificial Sequence
  Description of Artificial Sequence: Synthetic oligonucleotide
  Sense strand starting at position 1242 of SEQ ID NO: 317265
aucucaucagcgugagaaa

SEQ ID NO: 477354 - RNA, 19 nt, Artificial Sequence
  Description of Artificial Sequence: Synthetic oligonucleotide
  Antisense Strand to SEQ ID NO: 477353
uuucucacgcugaugagau

SEQ ID NO: 477355 - RNA, 19 nt, Artificial Sequence
  Description of Artificial Sequence: Synthetic oligonucleotide
  Sense strand starting at position 2307 of SEQ ID NO: 317265
acgcgaguccucgccgaaa

SEQ ID NO: 477356 - RNA, 19 nt, Artificial Sequence
  Description of Artificial Sequence: Synthetic oligonucleotide
  Antisense Strand to SEQ ID NO: 477355
uuucggcgaggacucgcgu

SEQ ID NO: 477357 - RNA, 19 nt, Artificial Sequence
  Description of Artificial Sequence: Synthetic oligonucleotide
  Sense strand starting at position 2521 of SEQ ID NO: 317265
gauccuuguggccagaguu

SEQ ID NO: 477358 - RNA, 19 nt, Artificial Sequence
  Description of Artificial Sequence: Synthetic oligonucleotide
  Antisense Strand to SEQ ID NO: 477357
aacucuggccacaaggauc

SEQ ID NO: 477359 - RNA, 19 nt, Artificial Sequence
  Description of Artificial Sequence: Synthetic oligonucleotide
  Sense strand starting at position 2534 of SEQ ID NO: 317265
agaguuuguugagcuaaua

SEQ ID NO: 477360 - RNA, 19 nt, Artificial Sequence
  Description of Artificial Sequence: Synthetic oligonucleotide
  Antisense Strand to SEQ ID NO: 477359
uauuagcucaacaaacucu

SEQ ID NO: 477361 - RNA, 19 nt, Artificial Sequence
  Description of Artificial Sequence: Synthetic oligonucleotide
  Sense strand starting at position 2643 of SEQ ID NO: 317265
cucauuaugcccuaguuau

SEQ ID NO: 477362 - RNA, 19 nt, Artificial Sequence
  Description of Artificial Sequence: Synthetic oligonucleotide
  Antisense Strand to SEQ ID NO: 477361
auaacuagggcauaaugag

SEQ ID NO: 477363 - RNA, 19 nt, Artificial Sequence
  Description of Artificial Sequence: Synthetic oligonucleotide
  Sense strand starting at position 2683 of SEQ ID NO: 317265
ugauguagcgguuaaagau

SEQ ID NO: 477364 - RNA, 19 nt, Artificial Sequence
  Description of Artificial Sequence: Synthetic oligonucleotide
  Antisense Strand to SEQ ID NO: 477363
aucuuuaaccgcuacauca

SEQ ID NO: 477365 - RNA, 19 nt, Artificial Sequence
  Description of Artificial Sequence: Synthetic oligonucleotide
  Sense strand starting at position 2690 of SEQ ID NO: 317265
gcgguuaaagauuaacuga

SEQ ID NO: 477366 - RNA, 19 nt, Artificial Sequence
  Description of Artificial Sequence: Synthetic oligonucleotide
  Antisense Strand to SEQ ID NO: 477365
ucaguuaaucuuuaaccgc

SEQ ID NO: 477367 - RNA, 19 nt, Artificial Sequence
  Description of Artificial Sequence: Synthetic oligonucleotide
  Sense strand starting at position 2724 of SEQ ID NO: 317265
gucuuugucuaccuaagga

SEQ ID NO: 477368 - RNA, 19 nt, Artificial Sequence
  Description of Artificial Sequence: Synthetic oligonucleotide
  Antisense Strand to SEQ ID NO: 477367
uccuuagguagacaaagac

SEQ ID NO: 477369 - RNA, 19 nt, Artificial Sequence
  Description of Artificial Sequence: Synthetic oligonucleotide
  Sense strand starting at position 2794 of SEQ ID NO: 317265
ugaggaaacgugcaauauu

SEQ ID NO: 477370 - RNA, 19 nt, Artificial Sequence
  Description of Artificial Sequence: Synthetic oligonucleotide
  Antisense Strand to SEQ ID NO: 477369
aauauugcacguuuccuca

SEQ ID NO: 477371 - RNA, 19 nt, Artificial Sequence
  Description of Artificial Sequence: Synthetic oligonucleotide
  Sense strand starting at position 2879 of SEQ ID NO: 317265
acaucuguuugagcagaug

SEQ ID NO: 477372 - RNA, 19 nt, Artificial Sequence
  Description of Artificial Sequence: Synthetic oligonucleotide
  Antisense Strand to SEQ ID NO: 477371
caucugcucaaacagaugu

SEQ ID NO: 477373 - RNA, 19 nt, Artificial Sequence
  Description of Artificial Sequence: Synthetic oligonucleotide
  Sense strand starting at position 2882 of SEQ ID NO: 317265
ucuguuugagcagaugaau

SEQ ID NO: 477374 - RNA, 19 nt, Artificial Sequence
  Description of Artificial Sequence: Synthetic oligonucleotide
  Antisense Strand to SEQ ID NO: 477373
auucaucugcucaaacaga

SEQ ID NO: 477375 - RNA, 19 nt, Artificial Sequence
  Description of Artificial Sequence: Synthetic oligonucleotide
  Sense strand starting at position 2896 of SEQ ID NO: 317265
ugaauaugccauugggaaa

SEQ ID NO: 477376 - RNA, 19 nt, Artificial Sequence
  Description of Artificial Sequence: Synthetic oligonucleotide
  Antisense Strand to SEQ ID NO: 477375
uuucccaauggcauauuca

SEQ ID NO: 477377 - RNA, 19 nt, Artificial Sequence
  Description of Artificial Sequence: Synthetic oligonucleotide
  Sense strand starting at position 2942 of SEQ ID NO: 317265
ggcagaccuuaacuaaagu

SEQ ID NO: 477378 - RNA, 19 nt, Artificial Sequence
  Description of Artificial Sequence: Synthetic oligonucleotide
  Antisense Strand to SEQ ID NO: 477377
acuuuaguuaaggucugcc

SEQ ID NO: 477379 - RNA, 19 nt, Artificial Sequence
  Description of Artificial Sequence: Synthetic oligonucleotide
  Sense strand starting at position 2998 of SEQ ID NO: 317265
agaugaacugcuuauucca

SEQ ID NO: 477380 - RNA, 19 nt, Artificial Sequence
  Description of Artificial Sequence: Synthetic oligonucleotide
  Antisense Strand to SEQ ID NO: 477379
uggaauaagcaguucaucu

SEQ ID NO: 477381 - RNA, 19 nt, Artificial Sequence
  Description of Artificial Sequence: Synthetic oligonucleotide
  Sense strand starting at position 3006 of SEQ ID NO: 317265
ugcuuauuccaucagauga

SEQ ID NO: 477382 - RNA, 19 nt, Artificial Sequence
  Description of Artificial Sequence: Synthetic oligonucleotide
  Antisense Strand to SEQ ID NO: 477381
ucaucugauggaauaagca

SEQ ID NO: 477383 - RNA, 19 nt, Artificial Sequence
  Description of Artificial Sequence: Synthetic oligonucleotide
  Sense strand starting at position 3205 of SEQ ID NO: 317265
aauuacuuaucugugaggu

SEQ ID NO: 477384 - RNA, 19 nt, Artificial Sequence
  Description of Artificial Sequence: Synthetic oligonucleotide
  Antisense Strand to SEQ ID NO: 477383
accucacagauaaguaauu

SEQ ID NO: 477385 - RNA, 19 nt, Artificial Sequence
  Description of Artificial Sequence: Synthetic oligonucleotide
  Sense strand starting at position 3255 of SEQ ID NO: 317265
auuagagagccucggaaua

SEQ ID NO: 477386 - RNA, 19 nt, Artificial Sequence
  Description of Artificial Sequence: Synthetic oligonucleotide
  Antisense Strand to SEQ ID NO: 477385
uauuccgaggcucucuaau

SEQ ID NO: 477387 - RNA, 19 nt, Artificial Sequence
  Description of Artificial Sequence: Synthetic oligonucleotide
  Sense strand starting at position 3583 of SEQ ID NO: 317265
ugacuacugacuggaaguu

SEQ ID NO: 477388 - RNA, 19 nt, Artificial Sequence
  Description of Artificial Sequence: Synthetic oligonucleotide
  Antisense Strand to SEQ ID NO: 477387
aacuuccagucaguaguca

SEQ ID NO: 477389 - RNA, 19 nt, Artificial Sequence
  Description of Artificial Sequence: Synthetic oligonucleotide
  Sense strand starting at position 3592 of SEQ ID NO: 317265
acuggaaguuuauuguuua

SEQ ID NO: 477390 - RNA, 19 nt, Artificial Sequence
  Description of Artificial Sequence: Synthetic oligonucleotide
  Antisense Strand to SEQ ID NO: 477389
uaaacaauaaacuuccagu

SEQ ID NO: 477391 - RNA, 19 nt, Artificial Sequence
  Description of Artificial Sequence: Synthetic oligonucleotide
  Sense strand starting at position 3595 of SEQ ID NO: 317265
ggaaguuuauuguuuauuc

SEQ ID NO: 477392 - RNA, 19 nt, Artificial Sequence
  Description of Artificial Sequence: Synthetic oligonucleotide
  Antisense Strand to SEQ ID NO: 477391
gaauaaacaauaaacuucc

SEQ ID NO: 477393 - RNA, 19 nt, Artificial Sequence
  Description of Artificial Sequence: Synthetic oligonucleotide
  Sense strand starting at position 3623 of SEQ ID NO: 317265
ugaauuaagucagugaagu

SEQ ID NO: 477394 - RNA, 19 nt, Artificial Sequence
  Description of Artificial Sequence: Synthetic oligonucleotide
  Antisense Strand to SEQ ID NO: 477393
acuucacugacuuaauuca

SEQ ID NO: 477395 - RNA, 19 nt, Artificial Sequence
  Description of Artificial Sequence: Synthetic oligonucleotide
  Sense strand starting at position 3624 of SEQ ID NO: 317265
gaauuaagucagugaagug

SEQ ID NO: 477396 - RNA, 19 nt, Artificial Sequence
  Description of Artificial Sequence: Synthetic oligonucleotide
  Antisense Strand to SEQ ID NO: 477395
cacuucacugacuuaauuc

SEQ ID NO: 477397 - RNA, 19 nt, Artificial Sequence
  Description of Artificial Sequence: Synthetic oligonucleotide
  Sense strand starting at position 3629 of SEQ ID NO: 317265
aagucagugaagugagaga

SEQ ID NO: 477398 - RNA, 19 nt, Artificial Sequence
  Description of Artificial Sequence: Synthetic oligonucleotide
  Antisense Strand to SEQ ID NO: 477397
ucucucacuucacugacuu

SEQ ID NO: 477399 - RNA, 19 nt, Artificial Sequence
  Description of Artificial Sequence: Synthetic oligonucleotide
  Sense strand starting at position 3640 of SEQ ID NO: 317265
gugagagauuucgugugua

SEQ ID NO: 477400 - RNA, 19 nt, Artificial Sequence
  Description of Artificial Sequence: Synthetic oligonucleotide
  Antisense Strand to SEQ ID NO: 477399
uacacacgaaaucucucac

SEQ ID NO: 477401 - RNA, 19 nt, Artificial Sequence
  Description of Artificial Sequence: Synthetic oligonucleotide
  Sense strand starting at position 3785 of SEQ ID NO: 317265
uccucaugugacugaagua

SEQ ID NO: 477402 - RNA, 19 nt, Artificial Sequence
  Description of Artificial Sequence: Synthetic oligonucleotide
  Antisense Strand to SEQ ID NO: 477401
uacuucagucacaugagga

SEQ ID NO: 477403 - RNA, 19 nt, Artificial Sequence
  Description of Artificial Sequence: Synthetic oligonucleotide
  Sense strand starting at position 3844 of SEQ ID NO: 317265
aauugauaauuggaggaaa

SEQ ID NO: 477404 - RNA, 19 nt, Artificial Sequence
  Description of Artificial Sequence: Synthetic oligonucleotide
  Antisense Strand to SEQ ID NO: 477403
uuuccuccaauuaucaauu

SEQ ID NO: 477405 - RNA, 19 nt, Artificial Sequence
  Description of Artificial Sequence: Synthetic oligonucleotide
  Sense strand starting at position 3861 of SEQ ID NO: 317265
aauucuacuguuggaaaga

SEQ ID NO: 477406 - RNA, 19 nt, Artificial Sequence
  Description of Artificial Sequence: Synthetic oligonucleotide
  Antisense Strand to SEQ ID NO: 477405
ucuuuccaacaguagaauu

SEQ ID NO: 477407 - RNA, 19 nt, Artificial Sequence
  Description of Artificial Sequence: Synthetic oligonucleotide
  Sense strand starting at position 74 of SEQ ID NO: 317266
guuuaaggcucaccuggaa

SEQ ID NO: 477408 - RNA, 19 nt, Artificial Sequence
  Description of Artificial Sequence: Synthetic oligonucleotide
  Antisense Strand to SEQ ID NO: 477407
uuccaggugagccuuaaac

SEQ ID NO: 477409 - RNA, 19 nt, Artificial Sequence
  Description of Artificial Sequence: Synthetic oligonucleotide
  Sense strand starting at position 150 of SEQ ID NO: 317266
gguuauuggacauacugua

SEQ ID NO: 477410 - RNA, 19 nt, Artificial Sequence
  Description of Artificial Sequence: Synthetic oligonucleotide
  Antisense Strand to SEQ ID NO: 477409
uacaguauguccaauaacc

SEQ ID NO: 477411 - RNA, 19 nt, Artificial Sequence
  Description of Artificial Sequence: Synthetic oligonucleotide
  Sense strand starting at position 189 of SEQ ID NO: 317266
acacuuaucuguguaugua

SEQ ID NO: 477412 - RNA, 19 nt, Artificial Sequence
  Description of Artificial Sequence: Synthetic oligonucleotide
  Antisense Strand to SEQ ID NO: 477411
uacauacacagauaagugu

SEQ ID NO: 477413 - RNA, 19 nt, Artificial Sequence
  Description of Artificial Sequence: Synthetic oligonucleotide
  Sense strand starting at position 190 of SEQ ID NO: 317266
cacuuaucuguguauguau

SEQ ID NO: 477414 - RNA, 19 nt, Artificial Sequence
  Description of Artificial Sequence: Synthetic oligonucleotide
  Antisense Strand to SEQ ID NO: 477413
auacauacacagauaagug

SEQ ID NO: 477415 - RNA, 19 nt, Artificial Sequence
  Description of Artificial Sequence: Synthetic oligonucleotide
  Sense strand starting at position 199 of SEQ ID NO: 317266
guguauguauguucaaagg

SEQ ID NO: 477416 - RNA, 19 nt, Artificial Sequence
  Description of Artificial Sequence: Synthetic oligonucleotide
  Antisense Strand to SEQ ID NO: 477415
ccuuugaacauacauacac

SEQ ID NO: 477417 - RNA, 19 nt, Artificial Sequence
  Description of Artificial Sequence: Synthetic oligonucleotide
  Sense strand starting at position 275 of SEQ ID NO: 317266
uguguauguucgacggaaa

SEQ ID NO: 477418 - RNA, 19 nt, Artificial Sequence
  Description of Artificial Sequence: Synthetic oligonucleotide
  Antisense Strand to SEQ ID NO: 477417
uuuccgucgaacauacaca

SEQ ID NO: 477419 - RNA, 19 nt, Artificial Sequence
  Description of Artificial Sequence: Synthetic oligonucleotide
  Sense strand starting at position 278 of SEQ ID NO: 317266
guauguucgacggaaauau

SEQ ID NO: 477420 - RNA, 19 nt, Artificial Sequence
  Description of Artificial Sequence: Synthetic oligonucleotide
  Antisense Strand to SEQ ID NO: 477419
auauuuccgucgaacauac

SEQ ID NO: 477421 - RNA, 19 nt, Artificial Sequence
  Description of Artificial Sequence: Synthetic oligonucleotide
  Sense strand starting at position 497 of SEQ ID NO: 317266
uggccucuuccagauauau

SEQ ID NO: 477422 - RNA, 19 nt, Artificial Sequence
  Description of Artificial Sequence: Synthetic oligonucleotide
  Antisense Strand to SEQ ID NO: 477421
auauaucuggaagaggcca

SEQ ID NO: 477423 - RNA, 19 nt, Artificial Sequence
  Description of Artificial Sequence: Synthetic oligonucleotide
  Sense strand starting at position 517 of SEQ ID NO: 317266
gccaaaggucgggaucaaa

SEQ ID NO: 477424 - RNA, 19 nt, Artificial Sequence
  Description of Artificial Sequence: Synthetic oligonucleotide
  Antisense Strand to SEQ ID NO: 477423
uuugaucccgaccuuuggc

SEQ ID NO: 477425 - RNA, 19 nt, Artificial Sequence
  Description of Artificial Sequence: Synthetic oligonucleotide
  Sense strand starting at position 528 of SEQ ID NO: 317266
ggaucaaagccugaagcau

SEQ ID NO: 477426 - RNA, 19 nt, Artificial Sequence
  Description of Artificial Sequence: Synthetic oligonucleotide
  Antisense Strand to SEQ ID NO: 477425
augcuucaggcuuugaucc

SEQ ID NO: 477427 - RNA, 19 nt, Artificial Sequence
  Description of Artificial Sequence: Synthetic oligonucleotide
  Sense strand starting at position 536 of SEQ ID NO: 317266
gccugaagcauuugcuguu

SEQ ID NO: 477428 - RNA, 19 nt, Artificial Sequence
  Description of Artificial Sequence: Synthetic oligonucleotide
  Antisense Strand to SEQ ID NO: 477427
aacagcaaaugcuucaggc

SEQ ID NO: 477429 - RNA, 19 nt, Artificial Sequence
  Description of Artificial Sequence: Synthetic oligonucleotide
  Sense strand starting at position 598 of SEQ ID NO: 317266
ugaagauucugaguugcac

SEQ ID NO: 477430 - RNA, 19 nt, Artificial Sequence
  Description of Artificial Sequence: Synthetic oligonucleotide
  Antisense Strand to SEQ ID NO: 477429
gugcaacucagaaucuuca

SEQ ID NO: 477431 - RNA, 19 nt, Artificial Sequence
  Description of Artificial Sequence: Synthetic oligonucleotide
  Sense strand starting at position 633 of SEQ ID NO: 317266
uguugagcacuguauuaac

SEQ ID NO: 477432 - RNA, 19 nt, Artificial Sequence
  Description of Artificial Sequence: Synthetic oligonucleotide
  Antisense Strand to SEQ ID NO: 477431
guuaauacagugcucaaca

SEQ ID NO: 477433 - RNA, 19 nt, Artificial Sequence
  Description of Artificial Sequence: Synthetic oligonucleotide
  Sense strand starting at position 795 of SEQ ID NO: 317266
aguacaagucgcuacuauu

SEQ ID NO: 477434 - RNA, 19 nt, Artificial Sequence
  Description of Artificial Sequence: Synthetic oligonucleotide
  Antisense Strand to SEQ ID NO: 477433
aauaguagcgacuuguacu

SEQ ID NO: 477435 - RNA, 19 nt, Artificial Sequence
  Description of Artificial Sequence: Synthetic oligonucleotide
  Sense strand starting at position 858 of SEQ ID NO: 317266
cguuucugugauuacugaa

SEQ ID NO: 477436 - RNA, 19 nt, Artificial Sequence
  Description of Artificial Sequence: Synthetic oligonucleotide
  Antisense Strand to SEQ ID NO: 477435
uucaguaaucacagaaacg

SEQ ID NO: 477437 - RNA, 19 nt, Artificial Sequence
  Description of Artificial Sequence: Synthetic oligonucleotide
  Sense strand starting at position 865 of SEQ ID NO: 317266
gugauuacugaauguaaca

SEQ ID NO: 477438 - RNA, 19 nt, Artificial Sequence
  Description of Artificial Sequence: Synthetic oligonucleotide
  Antisense Strand to SEQ ID NO: 477437
uguuacauucaguaaucac

SEQ ID NO: 477439 - RNA, 19 nt, Artificial Sequence
  Description of Artificial Sequence: Synthetic oligonucleotide
  Sense strand starting at position 914 of SEQ ID NO: 317266
gucaaauguauauaucguu

SEQ ID NO: 477440 - RNA, 19 nt, Artificial Sequence
  Description of Artificial Sequence: Synthetic oligonucleotide
  Antisense Strand to SEQ ID NO: 477439
aacgauauauacauuugac

SEQ ID NO: 477441 - RNA, 19 nt, Artificial Sequence
  Description of Artificial Sequence: Synthetic oligonucleotide
  Sense strand starting at position 1058 of SEQ ID NO: 317266
cauguaaguucgguaacaa

SEQ ID NO: 477442 - RNA, 19 nt, Artificial Sequence
  Description of Artificial Sequence: Synthetic oligonucleotide
  Antisense Strand to SEQ ID NO: 477441
uuguuaccgaacuuacaug

SEQ ID NO: 477443 - RNA, 19 nt, Artificial Sequence
  Description of Artificial Sequence: Synthetic oligonucleotide
  Sense strand starting at position 1059 of SEQ ID NO: 317266
auguaaguucgguaacaac

SEQ ID NO: 477444 - RNA, 19 nt, Artificial Sequence
  Description of Artificial Sequence: Synthetic oligonucleotide
  Antisense Strand to SEQ ID NO: 477443
guuguuaccgaacuuacau

SEQ ID NO: 477445 - RNA, 19 nt, Artificial Sequence
  Description of Artificial Sequence: Synthetic oligonucleotide
  Sense strand starting at position 1142 of SEQ ID NO: 317266
gggaauauugcacacugua

SEQ ID NO: 477446 - RNA, 19 nt, Artificial Sequence
  Description of Artificial Sequence: Synthetic oligonucleotide
  Antisense Strand to SEQ ID NO: 477445
uacagugugcaauauuccc

SEQ ID NO: 477447 - RNA, 19 nt, Artificial Sequence
  Description of Artificial Sequence: Synthetic oligonucleotide
  Sense strand starting at position 1158 of SEQ ID NO: 317266
guagucacccagcacuaau

SEQ ID NO: 477448 - RNA, 19 nt, Artificial Sequence
  Description of Artificial Sequence: Synthetic oligonucleotide
  Antisense Strand to SEQ ID NO: 477447
auuagugcugggugacuac

SEQ ID NO: 477449 - RNA, 19 nt, Artificial Sequence
  Description of Artificial Sequence: Synthetic oligonucleotide
  Sense strand starting at position 1271 of SEQ ID NO: 317266
aaauaauuuccgugcaggu

SEQ ID NO: 477450 - RNA, 19 nt, Artificial Sequence
  Description of Artificial Sequence: Synthetic oligonucleotide
  Antisense Strand to SEQ ID NO: 477449
accugcacggaaauuauuu

SEQ ID NO: 477451 - RNA, 19 nt, Artificial Sequence
  Description of Artificial Sequence: Synthetic oligonucleotide
  Sense strand starting at position 1288 of SEQ ID NO: 317266
guuguaagaucucccucac

SEQ ID NO: 477452 - RNA, 19 nt, Artificial Sequence
  Description of Artificial Sequence: Synthetic oligonucleotide
  Antisense Strand to SEQ ID NO: 477451
gugagggagaucuuacaac

SEQ ID NO: 477453 - RNA, 19 nt, Artificial Sequence
  Description of Artificial Sequence: Synthetic oligonucleotide
  Sense strand starting at position 1707 of SEQ ID NO: 317266
ggagaaauccggcaacuuu

SEQ ID NO: 477454 - RNA, 19 nt, Artificial Sequence
  Description of Artificial Sequence: Synthetic oligonucleotide
  Antisense Strand to SEQ ID NO: 477453
aaaguugccggauuucucc

SEQ ID NO: 477455 - RNA, 19 nt, Artificial Sequence
  Description of Artificial Sequence: Synthetic oligonucleotide
  Sense strand starting at position 2425 of SEQ ID NO: 317266
gccggaauuaaccggagaa

SEQ ID NO: 477456 - RNA, 19 nt, Artificial Sequence
  Description of Artificial Sequence: Synthetic oligonucleotide
  Antisense Strand to SEQ ID NO: 477455
uucuccgguuaauuccggc

SEQ ID NO: 477457 - RNA, 19 nt, Artificial Sequence
  Description of Artificial Sequence: Synthetic oligonucleotide
  Sense strand starting at position 2426 of SEQ ID NO: 317266
ccggaauuaaccggagaag

SEQ ID NO: 477458 - RNA, 19 nt, Artificial Sequence
  Description of Artificial Sequence: Synthetic oligonucleotide
  Antisense Strand to SEQ ID NO: 477457
cuucuccgguuaauuccgg

SEQ ID NO: 477459 - RNA, 19 nt, Artificial Sequence
  Description of Artificial Sequence: Synthetic oligonucleotide
  Sense strand starting at position 2608 of SEQ ID NO: 317266
gugucauugggacacuuaa

SEQ ID NO: 477460 - RNA, 19 nt, Artificial Sequence
  Description of Artificial Sequence: Synthetic oligonucleotide
  Antisense Strand to SEQ ID NO: 477459
uuaagugucccaaugacac

SEQ ID NO: 477461 - RNA, 19 nt, Artificial Sequence
  Description of Artificial Sequence: Synthetic oligonucleotide
  Sense strand starting at position 3167 of SEQ ID NO: 317266
guacaaccuguuggagaaa

SEQ ID NO: 477462 - RNA, 19 nt, Artificial Sequence
  Description of Artificial Sequence: Synthetic oligonucleotide
  Antisense Strand to SEQ ID NO: 477461
uuucuccaacagguuguac

SEQ ID NO: 477463 - RNA, 19 nt, Artificial Sequence
  Description of Artificial Sequence: Synthetic oligonucleotide
  Sense strand starting at position 3227 of SEQ ID NO: 317266
cggucaauccaauguugag

SEQ ID NO: 477464 - RNA, 19 nt, Artificial Sequence
  Description of Artificial Sequence: Synthetic oligonucleotide
  Antisense Strand to SEQ ID NO: 477463
cucaacauuggauugaccg

SEQ ID NO: 477465 - RNA, 19 nt, Artificial Sequence
  Description of Artificial Sequence: Synthetic oligonucleotide
  Sense strand starting at position 3284 of SEQ ID NO: 317266
uucucacagucaucaguuu

SEQ ID NO: 477466 - RNA, 19 nt, Artificial Sequence
  Description of Artificial Sequence: Synthetic oligonucleotide
  Antisense Strand to SEQ ID NO: 477465
aaacugaugacugugagaa

SEQ ID NO: 477467 - RNA, 19 nt, Artificial Sequence
  Description of Artificial Sequence: Synthetic oligonucleotide
  Sense strand starting at position 3303 of SEQ ID NO: 317266
cugcuuggugacuaguauu

SEQ ID NO: 477468 - RNA, 19 nt, Artificial Sequence
  Description of Artificial Sequence: Synthetic oligonucleotide
  Antisense Strand to SEQ ID NO: 477467
aauacuagucaccaagcag

SEQ ID NO: 477469 - RNA, 19 nt, Artificial Sequence
  Description of Artificial Sequence: Synthetic oligonucleotide
  Sense strand starting at position 3341 of SEQ ID NO: 317266
gcgacccuguaauuuguua

SEQ ID NO: 477470 - RNA, 19 nt, Artificial Sequence
  Description of Artificial Sequence: Synthetic oligonucleotide
  Antisense Strand to SEQ ID NO: 477469
uaacaaauuacagggucgc

SEQ ID NO: 477471 - RNA, 19 nt, Artificial Sequence
  Description of Artificial Sequence: Synthetic oligonucleotide
  Sense strand starting at position 3345 of SEQ ID NO: 317266
cccuguaauuuguuaagca

SEQ ID NO: 477472 - RNA, 19 nt, Artificial Sequence
  Description of Artificial Sequence: Synthetic oligonucleotide
  Antisense Strand to SEQ ID NO: 477471
ugcuuaacaaauuacaggg

SEQ ID NO: 477473 - RNA, 19 nt, Artificial Sequence
  Description of Artificial Sequence: Synthetic oligonucleotide
  Sense strand starting at position 3544 of SEQ ID NO: 317266
acauuaguucccuagggcu

SEQ ID NO: 477474 - RNA, 19 nt, Artificial Sequence
  Description of Artificial Sequence: Synthetic oligonucleotide
  Antisense Strand to SEQ ID NO: 477473
agcccuagggaacuaaugu

SEQ ID NO: 477475 - RNA, 19 nt, Artificial Sequence
  Description of Artificial Sequence: Synthetic oligonucleotide
  Sense strand starting at position 3717 of SEQ ID NO: 317266
aguuucuuggcauauggua

SEQ ID NO: 477476 - RNA, 19 nt, Artificial Sequence
  Description of Artificial Sequence: Synthetic oligonucleotide
  Antisense Strand to SEQ ID NO: 477475
uaccauaugccaagaaacu

SEQ ID NO: 477477 - RNA, 19 nt, Artificial Sequence
  Description of Artificial Sequence: Synthetic oligonucleotide
  Sense strand starting at position 3771 of SEQ ID NO: 317266
ugugcuuguguguucaaau

SEQ ID NO: 477478 - RNA, 19 nt, Artificial Sequence
  Description of Artificial Sequence: Synthetic oligonucleotide
  Antisense Strand to SEQ ID NO: 477477
auuugaacacacaagcaca

SEQ ID NO: 477479 - RNA, 19 nt, Artificial Sequence
  Description of Artificial Sequence: Synthetic oligonucleotide
  Sense strand starting at position 3829 of SEQ ID NO: 317266
ggcgaaccauccuccagua

SEQ ID NO: 477480 - RNA, 19 nt, Artificial Sequence
  Description of Artificial Sequence: Synthetic oligonucleotide
  Antisense Strand to SEQ ID NO: 477479
uacuggaggaugguucgcc

SEQ ID NO: 477481 - RNA, 19 nt, Artificial Sequence
  Description of Artificial Sequence: Synthetic oligonucleotide
  Sense strand starting at position 3845 of SEQ ID NO: 317266
guaugaccucauggacguu

SEQ ID NO: 477482 - RNA, 19 nt, Artificial Sequence
  Description of Artificial Sequence: Synthetic oligonucleotide
  Antisense Strand to SEQ ID NO: 477481
aacguccaugaggucauac

SEQ ID NO: 477483 - RNA, 19 nt, Artificial Sequence
  Description of Artificial Sequence: Synthetic oligonucleotide
  Sense strand starting at position 3848 of SEQ ID NO: 317266
ugaccucauggacguuaau

SEQ ID NO: 477484 - RNA, 19 nt, Artificial Sequence
  Description of Artificial Sequence: Synthetic oligonucleotide
  Antisense Strand to SEQ ID NO: 477483
auuaacguccaugagguca

SEQ ID NO: 477485 - RNA, 19 nt, Artificial Sequence
  Description of Artificial Sequence: Synthetic oligonucleotide
  Sense strand starting at position 3851 of SEQ ID NO: 317266
ccucauggacguuaauuau

SEQ ID NO: 477486 - RNA, 19 nt, Artificial Sequence
  Description of Artificial Sequence: Synthetic oligonucleotide
  Antisense Strand to SEQ ID NO: 477485
auaauuaacguccaugagg

SEQ ID NO: 477487 - RNA, 19 nt, Artificial Sequence
  Description of Artificial Sequence: Synthetic oligonucleotide
  Sense strand starting at position 37 of SEQ ID NO: 317267
gcaaacuucuggccuuaag

SEQ ID NO: 477488 - RNA, 19 nt, Artificial Sequence
  Description of Artificial Sequence: Synthetic oligonucleotide
  Antisense Strand to SEQ ID NO: 477487
cuuaaggccagaaguuugc

SEQ ID NO: 477489 - RNA, 19 nt, Artificial Sequence
  Description of Artificial Sequence: Synthetic oligonucleotide
  Sense strand starting at position 246 of SEQ ID NO: 317267
uucuaagguuccucaagca

SEQ ID NO: 477490 - RNA, 19 nt, Artificial Sequence
  Description of Artificial Sequence: Synthetic oligonucleotide
  Antisense Strand to SEQ ID NO: 477489
ugcuugaggaaccuuagaa

SEQ ID NO: 477491 - RNA, 19 nt, Artificial Sequence
  Description of Artificial Sequence: Synthetic oligonucleotide
  Sense strand starting at position 258 of SEQ ID NO: 317267
ucaagcauagcugaacuaa

SEQ ID NO: 477492 - RNA, 19 nt, Artificial Sequence
  Description of Artificial Sequence: Synthetic oligonucleotide
  Antisense Strand to SEQ ID NO: 477491
uuaguucagcuaugcuuga

SEQ ID NO: 477493 - RNA, 19 nt, Artificial Sequence
  Description of Artificial Sequence: Synthetic oligonucleotide
  Sense strand starting at position 432 of SEQ ID NO: 317267
gagaguuaauuagugaagu

SEQ ID NO: 477494 - RNA, 19 nt, Artificial Sequence
  Description of Artificial Sequence: Synthetic oligonucleotide
  Antisense Strand to SEQ ID NO: 477493
acuucacuaauuaacucuc

SEQ ID NO: 477495 - RNA, 19 nt, Artificial Sequence
  Description of Artificial Sequence: Synthetic oligonucleotide
  Sense strand starting at position 541 of SEQ ID NO: 317267
uggcucauuccugagguga

SEQ ID NO: 477496 - RNA, 19 nt, Artificial Sequence
  Description of Artificial Sequence: Synthetic oligonucleotide
  Antisense Strand to SEQ ID NO: 477495
ucaccucaggaaugagcca

SEQ ID NO: 477497 - RNA, 19 nt, Artificial Sequence
  Description of Artificial Sequence: Synthetic oligonucleotide
  Sense strand starting at position 545 of SEQ ID NO: 317267
ucauuccugaggugagaca

SEQ ID NO: 477498 - RNA, 19 nt, Artificial Sequence
  Description of Artificial Sequence: Synthetic oligonucleotide
  Antisense Strand to SEQ ID NO: 477497
ugucucaccucaggaauga

SEQ ID NO: 477499 - RNA, 19 nt, Artificial Sequence
  Description of Artificial Sequence: Synthetic oligonucleotide
  Sense strand starting at position 858 of SEQ ID NO: 317267
cuaaauuuaugcguuugca

SEQ ID NO: 477500 - RNA, 19 nt, Artificial Sequence
  Description of Artificial Sequence: Synthetic oligonucleotide
  Antisense Strand to SEQ ID NO: 477499
ugcaaacgcauaaauuuag

SEQ ID NO: 477501 - RNA, 19 nt, Artificial Sequence
  Description of Artificial Sequence: Synthetic oligonucleotide
  Sense strand starting at position 900 of SEQ ID NO: 317267
guauguaucaaucauguga

SEQ ID NO: 477502 - RNA, 19 nt, Artificial Sequence
  Description of Artificial Sequence: Synthetic oligonucleotide
  Antisense Strand to SEQ ID NO: 477501
ucacaugauugauacauac

SEQ ID NO: 477503 - RNA, 19 nt, Artificial Sequence
  Description of Artificial Sequence: Synthetic oligonucleotide
  Sense strand starting at position 1004 of SEQ ID NO: 317267
cuugguguuaggcauagaa

SEQ ID NO: 477504 - RNA, 19 nt, Artificial Sequence
  Description of Artificial Sequence: Synthetic oligonucleotide
  Antisense Strand to SEQ ID NO: 477503
uucuaugccuaacaccaag

SEQ ID NO: 477505 - RNA, 19 nt, Artificial Sequence
  Description of Artificial Sequence: Synthetic oligonucleotide
  Sense strand starting at position 1071 of SEQ ID NO: 317267
agcugacucaugggaucaa

SEQ ID NO: 477506 - RNA, 19 nt, Artificial Sequence
  Description of Artificial Sequence: Synthetic oligonucleotide
  Antisense Strand to SEQ ID NO: 477505
uugaucccaugagucagcu

SEQ ID NO: 477507 - RNA, 19 nt, Artificial Sequence
  Description of Artificial Sequence: Synthetic oligonucleotide
  Sense strand starting at position 1081 of SEQ ID NO: 317267
ugggaucaauuauaaagaa

SEQ ID NO: 477508 - RNA, 19 nt, Artificial Sequence
  Description of Artificial Sequence: Synthetic oligonucleotide
  Antisense Strand to SEQ ID NO: 477507
uucuuuauaauugauccca

SEQ ID NO: 477509 - RNA, 19 nt, Artificial Sequence
  Description of Artificial Sequence: Synthetic oligonucleotide
  Sense strand starting at position 1131 of SEQ ID NO: 317267
guguuuccauaagugauga

SEQ ID NO: 477510 - RNA, 19 nt, Artificial Sequence
  Description of Artificial Sequence: Synthetic oligonucleotide
  Antisense Strand to SEQ ID NO: 477509
ucaucacuuauggaaacac

SEQ ID NO: 477511 - RNA, 19 nt, Artificial Sequence
  Description of Artificial Sequence: Synthetic oligonucleotide
  Sense strand starting at position 1179 of SEQ ID NO: 317267
cugaucgcuuuauuaccaa

SEQ ID NO: 477512 - RNA, 19 nt, Artificial Sequence
  Description of Artificial Sequence: Synthetic oligonucleotide
  Antisense Strand to SEQ ID NO: 477511
uugguaauaaagcgaucag

SEQ ID NO: 477513 - RNA, 19 nt, Artificial Sequence
  Description of Artificial Sequence: Synthetic oligonucleotide
  Sense strand starting at position 1235 of SEQ ID NO: 317267
acaugcgaauuccucacua

SEQ ID NO: 477514 - RNA, 19 nt, Artificial Sequence
  Description of Artificial Sequence: Synthetic oligonucleotide
  Antisense Strand to SEQ ID NO: 477513
uagugaggaauucgcaugu

SEQ ID NO: 477515 - RNA, 19 nt, Artificial Sequence
  Description of Artificial Sequence: Synthetic oligonucleotide
  Sense strand starting at position 1237 of SEQ ID NO: 317267
augcgaauuccucacuaua

SEQ ID NO: 477516 - RNA, 19 nt, Artificial Sequence
  Description of Artificial Sequence: Synthetic oligonucleotide
  Antisense Strand to SEQ ID NO: 477515
uauagugaggaauucgcau

SEQ ID NO: 477517 - RNA, 19 nt, Artificial Sequence
  Description of Artificial Sequence: Synthetic oligonucleotide
  Sense strand starting at position 1239 of SEQ ID NO: 317267
gcgaauuccucacuauaga

SEQ ID NO: 477518 - RNA, 19 nt, Artificial Sequence
  Description of Artificial Sequence: Synthetic oligonucleotide
  Antisense Strand to SEQ ID NO: 477517
ucuauagugaggaauucgc

SEQ ID NO: 477519 - RNA, 19 nt, Artificial Sequence
  Description of Artificial Sequence: Synthetic oligonucleotide
  Sense strand starting at position 1255 of SEQ ID NO: 317267
agauucccguucucaauaa

SEQ ID NO: 477520 - RNA, 19 nt, Artificial Sequence
  Description of Artificial Sequence: Synthetic oligonucleotide
  Antisense Strand to SEQ ID NO: 477519
uuauugagaacgggaaucu

SEQ ID NO: 477521 - RNA, 19 nt, Artificial Sequence
  Description of Artificial Sequence: Synthetic oligonucleotide
  Sense strand starting at position 1608 of SEQ ID NO: 317267
acaagcagcauuugcgaua

SEQ ID NO: 477522 - RNA, 19 nt, Artificial Sequence
  Description of Artificial Sequence: Synthetic oligonucleotide
  Antisense Strand to SEQ ID NO: 477521
uaucgcaaaugcugcuugu

SEQ ID NO: 477523 - RNA, 19 nt, Artificial Sequence
  Description of Artificial Sequence: Synthetic oligonucleotide
  Sense strand starting at position 1621 of SEQ ID NO: 317267
gcgauacuuacugaguguu

SEQ ID NO: 477524 - RNA, 19 nt, Artificial Sequence
  Description of Artificial Sequence: Synthetic oligonucleotide
  Antisense Strand to SEQ ID NO: 477523
aacacucaguaaguaucgc

SEQ ID NO: 477525 - RNA, 19 nt, Artificial Sequence
  Description of Artificial Sequence: Synthetic oligonucleotide
  Sense strand starting at position 1624 of SEQ ID NO: 317267
auacuuacugaguguuucu

SEQ ID NO: 477526 - RNA, 19 nt, Artificial Sequence
  Description of Artificial Sequence: Synthetic oligonucleotide
  Antisense Strand to SEQ ID NO: 477525
agaaacacucaguaaguau

SEQ ID NO: 477527 - RNA, 19 nt, Artificial Sequence
  Description of Artificial Sequence: Synthetic oligonucleotide
  Sense strand starting at position 2112 of SEQ ID NO: 317267
gaauuauauuagucagggu

SEQ ID NO: 477528 - RNA, 19 nt, Artificial Sequence
  Description of Artificial Sequence: Synthetic oligonucleotide
  Antisense Strand to SEQ ID NO: 477527
acccugacuaauauaauuc

SEQ ID NO: 477529 - RNA, 19 nt, Artificial Sequence
  Description of Artificial Sequence: Synthetic oligonucleotide
  Sense strand starting at position 2116 of SEQ ID NO: 317267
uauauuagucaggguggua

SEQ ID NO: 477530 - RNA, 19 nt, Artificial Sequence
  Description of Artificial Sequence: Synthetic oligonucleotide
  Antisense Strand to SEQ ID NO: 477529
uaccacccugacuaauaua

SEQ ID NO: 477531 - RNA, 19 nt, Artificial Sequence
  Description of Artificial Sequence: Synthetic oligonucleotide
  Sense strand starting at position 2119 of SEQ ID NO: 317267
auuagucagggugguauaa

SEQ ID NO: 477532 - RNA, 19 nt, Artificial Sequence
  Description of Artificial Sequence: Synthetic oligonucleotide
  Antisense Strand to SEQ ID NO: 477531
uuauaccacccugacuaau

SEQ ID NO: 477533 - RNA, 19 nt, Artificial Sequence
  Description of Artificial Sequence: Synthetic oligonucleotide
  Sense strand starting at position 2132 of SEQ ID NO: 317267
guauaagaaccaggcucua

SEQ ID NO: 477534 - RNA, 19 nt, Artificial Sequence
  Description of Artificial Sequence: Synthetic oligonucleotide
  Antisense Strand to SEQ ID NO: 477533
uagagccugguucuuauac

SEQ ID NO: 477535 - RNA, 19 nt, Artificial Sequence
  Description of Artificial Sequence: Synthetic oligonucleotide
  Sense strand starting at position 2314 of SEQ ID NO: 317267
accagugaucucuguccca

SEQ ID NO: 477536 - RNA, 19 nt, Artificial Sequence
  Description of Artificial Sequence: Synthetic oligonucleotide
  Antisense Strand to SEQ ID NO: 477535
ugggacagagaucacuggu

SEQ ID NO: 477537 - RNA, 19 nt, Artificial Sequence
  Description of Artificial Sequence: Synthetic oligonucleotide
  Sense strand starting at position 2352 of SEQ ID NO: 317267
acaauuaaucuuggcagca

SEQ ID NO: 477538 - RNA, 19 nt, Artificial Sequence
  Description of Artificial Sequence: Synthetic oligonucleotide
  Antisense Strand to SEQ ID NO: 477537
ugcugccaagauuaauugu

SEQ ID NO: 477539 - RNA, 19 nt, Artificial Sequence
  Description of Artificial Sequence: Synthetic oligonucleotide
  Sense strand starting at position 2365 of SEQ ID NO: 317267
gcagcaugacacugaugga

SEQ ID NO: 477540 - RNA, 19 nt, Artificial Sequence
  Description of Artificial Sequence: Synthetic oligonucleotide
  Antisense Strand to SEQ ID NO: 477539
uccaucagugucaugcugc

SEQ ID NO: 477541 - RNA, 19 nt, Artificial Sequence
  Description of Artificial Sequence: Synthetic oligonucleotide
  Sense strand starting at position 2716 of SEQ ID NO: 317267
ugcaguucuagugauguaa

SEQ ID NO: 477542 - RNA, 19 nt, Artificial Sequence
  Description of Artificial Sequence: Synthetic oligonucleotide
  Antisense Strand to SEQ ID NO: 477541
uuacaucacuagaacugca

SEQ ID NO: 477543 - RNA, 19 nt, Artificial Sequence
  Description of Artificial Sequence: Synthetic oligonucleotide
  Sense strand starting at position 2941 of SEQ ID NO: 317267
auugauugcugacuccaaa

SEQ ID NO: 477544 - RNA, 19 nt, Artificial Sequence
  Description of Artificial Sequence: Synthetic oligonucleotide
  Antisense Strand to SEQ ID NO: 477543
uuuggagucagcaaucaau

SEQ ID NO: 477545 - RNA, 19 nt, Artificial Sequence
  Description of Artificial Sequence: Synthetic oligonucleotide
  Sense strand starting at position 3084 of SEQ ID NO: 317267
aaauauugcugugcuauag

SEQ ID NO: 477546 - RNA, 19 nt, Artificial Sequence
  Description of Artificial Sequence: Synthetic oligonucleotide
  Antisense Strand to SEQ ID NO: 477545
cuauagcacagcaauauuu

SEQ ID NO: 477547 - RNA, 19 nt, Artificial Sequence
  Description of Artificial Sequence: Synthetic oligonucleotide
  Sense strand starting at position 3088 of SEQ ID NO: 317267
auugcugugcuauaguaaa

SEQ ID NO: 477548 - RNA, 19 nt, Artificial Sequence
  Description of Artificial Sequence: Synthetic oligonucleotide
  Antisense Strand to SEQ ID NO: 477547
uuuacuauagcacagcaau

SEQ ID NO: 477549 - RNA, 19 nt, Artificial Sequence
  Description of Artificial Sequence: Synthetic oligonucleotide
  Sense strand starting at position 3140 of SEQ ID NO: 317267
uugacaagcuuuguauaca

SEQ ID NO: 477550 - RNA, 19 nt, Artificial Sequence
  Description of Artificial Sequence: Synthetic oligonucleotide
  Antisense Strand to SEQ ID NO: 477549
uguauacaaagcuugucaa

SEQ ID NO: 477551 - RNA, 19 nt, Artificial Sequence
  Description of Artificial Sequence: Synthetic oligonucleotide
  Sense strand starting at position 3156 of SEQ ID NO: 317267
acauuuagaugaugugauu

SEQ ID NO: 477552 - RNA, 19 nt, Artificial Sequence
  Description of Artificial Sequence: Synthetic oligonucleotide
  Antisense Strand to SEQ ID NO: 477551
aaucacaucaucuaaaugu

SEQ ID NO: 477553 - RNA, 19 nt, Artificial Sequence
  Description of Artificial Sequence: Synthetic oligonucleotide
  Sense strand starting at position 3313 of SEQ ID NO: 317267
gcggauacauuauucuauu

SEQ ID NO: 477554 - RNA, 19 nt, Artificial Sequence
  Description of Artificial Sequence: Synthetic oligonucleotide
  Antisense Strand to SEQ ID NO: 477553
aauagaauaauguauccgc

SEQ ID NO: 477555 - RNA, 19 nt, Artificial Sequence
  Description of Artificial Sequence: Synthetic oligonucleotide
  Sense strand starting at position 3314 of SEQ ID NO: 317267
cggauacauuauucuauua

SEQ ID NO: 477556 - RNA, 19 nt, Artificial Sequence
  Description of Artificial Sequence: Synthetic oligonucleotide
  Antisense Strand to SEQ ID NO: 477555
uaauagaauaauguauccg

SEQ ID NO: 477557 - RNA, 19 nt, Artificial Sequence
  Description of Artificial Sequence: Synthetic oligonucleotide
  Sense strand starting at position 3447 of SEQ ID NO: 317267
cuaucaauggcacauguaa

SEQ ID NO: 477558 - RNA, 19 nt, Artificial Sequence
  Description of Artificial Sequence: Synthetic oligonucleotide
  Antisense Strand to SEQ ID NO: 477557
uuacaugugccauugauag

SEQ ID NO: 477559 - RNA, 19 nt, Artificial Sequence
  Description of Artificial Sequence: Synthetic oligonucleotide
  Sense strand starting at position 3504 of SEQ ID NO: 317267
ugacuuuggaacugucagu

SEQ ID NO: 477560 - RNA, 19 nt, Artificial Sequence
  Description of Artificial Sequence: Synthetic oligonucleotide
  Antisense Strand to SEQ ID NO: 477559
acugacaguuccaaaguca

SEQ ID NO: 477561 - RNA, 19 nt, Artificial Sequence
  Description of Artificial Sequence: Synthetic oligonucleotide
  Sense strand starting at position 3529 of SEQ ID NO: 317267
ugacuuguguuucuugacu

SEQ ID NO: 477562 - RNA, 19 nt, Artificial Sequence
  Description of Artificial Sequence: Synthetic oligonucleotide
  Antisense Strand to SEQ ID NO: 477561
agucaagaaacacaaguca

SEQ ID NO: 477563 - RNA, 19 nt, Artificial Sequence
  Description of Artificial Sequence: Synthetic oligonucleotide
  Sense strand starting at position 3878 of SEQ ID NO: 317267
auggaauacuuacaugaug

SEQ ID NO: 477564 - RNA, 19 nt, Artificial Sequence
  Description of Artificial Sequence: Synthetic oligonucleotide
  Antisense Strand to SEQ ID NO: 477563
caucauguaaguauuccau

SEQ ID NO: 477565 - RNA, 19 nt, Artificial Sequence
  Description of Artificial Sequence: Synthetic oligonucleotide
  Sense strand starting at position 3896 of SEQ ID NO: 317267
gaaccauagugauccuguu

SEQ ID NO: 477566 - RNA, 19 nt, Artificial Sequence
  Description of Artificial Sequence: Synthetic oligonucleotide
  Antisense Strand to SEQ ID NO: 477565
aacaggaucacuaugguuc

SEQ ID NO: 477567 - RNA, 19 nt, Artificial Sequence
  Description of Artificial Sequence: Synthetic oligonucleotide
  Sense strand starting at position 37 of SEQ ID NO: 317268
cgacaugcaguggaagaau

SEQ ID NO: 477568 - RNA, 19 nt, Artificial Sequence
  Description of Artificial Sequence: Synthetic oligonucleotide
  Antisense Strand to SEQ ID NO: 477567
auucuuccacugcaugucg

SEQ ID NO: 477569 - RNA, 19 nt, Artificial Sequence
  Description of Artificial Sequence: Synthetic oligonucleotide
  Sense strand starting at position 105 of SEQ ID NO: 317268
aucugcuugagaggcauaa

SEQ ID NO: 477570 - RNA, 19 nt, Artificial Sequence
  Description of Artificial Sequence: Synthetic oligonucleotide
  Antisense Strand to SEQ ID NO: 477569
uuaugccucucaagcagau

SEQ ID NO: 477571 - RNA, 19 nt, Artificial Sequence
  Description of Artificial Sequence: Synthetic oligonucleotide
  Sense strand starting at position 107 of SEQ ID NO: 317268
cugcuugagaggcauaaua

SEQ ID NO: 477572 - RNA, 19 nt, Artificial Sequence
  Description of Artificial Sequence: Synthetic oligonucleotide
  Antisense Strand to SEQ ID NO: 477571
uauuaugccucucaagcag

SEQ ID NO: 477573 - RNA, 19 nt, Artificial Sequence
  Description of Artificial Sequence: Synthetic oligonucleotide
  Sense strand starting at position 109 of SEQ ID NO: 317268
gcuugagaggcauaauaua

SEQ ID NO: 477574 - RNA, 19 nt, Artificial Sequence
  Description of Artificial Sequence: Synthetic oligonucleotide
  Antisense Strand to SEQ ID NO: 477573
uauauuaugccucucaagc

SEQ ID NO: 477575 - RNA, 19 nt, Artificial Sequence
  Description of Artificial Sequence: Synthetic oligonucleotide
  Sense strand starting at position 133 of SEQ ID NO: 317268
guuuguaaacccugauauc

SEQ ID NO: 477576 - RNA, 19 nt, Artificial Sequence
  Description of Artificial Sequence: Synthetic oligonucleotide
  Antisense Strand to SEQ ID NO: 477575
gauaucaggguuuacaaac

SEQ ID NO: 477577 - RNA, 19 nt, Artificial Sequence
  Description of Artificial Sequence: Synthetic oligonucleotide
  Sense strand starting at position 328 of SEQ ID NO: 317268
ucuaaaucucaugggacca

SEQ ID NO: 477578 - RNA, 19 nt, Artificial Sequence
  Description of Artificial Sequence: Synthetic oligonucleotide
  Antisense Strand to SEQ ID NO: 477577
uggucccaugagauuuaga

SEQ ID NO: 477579 - RNA, 19 nt, Artificial Sequence
  Description of Artificial Sequence: Synthetic oligonucleotide
  Sense strand starting at position 527 of SEQ ID NO: 317268
gugacugugccagacauca

SEQ ID NO: 477580 - RNA, 19 nt, Artificial Sequence
  Description of Artificial Sequence: Synthetic oligonucleotide
  Antisense Strand to SEQ ID NO: 477579
ugaugucuggcacagucac

SEQ ID NO: 477581 - RNA, 19 nt, Artificial Sequence
  Description of Artificial Sequence: Synthetic oligonucleotide
  Sense strand starting at position 825 of SEQ ID NO: 317268
agacaaucuccuuguguua

SEQ ID NO: 477582 - RNA, 19 nt, Artificial Sequence
  Description of Artificial Sequence: Synthetic oligonucleotide
  Antisense Strand to SEQ ID NO: 477581
uaacacaaggagauugucu

SEQ ID NO: 477583 - RNA, 19 nt, Artificial Sequence
  Description of Artificial Sequence: Synthetic oligonucleotide
  Sense strand starting at position 867 of SEQ ID NO: 317268
ggcagugucagaggauuaa

SEQ ID NO: 477584 - RNA, 19 nt, Artificial Sequence
  Description of Artificial Sequence: Synthetic oligonucleotide
  Antisense Strand to SEQ ID NO: 477583
uuaauccucugacacugcc

SEQ ID NO: 477585 - RNA, 19 nt, Artificial Sequence
  Description of Artificial Sequence: Synthetic oligonucleotide
  Sense strand starting at position 871 of SEQ ID NO: 317268
gugucagaggauuaagcua

SEQ ID NO: 477586 - RNA, 19 nt, Artificial Sequence
  Description of Artificial Sequence: Synthetic oligonucleotide
  Antisense Strand to SEQ ID NO: 477585
uagcuuaauccucugacac

SEQ ID NO: 477587 - RNA, 19 nt, Artificial Sequence
  Description of Artificial Sequence: Synthetic oligonucleotide
  Sense strand starting at position 930 of SEQ ID NO: 317268
gacagcaagcaguauugaa

SEQ ID NO: 477588 - RNA, 19 nt, Artificial Sequence
  Description of Artificial Sequence: Synthetic oligonucleotide
  Antisense Strand to SEQ ID NO: 477587
uucaauacugcuugcuguc

SEQ ID NO: 477589 - RNA, 19 nt, Artificial Sequence
  Description of Artificial Sequence: Synthetic oligonucleotide
  Sense strand starting at position 943 of SEQ ID NO: 317268
auugaaaugguacguccau

SEQ ID NO: 477590 - RNA, 19 nt, Artificial Sequence
  Description of Artificial Sequence: Synthetic oligonucleotide
  Antisense Strand to SEQ ID NO: 477589
auggacguaccauuucaau

SEQ ID NO: 477591 - RNA, 19 nt, Artificial Sequence
  Description of Artificial Sequence: Synthetic oligonucleotide
  Sense strand starting at position 944 of SEQ ID NO: 317268
uugaaaugguacguccaua

SEQ ID NO: 477592 - RNA, 19 nt, Artificial Sequence
  Description of Artificial Sequence: Synthetic oligonucleotide
  Antisense Strand to SEQ ID NO: 477591
uauggacguaccauuucaa

SEQ ID NO: 477593 - RNA, 19 nt, Artificial Sequence
  Description of Artificial Sequence: Synthetic oligonucleotide
  Sense strand starting at position 1091 of SEQ ID NO: 317268
accucuagcucaucugaga

SEQ ID NO: 477594 - RNA, 19 nt, Artificial Sequence
  Description of Artificial Sequence: Synthetic oligonucleotide
  Antisense Strand to SEQ ID NO: 477593
ucucagaugagcuagaggu

SEQ ID NO: 477595 - RNA, 19 nt, Artificial Sequence
  Description of Artificial Sequence: Synthetic oligonucleotide
  Sense strand starting at position 1137 of SEQ ID NO: 317268
ucaacugagcucuggcaaa

SEQ ID NO: 477596 - RNA, 19 nt, Artificial Sequence
  Description of Artificial Sequence: Synthetic oligonucleotide
  Antisense Strand to SEQ ID NO: 477595
uuugccagagcucaguuga

SEQ ID NO: 477597 - RNA, 19 nt, Artificial Sequence
  Description of Artificial Sequence: Synthetic oligonucleotide
  Sense strand starting at position 1265 of SEQ ID NO: 317268
cgagucagacuuuagauua

SEQ ID NO: 477598 - RNA, 19 nt, Artificial Sequence
  Description of Artificial Sequence: Synthetic oligonucleotide
  Antisense Strand to SEQ ID NO: 477597
uaaucuaaagucugacucg

SEQ ID NO: 477599 - RNA, 19 nt, Artificial Sequence
  Description of Artificial Sequence: Synthetic oligonucleotide
  Sense strand starting at position 1399 of SEQ ID NO: 317268
aaaugauggacgcgauuac

SEQ ID NO: 477600 - RNA, 19 nt, Artificial Sequence
  Description of Artificial Sequence: Synthetic oligonucleotide
  Antisense Strand to SEQ ID NO: 477599
guaaucgcguccaucauuu

SEQ ID NO: 477601 - RNA, 19 nt, Artificial Sequence
  Description of Artificial Sequence: Synthetic oligonucleotide
  Sense strand starting at position 1400 of SEQ ID NO: 317268
aaugauggacgcgauuaca

SEQ ID NO: 477602 - RNA, 19 nt, Artificial Sequence
  Description of Artificial Sequence: Synthetic oligonucleotide
  Antisense Strand to SEQ ID NO: 477601
uguaaucgcguccaucauu

SEQ ID NO: 477603 - RNA, 19 nt, Artificial Sequence
  Description of Artificial Sequence: Synthetic oligonucleotide
  Sense strand starting at position 2243 of SEQ ID NO: 317268
gcgcguuuccucuugagug

SEQ ID NO: 477604 - RNA, 19 nt, Artificial Sequence
  Description of Artificial Sequence: Synthetic oligonucleotide
  Antisense Strand to SEQ ID NO: 477603
cacucaagaggaaacgcgc

SEQ ID NO: 477605 - RNA, 19 nt, Artificial Sequence
  Description of Artificial Sequence: Synthetic oligonucleotide
  Sense strand starting at position 2273 of SEQ ID NO: 317268
ggcuguugugcagucguga

SEQ ID NO: 477606 - RNA, 19 nt, Artificial Sequence
  Description of Artificial Sequence: Synthetic oligonucleotide
  Antisense Strand to SEQ ID NO: 477605
ucacgacugcacaacagcc

SEQ ID NO: 477607 - RNA, 19 nt, Artificial Sequence
  Description of Artificial Sequence: Synthetic oligonucleotide
  Sense strand starting at position 2314 of SEQ ID NO: 317268
guauacuaucuguaaauac

SEQ ID NO: 477608 - RNA, 19 nt, Artificial Sequence
  Description of Artificial Sequence: Synthetic oligonucleotide
  Antisense Strand to SEQ ID NO: 477607
guauuuacagauaguauac

SEQ ID NO: 477609 - RNA, 19 nt, Artificial Sequence
  Description of Artificial Sequence: Synthetic oligonucleotide
  Sense strand starting at position 2362 of SEQ ID NO: 317268
acauaauugugagcuaaag

SEQ ID NO: 477610 - RNA, 19 nt, Artificial Sequence
  Description of Artificial Sequence: Synthetic oligonucleotide
  Antisense Strand to SEQ ID NO: 477609
cuuuagcucacaauuaugu

SEQ ID NO: 477611 - RNA, 19 nt, Artificial Sequence
  Description of Artificial Sequence: Synthetic oligonucleotide
  Sense strand starting at position 2364 of SEQ ID NO: 317268
auaauugugagcuaaaggu

SEQ ID NO: 477612 - RNA, 19 nt, Artificial Sequence
  Description of Artificial Sequence: Synthetic oligonucleotide
  Antisense Strand to SEQ ID NO: 477611
accuuuagcucacaauuau

SEQ ID NO: 477613 - RNA, 19 nt, Artificial Sequence
  Description of Artificial Sequence: Synthetic oligonucleotide
  Sense strand starting at position 2377 of SEQ ID NO: 317268
aaagguuacuguccaugua

SEQ ID NO: 477614 - RNA, 19 nt, Artificial Sequence
  Description of Artificial Sequence: Synthetic oligonucleotide
  Antisense Strand to SEQ ID NO: 477613
uacauggacaguaaccuuu

SEQ ID NO: 477615 - RNA, 19 nt, Artificial Sequence
  Description of Artificial Sequence: Synthetic oligonucleotide
  Sense strand starting at position 2378 of SEQ ID NO: 317268
aagguuacuguccauguaa

SEQ ID NO: 477616 - RNA, 19 nt, Artificial Sequence
  Description of Artificial Sequence: Synthetic oligonucleotide
  Antisense Strand to SEQ ID NO: 477615
uuacauggacaguaaccuu

SEQ ID NO: 477617 - RNA, 19 nt, Artificial Sequence
  Description of Artificial Sequence: Synthetic oligonucleotide
  Sense strand starting at position 2447 of SEQ ID NO: 317268
cacauagauccuggugcua

SEQ ID NO: 477618 - RNA, 19 nt, Artificial Sequence
  Description of Artificial Sequence: Synthetic oligonucleotide
  Antisense Strand to SEQ ID NO: 477617
uagcaccaggaucuaugug

SEQ ID NO: 477619 - RNA, 19 nt, Artificial Sequence
  Description of Artificial Sequence: Synthetic oligonucleotide
  Sense strand starting at position 2612 of SEQ ID NO: 317268
agaggaaccuguuccguga

SEQ ID NO: 477620 - RNA, 19 nt, Artificial Sequence
  Description of Artificial Sequence: Synthetic oligonucleotide
  Antisense Strand to SEQ ID NO: 477619
ucacggaacagguuccucu

SEQ ID NO: 477621 - RNA, 19 nt, Artificial Sequence
  Description of Artificial Sequence: Synthetic oligonucleotide
  Sense strand starting at position 2615 of SEQ ID NO: 317268
ggaaccuguuccgugaaac

SEQ ID NO: 477622 - RNA, 19 nt, Artificial Sequence
  Description of Artificial Sequence: Synthetic oligonucleotide
  Antisense Strand to SEQ ID NO: 477621
guuucacggaacagguucc

SEQ ID NO: 477623 - RNA, 19 nt, Artificial Sequence
  Description of Artificial Sequence: Synthetic oligonucleotide
  Sense strand starting at position 2616 of SEQ ID NO: 317268
gaaccuguuccgugaaaca

SEQ ID NO: 477624 - RNA, 19 nt, Artificial Sequence
  Description of Artificial Sequence: Synthetic oligonucleotide
  Antisense Strand to SEQ ID NO: 477623
uguuucacggaacagguuc

SEQ ID NO: 477625 - RNA, 19 nt, Artificial Sequence
  Description of Artificial Sequence: Synthetic oligonucleotide
  Sense strand starting at position 2621 of SEQ ID NO: 317268
uguuccgugaaacaugauu

SEQ ID NO: 477626 - RNA, 19 nt, Artificial Sequence
  Description of Artificial Sequence: Synthetic oligonucleotide
  Antisense Strand to SEQ ID NO: 477625
aaucauguuucacggaaca

SEQ ID NO: 477627 - RNA, 19 nt, Artificial Sequence
  Description of Artificial Sequence: Synthetic oligonucleotide
  Sense strand starting at position 2626 of SEQ ID NO: 317268
cgugaaacaugauuccgga

SEQ ID NO: 477628 - RNA, 19 nt, Artificial Sequence
  Description of Artificial Sequence: Synthetic oligonucleotide
  Antisense Strand to SEQ ID NO: 477627
uccggaaucauguuucacg

SEQ ID NO: 477629 - RNA, 19 nt, Artificial Sequence
  Description of Artificial Sequence: Synthetic oligonucleotide
  Sense strand starting at position 2633 of SEQ ID NO: 317268
caugauuccggaggcaaag

SEQ ID NO: 477630 - RNA, 19 nt, Artificial Sequence
  Description of Artificial Sequence: Synthetic oligonucleotide
  Antisense Strand to SEQ ID NO: 477629
cuuugccuccggaaucaug

SEQ ID NO: 477631 - RNA, 19 nt, Artificial Sequence
  Description of Artificial Sequence: Synthetic oligonucleotide
  Sense strand starting at position 2655 of SEQ ID NO: 317268
ggaggcuaguccucaguga

SEQ ID NO: 477632 - RNA, 19 nt, Artificial Sequence
  Description of Artificial Sequence: Synthetic oligonucleotide
  Antisense Strand to SEQ ID NO: 477631
ucacugaggacuagccucc

SEQ ID NO: 477633 - RNA, 19 nt, Artificial Sequence
  Description of Artificial Sequence: Synthetic oligonucleotide
  Sense strand starting at position 2702 of SEQ ID NO: 317268
ucacuccaucaugggauau

SEQ ID NO: 477634 - RNA, 19 nt, Artificial Sequence
  Description of Artificial Sequence: Synthetic oligonucleotide
  Antisense Strand to SEQ ID NO: 477633
auaucccaugauggaguga

SEQ ID NO: 477635 - RNA, 19 nt, Artificial Sequence
  Description of Artificial Sequence: Synthetic oligonucleotide
  Sense strand starting at position 2704 of SEQ ID NO: 317268
acuccaucaugggauauuu

SEQ ID NO: 477636 - RNA, 19 nt, Artificial Sequence
  Description of Artificial Sequence: Synthetic oligonucleotide
  Antisense Strand to SEQ ID NO: 477635
aaauaucccaugauggagu

SEQ ID NO: 477637 - RNA, 19 nt, Artificial Sequence
  Description of Artificial Sequence: Synthetic oligonucleotide
  Sense strand starting at position 2713 of SEQ ID NO: 317268
ugggauauuugauaacuau

SEQ ID NO: 477638 - RNA, 19 nt, Artificial Sequence
  Description of Artificial Sequence: Synthetic oligonucleotide
  Antisense Strand to SEQ ID NO: 477637
auaguuaucaaauauccca

SEQ ID NO: 477639 - RNA, 19 nt, Artificial Sequence
  Description of Artificial Sequence: Synthetic oligonucleotide
  Sense strand starting at position 2939 of SEQ ID NO: 317268
auaccuguccuauacuguu

SEQ ID NO: 477640 - RNA, 19 nt, Artificial Sequence
  Description of Artificial Sequence: Synthetic oligonucleotide
  Antisense Strand to SEQ ID NO: 477639
aacaguauaggacagguau

SEQ ID NO: 477641 - RNA, 19 nt, Artificial Sequence
  Description of Artificial Sequence: Synthetic oligonucleotide
  Sense strand starting at position 3213 of SEQ ID NO: 317268
uucucugcaguuuaaauga

SEQ ID NO: 477642 - RNA, 19 nt, Artificial Sequence
  Description of Artificial Sequence: Synthetic oligonucleotide
  Antisense Strand to SEQ ID NO: 477641
ucauuuaaacugcagagaa

SEQ ID NO: 477643 - RNA, 19 nt, Artificial Sequence
  Description of Artificial Sequence: Synthetic oligonucleotide
  Sense strand starting at position 3409 of SEQ ID NO: 317268
ugacauuacugauccugua

SEQ ID NO: 477644 - RNA, 19 nt, Artificial Sequence
  Description of Artificial Sequence: Synthetic oligonucleotide
  Antisense Strand to SEQ ID NO: 477643
uacaggaucaguaauguca

SEQ ID NO: 477645 - RNA, 19 nt, Artificial Sequence
  Description of Artificial Sequence: Synthetic oligonucleotide
  Sense strand starting at position 3910 of SEQ ID NO: 317268
ccuagaaaggguugcugaa

SEQ ID NO: 477646 - RNA, 19 nt, Artificial Sequence
  Description of Artificial Sequence: Synthetic oligonucleotide
  Antisense Strand to SEQ ID NO: 477645
uucagcaacccuuucuagg

SEQ ID NO: 477647 - RNA, 19 nt, Artificial Sequence
  Description of Artificial Sequence: Synthetic oligonucleotide
  Sense strand starting at position 115 of SEQ ID NO: 317269
agaguacucccuugaugca

SEQ ID NO: 477648 - RNA, 19 nt, Artificial Sequence
  Description of Artificial Sequence: Synthetic oligonucleotide
  Antisense Strand to SEQ ID NO: 477647
ugcaucaagggaguacucu

SEQ ID NO: 477649 - RNA, 19 nt, Artificial Sequence
  Description of Artificial Sequence: Synthetic oligonucleotide
  Sense strand starting at position 116 of SEQ ID NO: 317269
gaguacucccuugaugcaa

SEQ ID NO: 477650 - RNA, 19 nt, Artificial Sequence
  Description of Artificial Sequence: Synthetic oligonucleotide
  Antisense Strand to SEQ ID NO: 477649
uugcaucaagggaguacuc

SEQ ID NO: 477651 - RNA, 19 nt, Artificial Sequence
  Description of Artificial Sequence: Synthetic oligonucleotide
  Sense strand starting at position 220 of SEQ ID NO: 317269
gauauaauggcuugcuaga

SEQ ID NO: 477652 - RNA, 19 nt, Artificial Sequence
  Description of Artificial Sequence: Synthetic oligonucleotide
  Antisense Strand to SEQ ID NO: 477651
ucuagcaagccauuauauc

SEQ ID NO: 477653 - RNA, 19 nt, Artificial Sequence
  Description of Artificial Sequence: Synthetic oligonucleotide
  Sense strand starting at position 266 of SEQ ID NO: 317269
auguuaucaguuggaauaa

SEQ ID NO: 477654 - RNA, 19 nt, Artificial Sequence
  Description of Artificial Sequence: Synthetic oligonucleotide
  Antisense Strand to SEQ ID NO: 477653
uuauuccaacugauaacau

SEQ ID NO: 477655 - RNA, 19 nt, Artificial Sequence
  Description of Artificial Sequence: Synthetic oligonucleotide
  Sense strand starting at position 333 of SEQ ID NO: 317269
augucuuaucuugggauag

SEQ ID NO: 477656 - RNA, 19 nt, Artificial Sequence
  Description of Artificial Sequence: Synthetic oligonucleotide
  Antisense Strand to SEQ ID NO: 477655
cuaucccaagauaagacau

SEQ ID NO: 477657 - RNA, 19 nt, Artificial Sequence
  Description of Artificial Sequence: Synthetic oligonucleotide
  Sense strand starting at position 337 of SEQ ID NO: 317269
cuuaucuugggauagcuua

SEQ ID NO: 477658 - RNA, 19 nt, Artificial Sequence
  Description of Artificial Sequence: Synthetic oligonucleotide
  Antisense Strand to SEQ ID NO: 477657
uaagcuaucccaagauaag

SEQ ID NO: 477659 - RNA, 19 nt, Artificial Sequence
  Description of Artificial Sequence: Synthetic oligonucleotide
  Sense strand starting at position 389 of SEQ ID NO: 317269
ucauauggucuacagaguu

SEQ ID NO: 477660 - RNA, 19 nt, Artificial Sequence
  Description of Artificial Sequence: Synthetic oligonucleotide
  Antisense Strand to SEQ ID NO: 477659
aacucuguagaccauauga

SEQ ID NO: 477661 - RNA, 19 nt, Artificial Sequence
  Description of Artificial Sequence: Synthetic oligonucleotide
  Sense strand starting at position 395 of SEQ ID NO: 317269
ggucuacagaguuaagcaa

SEQ ID NO: 477662 - RNA, 19 nt, Artificial Sequence
  Description of Artificial Sequence: Synthetic oligonucleotide
  Antisense Strand to SEQ ID NO: 477661
uugcuuaacucuguagacc

SEQ ID NO: 477663 - RNA, 19 nt, Artificial Sequence
  Description of Artificial Sequence: Synthetic oligonucleotide
  Sense strand starting at position 458 of SEQ ID NO: 317269
ggcuauucuuaaucauaag

SEQ ID NO: 477664 - RNA, 19 nt, Artificial Sequence
  Description of Artificial Sequence: Synthetic oligonucleotide
  Antisense Strand to SEQ ID NO: 477663
cuuaugauuaagaauagcc

SEQ ID NO: 477665 - RNA, 19 nt, Artificial Sequence
  Description of Artificial Sequence: Synthetic oligonucleotide
  Sense strand starting at position 505 of SEQ ID NO: 317269
cgggaauucuccuccuaaa

SEQ ID NO: 477666 - RNA, 19 nt, Artificial Sequence
  Description of Artificial Sequence: Synthetic oligonucleotide
  Antisense Strand to SEQ ID NO: 477665
uuuaggaggagaauucccg

SEQ ID NO: 477667 - RNA, 19 nt, Artificial Sequence
  Description of Artificial Sequence: Synthetic oligonucleotide
  Sense strand starting at position 559 of SEQ ID NO: 317269
gaggaacuuuagguuuaca

SEQ ID NO: 477668 - RNA, 19 nt, Artificial Sequence
  Description of Artificial Sequence: Synthetic oligonucleotide
  Antisense Strand to SEQ ID NO: 477667
uguaaaccuaaaguuccuc

SEQ ID NO: 477669 - RNA, 19 nt, Artificial Sequence
  Description of Artificial Sequence: Synthetic oligonucleotide
  Sense strand starting at position 711 of SEQ ID NO: 317269
agagguucuugacuacaaa

SEQ ID NO: 477670 - RNA, 19 nt, Artificial Sequence
  Description of Artificial Sequence: Synthetic oligonucleotide
  Antisense Strand to SEQ ID NO: 477669
uuuguagucaagaaccucu

SEQ ID NO: 477671 - RNA, 19 nt, Artificial Sequence
  Description of Artificial Sequence: Synthetic oligonucleotide
  Sense strand starting at position 800 of SEQ ID NO: 317269
gaugaaugggcuuggaaug

SEQ ID NO: 477672 - RNA, 19 nt, Artificial Sequence
  Description of Artificial Sequence: Synthetic oligonucleotide
  Antisense Strand to SEQ ID NO: 477671
cauuccaagcccauucauc

SEQ ID NO: 477673 - RNA, 19 nt, Artificial Sequence
  Description of Artificial Sequence: Synthetic oligonucleotide
  Sense strand starting at position 905 of SEQ ID NO: 317269
ucggacugucacugaaaga

SEQ ID NO: 477674 - RNA, 19 nt, Artificial Sequence
  Description of Artificial Sequence: Synthetic oligonucleotide
  Antisense Strand to SEQ ID NO: 477673
ucuuucagugacaguccga

SEQ ID NO: 477675 - RNA, 19 nt, Artificial Sequence
  Description of Artificial Sequence: Synthetic oligonucleotide
  Sense strand starting at position 1087 of SEQ ID NO: 317269
aaguguuaaccuuggaagu

SEQ ID NO: 477676 - RNA, 19 nt, Artificial Sequence
  Description of Artificial Sequence: Synthetic oligonucleotide
  Antisense Strand to SEQ ID NO: 477675
acuuccaagguuaacacuu

SEQ ID NO: 477677 - RNA, 19 nt, Artificial Sequence
  Description of Artificial Sequence: Synthetic oligonucleotide
  Sense strand starting at position 1088 of SEQ ID NO: 317269
aguguuaaccuuggaaguu

SEQ ID NO: 477678 - RNA, 19 nt, Artificial Sequence
  Description of Artificial Sequence: Synthetic oligonucleotide
  Antisense Strand to SEQ ID NO: 477677
aacuuccaagguuaacacu

SEQ ID NO: 477679 - RNA, 19 nt, Artificial Sequence
  Description of Artificial Sequence: Synthetic oligonucleotide
  Sense strand starting at position 1101 of SEQ ID NO: 317269
gaaguuagauuguucucca

SEQ ID NO: 477680 - RNA, 19 nt, Artificial Sequence
  Description of Artificial Sequence: Synthetic oligonucleotide
  Antisense Strand to SEQ ID NO: 477679
uggagaacaaucuaacuuc

SEQ ID NO: 477681 - RNA, 19 nt, Artificial Sequence
  Description of Artificial Sequence: Synthetic oligonucleotide
  Sense strand starting at position 2506 of SEQ ID NO: 317269
ggcaaucauccgcaaagac

SEQ ID NO: 477682 - RNA, 19 nt, Artificial Sequence
  Description of Artificial Sequence: Synthetic oligonucleotide
  Antisense Strand to SEQ ID NO: 477681
gucuuugcggaugauugcc

SEQ ID NO: 477683 - RNA, 19 nt, Artificial Sequence
  Description of Artificial Sequence: Synthetic oligonucleotide
  Sense strand starting at position 2690 of SEQ ID NO: 317269
guaauuauagaacaagcuu

SEQ ID NO: 477684 - RNA, 19 nt, Artificial Sequence
  Description of Artificial Sequence: Synthetic oligonucleotide
  Antisense Strand to SEQ ID NO: 477683
aagcuuguucuauaauuac

SEQ ID NO: 477685 - RNA, 19 nt, Artificial Sequence
  Description of Artificial Sequence: Synthetic oligonucleotide
  Sense strand starting at position 2821 of SEQ ID NO: 317269
accgcaagaguuuaguuaa

SEQ ID NO: 477686 - RNA, 19 nt, Artificial Sequence
  Description of Artificial Sequence: Synthetic oligonucleotide
  Antisense Strand to SEQ ID NO: 477685
uuaacuaaacucuugcggu

SEQ ID NO: 477687 - RNA, 19 nt, Artificial Sequence
  Description of Artificial Sequence: Synthetic oligonucleotide
  Sense strand starting at position 2899 of SEQ ID NO: 317269
cuuacagucucaucugaga

SEQ ID NO: 477688 - RNA, 19 nt, Artificial Sequence
  Description of Artificial Sequence: Synthetic oligonucleotide
  Antisense Strand to SEQ ID NO: 477687
ucucagaugagacuguaag

SEQ ID NO: 477689 - RNA, 19 nt, Artificial Sequence
  Description of Artificial Sequence: Synthetic oligonucleotide
  Sense strand starting at position 2973 of SEQ ID NO: 317269
agcugauggcaagauguca

SEQ ID NO: 477690 - RNA, 19 nt, Artificial Sequence
  Description of Artificial Sequence: Synthetic oligonucleotide
  Antisense Strand to SEQ ID NO: 477689
ugacaucuugccaucagcu

SEQ ID NO: 477691 - RNA, 19 nt, Artificial Sequence
  Description of Artificial Sequence: Synthetic oligonucleotide
  Sense strand starting at position 3186 of SEQ ID NO: 317269
acaugucagucaucuaauu

SEQ ID NO: 477692 - RNA, 19 nt, Artificial Sequence
  Description of Artificial Sequence: Synthetic oligonucleotide
  Antisense Strand to SEQ ID NO: 477691
aauuagaugacugacaugu

SEQ ID NO: 477693 - RNA, 19 nt, Artificial Sequence
  Description of Artificial Sequence: Synthetic oligonucleotide
  Sense strand starting at position 3220 of SEQ ID NO: 317269
gccagaacuuaauugacca

SEQ ID NO: 477694 - RNA, 19 nt, Artificial Sequence
  Description of Artificial Sequence: Synthetic oligonucleotide
  Antisense Strand to SEQ ID NO: 477693
uggucaauuaaguucuggc

SEQ ID NO: 477695 - RNA, 19 nt, Artificial Sequence
  Description of Artificial Sequence: Synthetic oligonucleotide
  Sense strand starting at position 3224 of SEQ ID NO: 317269
gaacuuaauugaccaggua

SEQ ID NO: 477696 - RNA, 19 nt, Artificial Sequence
  Description of Artificial Sequence: Synthetic oligonucleotide
  Antisense Strand to SEQ ID NO: 477695
uaccuggucaauuaaguuc

SEQ ID NO: 477697 - RNA, 19 nt, Artificial Sequence
  Description of Artificial Sequence: Synthetic oligonucleotide
  Sense strand starting at position 3236 of SEQ ID NO: 317269
ccagguauuugacagaauu

SEQ ID NO: 477698 - RNA, 19 nt, Artificial Sequence
  Description of Artificial Sequence: Synthetic oligonucleotide
  Antisense Strand to SEQ ID NO: 477697
aauucugucaaauaccugg

SEQ ID NO: 477699 - RNA, 19 nt, Artificial Sequence
  Description of Artificial Sequence: Synthetic oligonucleotide
  Sense strand starting at position 3286 of SEQ ID NO: 317269
ugaaccucuugucuacaga

SEQ ID NO: 477700 - RNA, 19 nt, Artificial Sequence
  Description of Artificial Sequence: Synthetic oligonucleotide
  Antisense Strand to SEQ ID NO: 477699
ucuguagacaagagguuca

SEQ ID NO: 477701 - RNA, 19 nt, Artificial Sequence
  Description of Artificial Sequence: Synthetic oligonucleotide
  Sense strand starting at position 3310 of SEQ ID NO: 317269
agguguuugcaggaaugca

SEQ ID NO: 477702 - RNA, 19 nt, Artificial Sequence
  Description of Artificial Sequence: Synthetic oligonucleotide
  Antisense Strand to SEQ ID NO: 477701
ugcauuccugcaaacaccu

SEQ ID NO: 477703 - RNA, 19 nt, Artificial Sequence
  Description of Artificial Sequence: Synthetic oligonucleotide
  Sense strand starting at position 3342 of SEQ ID NO: 317269
agguaaucucaagguagca

SEQ ID NO: 477704 - RNA, 19 nt, Artificial Sequence
  Description of Artificial Sequence: Synthetic oligonucleotide
  Antisense Strand to SEQ ID NO: 477703
ugcuaccuugagauuaccu

SEQ ID NO: 477705 - RNA, 19 nt, Artificial Sequence
  Description of Artificial Sequence: Synthetic oligonucleotide
  Sense strand starting at position 3373 of SEQ ID NO: 317269
ugggccacguaauuagaaa

SEQ ID NO: 477706 - RNA, 19 nt, Artificial Sequence
  Description of Artificial Sequence: Synthetic oligonucleotide
  Antisense Strand to SEQ ID NO: 477705
uuucuaauuacguggccca

SEQ ID NO: 477707 - RNA, 19 nt, Artificial Sequence
  Description of Artificial Sequence: Synthetic oligonucleotide
  Sense strand starting at position 3423 of SEQ ID NO: 317269
ggcugacuucuagggagau

SEQ ID NO: 477708 - RNA, 19 nt, Artificial Sequence
  Description of Artificial Sequence: Synthetic oligonucleotide
  Antisense Strand to SEQ ID NO: 477707
aucucccuagaagucagcc

SEQ ID NO: 477709 - RNA, 19 nt, Artificial Sequence
  Description of Artificial Sequence: Synthetic oligonucleotide
  Sense strand starting at position 3458 of SEQ ID NO: 317269
ccauuugagucagaaagaa

SEQ ID NO: 477710 - RNA, 19 nt, Artificial Sequence
  Description of Artificial Sequence: Synthetic oligonucleotide
  Antisense Strand to SEQ ID NO: 477709
uucuuucugacucaaaugg

SEQ ID NO: 477711 - RNA, 19 nt, Artificial Sequence
  Description of Artificial Sequence: Synthetic oligonucleotide
  Sense strand starting at position 3504 of SEQ ID NO: 317269
uucugcaugguuuaaauca

SEQ ID NO: 477712 - RNA, 19 nt, Artificial Sequence
  Description of Artificial Sequence: Synthetic oligonucleotide
  Antisense Strand to SEQ ID NO: 477711
ugauuuaaaccaugcagaa

SEQ ID NO: 477713 - RNA, 19 nt, Artificial Sequence
  Description of Artificial Sequence: Synthetic oligonucleotide
  Sense strand starting at position 3519 of SEQ ID NO: 317269
aucagacuugaaugucacu

SEQ ID NO: 477714 - RNA, 19 nt, Artificial Sequence
  Description of Artificial Sequence: Synthetic oligonucleotide
  Antisense Strand to SEQ ID NO: 477713
agugacauucaagucugau

SEQ ID NO: 477715 - RNA, 19 nt, Artificial Sequence
  Description of Artificial Sequence: Synthetic oligonucleotide
  Sense strand starting at position 3553 of SEQ ID NO: 317269
uuugcaagacuguaauuac

SEQ ID NO: 477716 - RNA, 19 nt, Artificial Sequence
  Description of Artificial Sequence: Synthetic oligonucleotide
  Antisense Strand to SEQ ID NO: 477715
guaauuacagucuugcaaa

SEQ ID NO: 477717 - RNA, 19 nt, Artificial Sequence
  Description of Artificial Sequence: Synthetic oligonucleotide
  Sense strand starting at position 3644 of SEQ ID NO: 317269
aaugauguaggcuaaagua

SEQ ID NO: 477718 - RNA, 19 nt, Artificial Sequence
  Description of Artificial Sequence: Synthetic oligonucleotide
  Antisense Strand to SEQ ID NO: 477717
uacuuuagccuacaucauu

SEQ ID NO: 477719 - RNA, 19 nt, Artificial Sequence
  Description of Artificial Sequence: Synthetic oligonucleotide
  Sense strand starting at position 3739 of SEQ ID NO: 317269
ugcuuugaaucauuuaguu

SEQ ID NO: 477720 - RNA, 19 nt, Artificial Sequence
  Description of Artificial Sequence: Synthetic oligonucleotide
  Antisense Strand to SEQ ID NO: 477719
aacuaaaugauucaaagca

SEQ ID NO: 477721 - RNA, 19 nt, Artificial Sequence
  Description of Artificial Sequence: Synthetic oligonucleotide
  Sense strand starting at position 3828 of SEQ ID NO: 317269
uugauuugguguucuuauu

SEQ ID NO: 477722 - RNA, 19 nt, Artificial Sequence
  Description of Artificial Sequence: Synthetic oligonucleotide
  Antisense Strand to SEQ ID NO: 477721
aauaagaacaccaaaucaa

SEQ ID NO: 477723 - RNA, 19 nt, Artificial Sequence
  Description of Artificial Sequence: Synthetic oligonucleotide
  Sense strand starting at position 3862 of SEQ ID NO: 317269
cuggcuaugcuuuaaagaa

SEQ ID NO: 477724 - RNA, 19 nt, Artificial Sequence
  Description of Artificial Sequence: Synthetic oligonucleotide
  Antisense Strand to SEQ ID NO: 477723
uucuuuaaagcauagccag

SEQ ID NO: 477725 - RNA, 19 nt, Artificial Sequence
  Description of Artificial Sequence: Synthetic oligonucleotide
  Sense strand starting at position 3977 of SEQ ID NO: 317269
ccucuccuucugggacauu

SEQ ID NO: 477726 - RNA, 19 nt, Artificial Sequence
  Description of Artificial Sequence: Synthetic oligonucleotide
  Antisense Strand to SEQ ID NO: 477725
aaugucccagaaggagagg

SEQ ID NO: 477727 - RNA, 19 nt, Artificial Sequence
  Description of Artificial Sequence: Synthetic oligonucleotide
  Sense strand starting at position 89 of SEQ ID NO: 317270
uuagguuggguuuagaauu

SEQ ID NO: 477728 - RNA, 19 nt, Artificial Sequence
  Description of Artificial Sequence: Synthetic oligonucleotide
  Antisense Strand to SEQ ID NO: 477727
aauucuaaacccaaccuaa

SEQ ID NO: 477729 - RNA, 19 nt, Artificial Sequence
  Description of Artificial Sequence: Synthetic oligonucleotide
  Sense strand starting at position 125 of SEQ ID NO: 317270
gucaauaucuaauuguaag

SEQ ID NO: 477730 - RNA, 19 nt, Artificial Sequence
  Description of Artificial Sequence: Synthetic oligonucleotide
  Antisense Strand to SEQ ID NO: 477729
cuuacaauuagauauugac

SEQ ID NO: 477731 - RNA, 19 nt, Artificial Sequence
  Description of Artificial Sequence: Synthetic oligonucleotide
  Sense strand starting at position 500 of SEQ ID NO: 317270
ucaauaugugcugaaauau

SEQ ID NO: 477732 - RNA, 19 nt, Artificial Sequence
  Description of Artificial Sequence: Synthetic oligonucleotide
  Antisense Strand to SEQ ID NO: 477731
auauuucagcacauauuga

SEQ ID NO: 477733 - RNA, 19 nt, Artificial Sequence
  Description of Artificial Sequence: Synthetic oligonucleotide
  Sense strand starting at position 526 of SEQ ID NO: 317270
uggauuauauggucuaaau

SEQ ID NO: 477734 - RNA, 19 nt, Artificial Sequence
  Description of Artificial Sequence: Synthetic oligonucleotide
  Antisense Strand to SEQ ID NO: 477733
auuuagaccauauaaucca

SEQ ID NO: 477735 - RNA, 19 nt, Artificial Sequence
  Description of Artificial Sequence: Synthetic oligonucleotide
  Sense strand starting at position 581 of SEQ ID NO: 317270
acccaaauggcaugaauuc

SEQ ID NO: 477736 - RNA, 19 nt, Artificial Sequence
  Description of Artificial Sequence: Synthetic oligonucleotide
  Antisense Strand to SEQ ID NO: 477735
gaauucaugccauuugggu

SEQ ID NO: 477737 - RNA, 19 nt, Artificial Sequence
  Description of Artificial Sequence: Synthetic oligonucleotide
  Sense strand starting at position 601 of SEQ ID NO: 317270
acaauaugagauugugugu

SEQ ID NO: 477738 - RNA, 19 nt, Artificial Sequence
  Description of Artificial Sequence: Synthetic oligonucleotide
  Antisense Strand to SEQ ID NO: 477737
acacacaaucucauauugu

SEQ ID NO: 477739 - RNA, 19 nt, Artificial Sequence
  Description of Artificial Sequence: Synthetic oligonucleotide
  Sense strand starting at position 604 of SEQ ID NO: 317270
auaugagauuguguguaac

SEQ ID NO: 477740 - RNA, 19 nt, Artificial Sequence
  Description of Artificial Sequence: Synthetic oligonucleotide
  Antisense Strand to SEQ ID NO: 477739
guuacacacaaucucauau

SEQ ID NO: 477741 - RNA, 19 nt, Artificial Sequence
  Description of Artificial Sequence: Synthetic oligonucleotide
  Sense strand starting at position 607 of SEQ ID NO: 317270
ugagauuguguguaacucu

SEQ ID NO: 477742 - RNA, 19 nt, Artificial Sequence
  Description of Artificial Sequence: Synthetic oligonucleotide
  Antisense Strand to SEQ ID NO: 477741
agaguuacacacaaucuca

SEQ ID NO: 477743 - RNA, 19 nt, Artificial Sequence
  Description of Artificial Sequence: Synthetic oligonucleotide
  Sense strand starting at position 760 of SEQ ID NO: 317270
ccaggucauuucguugcua

SEQ ID NO: 477744 - RNA, 19 nt, Artificial Sequence
  Description of Artificial Sequence: Synthetic oligonucleotide
  Antisense Strand to SEQ ID NO: 477743
uagcaacgaaaugaccugg

SEQ ID NO: 477745 - RNA, 19 nt, Artificial Sequence
  Description of Artificial Sequence: Synthetic oligonucleotide
  Sense strand starting at position 771 of SEQ ID NO: 317270
cguugcuacccagagagau

SEQ ID NO: 477746 - RNA, 19 nt, Artificial Sequence
  Description of Artificial Sequence: Synthetic oligonucleotide
  Antisense Strand to SEQ ID NO: 477745
aucucucuggguagcaacg

SEQ ID NO: 477747 - RNA, 19 nt, Artificial Sequence
  Description of Artificial Sequence: Synthetic oligonucleotide
  Sense strand starting at position 1249 of SEQ ID NO: 317270
ugucacuuugcagaaacaa

SEQ ID NO: 477748 - RNA, 19 nt, Artificial Sequence
  Description of Artificial Sequence: Synthetic oligonucleotide
  Antisense Strand to SEQ ID NO: 477747
uuguuucugcaaagugaca

SEQ ID NO: 477749 - RNA, 19 nt, Artificial Sequence
  Description of Artificial Sequence: Synthetic oligonucleotide
  Sense strand starting at position 1357 of SEQ ID NO: 317270
guaugccauccagaagucu

SEQ ID NO: 477750 - RNA, 19 nt, Artificial Sequence
  Description of Artificial Sequence: Synthetic oligonucleotide
  Antisense Strand to SEQ ID NO: 477749
agacuucuggauggcauac

SEQ ID NO: 477751 - RNA, 19 nt, Artificial Sequence
  Description of Artificial Sequence: Synthetic oligonucleotide
  Sense strand starting at position 1530 of SEQ ID NO: 317270
aagcuuaccuugguuagga

SEQ ID NO: 477752 - RNA, 19 nt, Artificial Sequence
  Description of Artificial Sequence: Synthetic oligonucleotide
  Antisense Strand to SEQ ID NO: 477751
uccuaaccaagguaagcuu

SEQ ID NO: 477753 - RNA, 19 nt, Artificial Sequence
  Description of Artificial Sequence: Synthetic oligonucleotide
  Sense strand starting at position 1531 of SEQ ID NO: 317270
agcuuaccuugguuaggaa

SEQ ID NO: 477754 - RNA, 19 nt, Artificial Sequence
  Description of Artificial Sequence: Synthetic oligonucleotide
  Antisense Strand to SEQ ID NO: 477753
uuccuaaccaagguaagcu

SEQ ID NO: 477755 - RNA, 19 nt, Artificial Sequence
  Description of Artificial Sequence: Synthetic oligonucleotide
  Sense strand starting at position 1532 of SEQ ID NO: 317270
gcuuaccuugguuaggaaa

SEQ ID NO: 477756 - RNA, 19 nt, Artificial Sequence
  Description of Artificial Sequence: Synthetic oligonucleotide
  Antisense Strand to SEQ ID NO: 477755
uuuccuaaccaagguaagc

SEQ ID NO: 477757 - RNA, 19 nt, Artificial Sequence
  Description of Artificial Sequence: Synthetic oligonucleotide
  Sense strand starting at position 1620 of SEQ ID NO: 317270
aacuuuguugccuauggau

SEQ ID NO: 477758 - RNA, 19 nt, Artificial Sequence
  Description of Artificial Sequence: Synthetic oligonucleotide
  Antisense Strand to SEQ ID NO: 477757
auccauaggcaacaaaguu

SEQ ID NO: 477759 - RNA, 19 nt, Artificial Sequence
  Description of Artificial Sequence: Synthetic oligonucleotide
  Sense strand starting at position 1635 of SEQ ID NO: 317270
ggauucugcuuucuaauaa

SEQ ID NO: 477760 - RNA, 19 nt, Artificial Sequence
  Description of Artificial Sequence: Synthetic oligonucleotide
  Antisense Strand to SEQ ID NO: 477759
uuauuagaaagcagaaucc

SEQ ID NO: 477761 - RNA, 19 nt, Artificial Sequence
  Description of Artificial Sequence: Synthetic oligonucleotide
  Sense strand starting at position 2060 of SEQ ID NO: 317270
gugcauguugggaguguuu

SEQ ID NO: 477762 - RNA, 19 nt, Artificial Sequence
  Description of Artificial Sequence: Synthetic oligonucleotide
  Antisense Strand to SEQ ID NO: 477761
aaacacucccaacaugcac

SEQ ID NO: 477763 - RNA, 19 nt, Artificial Sequence
  Description of Artificial Sequence: Synthetic oligonucleotide
  Sense strand starting at position 2119 of SEQ ID NO: 317270
cugccacacuucuugagaa

SEQ ID NO: 477764 - RNA, 19 nt, Artificial Sequence
  Description of Artificial Sequence: Synthetic oligonucleotide
  Antisense Strand to SEQ ID NO: 477763
uucucaagaaguguggcag

SEQ ID NO: 477765 - RNA, 19 nt, Artificial Sequence
  Description of Artificial Sequence: Synthetic oligonucleotide
  Sense strand starting at position 2121 of SEQ ID NO: 317270
gccacacuucuugagaaau

SEQ ID NO: 477766 - RNA, 19 nt, Artificial Sequence
  Description of Artificial Sequence: Synthetic oligonucleotide
  Antisense Strand to SEQ ID NO: 477765
auuucucaagaaguguggc

SEQ ID NO: 477767 - RNA, 19 nt, Artificial Sequence
  Description of Artificial Sequence: Synthetic oligonucleotide
  Sense strand starting at position 2144 of SEQ ID NO: 317270
ggacauucuaguuaacgcu

SEQ ID NO: 477768 - RNA, 19 nt, Artificial Sequence
  Description of Artificial Sequence: Synthetic oligonucleotide
  Antisense Strand to SEQ ID NO: 477767
agcguuaacuagaaugucc

SEQ ID NO: 477769 - RNA, 19 nt, Artificial Sequence
  Description of Artificial Sequence: Synthetic oligonucleotide
  Sense strand starting at position 2159 of SEQ ID NO: 317270
cgcuuuaaccacgggauuu

SEQ ID NO: 477770 - RNA, 19 nt, Artificial Sequence
  Description of Artificial Sequence: Synthetic oligonucleotide
  Antisense Strand to SEQ ID NO: 477769
aaaucccgugguuaaagcg

SEQ ID NO: 477771 - RNA, 19 nt, Artificial Sequence
  Description of Artificial Sequence: Synthetic oligonucleotide
  Sense strand starting at position 2220 of SEQ ID NO: 317270
guaauuggccugugagaaa

SEQ ID NO: 477772 - RNA, 19 nt, Artificial Sequence
  Description of Artificial Sequence: Synthetic oligonucleotide
  Antisense Strand to SEQ ID NO: 477771
uuucucacaggccaauuac

SEQ ID NO: 477773 - RNA, 19 nt, Artificial Sequence
  Description of Artificial Sequence: Synthetic oligonucleotide
  Sense strand starting at position 2433 of SEQ ID NO: 317270
gguaccaucaacugugaga

SEQ ID NO: 477774 - RNA, 19 nt, Artificial Sequence
  Description of Artificial Sequence: Synthetic oligonucleotide
  Antisense Strand to SEQ ID NO: 477773
ucucacaguugaugguacc

SEQ ID NO: 477775 - RNA, 19 nt, Artificial Sequence
  Description of Artificial Sequence: Synthetic oligonucleotide
  Sense strand starting at position 2580 of SEQ ID NO: 317270
uuuagucauuaucuacuga

SEQ ID NO: 477776 - RNA, 19 nt, Artificial Sequence
  Description of Artificial Sequence: Synthetic oligonucleotide
  Antisense Strand to SEQ ID NO: 477775
ucaguagauaaugacuaaa

SEQ ID NO: 477777 - RNA, 19 nt, Artificial Sequence
  Description of Artificial Sequence: Synthetic oligonucleotide
  Sense strand starting at position 2761 of SEQ ID NO: 317270
acugguuuccuauguaaag

SEQ ID NO: 477778 - RNA, 19 nt, Artificial Sequence
  Description of Artificial Sequence: Synthetic oligonucleotide
  Antisense Strand to SEQ ID NO: 477777
cuuuacauaggaaaccagu

SEQ ID NO: 477779 - RNA, 19 nt, Artificial Sequence
  Description of Artificial Sequence: Synthetic oligonucleotide
  Sense strand starting at position 2958 of SEQ ID NO: 317270
gucauagcacuuuaaguaa

SEQ ID NO: 477780 - RNA, 19 nt, Artificial Sequence
  Description of Artificial Sequence: Synthetic oligonucleotide
  Antisense Strand to SEQ ID NO: 477779
uuacuuaaagugcuaugac

SEQ ID NO: 477781 - RNA, 19 nt, Artificial Sequence
  Description of Artificial Sequence: Synthetic oligonucleotide
  Sense strand starting at position 2961 of SEQ ID NO: 317270
auagcacuuuaaguaagau

SEQ ID NO: 477782 - RNA, 19 nt, Artificial Sequence
  Description of Artificial Sequence: Synthetic oligonucleotide
  Antisense Strand to SEQ ID NO: 477781
aucuuacuuaaagugcuau

SEQ ID NO: 477783 - RNA, 19 nt, Artificial Sequence
  Description of Artificial Sequence: Synthetic oligonucleotide
  Sense strand starting at position 3290 of SEQ ID NO: 317270
uuaggcaguuuaucuauuu

SEQ ID NO: 477784 - RNA, 19 nt, Artificial Sequence
  Description of Artificial Sequence: Synthetic oligonucleotide
  Antisense Strand to SEQ ID NO: 477783
aaauagauaaacugccuaa

SEQ ID NO: 477785 - RNA, 19 nt, Artificial Sequence
  Description of Artificial Sequence: Synthetic oligonucleotide
  Sense strand starting at position 3302 of SEQ ID NO: 317270
ucuauuuaaucuguggugu

SEQ ID NO: 477786 - RNA, 19 nt, Artificial Sequence
  Description of Artificial Sequence: Synthetic oligonucleotide
  Antisense Strand to SEQ ID NO: 477785
acaccacagauuaaauaga

SEQ ID NO: 477787 - RNA, 19 nt, Artificial Sequence
  Description of Artificial Sequence: Synthetic oligonucleotide
  Sense strand starting at position 3303 of SEQ ID NO: 317270
cuauuuaaucuguggugug

SEQ ID NO: 477788 - RNA, 19 nt, Artificial Sequence
  Description of Artificial Sequence: Synthetic oligonucleotide
  Antisense Strand to SEQ ID NO: 477787
cacaccacagauuaaauag

SEQ ID NO: 477789 - RNA, 19 nt, Artificial Sequence
  Description of Artificial Sequence: Synthetic oligonucleotide
  Sense strand starting at position 3411 of SEQ ID NO: 317270
agaugugacuuaguauuac

SEQ ID NO: 477790 - RNA, 19 nt, Artificial Sequence
  Description of Artificial Sequence: Synthetic oligonucleotide
  Antisense Strand to SEQ ID NO: 477789
guaauacuaagucacaucu

SEQ ID NO: 477791 - RNA, 19 nt, Artificial Sequence
  Description of Artificial Sequence: Synthetic oligonucleotide
  Sense strand starting at position 3423 of SEQ ID NO: 317270
guauuacuugcagauauua

SEQ ID NO: 477792 - RNA, 19 nt, Artificial Sequence
  Description of Artificial Sequence: Synthetic oligonucleotide
  Antisense Strand to SEQ ID NO: 477791
uaauaucugcaaguaauac

SEQ ID NO: 477793 - RNA, 19 nt, Artificial Sequence
  Description of Artificial Sequence: Synthetic oligonucleotide
  Sense strand starting at position 3431 of SEQ ID NO: 317270
ugcagauauuaauucgauc

SEQ ID NO: 477794 - RNA, 19 nt, Artificial Sequence
  Description of Artificial Sequence: Synthetic oligonucleotide
  Antisense Strand to SEQ ID NO: 477793
gaucgaauuaauaucugca

SEQ ID NO: 477795 - RNA, 19 nt, Artificial Sequence
  Description of Artificial Sequence: Synthetic oligonucleotide
  Sense strand starting at position 3451 of SEQ ID NO: 317270
ucauguuggcuccauaacu

SEQ ID NO: 477796 - RNA, 19 nt, Artificial Sequence
  Description of Artificial Sequence: Synthetic oligonucleotide
  Antisense Strand to SEQ ID NO: 477795
aguuauggagccaacauga

SEQ ID NO: 477797 - RNA, 19 nt, Artificial Sequence
  Description of Artificial Sequence: Synthetic oligonucleotide
  Sense strand starting at position 3595 of SEQ ID NO: 317270
ugaagugggucauuugcuu

SEQ ID NO: 477798 - RNA, 19 nt, Artificial Sequence
  Description of Artificial Sequence: Synthetic oligonucleotide
  Antisense Strand to SEQ ID NO: 477797
aagcaaaugacccacuuca

SEQ ID NO: 477799 - RNA, 19 nt, Artificial Sequence
  Description of Artificial Sequence: Synthetic oligonucleotide
  Sense strand starting at position 3601 of SEQ ID NO: 317270
gggucauuugcuuauuguc

SEQ ID NO: 477800 - RNA, 19 nt, Artificial Sequence
  Description of Artificial Sequence: Synthetic oligonucleotide
  Antisense Strand to SEQ ID NO: 477799
gacaauaagcaaaugaccc

SEQ ID NO: 477801 - RNA, 19 nt, Artificial Sequence
  Description of Artificial Sequence: Synthetic oligonucleotide
  Sense strand starting at position 3606 of SEQ ID NO: 317270
auuugcuuauugucagcau

SEQ ID NO: 477802 - RNA, 19 nt, Artificial Sequence
  Description of Artificial Sequence: Synthetic oligonucleotide
  Antisense Strand to SEQ ID NO: 477801
augcugacaauaagcaaau

SEQ ID NO: 477803 - RNA, 19 nt, Artificial Sequence
  Description of Artificial Sequence: Synthetic oligonucleotide
  Sense strand starting at position 3740 of SEQ ID NO: 317270
gcagaugcuguggaaacuu

SEQ ID NO: 477804 - RNA, 19 nt, Artificial Sequence
  Description of Artificial Sequence: Synthetic oligonucleotide
  Antisense Strand to SEQ ID NO: 477803
aaguuuccacagcaucugc

SEQ ID NO: 477805 - RNA, 19 nt, Artificial Sequence
  Description of Artificial Sequence: Synthetic oligonucleotide
  Sense strand starting at position 3763 of SEQ ID NO: 317270
ucugaugacugcuuuccaa

SEQ ID NO: 477806 - RNA, 19 nt, Artificial Sequence
  Description of Artificial Sequence: Synthetic oligonucleotide
  Antisense Strand to SEQ ID NO: 477805
uuggaaagcagucaucaga

SEQ ID NO: 477807 - RNA, 19 nt, Artificial Sequence
  Description of Artificial Sequence: Synthetic oligonucleotide
  Sense strand starting at position 28 of SEQ ID NO: 317271
uuagguuggguuuagaauu

SEQ ID NO: 477808 - RNA, 19 nt, Artificial Sequence
  Description of Artificial Sequence: Synthetic oligonucleotide
  Antisense Strand to SEQ ID NO: 477807
aauucuaaacccaaccuaa

SEQ ID NO: 477809 - RNA, 19 nt, Artificial Sequence
  Description of Artificial Sequence: Synthetic oligonucleotide
  Sense strand starting at position 64 of SEQ ID NO: 317271
gucaauaucuaauuguaag

SEQ ID NO: 477810 - RNA, 19 nt, Artificial Sequence
  Description of Artificial Sequence: Synthetic oligonucleotide
  Antisense Strand to SEQ ID NO: 477809
cuuacaauuagauauugac

SEQ ID NO: 477811 - RNA, 19 nt, Artificial Sequence
  Description of Artificial Sequence: Synthetic oligonucleotide
  Sense strand starting at position 439 of SEQ ID NO: 317271
ucaauaugugcugaaauau

SEQ ID NO: 477812 - RNA, 19 nt, Artificial Sequence
  Description of Artificial Sequence: Synthetic oligonucleotide
  Antisense Strand to SEQ ID NO: 477811
auauuucagcacauauuga

SEQ ID NO: 477813 - RNA, 19 nt, Artificial Sequence
  Description of Artificial Sequence: Synthetic oligonucleotide
  Sense strand starting at position 465 of SEQ ID NO: 317271
uggauuauauggucuaaau

SEQ ID NO: 477814 - RNA, 19 nt, Artificial Sequence
  Description of Artificial Sequence: Synthetic oligonucleotide
  Antisense Strand to SEQ ID NO: 477813
auuuagaccauauaaucca

SEQ ID NO: 477815 - RNA, 19 nt, Artificial Sequence
  Description of Artificial Sequence: Synthetic oligonucleotide
  Sense strand starting at position 520 of SEQ ID NO: 317271
acccaaauggcaugaauuc

SEQ ID NO: 477816 - RNA, 19 nt, Artificial Sequence
  Description of Artificial Sequence: Synthetic oligonucleotide
  Antisense Strand to SEQ ID NO: 477815
gaauucaugccauuugggu

SEQ ID NO: 477817 - RNA, 19 nt, Artificial Sequence
  Description of Artificial Sequence: Synthetic oligonucleotide
  Sense strand starting at position 540 of SEQ ID NO: 317271
acaauaugagauugugugu

SEQ ID NO: 477818 - RNA, 19 nt, Artificial Sequence
  Description of Artificial Sequence: Synthetic oligonucleotide
  Antisense Strand to SEQ ID NO: 477817
acacacaaucucauauugu

SEQ ID NO: 477819 - RNA, 19 nt, Artificial Sequence
  Description of Artificial Sequence: Synthetic oligonucleotide
  Sense strand starting at position 543 of SEQ ID NO: 317271
auaugagauuguguguaac

SEQ ID NO: 477820 - RNA, 19 nt, Artificial Sequence
  Description of Artificial Sequence: Synthetic oligonucleotide
  Antisense Strand to SEQ ID NO: 477819
guuacacacaaucucauau

SEQ ID NO: 477821 - RNA, 19 nt, Artificial Sequence
  Description of Artificial Sequence: Synthetic oligonucleotide
  Sense strand starting at position 546 of SEQ ID NO: 317271
ugagauuguguguaacucu

SEQ ID NO: 477822 - RNA, 19 nt, Artificial Sequence
  Description of Artificial Sequence: Synthetic oligonucleotide
  Antisense Strand to SEQ ID NO: 477821
agaguuacacacaaucuca

SEQ ID NO: 477823 - RNA, 19 nt, Artificial Sequence
  Description of Artificial Sequence: Synthetic oligonucleotide
  Sense strand starting at position 699 of SEQ ID NO: 317271
ccaggucauuucguugcua

SEQ ID NO: 477824 - RNA, 19 nt, Artificial Sequence
  Description of Artificial Sequence: Synthetic oligonucleotide
  Antisense Strand to SEQ ID NO: 477823
uagcaacgaaaugaccugg

SEQ ID NO: 477825 - RNA, 19 nt, Artificial Sequence
  Description of Artificial Sequence: Synthetic oligonucleotide
  Sense strand starting at position 710 of SEQ ID NO: 317271
cguugcuacccagagagau

SEQ ID NO: 477826 - RNA, 19 nt, Artificial Sequence
  Description of Artificial Sequence: Synthetic oligonucleotide
  Antisense Strand to SEQ ID NO: 477825
aucucucuggguagcaacg

SEQ ID NO: 477827 - RNA, 19 nt, Artificial Sequence
  Description of Artificial Sequence: Synthetic oligonucleotide
  Sense strand starting at position 1188 of SEQ ID NO: 317271
ugucacuuugcagaaacaa

SEQ ID NO: 477828 - RNA, 19 nt, Artificial Sequence
  Description of Artificial Sequence: Synthetic oligonucleotide
  Antisense Strand to SEQ ID NO: 477827
uuguuucugcaaagugaca

SEQ ID NO: 477829 - RNA, 19 nt, Artificial Sequence
  Description of Artificial Sequence: Synthetic oligonucleotide
  Sense strand starting at position 1296 of SEQ ID NO: 317271
guaugccauccagaagucu

SEQ ID NO: 477830 - RNA, 19 nt, Artificial Sequence
  Description of Artificial Sequence: Synthetic oligonucleotide
  Antisense Strand to SEQ ID NO: 477829
agacuucuggauggcauac

SEQ ID NO: 477831 - RNA, 19 nt, Artificial Sequence
  Description of Artificial Sequence: Synthetic oligonucleotide
  Sense strand starting at position 1469 of SEQ ID NO: 317271
aagcuuaccuugguuagga

SEQ ID NO: 477832 - RNA, 19 nt, Artificial Sequence
  Description of Artificial Sequence: Synthetic oligonucleotide
  Antisense Strand to SEQ ID NO: 477831
uccuaaccaagguaagcuu

SEQ ID NO: 477833 - RNA, 19 nt, Artificial Sequence
  Description of Artificial Sequence: Synthetic oligonucleotide
  Sense strand starting at position 1470 of SEQ ID NO: 317271
agcuuaccuugguuaggaa

SEQ ID NO: 477834 - RNA, 19 nt, Artificial Sequence
  Description of Artificial Sequence: Synthetic oligonucleotide
  Antisense Strand to SEQ ID NO: 477833
uuccuaaccaagguaagcu

SEQ ID NO: 477835 - RNA, 19 nt, Artificial Sequence
  Description of Artificial Sequence: Synthetic oligonucleotide
  Sense strand starting at position 1471 of SEQ ID NO: 317271
gcuuaccuugguuaggaaa

SEQ ID NO: 477836 - RNA, 19 nt, Artificial Sequence
  Description of Artificial Sequence: Synthetic oligonucleotide
  Antisense Strand to SEQ ID NO: 477835
uuuccuaaccaagguaagc

SEQ ID NO: 477837 - RNA, 19 nt, Artificial Sequence
  Description of Artificial Sequence: Synthetic oligonucleotide
  Sense strand starting at position 1559 of SEQ ID NO: 317271
aacuuuguugccuauggau

SEQ ID NO: 477838 - RNA, 19 nt, Artificial Sequence
  Description of Artificial Sequence: Synthetic oligonucleotide
  Antisense Strand to SEQ ID NO: 477837
auccauaggcaacaaaguu

SEQ ID NO: 477839 - RNA, 19 nt, Artificial Sequence
  Description of Artificial Sequence: Synthetic oligonucleotide
  Sense strand starting at position 1574 of SEQ ID NO: 317271
ggauucugcuuucuaauaa

SEQ ID NO: 477840 - RNA, 19 nt, Artificial Sequence
  Description of Artificial Sequence: Synthetic oligonucleotide
  Antisense Strand to SEQ ID NO: 477839
uuauuagaaagcagaaucc

SEQ ID NO: 477841 - RNA, 19 nt, Artificial Sequence
  Description of Artificial Sequence: Synthetic oligonucleotide
  Sense strand starting at position 1999 of SEQ ID NO: 317271
gugcauguugggaguguuu

SEQ ID NO: 477842 - RNA, 19 nt, Artificial Sequence
  Description of Artificial Sequence: Synthetic oligonucleotide
  Antisense Strand to SEQ ID NO: 477841
aaacacucccaacaugcac

SEQ ID NO: 477843 - RNA, 19 nt, Artificial Sequence
  Description of Artificial Sequence: Synthetic oligonucleotide
  Sense strand starting at position 2058 of SEQ ID NO: 317271
cugccacacuucuugagaa

SEQ ID NO: 477844 - RNA, 19 nt, Artificial Sequence
  Description of Artificial Sequence: Synthetic oligonucleotide
  Antisense Strand to SEQ ID NO: 477843
uucucaagaaguguggcag

SEQ ID NO: 477845 - RNA, 19 nt, Artificial Sequence
  Description of Artificial Sequence: Synthetic oligonucleotide
  Sense strand starting at position 2060 of SEQ ID NO: 317271
gccacacuucuugagaaau

SEQ ID NO: 477846 - RNA, 19 nt, Artificial Sequence
  Description of Artificial Sequence: Synthetic oligonucleotide
  Antisense Strand to SEQ ID NO: 477845
auuucucaagaaguguggc

SEQ ID NO: 477847 - RNA, 19 nt, Artificial Sequence
  Description of Artificial Sequence: Synthetic oligonucleotide
  Sense strand starting at position 2083 of SEQ ID NO: 317271
ggacauucuaguuaacgcu

SEQ ID NO: 477848 - RNA, 19 nt, Artificial Sequence
  Description of Artificial Sequence: Synthetic oligonucleotide
  Antisense Strand to SEQ ID NO: 477847
agcguuaacuagaaugucc

SEQ ID NO: 477849 - RNA, 19 nt, Artificial Sequence
  Description of Artificial Sequence: Synthetic oligonucleotide
  Sense strand starting at position 2098 of SEQ ID NO: 317271
cgcuuuaaccacgggauuu

SEQ ID NO: 477850 - RNA, 19 nt, Artificial Sequence
  Description of Artificial Sequence: Synthetic oligonucleotide
  Antisense Strand to SEQ ID NO: 477849
aaaucccgugguuaaagcg

SEQ ID NO: 477851 - RNA, 19 nt, Artificial Sequence
  Description of Artificial Sequence: Synthetic oligonucleotide
  Sense strand starting at position 2372 of SEQ ID NO: 317271
gguaccaucaacugugaga

SEQ ID NO: 477852 - RNA, 19 nt, Artificial Sequence
  Description of Artificial Sequence: Synthetic oligonucleotide
  Antisense Strand to SEQ ID NO: 477851
ucucacaguugaugguacc

SEQ ID NO: 477853 - RNA, 19 nt, Artificial Sequence
  Description of Artificial Sequence: Synthetic oligonucleotide
  Sense strand starting at position 2519 of SEQ ID NO: 317271
uuuagucauuaucuacuga

SEQ ID NO: 477854 - RNA, 19 nt, Artificial Sequence
  Description of Artificial Sequence: Synthetic oligonucleotide
  Antisense Strand to SEQ ID NO: 477853
ucaguagauaaugacuaaa

SEQ ID NO: 477855 - RNA, 19 nt, Artificial Sequence
  Description of Artificial Sequence: Synthetic oligonucleotide
  Sense strand starting at position 2700 of SEQ ID NO: 317271
acugguuuccuauguaaag

SEQ ID NO: 477856 - RNA, 19 nt, Artificial Sequence
  Description of Artificial Sequence: Synthetic oligonucleotide
  Antisense Strand to SEQ ID NO: 477855
cuuuacauaggaaaccagu

SEQ ID NO: 477857 - RNA, 19 nt, Artificial Sequence
  Description of Artificial Sequence: Synthetic oligonucleotide
  Sense strand starting at position 2897 of SEQ ID NO: 317271
gucauagcacuuuaaguaa

SEQ ID NO: 477858 - RNA, 19 nt, Artificial Sequence
  Description of Artificial Sequence: Synthetic oligonucleotide
  Antisense Strand to SEQ ID NO: 477857
uuacuuaaagugcuaugac

SEQ ID NO: 477859 - RNA, 19 nt, Artificial Sequence
  Description of Artificial Sequence: Synthetic oligonucleotide
  Sense strand starting at position 2900 of SEQ ID NO: 317271
auagcacuuuaaguaagau

SEQ ID NO: 477860 - RNA, 19 nt, Artificial Sequence
  Description of Artificial Sequence: Synthetic oligonucleotide
  Antisense Strand to SEQ ID NO: 477859
aucuuacuuaaagugcuau

SEQ ID NO: 477861 - RNA, 19 nt, Artificial Sequence
  Description of Artificial Sequence: Synthetic oligonucleotide
  Sense strand starting at position 3229 of SEQ ID NO: 317271
uuaggcaguuuaucuauuu

SEQ ID NO: 477862 - RNA, 19 nt, Artificial Sequence
  Description of Artificial Sequence: Synthetic oligonucleotide
  Antisense Strand to SEQ ID NO: 477861
aaauagauaaacugccuaa

SEQ ID NO: 477863 - RNA, 19 nt, Artificial Sequence
  Description of Artificial Sequence: Synthetic oligonucleotide
  Sense strand starting at position 3241 of SEQ ID NO: 317271
ucuauuuaaucuguggugu

SEQ ID NO: 477864 - RNA, 19 nt, Artificial Sequence
  Description of Artificial Sequence: Synthetic oligonucleotide
  Antisense Strand to SEQ ID NO: 477863
acaccacagauuaaauaga

SEQ ID NO: 477865 - RNA, 19 nt, Artificial Sequence
  Description of Artificial Sequence: Synthetic oligonucleotide
  Sense strand starting at position 3242 of SEQ ID NO: 317271
cuauuuaaucuguggugug

SEQ ID NO: 477866 - RNA, 19 nt, Artificial Sequence
  Description of Artificial Sequence: Synthetic oligonucleotide
  Antisense Strand to SEQ ID NO: 477865
cacaccacagauuaaauag

SEQ ID NO: 477867 - RNA, 19 nt, Artificial Sequence
  Description of Artificial Sequence: Synthetic oligonucleotide
  Sense strand starting at position 3350 of SEQ ID NO: 317271
agaugugacuuaguauuac

SEQ ID NO: 477868 - RNA, 19 nt, Artificial Sequence
  Description of Artificial Sequence: Synthetic oligonucleotide
  Antisense Strand to SEQ ID NO: 477867
guaauacuaagucacaucu

SEQ ID NO: 477869 - RNA, 19 nt, Artificial Sequence
  Description of Artificial Sequence: Synthetic oligonucleotide
  Sense strand starting at position 3362 of SEQ ID NO: 317271
guauuacuugcagauauua

SEQ ID NO: 477870 - RNA, 19 nt, Artificial Sequence
  Description of Artificial Sequence: Synthetic oligonucleotide
  Antisense Strand to SEQ ID NO: 477869
uaauaucugcaaguaauac

SEQ ID NO: 477871 - RNA, 19 nt, Artificial Sequence
  Description of Artificial Sequence: Synthetic oligonucleotide
  Sense strand starting at position 3370 of SEQ ID NO: 317271
ugcagauauuaauucgauc

SEQ ID NO: 477872 - RNA, 19 nt, Artificial Sequence
  Description of Artificial Sequence: Synthetic oligonucleotide
  Antisense Strand to SEQ ID NO: 477871
gaucgaauuaauaucugca

SEQ ID NO: 477873 - RNA, 19 nt, Artificial Sequence
  Description of Artificial Sequence: Synthetic oligonucleotide
  Sense strand starting at position 3390 of SEQ ID NO: 317271
ucauguuggcuccauaacu

SEQ ID NO: 477874 - RNA, 19 nt, Artificial Sequence
  Description of Artificial Sequence: Synthetic oligonucleotide
  Antisense Strand to SEQ ID NO: 477873
aguuauggagccaacauga

SEQ ID NO: 477875 - RNA, 19 nt, Artificial Sequence
  Description of Artificial Sequence: Synthetic oligonucleotide
  Sense strand starting at position 3534 of SEQ ID NO: 317271
ugaagugggucauuugcuu

SEQ ID NO: 477876 - RNA, 19 nt, Artificial Sequence
  Description of Artificial Sequence: Synthetic oligonucleotide
  Antisense Strand to SEQ ID NO: 477875
aagcaaaugacccacuuca

SEQ ID NO: 477877 - RNA, 19 nt, Artificial Sequence
  Description of Artificial Sequence: Synthetic oligonucleotide
  Sense strand starting at position 3540 of SEQ ID NO: 317271
gggucauuugcuuauuguc

SEQ ID NO: 477878 - RNA, 19 nt, Artificial Sequence
  Description of Artificial Sequence: Synthetic oligonucleotide
  Antisense Strand to SEQ ID NO: 477877
gacaauaagcaaaugaccc

SEQ ID NO: 477879 - RNA, 19 nt, Artificial Sequence
  Description of Artificial Sequence: Synthetic oligonucleotide
  Sense strand starting at position 3545 of SEQ ID NO: 317271
auuugcuuauugucagcau

SEQ ID NO: 477880 - RNA, 19 nt, Artificial Sequence
  Description of Artificial Sequence: Synthetic oligonucleotide
  Antisense Strand to SEQ ID NO: 477879
augcugacaauaagcaaau

SEQ ID NO: 477881 - RNA, 19 nt, Artificial Sequence
  Description of Artificial Sequence: Synthetic oligonucleotide
  Sense strand starting at position 3679 of SEQ ID NO: 317271
gcagaugcuguggaaacuu

SEQ ID NO: 477882 - RNA, 19 nt, Artificial Sequence
  Description of Artificial Sequence: Synthetic oligonucleotide
  Antisense Strand to SEQ ID NO: 477881
aaguuuccacagcaucugc

SEQ ID NO: 477883 - RNA, 19 nt, Artificial Sequence
  Description of Artificial Sequence: Synthetic oligonucleotide
  Sense strand starting at position 3702 of SEQ ID NO: 317271
ucugaugacugcuuuccaa

SEQ ID NO: 477884 - RNA, 19 nt, Artificial Sequence
  Description of Artificial Sequence: Synthetic oligonucleotide
  Antisense Strand to SEQ ID NO: 477883
uuggaaagcagucaucaga

SEQ ID NO: 477885 - RNA, 19 nt, Artificial Sequence
  Description of Artificial Sequence: Synthetic oligonucleotide
  Sense strand starting at position 3929 of SEQ ID NO: 317271
guugaaugucuuuauugac

SEQ ID NO: 477886 - RNA, 19 nt, Artificial Sequence
  Description of Artificial Sequence: Synthetic oligonucleotide
  Antisense Strand to SEQ ID NO: 477885
gucaauaaagacauucaac

SEQ ID NO: 477887 - RNA, 19 nt, Artificial Sequence
  Description of Artificial Sequence: Synthetic oligonucleotide
  Sense strand starting at position 291 of SEQ ID NO: 317272
ugucaaacuguauauacau

SEQ ID NO: 477888 - RNA, 19 nt, Artificial Sequence
  Description of Artificial Sequence: Synthetic oligonucleotide
  Antisense Strand to SEQ ID NO: 477887
auguauauacaguuugaca

SEQ ID NO: 477889 - RNA, 19 nt, Artificial Sequence
  Description of Artificial Sequence: Synthetic oligonucleotide
  Sense strand starting at position 986 of SEQ ID NO: 317272
gaauaucaacgccaggauu

SEQ ID NO: 477890 - RNA, 19 nt, Artificial Sequence
  Description of Artificial Sequence: Synthetic oligonucleotide
  Antisense Strand to SEQ ID NO: 477889
aauccuggcguugauauuc

SEQ ID NO: 477891 - RNA, 19 nt, Artificial Sequence
  Description of Artificial Sequence: Synthetic oligonucleotide
  Sense strand starting at position 988 of SEQ ID NO: 317272
auaucaacgccaggauuaa

SEQ ID NO: 477892 - RNA, 19 nt, Artificial Sequence
  Description of Artificial Sequence: Synthetic oligonucleotide
  Antisense Strand to SEQ ID NO: 477891
uuaauccuggcguugauau

SEQ ID NO: 477893 - RNA, 19 nt, Artificial Sequence
  Description of Artificial Sequence: Synthetic oligonucleotide
  Sense strand starting at position 1444 of SEQ ID NO: 317272
ggcguaagcgugucaggaa

SEQ ID NO: 477894 - RNA, 19 nt, Artificial Sequence
  Description of Artificial Sequence: Synthetic oligonucleotide
  Antisense Strand to SEQ ID NO: 477893
uuccugacacgcuuacgcc

SEQ ID NO: 477895 - RNA, 19 nt, Artificial Sequence
  Description of Artificial Sequence: Synthetic oligonucleotide
  Sense strand starting at position 2233 of SEQ ID NO: 317272
uuguuuagguguuugaaga

SEQ ID NO: 477896 - RNA, 19 nt, Artificial Sequence
  Description of Artificial Sequence: Synthetic oligonucleotide
  Antisense Strand to SEQ ID NO: 477895
ucuucaaacaccuaaacaa

SEQ ID NO: 477897 - RNA, 19 nt, Artificial Sequence
  Description of Artificial Sequence: Synthetic oligonucleotide
  Sense strand starting at position 2264 of SEQ ID NO: 317272
ugugaaauuccgcacuuaa

SEQ ID NO: 477898 - RNA, 19 nt, Artificial Sequence
  Description of Artificial Sequence: Synthetic oligonucleotide
  Antisense Strand to SEQ ID NO: 477897
uuaagugcggaauuucaca

SEQ ID NO: 477899 - RNA, 19 nt, Artificial Sequence
  Description of Artificial Sequence: Synthetic oligonucleotide
  Sense strand starting at position 2367 of SEQ ID NO: 317272
acauauauccgguggaccu

SEQ ID NO: 477900 - RNA, 19 nt, Artificial Sequence
  Description of Artificial Sequence: Synthetic oligonucleotide
  Antisense Strand to SEQ ID NO: 477899
agguccaccggauauaugu

SEQ ID NO: 477901 - RNA, 19 nt, Artificial Sequence
  Description of Artificial Sequence: Synthetic oligonucleotide
  Sense strand starting at position 2368 of SEQ ID NO: 317272
cauauauccgguggaccuu

SEQ ID NO: 477902 - RNA, 19 nt, Artificial Sequence
  Description of Artificial Sequence: Synthetic oligonucleotide
  Antisense Strand to SEQ ID NO: 477901
aagguccaccggauauaug

SEQ ID NO: 477903 - RNA, 19 nt, Artificial Sequence
  Description of Artificial Sequence: Synthetic oligonucleotide
  Sense strand starting at position 2460 of SEQ ID NO: 317272
guauaagugguuuaaauga

SEQ ID NO: 477904 - RNA, 19 nt, Artificial Sequence
  Description of Artificial Sequence: Synthetic oligonucleotide
  Antisense Strand to SEQ ID NO: 477903
ucauuuaaaccacuuauac

SEQ ID NO: 477905 - RNA, 19 nt, Artificial Sequence
  Description of Artificial Sequence: Synthetic oligonucleotide
  Sense strand starting at position 2507 of SEQ ID NO: 317272
gagaacuagcgauaggcuu

SEQ ID NO: 477906 - RNA, 19 nt, Artificial Sequence
  Description of Artificial Sequence: Synthetic oligonucleotide
  Antisense Strand to SEQ ID NO: 477905
aagccuaucgcuaguucuc

SEQ ID NO: 477907 - RNA, 19 nt, Artificial Sequence
  Description of Artificial Sequence: Synthetic oligonucleotide
  Sense strand starting at position 2619 of SEQ ID NO: 317272
gguuguuuggcauucggua

SEQ ID NO: 477908 - RNA, 19 nt, Artificial Sequence
  Description of Artificial Sequence: Synthetic oligonucleotide
  Antisense Strand to SEQ ID NO: 477907
uaccgaaugccaaacaacc

SEQ ID NO: 477909 - RNA, 19 nt, Artificial Sequence
  Description of Artificial Sequence: Synthetic oligonucleotide
  Sense strand starting at position 2620 of SEQ ID NO: 317272
guuguuuggcauucgguau

SEQ ID NO: 477910 - RNA, 19 nt, Artificial Sequence
  Description of Artificial Sequence: Synthetic oligonucleotide
  Antisense Strand to SEQ ID NO: 477909
auaccgaaugccaaacaac

SEQ ID NO: 477911 - RNA, 19 nt, Artificial Sequence
  Description of Artificial Sequence: Synthetic oligonucleotide
  Sense strand starting at position 2983 of SEQ ID NO: 317272
gaggaauuagcagggacuu

SEQ ID NO: 477912 - RNA, 19 nt, Artificial Sequence
  Description of Artificial Sequence: Synthetic oligonucleotide
  Antisense Strand to SEQ ID NO: 477911
aagucccugcuaauuccuc

SEQ ID NO: 477913 - RNA, 19 nt, Artificial Sequence
  Description of Artificial Sequence: Synthetic oligonucleotide
  Sense strand starting at position 2984 of SEQ ID NO: 317272
aggaauuagcagggacuuu

SEQ ID NO: 477914 - RNA, 19 nt, Artificial Sequence
  Description of Artificial Sequence: Synthetic oligonucleotide
  Antisense Strand to SEQ ID NO: 477913
aaagucccugcuaauuccu

SEQ ID NO: 477915 - RNA, 19 nt, Artificial Sequence
  Description of Artificial Sequence: Synthetic oligonucleotide
  Sense strand starting at position 3007 of SEQ ID NO: 317272
ccagacagacccuguuuaa

SEQ ID NO: 477916 - RNA, 19 nt, Artificial Sequence
  Description of Artificial Sequence: Synthetic oligonucleotide
  Antisense Strand to SEQ ID NO: 477915
uuaaacagggucugucugg

SEQ ID NO: 477917 - RNA, 19 nt, Artificial Sequence
  Description of Artificial Sequence: Synthetic oligonucleotide
  Sense strand starting at position 3010 of SEQ ID NO: 317272
gacagacccuguuuaaagu

SEQ ID NO: 477918 - RNA, 19 nt, Artificial Sequence
  Description of Artificial Sequence: Synthetic oligonucleotide
  Antisense Strand to SEQ ID NO: 477917
acuuuaaacagggucuguc

SEQ ID NO: 477919 - RNA, 19 nt, Artificial Sequence
  Description of Artificial Sequence: Synthetic oligonucleotide
  Sense strand starting at position 3062 of SEQ ID NO: 317272
accaaauauugagccagau

SEQ ID NO: 477920 - RNA, 19 nt, Artificial Sequence
  Description of Artificial Sequence: Synthetic oligonucleotide
  Antisense Strand to SEQ ID NO: 477919
aucuggcucaauauuuggu

SEQ ID NO: 477921 - RNA, 19 nt, Artificial Sequence
  Description of Artificial Sequence: Synthetic oligonucleotide
  Sense strand starting at position 3126 of SEQ ID NO: 317272
acaguaacuuugguaaagu

SEQ ID NO: 477922 - RNA, 19 nt, Artificial Sequence
  Description of Artificial Sequence: Synthetic oligonucleotide
  Antisense Strand to SEQ ID NO: 477921
acuuuaccaaaguuacugu

SEQ ID NO: 477923 - RNA, 19 nt, Artificial Sequence
  Description of Artificial Sequence: Synthetic oligonucleotide
  Sense strand starting at position 3199 of SEQ ID NO: 317272
ggcaaagucauauagcaag

SEQ ID NO: 477924 - RNA, 19 nt, Artificial Sequence
  Description of Artificial Sequence: Synthetic oligonucleotide
  Antisense Strand to SEQ ID NO: 477923
cuugcuauaugacuuugcc

SEQ ID NO: 477925 - RNA, 19 nt, Artificial Sequence
  Description of Artificial Sequence: Synthetic oligonucleotide
  Sense strand starting at position 3349 of SEQ ID NO: 317272
gccgucugcccuuuaguca

SEQ ID NO: 477926 - RNA, 19 nt, Artificial Sequence
  Description of Artificial Sequence: Synthetic oligonucleotide
  Antisense Strand to SEQ ID NO: 477925
ugacuaaagggcagacggc

SEQ ID NO: 477927 - RNA, 19 nt, Artificial Sequence
  Description of Artificial Sequence: Synthetic oligonucleotide
  Sense strand starting at position 3481 of SEQ ID NO: 317272
cgggaacugugauuguuau

SEQ ID NO: 477928 - RNA, 19 nt, Artificial Sequence
  Description of Artificial Sequence: Synthetic oligonucleotide
  Antisense Strand to SEQ ID NO: 477927
auaacaaucacaguucccg

SEQ ID NO: 477929 - RNA, 19 nt, Artificial Sequence
  Description of Artificial Sequence: Synthetic oligonucleotide
  Sense strand starting at position 3482 of SEQ ID NO: 317272
gggaacugugauuguuaua

SEQ ID NO: 477930 - RNA, 19 nt, Artificial Sequence
  Description of Artificial Sequence: Synthetic oligonucleotide
  Antisense Strand to SEQ ID NO: 477929
uauaacaaucacaguuccc

SEQ ID NO: 477931 - RNA, 19 nt, Artificial Sequence
  Description of Artificial Sequence: Synthetic oligonucleotide
  Sense strand starting at position 3602 of SEQ ID NO: 317272
aaauacauguguuuaaggu

SEQ ID NO: 477932 - RNA, 19 nt, Artificial Sequence
  Description of Artificial Sequence: Synthetic oligonucleotide
  Antisense Strand to SEQ ID NO: 477931
accuuaaacacauguauuu

SEQ ID NO: 477933 - RNA, 19 nt, Artificial Sequence
  Description of Artificial Sequence: Synthetic oligonucleotide
  Sense strand starting at position 3603 of SEQ ID NO: 317272
aauacauguguuuaagguu

SEQ ID NO: 477934 - RNA, 19 nt, Artificial Sequence
  Description of Artificial Sequence: Synthetic oligonucleotide
  Antisense Strand to SEQ ID NO: 477933
aaccuuaaacacauguauu

SEQ ID NO: 477935 - RNA, 19 nt, Artificial Sequence
  Description of Artificial Sequence: Synthetic oligonucleotide
  Sense strand starting at position 3632 of SEQ ID NO: 317272
aaaugagguuaggcauauu

SEQ ID NO: 477936 - RNA, 19 nt, Artificial Sequence
  Description of Artificial Sequence: Synthetic oligonucleotide
  Antisense Strand to SEQ ID NO: 477935
aauaugccuaaccucauuu

SEQ ID NO: 477937 - RNA, 19 nt, Artificial Sequence
  Description of Artificial Sequence: Synthetic oligonucleotide
  Sense strand starting at position 3635 of SEQ ID NO: 317272
ugagguuaggcauauuagu

SEQ ID NO: 477938 - RNA, 19 nt, Artificial Sequence
  Description of Artificial Sequence: Synthetic oligonucleotide
  Antisense Strand to SEQ ID NO: 477937
acuaauaugccuaaccuca

SEQ ID NO: 477939 - RNA, 19 nt, Artificial Sequence
  Description of Artificial Sequence: Synthetic oligonucleotide
  Sense strand starting at position 3665 of SEQ ID NO: 317272
acaaguaauuucuaggaau

SEQ ID NO: 477940 - RNA, 19 nt, Artificial Sequence
  Description of Artificial Sequence: Synthetic oligonucleotide
  Antisense Strand to SEQ ID NO: 477939
auuccuagaaauuacuugu

SEQ ID NO: 477941 - RNA, 19 nt, Artificial Sequence
  Description of Artificial Sequence: Synthetic oligonucleotide
  Sense strand starting at position 3685 of SEQ ID NO: 317272
gcuguaagauccuuaagga

SEQ ID NO: 477942 - RNA, 19 nt, Artificial Sequence
  Description of Artificial Sequence: Synthetic oligonucleotide
  Antisense Strand to SEQ ID NO: 477941
uccuuaaggaucuuacagc

SEQ ID NO: 477943 - RNA, 19 nt, Artificial Sequence
  Description of Artificial Sequence: Synthetic oligonucleotide
  Sense strand starting at position 3701 of SEQ ID NO: 317272
ggagucacuagguggagau

SEQ ID NO: 477944 - RNA, 19 nt, Artificial Sequence
  Description of Artificial Sequence: Synthetic oligonucleotide
  Antisense Strand to SEQ ID NO: 477943
aucuccaccuagugacucc

SEQ ID NO: 477945 - RNA, 19 nt, Artificial Sequence
  Description of Artificial Sequence: Synthetic oligonucleotide
  Sense strand starting at position 3717 of SEQ ID NO: 317272
gauguugugagguacaaag

SEQ ID NO: 477946 - RNA, 19 nt, Artificial Sequence
  Description of Artificial Sequence: Synthetic oligonucleotide
  Antisense Strand to SEQ ID NO: 477945
cuuuguaccucacaacauc

SEQ ID NO: 477947 - RNA, 19 nt, Artificial Sequence
  Description of Artificial Sequence: Synthetic oligonucleotide
  Sense strand starting at position 3719 of SEQ ID NO: 317272
uguugugagguacaaagau

SEQ ID NO: 477948 - RNA, 19 nt, Artificial Sequence
  Description of Artificial Sequence: Synthetic oligonucleotide
  Antisense Strand to SEQ ID NO: 477947
aucuuuguaccucacaaca

SEQ ID NO: 477949 - RNA, 19 nt, Artificial Sequence
  Description of Artificial Sequence: Synthetic oligonucleotide
  Sense strand starting at position 3729 of SEQ ID NO: 317272
uacaaagauuguucuugga

SEQ ID NO: 477950 - RNA, 19 nt, Artificial Sequence
  Description of Artificial Sequence: Synthetic oligonucleotide
  Antisense Strand to SEQ ID NO: 477949
uccaagaacaaucuuugua

SEQ ID NO: 477951 - RNA, 19 nt, Artificial Sequence
  Description of Artificial Sequence: Synthetic oligonucleotide
  Sense strand starting at position 3731 of SEQ ID NO: 317272
caaagauuguucuuggaaa

SEQ ID NO: 477952 - RNA, 19 nt, Artificial Sequence
  Description of Artificial Sequence: Synthetic oligonucleotide
  Antisense Strand to SEQ ID NO: 477951
uuuccaagaacaaucuuug

SEQ ID NO: 477953 - RNA, 19 nt, Artificial Sequence
  Description of Artificial Sequence: Synthetic oligonucleotide
  Sense strand starting at position 3733 of SEQ ID NO: 317272
aagauuguucuuggaaaua

SEQ ID NO: 477954 - RNA, 19 nt, Artificial Sequence
  Description of Artificial Sequence: Synthetic oligonucleotide
  Antisense Strand to SEQ ID NO: 477953
uauuuccaagaacaaucuu

SEQ ID NO: 477955 - RNA, 19 nt, Artificial Sequence
  Description of Artificial Sequence: Synthetic oligonucleotide
  Sense strand starting at position 3744 of SEQ ID NO: 317272
uggaaauagccuggaaggu

SEQ ID NO: 477956 - RNA, 19 nt, Artificial Sequence
  Description of Artificial Sequence: Synthetic oligonucleotide
  Antisense Strand to SEQ ID NO: 477955
accuuccaggcuauuucca

SEQ ID NO: 477957 - RNA, 19 nt, Artificial Sequence
  Description of Artificial Sequence: Synthetic oligonucleotide
  Sense strand starting at position 3753 of SEQ ID NO: 317272
ccuggaagguuguugaaca

SEQ ID NO: 477958 - RNA, 19 nt, Artificial Sequence
  Description of Artificial Sequence: Synthetic oligonucleotide
  Antisense Strand to SEQ ID NO: 477957
uguucaacaaccuuccagg

SEQ ID NO: 477959 - RNA, 19 nt, Artificial Sequence
  Description of Artificial Sequence: Synthetic oligonucleotide
  Sense strand starting at position 3838 of SEQ ID NO: 317272
agggcuucucaauaggcau

SEQ ID NO: 477960 - RNA, 19 nt, Artificial Sequence
  Description of Artificial Sequence: Synthetic oligonucleotide
  Antisense Strand to SEQ ID NO: 477959
augccuauugagaagcccu

SEQ ID NO: 477961 - RNA, 19 nt, Artificial Sequence
  Description of Artificial Sequence: Synthetic oligonucleotide
  Sense strand starting at position 3888 of SEQ ID NO: 317272
gagacaguguuguuuaaag

SEQ ID NO: 477962 - RNA, 19 nt, Artificial Sequence
  Description of Artificial Sequence: Synthetic oligonucleotide
  Antisense Strand to SEQ ID NO: 477961
cuuuaaacaacacugucuc

SEQ ID NO: 477963 - RNA, 19 nt, Artificial Sequence
  Description of Artificial Sequence: Synthetic oligonucleotide
  Sense strand starting at position 3890 of SEQ ID NO: 317272
gacaguguuguuuaaagac

SEQ ID NO: 477964 - RNA, 19 nt, Artificial Sequence
  Description of Artificial Sequence: Synthetic oligonucleotide
  Antisense Strand to SEQ ID NO: 477963
gucuuuaaacaacacuguc

SEQ ID NO: 477965 - RNA, 19 nt, Artificial Sequence
  Description of Artificial Sequence: Synthetic oligonucleotide
  Sense strand starting at position 3919 of SEQ ID NO: 317272
cuuaacauuguaugucauu

SEQ ID NO: 477966 - RNA, 19 nt, Artificial Sequence
  Description of Artificial Sequence: Synthetic oligonucleotide
  Antisense Strand to SEQ ID NO: 477965
aaugacauacaauguuaag

SEQ ID NO: 477967 - RNA, 19 nt, Artificial Sequence
  Description of Artificial Sequence: Synthetic oligonucleotide
  Sense strand starting at position 20 of SEQ ID NO: 317273
cggcauuaauaugcaaauc

SEQ ID NO: 477968 - RNA, 19 nt, Artificial Sequence
  Description of Artificial Sequence: Synthetic oligonucleotide
  Antisense Strand to SEQ ID NO: 477967
gauuugcauauuaaugccg

SEQ ID NO: 477969 - RNA, 19 nt, Artificial Sequence
  Description of Artificial Sequence: Synthetic oligonucleotide
  Sense strand starting at position 153 of SEQ ID NO: 317273
uccauaaacuggguuuguu

SEQ ID NO: 477970 - RNA, 19 nt, Artificial Sequence
  Description of Artificial Sequence: Synthetic oligonucleotide
  Antisense Strand to SEQ ID NO: 477969
aacaaacccaguuuaugga

SEQ ID NO: 477971 - RNA, 19 nt, Artificial Sequence
  Description of Artificial Sequence: Synthetic oligonucleotide
  Sense strand starting at position 524 of SEQ ID NO: 317273
ugucaaacuguauauacau

SEQ ID NO: 477972 - RNA, 19 nt, Artificial Sequence
  Description of Artificial Sequence: Synthetic oligonucleotide
  Antisense Strand to SEQ ID NO: 477971
auguauauacaguuugaca

SEQ ID NO: 477973 - RNA, 19 nt, Artificial Sequence
  Description of Artificial Sequence: Synthetic oligonucleotide
  Sense strand starting at position 534 of SEQ ID NO: 317273
uauauacaucguggugauu

SEQ ID NO: 477974 - RNA, 19 nt, Artificial Sequence
  Description of Artificial Sequence: Synthetic oligonucleotide
  Antisense Strand to SEQ ID NO: 477973
aaucaccacgauguauaua

SEQ ID NO: 477975 - RNA, 19 nt, Artificial Sequence
  Description of Artificial Sequence: Synthetic oligonucleotide
  Sense strand starting at position 1219 of SEQ ID NO: 317273
gaauaucaacgccaggauu

SEQ ID NO: 477976 - RNA, 19 nt, Artificial Sequence
  Description of Artificial Sequence: Synthetic oligonucleotide
  Antisense Strand to SEQ ID NO: 477975
aauccuggcguugauauuc

SEQ ID NO: 477977 - RNA, 19 nt, Artificial Sequence
  Description of Artificial Sequence: Synthetic oligonucleotide
  Sense strand starting at position 1221 of SEQ ID NO: 317273
auaucaacgccaggauuaa

SEQ ID NO: 477978 - RNA, 19 nt, Artificial Sequence
  Description of Artificial Sequence: Synthetic oligonucleotide
  Antisense Strand to SEQ ID NO: 477977
uuaauccuggcguugauau

SEQ ID NO: 477979 - RNA, 19 nt, Artificial Sequence
  Description of Artificial Sequence: Synthetic oligonucleotide
  Sense strand starting at position 1677 of SEQ ID NO: 317273
ggcguaagcgugucaggaa

SEQ ID NO: 477980 - RNA, 19 nt, Artificial Sequence
  Description of Artificial Sequence: Synthetic oligonucleotide
  Antisense Strand to SEQ ID NO: 477979
uuccugacacgcuuacgcc

SEQ ID NO: 477981 - RNA, 19 nt, Artificial Sequence
  Description of Artificial Sequence: Synthetic oligonucleotide
  Sense strand starting at position 2466 of SEQ ID NO: 317273
uuguuuagguguuugaaga

SEQ ID NO: 477982 - RNA, 19 nt, Artificial Sequence
  Description of Artificial Sequence: Synthetic oligonucleotide
  Antisense Strand to SEQ ID NO: 477981
ucuucaaacaccuaaacaa

SEQ ID NO: 477983 - RNA, 19 nt, Artificial Sequence
  Description of Artificial Sequence: Synthetic oligonucleotide
  Sense strand starting at position 2467 of SEQ ID NO: 317273
uguuuagguguuugaagac

SEQ ID NO: 477984 - RNA, 19 nt, Artificial Sequence
  Description of Artificial Sequence: Synthetic oligonucleotide
  Antisense Strand to SEQ ID NO: 477983
gucuucaaacaccuaaaca

SEQ ID NO: 477985 - RNA, 19 nt, Artificial Sequence
  Description of Artificial Sequence: Synthetic oligonucleotide
  Sense strand starting at position 2497 of SEQ ID NO: 317273
ugugaaauuccgcacuuaa

SEQ ID NO: 477986 - RNA, 19 nt, Artificial Sequence
  Description of Artificial Sequence: Synthetic oligonucleotide
  Antisense Strand to SEQ ID NO: 477985
uuaagugcggaauuucaca

SEQ ID NO: 477987 - RNA, 19 nt, Artificial Sequence
  Description of Artificial Sequence: Synthetic oligonucleotide
  Sense strand starting at position 2600 of SEQ ID NO: 317273
acauauauccgguggaccu

SEQ ID NO: 477988 - RNA, 19 nt, Artificial Sequence
  Description of Artificial Sequence: Synthetic oligonucleotide
  Antisense Strand to SEQ ID NO: 477987
agguccaccggauauaugu

SEQ ID NO: 477989 - RNA, 19 nt, Artificial Sequence
  Description of Artificial Sequence: Synthetic oligonucleotide
  Sense strand starting at position 2601 of SEQ ID NO: 317273
cauauauccgguggaccuu

SEQ ID NO: 477990 - RNA, 19 nt, Artificial Sequence
  Description of Artificial Sequence: Synthetic oligonucleotide
  Antisense Strand to SEQ ID NO: 477989
aagguccaccggauauaug

SEQ ID NO: 477991 - RNA, 19 nt, Artificial Sequence
  Description of Artificial Sequence: Synthetic oligonucleotide
  Sense strand starting at position 2693 of SEQ ID NO: 317273
guauaagugguuuaaauga

SEQ ID NO: 477992 - RNA, 19 nt, Artificial Sequence
  Description of Artificial Sequence: Synthetic oligonucleotide
  Antisense Strand to SEQ ID NO: 477991
ucauuuaaaccacuuauac

SEQ ID NO: 477993 - RNA, 19 nt, Artificial Sequence
  Description of Artificial Sequence: Synthetic oligonucleotide
  Sense strand starting at position 2740 of SEQ ID NO: 317273
gagaacuagcgauaggcuu

SEQ ID NO: 477994 - RNA, 19 nt, Artificial Sequence
  Description of Artificial Sequence: Synthetic oligonucleotide
  Antisense Strand to SEQ ID NO: 477993
aagccuaucgcuaguucuc

SEQ ID NO: 477995 - RNA, 19 nt, Artificial Sequence
  Description of Artificial Sequence: Synthetic oligonucleotide
  Sense strand starting at position 2852 of SEQ ID NO: 317273
gguuguuuggcauucggua

SEQ ID NO: 477996 - RNA, 19 nt, Artificial Sequence
  Description of Artificial Sequence: Synthetic oligonucleotide
  Antisense Strand to SEQ ID NO: 477995
uaccgaaugccaaacaacc

SEQ ID NO: 477997 - RNA, 19 nt, Artificial Sequence
  Description of Artificial Sequence: Synthetic oligonucleotide
  Sense strand starting at position 2853 of SEQ ID NO: 317273
guuguuuggcauucgguau

SEQ ID NO: 477998 - RNA, 19 nt, Artificial Sequence
  Description of Artificial Sequence: Synthetic oligonucleotide
  Antisense Strand to SEQ ID NO: 477997
auaccgaaugccaaacaac

SEQ ID NO: 477999 - RNA, 19 nt, Artificial Sequence
  Description of Artificial Sequence: Synthetic oligonucleotide
  Sense strand starting at position 3216 of SEQ ID NO: 317273
gaggaauuagcagggacuu

SEQ ID NO: 478000 - RNA, 19 nt, Artificial Sequence
  Description of Artificial Sequence: Synthetic oligonucleotide
  Antisense Strand to SEQ ID NO: 477999
aagucccugcuaauuccuc

SEQ ID NO: 478001 - RNA, 19 nt, Artificial Sequence
  Description of Artificial Sequence: Synthetic oligonucleotide
  Sense strand starting at position 3217 of SEQ ID NO: 317273
aggaauuagcagggacuuu

SEQ ID NO: 478002 - RNA, 19 nt, Artificial Sequence
  Description of Artificial Sequence: Synthetic oligonucleotide
  Antisense Strand to SEQ ID NO: 478001
aaagucccugcuaauuccu

SEQ ID NO: 478003 - RNA, 19 nt, Artificial Sequence
  Description of Artificial Sequence: Synthetic oligonucleotide
  Sense strand starting at position 3240 of SEQ ID NO: 317273
ccagacagacccuguuuaa

SEQ ID NO: 478004 - RNA, 19 nt, Artificial Sequence
  Description of Artificial Sequence: Synthetic oligonucleotide
  Antisense Strand to SEQ ID NO: 478003
uuaaacagggucugucugg

SEQ ID NO: 478005 - RNA, 19 nt, Artificial Sequence
  Description of Artificial Sequence: Synthetic oligonucleotide
  Sense strand starting at position 3243 of SEQ ID NO: 317273
gacagacccuguuuaaagu

SEQ ID NO: 478006 - RNA, 19 nt, Artificial Sequence
  Description of Artificial Sequence: Synthetic oligonucleotide
  Antisense Strand to SEQ ID NO: 478005
acuuuaaacagggucuguc

SEQ ID NO: 478007 - RNA, 19 nt, Artificial Sequence
  Description of Artificial Sequence: Synthetic oligonucleotide
  Sense strand starting at position 3295 of SEQ ID NO: 317273
accaaauauugagccagau

SEQ ID NO: 478008 - RNA, 19 nt, Artificial Sequence
  Description of Artificial Sequence: Synthetic oligonucleotide
  Antisense Strand to SEQ ID NO: 478007
aucuggcucaauauuuggu

SEQ ID NO: 478009 - RNA, 19 nt, Artificial Sequence
  Description of Artificial Sequence: Synthetic oligonucleotide
  Sense strand starting at position 3359 of SEQ ID NO: 317273
acaguaacuuugguaaagu

SEQ ID NO: 478010 - RNA, 19 nt, Artificial Sequence
  Description of Artificial Sequence: Synthetic oligonucleotide
  Antisense Strand to SEQ ID NO: 478009
acuuuaccaaaguuacugu

SEQ ID NO: 478011 - RNA, 19 nt, Artificial Sequence
  Description of Artificial Sequence: Synthetic oligonucleotide
  Sense strand starting at position 3432 of SEQ ID NO: 317273
ggcaaagucauauagcaag

SEQ ID NO: 478012 - RNA, 19 nt, Artificial Sequence
  Description of Artificial Sequence: Synthetic oligonucleotide
  Antisense Strand to SEQ ID NO: 478011
cuugcuauaugacuuugcc

SEQ ID NO: 478013 - RNA, 19 nt, Artificial Sequence
  Description of Artificial Sequence: Synthetic oligonucleotide
  Sense strand starting at position 3582 of SEQ ID NO: 317273
gccgucugcccuuuaguca

SEQ ID NO: 478014 - RNA, 19 nt, Artificial Sequence
  Description of Artificial Sequence: Synthetic oligonucleotide
  Antisense Strand to SEQ ID NO: 478013
ugacuaaagggcagacggc

SEQ ID NO: 478015 - RNA, 19 nt, Artificial Sequence
  Description of Artificial Sequence: Synthetic oligonucleotide
  Sense strand starting at position 3714 of SEQ ID NO: 317273
cgggaacugugauuguuau

SEQ ID NO: 478016 - RNA, 19 nt, Artificial Sequence
  Description of Artificial Sequence: Synthetic oligonucleotide
  Antisense Strand to SEQ ID NO: 478015
auaacaaucacaguucccg

SEQ ID NO: 478017 - RNA, 19 nt, Artificial Sequence
  Description of Artificial Sequence: Synthetic oligonucleotide
  Sense strand starting at position 3715 of SEQ ID NO: 317273
gggaacugugauuguuaua

SEQ ID NO: 478018 - RNA, 19 nt, Artificial Sequence
  Description of Artificial Sequence: Synthetic oligonucleotide
  Antisense Strand to SEQ ID NO: 478017
uauaacaaucacaguuccc

SEQ ID NO: 478019 - RNA, 19 nt, Artificial Sequence
  Description of Artificial Sequence: Synthetic oligonucleotide
  Sense strand starting at position 3835 of SEQ ID NO: 317273
aaauacauguguuuaaggu

SEQ ID NO: 478020 - RNA, 19 nt, Artificial Sequence
  Description of Artificial Sequence: Synthetic oligonucleotide
  Antisense Strand to SEQ ID NO: 478019
accuuaaacacauguauuu

SEQ ID NO: 478021 - RNA, 19 nt, Artificial Sequence
  Description of Artificial Sequence: Synthetic oligonucleotide
  Sense strand starting at position 3836 of SEQ ID NO: 317273
aauacauguguuuaagguu

SEQ ID NO: 478022 - RNA, 19 nt, Artificial Sequence
  Description of Artificial Sequence: Synthetic oligonucleotide
  Antisense Strand to SEQ ID NO: 478021
aaccuuaaacacauguauu

SEQ ID NO: 478023 - RNA, 19 nt, Artificial Sequence
  Description of Artificial Sequence: Synthetic oligonucleotide
  Sense strand starting at position 3865 of SEQ ID NO: 317273
aaaugagguuaggcauauu

SEQ ID NO: 478024 - RNA, 19 nt, Artificial Sequence
  Description of Artificial Sequence: Synthetic oligonucleotide
  Antisense Strand to SEQ ID NO: 478023
aauaugccuaaccucauuu

SEQ ID NO: 478025 - RNA, 19 nt, Artificial Sequence
  Description of Artificial Sequence: Synthetic oligonucleotide
  Sense strand starting at position 3868 of SEQ ID NO: 317273
ugagguuaggcauauuagu

SEQ ID NO: 478026 - RNA, 19 nt, Artificial Sequence
  Description of Artificial Sequence: Synthetic oligonucleotide
  Antisense Strand to SEQ ID NO: 478025
acuaauaugccuaaccuca

SEQ ID NO: 478027 - RNA, 19 nt, Artificial Sequence
  Description of Artificial Sequence: Synthetic oligonucleotide
  Sense strand starting at position 3875 of SEQ ID NO: 317273
aggcauauuaguggcaauu

SEQ ID NO: 478028 - RNA, 19 nt, Artificial Sequence
  Description of Artificial Sequence: Synthetic oligonucleotide
  Antisense Strand to SEQ ID NO: 478027
aauugccacuaauaugccu

SEQ ID NO: 478029 - RNA, 19 nt, Artificial Sequence
  Description of Artificial Sequence: Synthetic oligonucleotide
  Sense strand starting at position 3898 of SEQ ID NO: 317273
acaaguaauuucuaggaau

SEQ ID NO: 478030 - RNA, 19 nt, Artificial Sequence
  Description of Artificial Sequence: Synthetic oligonucleotide
  Antisense Strand to SEQ ID NO: 478029
auuccuagaaauuacuugu

SEQ ID NO: 478031 - RNA, 19 nt, Artificial Sequence
  Description of Artificial Sequence: Synthetic oligonucleotide
  Sense strand starting at position 3918 of SEQ ID NO: 317273
gcuguaagauccuuaagga

SEQ ID NO: 478032 - RNA, 19 nt, Artificial Sequence
  Description of Artificial Sequence: Synthetic oligonucleotide
  Antisense Strand to SEQ ID NO: 478031
uccuuaaggaucuuacagc

SEQ ID NO: 478033 - RNA, 19 nt, Artificial Sequence
  Description of Artificial Sequence: Synthetic oligonucleotide
  Sense strand starting at position 3934 of SEQ ID NO: 317273
ggagucacuagguggagau

SEQ ID NO: 478034 - RNA, 19 nt, Artificial Sequence
  Description of Artificial Sequence: Synthetic oligonucleotide
  Antisense Strand to SEQ ID NO: 478033
aucuccaccuagugacucc

SEQ ID NO: 478035 - RNA, 19 nt, Artificial Sequence
  Description of Artificial Sequence: Synthetic oligonucleotide
  Sense strand starting at position 3950 of SEQ ID NO: 317273
gauguugugagguacaaag

SEQ ID NO: 478036 - RNA, 19 nt, Artificial Sequence
  Description of Artificial Sequence: Synthetic oligonucleotide
  Antisense Strand to SEQ ID NO: 478035
cuuuguaccucacaacauc

SEQ ID NO: 478037 - RNA, 19 nt, Artificial Sequence
  Description of Artificial Sequence: Synthetic oligonucleotide
  Sense strand starting at position 3952 of SEQ ID NO: 317273
uguugugagguacaaagau

SEQ ID NO: 478038 - RNA, 19 nt, Artificial Sequence
  Description of Artificial Sequence: Synthetic oligonucleotide
  Antisense Strand to SEQ ID NO: 478037
aucuuuguaccucacaaca

SEQ ID NO: 478039 - RNA, 19 nt, Artificial Sequence
  Description of Artificial Sequence: Synthetic oligonucleotide
  Sense strand starting at position 3962 of SEQ ID NO: 317273
uacaaagauuguucuugga

SEQ ID NO: 478040 - RNA, 19 nt, Artificial Sequence
  Description of Artificial Sequence: Synthetic oligonucleotide
  Antisense Strand to SEQ ID NO: 478039
uccaagaacaaucuuugua

SEQ ID NO: 478041 - RNA, 19 nt, Artificial Sequence
  Description of Artificial Sequence: Synthetic oligonucleotide
  Sense strand starting at position 3964 of SEQ ID NO: 317273
caaagauuguucuuggaaa

SEQ ID NO: 478042 - RNA, 19 nt, Artificial Sequence
  Description of Artificial Sequence: Synthetic oligonucleotide
  Antisense Strand to SEQ ID NO: 478041
uuuccaagaacaaucuuug

SEQ ID NO: 478043 - RNA, 19 nt, Artificial Sequence
  Description of Artificial Sequence: Synthetic oligonucleotide
  Sense strand starting at position 3966 of SEQ ID NO: 317273
aagauuguucuuggaaaua

SEQ ID NO: 478044 - RNA, 19 nt, Artificial Sequence
  Description of Artificial Sequence: Synthetic oligonucleotide
  Antisense Strand to SEQ ID NO: 478043
uauuuccaagaacaaucuu

SEQ ID NO: 478045 - RNA, 19 nt, Artificial Sequence
  Description of Artificial Sequence: Synthetic oligonucleotide
  Sense strand starting at position 3977 of SEQ ID NO: 317273
uggaaauagccuggaaggu

SEQ ID NO: 478046 - RNA, 19 nt, Artificial Sequence
  Description of Artificial Sequence: Synthetic oligonucleotide
  Antisense Strand to SEQ ID NO: 478045
accuuccaggcuauuucca

SEQ ID NO: 478047 - RNA, 19 nt, Artificial Sequence
  Description of Artificial Sequence: Synthetic oligonucleotide
  Sense strand starting at position 91 of SEQ ID NO: 317274
agaggaagauaauaaaucu

SEQ ID NO: 478048 - RNA, 19 nt, Artificial Sequence
  Description of Artificial Sequence: Synthetic oligonucleotide
  Antisense Strand to SEQ ID NO: 478047
agauuuauuaucuuccucu

SEQ ID NO: 478049 - RNA, 19 nt, Artificial Sequence
  Description of Artificial Sequence: Synthetic oligonucleotide
  Sense strand starting at position 236 of SEQ ID NO: 317274
aagcuaggugcuugggaaa

SEQ ID NO: 478050 - RNA, 19 nt, Artificial Sequence
  Description of Artificial Sequence: Synthetic oligonucleotide
  Antisense Strand to SEQ ID NO: 478049
uuucccaagcaccuagcuu

SEQ ID NO: 478051 - RNA, 19 nt, Artificial Sequence
  Description of Artificial Sequence: Synthetic oligonucleotide
  Sense strand starting at position 301 of SEQ ID NO: 317274
gccaacaguguguauauca

SEQ ID NO: 478052 - RNA, 19 nt, Artificial Sequence
  Description of Artificial Sequence: Synthetic oligonucleotide
  Antisense Strand to SEQ ID NO: 478051
ugauauacacacuguuggc

SEQ ID NO: 478053 - RNA, 19 nt, Artificial Sequence
  Description of Artificial Sequence: Synthetic oligonucleotide
  Sense strand starting at position 524 of SEQ ID NO: 317274
uugaguacuuugguuuauc

SEQ ID NO: 478054 - RNA, 19 nt, Artificial Sequence
  Description of Artificial Sequence: Synthetic oligonucleotide
  Antisense Strand to SEQ ID NO: 478053
gauaaaccaaaguacucaa

SEQ ID NO: 478055 - RNA, 19 nt, Artificial Sequence
  Description of Artificial Sequence: Synthetic oligonucleotide
  Sense strand starting at position 525 of SEQ ID NO: 317274
ugaguacuuugguuuaucu

SEQ ID NO: 478056 - RNA, 19 nt, Artificial Sequence
  Description of Artificial Sequence: Synthetic oligonucleotide
  Antisense Strand to SEQ ID NO: 478055
agauaaaccaaaguacuca

SEQ ID NO: 478057 - RNA, 19 nt, Artificial Sequence
  Description of Artificial Sequence: Synthetic oligonucleotide
  Sense strand starting at position 533 of SEQ ID NO: 317274
uugguuuaucuagagguug

SEQ ID NO: 478058 - RNA, 19 nt, Artificial Sequence
  Description of Artificial Sequence: Synthetic oligonucleotide
  Antisense Strand to SEQ ID NO: 478057
caaccucuagauaaaccaa

SEQ ID NO: 478059 - RNA, 19 nt, Artificial Sequence
  Description of Artificial Sequence: Synthetic oligonucleotide
  Sense strand starting at position 535 of SEQ ID NO: 317274
gguuuaucuagagguugug

SEQ ID NO: 478060 - RNA, 19 nt, Artificial Sequence
  Description of Artificial Sequence: Synthetic oligonucleotide
  Antisense Strand to SEQ ID NO: 478059
cacaaccucuagauaaacc

SEQ ID NO: 478061 - RNA, 19 nt, Artificial Sequence
  Description of Artificial Sequence: Synthetic oligonucleotide
  Sense strand starting at position 602 of SEQ ID NO: 317274
ucucaaaugcucuggaucu

SEQ ID NO: 478062 - RNA, 19 nt, Artificial Sequence
  Description of Artificial Sequence: Synthetic oligonucleotide
  Antisense Strand to SEQ ID NO: 478061
agauccagagcauuugaga

SEQ ID NO: 478063 - RNA, 19 nt, Artificial Sequence
  Description of Artificial Sequence: Synthetic oligonucleotide
  Sense strand starting at position 604 of SEQ ID NO: 317274
ucaaaugcucuggaucuaa

SEQ ID NO: 478064 - RNA, 19 nt, Artificial Sequence
  Description of Artificial Sequence: Synthetic oligonucleotide
  Antisense Strand to SEQ ID NO: 478063
uuagauccagagcauuuga

SEQ ID NO: 478065 - RNA, 19 nt, Artificial Sequence
  Description of Artificial Sequence: Synthetic oligonucleotide
  Sense strand starting at position 1166 of SEQ ID NO: 317274
uccucagucucacuguaau

SEQ ID NO: 478066 - RNA, 19 nt, Artificial Sequence
  Description of Artificial Sequence: Synthetic oligonucleotide
  Antisense Strand to SEQ ID NO: 478065
auuacagugagacugagga

SEQ ID NO: 478067 - RNA, 19 nt, Artificial Sequence
  Description of Artificial Sequence: Synthetic oligonucleotide
  Sense strand starting at position 1169 of SEQ ID NO: 317274
ucagucucacuguaauaau

SEQ ID NO: 478068 - RNA, 19 nt, Artificial Sequence
  Description of Artificial Sequence: Synthetic oligonucleotide
  Antisense Strand to SEQ ID NO: 478067
auuauuacagugagacuga

SEQ ID NO: 478069 - RNA, 19 nt, Artificial Sequence
  Description of Artificial Sequence: Synthetic oligonucleotide
  Sense strand starting at position 1180 of SEQ ID NO: 317274
guaauaaucugagucuaaa

SEQ ID NO: 478070 - RNA, 19 nt, Artificial Sequence
  Description of Artificial Sequence: Synthetic oligonucleotide
  Antisense Strand to SEQ ID NO: 478069
uuuagacucagauuauuac

SEQ ID NO: 478071 - RNA, 19 nt, Artificial Sequence
  Description of Artificial Sequence: Synthetic oligonucleotide
  Sense strand starting at position 1735 of SEQ ID NO: 317274
ugggaauuccaguggguca

SEQ ID NO: 478072 - RNA, 19 nt, Artificial Sequence
  Description of Artificial Sequence: Synthetic oligonucleotide
  Antisense Strand to SEQ ID NO: 478071
ugacccacuggaauuccca

SEQ ID NO: 478073 - RNA, 19 nt, Artificial Sequence
  Description of Artificial Sequence: Synthetic oligonucleotide
  Sense strand starting at position 1737 of SEQ ID NO: 317274
ggaauuccagugggucaga

SEQ ID NO: 478074 - RNA, 19 nt, Artificial Sequence
  Description of Artificial Sequence: Synthetic oligonucleotide
  Antisense Strand to SEQ ID NO: 478073
ucugacccacuggaauucc

SEQ ID NO: 478075 - RNA, 19 nt, Artificial Sequence
  Description of Artificial Sequence: Synthetic oligonucleotide
  Sense strand starting at position 1740 of SEQ ID NO: 317274
auuccagugggucagaauu

SEQ ID NO: 478076 - RNA, 19 nt, Artificial Sequence
  Description of Artificial Sequence: Synthetic oligonucleotide
  Antisense Strand to SEQ ID NO: 478075
aauucugacccacuggaau

SEQ ID NO: 478077 - RNA, 19 nt, Artificial Sequence
  Description of Artificial Sequence: Synthetic oligonucleotide
  Sense strand starting at position 1746 of SEQ ID NO: 317274
gugggucagaauugcuuaa

SEQ ID NO: 478078 - RNA, 19 nt, Artificial Sequence
  Description of Artificial Sequence: Synthetic oligonucleotide
  Antisense Strand to SEQ ID NO: 478077
uuaagcaauucugacccac

SEQ ID NO: 478079 - RNA, 19 nt, Artificial Sequence
  Description of Artificial Sequence: Synthetic oligonucleotide
  Sense strand starting at position 1750 of SEQ ID NO: 317274
gucagaauugcuuaaccuu

SEQ ID NO: 478080 - RNA, 19 nt, Artificial Sequence
  Description of Artificial Sequence: Synthetic oligonucleotide
  Antisense Strand to SEQ ID NO: 478079
aagguuaagcaauucugac

SEQ ID NO: 478081 - RNA, 19 nt, Artificial Sequence
  Description of Artificial Sequence: Synthetic oligonucleotide
  Sense strand starting at position 1757 of SEQ ID NO: 317274
uugcuuaaccuuggagacu

SEQ ID NO: 478082 - RNA, 19 nt, Artificial Sequence
  Description of Artificial Sequence: Synthetic oligonucleotide
  Antisense Strand to SEQ ID NO: 478081
agucuccaagguuaagcaa

SEQ ID NO: 478083 - RNA, 19 nt, Artificial Sequence
  Description of Artificial Sequence: Synthetic oligonucleotide
  Sense strand starting at position 2138 of SEQ ID NO: 317274
ggcaacuucccguaaaucu

SEQ ID NO: 478084 - RNA, 19 nt, Artificial Sequence
  Description of Artificial Sequence: Synthetic oligonucleotide
  Antisense Strand to SEQ ID NO: 478083
agauuuacgggaaguugcc

SEQ ID NO: 478085 - RNA, 19 nt, Artificial Sequence
  Description of Artificial Sequence: Synthetic oligonucleotide
  Sense strand starting at position 2147 of SEQ ID NO: 317274
ccguaaaucugcccugaaa

SEQ ID NO: 478086 - RNA, 19 nt, Artificial Sequence
  Description of Artificial Sequence: Synthetic oligonucleotide
  Antisense Strand to SEQ ID NO: 478085
uuucagggcagauuuacgg

SEQ ID NO: 478087 - RNA, 19 nt, Artificial Sequence
  Description of Artificial Sequence: Synthetic oligonucleotide
  Sense strand starting at position 2149 of SEQ ID NO: 317274
guaaaucugcccugaaauu

SEQ ID NO: 478088 - RNA, 19 nt, Artificial Sequence
  Description of Artificial Sequence: Synthetic oligonucleotide
  Antisense Strand to SEQ ID NO: 478087
aauuucagggcagauuuac

SEQ ID NO: 478089 - RNA, 19 nt, Artificial Sequence
  Description of Artificial Sequence: Synthetic oligonucleotide
  Sense strand starting at position 2234 of SEQ ID NO: 317274
gcagauaccuuugcugaag

SEQ ID NO: 478090 - RNA, 19 nt, Artificial Sequence
  Description of Artificial Sequence: Synthetic oligonucleotide
  Antisense Strand to SEQ ID NO: 478089
cuucagcaaagguaucugc

SEQ ID NO: 478091 - RNA, 19 nt, Artificial Sequence
  Description of Artificial Sequence: Synthetic oligonucleotide
  Sense strand starting at position 2237 of SEQ ID NO: 317274
gauaccuuugcugaagguu

SEQ ID NO: 478092 - RNA, 19 nt, Artificial Sequence
  Description of Artificial Sequence: Synthetic oligonucleotide
  Antisense Strand to SEQ ID NO: 478091
aaccuucagcaaagguauc

SEQ ID NO: 478093 - RNA, 19 nt, Artificial Sequence
  Description of Artificial Sequence: Synthetic oligonucleotide
  Sense strand starting at position 2736 of SEQ ID NO: 317274
ccuagaguuacggaggguu

SEQ ID NO: 478094 - RNA, 19 nt, Artificial Sequence
  Description of Artificial Sequence: Synthetic oligonucleotide
  Antisense Strand to SEQ ID NO: 478093
aacccuccguaacucuagg

SEQ ID NO: 478095 - RNA, 19 nt, Artificial Sequence
  Description of Artificial Sequence: Synthetic oligonucleotide
  Sense strand starting at position 2744 of SEQ ID NO: 317274
uacggaggguuucuagaaa

SEQ ID NO: 478096 - RNA, 19 nt, Artificial Sequence
  Description of Artificial Sequence: Synthetic oligonucleotide
  Antisense Strand to SEQ ID NO: 478095
uuucuagaaacccuccgua

SEQ ID NO: 478097 - RNA, 19 nt, Artificial Sequence
  Description of Artificial Sequence: Synthetic oligonucleotide
  Sense strand starting at position 2913 of SEQ ID NO: 317274
cuguuuauacaagaguuaa

SEQ ID NO: 478098 - RNA, 19 nt, Artificial Sequence
  Description of Artificial Sequence: Synthetic oligonucleotide
  Antisense Strand to SEQ ID NO: 478097
uuaacucuuguauaaacag

SEQ ID NO: 478099 - RNA, 19 nt, Artificial Sequence
  Description of Artificial Sequence: Synthetic oligonucleotide
  Sense strand starting at position 2954 of SEQ ID NO: 317274
agcgcuaagccuguuugua

SEQ ID NO: 478100 - RNA, 19 nt, Artificial Sequence
  Description of Artificial Sequence: Synthetic oligonucleotide
  Antisense Strand to SEQ ID NO: 478099
uacaaacaggcuuagcgcu

SEQ ID NO: 478101 - RNA, 19 nt, Artificial Sequence
  Description of Artificial Sequence: Synthetic oligonucleotide
  Sense strand starting at position 2955 of SEQ ID NO: 317274
gcgcuaagccuguuuguag

SEQ ID NO: 478102 - RNA, 19 nt, Artificial Sequence
  Description of Artificial Sequence: Synthetic oligonucleotide
  Antisense Strand to SEQ ID NO: 478101
cuacaaacaggcuuagcgc

SEQ ID NO: 478103 - RNA, 19 nt, Artificial Sequence
  Description of Artificial Sequence: Synthetic oligonucleotide
  Sense strand starting at position 2997 of SEQ ID NO: 317274
cgaauucugugacuaaaca

SEQ ID NO: 478104 - RNA, 19 nt, Artificial Sequence
  Description of Artificial Sequence: Synthetic oligonucleotide
  Antisense Strand to SEQ ID NO: 478103
uguuuagucacagaauucg

SEQ ID NO: 478105 - RNA, 19 nt, Artificial Sequence
  Description of Artificial Sequence: Synthetic oligonucleotide
  Sense strand starting at position 3199 of SEQ ID NO: 317274
caguguuagcugccguuau

SEQ ID NO: 478106 - RNA, 19 nt, Artificial Sequence
  Description of Artificial Sequence: Synthetic oligonucleotide
  Antisense Strand to SEQ ID NO: 478105
auaacggcagcuaacacug

SEQ ID NO: 478107 - RNA, 19 nt, Artificial Sequence
  Description of Artificial Sequence: Synthetic oligonucleotide
  Sense strand starting at position 3210 of SEQ ID NO: 317274
gccguuauuguuguuguua

SEQ ID NO: 478108 - RNA, 19 nt, Artificial Sequence
  Description of Artificial Sequence: Synthetic oligonucleotide
  Antisense Strand to SEQ ID NO: 478107
uaacaacaacaauaacggc

SEQ ID NO: 478109 - RNA, 19 nt, Artificial Sequence
  Description of Artificial Sequence: Synthetic oligonucleotide
  Sense strand starting at position 3276 of SEQ ID NO: 317274
uguggucagaguuagacau

SEQ ID NO: 478110 - RNA, 19 nt, Artificial Sequence
  Description of Artificial Sequence: Synthetic oligonucleotide
  Antisense Strand to SEQ ID NO: 478109
augucuaacucugaccaca

SEQ ID NO: 478111 - RNA, 19 nt, Artificial Sequence
  Description of Artificial Sequence: Synthetic oligonucleotide
  Sense strand starting at position 3284 of SEQ ID NO: 317274
gaguuagacaugggcugua

SEQ ID NO: 478112 - RNA, 19 nt, Artificial Sequence
  Description of Artificial Sequence: Synthetic oligonucleotide
  Antisense Strand to SEQ ID NO: 478111
uacagcccaugucuaacuc

SEQ ID NO: 478113 - RNA, 19 nt, Artificial Sequence
  Description of Artificial Sequence: Synthetic oligonucleotide
  Sense strand starting at position 3377 of SEQ ID NO: 317274
agauucuaacgaugggauu

SEQ ID NO: 478114 - RNA, 19 nt, Artificial Sequence
  Description of Artificial Sequence: Synthetic oligonucleotide
  Antisense Strand to SEQ ID NO: 478113
aaucccaucguuagaaucu

SEQ ID NO: 478115 - RNA, 19 nt, Artificial Sequence
  Description of Artificial Sequence: Synthetic oligonucleotide
  Sense strand starting at position 3419 of SEQ ID NO: 317274
gcugacagucuugaauaca

SEQ ID NO: 478116 - RNA, 19 nt, Artificial Sequence
  Description of Artificial Sequence: Synthetic oligonucleotide
  Antisense Strand to SEQ ID NO: 478115
uguauucaagacugucagc

SEQ ID NO: 478117 - RNA, 19 nt, Artificial Sequence
  Description of Artificial Sequence: Synthetic oligonucleotide
  Sense strand starting at position 3430 of SEQ ID NO: 317274
ugaauacaaugggaaauaa

SEQ ID NO: 478118 - RNA, 19 nt, Artificial Sequence
  Description of Artificial Sequence: Synthetic oligonucleotide
  Antisense Strand to SEQ ID NO: 478117
uuauuucccauuguauuca

SEQ ID NO: 478119 - RNA, 19 nt, Artificial Sequence
  Description of Artificial Sequence: Synthetic oligonucleotide
  Sense strand starting at position 3629 of SEQ ID NO: 317274
gugucuuacccugggauag

SEQ ID NO: 478120 - RNA, 19 nt, Artificial Sequence
  Description of Artificial Sequence: Synthetic oligonucleotide
  Antisense Strand to SEQ ID NO: 478119
cuaucccaggguaagacac

SEQ ID NO: 478121 - RNA, 19 nt, Artificial Sequence
  Description of Artificial Sequence: Synthetic oligonucleotide
  Sense strand starting at position 3630 of SEQ ID NO: 317274
ugucuuacccugggauagu

SEQ ID NO: 478122 - RNA, 19 nt, Artificial Sequence
  Description of Artificial Sequence: Synthetic oligonucleotide
  Antisense Strand to SEQ ID NO: 478121
acuaucccaggguaagaca

SEQ ID NO: 478123 - RNA, 19 nt, Artificial Sequence
  Description of Artificial Sequence: Synthetic oligonucleotide
  Sense strand starting at position 3751 of SEQ ID NO: 317274
gugauuauugaaggcuaaa

SEQ ID NO: 478124 - RNA, 19 nt, Artificial Sequence
  Description of Artificial Sequence: Synthetic oligonucleotide
  Antisense Strand to SEQ ID NO: 478123
uuuagccuucaauaaucac

SEQ ID NO: 478125 - RNA, 19 nt, Artificial Sequence
  Description of Artificial Sequence: Synthetic oligonucleotide
  Sense strand starting at position 3880 of SEQ ID NO: 317274
cccuucuuacuuuauguga

SEQ ID NO: 478126 - RNA, 19 nt, Artificial Sequence
  Description of Artificial Sequence: Synthetic oligonucleotide
  Antisense Strand to SEQ ID NO: 478125
ucacauaaaguaagaaggg

SEQ ID NO: 478127 - RNA, 19 nt, Artificial Sequence
  Description of Artificial Sequence: Synthetic oligonucleotide
  Sense strand starting at position 170 of SEQ ID NO: 317275
gaaugaauucccgagcuca

SEQ ID NO: 478128 - RNA, 19 nt, Artificial Sequence
  Description of Artificial Sequence: Synthetic oligonucleotide
  Antisense Strand to SEQ ID NO: 478127
ugagcucgggaauucauuc

SEQ ID NO: 478129 - RNA, 19 nt, Artificial Sequence
  Description of Artificial Sequence: Synthetic oligonucleotide
  Sense strand starting at position 195 of SEQ ID NO: 317275
ugcaaauugcaagguuaca

SEQ ID NO: 478130 - RNA, 19 nt, Artificial Sequence
  Description of Artificial Sequence: Synthetic oligonucleotide
  Antisense Strand to SEQ ID NO: 478129
uguaaccuugcaauuugca

SEQ ID NO: 478131 - RNA, 19 nt, Artificial Sequence
  Description of Artificial Sequence: Synthetic oligonucleotide
  Sense strand starting at position 483 of SEQ ID NO: 317275
cccaaaucguaugcaauuu

SEQ ID NO: 478132 - RNA, 19 nt, Artificial Sequence
  Description of Artificial Sequence: Synthetic oligonucleotide
  Antisense Strand to SEQ ID NO: 478131
aaauugcauacgauuuggg

SEQ ID NO: 478133 - RNA, 19 nt, Artificial Sequence
  Description of Artificial Sequence: Synthetic oligonucleotide
  Sense strand starting at position 831 of SEQ ID NO: 317275
gccggaaaggcucauagaa

SEQ ID NO: 478134 - RNA, 19 nt, Artificial Sequence
  Description of Artificial Sequence: Synthetic oligonucleotide
  Antisense Strand to SEQ ID NO: 478133
uucuaugagccuuuccggc

SEQ ID NO: 478135 - RNA, 19 nt, Artificial Sequence
  Description of Artificial Sequence: Synthetic oligonucleotide
  Sense strand starting at position 846 of SEQ ID NO: 317275
agaaauaaaccuugacgcu

SEQ ID NO: 478136 - RNA, 19 nt, Artificial Sequence
  Description of Artificial Sequence: Synthetic oligonucleotide
  Antisense Strand to SEQ ID NO: 478135
agcgucaagguuuauuucu

SEQ ID NO: 478137 - RNA, 19 nt, Artificial Sequence
  Description of Artificial Sequence: Synthetic oligonucleotide
  Sense strand starting at position 895 of SEQ ID NO: 317275
gcauaacgauaagcucauu

SEQ ID NO: 478138 - RNA, 19 nt, Artificial Sequence
  Description of Artificial Sequence: Synthetic oligonucleotide
  Antisense Strand to SEQ ID NO: 478137
aaugagcuuaucguuaugc

SEQ ID NO: 478139 - RNA, 19 nt, Artificial Sequence
  Description of Artificial Sequence: Synthetic oligonucleotide
  Sense strand starting at position 898 of SEQ ID NO: 317275
uaacgauaagcucauuguu

SEQ ID NO: 478140 - RNA, 19 nt, Artificial Sequence
  Description of Artificial Sequence: Synthetic oligonucleotide
  Antisense Strand to SEQ ID NO: 478139
aacaaugagcuuaucguua

SEQ ID NO: 478141 - RNA, 19 nt, Artificial Sequence
  Description of Artificial Sequence: Synthetic oligonucleotide
  Sense strand starting at position 957 of SEQ ID NO: 317275
ugucaaaggcaagaguuaa

SEQ ID NO: 478142 - RNA, 19 nt, Artificial Sequence
  Description of Artificial Sequence: Synthetic oligonucleotide
  Antisense Strand to SEQ ID NO: 478141
uuaacucuugccuuugaca

SEQ ID NO: 478143 - RNA, 19 nt, Artificial Sequence
  Description of Artificial Sequence: Synthetic oligonucleotide
  Sense strand starting at position 971 of SEQ ID NO: 317275
guuaauaaaggguggaguu

SEQ ID NO: 478144 - RNA, 19 nt, Artificial Sequence
  Description of Artificial Sequence: Synthetic oligonucleotide
  Antisense Strand to SEQ ID NO: 478143
aacuccacccuuuauuaac

SEQ ID NO: 478145 - RNA, 19 nt, Artificial Sequence
  Description of Artificial Sequence: Synthetic oligonucleotide
  Sense strand starting at position 995 of SEQ ID NO: 317275
gcgaauauguagacgcagu

SEQ ID NO: 478146 - RNA, 19 nt, Artificial Sequence
  Description of Artificial Sequence: Synthetic oligonucleotide
  Antisense Strand to SEQ ID NO: 478145
acugcgucuacauauucgc

SEQ ID NO: 478147 - RNA, 19 nt, Artificial Sequence
  Description of Artificial Sequence: Synthetic oligonucleotide
  Sense strand starting at position 1330 of SEQ ID NO: 317275
accuauagagauugcuaga

SEQ ID NO: 478148 - RNA, 19 nt, Artificial Sequence
  Description of Artificial Sequence: Synthetic oligonucleotide
  Antisense Strand to SEQ ID NO: 478147
ucuagcaaucucuauaggu

SEQ ID NO: 478149 - RNA, 19 nt, Artificial Sequence
  Description of Artificial Sequence: Synthetic oligonucleotide
  Sense strand starting at position 1335 of SEQ ID NO: 317275
uagagauugcuagagucuu

SEQ ID NO: 478150 - RNA, 19 nt, Artificial Sequence
  Description of Artificial Sequence: Synthetic oligonucleotide
  Antisense Strand to SEQ ID NO: 478149
aagacucuagcaaucucua

SEQ ID NO: 478151 - RNA, 19 nt, Artificial Sequence
  Description of Artificial Sequence: Synthetic oligonucleotide
  Sense strand starting at position 1347 of SEQ ID NO: 317275
gagucuugggcccaugcaa

SEQ ID NO: 478152 - RNA, 19 nt, Artificial Sequence
  Description of Artificial Sequence: Synthetic oligonucleotide
  Antisense Strand to SEQ ID NO: 478151
uugcaugggcccaagacuc

SEQ ID NO: 478153 - RNA, 19 nt, Artificial Sequence
  Description of Artificial Sequence: Synthetic oligonucleotide
  Sense strand starting at position 1425 of SEQ ID NO: 317275
agaauuacuuagcuacagu

SEQ ID NO: 478154 - RNA, 19 nt, Artificial Sequence
  Description of Artificial Sequence: Synthetic oligonucleotide
  Antisense Strand to SEQ ID NO: 478153
acuguagcuaaguaauucu

SEQ ID NO: 478155 - RNA, 19 nt, Artificial Sequence
  Description of Artificial Sequence: Synthetic oligonucleotide
  Sense strand starting at position 1580 of SEQ ID NO: 317275
ccaagagagugcucagaau

SEQ ID NO: 478156 - RNA, 19 nt, Artificial Sequence
  Description of Artificial Sequence: Synthetic oligonucleotide
  Antisense Strand to SEQ ID NO: 478155
auucugagcacucucuugg

SEQ ID NO: 478157 - RNA, 19 nt, Artificial Sequence
  Description of Artificial Sequence: Synthetic oligonucleotide
  Sense strand starting at position 1776 of SEQ ID NO: 317275
agaaguuauuuccaagaac

SEQ ID NO: 478158 - RNA, 19 nt, Artificial Sequence
  Description of Artificial Sequence: Synthetic oligonucleotide
  Antisense Strand to SEQ ID NO: 478157
guucuuggaaauaacuucu

SEQ ID NO: 478159 - RNA, 19 nt, Artificial Sequence
  Description of Artificial Sequence: Synthetic oligonucleotide
  Sense strand starting at position 1833 of SEQ ID NO: 317275
agagcaguucuugacaguu

SEQ ID NO: 478160 - RNA, 19 nt, Artificial Sequence
  Description of Artificial Sequence: Synthetic oligonucleotide
  Antisense Strand to SEQ ID NO: 478159
aacugucaagaacugcucu

SEQ ID NO: 478161 - RNA, 19 nt, Artificial Sequence
  Description of Artificial Sequence: Synthetic oligonucleotide
  Sense strand starting at position 1855 of SEQ ID NO: 317275
aaaugucagaaggguuguu

SEQ ID NO: 478162 - RNA, 19 nt, Artificial Sequence
  Description of Artificial Sequence: Synthetic oligonucleotide
  Antisense Strand to SEQ ID NO: 478161
aacaacccuucugacauuu

SEQ ID NO: 478163 - RNA, 19 nt, Artificial Sequence
  Description of Artificial Sequence: Synthetic oligonucleotide
  Sense strand starting at position 1860 of SEQ ID NO: 317275
ucagaaggguuguugucau

SEQ ID NO: 478164 - RNA, 19 nt, Artificial Sequence
  Description of Artificial Sequence: Synthetic oligonucleotide
  Antisense Strand to SEQ ID NO: 478163
augacaacaacccuucuga

SEQ ID NO: 478165 - RNA, 19 nt, Artificial Sequence
  Description of Artificial Sequence: Synthetic oligonucleotide
  Sense strand starting at position 1948 of SEQ ID NO: 317275
cgguuaguccugggacuaa

SEQ ID NO: 478166 - RNA, 19 nt, Artificial Sequence
  Description of Artificial Sequence: Synthetic oligonucleotide
  Antisense Strand to SEQ ID NO: 478165
uuagucccaggacuaaccg

SEQ ID NO: 478167 - RNA, 19 nt, Artificial Sequence
  Description of Artificial Sequence: Synthetic oligonucleotide
  Sense strand starting at position 1991 of SEQ ID NO: 317275
gggucugacugacuaaucu

SEQ ID NO: 478168 - RNA, 19 nt, Artificial Sequence
  Description of Artificial Sequence: Synthetic oligonucleotide
  Antisense Strand to SEQ ID NO: 478167
agauuagucagucagaccc

SEQ ID NO: 478169 - RNA, 19 nt, Artificial Sequence
  Description of Artificial Sequence: Synthetic oligonucleotide
  Sense strand starting at position 1995 of SEQ ID NO: 317275
cugacugacuaaucuguua

SEQ ID NO: 478170 - RNA, 19 nt, Artificial Sequence
  Description of Artificial Sequence: Synthetic oligonucleotide
  Antisense Strand to SEQ ID NO: 478169
uaacagauuagucagucag

SEQ ID NO: 478171 - RNA, 19 nt, Artificial Sequence
  Description of Artificial Sequence: Synthetic oligonucleotide
  Sense strand starting at position 2221 of SEQ ID NO: 317275
ccuugcuucccugagagga

SEQ ID NO: 478172 - RNA, 19 nt, Artificial Sequence
  Description of Artificial Sequence: Synthetic oligonucleotide
  Antisense Strand to SEQ ID NO: 478171
uccucucagggaagcaagg

SEQ ID NO: 478173 - RNA, 19 nt, Artificial Sequence
  Description of Artificial Sequence: Synthetic oligonucleotide
  Sense strand starting at position 2662 of SEQ ID NO: 317275
auuauuauucucgagauuc

SEQ ID NO: 478174 - RNA, 19 nt, Artificial Sequence
  Description of Artificial Sequence: Synthetic oligonucleotide
  Antisense Strand to SEQ ID NO: 478173
gaaucucgagaauaauaau

SEQ ID NO: 478175 - RNA, 19 nt, Artificial Sequence
  Description of Artificial Sequence: Synthetic oligonucleotide
  Sense strand starting at position 2859 of SEQ ID NO: 317275
ggcauaguuuccucucaga

SEQ ID NO: 478176 - RNA, 19 nt, Artificial Sequence
  Description of Artificial Sequence: Synthetic oligonucleotide
  Antisense Strand to SEQ ID NO: 478175
ucugagaggaaacuaugcc

SEQ ID NO: 478177 - RNA, 19 nt, Artificial Sequence
  Description of Artificial Sequence: Synthetic oligonucleotide
  Sense strand starting at position 2929 of SEQ ID NO: 317275
aauguuaggguuuaucuca

SEQ ID NO: 478178 - RNA, 19 nt, Artificial Sequence
  Description of Artificial Sequence: Synthetic oligonucleotide
  Antisense Strand to SEQ ID NO: 478177
ugagauaaacccuaacauu

SEQ ID NO: 478179 - RNA, 19 nt, Artificial Sequence
  Description of Artificial Sequence: Synthetic oligonucleotide
  Sense strand starting at position 3004 of SEQ ID NO: 317275
cccugcaugcuagggauua

SEQ ID NO: 478180 - RNA, 19 nt, Artificial Sequence
  Description of Artificial Sequence: Synthetic oligonucleotide
  Antisense Strand to SEQ ID NO: 478179
uaaucccuagcaugcaggg

SEQ ID NO: 478181 - RNA, 19 nt, Artificial Sequence
  Description of Artificial Sequence: Synthetic oligonucleotide
  Sense strand starting at position 3006 of SEQ ID NO: 317275
cugcaugcuagggauuaau

SEQ ID NO: 478182 - RNA, 19 nt, Artificial Sequence
  Description of Artificial Sequence: Synthetic oligonucleotide
  Antisense Strand to SEQ ID NO: 478181
auuaaucccuagcaugcag

SEQ ID NO: 478183 - RNA, 19 nt, Artificial Sequence
  Description of Artificial Sequence: Synthetic oligonucleotide
  Sense strand starting at position 3016 of SEQ ID NO: 317275
gggauuaauuacuccuauc

SEQ ID NO: 478184 - RNA, 19 nt, Artificial Sequence
  Description of Artificial Sequence: Synthetic oligonucleotide
  Antisense Strand to SEQ ID NO: 478183
gauaggaguaauuaauccc

SEQ ID NO: 478185 - RNA, 19 nt, Artificial Sequence
  Description of Artificial Sequence: Synthetic oligonucleotide
  Sense strand starting at position 3035 of SEQ ID NO: 317275
acagaagucuuucccauga

SEQ ID NO: 478186 - RNA, 19 nt, Artificial Sequence
  Description of Artificial Sequence: Synthetic oligonucleotide
  Antisense Strand to SEQ ID NO: 478185
ucaugggaaagacuucugu

SEQ ID NO: 478187 - RNA, 19 nt, Artificial Sequence
  Description of Artificial Sequence: Synthetic oligonucleotide
  Sense strand starting at position 3097 of SEQ ID NO: 317275
guauuugcguguccucaaa

SEQ ID NO: 478188 - RNA, 19 nt, Artificial Sequence
  Description of Artificial Sequence: Synthetic oligonucleotide
  Antisense Strand to SEQ ID NO: 478187
uuugaggacacgcaaauac

SEQ ID NO: 478189 - RNA, 19 nt, Artificial Sequence
  Description of Artificial Sequence: Synthetic oligonucleotide
  Sense strand starting at position 3099 of SEQ ID NO: 317275
auuugcguguccucaaaug

SEQ ID NO: 478190 - RNA, 19 nt, Artificial Sequence
  Description of Artificial Sequence: Synthetic oligonucleotide
  Antisense Strand to SEQ ID NO: 478189
cauuugaggacacgcaaau

SEQ ID NO: 478191 - RNA, 19 nt, Artificial Sequence
  Description of Artificial Sequence: Synthetic oligonucleotide
  Sense strand starting at position 3512 of SEQ ID NO: 317275
cauggaguccaaugccuua

SEQ ID NO: 478192 - RNA, 19 nt, Artificial Sequence
  Description of Artificial Sequence: Synthetic oligonucleotide
  Antisense Strand to SEQ ID NO: 478191
uaaggcauuggacuccaug

SEQ ID NO: 478193 - RNA, 19 nt, Artificial Sequence
  Description of Artificial Sequence: Synthetic oligonucleotide
  Sense strand starting at position 3517 of SEQ ID NO: 317275
aguccaaugccuuacuguu

SEQ ID NO: 478194 - RNA, 19 nt, Artificial Sequence
  Description of Artificial Sequence: Synthetic oligonucleotide
  Antisense Strand to SEQ ID NO: 478193
aacaguaaggcauuggacu

SEQ ID NO: 478195 - RNA, 19 nt, Artificial Sequence
  Description of Artificial Sequence: Synthetic oligonucleotide
  Sense strand starting at position 3854 of SEQ ID NO: 317275
uuuccauuggauuagguau

SEQ ID NO: 478196 - RNA, 19 nt, Artificial Sequence
  Description of Artificial Sequence: Synthetic oligonucleotide
  Antisense Strand to SEQ ID NO: 478195
auaccuaauccaauggaaa

SEQ ID NO: 478197 - RNA, 19 nt, Artificial Sequence
  Description of Artificial Sequence: Synthetic oligonucleotide
  Sense strand starting at position 3861 of SEQ ID NO: 317275
uggauuagguauucuaagu

SEQ ID NO: 478198 - RNA, 19 nt, Artificial Sequence
  Description of Artificial Sequence: Synthetic oligonucleotide
  Antisense Strand to SEQ ID NO: 478197
acuuagaauaccuaaucca

SEQ ID NO: 478199 - RNA, 19 nt, Artificial Sequence
  Description of Artificial Sequence: Synthetic oligonucleotide
  Sense strand starting at position 3895 of SEQ ID NO: 317275
caaaguauaugggaagaua

SEQ ID NO: 478200 - RNA, 19 nt, Artificial Sequence
  Description of Artificial Sequence: Synthetic oligonucleotide
  Antisense Strand to SEQ ID NO: 478199
uaucuucccauauacuuug

SEQ ID NO: 478201 - RNA, 19 nt, Artificial Sequence
  Description of Artificial Sequence: Synthetic oligonucleotide
  Sense strand starting at position 3906 of SEQ ID NO: 317275
ggaagauauguguagguca

SEQ ID NO: 478202 - RNA, 19 nt, Artificial Sequence
  Description of Artificial Sequence: Synthetic oligonucleotide
  Antisense Strand to SEQ ID NO: 478201
ugaccuacacauaucuucc

SEQ ID NO: 478203 - RNA, 19 nt, Artificial Sequence
  Description of Artificial Sequence: Synthetic oligonucleotide
  Sense strand starting at position 3908 of SEQ ID NO: 317275
aagauauguguaggucaua

SEQ ID NO: 478204 - RNA, 19 nt, Artificial Sequence
  Description of Artificial Sequence: Synthetic oligonucleotide
  Antisense Strand to SEQ ID NO: 478203
uaugaccuacacauaucuu

SEQ ID NO: 478205 - RNA, 19 nt, Artificial Sequence
  Description of Artificial Sequence: Synthetic oligonucleotide
  Sense strand starting at position 3909 of SEQ ID NO: 317275
agauauguguaggucauau

SEQ ID NO: 478206 - RNA, 19 nt, Artificial Sequence
  Description of Artificial Sequence: Synthetic oligonucleotide
  Antisense Strand to SEQ ID NO: 478205
auaugaccuacacauaucu

SEQ ID NO: 478207 - RNA, 19 nt, Artificial Sequence
  Description of Artificial Sequence: Synthetic oligonucleotide
  Sense strand starting at position 642 of SEQ ID NO: 317276
cuccgauucccucagacuu

SEQ ID NO: 478208 - RNA, 19 nt, Artificial Sequence
  Description of Artificial Sequence: Synthetic oligonucleotide
  Antisense Strand to SEQ ID NO: 478207
aagucugagggaaucggag

SEQ ID NO: 478209 - RNA, 19 nt, Artificial Sequence
  Description of Artificial Sequence: Synthetic oligonucleotide
  Sense strand starting at position 653 of SEQ ID NO: 317276
ucagacuuacccugucaca

SEQ ID NO: 478210 - RNA, 19 nt, Artificial Sequence
  Description of Artificial Sequence: Synthetic oligonucleotide
  Antisense Strand to SEQ ID NO: 478209
ugugacaggguaagucuga

SEQ ID NO: 478211 - RNA, 19 nt, Artificial Sequence
  Description of Artificial Sequence: Synthetic oligonucleotide
  Sense strand starting at position 1214 of SEQ ID NO: 317276
gggcgccuccuuuaugcua

SEQ ID NO: 478212 - RNA, 19 nt, Artificial Sequence
  Description of Artificial Sequence: Synthetic oligonucleotide
  Antisense Strand to SEQ ID NO: 478211
uagcauaaaggaggcgccc

SEQ ID NO: 478213 - RNA, 19 nt, Artificial Sequence
  Description of Artificial Sequence: Synthetic oligonucleotide
  Sense strand starting at position 1393 of SEQ ID NO: 317276
guucuccuugggugugaaa

SEQ ID NO: 478214 - RNA, 19 nt, Artificial Sequence
  Description of Artificial Sequence: Synthetic oligonucleotide
  Antisense Strand to SEQ ID NO: 478213
uuucacacccaaggagaac

SEQ ID NO: 478215 - RNA, 19 nt, Artificial Sequence
  Description of Artificial Sequence: Synthetic oligonucleotide
  Sense strand starting at position 1395 of SEQ ID NO: 317276
ucuccuugggugugaaaug

SEQ ID NO: 478216 - RNA, 19 nt, Artificial Sequence
  Description of Artificial Sequence: Synthetic oligonucleotide
  Antisense Strand to SEQ ID NO: 478215
cauuucacacccaaggaga

SEQ ID NO: 478217 - RNA, 19 nt, Artificial Sequence
  Description of Artificial Sequence: Synthetic oligonucleotide
  Sense strand starting at position 1470 of SEQ ID NO: 317276
gccagagcgcggaguaguu

SEQ ID NO: 478218 - RNA, 19 nt, Artificial Sequence
  Description of Artificial Sequence: Synthetic oligonucleotide
  Antisense Strand to SEQ ID NO: 478217
aacuacuccgcgcucuggc

SEQ ID NO: 478219 - RNA, 19 nt, Artificial Sequence
  Description of Artificial Sequence: Synthetic oligonucleotide
  Sense strand starting at position 1479 of SEQ ID NO: 317276
cggaguaguucucuccaga

SEQ ID NO: 478220 - RNA, 19 nt, Artificial Sequence
  Description of Artificial Sequence: Synthetic oligonucleotide
  Antisense Strand to SEQ ID NO: 478219
ucuggagagaacuacuccg

SEQ ID NO: 478221 - RNA, 19 nt, Artificial Sequence
  Description of Artificial Sequence: Synthetic oligonucleotide
  Sense strand starting at position 1482 of SEQ ID NO: 317276
aguaguucucuccagaagg

SEQ ID NO: 478222 - RNA, 19 nt, Artificial Sequence
  Description of Artificial Sequence: Synthetic oligonucleotide
  Antisense Strand to SEQ ID NO: 478221
ccuucuggagagaacuacu

SEQ ID NO: 478223 - RNA, 19 nt, Artificial Sequence
  Description of Artificial Sequence: Synthetic oligonucleotide
  Sense strand starting at position 1640 of SEQ ID NO: 317276
guguguugagaccacuacu

SEQ ID NO: 478224 - RNA, 19 nt, Artificial Sequence
  Description of Artificial Sequence: Synthetic oligonucleotide
  Antisense Strand to SEQ ID NO: 478223
aguaguggucucaacacac

SEQ ID NO: 478225 - RNA, 19 nt, Artificial Sequence
  Description of Artificial Sequence: Synthetic oligonucleotide
  Sense strand starting at position 2075 of SEQ ID NO: 317276
ugggaaauuuccuaaaccu

SEQ ID NO: 478226 - RNA, 19 nt, Artificial Sequence
  Description of Artificial Sequence: Synthetic oligonucleotide
  Antisense Strand to SEQ ID NO: 478225
agguuuaggaaauuuccca

SEQ ID NO: 478227 - RNA, 19 nt, Artificial Sequence
  Description of Artificial Sequence: Synthetic oligonucleotide
  Sense strand starting at position 2595 of SEQ ID NO: 317276
ugagucaugccuugaguca

SEQ ID NO: 478228 - RNA, 19 nt, Artificial Sequence
  Description of Artificial Sequence: Synthetic oligonucleotide
  Antisense Strand to SEQ ID NO: 478227
ugacucaaggcaugacuca

SEQ ID NO: 478229 - RNA, 19 nt, Artificial Sequence
  Description of Artificial Sequence: Synthetic oligonucleotide
  Sense strand starting at position 2596 of SEQ ID NO: 317276
gagucaugccuugagucac

SEQ ID NO: 478230 - RNA, 19 nt, Artificial Sequence
  Description of Artificial Sequence: Synthetic oligonucleotide
  Antisense Strand to SEQ ID NO: 478229
gugacucaaggcaugacuc

SEQ ID NO: 478231 - RNA, 19 nt, Artificial Sequence
  Description of Artificial Sequence: Synthetic oligonucleotide
  Sense strand starting at position 2627 of SEQ ID NO: 317276
cuacuucgcuuacuuugaa

SEQ ID NO: 478232 - RNA, 19 nt, Artificial Sequence
  Description of Artificial Sequence: Synthetic oligonucleotide
  Antisense Strand to SEQ ID NO: 478231
uucaaaguaagcgaaguag

SEQ ID NO: 478233 - RNA, 19 nt, Artificial Sequence
  Description of Artificial Sequence: Synthetic oligonucleotide
  Sense strand starting at position 2630 of SEQ ID NO: 317276
cuucgcuuacuuugaaaca

SEQ ID NO: 478234 - RNA, 19 nt, Artificial Sequence
  Description of Artificial Sequence: Synthetic oligonucleotide
  Antisense Strand to SEQ ID NO: 478233
uguuucaaaguaagcgaag

SEQ ID NO: 478235 - RNA, 19 nt, Artificial Sequence
  Description of Artificial Sequence: Synthetic oligonucleotide
  Sense strand starting at position 2649 of SEQ ID NO: 317276
aguucugauuccuuagcua

SEQ ID NO: 478236 - RNA, 19 nt, Artificial Sequence
  Description of Artificial Sequence: Synthetic oligonucleotide
  Antisense Strand to SEQ ID NO: 478235
uagcuaaggaaucagaacu

SEQ ID NO: 478237 - RNA, 19 nt, Artificial Sequence
  Description of Artificial Sequence: Synthetic oligonucleotide
  Sense strand starting at position 3030 of SEQ ID NO: 317276
cccugugagcuggguagaa

SEQ ID NO: 478238 - RNA, 19 nt, Artificial Sequence
  Description of Artificial Sequence: Synthetic oligonucleotide
  Antisense Strand to SEQ ID NO: 478237
uucuacccagcucacaggg

SEQ ID NO: 478239 - RNA, 19 nt, Artificial Sequence
  Description of Artificial Sequence: Synthetic oligonucleotide
  Sense strand starting at position 3086 of SEQ ID NO: 317276
cgccuuguugccuuguaua

SEQ ID NO: 478240 - RNA, 19 nt, Artificial Sequence
  Description of Artificial Sequence: Synthetic oligonucleotide
  Antisense Strand to SEQ ID NO: 478239
uauacaaggcaacaaggcg

SEQ ID NO: 478241 - RNA, 19 nt, Artificial Sequence
  Description of Artificial Sequence: Synthetic oligonucleotide
  Sense strand starting at position 3143 of SEQ ID NO: 317276
ucuugucagucucuucuua

SEQ ID NO: 478242 - RNA, 19 nt, Artificial Sequence
  Description of Artificial Sequence: Synthetic oligonucleotide
  Antisense Strand to SEQ ID NO: 478241
uaagaagagacugacaaga

SEQ ID NO: 478243 - RNA, 19 nt, Artificial Sequence
  Description of Artificial Sequence: Synthetic oligonucleotide
  Sense strand starting at position 3285 of SEQ ID NO: 317276
gugcuauagugacuacugu

SEQ ID NO: 478244 - RNA, 19 nt, Artificial Sequence
  Description of Artificial Sequence: Synthetic oligonucleotide
  Antisense Strand to SEQ ID NO: 478243
acaguagucacuauagcac

SEQ ID NO: 478245 - RNA, 19 nt, Artificial Sequence
  Description of Artificial Sequence: Synthetic oligonucleotide
  Sense strand starting at position 3336 of SEQ ID NO: 317276
uccaaugaguuccugauua

SEQ ID NO: 478246 - RNA, 19 nt, Artificial Sequence
  Description of Artificial Sequence: Synthetic oligonucleotide
  Antisense Strand to SEQ ID NO: 478245
uaaucaggaacucauugga

SEQ ID NO: 478247 - RNA, 19 nt, Artificial Sequence
  Description of Artificial Sequence: Synthetic oligonucleotide
  Sense strand starting at position 3338 of SEQ ID NO: 317276
caaugaguuccugauuacg

SEQ ID NO: 478248 - RNA, 19 nt, Artificial Sequence
  Description of Artificial Sequence: Synthetic oligonucleotide
  Antisense Strand to SEQ ID NO: 478247
cguaaucaggaacucauug

SEQ ID NO: 478249 - RNA, 19 nt, Artificial Sequence
  Description of Artificial Sequence: Synthetic oligonucleotide
  Sense strand starting at position 3340 of SEQ ID NO: 317276
augaguuccugauuacgua

SEQ ID NO: 478250 - RNA, 19 nt, Artificial Sequence
  Description of Artificial Sequence: Synthetic oligonucleotide
  Antisense Strand to SEQ ID NO: 478249
uacguaaucaggaacucau

SEQ ID NO: 478251 - RNA, 19 nt, Artificial Sequence
  Description of Artificial Sequence: Synthetic oligonucleotide
  Sense strand starting at position 3341 of SEQ ID NO: 317276
ugaguuccugauuacguaa

SEQ ID NO: 478252 - RNA, 19 nt, Artificial Sequence
  Description of Artificial Sequence: Synthetic oligonucleotide
  Antisense Strand to SEQ ID NO: 478251
uuacguaaucaggaacuca

SEQ ID NO: 478253 - RNA, 19 nt, Artificial Sequence
  Description of Artificial Sequence: Synthetic oligonucleotide
  Sense strand starting at position 3344 of SEQ ID NO: 317276
guuccugauuacguaaauu

SEQ ID NO: 478254 - RNA, 19 nt, Artificial Sequence
  Description of Artificial Sequence: Synthetic oligonucleotide
  Antisense Strand to SEQ ID NO: 478253
aauuuacguaaucaggaac

SEQ ID NO: 478255 - RNA, 19 nt, Artificial Sequence
  Description of Artificial Sequence: Synthetic oligonucleotide
  Sense strand starting at position 3409 of SEQ ID NO: 317276
cagccuuagccuggcauua

SEQ ID NO: 478256 - RNA, 19 nt, Artificial Sequence
  Description of Artificial Sequence: Synthetic oligonucleotide
  Antisense Strand to SEQ ID NO: 478255
uaaugccaggcuaaggcug

SEQ ID NO: 478257 - RNA, 19 nt, Artificial Sequence
  Description of Artificial Sequence: Synthetic oligonucleotide
  Sense strand starting at position 3420 of SEQ ID NO: 317276
uggcauuaucuaggaacca

SEQ ID NO: 478258 - RNA, 19 nt, Artificial Sequence
  Description of Artificial Sequence: Synthetic oligonucleotide
  Antisense Strand to SEQ ID NO: 478257
ugguuccuagauaaugcca

SEQ ID NO: 478259 - RNA, 19 nt, Artificial Sequence
  Description of Artificial Sequence: Synthetic oligonucleotide
  Sense strand starting at position 3421 of SEQ ID NO: 317276
ggcauuaucuaggaaccag

SEQ ID NO: 478260 - RNA, 19 nt, Artificial Sequence
  Description of Artificial Sequence: Synthetic oligonucleotide
  Antisense Strand to SEQ ID NO: 478259
cugguuccuagauaaugcc

SEQ ID NO: 478261 - RNA, 19 nt, Artificial Sequence
  Description of Artificial Sequence: Synthetic oligonucleotide
  Sense strand starting at position 3503 of SEQ ID NO: 317276
gacagugaguucucuaaua

SEQ ID NO: 478262 - RNA, 19 nt, Artificial Sequence
  Description of Artificial Sequence: Synthetic oligonucleotide
  Antisense Strand to SEQ ID NO: 478261
uauuagagaacucacuguc

SEQ ID NO: 478263 - RNA, 19 nt, Artificial Sequence
  Description of Artificial Sequence: Synthetic oligonucleotide
  Sense strand starting at position 3505 of SEQ ID NO: 317276
cagugaguucucuaauagg

SEQ ID NO: 478264 - RNA, 19 nt, Artificial Sequence
  Description of Artificial Sequence: Synthetic oligonucleotide
  Antisense Strand to SEQ ID NO: 478263
ccuauuagagaacucacug

SEQ ID NO: 478265 - RNA, 19 nt, Artificial Sequence
  Description of Artificial Sequence: Synthetic oligonucleotide
  Sense strand starting at position 3508 of SEQ ID NO: 317276
ugaguucucuaauaggaaa

SEQ ID NO: 478266 - RNA, 19 nt, Artificial Sequence
  Description of Artificial Sequence: Synthetic oligonucleotide
  Antisense Strand to SEQ ID NO: 478265
uuuccuauuagagaacuca

SEQ ID NO: 478267 - RNA, 19 nt, Artificial Sequence
  Description of Artificial Sequence: Synthetic oligonucleotide
  Sense strand starting at position 3648 of SEQ ID NO: 317276
ugcaauaucucagugcaag

SEQ ID NO: 478268 - RNA, 19 nt, Artificial Sequence
  Description of Artificial Sequence: Synthetic oligonucleotide
  Antisense Strand to SEQ ID NO: 478267
cuugcacugagauauugca

SEQ ID NO: 478269 - RNA, 19 nt, Artificial Sequence
  Description of Artificial Sequence: Synthetic oligonucleotide
  Sense strand starting at position 3649 of SEQ ID NO: 317276
gcaauaucucagugcaagu

SEQ ID NO: 478270 - RNA, 19 nt, Artificial Sequence
  Description of Artificial Sequence: Synthetic oligonucleotide
  Antisense Strand to SEQ ID NO: 478269
acuugcacugagauauugc

SEQ ID NO: 478271 - RNA, 19 nt, Artificial Sequence
  Description of Artificial Sequence: Synthetic oligonucleotide
  Sense strand starting at position 3660 of SEQ ID NO: 317276
gugcaagucuggcuuggaa

SEQ ID NO: 478272 - RNA, 19 nt, Artificial Sequence
  Description of Artificial Sequence: Synthetic oligonucleotide
  Antisense Strand to SEQ ID NO: 478271
uuccaagccagacuugcac

SEQ ID NO: 478273 - RNA, 19 nt, Artificial Sequence
  Description of Artificial Sequence: Synthetic oligonucleotide
  Sense strand starting at position 3662 of SEQ ID NO: 317276
gcaagucuggcuuggaaca

SEQ ID NO: 478274 - RNA, 19 nt, Artificial Sequence
  Description of Artificial Sequence: Synthetic oligonucleotide
  Antisense Strand to SEQ ID NO: 478273
uguuccaagccagacuugc

SEQ ID NO: 478275 - RNA, 19 nt, Artificial Sequence
  Description of Artificial Sequence: Synthetic oligonucleotide
  Sense strand starting at position 3713 of SEQ ID NO: 317276
gcacauauuccuuggagcu

SEQ ID NO: 478276 - RNA, 19 nt, Artificial Sequence
  Description of Artificial Sequence: Synthetic oligonucleotide
  Antisense Strand to SEQ ID NO: 478275
agcuccaaggaauaugugc

SEQ ID NO: 478277 - RNA, 19 nt, Artificial Sequence
  Description of Artificial Sequence: Synthetic oligonucleotide
  Sense strand starting at position 3714 of SEQ ID NO: 317276
cacauauuccuuggagcug

SEQ ID NO: 478278 - RNA, 19 nt, Artificial Sequence
  Description of Artificial Sequence: Synthetic oligonucleotide
  Antisense Strand to SEQ ID NO: 478277
cagcuccaaggaauaugug

SEQ ID NO: 478279 - RNA, 19 nt, Artificial Sequence
  Description of Artificial Sequence: Synthetic oligonucleotide
  Sense strand starting at position 3730 of SEQ ID NO: 317276
cugucaucccaagaaggua

SEQ ID NO: 478280 - RNA, 19 nt, Artificial Sequence
  Description of Artificial Sequence: Synthetic oligonucleotide
  Antisense Strand to SEQ ID NO: 478279
uaccuucuugggaugacag

SEQ ID NO: 478281 - RNA, 19 nt, Artificial Sequence
  Description of Artificial Sequence: Synthetic oligonucleotide
  Sense strand starting at position 3764 of SEQ ID NO: 317276
aguccagaccacugaucua

SEQ ID NO: 478282 - RNA, 19 nt, Artificial Sequence
  Description of Artificial Sequence: Synthetic oligonucleotide
  Antisense Strand to SEQ ID NO: 478281
uagaucaguggucuggacu

SEQ ID NO: 478283 - RNA, 19 nt, Artificial Sequence
  Description of Artificial Sequence: Synthetic oligonucleotide
  Sense strand starting at position 3775 of SEQ ID NO: 317276
cugaucuaauuuggaauca

SEQ ID NO: 478284 - RNA, 19 nt, Artificial Sequence
  Description of Artificial Sequence: Synthetic oligonucleotide
  Antisense Strand to SEQ ID NO: 478283
ugauuccaaauuagaucag

SEQ ID NO: 478285 - RNA, 19 nt, Artificial Sequence
  Description of Artificial Sequence: Synthetic oligonucleotide
  Sense strand starting at position 3776 of SEQ ID NO: 317276
ugaucuaauuuggaaucau

SEQ ID NO: 478286 - RNA, 19 nt, Artificial Sequence
  Description of Artificial Sequence: Synthetic oligonucleotide
  Antisense Strand to SEQ ID NO: 478285
augauuccaaauuagauca

SEQ ID NO: 478287 - RNA, 19 nt, Artificial Sequence
  Description of Artificial Sequence: Synthetic oligonucleotide
  Sense strand starting at position 402 of SEQ ID NO: 317277
ggcagaaguuacugauaaa

SEQ ID NO: 478288 - RNA, 19 nt, Artificial Sequence
  Description of Artificial Sequence: Synthetic oligonucleotide
  Antisense Strand to SEQ ID NO: 478287
uuuaucaguaacuucugcc

SEQ ID NO: 478289 - RNA, 19 nt, Artificial Sequence
  Description of Artificial Sequence: Synthetic oligonucleotide
  Sense strand starting at position 511 of SEQ ID NO: 317277
acgccaaaugaauauccau

SEQ ID NO: 478290 - RNA, 19 nt, Artificial Sequence
  Description of Artificial Sequence: Synthetic oligonucleotide
  Antisense Strand to SEQ ID NO: 478289
auggauauucauuuggcgu

SEQ ID NO: 478291 - RNA, 19 nt, Artificial Sequence
  Description of Artificial Sequence: Synthetic oligonucleotide
  Sense strand starting at position 518 of SEQ ID NO: 317277
augaauauccauuguggcu

SEQ ID NO: 478292 - RNA, 19 nt, Artificial Sequence
  Description of Artificial Sequence: Synthetic oligonucleotide
  Antisense Strand to SEQ ID NO: 478291
agccacaauggauauucau

SEQ ID NO: 478293 - RNA, 19 nt, Artificial Sequence
  Description of Artificial Sequence: Synthetic oligonucleotide
  Sense strand starting at position 520 of SEQ ID NO: 317277
gaauauccauuguggcuau

SEQ ID NO: 478294 - RNA, 19 nt, Artificial Sequence
  Description of Artificial Sequence: Synthetic oligonucleotide
  Antisense Strand to SEQ ID NO: 478293
auagccacaauggauauuc

SEQ ID NO: 478295 - RNA, 19 nt, Artificial Sequence
  Description of Artificial Sequence: Synthetic oligonucleotide
  Sense strand starting at position 524 of SEQ ID NO: 317277
auccauuguggcuaucuga

SEQ ID NO: 478296 - RNA, 19 nt, Artificial Sequence
  Description of Artificial Sequence: Synthetic oligonucleotide
  Antisense Strand to SEQ ID NO: 478295
ucagauagccacaauggau

SEQ ID NO: 478297 - RNA, 19 nt, Artificial Sequence
  Description of Artificial Sequence: Synthetic oligonucleotide
  Sense strand starting at position 594 of SEQ ID NO: 317277
uucuaaccguccuacgaua

SEQ ID NO: 478298 - RNA, 19 nt, Artificial Sequence
  Description of Artificial Sequence: Synthetic oligonucleotide
  Antisense Strand to SEQ ID NO: 478297
uaucguaggacgguuagaa

SEQ ID NO: 478299 - RNA, 19 nt, Artificial Sequence
  Description of Artificial Sequence: Synthetic oligonucleotide
  Sense strand starting at position 640 of SEQ ID NO: 317277
auugcaaagcuucgacaga

SEQ ID NO: 478300 - RNA, 19 nt, Artificial Sequence
  Description of Artificial Sequence: Synthetic oligonucleotide
  Antisense Strand to SEQ ID NO: 478299
ucugucgaagcuuugcaau

SEQ ID NO: 478301 - RNA, 19 nt, Artificial Sequence
  Description of Artificial Sequence: Synthetic oligonucleotide
  Sense strand starting at position 749 of SEQ ID NO: 317277
ggcuacuguuuccaagcaa

SEQ ID NO: 478302 - RNA, 19 nt, Artificial Sequence
  Description of Artificial Sequence: Synthetic oligonucleotide
  Antisense Strand to SEQ ID NO: 478301
uugcuuggaaacaguagcc

SEQ ID NO: 478303 - RNA, 19 nt, Artificial Sequence
  Description of Artificial Sequence: Synthetic oligonucleotide
  Sense strand starting at position 809 of SEQ ID NO: 317277
acgcuuuaaucccgagaga

SEQ ID NO: 478304 - RNA, 19 nt, Artificial Sequence
  Description of Artificial Sequence: Synthetic oligonucleotide
  Antisense Strand to SEQ ID NO: 478303
ucucucgggauuaaagcgu

SEQ ID NO: 478305 - RNA, 19 nt, Artificial Sequence
  Description of Artificial Sequence: Synthetic oligonucleotide
  Sense strand starting at position 810 of SEQ ID NO: 317277
cgcuuuaaucccgagagaa

SEQ ID NO: 478306 - RNA, 19 nt, Artificial Sequence
  Description of Artificial Sequence: Synthetic oligonucleotide
  Antisense Strand to SEQ ID NO: 478305
uucucucgggauuaaagcg

SEQ ID NO: 478307 - RNA, 19 nt, Artificial Sequence
  Description of Artificial Sequence: Synthetic oligonucleotide
  Sense strand starting at position 847 of SEQ ID NO: 317277
gcgggaggguacaagaaau

SEQ ID NO: 478308 - RNA, 19 nt, Artificial Sequence
  Description of Artificial Sequence: Synthetic oligonucleotide
  Antisense Strand to SEQ ID NO: 478307
auuucuuguacccucccgc

SEQ ID NO: 478309 - RNA, 19 nt, Artificial Sequence
  Description of Artificial Sequence: Synthetic oligonucleotide
  Sense strand starting at position 937 of SEQ ID NO: 317277
cguagagucuugugugcac

SEQ ID NO: 478310 - RNA, 19 nt, Artificial Sequence
  Description of Artificial Sequence: Synthetic oligonucleotide
  Antisense Strand to SEQ ID NO: 478309
gugcacacaagacucuacg

SEQ ID NO: 478311 - RNA, 19 nt, Artificial Sequence
  Description of Artificial Sequence: Synthetic oligonucleotide
  Sense strand starting at position 939 of SEQ ID NO: 317277
uagagucuugugugcacuu

SEQ ID NO: 478312 - RNA, 19 nt, Artificial Sequence
  Description of Artificial Sequence: Synthetic oligonucleotide
  Antisense Strand to SEQ ID NO: 478311
aagugcacacaagacucua

SEQ ID NO: 478313 - RNA, 19 nt, Artificial Sequence
  Description of Artificial Sequence: Synthetic oligonucleotide
  Sense strand starting at position 940 of SEQ ID NO: 317277
agagucuugugugcacuua

SEQ ID NO: 478314 - RNA, 19 nt, Artificial Sequence
  Description of Artificial Sequence: Synthetic oligonucleotide
  Antisense Strand to SEQ ID NO: 478313
uaagugcacacaagacucu

SEQ ID NO: 478315 - RNA, 19 nt, Artificial Sequence
  Description of Artificial Sequence: Synthetic oligonucleotide
  Sense strand starting at position 1010 of SEQ ID NO: 317277
guggguuguggauaaauca

SEQ ID NO: 478316 - RNA, 19 nt, Artificial Sequence
  Description of Artificial Sequence: Synthetic oligonucleotide
  Antisense Strand to SEQ ID NO: 478315
ugauuuauccacaacccac

SEQ ID NO: 478317 - RNA, 19 nt, Artificial Sequence
  Description of Artificial Sequence: Synthetic oligonucleotide
  Sense strand starting at position 1058 of SEQ ID NO: 317277
agagaauaagcccguggau

SEQ ID NO: 478318 - RNA, 19 nt, Artificial Sequence
  Description of Artificial Sequence: Synthetic oligonucleotide
  Antisense Strand to SEQ ID NO: 478317
auccacgggcuuauucucu

SEQ ID NO: 478319 - RNA, 19 nt, Artificial Sequence
  Description of Artificial Sequence: Synthetic oligonucleotide
  Sense strand starting at position 1739 of SEQ ID NO: 317277
cuccgauucccucagacuu

SEQ ID NO: 478320 - RNA, 19 nt, Artificial Sequence
  Description of Artificial Sequence: Synthetic oligonucleotide
  Antisense Strand to SEQ ID NO: 478319
aagucugagggaaucggag

SEQ ID NO: 478321 - RNA, 19 nt, Artificial Sequence
  Description of Artificial Sequence: Synthetic oligonucleotide
  Sense strand starting at position 1750 of SEQ ID NO: 317277
ucagacuuacccugucaca

SEQ ID NO: 478322 - RNA, 19 nt, Artificial Sequence
  Description of Artificial Sequence: Synthetic oligonucleotide
  Antisense Strand to SEQ ID NO: 478321
ugugacaggguaagucuga

SEQ ID NO: 478323 - RNA, 19 nt, Artificial Sequence
  Description of Artificial Sequence: Synthetic oligonucleotide
  Sense strand starting at position 2311 of SEQ ID NO: 317277
gggcgccuccuuuaugcua

SEQ ID NO: 478324 - RNA, 19 nt, Artificial Sequence
  Description of Artificial Sequence: Synthetic oligonucleotide
  Antisense Strand to SEQ ID NO: 478323
uagcauaaaggaggcgccc

SEQ ID NO: 478325 - RNA, 19 nt, Artificial Sequence
  Description of Artificial Sequence: Synthetic oligonucleotide
  Sense strand starting at position 2313 of SEQ ID NO: 317277
gcgccuccuuuaugcuaau

SEQ ID NO: 478326 - RNA, 19 nt, Artificial Sequence
  Description of Artificial Sequence: Synthetic oligonucleotide
  Antisense Strand to SEQ ID NO: 478325
auuagcauaaaggaggcgc

SEQ ID NO: 478327 - RNA, 19 nt, Artificial Sequence
  Description of Artificial Sequence: Synthetic oligonucleotide
  Sense strand starting at position 2488 of SEQ ID NO: 317277
gcguucuccuuggguguga

SEQ ID NO: 478328 - RNA, 19 nt, Artificial Sequence
  Description of Artificial Sequence: Synthetic oligonucleotide
  Antisense Strand to SEQ ID NO: 478327
ucacacccaaggagaacgc

SEQ ID NO: 478329 - RNA, 19 nt, Artificial Sequence
  Description of Artificial Sequence: Synthetic oligonucleotide
  Sense strand starting at position 2490 of SEQ ID NO: 317277
guucuccuugggugugaaa

SEQ ID NO: 478330 - RNA, 19 nt, Artificial Sequence
  Description of Artificial Sequence: Synthetic oligonucleotide
  Antisense Strand to SEQ ID NO: 478329
uuucacacccaaggagaac

SEQ ID NO: 478331 - RNA, 19 nt, Artificial Sequence
  Description of Artificial Sequence: Synthetic oligonucleotide
  Sense strand starting at position 2492 of SEQ ID NO: 317277
ucuccuugggugugaaaug

SEQ ID NO: 478332 - RNA, 19 nt, Artificial Sequence
  Description of Artificial Sequence: Synthetic oligonucleotide
  Antisense Strand to SEQ ID NO: 478331
cauuucacacccaaggaga

SEQ ID NO: 478333 - RNA, 19 nt, Artificial Sequence
  Description of Artificial Sequence: Synthetic oligonucleotide
  Sense strand starting at position 2493 of SEQ ID NO: 317277
cuccuugggugugaaauga

SEQ ID NO: 478334 - RNA, 19 nt, Artificial Sequence
  Description of Artificial Sequence: Synthetic oligonucleotide
  Antisense Strand to SEQ ID NO: 478333
ucauuucacacccaaggag

SEQ ID NO: 478335 - RNA, 19 nt, Artificial Sequence
  Description of Artificial Sequence: Synthetic oligonucleotide
  Sense strand starting at position 2567 of SEQ ID NO: 317277
gccagagcgcggaguaguu

SEQ ID NO: 478336 - RNA, 19 nt, Artificial Sequence
  Description of Artificial Sequence: Synthetic oligonucleotide
  Antisense Strand to SEQ ID NO: 478335
aacuacuccgcgcucuggc

SEQ ID NO: 478337 - RNA, 19 nt, Artificial Sequence
  Description of Artificial Sequence: Synthetic oligonucleotide
  Sense strand starting at position 2576 of SEQ ID NO: 317277
cggaguaguucucuccaga

SEQ ID NO: 478338 - RNA, 19 nt, Artificial Sequence
  Description of Artificial Sequence: Synthetic oligonucleotide
  Antisense Strand to SEQ ID NO: 478337
ucuggagagaacuacuccg

SEQ ID NO: 478339 - RNA, 19 nt, Artificial Sequence
  Description of Artificial Sequence: Synthetic oligonucleotide
  Sense strand starting at position 2579 of SEQ ID NO: 317277
aguaguucucuccagaagg

SEQ ID NO: 478340 - RNA, 19 nt, Artificial Sequence
  Description of Artificial Sequence: Synthetic oligonucleotide
  Antisense Strand to SEQ ID NO: 478339
ccuucuggagagaacuacu

SEQ ID NO: 478341 - RNA, 19 nt, Artificial Sequence
  Description of Artificial Sequence: Synthetic oligonucleotide
  Sense strand starting at position 2737 of SEQ ID NO: 317277
guguguugagaccacuacu

SEQ ID NO: 478342 - RNA, 19 nt, Artificial Sequence
  Description of Artificial Sequence: Synthetic oligonucleotide
  Antisense Strand to SEQ ID NO: 478341
aguaguggucucaacacac

SEQ ID NO: 478343 - RNA, 19 nt, Artificial Sequence
  Description of Artificial Sequence: Synthetic oligonucleotide
  Sense strand starting at position 3172 of SEQ ID NO: 317277
ugggaaauuuccuaaaccu

SEQ ID NO: 478344 - RNA, 19 nt, Artificial Sequence
  Description of Artificial Sequence: Synthetic oligonucleotide
  Antisense Strand to SEQ ID NO: 478343
agguuuaggaaauuuccca

SEQ ID NO: 478345 - RNA, 19 nt, Artificial Sequence
  Description of Artificial Sequence: Synthetic oligonucleotide
  Sense strand starting at position 3181 of SEQ ID NO: 317277
uccuaaaccucgcgagaac

SEQ ID NO: 478346 - RNA, 19 nt, Artificial Sequence
  Description of Artificial Sequence: Synthetic oligonucleotide
  Antisense Strand to SEQ ID NO: 478345
guucucgcgagguuuagga

SEQ ID NO: 478347 - RNA, 19 nt, Artificial Sequence
  Description of Artificial Sequence: Synthetic oligonucleotide
  Sense strand starting at position 3687 of SEQ ID NO: 317277
ggguuugagucaugccuug

SEQ ID NO: 478348 - RNA, 19 nt, Artificial Sequence
  Description of Artificial Sequence: Synthetic oligonucleotide
  Antisense Strand to SEQ ID NO: 478347
caaggcaugacucaaaccc

SEQ ID NO: 478349 - RNA, 19 nt, Artificial Sequence
  Description of Artificial Sequence: Synthetic oligonucleotide
  Sense strand starting at position 3692 of SEQ ID NO: 317277
ugagucaugccuugaguca

SEQ ID NO: 478350 - RNA, 19 nt, Artificial Sequence
  Description of Artificial Sequence: Synthetic oligonucleotide
  Antisense Strand to SEQ ID NO: 478349
ugacucaaggcaugacuca

SEQ ID NO: 478351 - RNA, 19 nt, Artificial Sequence
  Description of Artificial Sequence: Synthetic oligonucleotide
  Sense strand starting at position 3693 of SEQ ID NO: 317277
gagucaugccuugagucac

SEQ ID NO: 478352 - RNA, 19 nt, Artificial Sequence
  Description of Artificial Sequence: Synthetic oligonucleotide
  Antisense Strand to SEQ ID NO: 478351
gugacucaaggcaugacuc

SEQ ID NO: 478353 - RNA, 19 nt, Artificial Sequence
  Description of Artificial Sequence: Synthetic oligonucleotide
  Sense strand starting at position 3720 of SEQ ID NO: 317277
gccacuacuucgcuuacuu

SEQ ID NO: 478354 - RNA, 19 nt, Artificial Sequence
  Description of Artificial Sequence: Synthetic oligonucleotide
  Antisense Strand to SEQ ID NO: 478353
aaguaagcgaaguaguggc

SEQ ID NO: 478355 - RNA, 19 nt, Artificial Sequence
  Description of Artificial Sequence: Synthetic oligonucleotide
  Sense strand starting at position 3724 of SEQ ID NO: 317277
cuacuucgcuuacuuugaa

SEQ ID NO: 478356 - RNA, 19 nt, Artificial Sequence
  Description of Artificial Sequence: Synthetic oligonucleotide
  Antisense Strand to SEQ ID NO: 478355
uucaaaguaagcgaaguag

SEQ ID NO: 478357 - RNA, 19 nt, Artificial Sequence
  Description of Artificial Sequence: Synthetic oligonucleotide
  Sense strand starting at position 3727 of SEQ ID NO: 317277
cuucgcuuacuuugaaaca

SEQ ID NO: 478358 - RNA, 19 nt, Artificial Sequence
  Description of Artificial Sequence: Synthetic oligonucleotide
  Antisense Strand to SEQ ID NO: 478357
uguuucaaaguaagcgaag

SEQ ID NO: 478359 - RNA, 19 nt, Artificial Sequence
  Description of Artificial Sequence: Synthetic oligonucleotide
  Sense strand starting at position 3728 of SEQ ID NO: 317277
uucgcuuacuuugaaacaa

SEQ ID NO: 478360 - RNA, 19 nt, Artificial Sequence
  Description of Artificial Sequence: Synthetic oligonucleotide
  Antisense Strand to SEQ ID NO: 478359
uuguuucaaaguaagcgaa

SEQ ID NO: 478361 - RNA, 19 nt, Artificial Sequence
  Description of Artificial Sequence: Synthetic oligonucleotide
  Sense strand starting at position 3746 of SEQ ID NO: 317277
aguucugauuccuuagcua

SEQ ID NO: 478362 - RNA, 19 nt, Artificial Sequence
  Description of Artificial Sequence: Synthetic oligonucleotide
  Antisense Strand to SEQ ID NO: 478361
uagcuaaggaaucagaacu

SEQ ID NO: 478363 - RNA, 19 nt, Artificial Sequence
  Description of Artificial Sequence: Synthetic oligonucleotide
  Sense strand starting at position 1 of SEQ ID NO: 317278
gacagucuauguuucuaag

SEQ ID NO: 478364 - RNA, 19 nt, Artificial Sequence
  Description of Artificial Sequence: Synthetic oligonucleotide
  Antisense Strand to SEQ ID NO: 478363
cuuagaaacauagacuguc

SEQ ID NO: 478365 - RNA, 19 nt, Artificial Sequence
  Description of Artificial Sequence: Synthetic oligonucleotide
  Sense strand starting at position 30 of SEQ ID NO: 317278
ucacuugugcacuggauuu

SEQ ID NO: 478366 - RNA, 19 nt, Artificial Sequence
  Description of Artificial Sequence: Synthetic oligonucleotide
  Antisense Strand to SEQ ID NO: 478365
aaauccagugcacaaguga

SEQ ID NO: 478367 - RNA, 19 nt, Artificial Sequence
  Description of Artificial Sequence: Synthetic oligonucleotide
  Sense strand starting at position 57 of SEQ ID NO: 317278
uuggcuacucagggacaau

SEQ ID NO: 478368 - RNA, 19 nt, Artificial Sequence
  Description of Artificial Sequence: Synthetic oligonucleotide
  Antisense Strand to SEQ ID NO: 478367
auugucccugaguagccaa

SEQ ID NO: 478369 - RNA, 19 nt, Artificial Sequence
  Description of Artificial Sequence: Synthetic oligonucleotide
  Sense strand starting at position 69 of SEQ ID NO: 317278
ggacaaugcccuuacaguu

SEQ ID NO: 478370 - RNA, 19 nt, Artificial Sequence
  Description of Artificial Sequence: Synthetic oligonucleotide
  Antisense Strand to SEQ ID NO: 478369
aacuguaagggcauugucc

SEQ ID NO: 478371 - RNA, 19 nt, Artificial Sequence
  Description of Artificial Sequence: Synthetic oligonucleotide
  Sense strand starting at position 526 of SEQ ID NO: 317278
aucuuagugcuaugauaca

SEQ ID NO: 478372 - RNA, 19 nt, Artificial Sequence
  Description of Artificial Sequence: Synthetic oligonucleotide
  Antisense Strand to SEQ ID NO: 478371
uguaucauagcacuaagau

SEQ ID NO: 478373 - RNA, 19 nt, Artificial Sequence
  Description of Artificial Sequence: Synthetic oligonucleotide
  Sense strand starting at position 715 of SEQ ID NO: 317278
aguucaguggagcaauguu

SEQ ID NO: 478374 - RNA, 19 nt, Artificial Sequence
  Description of Artificial Sequence: Synthetic oligonucleotide
  Antisense Strand to SEQ ID NO: 478373
aacauugcuccacugaacu

SEQ ID NO: 478375 - RNA, 19 nt, Artificial Sequence
  Description of Artificial Sequence: Synthetic oligonucleotide
  Sense strand starting at position 777 of SEQ ID NO: 317278
aggccugagacuugaacuu

SEQ ID NO: 478376 - RNA, 19 nt, Artificial Sequence
  Description of Artificial Sequence: Synthetic oligonucleotide
  Antisense Strand to SEQ ID NO: 478375
aaguucaagucucaggccu

SEQ ID NO: 478377 - RNA, 19 nt, Artificial Sequence
  Description of Artificial Sequence: Synthetic oligonucleotide
  Sense strand starting at position 828 of SEQ ID NO: 317278
ugacuugugaagugaaaga

SEQ ID NO: 478378 - RNA, 19 nt, Artificial Sequence
  Description of Artificial Sequence: Synthetic oligonucleotide
  Antisense Strand to SEQ ID NO: 478377
ucuuucacuucacaaguca

SEQ ID NO: 478379 - RNA, 19 nt, Artificial Sequence
  Description of Artificial Sequence: Synthetic oligonucleotide
  Sense strand starting at position 864 of SEQ ID NO: 317278
ucagauugacgaugauagu

SEQ ID NO: 478380 - RNA, 19 nt, Artificial Sequence
  Description of Artificial Sequence: Synthetic oligonucleotide
  Antisense Strand to SEQ ID NO: 478379
acuaucaucgucaaucuga

SEQ ID NO: 478381 - RNA, 19 nt, Artificial Sequence
  Description of Artificial Sequence: Synthetic oligonucleotide
  Sense strand starting at position 883 of SEQ ID NO: 317278
aacagucauggugguauau

SEQ ID NO: 478382 - RNA, 19 nt, Artificial Sequence
  Description of Artificial Sequence: Synthetic oligonucleotide
  Antisense Strand to SEQ ID NO: 478381
auauaccaccaugacuguu

SEQ ID NO: 478383 - RNA, 19 nt, Artificial Sequence
  Description of Artificial Sequence: Synthetic oligonucleotide
  Sense strand starting at position 946 of SEQ ID NO: 317278
auacacgcccuuuaguaua

SEQ ID NO: 478384 - RNA, 19 nt, Artificial Sequence
  Description of Artificial Sequence: Synthetic oligonucleotide
  Antisense Strand to SEQ ID NO: 478383
uauacuaaagggcguguau

SEQ ID NO: 478385 - RNA, 19 nt, Artificial Sequence
  Description of Artificial Sequence: Synthetic oligonucleotide
  Sense strand starting at position 1262 of SEQ ID NO: 317278
gcaauuacaugauugucuu

SEQ ID NO: 478386 - RNA, 19 nt, Artificial Sequence
  Description of Artificial Sequence: Synthetic oligonucleotide
  Antisense Strand to SEQ ID NO: 478385
aagacaaucauguaauugc

SEQ ID NO: 478387 - RNA, 19 nt, Artificial Sequence
  Description of Artificial Sequence: Synthetic oligonucleotide
  Sense strand starting at position 1266 of SEQ ID NO: 317278
uuacaugauugucuucuuu

SEQ ID NO: 478388 - RNA, 19 nt, Artificial Sequence
  Description of Artificial Sequence: Synthetic oligonucleotide
  Antisense Strand to SEQ ID NO: 478387
aaagaagacaaucauguaa

SEQ ID NO: 478389 - RNA, 19 nt, Artificial Sequence
  Description of Artificial Sequence: Synthetic oligonucleotide
  Sense strand starting at position 1592 of SEQ ID NO: 317278
gggcuuaucgccuugccaa

SEQ ID NO: 478390 - RNA, 19 nt, Artificial Sequence
  Description of Artificial Sequence: Synthetic oligonucleotide
  Antisense Strand to SEQ ID NO: 478389
uuggcaaggcgauaagccc

SEQ ID NO: 478391 - RNA, 19 nt, Artificial Sequence
  Description of Artificial Sequence: Synthetic oligonucleotide
  Sense strand starting at position 1727 of SEQ ID NO: 317278
gacggaagcuugucaggga

SEQ ID NO: 478392 - RNA, 19 nt, Artificial Sequence
  Description of Artificial Sequence: Synthetic oligonucleotide
  Antisense Strand to SEQ ID NO: 478391
ucccugacaagcuuccguc

SEQ ID NO: 478393 - RNA, 19 nt, Artificial Sequence
  Description of Artificial Sequence: Synthetic oligonucleotide
  Sense strand starting at position 1732 of SEQ ID NO: 317278
aagcuugucagggaagagu

SEQ ID NO: 478394 - RNA, 19 nt, Artificial Sequence
  Description of Artificial Sequence: Synthetic oligonucleotide
  Antisense Strand to SEQ ID NO: 478393
acucuucccugacaagcuu

SEQ ID NO: 478395 - RNA, 19 nt, Artificial Sequence
  Description of Artificial Sequence: Synthetic oligonucleotide
  Sense strand starting at position 1752 of SEQ ID NO: 317278
cauagaaggcgucaccuuu

SEQ ID NO: 478396 - RNA, 19 nt, Artificial Sequence
  Description of Artificial Sequence: Synthetic oligonucleotide
  Antisense Strand to SEQ ID NO: 478395
aaaggugacgccuucuaug

SEQ ID NO: 478397 - RNA, 19 nt, Artificial Sequence
  Description of Artificial Sequence: Synthetic oligonucleotide
  Sense strand starting at position 1758 of SEQ ID NO: 317278
aggcgucaccuuuaggaga

SEQ ID NO: 478398 - RNA, 19 nt, Artificial Sequence
  Description of Artificial Sequence: Synthetic oligonucleotide
  Antisense Strand to SEQ ID NO: 478397
ucuccuaaaggugacgccu

SEQ ID NO: 478399 - RNA, 19 nt, Artificial Sequence
  Description of Artificial Sequence: Synthetic oligonucleotide
  Sense strand starting at position 1772 of SEQ ID NO: 317278
ggagacauccucugucaua

SEQ ID NO: 478400 - RNA, 19 nt, Artificial Sequence
  Description of Artificial Sequence: Synthetic oligonucleotide
  Antisense Strand to SEQ ID NO: 478399
uaugacagaggaugucucc

SEQ ID NO: 478401 - RNA, 19 nt, Artificial Sequence
  Description of Artificial Sequence: Synthetic oligonucleotide
  Sense strand starting at position 1773 of SEQ ID NO: 317278
gagacauccucugucauag

SEQ ID NO: 478402 - RNA, 19 nt, Artificial Sequence
  Description of Artificial Sequence: Synthetic oligonucleotide
  Antisense Strand to SEQ ID NO: 478401
cuaugacagaggaugucuc

SEQ ID NO: 478403 - RNA, 19 nt, Artificial Sequence
  Description of Artificial Sequence: Synthetic oligonucleotide
  Sense strand starting at position 2444 of SEQ ID NO: 317278
cagcuaaaccgugaggaca

SEQ ID NO: 478404 - RNA, 19 nt, Artificial Sequence
  Description of Artificial Sequence: Synthetic oligonucleotide
  Antisense Strand to SEQ ID NO: 478403
uguccucacgguuuagcug

SEQ ID NO: 478405 - RNA, 19 nt, Artificial Sequence
  Description of Artificial Sequence: Synthetic oligonucleotide
  Sense strand starting at position 2491 of SEQ ID NO: 317278
ccaugaccucauggaacua

SEQ ID NO: 478406 - RNA, 19 nt, Artificial Sequence
  Description of Artificial Sequence: Synthetic oligonucleotide
  Antisense Strand to SEQ ID NO: 478405
uaguuccaugaggucaugg

SEQ ID NO: 478407 - RNA, 19 nt, Artificial Sequence
  Description of Artificial Sequence: Synthetic oligonucleotide
  Sense strand starting at position 2598 of SEQ ID NO: 317278
guguguccugugagagcua

SEQ ID NO: 478408 - RNA, 19 nt, Artificial Sequence
  Description of Artificial Sequence: Synthetic oligonucleotide
  Antisense Strand to SEQ ID NO: 478407
uagcucucacaggacacac

SEQ ID NO: 478409 - RNA, 19 nt, Artificial Sequence
  Description of Artificial Sequence: Synthetic oligonucleotide
  Sense strand starting at position 2632 of SEQ ID NO: 317278
ugacaaucugagugucagu

SEQ ID NO: 478410 - RNA, 19 nt, Artificial Sequence
  Description of Artificial Sequence: Synthetic oligonucleotide
  Antisense Strand to SEQ ID NO: 478409
acugacacucagauuguca

SEQ ID NO: 478411 - RNA, 19 nt, Artificial Sequence
  Description of Artificial Sequence: Synthetic oligonucleotide
  Sense strand starting at position 2639 of SEQ ID NO: 317278
cugagugucagugagggaa

SEQ ID NO: 478412 - RNA, 19 nt, Artificial Sequence
  Description of Artificial Sequence: Synthetic oligonucleotide
  Antisense Strand to SEQ ID NO: 478411
uucccucacugacacucag

SEQ ID NO: 478413 - RNA, 19 nt, Artificial Sequence
  Description of Artificial Sequence: Synthetic oligonucleotide
  Sense strand starting at position 2721 of SEQ ID NO: 317278
ggcuuuguggcacaaagaa

SEQ ID NO: 478414 - RNA, 19 nt, Artificial Sequence
  Description of Artificial Sequence: Synthetic oligonucleotide
  Antisense Strand to SEQ ID NO: 478413
uucuuugugccacaaagcc

SEQ ID NO: 478415 - RNA, 19 nt, Artificial Sequence
  Description of Artificial Sequence: Synthetic oligonucleotide
  Sense strand starting at position 2886 of SEQ ID NO: 317278
agauauuugucuuuagcuu

SEQ ID NO: 478416 - RNA, 19 nt, Artificial Sequence
  Description of Artificial Sequence: Synthetic oligonucleotide
  Antisense Strand to SEQ ID NO: 478415
aagcuaaagacaaauaucu

SEQ ID NO: 478417 - RNA, 19 nt, Artificial Sequence
  Description of Artificial Sequence: Synthetic oligonucleotide
  Sense strand starting at position 2890 of SEQ ID NO: 317278
auuugucuuuagcuuucua

SEQ ID NO: 478418 - RNA, 19 nt, Artificial Sequence
  Description of Artificial Sequence: Synthetic oligonucleotide
  Antisense Strand to SEQ ID NO: 478417
uagaaagcuaaagacaaau

SEQ ID NO: 478419 - RNA, 19 nt, Artificial Sequence
  Description of Artificial Sequence: Synthetic oligonucleotide
  Sense strand starting at position 2965 of SEQ ID NO: 317278
uccgguuacuaacucuuaa

SEQ ID NO: 478420 - RNA, 19 nt, Artificial Sequence
  Description of Artificial Sequence: Synthetic oligonucleotide
  Antisense Strand to SEQ ID NO: 478419
uuaagaguuaguaaccgga

SEQ ID NO: 478421 - RNA, 19 nt, Artificial Sequence
  Description of Artificial Sequence: Synthetic oligonucleotide
  Sense strand starting at position 3123 of SEQ ID NO: 317278
agccaaauacuuuggccau

SEQ ID NO: 478422 - RNA, 19 nt, Artificial Sequence
  Description of Artificial Sequence: Synthetic oligonucleotide
  Antisense Strand to SEQ ID NO: 478421
auggccaaaguauuuggcu

SEQ ID NO: 478423 - RNA, 19 nt, Artificial Sequence
  Description of Artificial Sequence: Synthetic oligonucleotide
  Sense strand starting at position 3241 of SEQ ID NO: 317278
augugauaccuuuacaugu

SEQ ID NO: 478424 - RNA, 19 nt, Artificial Sequence
  Description of Artificial Sequence: Synthetic oligonucleotide
  Antisense Strand to SEQ ID NO: 478423
acauguaaagguaucacau

SEQ ID NO: 478425 - RNA, 19 nt, Artificial Sequence
  Description of Artificial Sequence: Synthetic oligonucleotide
  Sense strand starting at position 3302 of SEQ ID NO: 317278
gauaucagagacugguuua

SEQ ID NO: 478426 - RNA, 19 nt, Artificial Sequence
  Description of Artificial Sequence: Synthetic oligonucleotide
  Antisense Strand to SEQ ID NO: 478425
uaaaccagucucugauauc

SEQ ID NO: 478427 - RNA, 19 nt, Artificial Sequence
  Description of Artificial Sequence: Synthetic oligonucleotide
  Sense strand starting at position 3305 of SEQ ID NO: 317278
aucagagacugguuuacaa

SEQ ID NO: 478428 - RNA, 19 nt, Artificial Sequence
  Description of Artificial Sequence: Synthetic oligonucleotide
  Antisense Strand to SEQ ID NO: 478427
uuguaaaccagucucugau

SEQ ID NO: 478429 - RNA, 19 nt, Artificial Sequence
  Description of Artificial Sequence: Synthetic oligonucleotide
  Sense strand starting at position 3427 of SEQ ID NO: 317278
ggagcuuugcucgaauaua

SEQ ID NO: 478430 - RNA, 19 nt, Artificial Sequence
  Description of Artificial Sequence: Synthetic oligonucleotide
  Antisense Strand to SEQ ID NO: 478429
uauauucgagcaaagcucc

SEQ ID NO: 478431 - RNA, 19 nt, Artificial Sequence
  Description of Artificial Sequence: Synthetic oligonucleotide
  Sense strand starting at position 3465 of SEQ ID NO: 317278
guagaucaagcauagguua

SEQ ID NO: 478432 - RNA, 19 nt, Artificial Sequence
  Description of Artificial Sequence: Synthetic oligonucleotide
  Antisense Strand to SEQ ID NO: 478431
uaaccuaugcuugaucuac

SEQ ID NO: 478433 - RNA, 19 nt, Artificial Sequence
  Description of Artificial Sequence: Synthetic oligonucleotide
  Sense strand starting at position 3594 of SEQ ID NO: 317278
aggaguaagugaaggagua

SEQ ID NO: 478434 - RNA, 19 nt, Artificial Sequence
  Description of Artificial Sequence: Synthetic oligonucleotide
  Antisense Strand to SEQ ID NO: 478433
uacuccuucacuuacuccu

SEQ ID NO: 478435 - RNA, 19 nt, Artificial Sequence
  Description of Artificial Sequence: Synthetic oligonucleotide
  Sense strand starting at position 3595 of SEQ ID NO: 317278
ggaguaagugaaggaguaa

SEQ ID NO: 478436 - RNA, 19 nt, Artificial Sequence
  Description of Artificial Sequence: Synthetic oligonucleotide
  Antisense Strand to SEQ ID NO: 478435
uuacuccuucacuuacucc

SEQ ID NO: 478437 - RNA, 19 nt, Artificial Sequence
  Description of Artificial Sequence: Synthetic oligonucleotide
  Sense strand starting at position 3686 of SEQ ID NO: 317278
agagaaagaucuccuagcu

SEQ ID NO: 478438 - RNA, 19 nt, Artificial Sequence
  Description of Artificial Sequence: Synthetic oligonucleotide
  Antisense Strand to SEQ ID NO: 478437
agcuaggagaucuuucucu

SEQ ID NO: 478439 - RNA, 19 nt, Artificial Sequence
  Description of Artificial Sequence: Synthetic oligonucleotide
  Sense strand starting at position 3783 of SEQ ID NO: 317278
uugaguaagauauggcuau

SEQ ID NO: 478440 - RNA, 19 nt, Artificial Sequence
  Description of Artificial Sequence: Synthetic oligonucleotide
  Antisense Strand to SEQ ID NO: 478439
auagccauaucuuacucaa

SEQ ID NO: 478441 - RNA, 19 nt, Artificial Sequence
  Description of Artificial Sequence: Synthetic oligonucleotide
  Sense strand starting at position 3825 of SEQ ID NO: 317278
agcucugaucuccagaacu

SEQ ID NO: 478442 - RNA, 19 nt, Artificial Sequence
  Description of Artificial Sequence: Synthetic oligonucleotide
  Antisense Strand to SEQ ID NO: 478441
aguucuggagaucagagcu

SEQ ID NO: 478443 - RNA, 19 nt, Artificial Sequence
  Description of Artificial Sequence: Synthetic oligonucleotide
  Sense strand starting at position 98 of SEQ ID NO: 317279
ugcugaugauggcuaauua

SEQ ID NO: 478444 - RNA, 19 nt, Artificial Sequence
  Description of Artificial Sequence: Synthetic oligonucleotide
  Antisense Strand to SEQ ID NO: 478443
uaauuagccaucaucagca

SEQ ID NO: 478445 - RNA, 19 nt, Artificial Sequence
  Description of Artificial Sequence: Synthetic oligonucleotide
  Sense strand starting at position 117 of SEQ ID NO: 317279
caugcaucaugugcugaau

SEQ ID NO: 478446 - RNA, 19 nt, Artificial Sequence
  Description of Artificial Sequence: Synthetic oligonucleotide
  Antisense Strand to SEQ ID NO: 478445
auucagcacaugaugcaug

SEQ ID NO: 478447 - RNA, 19 nt, Artificial Sequence
  Description of Artificial Sequence: Synthetic oligonucleotide
  Sense strand starting at position 228 of SEQ ID NO: 317279
aguggaaccugauuaugca

SEQ ID NO: 478448 - RNA, 19 nt, Artificial Sequence
  Description of Artificial Sequence: Synthetic oligonucleotide
  Antisense Strand to SEQ ID NO: 478447
ugcauaaucagguuccacu

SEQ ID NO: 478449 - RNA, 19 nt, Artificial Sequence
  Description of Artificial Sequence: Synthetic oligonucleotide
  Sense strand starting at position 658 of SEQ ID NO: 317279
gaaauacgggccugcuaaa

SEQ ID NO: 478450 - RNA, 19 nt, Artificial Sequence
  Description of Artificial Sequence: Synthetic oligonucleotide
  Antisense Strand to SEQ ID NO: 478449
uuuagcaggcccguauuuc

SEQ ID NO: 478451 - RNA, 19 nt, Artificial Sequence
  Description of Artificial Sequence: Synthetic oligonucleotide
  Sense strand starting at position 684 of SEQ ID NO: 317279
aggagacaauauuauccau

SEQ ID NO: 478452 - RNA, 19 nt, Artificial Sequence
  Description of Artificial Sequence: Synthetic oligonucleotide
  Antisense Strand to SEQ ID NO: 478451
auggauaauauugucuccu

SEQ ID NO: 478453 - RNA, 19 nt, Artificial Sequence
  Description of Artificial Sequence: Synthetic oligonucleotide
  Sense strand starting at position 719 of SEQ ID NO: 317279
cugcucugguuucuaugaa

SEQ ID NO: 478454 - RNA, 19 nt, Artificial Sequence
  Description of Artificial Sequence: Synthetic oligonucleotide
  Antisense Strand to SEQ ID NO: 478453
uucauagaaaccagagcag

SEQ ID NO: 478455 - RNA, 19 nt, Artificial Sequence
  Description of Artificial Sequence: Synthetic oligonucleotide
  Sense strand starting at position 752 of SEQ ID NO: 317279
acugcuaagucaguguaaa

SEQ ID NO: 478456 - RNA, 19 nt, Artificial Sequence
  Description of Artificial Sequence: Synthetic oligonucleotide
  Antisense Strand to SEQ ID NO: 478455
uuuacacugacuuagcagu

SEQ ID NO: 478457 - RNA, 19 nt, Artificial Sequence
  Description of Artificial Sequence: Synthetic oligonucleotide
  Sense strand starting at position 772 of SEQ ID NO: 317279
guuguaagcgacugaaaug

SEQ ID NO: 478458 - RNA, 19 nt, Artificial Sequence
  Description of Artificial Sequence: Synthetic oligonucleotide
  Antisense Strand to SEQ ID NO: 478457
cauuucagucgcuuacaac

SEQ ID NO: 478459 - RNA, 19 nt, Artificial Sequence
  Description of Artificial Sequence: Synthetic oligonucleotide
  Sense strand starting at position 773 of SEQ ID NO: 317279
uuguaagcgacugaaaugu

SEQ ID NO: 478460 - RNA, 19 nt, Artificial Sequence
  Description of Artificial Sequence: Synthetic oligonucleotide
  Antisense Strand to SEQ ID NO: 478459
acauuucagucgcuuacaa

SEQ ID NO: 478461 - RNA, 19 nt, Artificial Sequence
  Description of Artificial Sequence: Synthetic oligonucleotide
  Sense strand starting at position 782 of SEQ ID NO: 317279
acugaaauguucucaggag

SEQ ID NO: 478462 - RNA, 19 nt, Artificial Sequence
  Description of Artificial Sequence: Synthetic oligonucleotide
  Antisense Strand to SEQ ID NO: 478461
cuccugagaacauuucagu

SEQ ID NO: 478463 - RNA, 19 nt, Artificial Sequence
  Description of Artificial Sequence: Synthetic oligonucleotide
  Sense strand starting at position 803 of SEQ ID NO: 317279
agaguuuauggauguuuau

SEQ ID NO: 478464 - RNA, 19 nt, Artificial Sequence
  Description of Artificial Sequence: Synthetic oligonucleotide
  Antisense Strand to SEQ ID NO: 478463
auaaacauccauaaacucu

SEQ ID NO: 478465 - RNA, 19 nt, Artificial Sequence
  Description of Artificial Sequence: Synthetic oligonucleotide
  Sense strand starting at position 806 of SEQ ID NO: 317279
guuuauggauguuuaugga

SEQ ID NO: 478466 - RNA, 19 nt, Artificial Sequence
  Description of Artificial Sequence: Synthetic oligonucleotide
  Antisense Strand to SEQ ID NO: 478465
uccauaaacauccauaaac

SEQ ID NO: 478467 - RNA, 19 nt, Artificial Sequence
  Description of Artificial Sequence: Synthetic oligonucleotide
  Sense strand starting at position 812 of SEQ ID NO: 317279
ggauguuuauggaggagac

SEQ ID NO: 478468 - RNA, 19 nt, Artificial Sequence
  Description of Artificial Sequence: Synthetic oligonucleotide
  Antisense Strand to SEQ ID NO: 478467
gucuccuccauaaacaucc

SEQ ID NO: 478469 - RNA, 19 nt, Artificial Sequence
  Description of Artificial Sequence: Synthetic oligonucleotide
  Sense strand starting at position 825 of SEQ ID NO: 317279
ggagacagucacuguugaa

SEQ ID NO: 478470 - RNA, 19 nt, Artificial Sequence
  Description of Artificial Sequence: Synthetic oligonucleotide
  Antisense Strand to SEQ ID NO: 478469
uucaacagugacugucucc

SEQ ID NO: 478471 - RNA, 19 nt, Artificial Sequence
  Description of Artificial Sequence: Synthetic oligonucleotide
  Sense strand starting at position 847 of SEQ ID NO: 317279
cuuccaguugcuuauuauu

SEQ ID NO: 478472 - RNA, 19 nt, Artificial Sequence
  Description of Artificial Sequence: Synthetic oligonucleotide
  Antisense Strand to SEQ ID NO: 478471
aauaauaagcaacuggaag

SEQ ID NO: 478473 - RNA, 19 nt, Artificial Sequence
  Description of Artificial Sequence: Synthetic oligonucleotide
  Sense strand starting at position 1173 of SEQ ID NO: 317279
gguuccuuucgugacgaca

SEQ ID NO: 478474 - RNA, 19 nt, Artificial Sequence
  Description of Artificial Sequence: Synthetic oligonucleotide
  Antisense Strand to SEQ ID NO: 478473
ugucgucacgaaaggaacc

SEQ ID NO: 478475 - RNA, 19 nt, Artificial Sequence
  Description of Artificial Sequence: Synthetic oligonucleotide
  Sense strand starting at position 1245 of SEQ ID NO: 317279
uuccgagccugauuuauac

SEQ ID NO: 478476 - RNA, 19 nt, Artificial Sequence
  Description of Artificial Sequence: Synthetic oligonucleotide
  Antisense Strand to SEQ ID NO: 478475
guauaaaucaggcucggaa

SEQ ID NO: 478477 - RNA, 19 nt, Artificial Sequence
  Description of Artificial Sequence: Synthetic oligonucleotide
  Sense strand starting at position 1249 of SEQ ID NO: 317279
gagccugauuuauacagga

SEQ ID NO: 478478 - RNA, 19 nt, Artificial Sequence
  Description of Artificial Sequence: Synthetic oligonucleotide
  Antisense Strand to SEQ ID NO: 478477
uccuguauaaaucaggcuc

SEQ ID NO: 478479 - RNA, 19 nt, Artificial Sequence
  Description of Artificial Sequence: Synthetic oligonucleotide
  Sense strand starting at position 1284 of SEQ ID NO: 317279
uggacuccuugaccuguua

SEQ ID NO: 478480 - RNA, 19 nt, Artificial Sequence
  Description of Artificial Sequence: Synthetic oligonucleotide
  Antisense Strand to SEQ ID NO: 478479
uaacaggucaaggagucca

SEQ ID NO: 478481 - RNA, 19 nt, Artificial Sequence
  Description of Artificial Sequence: Synthetic oligonucleotide
  Sense strand starting at position 1418 of SEQ ID NO: 317279
cggugcucugugucacgau

SEQ ID NO: 478482 - RNA, 19 nt, Artificial Sequence
  Description of Artificial Sequence: Synthetic oligonucleotide
  Antisense Strand to SEQ ID NO: 478481
aucgugacacagagcaccg

SEQ ID NO: 478483 - RNA, 19 nt, Artificial Sequence
  Description of Artificial Sequence: Synthetic oligonucleotide
  Sense strand starting at position 2679 of SEQ ID NO: 317279
augucuauccacuagcauu

SEQ ID NO: 478484 - RNA, 19 nt, Artificial Sequence
  Description of Artificial Sequence: Synthetic oligonucleotide
  Antisense Strand to SEQ ID NO: 478483
aaugcuaguggauagacau

SEQ ID NO: 478485 - RNA, 19 nt, Artificial Sequence
  Description of Artificial Sequence: Synthetic oligonucleotide
  Sense strand starting at position 2707 of SEQ ID NO: 317279
ugcagaucuagggagugau

SEQ ID NO: 478486 - RNA, 19 nt, Artificial Sequence
  Description of Artificial Sequence: Synthetic oligonucleotide
  Antisense Strand to SEQ ID NO: 478485
aucacucccuagaucugca

SEQ ID NO: 478487 - RNA, 19 nt, Artificial Sequence
  Description of Artificial Sequence: Synthetic oligonucleotide
  Sense strand starting at position 2789 of SEQ ID NO: 317279
cucuguuuguuugcauuua

SEQ ID NO: 478488 - RNA, 19 nt, Artificial Sequence
  Description of Artificial Sequence: Synthetic oligonucleotide
  Antisense Strand to SEQ ID NO: 478487
uaaaugcaaacaaacagag

SEQ ID NO: 478489 - RNA, 19 nt, Artificial Sequence
  Description of Artificial Sequence: Synthetic oligonucleotide
  Sense strand starting at position 2867 of SEQ ID NO: 317279
uuuaaucgugugcuuguau

SEQ ID NO: 478490 - RNA, 19 nt, Artificial Sequence
  Description of Artificial Sequence: Synthetic oligonucleotide
  Antisense Strand to SEQ ID NO: 478489
auacaagcacacgauuaaa

SEQ ID NO: 478491 - RNA, 19 nt, Artificial Sequence
  Description of Artificial Sequence: Synthetic oligonucleotide
  Sense strand starting at position 2894 of SEQ ID NO: 317279
gcgcauacucccgcaaagu

SEQ ID NO: 478492 - RNA, 19 nt, Artificial Sequence
  Description of Artificial Sequence: Synthetic oligonucleotide
  Antisense Strand to SEQ ID NO: 478491
acuuugcgggaguaugcgc

SEQ ID NO: 478493 - RNA, 19 nt, Artificial Sequence
  Description of Artificial Sequence: Synthetic oligonucleotide
  Sense strand starting at position 2965 of SEQ ID NO: 317279
cugcgaggugacuauuaga

SEQ ID NO: 478494 - RNA, 19 nt, Artificial Sequence
  Description of Artificial Sequence: Synthetic oligonucleotide
  Antisense Strand to SEQ ID NO: 478493
ucuaauagucaccucgcag

SEQ ID NO: 478495 - RNA, 19 nt, Artificial Sequence
  Description of Artificial Sequence: Synthetic oligonucleotide
  Sense strand starting at position 2990 of SEQ ID NO: 317279
ggaguaaacccacgauguc

SEQ ID NO: 478496 - RNA, 19 nt, Artificial Sequence
  Description of Artificial Sequence: Synthetic oligonucleotide
  Antisense Strand to SEQ ID NO: 478495
gacaucguggguuuacucc

SEQ ID NO: 478497 - RNA, 19 nt, Artificial Sequence
  Description of Artificial Sequence: Synthetic oligonucleotide
  Sense strand starting at position 2991 of SEQ ID NO: 317279
gaguaaacccacgaugucu

SEQ ID NO: 478498 - RNA, 19 nt, Artificial Sequence
  Description of Artificial Sequence: Synthetic oligonucleotide
  Antisense Strand to SEQ ID NO: 478497
agacaucguggguuuacuc

SEQ ID NO: 478499 - RNA, 19 nt, Artificial Sequence
  Description of Artificial Sequence: Synthetic oligonucleotide
  Sense strand starting at position 3028 of SEQ ID NO: 317279
guaauuaucucauugucau

SEQ ID NO: 478500 - RNA, 19 nt, Artificial Sequence
  Description of Artificial Sequence: Synthetic oligonucleotide
  Antisense Strand to SEQ ID NO: 478499
augacaaugagauaauuac

SEQ ID NO: 478501 - RNA, 19 nt, Artificial Sequence
  Description of Artificial Sequence: Synthetic oligonucleotide
  Sense strand starting at position 3099 of SEQ ID NO: 317279
acgcuaagaggucagaagu

SEQ ID NO: 478502 - RNA, 19 nt, Artificial Sequence
  Description of Artificial Sequence: Synthetic oligonucleotide
  Antisense Strand to SEQ ID NO: 478501
acuucugaccucuuagcgu

SEQ ID NO: 478503 - RNA, 19 nt, Artificial Sequence
  Description of Artificial Sequence: Synthetic oligonucleotide
  Sense strand starting at position 3319 of SEQ ID NO: 317279
gggucucauccuugaggug

SEQ ID NO: 478504 - RNA, 19 nt, Artificial Sequence
  Description of Artificial Sequence: Synthetic oligonucleotide
  Antisense Strand to SEQ ID NO: 478503
caccucaaggaugagaccc

SEQ ID NO: 478505 - RNA, 19 nt, Artificial Sequence
  Description of Artificial Sequence: Synthetic oligonucleotide
  Sense strand starting at position 3320 of SEQ ID NO: 317279
ggucucauccuugagguga

SEQ ID NO: 478506 - RNA, 19 nt, Artificial Sequence
  Description of Artificial Sequence: Synthetic oligonucleotide
  Antisense Strand to SEQ ID NO: 478505
ucaccucaaggaugagacc

SEQ ID NO: 478507 - RNA, 19 nt, Artificial Sequence
  Description of Artificial Sequence: Synthetic oligonucleotide
  Sense strand starting at position 3324 of SEQ ID NO: 317279
ucauccuugaggugacuga

SEQ ID NO: 478508 - RNA, 19 nt, Artificial Sequence
  Description of Artificial Sequence: Synthetic oligonucleotide
  Antisense Strand to SEQ ID NO: 478507
ucagucaccucaaggauga

SEQ ID NO: 478509 - RNA, 19 nt, Artificial Sequence
  Description of Artificial Sequence: Synthetic oligonucleotide
  Sense strand starting at position 3328 of SEQ ID NO: 317279
ccuugaggugacugauaac

SEQ ID NO: 478510 - RNA, 19 nt, Artificial Sequence
  Description of Artificial Sequence: Synthetic oligonucleotide
  Antisense Strand to SEQ ID NO: 478509
guuaucagucaccucaagg

SEQ ID NO: 478511 - RNA, 19 nt, Artificial Sequence
  Description of Artificial Sequence: Synthetic oligonucleotide
  Sense strand starting at position 3399 of SEQ ID NO: 317279
gcuggacuauuauuacaaa

SEQ ID NO: 478512 - RNA, 19 nt, Artificial Sequence
  Description of Artificial Sequence: Synthetic oligonucleotide
  Antisense Strand to SEQ ID NO: 478511
uuuguaauaauaguccagc

SEQ ID NO: 478513 - RNA, 19 nt, Artificial Sequence
  Description of Artificial Sequence: Synthetic oligonucleotide
  Sense strand starting at position 3419 of SEQ ID NO: 317279
auugcauugaugugggaau

SEQ ID NO: 478514 - RNA, 19 nt, Artificial Sequence
  Description of Artificial Sequence: Synthetic oligonucleotide
  Antisense Strand to SEQ ID NO: 478513
auucccacaucaaugcaau

SEQ ID NO: 478515 - RNA, 19 nt, Artificial Sequence
  Description of Artificial Sequence: Synthetic oligonucleotide
  Sense strand starting at position 3421 of SEQ ID NO: 317279
ugcauugaugugggaauug

SEQ ID NO: 478516 - RNA, 19 nt, Artificial Sequence
  Description of Artificial Sequence: Synthetic oligonucleotide
  Antisense Strand to SEQ ID NO: 478515
caauucccacaucaaugca

SEQ ID NO: 478517 - RNA, 19 nt, Artificial Sequence
  Description of Artificial Sequence: Synthetic oligonucleotide
  Sense strand starting at position 3432 of SEQ ID NO: 317279
gggaauugccagugacaga

SEQ ID NO: 478518 - RNA, 19 nt, Artificial Sequence
  Description of Artificial Sequence: Synthetic oligonucleotide
  Antisense Strand to SEQ ID NO: 478517
ucugucacuggcaauuccc

SEQ ID NO: 478519 - RNA, 19 nt, Artificial Sequence
  Description of Artificial Sequence: Synthetic oligonucleotide
  Sense strand starting at position 3631 of SEQ ID NO: 317279
gaaagcgauccauguggau

SEQ ID NO: 478520 - RNA, 19 nt, Artificial Sequence
  Description of Artificial Sequence: Synthetic oligonucleotide
  Antisense Strand to SEQ ID NO: 478519
auccacauggaucgcuuuc

SEQ ID NO: 478521 - RNA, 19 nt, Artificial Sequence
  Description of Artificial Sequence: Synthetic oligonucleotide
  Sense strand starting at position 3811 of SEQ ID NO: 317279
cauuaaaucgauuguggag

SEQ ID NO: 478522 - RNA, 19 nt, Artificial Sequence
  Description of Artificial Sequence: Synthetic oligonucleotide
  Antisense Strand to SEQ ID NO: 478521
cuccacaaucgauuuaaug

SEQ ID NO: 478523 - RNA, 19 nt, Artificial Sequence
  Description of Artificial Sequence: Synthetic oligonucleotide
  Sense strand starting at position 346 of SEQ ID NO: 317280
accacaucgcuguaauucu

SEQ ID NO: 478524 - RNA, 19 nt, Artificial Sequence
  Description of Artificial Sequence: Synthetic oligonucleotide
  Antisense Strand to SEQ ID NO: 478523
agaauuacagcgauguggu

SEQ ID NO: 478525 - RNA, 19 nt, Artificial Sequence
  Description of Artificial Sequence: Synthetic oligonucleotide
  Sense strand starting at position 380 of SEQ ID NO: 317280
uuuccaguaugaucuuuau

SEQ ID NO: 478526 - RNA, 19 nt, Artificial Sequence
  Description of Artificial Sequence: Synthetic oligonucleotide
  Antisense Strand to SEQ ID NO: 478525
auaaagaucauacuggaaa

SEQ ID NO: 478527 - RNA, 19 nt, Artificial Sequence
  Description of Artificial Sequence: Synthetic oligonucleotide
  Sense strand starting at position 443 of SEQ ID NO: 317280
aguuguuaauucccaauag

SEQ ID NO: 478528 - RNA, 19 nt, Artificial Sequence
  Description of Artificial Sequence: Synthetic oligonucleotide
  Antisense Strand to SEQ ID NO: 478527
cuauugggaauuaacaacu

SEQ ID NO: 478529 - RNA, 19 nt, Artificial Sequence
  Description of Artificial Sequence: Synthetic oligonucleotide
  Sense strand starting at position 444 of SEQ ID NO: 317280
guuguuaauucccaauagu

SEQ ID NO: 478530 - RNA, 19 nt, Artificial Sequence
  Description of Artificial Sequence: Synthetic oligonucleotide
  Antisense Strand to SEQ ID NO: 478529
acuauugggaauuaacaac

SEQ ID NO: 478531 - RNA, 19 nt, Artificial Sequence
  Description of Artificial Sequence: Synthetic oligonucleotide
  Sense strand starting at position 447 of SEQ ID NO: 317280
guuaauucccaauagucua

SEQ ID NO: 478532 - RNA, 19 nt, Artificial Sequence
  Description of Artificial Sequence: Synthetic oligonucleotide
  Antisense Strand to SEQ ID NO: 478531
uagacuauugggaauuaac

SEQ ID NO: 478533 - RNA, 19 nt, Artificial Sequence
  Description of Artificial Sequence: Synthetic oligonucleotide
  Sense strand starting at position 654 of SEQ ID NO: 317280
guaaauuauuguccuccca

SEQ ID NO: 478534 - RNA, 19 nt, Artificial Sequence
  Description of Artificial Sequence: Synthetic oligonucleotide
  Antisense Strand to SEQ ID NO: 478533
ugggaggacaauaauuuac

SEQ ID NO: 478535 - RNA, 19 nt, Artificial Sequence
  Description of Artificial Sequence: Synthetic oligonucleotide
  Sense strand starting at position 771 of SEQ ID NO: 317280
aguacaagccuguaauaau

SEQ ID NO: 478536 - RNA, 19 nt, Artificial Sequence
  Description of Artificial Sequence: Synthetic oligonucleotide
  Antisense Strand to SEQ ID NO: 478535
auuauuacaggcuuguacu

SEQ ID NO: 478537 - RNA, 19 nt, Artificial Sequence
  Description of Artificial Sequence: Synthetic oligonucleotide
  Sense strand starting at position 834 of SEQ ID NO: 317280
agaauaaacuacugugaaa

SEQ ID NO: 478538 - RNA, 19 nt, Artificial Sequence
  Description of Artificial Sequence: Synthetic oligonucleotide
  Antisense Strand to SEQ ID NO: 478537
uuucacaguaguuuauucu

SEQ ID NO: 478539 - RNA, 19 nt, Artificial Sequence
  Description of Artificial Sequence: Synthetic oligonucleotide
  Sense strand starting at position 996 of SEQ ID NO: 317280
gcugaaguuccacaacacu

SEQ ID NO: 478540 - RNA, 19 nt, Artificial Sequence
  Description of Artificial Sequence: Synthetic oligonucleotide
  Antisense Strand to SEQ ID NO: 478539
aguguuguggaacuucagc

SEQ ID NO: 478541 - RNA, 19 nt, Artificial Sequence
  Description of Artificial Sequence: Synthetic oligonucleotide
  Sense strand starting at position 1079 of SEQ ID NO: 317280
cuugcauugugcuugacuu

SEQ ID NO: 478542 - RNA, 19 nt, Artificial Sequence
  Description of Artificial Sequence: Synthetic oligonucleotide
  Antisense Strand to SEQ ID NO: 478541
aagucaagcacaaugcaag

SEQ ID NO: 478543 - RNA, 19 nt, Artificial Sequence
  Description of Artificial Sequence: Synthetic oligonucleotide
  Sense strand starting at position 1149 of SEQ ID NO: 317280
uugggcuuucuagaugcua

SEQ ID NO: 478544 - RNA, 19 nt, Artificial Sequence
  Description of Artificial Sequence: Synthetic oligonucleotide
  Antisense Strand to SEQ ID NO: 478543
uagcaucuagaaagcccaa

SEQ ID NO: 478545 - RNA, 19 nt, Artificial Sequence
  Description of Artificial Sequence: Synthetic oligonucleotide
  Sense strand starting at position 1310 of SEQ ID NO: 317280
gguuuaguucuacguacca

SEQ ID NO: 478546 - RNA, 19 nt, Artificial Sequence
  Description of Artificial Sequence: Synthetic oligonucleotide
  Antisense Strand to SEQ ID NO: 478545
ugguacguagaacuaaacc

SEQ ID NO: 478547 - RNA, 19 nt, Artificial Sequence
  Description of Artificial Sequence: Synthetic oligonucleotide
  Sense strand starting at position 1315 of SEQ ID NO: 317280
aguucuacguaccaacaaa

SEQ ID NO: 478548 - RNA, 19 nt, Artificial Sequence
  Description of Artificial Sequence: Synthetic oligonucleotide
  Antisense Strand to SEQ ID NO: 478547
uuuguugguacguagaacu

SEQ ID NO: 478549 - RNA, 19 nt, Artificial Sequence
  Description of Artificial Sequence: Synthetic oligonucleotide
  Sense strand starting at position 1393 of SEQ ID NO: 317280
gcccaagcuauuggguaau

SEQ ID NO: 478550 - RNA, 19 nt, Artificial Sequence
  Description of Artificial Sequence: Synthetic oligonucleotide
  Antisense Strand to SEQ ID NO: 478549
auuacccaauagcuugggc

SEQ ID NO: 478551 - RNA, 19 nt, Artificial Sequence
  Description of Artificial Sequence: Synthetic oligonucleotide
  Sense strand starting at position 1475 of SEQ ID NO: 317280
uaacgauuguuaggaagac

SEQ ID NO: 478552 - RNA, 19 nt, Artificial Sequence
  Description of Artificial Sequence: Synthetic oligonucleotide
  Antisense Strand to SEQ ID NO: 478551
gucuuccuaacaaucguua

SEQ ID NO: 478553 - RNA, 19 nt, Artificial Sequence
  Description of Artificial Sequence: Synthetic oligonucleotide
  Sense strand starting at position 1526 of SEQ ID NO: 317280
gcacgaauuccuccgugcu

SEQ ID NO: 478554 - RNA, 19 nt, Artificial Sequence
  Description of Artificial Sequence: Synthetic oligonucleotide
  Antisense Strand to SEQ ID NO: 478553
agcacggaggaauucgugc

SEQ ID NO: 478555 - RNA, 19 nt, Artificial Sequence
  Description of Artificial Sequence: Synthetic oligonucleotide
  Sense strand starting at position 1571 of SEQ ID NO: 317280
cggcauuccuaacugaaau

SEQ ID NO: 478556 - RNA, 19 nt, Artificial Sequence
  Description of Artificial Sequence: Synthetic oligonucleotide
  Antisense Strand to SEQ ID NO: 478555
auuucaguuaggaaugccg

SEQ ID NO: 478557 - RNA, 19 nt, Artificial Sequence
  Description of Artificial Sequence: Synthetic oligonucleotide
  Sense strand starting at position 1741 of SEQ ID NO: 317280
ugcgcucuccaacacuaaa

SEQ ID NO: 478558 - RNA, 19 nt, Artificial Sequence
  Description of Artificial Sequence: Synthetic oligonucleotide
  Antisense Strand to SEQ ID NO: 478557
uuuaguguuggagagcgca

SEQ ID NO: 478559 - RNA, 19 nt, Artificial Sequence
  Description of Artificial Sequence: Synthetic oligonucleotide
  Sense strand starting at position 2158 of SEQ ID NO: 317280
cgcagaaaucgcuguccag

SEQ ID NO: 478560 - RNA, 19 nt, Artificial Sequence
  Description of Artificial Sequence: Synthetic oligonucleotide
  Antisense Strand to SEQ ID NO: 478559
cuggacagcgauuucugcg

SEQ ID NO: 478561 - RNA, 19 nt, Artificial Sequence
  Description of Artificial Sequence: Synthetic oligonucleotide
  Sense strand starting at position 2373 of SEQ ID NO: 317280
gcuccuuggccucaaagga

SEQ ID NO: 478562 - RNA, 19 nt, Artificial Sequence
  Description of Artificial Sequence: Synthetic oligonucleotide
  Antisense Strand to SEQ ID NO: 478561
uccuuugaggccaaggagc

SEQ ID NO: 478563 - RNA, 19 nt, Artificial Sequence
  Description of Artificial Sequence: Synthetic oligonucleotide
  Sense strand starting at position 3308 of SEQ ID NO: 317280
uggcgugcaugcaugagaa

SEQ ID NO: 478564 - RNA, 19 nt, Artificial Sequence
  Description of Artificial Sequence: Synthetic oligonucleotide
  Antisense Strand to SEQ ID NO: 478563
uucucaugcaugcacgcca

SEQ ID NO: 478565 - RNA, 19 nt, Artificial Sequence
  Description of Artificial Sequence: Synthetic oligonucleotide
  Sense strand starting at position 3310 of SEQ ID NO: 317280
gcgugcaugcaugagaaua

SEQ ID NO: 478566 - RNA, 19 nt, Artificial Sequence
  Description of Artificial Sequence: Synthetic oligonucleotide
  Antisense Strand to SEQ ID NO: 478565
uauucucaugcaugcacgc

SEQ ID NO: 478567 - RNA, 19 nt, Artificial Sequence
  Description of Artificial Sequence: Synthetic oligonucleotide
  Sense strand starting at position 3312 of SEQ ID NO: 317280
gugcaugcaugagaauaga

SEQ ID NO: 478568 - RNA, 19 nt, Artificial Sequence
  Description of Artificial Sequence: Synthetic oligonucleotide
  Antisense Strand to SEQ ID NO: 478567
ucuauucucaugcaugcac

SEQ ID NO: 478569 - RNA, 19 nt, Artificial Sequence
  Description of Artificial Sequence: Synthetic oligonucleotide
  Sense strand starting at position 3321 of SEQ ID NO: 317280
ugagaauagagcuguuaaa

SEQ ID NO: 478570 - RNA, 19 nt, Artificial Sequence
  Description of Artificial Sequence: Synthetic oligonucleotide
  Antisense Strand to SEQ ID NO: 478569
uuuaacagcucuauucuca

SEQ ID NO: 478571 - RNA, 19 nt, Artificial Sequence
  Description of Artificial Sequence: Synthetic oligonucleotide
  Sense strand starting at position 3398 of SEQ ID NO: 317280
ucuaaagcgcuccaagaua

SEQ ID NO: 478572 - RNA, 19 nt, Artificial Sequence
  Description of Artificial Sequence: Synthetic oligonucleotide
  Antisense Strand to SEQ ID NO: 478571
uaucuuggagcgcuuuaga

SEQ ID NO: 478573 - RNA, 19 nt, Artificial Sequence
  Description of Artificial Sequence: Synthetic oligonucleotide
  Sense strand starting at position 3445 of SEQ ID NO: 317280
auagcuguccuugacuaau

SEQ ID NO: 478574 - RNA, 19 nt, Artificial Sequence
  Description of Artificial Sequence: Synthetic oligonucleotide
  Antisense Strand to SEQ ID NO: 478573
auuagucaaggacagcuau

SEQ ID NO: 478575 - RNA, 19 nt, Artificial Sequence
  Description of Artificial Sequence: Synthetic oligonucleotide
  Sense strand starting at position 3447 of SEQ ID NO: 317280
agcuguccuugacuaauua

SEQ ID NO: 478576 - RNA, 19 nt, Artificial Sequence
  Description of Artificial Sequence: Synthetic oligonucleotide
  Antisense Strand to SEQ ID NO: 478575
uaauuagucaaggacagcu

SEQ ID NO: 478577 - RNA, 19 nt, Artificial Sequence
  Description of Artificial Sequence: Synthetic oligonucleotide
  Sense strand starting at position 3448 of SEQ ID NO: 317280
gcuguccuugacuaauuaa

SEQ ID NO: 478578 - RNA, 19 nt, Artificial Sequence
  Description of Artificial Sequence: Synthetic oligonucleotide
  Antisense Strand to SEQ ID NO: 478577
uuaauuagucaaggacagc

SEQ ID NO: 478579 - RNA, 19 nt, Artificial Sequence
  Description of Artificial Sequence: Synthetic oligonucleotide
  Sense strand starting at position 3451 of SEQ ID NO: 317280
guccuugacuaauuaagcu

SEQ ID NO: 478580 - RNA, 19 nt, Artificial Sequence
  Description of Artificial Sequence: Synthetic oligonucleotide
  Antisense Strand to SEQ ID NO: 478579
agcuuaauuagucaaggac

SEQ ID NO: 478581 - RNA, 19 nt, Artificial Sequence
  Description of Artificial Sequence: Synthetic oligonucleotide
  Sense strand starting at position 3547 of SEQ ID NO: 317280
cagucaguuugggagaagu

SEQ ID NO: 478582 - RNA, 19 nt, Artificial Sequence
  Description of Artificial Sequence: Synthetic oligonucleotide
  Antisense Strand to SEQ ID NO: 478581
acuucucccaaacugacug

SEQ ID NO: 478583 - RNA, 19 nt, Artificial Sequence
  Description of Artificial Sequence: Synthetic oligonucleotide
  Sense strand starting at position 3627 of SEQ ID NO: 317280
gggacagaucccuagacgu

SEQ ID NO: 478584 - RNA, 19 nt, Artificial Sequence
  Description of Artificial Sequence: Synthetic oligonucleotide
  Antisense Strand to SEQ ID NO: 478583
acgucuagggaucuguccc

SEQ ID NO: 478585 - RNA, 19 nt, Artificial Sequence
  Description of Artificial Sequence: Synthetic oligonucleotide
  Sense strand starting at position 3751 of SEQ ID NO: 317280
ccacggugugucggaguaa

SEQ ID NO: 478586 - RNA, 19 nt, Artificial Sequence
  Description of Artificial Sequence: Synthetic oligonucleotide
  Antisense Strand to SEQ ID NO: 478585
uuacuccgacacaccgugg

SEQ ID NO: 478587 - RNA, 19 nt, Artificial Sequence
  Description of Artificial Sequence: Synthetic oligonucleotide
  Sense strand starting at position 3778 of SEQ ID NO: 317280
acgucuaugaagcgggaua

SEQ ID NO: 478588 - RNA, 19 nt, Artificial Sequence
  Description of Artificial Sequence: Synthetic oligonucleotide
  Antisense Strand to SEQ ID NO: 478587
uaucccgcuucauagacgu

SEQ ID NO: 478589 - RNA, 19 nt, Artificial Sequence
  Description of Artificial Sequence: Synthetic oligonucleotide
  Sense strand starting at position 3779 of SEQ ID NO: 317280
cgucuaugaagcgggauaa

SEQ ID NO: 478590 - RNA, 19 nt, Artificial Sequence
  Description of Artificial Sequence: Synthetic oligonucleotide
  Antisense Strand to SEQ ID NO: 478589
uuaucccgcuucauagacg

SEQ ID NO: 478591 - RNA, 19 nt, Artificial Sequence
  Description of Artificial Sequence: Synthetic oligonucleotide
  Sense strand starting at position 3807 of SEQ ID NO: 317280
augccuagcccauagucau

SEQ ID NO: 478592 - RNA, 19 nt, Artificial Sequence
  Description of Artificial Sequence: Synthetic oligonucleotide
  Antisense Strand to SEQ ID NO: 478591
augacuaugggcuaggcau

SEQ ID NO: 478593 - RNA, 19 nt, Artificial Sequence
  Description of Artificial Sequence: Synthetic oligonucleotide
  Sense strand starting at position 3818 of SEQ ID NO: 317280
auagucaugugcuaacaaa

SEQ ID NO: 478594 - RNA, 19 nt, Artificial Sequence
  Description of Artificial Sequence: Synthetic oligonucleotide
  Antisense Strand to SEQ ID NO: 478593
uuuguuagcacaugacuau

SEQ ID NO: 478595 - RNA, 19 nt, Artificial Sequence
  Description of Artificial Sequence: Synthetic oligonucleotide
  Sense strand starting at position 3900 of SEQ ID NO: 317280
uucucagucugccuuugau

SEQ ID NO: 478596 - RNA, 19 nt, Artificial Sequence
  Description of Artificial Sequence: Synthetic oligonucleotide
  Antisense Strand to SEQ ID NO: 478595
aucaaaggcagacugagaa

SEQ ID NO: 478597 - RNA, 19 nt, Artificial Sequence
  Description of Artificial Sequence: Synthetic oligonucleotide
  Sense strand starting at position 3914 of SEQ ID NO: 317280
uugauaccuuccuaaacgu

SEQ ID NO: 478598 - RNA, 19 nt, Artificial Sequence
  Description of Artificial Sequence: Synthetic oligonucleotide
  Antisense Strand to SEQ ID NO: 478597
acguuuaggaagguaucaa

SEQ ID NO: 478599 - RNA, 19 nt, Artificial Sequence
  Description of Artificial Sequence: Synthetic oligonucleotide
  Sense strand starting at position 3923 of SEQ ID NO: 317280
uccuaaacgucagucguaa

SEQ ID NO: 478600 - RNA, 19 nt, Artificial Sequence
  Description of Artificial Sequence: Synthetic oligonucleotide
  Antisense Strand to SEQ ID NO: 478599
uuacgacugacguuuagga

SEQ ID NO: 478601 - RNA, 19 nt, Artificial Sequence
  Description of Artificial Sequence: Synthetic oligonucleotide
  Sense strand starting at position 3925 of SEQ ID NO: 317280
cuaaacgucagucguaagu

SEQ ID NO: 478602 - RNA, 19 nt, Artificial Sequence
  Description of Artificial Sequence: Synthetic oligonucleotide
  Antisense Strand to SEQ ID NO: 478601
acuuacgacugacguuuag

SEQ ID NO: 478603 - RNA, 19 nt, Artificial Sequence
  Description of Artificial Sequence: Synthetic oligonucleotide
  Sense strand starting at position 42 of SEQ ID NO: 317281
cuugcauugugcuugacuu

SEQ ID NO: 478604 - RNA, 19 nt, Artificial Sequence
  Description of Artificial Sequence: Synthetic oligonucleotide
  Antisense Strand to SEQ ID NO: 478603
aagucaagcacaaugcaag

SEQ ID NO: 478605 - RNA, 19 nt, Artificial Sequence
  Description of Artificial Sequence: Synthetic oligonucleotide
  Sense strand starting at position 112 of SEQ ID NO: 317281
uugggcuuucuagaugcua

SEQ ID NO: 478606 - RNA, 19 nt, Artificial Sequence
  Description of Artificial Sequence: Synthetic oligonucleotide
  Antisense Strand to SEQ ID NO: 478605
uagcaucuagaaagcccaa

SEQ ID NO: 478607 - RNA, 19 nt, Artificial Sequence
  Description of Artificial Sequence: Synthetic oligonucleotide
  Sense strand starting at position 273 of SEQ ID NO: 317281
gguuuaguucuacguacca

SEQ ID NO: 478608 - RNA, 19 nt, Artificial Sequence
  Description of Artificial Sequence: Synthetic oligonucleotide
  Antisense Strand to SEQ ID NO: 478607
ugguacguagaacuaaacc

SEQ ID NO: 478609 - RNA, 19 nt, Artificial Sequence
  Description of Artificial Sequence: Synthetic oligonucleotide
  Sense strand starting at position 356 of SEQ ID NO: 317281
gcccaagcuauuggguaau

SEQ ID NO: 478610 - RNA, 19 nt, Artificial Sequence
  Description of Artificial Sequence: Synthetic oligonucleotide
  Antisense Strand to SEQ ID NO: 478609
auuacccaauagcuugggc

SEQ ID NO: 478611 - RNA, 19 nt, Artificial Sequence
  Description of Artificial Sequence: Synthetic oligonucleotide
  Sense strand starting at position 489 of SEQ ID NO: 317281
gcacgaauuccuccgugcu

SEQ ID NO: 478612 - RNA, 19 nt, Artificial Sequence
  Description of Artificial Sequence: Synthetic oligonucleotide
  Antisense Strand to SEQ ID NO: 478611
agcacggaggaauucgugc

SEQ ID NO: 478613 - RNA, 19 nt, Artificial Sequence
  Description of Artificial Sequence: Synthetic oligonucleotide
  Sense strand starting at position 534 of SEQ ID NO: 317281
cggcauuccuaacugaaau

SEQ ID NO: 478614 - RNA, 19 nt, Artificial Sequence
  Description of Artificial Sequence: Synthetic oligonucleotide
  Antisense Strand to SEQ ID NO: 478613
auuucaguuaggaaugccg

SEQ ID NO: 478615 - RNA, 19 nt, Artificial Sequence
  Description of Artificial Sequence: Synthetic oligonucleotide
  Sense strand starting at position 704 of SEQ ID NO: 317281
ugcgcucuccaacacuaaa

SEQ ID NO: 478616 - RNA, 19 nt, Artificial Sequence
  Description of Artificial Sequence: Synthetic oligonucleotide
  Antisense Strand to SEQ ID NO: 478615
uuuaguguuggagagcgca

SEQ ID NO: 478617 - RNA, 19 nt, Artificial Sequence
  Description of Artificial Sequence: Synthetic oligonucleotide
  Sense strand starting at position 1336 of SEQ ID NO: 317281
gcuccuuggccucaaagga

SEQ ID NO: 478618 - RNA, 19 nt, Artificial Sequence
  Description of Artificial Sequence: Synthetic oligonucleotide
  Antisense Strand to SEQ ID NO: 478617
uccuuugaggccaaggagc

SEQ ID NO: 478619 - RNA, 19 nt, Artificial Sequence
  Description of Artificial Sequence: Synthetic oligonucleotide
  Sense strand starting at position 2271 of SEQ ID NO: 317281
uggcgugcaugcaugagaa

SEQ ID NO: 478620 - RNA, 19 nt, Artificial Sequence
  Description of Artificial Sequence: Synthetic oligonucleotide
  Antisense Strand to SEQ ID NO: 478619
uucucaugcaugcacgcca

SEQ ID NO: 478621 - RNA, 19 nt, Artificial Sequence
  Description of Artificial Sequence: Synthetic oligonucleotide
  Sense strand starting at position 2273 of SEQ ID NO: 317281
gcgugcaugcaugagaaua

SEQ ID NO: 478622 - RNA, 19 nt, Artificial Sequence
  Description of Artificial Sequence: Synthetic oligonucleotide
  Antisense Strand to SEQ ID NO: 478621
uauucucaugcaugcacgc

SEQ ID NO: 478623 - RNA, 19 nt, Artificial Sequence
  Description of Artificial Sequence: Synthetic oligonucleotide
  Sense strand starting at position 2284 of SEQ ID NO: 317281
ugagaauagagcuguuaaa

SEQ ID NO: 478624 - RNA, 19 nt, Artificial Sequence
  Description of Artificial Sequence: Synthetic oligonucleotide
  Antisense Strand to SEQ ID NO: 478623
uuuaacagcucuauucuca

SEQ ID NO: 478625 - RNA, 19 nt, Artificial Sequence
  Description of Artificial Sequence: Synthetic oligonucleotide
  Sense strand starting at position 2361 of SEQ ID NO: 317281
ucuaaagcgcuccaagaua

SEQ ID NO: 478626 - RNA, 19 nt, Artificial Sequence
  Description of Artificial Sequence: Synthetic oligonucleotide
  Antisense Strand to SEQ ID NO: 478625
uaucuuggagcgcuuuaga

SEQ ID NO: 478627 - RNA, 19 nt, Artificial Sequence
  Description of Artificial Sequence: Synthetic oligonucleotide
  Sense strand starting at position 2408 of SEQ ID NO: 317281
auagcuguccuugacuaau

SEQ ID NO: 478628 - RNA, 19 nt, Artificial Sequence
  Description of Artificial Sequence: Synthetic oligonucleotide
  Antisense Strand to SEQ ID NO: 478627
auuagucaaggacagcuau

SEQ ID NO: 478629 - RNA, 19 nt, Artificial Sequence
  Description of Artificial Sequence: Synthetic oligonucleotide
  Sense strand starting at position 2410 of SEQ ID NO: 317281
agcuguccuugacuaauua

SEQ ID NO: 478630 - RNA, 19 nt, Artificial Sequence
  Description of Artificial Sequence: Synthetic oligonucleotide
  Antisense Strand to SEQ ID NO: 478629
uaauuagucaaggacagcu

SEQ ID NO: 478631 - RNA, 19 nt, Artificial Sequence
  Description of Artificial Sequence: Synthetic oligonucleotide
  Sense strand starting at position 2411 of SEQ ID NO: 317281
gcuguccuugacuaauuaa

SEQ ID NO: 478632 - RNA, 19 nt, Artificial Sequence
  Description of Artificial Sequence: Synthetic oligonucleotide
  Antisense Strand to SEQ ID NO: 478631
uuaauuagucaaggacagc

SEQ ID NO: 478633 - RNA, 19 nt, Artificial Sequence
  Description of Artificial Sequence: Synthetic oligonucleotide
  Sense strand starting at position 2414 of SEQ ID NO: 317281
guccuugacuaauuaagcu

SEQ ID NO: 478634 - RNA, 19 nt, Artificial Sequence
  Description of Artificial Sequence: Synthetic oligonucleotide
  Antisense Strand to SEQ ID NO: 478633
agcuuaauuagucaaggac

SEQ ID NO: 478635 - RNA, 19 nt, Artificial Sequence
  Description of Artificial Sequence: Synthetic oligonucleotide
  Sense strand starting at position 2590 of SEQ ID NO: 317281
gggacagaucccuagacgu

SEQ ID NO: 478636 - RNA, 19 nt, Artificial Sequence
  Description of Artificial Sequence: Synthetic oligonucleotide
  Antisense Strand to SEQ ID NO: 478635
acgucuagggaucuguccc

SEQ ID NO: 478637 - RNA, 19 nt, Artificial Sequence
  Description of Artificial Sequence: Synthetic oligonucleotide
  Sense strand starting at position 2741 of SEQ ID NO: 317281
acgucuaugaagcgggaua

SEQ ID NO: 478638 - RNA, 19 nt, Artificial Sequence
  Description of Artificial Sequence: Synthetic oligonucleotide
  Antisense Strand to SEQ ID NO: 478637
uaucccgcuucauagacgu

SEQ ID NO: 478639 - RNA, 19 nt, Artificial Sequence
  Description of Artificial Sequence: Synthetic oligonucleotide
  Sense strand starting at position 2742 of SEQ ID NO: 317281
cgucuaugaagcgggauaa

SEQ ID NO: 478640 - RNA, 19 nt, Artificial Sequence
  Description of Artificial Sequence: Synthetic oligonucleotide
  Antisense Strand to SEQ ID NO: 478639
uuaucccgcuucauagacg

SEQ ID NO: 478641 - RNA, 19 nt, Artificial Sequence
  Description of Artificial Sequence: Synthetic oligonucleotide
  Sense strand starting at position 2770 of SEQ ID NO: 317281
augccuagcccauagucau

SEQ ID NO: 478642 - RNA, 19 nt, Artificial Sequence
  Description of Artificial Sequence: Synthetic oligonucleotide
  Antisense Strand to SEQ ID NO: 478641
augacuaugggcuaggcau

SEQ ID NO: 478643 - RNA, 19 nt, Artificial Sequence
  Description of Artificial Sequence: Synthetic oligonucleotide
  Sense strand starting at position 2863 of SEQ ID NO: 317281
uucucagucugccuuugau

SEQ ID NO: 478644 - RNA, 19 nt, Artificial Sequence
  Description of Artificial Sequence: Synthetic oligonucleotide
  Antisense Strand to SEQ ID NO: 478643
aucaaaggcagacugagaa

SEQ ID NO: 478645 - RNA, 19 nt, Artificial Sequence
  Description of Artificial Sequence: Synthetic oligonucleotide
  Sense strand starting at position 2886 of SEQ ID NO: 317281
uccuaaacgucagucguaa

SEQ ID NO: 478646 - RNA, 19 nt, Artificial Sequence
  Description of Artificial Sequence: Synthetic oligonucleotide
  Antisense Strand to SEQ ID NO: 478645
uuacgacugacguuuagga

SEQ ID NO: 478647 - RNA, 19 nt, Artificial Sequence
  Description of Artificial Sequence: Synthetic oligonucleotide
  Sense strand starting at position 3000 of SEQ ID NO: 317281
ccuagauaagucugacuau

SEQ ID NO: 478648 - RNA, 19 nt, Artificial Sequence
  Description of Artificial Sequence: Synthetic oligonucleotide
  Antisense Strand to SEQ ID NO: 478647
auagucagacuuaucuagg

SEQ ID NO: 478649 - RNA, 19 nt, Artificial Sequence
  Description of Artificial Sequence: Synthetic oligonucleotide
  Sense strand starting at position 3009 of SEQ ID NO: 317281
gucugacuauugcuuggua

SEQ ID NO: 478650 - RNA, 19 nt, Artificial Sequence
  Description of Artificial Sequence: Synthetic oligonucleotide
  Antisense Strand to SEQ ID NO: 478649
uaccaagcaauagucagac

SEQ ID NO: 478651 - RNA, 19 nt, Artificial Sequence
  Description of Artificial Sequence: Synthetic oligonucleotide
  Sense strand starting at position 3010 of SEQ ID NO: 317281
ucugacuauugcuugguau

SEQ ID NO: 478652 - RNA, 19 nt, Artificial Sequence
  Description of Artificial Sequence: Synthetic oligonucleotide
  Antisense Strand to SEQ ID NO: 478651
auaccaagcaauagucaga

SEQ ID NO: 478653 - RNA, 19 nt, Artificial Sequence
  Description of Artificial Sequence: Synthetic oligonucleotide
  Sense strand starting at position 3011 of SEQ ID NO: 317281
cugacuauugcuugguauu

SEQ ID NO: 478654 - RNA, 19 nt, Artificial Sequence
  Description of Artificial Sequence: Synthetic oligonucleotide
  Antisense Strand to SEQ ID NO: 478653
aauaccaagcaauagucag

SEQ ID NO: 478655 - RNA, 19 nt, Artificial Sequence
  Description of Artificial Sequence: Synthetic oligonucleotide
  Sense strand starting at position 3012 of SEQ ID NO: 317281
ugacuauugcuugguauua

SEQ ID NO: 478656 - RNA, 19 nt, Artificial Sequence
  Description of Artificial Sequence: Synthetic oligonucleotide
  Antisense Strand to SEQ ID NO: 478655
uaauaccaagcaauaguca

SEQ ID NO: 478657 - RNA, 19 nt, Artificial Sequence
  Description of Artificial Sequence: Synthetic oligonucleotide
  Sense strand starting at position 3013 of SEQ ID NO: 317281
gacuauugcuugguauuac

SEQ ID NO: 478658 - RNA, 19 nt, Artificial Sequence
  Description of Artificial Sequence: Synthetic oligonucleotide
  Antisense Strand to SEQ ID NO: 478657
guaauaccaagcaauaguc

SEQ ID NO: 478659 - RNA, 19 nt, Artificial Sequence
  Description of Artificial Sequence: Synthetic oligonucleotide
  Sense strand starting at position 3022 of SEQ ID NO: 317281
uugguauuacaacauaagu

SEQ ID NO: 478660 - RNA, 19 nt, Artificial Sequence
  Description of Artificial Sequence: Synthetic oligonucleotide
  Antisense Strand to SEQ ID NO: 478659
acuuauguuguaauaccaa

SEQ ID NO: 478661 - RNA, 19 nt, Artificial Sequence
  Description of Artificial Sequence: Synthetic oligonucleotide
  Sense strand starting at position 3116 of SEQ ID NO: 317281
ucagucugaccuuggagaa

SEQ ID NO: 478662 - RNA, 19 nt, Artificial Sequence
  Description of Artificial Sequence: Synthetic oligonucleotide
  Antisense Strand to SEQ ID NO: 478661
uucuccaaggucagacuga

SEQ ID NO: 478663 - RNA, 19 nt, Artificial Sequence
  Description of Artificial Sequence: Synthetic oligonucleotide
  Sense strand starting at position 3117 of SEQ ID NO: 317281
cagucugaccuuggagaau

SEQ ID NO: 478664 - RNA, 19 nt, Artificial Sequence
  Description of Artificial Sequence: Synthetic oligonucleotide
  Antisense Strand to SEQ ID NO: 478663
auucuccaaggucagacug

SEQ ID NO: 478665 - RNA, 19 nt, Artificial Sequence
  Description of Artificial Sequence: Synthetic oligonucleotide
  Sense strand starting at position 3277 of SEQ ID NO: 317281
auuuguuucucuuagggca

SEQ ID NO: 478666 - RNA, 19 nt, Artificial Sequence
  Description of Artificial Sequence: Synthetic oligonucleotide
  Antisense Strand to SEQ ID NO: 478665
ugcccuaagagaaacaaau

SEQ ID NO: 478667 - RNA, 19 nt, Artificial Sequence
  Description of Artificial Sequence: Synthetic oligonucleotide
  Sense strand starting at position 3318 of SEQ ID NO: 317281
cugguauacccacguagga

SEQ ID NO: 478668 - RNA, 19 nt, Artificial Sequence
  Description of Artificial Sequence: Synthetic oligonucleotide
  Antisense Strand to SEQ ID NO: 478667
uccuacguggguauaccag

SEQ ID NO: 478669 - RNA, 19 nt, Artificial Sequence
  Description of Artificial Sequence: Synthetic oligonucleotide
  Sense strand starting at position 3377 of SEQ ID NO: 317281
ugcagucuccgaugcaaga

SEQ ID NO: 478670 - RNA, 19 nt, Artificial Sequence
  Description of Artificial Sequence: Synthetic oligonucleotide
  Antisense Strand to SEQ ID NO: 478669
ucuugcaucggagacugca

SEQ ID NO: 478671 - RNA, 19 nt, Artificial Sequence
  Description of Artificial Sequence: Synthetic oligonucleotide
  Sense strand starting at position 3667 of SEQ ID NO: 317281
cuaccaagguugucaaaga

SEQ ID NO: 478672 - RNA, 19 nt, Artificial Sequence
  Description of Artificial Sequence: Synthetic oligonucleotide
  Antisense Strand to SEQ ID NO: 478671
ucuuugacaaccuugguag

SEQ ID NO: 478673 - RNA, 19 nt, Artificial Sequence
  Description of Artificial Sequence: Synthetic oligonucleotide
  Sense strand starting at position 3778 of SEQ ID NO: 317281
ucugacugcuuacuggaaa

SEQ ID NO: 478674 - RNA, 19 nt, Artificial Sequence
  Description of Artificial Sequence: Synthetic oligonucleotide
  Antisense Strand to SEQ ID NO: 478673
uuuccaguaagcagucaga

SEQ ID NO: 478675 - RNA, 19 nt, Artificial Sequence
  Description of Artificial Sequence: Synthetic oligonucleotide
  Sense strand starting at position 3781 of SEQ ID NO: 317281
gacugcuuacuggaaaugu

SEQ ID NO: 478676 - RNA, 19 nt, Artificial Sequence
  Description of Artificial Sequence: Synthetic oligonucleotide
  Antisense Strand to SEQ ID NO: 478675
acauuuccaguaagcaguc

SEQ ID NO: 478677 - RNA, 19 nt, Artificial Sequence
  Description of Artificial Sequence: Synthetic oligonucleotide
  Sense strand starting at position 3790 of SEQ ID NO: 317281
cuggaaaugucuuauuaau

SEQ ID NO: 478678 - RNA, 19 nt, Artificial Sequence
  Description of Artificial Sequence: Synthetic oligonucleotide
  Antisense Strand to SEQ ID NO: 478677
auuaauaagacauuuccag

SEQ ID NO: 478679 - RNA, 19 nt, Artificial Sequence
  Description of Artificial Sequence: Synthetic oligonucleotide
  Sense strand starting at position 3792 of SEQ ID NO: 317281
ggaaaugucuuauuaauug

SEQ ID NO: 478680 - RNA, 19 nt, Artificial Sequence
  Description of Artificial Sequence: Synthetic oligonucleotide
  Antisense Strand to SEQ ID NO: 478679
caauuaauaagacauuucc

SEQ ID NO: 478681 - RNA, 19 nt, Artificial Sequence
  Description of Artificial Sequence: Synthetic oligonucleotide
  Sense strand starting at position 3892 of SEQ ID NO: 317281
uuguucaagggauggcaua

SEQ ID NO: 478682 - RNA, 19 nt, Artificial Sequence
  Description of Artificial Sequence: Synthetic oligonucleotide
  Antisense Strand to SEQ ID NO: 478681
uaugccaucccuugaacaa

SEQ ID NO: 478683 - RNA, 19 nt, Artificial Sequence
  Description of Artificial Sequence: Synthetic oligonucleotide
  Sense strand starting at position 41 of SEQ ID NO: 317282
auaggauguuuacccacua

SEQ ID NO: 478684 - RNA, 19 nt, Artificial Sequence
  Description of Artificial Sequence: Synthetic oligonucleotide
  Antisense Strand to SEQ ID NO: 478683
uaguggguaaacauccuau

SEQ ID NO: 478685 - RNA, 19 nt, Artificial Sequence
  Description of Artificial Sequence: Synthetic oligonucleotide
  Sense strand starting at position 248 of SEQ ID NO: 317282
uguaacuuuccauagaguc

SEQ ID NO: 478686 - RNA, 19 nt, Artificial Sequence
  Description of Artificial Sequence: Synthetic oligonucleotide
  Antisense Strand to SEQ ID NO: 478685
gacucuauggaaaguuaca

SEQ ID NO: 478687 - RNA, 19 nt, Artificial Sequence
  Description of Artificial Sequence: Synthetic oligonucleotide
  Sense strand starting at position 256 of SEQ ID NO: 317282
uccauagaguccuuucuga

SEQ ID NO: 478688 - RNA, 19 nt, Artificial Sequence
  Description of Artificial Sequence: Synthetic oligonucleotide
  Antisense Strand to SEQ ID NO: 478687
ucagaaaggacucuaugga

SEQ ID NO: 478689 - RNA, 19 nt, Artificial Sequence
  Description of Artificial Sequence: Synthetic oligonucleotide
  Sense strand starting at position 641 of SEQ ID NO: 317282
guauaacaugguggucaga

SEQ ID NO: 478690 - RNA, 19 nt, Artificial Sequence
  Description of Artificial Sequence: Synthetic oligonucleotide
  Antisense Strand to SEQ ID NO: 478689
ucugaccaccauguuauac

SEQ ID NO: 478691 - RNA, 19 nt, Artificial Sequence
  Description of Artificial Sequence: Synthetic oligonucleotide
  Sense strand starting at position 643 of SEQ ID NO: 317282
auaacaugguggucagaaa

SEQ ID NO: 478692 - RNA, 19 nt, Artificial Sequence
  Description of Artificial Sequence: Synthetic oligonucleotide
  Antisense Strand to SEQ ID NO: 478691
uuucugaccaccauguuau

SEQ ID NO: 478693 - RNA, 19 nt, Artificial Sequence
  Description of Artificial Sequence: Synthetic oligonucleotide
  Sense strand starting at position 754 of SEQ ID NO: 317282
aucgauguggguugaaaug

SEQ ID NO: 478694 - RNA, 19 nt, Artificial Sequence
  Description of Artificial Sequence: Synthetic oligonucleotide
  Antisense Strand to SEQ ID NO: 478693
cauuucaacccacaucgau

SEQ ID NO: 478695 - RNA, 19 nt, Artificial Sequence
  Description of Artificial Sequence: Synthetic oligonucleotide
  Sense strand starting at position 756 of SEQ ID NO: 317282
cgauguggguugaaaugaa

SEQ ID NO: 478696 - RNA, 19 nt, Artificial Sequence
  Description of Artificial Sequence: Synthetic oligonucleotide
  Antisense Strand to SEQ ID NO: 478695
uucauuucaacccacaucg

SEQ ID NO: 478697 - RNA, 19 nt, Artificial Sequence
  Description of Artificial Sequence: Synthetic oligonucleotide
  Sense strand starting at position 828 of SEQ ID NO: 317282
aaagaagaugcuugguaca

SEQ ID NO: 478698 - RNA, 19 nt, Artificial Sequence
  Description of Artificial Sequence: Synthetic oligonucleotide
  Antisense Strand to SEQ ID NO: 478697
uguaccaagcaucuucuuu

SEQ ID NO: 478699 - RNA, 19 nt, Artificial Sequence
  Description of Artificial Sequence: Synthetic oligonucleotide
  Sense strand starting at position 830 of SEQ ID NO: 317282
agaagaugcuugguacaag

SEQ ID NO: 478700 - RNA, 19 nt, Artificial Sequence
  Description of Artificial Sequence: Synthetic oligonucleotide
  Antisense Strand to SEQ ID NO: 478699
cuuguaccaagcaucuucu

SEQ ID NO: 478701 - RNA, 19 nt, Artificial Sequence
  Description of Artificial Sequence: Synthetic oligonucleotide
  Sense strand starting at position 833 of SEQ ID NO: 317282
agaugcuugguacaaggua

SEQ ID NO: 478702 - RNA, 19 nt, Artificial Sequence
  Description of Artificial Sequence: Synthetic oligonucleotide
  Antisense Strand to SEQ ID NO: 478701
uaccuuguaccaagcaucu

SEQ ID NO: 478703 - RNA, 19 nt, Artificial Sequence
  Description of Artificial Sequence: Synthetic oligonucleotide
  Sense strand starting at position 956 of SEQ ID NO: 317282
cugugacacguugaccaau

SEQ ID NO: 478704 - RNA, 19 nt, Artificial Sequence
  Description of Artificial Sequence: Synthetic oligonucleotide
  Antisense Strand to SEQ ID NO: 478703
auuggucaacgugucacag

SEQ ID NO: 478705 - RNA, 19 nt, Artificial Sequence
  Description of Artificial Sequence: Synthetic oligonucleotide
  Sense strand starting at position 959 of SEQ ID NO: 317282
ugacacguugaccaaugau

SEQ ID NO: 478706 - RNA, 19 nt, Artificial Sequence
  Description of Artificial Sequence: Synthetic oligonucleotide
  Antisense Strand to SEQ ID NO: 478705
aucauuggucaacguguca

SEQ ID NO: 478707 - RNA, 19 nt, Artificial Sequence
  Description of Artificial Sequence: Synthetic oligonucleotide
  Sense strand starting at position 962 of SEQ ID NO: 317282
cacguugaccaaugauuga

SEQ ID NO: 478708 - RNA, 19 nt, Artificial Sequence
  Description of Artificial Sequence: Synthetic oligonucleotide
  Antisense Strand to SEQ ID NO: 478707
ucaaucauuggucaacgug

SEQ ID NO: 478709 - RNA, 19 nt, Artificial Sequence
  Description of Artificial Sequence: Synthetic oligonucleotide
  Sense strand starting at position 986 of SEQ ID NO: 317282
auuauaucggauuguuaag

SEQ ID NO: 478710 - RNA, 19 nt, Artificial Sequence
  Description of Artificial Sequence: Synthetic oligonucleotide
  Antisense Strand to SEQ ID NO: 478709
cuuaacaauccgauauaau

SEQ ID NO: 478711 - RNA, 19 nt, Artificial Sequence
  Description of Artificial Sequence: Synthetic oligonucleotide
  Sense strand starting at position 988 of SEQ ID NO: 317282
uauaucggauuguuaagua

SEQ ID NO: 478712 - RNA, 19 nt, Artificial Sequence
  Description of Artificial Sequence: Synthetic oligonucleotide
  Antisense Strand to SEQ ID NO: 478711
uacuuaacaauccgauaua

SEQ ID NO: 478713 - RNA, 19 nt, Artificial Sequence
  Description of Artificial Sequence: Synthetic oligonucleotide
  Sense strand starting at position 1003 of SEQ ID NO: 317282
aguaucuucuagcuuaaug

SEQ ID NO: 478714 - RNA, 19 nt, Artificial Sequence
  Description of Artificial Sequence: Synthetic oligonucleotide
  Antisense Strand to SEQ ID NO: 478713
cauuaagcuagaagauacu

SEQ ID NO: 478715 - RNA, 19 nt, Artificial Sequence
  Description of Artificial Sequence: Synthetic oligonucleotide
  Sense strand starting at position 1072 of SEQ ID NO: 317282
uugccauaccaucaggaau

SEQ ID NO: 478716 - RNA, 19 nt, Artificial Sequence
  Description of Artificial Sequence: Synthetic oligonucleotide
  Antisense Strand to SEQ ID NO: 478715
auuccugaugguauggcaa

SEQ ID NO: 478717 - RNA, 19 nt, Artificial Sequence
  Description of Artificial Sequence: Synthetic oligonucleotide
  Sense strand starting at position 1185 of SEQ ID NO: 317282
uaaacaucaggugguaaga

SEQ ID NO: 478718 - RNA, 19 nt, Artificial Sequence
  Description of Artificial Sequence: Synthetic oligonucleotide
  Antisense Strand to SEQ ID NO: 478717
ucuuaccaccugauguuua

SEQ ID NO: 478719 - RNA, 19 nt, Artificial Sequence
  Description of Artificial Sequence: Synthetic oligonucleotide
  Sense strand starting at position 1346 of SEQ ID NO: 317282
ucaggugaucguuaaugac

SEQ ID NO: 478720 - RNA, 19 nt, Artificial Sequence
  Description of Artificial Sequence: Synthetic oligonucleotide
  Antisense Strand to SEQ ID NO: 478719
gucauuaacgaucaccuga

SEQ ID NO: 478721 - RNA, 19 nt, Artificial Sequence
  Description of Artificial Sequence: Synthetic oligonucleotide
  Sense strand starting at position 1904 of SEQ ID NO: 317282
gguugaggaaucuguuauc

SEQ ID NO: 478722 - RNA, 19 nt, Artificial Sequence
  Description of Artificial Sequence: Synthetic oligonucleotide
  Antisense Strand to SEQ ID NO: 478721
gauaacagauuccucaacc

SEQ ID NO: 478723 - RNA, 19 nt, Artificial Sequence
  Description of Artificial Sequence: Synthetic oligonucleotide
  Sense strand starting at position 2114 of SEQ ID NO: 317282
uuuggugugagcucgguuu

SEQ ID NO: 478724 - RNA, 19 nt, Artificial Sequence
  Description of Artificial Sequence: Synthetic oligonucleotide
  Antisense Strand to SEQ ID NO: 478723
aaaccgagcucacaccaaa

SEQ ID NO: 478725 - RNA, 19 nt, Artificial Sequence
  Description of Artificial Sequence: Synthetic oligonucleotide
  Sense strand starting at position 2653 of SEQ ID NO: 317282
ggguaaaccaguuguauau

SEQ ID NO: 478726 - RNA, 19 nt, Artificial Sequence
  Description of Artificial Sequence: Synthetic oligonucleotide
  Antisense Strand to SEQ ID NO: 478725
auauacaacugguuuaccc

SEQ ID NO: 478727 - RNA, 19 nt, Artificial Sequence
  Description of Artificial Sequence: Synthetic oligonucleotide
  Sense strand starting at position 2704 of SEQ ID NO: 317282
ugaaacauuugcguacgau

SEQ ID NO: 478728 - RNA, 19 nt, Artificial Sequence
  Description of Artificial Sequence: Synthetic oligonucleotide
  Antisense Strand to SEQ ID NO: 478727
aucguacgcaaauguuuca

SEQ ID NO: 478729 - RNA, 19 nt, Artificial Sequence
  Description of Artificial Sequence: Synthetic oligonucleotide
  Sense strand starting at position 2727 of SEQ ID NO: 317282
agagaaagauuagaccaua

SEQ ID NO: 478730 - RNA, 19 nt, Artificial Sequence
  Description of Artificial Sequence: Synthetic oligonucleotide
  Antisense Strand to SEQ ID NO: 478729
uauggucuaaucuuucucu

SEQ ID NO: 478731 - RNA, 19 nt, Artificial Sequence
  Description of Artificial Sequence: Synthetic oligonucleotide
  Sense strand starting at position 2948 of SEQ ID NO: 317282
ggacuagccuagcucauuu

SEQ ID NO: 478732 - RNA, 19 nt, Artificial Sequence
  Description of Artificial Sequence: Synthetic oligonucleotide
  Antisense Strand to SEQ ID NO: 478731
aaaugagcuaggcuagucc

SEQ ID NO: 478733 - RNA, 19 nt, Artificial Sequence
  Description of Artificial Sequence: Synthetic oligonucleotide
  Sense strand starting at position 2984 of SEQ ID NO: 317282
ugacuacucuuaucccgaa

SEQ ID NO: 478734 - RNA, 19 nt, Artificial Sequence
  Description of Artificial Sequence: Synthetic oligonucleotide
  Antisense Strand to SEQ ID NO: 478733
uucgggauaagaguaguca

SEQ ID NO: 478735 - RNA, 19 nt, Artificial Sequence
  Description of Artificial Sequence: Synthetic oligonucleotide
  Sense strand starting at position 3129 of SEQ ID NO: 317282
uuugucuuagcagacauau

SEQ ID NO: 478736 - RNA, 19 nt, Artificial Sequence
  Description of Artificial Sequence: Synthetic oligonucleotide
  Antisense Strand to SEQ ID NO: 478735
auaugucugcuaagacaaa

SEQ ID NO: 478737 - RNA, 19 nt, Artificial Sequence
  Description of Artificial Sequence: Synthetic oligonucleotide
  Sense strand starting at position 3305 of SEQ ID NO: 317282
gaagccuuccuugaguuua

SEQ ID NO: 478738 - RNA, 19 nt, Artificial Sequence
  Description of Artificial Sequence: Synthetic oligonucleotide
  Antisense Strand to SEQ ID NO: 478737
uaaacucaaggaaggcuuc

SEQ ID NO: 478739 - RNA, 19 nt, Artificial Sequence
  Description of Artificial Sequence: Synthetic oligonucleotide
  Sense strand starting at position 3307 of SEQ ID NO: 317282
agccuuccuugaguuuaaa

SEQ ID NO: 478740 - RNA, 19 nt, Artificial Sequence
  Description of Artificial Sequence: Synthetic oligonucleotide
  Antisense Strand to SEQ ID NO: 478739
uuuaaacucaaggaaggcu

SEQ ID NO: 478741 - RNA, 19 nt, Artificial Sequence
  Description of Artificial Sequence: Synthetic oligonucleotide
  Sense strand starting at position 3310 of SEQ ID NO: 317282
cuuccuugaguuuaaauga

SEQ ID NO: 478742 - RNA, 19 nt, Artificial Sequence
  Description of Artificial Sequence: Synthetic oligonucleotide
  Antisense Strand to SEQ ID NO: 478741
ucauuuaaacucaaggaag

SEQ ID NO: 478743 - RNA, 19 nt, Artificial Sequence
  Description of Artificial Sequence: Synthetic oligonucleotide
  Sense strand starting at position 3339 of SEQ ID NO: 317282
aggagacuguaacuucuuu

SEQ ID NO: 478744 - RNA, 19 nt, Artificial Sequence
  Description of Artificial Sequence: Synthetic oligonucleotide
  Antisense Strand to SEQ ID NO: 478743
aaagaaguuacagucuccu

SEQ ID NO: 478745 - RNA, 19 nt, Artificial Sequence
  Description of Artificial Sequence: Synthetic oligonucleotide
  Sense strand starting at position 3343 of SEQ ID NO: 317282
gacuguaacuucuuuguga

SEQ ID NO: 478746 - RNA, 19 nt, Artificial Sequence
  Description of Artificial Sequence: Synthetic oligonucleotide
  Antisense Strand to SEQ ID NO: 478745
ucacaaagaaguuacaguc

SEQ ID NO: 478747 - RNA, 19 nt, Artificial Sequence
  Description of Artificial Sequence: Synthetic oligonucleotide
  Sense strand starting at position 3344 of SEQ ID NO: 317282
acuguaacuucuuugugag

SEQ ID NO: 478748 - RNA, 19 nt, Artificial Sequence
  Description of Artificial Sequence: Synthetic oligonucleotide
  Antisense Strand to SEQ ID NO: 478747
cucacaaagaaguuacagu

SEQ ID NO: 478749 - RNA, 19 nt, Artificial Sequence
  Description of Artificial Sequence: Synthetic oligonucleotide
  Sense strand starting at position 3345 of SEQ ID NO: 317282
cuguaacuucuuugugaga

SEQ ID NO: 478750 - RNA, 19 nt, Artificial Sequence
  Description of Artificial Sequence: Synthetic oligonucleotide
  Antisense Strand to SEQ ID NO: 478749
ucucacaaagaaguuacag

SEQ ID NO: 478751 - RNA, 19 nt, Artificial Sequence
  Description of Artificial Sequence: Synthetic oligonucleotide
  Sense strand starting at position 3346 of SEQ ID NO: 317282
uguaacuucuuugugagau

SEQ ID NO: 478752 - RNA, 19 nt, Artificial Sequence
  Description of Artificial Sequence: Synthetic oligonucleotide
  Antisense Strand to SEQ ID NO: 478751
aucucacaaagaaguuaca

SEQ ID NO: 478753 - RNA, 19 nt, Artificial Sequence
  Description of Artificial Sequence: Synthetic oligonucleotide
  Sense strand starting at position 3590 of SEQ ID NO: 317282
gggagguggucaucugaga

SEQ ID NO: 478754 - RNA, 19 nt, Artificial Sequence
  Description of Artificial Sequence: Synthetic oligonucleotide
  Antisense Strand to SEQ ID NO: 478753
ucucagaugaccaccuccc

SEQ ID NO: 478755 - RNA, 19 nt, Artificial Sequence
  Description of Artificial Sequence: Synthetic oligonucleotide
  Sense strand starting at position 3776 of SEQ ID NO: 317282
gcgugaacauaauuaaaug

SEQ ID NO: 478756 - RNA, 19 nt, Artificial Sequence
  Description of Artificial Sequence: Synthetic oligonucleotide
  Antisense Strand to SEQ ID NO: 478755
cauuuaauuauguucacgc

SEQ ID NO: 478757 - RNA, 19 nt, Artificial Sequence
  Description of Artificial Sequence: Synthetic oligonucleotide
  Sense strand starting at position 3790 of SEQ ID NO: 317282
aaaugauugcucuguuaag

SEQ ID NO: 478758 - RNA, 19 nt, Artificial Sequence
  Description of Artificial Sequence: Synthetic oligonucleotide
  Antisense Strand to SEQ ID NO: 478757
cuuaacagagcaaucauuu

SEQ ID NO: 478759 - RNA, 19 nt, Artificial Sequence
  Description of Artificial Sequence: Synthetic oligonucleotide
  Sense strand starting at position 3791 of SEQ ID NO: 317282
aaugauugcucuguuaagg

SEQ ID NO: 478760 - RNA, 19 nt, Artificial Sequence
  Description of Artificial Sequence: Synthetic oligonucleotide
  Antisense Strand to SEQ ID NO: 478759
ccuuaacagagcaaucauu

SEQ ID NO: 478761 - RNA, 19 nt, Artificial Sequence
  Description of Artificial Sequence: Synthetic oligonucleotide
  Sense strand starting at position 3820 of SEQ ID NO: 317282
uggagugguuucuuauaaa

SEQ ID NO: 478762 - RNA, 19 nt, Artificial Sequence
  Description of Artificial Sequence: Synthetic oligonucleotide
  Antisense Strand to SEQ ID NO: 478761
uuuauaagaaaccacucca

SEQ ID NO: 478763 - RNA, 19 nt, Artificial Sequence
  Description of Artificial Sequence: Synthetic oligonucleotide
  Sense strand starting at position 92 of SEQ ID NO: 317283
acgaacagcucauuauuaa

SEQ ID NO: 478764 - RNA, 19 nt, Artificial Sequence
  Description of Artificial Sequence: Synthetic oligonucleotide
  Antisense Strand to SEQ ID NO: 478763
uuaauaaugagcuguucgu

SEQ ID NO: 478765 - RNA, 19 nt, Artificial Sequence
  Description of Artificial Sequence: Synthetic oligonucleotide
  Sense strand starting at position 93 of SEQ ID NO: 317283
cgaacagcucauuauuaaa

SEQ ID NO: 478766 - RNA, 19 nt, Artificial Sequence
  Description of Artificial Sequence: Synthetic oligonucleotide
  Antisense Strand to SEQ ID NO: 478765
uuuaauaaugagcuguucg

SEQ ID NO: 478767 - RNA, 19 nt, Artificial Sequence
  Description of Artificial Sequence: Synthetic oligonucleotide
  Sense strand starting at position 191 of SEQ ID NO: 317283
gccucuaagugucuauaga

SEQ ID NO: 478768 - RNA, 19 nt, Artificial Sequence
  Description of Artificial Sequence: Synthetic oligonucleotide
  Antisense Strand to SEQ ID NO: 478767
ucuauagacacuuagaggc

SEQ ID NO: 478769 - RNA, 19 nt, Artificial Sequence
  Description of Artificial Sequence: Synthetic oligonucleotide
  Sense strand starting at position 192 of SEQ ID NO: 317283
ccucuaagugucuauagau

SEQ ID NO: 478770 - RNA, 19 nt, Artificial Sequence
  Description of Artificial Sequence: Synthetic oligonucleotide
  Antisense Strand to SEQ ID NO: 478769
aucuauagacacuuagagg

SEQ ID NO: 478771 - RNA, 19 nt, Artificial Sequence
  Description of Artificial Sequence: Synthetic oligonucleotide
  Sense strand starting at position 672 of SEQ ID NO: 317283
aacguauuagccugaaaca

SEQ ID NO: 478772 - RNA, 19 nt, Artificial Sequence
  Description of Artificial Sequence: Synthetic oligonucleotide
  Antisense Strand to SEQ ID NO: 478771
uguuucaggcuaauacguu

SEQ ID NO: 478773 - RNA, 19 nt, Artificial Sequence
  Description of Artificial Sequence: Synthetic oligonucleotide
  Sense strand starting at position 673 of SEQ ID NO: 317283
acguauuagccugaaacaa

SEQ ID NO: 478774 - RNA, 19 nt, Artificial Sequence
  Description of Artificial Sequence: Synthetic oligonucleotide
  Antisense Strand to SEQ ID NO: 478773
uuguuucaggcuaauacgu

SEQ ID NO: 478775 - RNA, 19 nt, Artificial Sequence
  Description of Artificial Sequence: Synthetic oligonucleotide
  Sense strand starting at position 683 of SEQ ID NO: 317283
cugaaacaaccucgaucaa

SEQ ID NO: 478776 - RNA, 19 nt, Artificial Sequence
  Description of Artificial Sequence: Synthetic oligonucleotide
  Antisense Strand to SEQ ID NO: 478775
uugaucgagguuguuucag

SEQ ID NO: 478777 - RNA, 19 nt, Artificial Sequence
  Description of Artificial Sequence: Synthetic oligonucleotide
  Sense strand starting at position 792 of SEQ ID NO: 317283
aaguauugguugucauuga

SEQ ID NO: 478778 - RNA, 19 nt, Artificial Sequence
  Description of Artificial Sequence: Synthetic oligonucleotide
  Antisense Strand to SEQ ID NO: 478777
ucaaugacaaccaauacuu

SEQ ID NO: 478779 - RNA, 19 nt, Artificial Sequence
  Description of Artificial Sequence: Synthetic oligonucleotide
  Sense strand starting at position 796 of SEQ ID NO: 317283
auugguugucauugagaac

SEQ ID NO: 478780 - RNA, 19 nt, Artificial Sequence
  Description of Artificial Sequence: Synthetic oligonucleotide
  Antisense Strand to SEQ ID NO: 478779
guucucaaugacaaccaau

SEQ ID NO: 478781 - RNA, 19 nt, Artificial Sequence
  Description of Artificial Sequence: Synthetic oligonucleotide
  Sense strand starting at position 797 of SEQ ID NO: 317283
uugguugucauugagaaca

SEQ ID NO: 478782 - RNA, 19 nt, Artificial Sequence
  Description of Artificial Sequence: Synthetic oligonucleotide
  Antisense Strand to SEQ ID NO: 478781
uguucucaaugacaaccaa

SEQ ID NO: 478783 - RNA, 19 nt, Artificial Sequence
  Description of Artificial Sequence: Synthetic oligonucleotide
  Sense strand starting at position 847 of SEQ ID NO: 317283
gccagugauucccuaggau

SEQ ID NO: 478784 - RNA, 19 nt, Artificial Sequence
  Description of Artificial Sequence: Synthetic oligonucleotide
  Antisense Strand to SEQ ID NO: 478783
auccuagggaaucacuggc

SEQ ID NO: 478785 - RNA, 19 nt, Artificial Sequence
  Description of Artificial Sequence: Synthetic oligonucleotide
  Sense strand starting at position 859 of SEQ ID NO: 317283
cuaggauucccaggacuug

SEQ ID NO: 478786 - RNA, 19 nt, Artificial Sequence
  Description of Artificial Sequence: Synthetic oligonucleotide
  Antisense Strand to SEQ ID NO: 478785
caaguccugggaauccuag

SEQ ID NO: 478787 - RNA, 19 nt, Artificial Sequence
  Description of Artificial Sequence: Synthetic oligonucleotide
  Sense strand starting at position 878 of SEQ ID NO: 317283
gcacaaaggugcucucaca

SEQ ID NO: 478788 - RNA, 19 nt, Artificial Sequence
  Description of Artificial Sequence: Synthetic oligonucleotide
  Antisense Strand to SEQ ID NO: 478787
ugugagagcaccuuugugc

SEQ ID NO: 478789 - RNA, 19 nt, Artificial Sequence
  Description of Artificial Sequence: Synthetic oligonucleotide
  Sense strand starting at position 1063 of SEQ ID NO: 317283
cagugucgucaccagggaa

SEQ ID NO: 478790 - RNA, 19 nt, Artificial Sequence
  Description of Artificial Sequence: Synthetic oligonucleotide
  Antisense Strand to SEQ ID NO: 478789
uucccuggugacgacacug

SEQ ID NO: 478791 - RNA, 19 nt, Artificial Sequence
  Description of Artificial Sequence: Synthetic oligonucleotide
  Sense strand starting at position 1180 of SEQ ID NO: 317283
gaagguucucagcacaaac

SEQ ID NO: 478792 - RNA, 19 nt, Artificial Sequence
  Description of Artificial Sequence: Synthetic oligonucleotide
  Antisense Strand to SEQ ID NO: 478791
guuugugcugagaaccuuc

SEQ ID NO: 478793 - RNA, 19 nt, Artificial Sequence
  Description of Artificial Sequence: Synthetic oligonucleotide
  Sense strand starting at position 2215 of SEQ ID NO: 317283
cuucuuaagaggugugaca

SEQ ID NO: 478794 - RNA, 19 nt, Artificial Sequence
  Description of Artificial Sequence: Synthetic oligonucleotide
  Antisense Strand to SEQ ID NO: 478793
ugucacaccucuuaagaag

SEQ ID NO: 478795 - RNA, 19 nt, Artificial Sequence
  Description of Artificial Sequence: Synthetic oligonucleotide
  Sense strand starting at position 2309 of SEQ ID NO: 317283
acgugaaggcucuagagau

SEQ ID NO: 478796 - RNA, 19 nt, Artificial Sequence
  Description of Artificial Sequence: Synthetic oligonucleotide
  Antisense Strand to SEQ ID NO: 478795
aucucuagagccuucacgu

SEQ ID NO: 478797 - RNA, 19 nt, Artificial Sequence
  Description of Artificial Sequence: Synthetic oligonucleotide
  Sense strand starting at position 2310 of SEQ ID NO: 317283
cgugaaggcucuagagaug

SEQ ID NO: 478798 - RNA, 19 nt, Artificial Sequence
  Description of Artificial Sequence: Synthetic oligonucleotide
  Antisense Strand to SEQ ID NO: 478797
caucucuagagccuucacg

SEQ ID NO: 478799 - RNA, 19 nt, Artificial Sequence
  Description of Artificial Sequence: Synthetic oligonucleotide
  Sense strand starting at position 2576 of SEQ ID NO: 317283
ggagaaugaauguguguug

SEQ ID NO: 478800 - RNA, 19 nt, Artificial Sequence
  Description of Artificial Sequence: Synthetic oligonucleotide
  Antisense Strand to SEQ ID NO: 478799
caacacacauucauucucc

SEQ ID NO: 478801 - RNA, 19 nt, Artificial Sequence
  Description of Artificial Sequence: Synthetic oligonucleotide
  Sense strand starting at position 2579 of SEQ ID NO: 317283
gaaugaauguguguugucu

SEQ ID NO: 478802 - RNA, 19 nt, Artificial Sequence
  Description of Artificial Sequence: Synthetic oligonucleotide
  Antisense Strand to SEQ ID NO: 478801
agacaacacacauucauuc

SEQ ID NO: 478803 - RNA, 19 nt, Artificial Sequence
  Description of Artificial Sequence: Synthetic oligonucleotide
  Sense strand starting at position 2583 of SEQ ID NO: 317283
gaauguguguugucuuaag

SEQ ID NO: 478804 - RNA, 19 nt, Artificial Sequence
  Description of Artificial Sequence: Synthetic oligonucleotide
  Antisense Strand to SEQ ID NO: 478803
cuuaagacaacacacauuc

SEQ ID NO: 478805 - RNA, 19 nt, Artificial Sequence
  Description of Artificial Sequence: Synthetic oligonucleotide
  Sense strand starting at position 2775 of SEQ ID NO: 317283
gccagcuaucacugugaac

SEQ ID NO: 478806 - RNA, 19 nt, Artificial Sequence
  Description of Artificial Sequence: Synthetic oligonucleotide
  Antisense Strand to SEQ ID NO: 478805
guucacagugauagcuggc

SEQ ID NO: 478807 - RNA, 19 nt, Artificial Sequence
  Description of Artificial Sequence: Synthetic oligonucleotide
  Sense strand starting at position 2777 of SEQ ID NO: 317283
cagcuaucacugugaacag

SEQ ID NO: 478808 - RNA, 19 nt, Artificial Sequence
  Description of Artificial Sequence: Synthetic oligonucleotide
  Antisense Strand to SEQ ID NO: 478807
cuguucacagugauagcug

SEQ ID NO: 478809 - RNA, 19 nt, Artificial Sequence
  Description of Artificial Sequence: Synthetic oligonucleotide
  Sense strand starting at position 2852 of SEQ ID NO: 317283
ucggcuuucucuuccaaac

SEQ ID NO: 478810 - RNA, 19 nt, Artificial Sequence
  Description of Artificial Sequence: Synthetic oligonucleotide
  Antisense Strand to SEQ ID NO: 478809
guuuggaagagaaagccga

SEQ ID NO: 478811 - RNA, 19 nt, Artificial Sequence
  Description of Artificial Sequence: Synthetic oligonucleotide
  Sense strand starting at position 2895 of SEQ ID NO: 317283
agacaugacuucccaguuu

SEQ ID NO: 478812 - RNA, 19 nt, Artificial Sequence
  Description of Artificial Sequence: Synthetic oligonucleotide
  Antisense Strand to SEQ ID NO: 478811
aaacugggaagucaugucu

SEQ ID NO: 478813 - RNA, 19 nt, Artificial Sequence
  Description of Artificial Sequence: Synthetic oligonucleotide
  Sense strand starting at position 2906 of SEQ ID NO: 317283
cccaguuuauucgcaccau

SEQ ID NO: 478814 - RNA, 19 nt, Artificial Sequence
  Description of Artificial Sequence: Synthetic oligonucleotide
  Antisense Strand to SEQ ID NO: 478813
auggugcgaauaaacuggg

SEQ ID NO: 478815 - RNA, 19 nt, Artificial Sequence
  Description of Artificial Sequence: Synthetic oligonucleotide
  Sense strand starting at position 2928 of SEQ ID NO: 317283
ccucacacugugugacaua

SEQ ID NO: 478816 - RNA, 19 nt, Artificial Sequence
  Description of Artificial Sequence: Synthetic oligonucleotide
  Antisense Strand to SEQ ID NO: 478815
uaugucacacagugugagg

SEQ ID NO: 478817 - RNA, 19 nt, Artificial Sequence
  Description of Artificial Sequence: Synthetic oligonucleotide
  Sense strand starting at position 2949 of SEQ ID NO: 317283
gauggacaaugucuucuau

SEQ ID NO: 478818 - RNA, 19 nt, Artificial Sequence
  Description of Artificial Sequence: Synthetic oligonucleotide
  Antisense Strand to SEQ ID NO: 478817
auagaagacauuguccauc

SEQ ID NO: 478819 - RNA, 19 nt, Artificial Sequence
  Description of Artificial Sequence: Synthetic oligonucleotide
  Sense strand starting at position 2988 of SEQ ID NO: 317283
acuagacucuuacugucau

SEQ ID NO: 478820 - RNA, 19 nt, Artificial Sequence
  Description of Artificial Sequence: Synthetic oligonucleotide
  Antisense Strand to SEQ ID NO: 478819
augacaguaagagucuagu

SEQ ID NO: 478821 - RNA, 19 nt, Artificial Sequence
  Description of Artificial Sequence: Synthetic oligonucleotide
  Sense strand starting at position 3005 of SEQ ID NO: 317283
augggccucugcuuauuaa

SEQ ID NO: 478822 - RNA, 19 nt, Artificial Sequence
  Description of Artificial Sequence: Synthetic oligonucleotide
  Antisense Strand to SEQ ID NO: 478821
uuaauaagcagaggcccau

SEQ ID NO: 478823 - RNA, 19 nt, Artificial Sequence
  Description of Artificial Sequence: Synthetic oligonucleotide
  Sense strand starting at position 3024 of SEQ ID NO: 317283
aaagaaaugguuuguaacu

SEQ ID NO: 478824 - RNA, 19 nt, Artificial Sequence
  Description of Artificial Sequence: Synthetic oligonucleotide
  Antisense Strand to SEQ ID NO: 478823
aguuacaaaccauuucuuu

SEQ ID NO: 478825 - RNA, 19 nt, Artificial Sequence
  Description of Artificial Sequence: Synthetic oligonucleotide
  Sense strand starting at position 3025 of SEQ ID NO: 317283
aagaaaugguuuguaacuc

SEQ ID NO: 478826 - RNA, 19 nt, Artificial Sequence
  Description of Artificial Sequence: Synthetic oligonucleotide
  Antisense Strand to SEQ ID NO: 478825
gaguuacaaaccauuucuu

SEQ ID NO: 478827 - RNA, 19 nt, Artificial Sequence
  Description of Artificial Sequence: Synthetic oligonucleotide
  Sense strand starting at position 3201 of SEQ ID NO: 317283
cccauacucggcuaacuau

SEQ ID NO: 478828 - RNA, 19 nt, Artificial Sequence
  Description of Artificial Sequence: Synthetic oligonucleotide
  Antisense Strand to SEQ ID NO: 478827
auaguuagccgaguauggg

SEQ ID NO: 478829 - RNA, 19 nt, Artificial Sequence
  Description of Artificial Sequence: Synthetic oligonucleotide
  Sense strand starting at position 3295 of SEQ ID NO: 317283
cagcuugucuuccuuggaa

SEQ ID NO: 478830 - RNA, 19 nt, Artificial Sequence
  Description of Artificial Sequence: Synthetic oligonucleotide
  Antisense Strand to SEQ ID NO: 478829
uuccaaggaagacaagcug

SEQ ID NO: 478831 - RNA, 19 nt, Artificial Sequence
  Description of Artificial Sequence: Synthetic oligonucleotide
  Sense strand starting at position 3440 of SEQ ID NO: 317283
ccuggucaagcacaagaau

SEQ ID NO: 478832 - RNA, 19 nt, Artificial Sequence
  Description of Artificial Sequence: Synthetic oligonucleotide
  Antisense Strand to SEQ ID NO: 478831
auucuugugcuugaccagg

SEQ ID NO: 478833 - RNA, 19 nt, Artificial Sequence
  Description of Artificial Sequence: Synthetic oligonucleotide
  Sense strand starting at position 3613 of SEQ ID NO: 317283
ugcugaucuuccuugccaa

SEQ ID NO: 478834 - RNA, 19 nt, Artificial Sequence
  Description of Artificial Sequence: Synthetic oligonucleotide
  Antisense Strand to SEQ ID NO: 478833
uuggcaaggaagaucagca

SEQ ID NO: 478835 - RNA, 19 nt, Artificial Sequence
  Description of Artificial Sequence: Synthetic oligonucleotide
  Sense strand starting at position 3651 of SEQ ID NO: 317283
cuucucaguaguggguaaa

SEQ ID NO: 478836 - RNA, 19 nt, Artificial Sequence
  Description of Artificial Sequence: Synthetic oligonucleotide
  Antisense Strand to SEQ ID NO: 478835
uuuacccacuacugagaag

SEQ ID NO: 478837 - RNA, 19 nt, Artificial Sequence
  Description of Artificial Sequence: Synthetic oligonucleotide
  Sense strand starting at position 3755 of SEQ ID NO: 317283
cccagugaaccuuggcuaa

SEQ ID NO: 478838 - RNA, 19 nt, Artificial Sequence
  Description of Artificial Sequence: Synthetic oligonucleotide
  Antisense Strand to SEQ ID NO: 478837
uuagccaagguucacuggg

SEQ ID NO: 478839 - RNA, 19 nt, Artificial Sequence
  Description of Artificial Sequence: Synthetic oligonucleotide
  Sense strand starting at position 3757 of SEQ ID NO: 317283
cagugaaccuuggcuaaug

SEQ ID NO: 478840 - RNA, 19 nt, Artificial Sequence
  Description of Artificial Sequence: Synthetic oligonucleotide
  Antisense Strand to SEQ ID NO: 478839
cauuagccaagguucacug

SEQ ID NO: 478841 - RNA, 19 nt, Artificial Sequence
  Description of Artificial Sequence: Synthetic oligonucleotide
  Sense strand starting at position 3759 of SEQ ID NO: 317283
gugaaccuuggcuaauguu

SEQ ID NO: 478842 - RNA, 19 nt, Artificial Sequence
  Description of Artificial Sequence: Synthetic oligonucleotide
  Antisense Strand to SEQ ID NO: 478841
aacauuagccaagguucac

SEQ ID NO: 478843 - RNA, 19 nt, Artificial Sequence
  Description of Artificial Sequence: Synthetic oligonucleotide
  Sense strand starting at position 431 of SEQ ID NO: 317284
aguguaagcauuugcaaga

SEQ ID NO: 478844 - RNA, 19 nt, Artificial Sequence
  Description of Artificial Sequence: Synthetic oligonucleotide
  Antisense Strand to SEQ ID NO: 478843
ucuugcaaaugcuuacacu

SEQ ID NO: 478845 - RNA, 19 nt, Artificial Sequence
  Description of Artificial Sequence: Synthetic oligonucleotide
  Sense strand starting at position 505 of SEQ ID NO: 317284
augacuuuacucggaauaa

SEQ ID NO: 478846 - RNA, 19 nt, Artificial Sequence
  Description of Artificial Sequence: Synthetic oligonucleotide
  Antisense Strand to SEQ ID NO: 478845
uuauuccgaguaaagucau

SEQ ID NO: 478847 - RNA, 19 nt, Artificial Sequence
  Description of Artificial Sequence: Synthetic oligonucleotide
  Sense strand starting at position 506 of SEQ ID NO: 317284
ugacuuuacucggaauaaa

SEQ ID NO: 478848 - RNA, 19 nt, Artificial Sequence
  Description of Artificial Sequence: Synthetic oligonucleotide
  Antisense Strand to SEQ ID NO: 478847
uuuauuccgaguaaaguca

SEQ ID NO: 478849 - RNA, 19 nt, Artificial Sequence
  Description of Artificial Sequence: Synthetic oligonucleotide
  Sense strand starting at position 567 of SEQ ID NO: 317284
gaaagugcugccuacaaau

SEQ ID NO: 478850 - RNA, 19 nt, Artificial Sequence
  Description of Artificial Sequence: Synthetic oligonucleotide
  Antisense Strand to SEQ ID NO: 478849
auuuguaggcagcacuuuc

SEQ ID NO: 478851 - RNA, 19 nt, Artificial Sequence
  Description of Artificial Sequence: Synthetic oligonucleotide
  Sense strand starting at position 590 of SEQ ID NO: 317284
acaaauggcuaacugauua

SEQ ID NO: 478852 - RNA, 19 nt, Artificial Sequence
  Description of Artificial Sequence: Synthetic oligonucleotide
  Antisense Strand to SEQ ID NO: 478851
uaaucaguuagccauuugu

SEQ ID NO: 478853 - RNA, 19 nt, Artificial Sequence
  Description of Artificial Sequence: Synthetic oligonucleotide
  Sense strand starting at position 602 of SEQ ID NO: 317284
cugauuaacuggcccauua

SEQ ID NO: 478854 - RNA, 19 nt, Artificial Sequence
  Description of Artificial Sequence: Synthetic oligonucleotide
  Antisense Strand to SEQ ID NO: 478853
uaaugggccaguuaaucag

SEQ ID NO: 478855 - RNA, 19 nt, Artificial Sequence
  Description of Artificial Sequence: Synthetic oligonucleotide
  Sense strand starting at position 784 of SEQ ID NO: 317284
gcagcuuuccacgugcaca

SEQ ID NO: 478856 - RNA, 19 nt, Artificial Sequence
  Description of Artificial Sequence: Synthetic oligonucleotide
  Antisense Strand to SEQ ID NO: 478855
ugugcacguggaaagcugc

SEQ ID NO: 478857 - RNA, 19 nt, Artificial Sequence
  Description of Artificial Sequence: Synthetic oligonucleotide
  Sense strand starting at position 842 of SEQ ID NO: 317284
ccagcagacccaugucuau

SEQ ID NO: 478858 - RNA, 19 nt, Artificial Sequence
  Description of Artificial Sequence: Synthetic oligonucleotide
  Antisense Strand to SEQ ID NO: 478857
auagacaugggucugcugg

SEQ ID NO: 478859 - RNA, 19 nt, Artificial Sequence
  Description of Artificial Sequence: Synthetic oligonucleotide
  Sense strand starting at position 932 of SEQ ID NO: 317284
aguaguuuguccuucgcuu

SEQ ID NO: 478860 - RNA, 19 nt, Artificial Sequence
  Description of Artificial Sequence: Synthetic oligonucleotide
  Antisense Strand to SEQ ID NO: 478859
aagcgaaggacaaacuacu

SEQ ID NO: 478861 - RNA, 19 nt, Artificial Sequence
  Description of Artificial Sequence: Synthetic oligonucleotide
  Sense strand starting at position 944 of SEQ ID NO: 317284
uucgcuucucuacagaaga

SEQ ID NO: 478862 - RNA, 19 nt, Artificial Sequence
  Description of Artificial Sequence: Synthetic oligonucleotide
  Antisense Strand to SEQ ID NO: 478861
ucuucuguagagaagcgaa

SEQ ID NO: 478863 - RNA, 19 nt, Artificial Sequence
  Description of Artificial Sequence: Synthetic oligonucleotide
  Sense strand starting at position 1021 of SEQ ID NO: 317284
cgaaaucagugcccaguaa

SEQ ID NO: 478864 - RNA, 19 nt, Artificial Sequence
  Description of Artificial Sequence: Synthetic oligonucleotide
  Antisense Strand to SEQ ID NO: 478863
uuacugggcacugauuucg

SEQ ID NO: 478865 - RNA, 19 nt, Artificial Sequence
  Description of Artificial Sequence: Synthetic oligonucleotide
  Sense strand starting at position 1022 of SEQ ID NO: 317284
gaaaucagugcccaguaau

SEQ ID NO: 478866 - RNA, 19 nt, Artificial Sequence
  Description of Artificial Sequence: Synthetic oligonucleotide
  Antisense Strand to SEQ ID NO: 478865
auuacugggcacugauuuc

SEQ ID NO: 478867 - RNA, 19 nt, Artificial Sequence
  Description of Artificial Sequence: Synthetic oligonucleotide
  Sense strand starting at position 1358 of SEQ ID NO: 317284
ugagaauuaccacgguaaa

SEQ ID NO: 478868 - RNA, 19 nt, Artificial Sequence
  Description of Artificial Sequence: Synthetic oligonucleotide
  Antisense Strand to SEQ ID NO: 478867
uuuaccgugguaauucuca

SEQ ID NO: 478869 - RNA, 19 nt, Artificial Sequence
  Description of Artificial Sequence: Synthetic oligonucleotide
  Sense strand starting at position 1359 of SEQ ID NO: 317284
gagaauuaccacgguaaag

SEQ ID NO: 478870 - RNA, 19 nt, Artificial Sequence
  Description of Artificial Sequence: Synthetic oligonucleotide
  Antisense Strand to SEQ ID NO: 478869
cuuuaccgugguaauucuc

SEQ ID NO: 478871 - RNA, 19 nt, Artificial Sequence
  Description of Artificial Sequence: Synthetic oligonucleotide
  Sense strand starting at position 1388 of SEQ ID NO: 317284
ugacgcuuuccguaaguuc

SEQ ID NO: 478872 - RNA, 19 nt, Artificial Sequence
  Description of Artificial Sequence: Synthetic oligonucleotide
  Antisense Strand to SEQ ID NO: 478871
gaacuuacggaaagcguca

SEQ ID NO: 478873 - RNA, 19 nt, Artificial Sequence
  Description of Artificial Sequence: Synthetic oligonucleotide
  Sense strand starting at position 1396 of SEQ ID NO: 317284
uccguaaguucugacuuaa

SEQ ID NO: 478874 - RNA, 19 nt, Artificial Sequence
  Description of Artificial Sequence: Synthetic oligonucleotide
  Antisense Strand to SEQ ID NO: 478873
uuaagucagaacuuacgga

SEQ ID NO: 478875 - RNA, 19 nt, Artificial Sequence
  Description of Artificial Sequence: Synthetic oligonucleotide
  Sense strand starting at position 1673 of SEQ ID NO: 317284
uuaccugcuggucauuaga

SEQ ID NO: 478876 - RNA, 19 nt, Artificial Sequence
  Description of Artificial Sequence: Synthetic oligonucleotide
  Antisense Strand to SEQ ID NO: 478875
ucuaaugaccagcagguaa

SEQ ID NO: 478877 - RNA, 19 nt, Artificial Sequence
  Description of Artificial Sequence: Synthetic oligonucleotide
  Sense strand starting at position 1675 of SEQ ID NO: 317284
accugcuggucauuagaaa

SEQ ID NO: 478878 - RNA, 19 nt, Artificial Sequence
  Description of Artificial Sequence: Synthetic oligonucleotide
  Antisense Strand to SEQ ID NO: 478877
uuucuaaugaccagcaggu

SEQ ID NO: 478879 - RNA, 19 nt, Artificial Sequence
  Description of Artificial Sequence: Synthetic oligonucleotide
  Sense strand starting at position 2194 of SEQ ID NO: 317284
aucuguauuccgugaucug

SEQ ID NO: 478880 - RNA, 19 nt, Artificial Sequence
  Description of Artificial Sequence: Synthetic oligonucleotide
  Antisense Strand to SEQ ID NO: 478879
cagaucacggaauacagau

SEQ ID NO: 478881 - RNA, 19 nt, Artificial Sequence
  Description of Artificial Sequence: Synthetic oligonucleotide
  Sense strand starting at position 2250 of SEQ ID NO: 317284
gcgagugaaccaugaugga

SEQ ID NO: 478882 - RNA, 19 nt, Artificial Sequence
  Description of Artificial Sequence: Synthetic oligonucleotide
  Antisense Strand to SEQ ID NO: 478881
uccaucaugguucacucgc

SEQ ID NO: 478883 - RNA, 19 nt, Artificial Sequence
  Description of Artificial Sequence: Synthetic oligonucleotide
  Sense strand starting at position 2263 of SEQ ID NO: 317284
gauggauccuggcucuaaa

SEQ ID NO: 478884 - RNA, 19 nt, Artificial Sequence
  Description of Artificial Sequence: Synthetic oligonucleotide
  Antisense Strand to SEQ ID NO: 478883
uuuagagccaggauccauc

SEQ ID NO: 478885 - RNA, 19 nt, Artificial Sequence
  Description of Artificial Sequence: Synthetic oligonucleotide
  Sense strand starting at position 2311 of SEQ ID NO: 317284
uuguaaagccuagggauca

SEQ ID NO: 478886 - RNA, 19 nt, Artificial Sequence
  Description of Artificial Sequence: Synthetic oligonucleotide
  Antisense Strand to SEQ ID NO: 478885
ugaucccuaggcuuuacaa

SEQ ID NO: 478887 - RNA, 19 nt, Artificial Sequence
  Description of Artificial Sequence: Synthetic oligonucleotide
  Sense strand starting at position 2365 of SEQ ID NO: 317284
ggguaaacugcucauccca

SEQ ID NO: 478888 - RNA, 19 nt, Artificial Sequence
  Description of Artificial Sequence: Synthetic oligonucleotide
  Antisense Strand to SEQ ID NO: 478887
ugggaugagcaguuuaccc

SEQ ID NO: 478889 - RNA, 19 nt, Artificial Sequence
  Description of Artificial Sequence: Synthetic oligonucleotide
  Sense strand starting at position 2385 of SEQ ID NO: 317284
agugcuucccugcugucaa

SEQ ID NO: 478890 - RNA, 19 nt, Artificial Sequence
  Description of Artificial Sequence: Synthetic oligonucleotide
  Antisense Strand to SEQ ID NO: 478889
uugacagcagggaagcacu

SEQ ID NO: 478891 - RNA, 19 nt, Artificial Sequence
  Description of Artificial Sequence: Synthetic oligonucleotide
  Sense strand starting at position 2423 of SEQ ID NO: 317284
ccuagagucucguccuaau

SEQ ID NO: 478892 - RNA, 19 nt, Artificial Sequence
  Description of Artificial Sequence: Synthetic oligonucleotide
  Antisense Strand to SEQ ID NO: 478891
auuaggacgagacucuagg

SEQ ID NO: 478893 - RNA, 19 nt, Artificial Sequence
  Description of Artificial Sequence: Synthetic oligonucleotide
  Sense strand starting at position 2436 of SEQ ID NO: 317284
ccuaaugggcucuaggagu

SEQ ID NO: 478894 - RNA, 19 nt, Artificial Sequence
  Description of Artificial Sequence: Synthetic oligonucleotide
  Antisense Strand to SEQ ID NO: 478893
acuccuagagcccauuagg

SEQ ID NO: 478895 - RNA, 19 nt, Artificial Sequence
  Description of Artificial Sequence: Synthetic oligonucleotide
  Sense strand starting at position 2452 of SEQ ID NO: 317284
aguccuaacccugaaacgu

SEQ ID NO: 478896 - RNA, 19 nt, Artificial Sequence
  Description of Artificial Sequence: Synthetic oligonucleotide
  Antisense Strand to SEQ ID NO: 478895
acguuucaggguuaggacu

SEQ ID NO: 478897 - RNA, 19 nt, Artificial Sequence
  Description of Artificial Sequence: Synthetic oligonucleotide
  Sense strand starting at position 2477 of SEQ ID NO: 317284
gagggaagcuucgccauua

SEQ ID NO: 478898 - RNA, 19 nt, Artificial Sequence
  Description of Artificial Sequence: Synthetic oligonucleotide
  Antisense Strand to SEQ ID NO: 478897
uaauggcgaagcuucccuc

SEQ ID NO: 478899 - RNA, 19 nt, Artificial Sequence
  Description of Artificial Sequence: Synthetic oligonucleotide
  Sense strand starting at position 2503 of SEQ ID NO: 317284
ggaagcuucuugccaggaa

SEQ ID NO: 478900 - RNA, 19 nt, Artificial Sequence
  Description of Artificial Sequence: Synthetic oligonucleotide
  Antisense Strand to SEQ ID NO: 478899
uuccuggcaagaagcuucc

SEQ ID NO: 478901 - RNA, 19 nt, Artificial Sequence
  Description of Artificial Sequence: Synthetic oligonucleotide
  Sense strand starting at position 2653 of SEQ ID NO: 317284
gcacgagaguguucaguga

SEQ ID NO: 478902 - RNA, 19 nt, Artificial Sequence
  Description of Artificial Sequence: Synthetic oligonucleotide
  Antisense Strand to SEQ ID NO: 478901
ucacugaacacucucgugc

SEQ ID NO: 478903 - RNA, 19 nt, Artificial Sequence
  Description of Artificial Sequence: Synthetic oligonucleotide
  Sense strand starting at position 2657 of SEQ ID NO: 317284
gagaguguucagugagcag

SEQ ID NO: 478904 - RNA, 19 nt, Artificial Sequence
  Description of Artificial Sequence: Synthetic oligonucleotide
  Antisense Strand to SEQ ID NO: 478903
cugcucacugaacacucuc

SEQ ID NO: 478905 - RNA, 19 nt, Artificial Sequence
  Description of Artificial Sequence: Synthetic oligonucleotide
  Sense strand starting at position 2742 of SEQ ID NO: 317284
agcucaagcuuccuuagaa

SEQ ID NO: 478906 - RNA, 19 nt, Artificial Sequence
  Description of Artificial Sequence: Synthetic oligonucleotide
  Antisense Strand to SEQ ID NO: 478905
uucuaaggaagcuugagcu

SEQ ID NO: 478907 - RNA, 19 nt, Artificial Sequence
  Description of Artificial Sequence: Synthetic oligonucleotide
  Sense strand starting at position 2743 of SEQ ID NO: 317284
gcucaagcuuccuuagaag

SEQ ID NO: 478908 - RNA, 19 nt, Artificial Sequence
  Description of Artificial Sequence: Synthetic oligonucleotide
  Antisense Strand to SEQ ID NO: 478907
cuucuaaggaagcuugagc

SEQ ID NO: 478909 - RNA, 19 nt, Artificial Sequence
  Description of Artificial Sequence: Synthetic oligonucleotide
  Sense strand starting at position 2771 of SEQ ID NO: 317284
aggagcugugcacguaaca

SEQ ID NO: 478910 - RNA, 19 nt, Artificial Sequence
  Description of Artificial Sequence: Synthetic oligonucleotide
  Antisense Strand to SEQ ID NO: 478909
uguuacgugcacagcuccu

SEQ ID NO: 478911 - RNA, 19 nt, Artificial Sequence
  Description of Artificial Sequence: Synthetic oligonucleotide
  Sense strand starting at position 3690 of SEQ ID NO: 317284
aucugaagguucuggaaca

SEQ ID NO: 478912 - RNA, 19 nt, Artificial Sequence
  Description of Artificial Sequence: Synthetic oligonucleotide
  Antisense Strand to SEQ ID NO: 478911
uguuccagaaccuucagau

SEQ ID NO: 478913 - RNA, 19 nt, Artificial Sequence
  Description of Artificial Sequence: Synthetic oligonucleotide
  Sense strand starting at position 3691 of SEQ ID NO: 317284
ucugaagguucuggaacaa

SEQ ID NO: 478914 - RNA, 19 nt, Artificial Sequence
  Description of Artificial Sequence: Synthetic oligonucleotide
  Antisense Strand to SEQ ID NO: 478913
uuguuccagaaccuucaga

SEQ ID NO: 478915 - RNA, 19 nt, Artificial Sequence
  Description of Artificial Sequence: Synthetic oligonucleotide
  Sense strand starting at position 3758 of SEQ ID NO: 317284
ccguuaaccucauuggcuu

SEQ ID NO: 478916 - RNA, 19 nt, Artificial Sequence
  Description of Artificial Sequence: Synthetic oligonucleotide
  Antisense Strand to SEQ ID NO: 478915
aagccaaugagguuaacgg

SEQ ID NO: 478917 - RNA, 19 nt, Artificial Sequence
  Description of Artificial Sequence: Synthetic oligonucleotide
  Sense strand starting at position 3786 of SEQ ID NO: 317284
cugcacuacugacaguuua

SEQ ID NO: 478918 - RNA, 19 nt, Artificial Sequence
  Description of Artificial Sequence: Synthetic oligonucleotide
  Antisense Strand to SEQ ID NO: 478917
uaaacugucaguagugcag

SEQ ID NO: 478919 - RNA, 19 nt, Artificial Sequence
  Description of Artificial Sequence: Synthetic oligonucleotide
  Sense strand starting at position 3805 of SEQ ID NO: 317284
cagagcuuuggaggagaca

SEQ ID NO: 478920 - RNA, 19 nt, Artificial Sequence
  Description of Artificial Sequence: Synthetic oligonucleotide
  Antisense Strand to SEQ ID NO: 478919
ugucuccuccaaagcucug

SEQ ID NO: 478921 - RNA, 19 nt, Artificial Sequence
  Description of Artificial Sequence: Synthetic oligonucleotide
  Sense strand starting at position 3951 of SEQ ID NO: 317284
guuaucaccuaagugcuaa

SEQ ID NO: 478922 - RNA, 19 nt, Artificial Sequence
  Description of Artificial Sequence: Synthetic oligonucleotide
  Antisense Strand to SEQ ID NO: 478921
uuagcacuuaggugauaac

SEQ ID NO: 478923 - RNA, 19 nt, Artificial Sequence
  Description of Artificial Sequence: Synthetic oligonucleotide
  Sense strand starting at position 45 of SEQ ID NO: 317285
cgugccaucucauuuagac

SEQ ID NO: 478924 - RNA, 19 nt, Artificial Sequence
  Description of Artificial Sequence: Synthetic oligonucleotide
  Antisense Strand to SEQ ID NO: 478923
gucuaaaugagauggcacg

SEQ ID NO: 478925 - RNA, 19 nt, Artificial Sequence
  Description of Artificial Sequence: Synthetic oligonucleotide
  Sense strand starting at position 114 of SEQ ID NO: 317285
ggaauagagacuugcuuau

SEQ ID NO: 478926 - RNA, 19 nt, Artificial Sequence
  Description of Artificial Sequence: Synthetic oligonucleotide
  Antisense Strand to SEQ ID NO: 478925
auaagcaagucucuauucc

SEQ ID NO: 478927 - RNA, 19 nt, Artificial Sequence
  Description of Artificial Sequence: Synthetic oligonucleotide
  Sense strand starting at position 143 of SEQ ID NO: 317285
ccaacucguucucccaaga

SEQ ID NO: 478928 - RNA, 19 nt, Artificial Sequence
  Description of Artificial Sequence: Synthetic oligonucleotide
  Antisense Strand to SEQ ID NO: 478927
ucuugggagaacgaguugg

SEQ ID NO: 478929 - RNA, 19 nt, Artificial Sequence
  Description of Artificial Sequence: Synthetic oligonucleotide
  Sense strand starting at position 250 of SEQ ID NO: 317285
acgaaccuuucucugcaua

SEQ ID NO: 478930 - RNA, 19 nt, Artificial Sequence
  Description of Artificial Sequence: Synthetic oligonucleotide
  Antisense Strand to SEQ ID NO: 478929
uaugcagagaaagguucgu

SEQ ID NO: 478931 - RNA, 19 nt, Artificial Sequence
  Description of Artificial Sequence: Synthetic oligonucleotide
  Sense strand starting at position 523 of SEQ ID NO: 317285
gauuuccugcaauguguaa

SEQ ID NO: 478932 - RNA, 19 nt, Artificial Sequence
  Description of Artificial Sequence: Synthetic oligonucleotide
  Antisense Strand to SEQ ID NO: 478931
uuacacauugcaggaaauc

SEQ ID NO: 478933 - RNA, 19 nt, Artificial Sequence
  Description of Artificial Sequence: Synthetic oligonucleotide
  Sense strand starting at position 583 of SEQ ID NO: 317285
uuaucaucuccaggucagu

SEQ ID NO: 478934 - RNA, 19 nt, Artificial Sequence
  Description of Artificial Sequence: Synthetic oligonucleotide
  Antisense Strand to SEQ ID NO: 478933
acugaccuggagaugauaa

SEQ ID NO: 478935 - RNA, 19 nt, Artificial Sequence
  Description of Artificial Sequence: Synthetic oligonucleotide
  Sense strand starting at position 990 of SEQ ID NO: 317285
uucccaaacuuuguuuagu

SEQ ID NO: 478936 - RNA, 19 nt, Artificial Sequence
  Description of Artificial Sequence: Synthetic oligonucleotide
  Antisense Strand to SEQ ID NO: 478935
acuaaacaaaguuugggaa

SEQ ID NO: 478937 - RNA, 19 nt, Artificial Sequence
  Description of Artificial Sequence: Synthetic oligonucleotide
  Sense strand starting at position 991 of SEQ ID NO: 317285
ucccaaacuuuguuuaguu

SEQ ID NO: 478938 - RNA, 19 nt, Artificial Sequence
  Description of Artificial Sequence: Synthetic oligonucleotide
  Antisense Strand to SEQ ID NO: 478937
aacuaaacaaaguuuggga

SEQ ID NO: 478939 - RNA, 19 nt, Artificial Sequence
  Description of Artificial Sequence: Synthetic oligonucleotide
  Sense strand starting at position 992 of SEQ ID NO: 317285
cccaaacuuuguuuaguua

SEQ ID NO: 478940 - RNA, 19 nt, Artificial Sequence
  Description of Artificial Sequence: Synthetic oligonucleotide
  Antisense Strand to SEQ ID NO: 478939
uaacuaaacaaaguuuggg

SEQ ID NO: 478941 - RNA, 19 nt, Artificial Sequence
  Description of Artificial Sequence: Synthetic oligonucleotide
  Sense strand starting at position 1128 of SEQ ID NO: 317285
ggucauuaacauuggcaau

SEQ ID NO: 478942 - RNA, 19 nt, Artificial Sequence
  Description of Artificial Sequence: Synthetic oligonucleotide
  Antisense Strand to SEQ ID NO: 478941
auugccaauguuaaugacc

SEQ ID NO: 478943 - RNA, 19 nt, Artificial Sequence
  Description of Artificial Sequence: Synthetic oligonucleotide
  Sense strand starting at position 1253 of SEQ ID NO: 317285
cuuagagcaucuuuagauu

SEQ ID NO: 478944 - RNA, 19 nt, Artificial Sequence
  Description of Artificial Sequence: Synthetic oligonucleotide
  Antisense Strand to SEQ ID NO: 478943
aaucuaaagaugcucuaag

SEQ ID NO: 478945 - RNA, 19 nt, Artificial Sequence
  Description of Artificial Sequence: Synthetic oligonucleotide
  Sense strand starting at position 1256 of SEQ ID NO: 317285
agagcaucuuuagauuuac

SEQ ID NO: 478946 - RNA, 19 nt, Artificial Sequence
  Description of Artificial Sequence: Synthetic oligonucleotide
  Antisense Strand to SEQ ID NO: 478945
guaaaucuaaagaugcucu

SEQ ID NO: 478947 - RNA, 19 nt, Artificial Sequence
  Description of Artificial Sequence: Synthetic oligonucleotide
  Sense strand starting at position 1276 of SEQ ID NO: 317285
ucaucaaaccuuggguagu

SEQ ID NO: 478948 - RNA, 19 nt, Artificial Sequence
  Description of Artificial Sequence: Synthetic oligonucleotide
  Antisense Strand to SEQ ID NO: 478947
acuacccaagguuugauga

SEQ ID NO: 478949 - RNA, 19 nt, Artificial Sequence
  Description of Artificial Sequence: Synthetic oligonucleotide
  Sense strand starting at position 1282 of SEQ ID NO: 317285
aaccuuggguaguauuuaa

SEQ ID NO: 478950 - RNA, 19 nt, Artificial Sequence
  Description of Artificial Sequence: Synthetic oligonucleotide
  Antisense Strand to SEQ ID NO: 478949
uuaaauacuacccaagguu

SEQ ID NO: 478951 - RNA, 19 nt, Artificial Sequence
  Description of Artificial Sequence: Synthetic oligonucleotide
  Sense strand starting at position 1336 of SEQ ID NO: 317285
gcauaugcauucucuagaa

SEQ ID NO: 478952 - RNA, 19 nt, Artificial Sequence
  Description of Artificial Sequence: Synthetic oligonucleotide
  Antisense Strand to SEQ ID NO: 478951
uucuagagaaugcauaugc

SEQ ID NO: 478953 - RNA, 19 nt, Artificial Sequence
  Description of Artificial Sequence: Synthetic oligonucleotide
  Sense strand starting at position 1504 of SEQ ID NO: 317285
agcucagagucauuacgau

SEQ ID NO: 478954 - RNA, 19 nt, Artificial Sequence
  Description of Artificial Sequence: Synthetic oligonucleotide
  Antisense Strand to SEQ ID NO: 478953
aucguaaugacucugagcu

SEQ ID NO: 478955 - RNA, 19 nt, Artificial Sequence
  Description of Artificial Sequence: Synthetic oligonucleotide
  Sense strand starting at position 1519 of SEQ ID NO: 317285
cgauguuuggccuagagua

SEQ ID NO: 478956 - RNA, 19 nt, Artificial Sequence
  Description of Artificial Sequence: Synthetic oligonucleotide
  Antisense Strand to SEQ ID NO: 478955
uacucuaggccaaacaucg

SEQ ID NO: 478957 - RNA, 19 nt, Artificial Sequence
  Description of Artificial Sequence: Synthetic oligonucleotide
  Sense strand starting at position 1521 of SEQ ID NO: 317285
auguuuggccuagaguaaa

SEQ ID NO: 478958 - RNA, 19 nt, Artificial Sequence
  Description of Artificial Sequence: Synthetic oligonucleotide
  Antisense Strand to SEQ ID NO: 478957
uuuacucuaggccaaacau

SEQ ID NO: 478959 - RNA, 19 nt, Artificial Sequence
  Description of Artificial Sequence: Synthetic oligonucleotide
  Sense strand starting at position 2049 of SEQ ID NO: 317285
uggguuugcguuuaauuua

SEQ ID NO: 478960 - RNA, 19 nt, Artificial Sequence
  Description of Artificial Sequence: Synthetic oligonucleotide
  Antisense Strand to SEQ ID NO: 478959
uaaauuaaacgcaaaccca

SEQ ID NO: 478961 - RNA, 19 nt, Artificial Sequence
  Description of Artificial Sequence: Synthetic oligonucleotide
  Sense strand starting at position 2170 of SEQ ID NO: 317285
augauuccucauggaagua

SEQ ID NO: 478962 - RNA, 19 nt, Artificial Sequence
  Description of Artificial Sequence: Synthetic oligonucleotide
  Antisense Strand to SEQ ID NO: 478961
uacuuccaugaggaaucau

SEQ ID NO: 478963 - RNA, 19 nt, Artificial Sequence
  Description of Artificial Sequence: Synthetic oligonucleotide
  Sense strand starting at position 2226 of SEQ ID NO: 317285
cugaccaaucuugguuaau

SEQ ID NO: 478964 - RNA, 19 nt, Artificial Sequence
  Description of Artificial Sequence: Synthetic oligonucleotide
  Antisense Strand to SEQ ID NO: 478963
auuaaccaagauuggucag

SEQ ID NO: 478965 - RNA, 19 nt, Artificial Sequence
  Description of Artificial Sequence: Synthetic oligonucleotide
  Sense strand starting at position 2227 of SEQ ID NO: 317285
ugaccaaucuugguuaauu

SEQ ID NO: 478966 - RNA, 19 nt, Artificial Sequence
  Description of Artificial Sequence: Synthetic oligonucleotide
  Antisense Strand to SEQ ID NO: 478965
aauuaaccaagauugguca

SEQ ID NO: 478967 - RNA, 19 nt, Artificial Sequence
  Description of Artificial Sequence: Synthetic oligonucleotide
  Sense strand starting at position 2243 of SEQ ID NO: 317285
auuugagcuuaggaaacaa

SEQ ID NO: 478968 - RNA, 19 nt, Artificial Sequence
  Description of Artificial Sequence: Synthetic oligonucleotide
  Antisense Strand to SEQ ID NO: 478967
uuguuuccuaagcucaaau

SEQ ID NO: 478969 - RNA, 19 nt, Artificial Sequence
  Description of Artificial Sequence: Synthetic oligonucleotide
  Sense strand starting at position 2316 of SEQ ID NO: 317285
cuucgcuuugcugcauuaa

SEQ ID NO: 478970 - RNA, 19 nt, Artificial Sequence
  Description of Artificial Sequence: Synthetic oligonucleotide
  Antisense Strand to SEQ ID NO: 478969
uuaaugcagcaaagcgaag

SEQ ID NO: 478971 - RNA, 19 nt, Artificial Sequence
  Description of Artificial Sequence: Synthetic oligonucleotide
  Sense strand starting at position 2436 of SEQ ID NO: 317285
gaguuaccuggcgaugagu

SEQ ID NO: 478972 - RNA, 19 nt, Artificial Sequence
  Description of Artificial Sequence: Synthetic oligonucleotide
  Antisense Strand to SEQ ID NO: 478971
acucaucgccagguaacuc

SEQ ID NO: 478973 - RNA, 19 nt, Artificial Sequence
  Description of Artificial Sequence: Synthetic oligonucleotide
  Sense strand starting at position 2523 of SEQ ID NO: 317285
gggcaauccagguguagag

SEQ ID NO: 478974 - RNA, 19 nt, Artificial Sequence
  Description of Artificial Sequence: Synthetic oligonucleotide
  Antisense Strand to SEQ ID NO: 478973
cucuacaccuggauugccc

SEQ ID NO: 478975 - RNA, 19 nt, Artificial Sequence
  Description of Artificial Sequence: Synthetic oligonucleotide
  Sense strand starting at position 2633 of SEQ ID NO: 317285
cugaauaacuaacuguuga

SEQ ID NO: 478976 - RNA, 19 nt, Artificial Sequence
  Description of Artificial Sequence: Synthetic oligonucleotide
  Antisense Strand to SEQ ID NO: 478975
ucaacaguuaguuauucag

SEQ ID NO: 478977 - RNA, 19 nt, Artificial Sequence
  Description of Artificial Sequence: Synthetic oligonucleotide
  Sense strand starting at position 2754 of SEQ ID NO: 317285
acucaaagauuugaguuua

SEQ ID NO: 478978 - RNA, 19 nt, Artificial Sequence
  Description of Artificial Sequence: Synthetic oligonucleotide
  Antisense Strand to SEQ ID NO: 478977
uaaacucaaaucuuugagu

SEQ ID NO: 478979 - RNA, 19 nt, Artificial Sequence
  Description of Artificial Sequence: Synthetic oligonucleotide
  Sense strand starting at position 2766 of SEQ ID NO: 317285
gaguuuaauugagcugggu

SEQ ID NO: 478980 - RNA, 19 nt, Artificial Sequence
  Description of Artificial Sequence: Synthetic oligonucleotide
  Antisense Strand to SEQ ID NO: 478979
acccagcucaauuaaacuc

SEQ ID NO: 478981 - RNA, 19 nt, Artificial Sequence
  Description of Artificial Sequence: Synthetic oligonucleotide
  Sense strand starting at position 2883 of SEQ ID NO: 317285
aggcaaauaguaugugcaa

SEQ ID NO: 478982 - RNA, 19 nt, Artificial Sequence
  Description of Artificial Sequence: Synthetic oligonucleotide
  Antisense Strand to SEQ ID NO: 478981
uugcacauacuauuugccu

SEQ ID NO: 478983 - RNA, 19 nt, Artificial Sequence
  Description of Artificial Sequence: Synthetic oligonucleotide
  Sense strand starting at position 2884 of SEQ ID NO: 317285
ggcaaauaguaugugcaaa

SEQ ID NO: 478984 - RNA, 19 nt, Artificial Sequence
  Description of Artificial Sequence: Synthetic oligonucleotide
  Antisense Strand to SEQ ID NO: 478983
uuugcacauacuauuugcc

SEQ ID NO: 478985 - RNA, 19 nt, Artificial Sequence
  Description of Artificial Sequence: Synthetic oligonucleotide
  Sense strand starting at position 2965 of SEQ ID NO: 317285
agcauaguuguagagggaa

SEQ ID NO: 478986 - RNA, 19 nt, Artificial Sequence
  Description of Artificial Sequence: Synthetic oligonucleotide
  Antisense Strand to SEQ ID NO: 478985
uucccucuacaacuaugcu

SEQ ID NO: 478987 - RNA, 19 nt, Artificial Sequence
  Description of Artificial Sequence: Synthetic oligonucleotide
  Sense strand starting at position 2967 of SEQ ID NO: 317285
cauaguuguagagggaauc

SEQ ID NO: 478988 - RNA, 19 nt, Artificial Sequence
  Description of Artificial Sequence: Synthetic oligonucleotide
  Antisense Strand to SEQ ID NO: 478987
gauucccucuacaacuaug

SEQ ID NO: 478989 - RNA, 19 nt, Artificial Sequence
  Description of Artificial Sequence: Synthetic oligonucleotide
  Sense strand starting at position 2968 of SEQ ID NO: 317285
auaguuguagagggaauca

SEQ ID NO: 478990 - RNA, 19 nt, Artificial Sequence
  Description of Artificial Sequence: Synthetic oligonucleotide
  Antisense Strand to SEQ ID NO: 478989
ugauucccucuacaacuau

SEQ ID NO: 478991 - RNA, 19 nt, Artificial Sequence
  Description of Artificial Sequence: Synthetic oligonucleotide
  Sense strand starting at position 2995 of SEQ ID NO: 317285
aggugagcauucuuaucaa

SEQ ID NO: 478992 - RNA, 19 nt, Artificial Sequence
  Description of Artificial Sequence: Synthetic oligonucleotide
  Antisense Strand to SEQ ID NO: 478991
uugauaagaaugcucaccu

SEQ ID NO: 478993 - RNA, 19 nt, Artificial Sequence
  Description of Artificial Sequence: Synthetic oligonucleotide
  Sense strand starting at position 2998 of SEQ ID NO: 317285
ugagcauucuuaucaauag

SEQ ID NO: 478994 - RNA, 19 nt, Artificial Sequence
  Description of Artificial Sequence: Synthetic oligonucleotide
  Antisense Strand to SEQ ID NO: 478993
cuauugauaagaaugcuca

SEQ ID NO: 478995 - RNA, 19 nt, Artificial Sequence
  Description of Artificial Sequence: Synthetic oligonucleotide
  Sense strand starting at position 3111 of SEQ ID NO: 317285
gagccuucugaagagcaca

SEQ ID NO: 478996 - RNA, 19 nt, Artificial Sequence
  Description of Artificial Sequence: Synthetic oligonucleotide
  Antisense Strand to SEQ ID NO: 478995
ugugcucuucagaaggcuc

SEQ ID NO: 478997 - RNA, 19 nt, Artificial Sequence
  Description of Artificial Sequence: Synthetic oligonucleotide
  Sense strand starting at position 3593 of SEQ ID NO: 317285
gccagaucaccauggugau

SEQ ID NO: 478998 - RNA, 19 nt, Artificial Sequence
  Description of Artificial Sequence: Synthetic oligonucleotide
  Antisense Strand to SEQ ID NO: 478997
aucaccauggugaucuggc

SEQ ID NO: 478999 - RNA, 19 nt, Artificial Sequence
  Description of Artificial Sequence: Synthetic oligonucleotide
  Sense strand starting at position 3794 of SEQ ID NO: 317285
gggugagguuaauuacaga

SEQ ID NO: 479000 - RNA, 19 nt, Artificial Sequence
  Description of Artificial Sequence: Synthetic oligonucleotide
  Antisense Strand to SEQ ID NO: 478999
ucuguaauuaaccucaccc

SEQ ID NO: 479001 - RNA, 19 nt, Artificial Sequence
  Description of Artificial Sequence: Synthetic oligonucleotide
  Sense strand starting at position 3849 of SEQ ID NO: 317285
ugguaugaagcaggaaaua

SEQ ID NO: 479002 - RNA, 19 nt, Artificial Sequence
  Description of Artificial Sequence: Synthetic oligonucleotide
  Antisense Strand to SEQ ID NO: 479001
uauuuccugcuucauacca

SEQ ID NO: 479003 - RNA, 19 nt, Artificial Sequence
  Description of Artificial Sequence: Synthetic oligonucleotide
  Sense strand starting at position 68 of SEQ ID NO: 317286
agugaaacaccauguuuag

SEQ ID NO: 479004 - RNA, 19 nt, Artificial Sequence
  Description of Artificial Sequence: Synthetic oligonucleotide
  Antisense Strand to SEQ ID NO: 479003
cuaaacaugguguuucacu

SEQ ID NO: 479005 - RNA, 19 nt, Artificial Sequence
  Description of Artificial Sequence: Synthetic oligonucleotide
  Sense strand starting at position 137 of SEQ ID NO: 317286
uccauauaugcugauugca

SEQ ID NO: 479006 - RNA, 19 nt, Artificial Sequence
  Description of Artificial Sequence: Synthetic oligonucleotide
  Antisense Strand to SEQ ID NO: 479005
ugcaaucagcauauaugga

SEQ ID NO: 479007 - RNA, 19 nt, Artificial Sequence
  Description of Artificial Sequence: Synthetic oligonucleotide
  Sense strand starting at position 149 of SEQ ID NO: 317286
gauugcaucucaccgaaga

SEQ ID NO: 479008 - RNA, 19 nt, Artificial Sequence
  Description of Artificial Sequence: Synthetic oligonucleotide
  Antisense Strand to SEQ ID NO: 479007
ucuucggugagaugcaauc

SEQ ID NO: 479009 - RNA, 19 nt, Artificial Sequence
  Description of Artificial Sequence: Synthetic oligonucleotide
  Sense strand starting at position 151 of SEQ ID NO: 317286
uugcaucucaccgaagagu

SEQ ID NO: 479010 - RNA, 19 nt, Artificial Sequence
  Description of Artificial Sequence: Synthetic oligonucleotide
  Antisense Strand to SEQ ID NO: 479009
acucuucggugagaugcaa

SEQ ID NO: 479011 - RNA, 19 nt, Artificial Sequence
  Description of Artificial Sequence: Synthetic oligonucleotide
  Sense strand starting at position 154 of SEQ ID NO: 317286
caucucaccgaagaguuua

SEQ ID NO: 479012 - RNA, 19 nt, Artificial Sequence
  Description of Artificial Sequence: Synthetic oligonucleotide
  Antisense Strand to SEQ ID NO: 479011
uaaacucuucggugagaug

SEQ ID NO: 479013 - RNA, 19 nt, Artificial Sequence
  Description of Artificial Sequence: Synthetic oligonucleotide
  Sense strand starting at position 863 of SEQ ID NO: 317286
gagauccaguguccuuuaa

SEQ ID NO: 479014 - RNA, 19 nt, Artificial Sequence
  Description of Artificial Sequence: Synthetic oligonucleotide
  Antisense Strand to SEQ ID NO: 479013
uuaaaggacacuggaucuc

SEQ ID NO: 479015 - RNA, 19 nt, Artificial Sequence
  Description of Artificial Sequence: Synthetic oligonucleotide
  Sense strand starting at position 865 of SEQ ID NO: 317286
gauccaguguccuuuaagg

SEQ ID NO: 479016 - RNA, 19 nt, Artificial Sequence
  Description of Artificial Sequence: Synthetic oligonucleotide
  Antisense Strand to SEQ ID NO: 479015
ccuuaaaggacacuggauc

SEQ ID NO: 479017 - RNA, 19 nt, Artificial Sequence
  Description of Artificial Sequence: Synthetic oligonucleotide
  Sense strand starting at position 981 of SEQ ID NO: 317286
ggcucugcccuuugggaaa

SEQ ID NO: 479018 - RNA, 19 nt, Artificial Sequence
  Description of Artificial Sequence: Synthetic oligonucleotide
  Antisense Strand to SEQ ID NO: 479017
uuucccaaagggcagagcc

SEQ ID NO: 479019 - RNA, 19 nt, Artificial Sequence
  Description of Artificial Sequence: Synthetic oligonucleotide
  Sense strand starting at position 1011 of SEQ ID NO: 317286
acgccaccagcaugauuua

SEQ ID NO: 479020 - RNA, 19 nt, Artificial Sequence
  Description of Artificial Sequence: Synthetic oligonucleotide
  Antisense Strand to SEQ ID NO: 479019
uaaaucaugcugguggcgu

SEQ ID NO: 479021 - RNA, 19 nt, Artificial Sequence
  Description of Artificial Sequence: Synthetic oligonucleotide
  Sense strand starting at position 1136 of SEQ ID NO: 317286
uaggaagggcauugucaua

SEQ ID NO: 479022 - RNA, 19 nt, Artificial Sequence
  Description of Artificial Sequence: Synthetic oligonucleotide
  Antisense Strand to SEQ ID NO: 479021
uaugacaaugcccuuccua

SEQ ID NO: 479023 - RNA, 19 nt, Artificial Sequence
  Description of Artificial Sequence: Synthetic oligonucleotide
  Sense strand starting at position 1697 of SEQ ID NO: 317286
cacaguucguaacugggaa

SEQ ID NO: 479024 - RNA, 19 nt, Artificial Sequence
  Description of Artificial Sequence: Synthetic oligonucleotide
  Antisense Strand to SEQ ID NO: 479023
uucccaguuacgaacugug

SEQ ID NO: 479025 - RNA, 19 nt, Artificial Sequence
  Description of Artificial Sequence: Synthetic oligonucleotide
  Sense strand starting at position 1698 of SEQ ID NO: 317286
acaguucguaacugggaau

SEQ ID NO: 479026 - RNA, 19 nt, Artificial Sequence
  Description of Artificial Sequence: Synthetic oligonucleotide
  Antisense Strand to SEQ ID NO: 479025
auucccaguuacgaacugu

SEQ ID NO: 479027 - RNA, 19 nt, Artificial Sequence
  Description of Artificial Sequence: Synthetic oligonucleotide
  Sense strand starting at position 1810 of SEQ ID NO: 317286
auagcacgucguguuaaca

SEQ ID NO: 479028 - RNA, 19 nt, Artificial Sequence
  Description of Artificial Sequence: Synthetic oligonucleotide
  Antisense Strand to SEQ ID NO: 479027
uguuaacacgacgugcuau

SEQ ID NO: 479029 - RNA, 19 nt, Artificial Sequence
  Description of Artificial Sequence: Synthetic oligonucleotide
  Sense strand starting at position 2222 of SEQ ID NO: 317286
caggauucccugugcaaac

SEQ ID NO: 479030 - RNA, 19 nt, Artificial Sequence
  Description of Artificial Sequence: Synthetic oligonucleotide
  Antisense Strand to SEQ ID NO: 479029
guuugcacagggaauccug

SEQ ID NO: 479031 - RNA, 19 nt, Artificial Sequence
  Description of Artificial Sequence: Synthetic oligonucleotide
  Sense strand starting at position 2298 of SEQ ID NO: 317286
ucagaaauguucucugaua

SEQ ID NO: 479032 - RNA, 19 nt, Artificial Sequence
  Description of Artificial Sequence: Synthetic oligonucleotide
  Antisense Strand to SEQ ID NO: 479031
uaucagagaacauuucuga

SEQ ID NO: 479033 - RNA, 19 nt, Artificial Sequence
  Description of Artificial Sequence: Synthetic oligonucleotide
  Sense strand starting at position 2483 of SEQ ID NO: 317286
ugacaauuguaauuguaug

SEQ ID NO: 479034 - RNA, 19 nt, Artificial Sequence
  Description of Artificial Sequence: Synthetic oligonucleotide
  Antisense Strand to SEQ ID NO: 479033
cauacaauuacaauuguca

SEQ ID NO: 479035 - RNA, 19 nt, Artificial Sequence
  Description of Artificial Sequence: Synthetic oligonucleotide
  Sense strand starting at position 2525 of SEQ ID NO: 317286
agacuugagucaucuacua

SEQ ID NO: 479036 - RNA, 19 nt, Artificial Sequence
  Description of Artificial Sequence: Synthetic oligonucleotide
  Antisense Strand to SEQ ID NO: 479035
uaguagaugacucaagucu

SEQ ID NO: 479037 - RNA, 19 nt, Artificial Sequence
  Description of Artificial Sequence: Synthetic oligonucleotide
  Sense strand starting at position 2553 of SEQ ID NO: 317286
aacgcuggguuaguaagau

SEQ ID NO: 479038 - RNA, 19 nt, Artificial Sequence
  Description of Artificial Sequence: Synthetic oligonucleotide
  Antisense Strand to SEQ ID NO: 479037
aucuuacuaacccagcguu

SEQ ID NO: 479039 - RNA, 19 nt, Artificial Sequence
  Description of Artificial Sequence: Synthetic oligonucleotide
  Sense strand starting at position 2559 of SEQ ID NO: 317286
ggguuaguaagaugccuuu

SEQ ID NO: 479040 - RNA, 19 nt, Artificial Sequence
  Description of Artificial Sequence: Synthetic oligonucleotide
  Antisense Strand to SEQ ID NO: 479039
aaaggcaucuuacuaaccc

SEQ ID NO: 479041 - RNA, 19 nt, Artificial Sequence
  Description of Artificial Sequence: Synthetic oligonucleotide
  Sense strand starting at position 2612 of SEQ ID NO: 317286
gauguagauucagugggua

SEQ ID NO: 479042 - RNA, 19 nt, Artificial Sequence
  Description of Artificial Sequence: Synthetic oligonucleotide
  Antisense Strand to SEQ ID NO: 479041
uacccacugaaucuacauc

SEQ ID NO: 479043 - RNA, 19 nt, Artificial Sequence
  Description of Artificial Sequence: Synthetic oligonucleotide
  Sense strand starting at position 2683 of SEQ ID NO: 317286
gugaguugugaagauaggu

SEQ ID NO: 479044 - RNA, 19 nt, Artificial Sequence
  Description of Artificial Sequence: Synthetic oligonucleotide
  Antisense Strand to SEQ ID NO: 479043
accuaucuucacaacucac

SEQ ID NO: 479045 - RNA, 19 nt, Artificial Sequence
  Description of Artificial Sequence: Synthetic oligonucleotide
  Sense strand starting at position 2688 of SEQ ID NO: 317286
uugugaagauagguaauau

SEQ ID NO: 479046 - RNA, 19 nt, Artificial Sequence
  Description of Artificial Sequence: Synthetic oligonucleotide
  Antisense Strand to SEQ ID NO: 479045
auauuaccuaucuucacaa

SEQ ID NO: 479047 - RNA, 19 nt, Artificial Sequence
  Description of Artificial Sequence: Synthetic oligonucleotide
  Sense strand starting at position 2823 of SEQ ID NO: 317286
cuuucuuucugauugagag

SEQ ID NO: 479048 - RNA, 19 nt, Artificial Sequence
  Description of Artificial Sequence: Synthetic oligonucleotide
  Antisense Strand to SEQ ID NO: 479047
cucucaaucagaaagaaag

SEQ ID NO: 479049 - RNA, 19 nt, Artificial Sequence
  Description of Artificial Sequence: Synthetic oligonucleotide
  Sense strand starting at position 2824 of SEQ ID NO: 317286
uuucuuucugauugagaga

SEQ ID NO: 479050 - RNA, 19 nt, Artificial Sequence
  Description of Artificial Sequence: Synthetic oligonucleotide
  Antisense Strand to SEQ ID NO: 479049
ucucucaaucagaaagaaa

SEQ ID NO: 479051 - RNA, 19 nt, Artificial Sequence
  Description of Artificial Sequence: Synthetic oligonucleotide
  Sense strand starting at position 2827 of SEQ ID NO: 317286
cuuucugauugagagauuu

SEQ ID NO: 479052 - RNA, 19 nt, Artificial Sequence
  Description of Artificial Sequence: Synthetic oligonucleotide
  Antisense Strand to SEQ ID NO: 479051
aaaucucucaaucagaaag

SEQ ID NO: 479053 - RNA, 19 nt, Artificial Sequence
  Description of Artificial Sequence: Synthetic oligonucleotide
  Sense strand starting at position 2864 of SEQ ID NO: 317286
auguuaagagaaugaucuu

SEQ ID NO: 479054 - RNA, 19 nt, Artificial Sequence
  Description of Artificial Sequence: Synthetic oligonucleotide
  Antisense Strand to SEQ ID NO: 479053
aagaucauucucuuaacau

SEQ ID NO: 479055 - RNA, 19 nt, Artificial Sequence
  Description of Artificial Sequence: Synthetic oligonucleotide
  Sense strand starting at position 2973 of SEQ ID NO: 317286
uagaaaucucaugggugau

SEQ ID NO: 479056 - RNA, 19 nt, Artificial Sequence
  Description of Artificial Sequence: Synthetic oligonucleotide
  Antisense Strand to SEQ ID NO: 479055
aucacccaugagauuucua

SEQ ID NO: 479057 - RNA, 19 nt, Artificial Sequence
  Description of Artificial Sequence: Synthetic oligonucleotide
  Sense strand starting at position 2974 of SEQ ID NO: 317286
agaaaucucaugggugauu

SEQ ID NO: 479058 - RNA, 19 nt, Artificial Sequence
  Description of Artificial Sequence: Synthetic oligonucleotide
  Antisense Strand to SEQ ID NO: 479057
aaucacccaugagauuucu

SEQ ID NO: 479059 - RNA, 19 nt, Artificial Sequence
  Description of Artificial Sequence: Synthetic oligonucleotide
  Sense strand starting at position 2987 of SEQ ID NO: 317286
gugauuuccucuuuaugca

SEQ ID NO: 479060 - RNA, 19 nt, Artificial Sequence
  Description of Artificial Sequence: Synthetic oligonucleotide
  Antisense Strand to SEQ ID NO: 479059
ugcauaaagaggaaaucac

SEQ ID NO: 479061 - RNA, 19 nt, Artificial Sequence
  Description of Artificial Sequence: Synthetic oligonucleotide
  Sense strand starting at position 3050 of SEQ ID NO: 317286
guaauagcauuugaaacau

SEQ ID NO: 479062 - RNA, 19 nt, Artificial Sequence
  Description of Artificial Sequence: Synthetic oligonucleotide
  Antisense Strand to SEQ ID NO: 479061
auguuucaaaugcuauuac

SEQ ID NO: 479063 - RNA, 19 nt, Artificial Sequence
  Description of Artificial Sequence: Synthetic oligonucleotide
  Sense strand starting at position 3187 of SEQ ID NO: 317286
agugaauauucgguucuca

SEQ ID NO: 479064 - RNA, 19 nt, Artificial Sequence
  Description of Artificial Sequence: Synthetic oligonucleotide
  Antisense Strand to SEQ ID NO: 479063
ugagaaccgaauauucacu

SEQ ID NO: 479065 - RNA, 19 nt, Artificial Sequence
  Description of Artificial Sequence: Synthetic oligonucleotide
  Sense strand starting at position 3191 of SEQ ID NO: 317286
aauauucgguucucaggau

SEQ ID NO: 479066 - RNA, 19 nt, Artificial Sequence
  Description of Artificial Sequence: Synthetic oligonucleotide
  Antisense Strand to SEQ ID NO: 479065
auccugagaaccgaauauu

SEQ ID NO: 479067 - RNA, 19 nt, Artificial Sequence
  Description of Artificial Sequence: Synthetic oligonucleotide
  Sense strand starting at position 3203 of SEQ ID NO: 317286
ucaggauucucagcugcca

SEQ ID NO: 479068 - RNA, 19 nt, Artificial Sequence
  Description of Artificial Sequence: Synthetic oligonucleotide
  Antisense Strand to SEQ ID NO: 479067
uggcagcugagaauccuga

SEQ ID NO: 479069 - RNA, 19 nt, Artificial Sequence
  Description of Artificial Sequence: Synthetic oligonucleotide
  Sense strand starting at position 3235 of SEQ ID NO: 317286
uuguuugcccuggauuacu

SEQ ID NO: 479070 - RNA, 19 nt, Artificial Sequence
  Description of Artificial Sequence: Synthetic oligonucleotide
  Antisense Strand to SEQ ID NO: 479069
aguaauccagggcaaacaa

SEQ ID NO: 479071 - RNA, 19 nt, Artificial Sequence
  Description of Artificial Sequence: Synthetic oligonucleotide
  Sense strand starting at position 3243 of SEQ ID NO: 317286
ccuggauuacuguauugau

SEQ ID NO: 479072 - RNA, 19 nt, Artificial Sequence
  Description of Artificial Sequence: Synthetic oligonucleotide
  Antisense Strand to SEQ ID NO: 479071
aucaauacaguaauccagg

SEQ ID NO: 479073 - RNA, 19 nt, Artificial Sequence
  Description of Artificial Sequence: Synthetic oligonucleotide
  Sense strand starting at position 3322 of SEQ ID NO: 317286
agucuuguugcggaagaug

SEQ ID NO: 479074 - RNA, 19 nt, Artificial Sequence
  Description of Artificial Sequence: Synthetic oligonucleotide
  Antisense Strand to SEQ ID NO: 479073
caucuuccgcaacaagacu

SEQ ID NO: 479075 - RNA, 19 nt, Artificial Sequence
  Description of Artificial Sequence: Synthetic oligonucleotide
  Sense strand starting at position 3325 of SEQ ID NO: 317286
cuuguugcggaagaugaua

SEQ ID NO: 479076 - RNA, 19 nt, Artificial Sequence
  Description of Artificial Sequence: Synthetic oligonucleotide
  Antisense Strand to SEQ ID NO: 479075
uaucaucuuccgcaacaag

SEQ ID NO: 479077 - RNA, 19 nt, Artificial Sequence
  Description of Artificial Sequence: Synthetic oligonucleotide
  Sense strand starting at position 3417 of SEQ ID NO: 317286
gagcaaauguagucaaaug

SEQ ID NO: 479078 - RNA, 19 nt, Artificial Sequence
  Description of Artificial Sequence: Synthetic oligonucleotide
  Antisense Strand to SEQ ID NO: 479077
cauuugacuacauuugcuc

SEQ ID NO: 479079 - RNA, 19 nt, Artificial Sequence
  Description of Artificial Sequence: Synthetic oligonucleotide
  Sense strand starting at position 3452 of SEQ ID NO: 317286
gcagucccucgauaguuga

SEQ ID NO: 479080 - RNA, 19 nt, Artificial Sequence
  Description of Artificial Sequence: Synthetic oligonucleotide
  Antisense Strand to SEQ ID NO: 479079
ucaacuaucgagggacugc

SEQ ID NO: 479081 - RNA, 19 nt, Artificial Sequence
  Description of Artificial Sequence: Synthetic oligonucleotide
  Sense strand starting at position 3947 of SEQ ID NO: 317286
ucaguuugagcacaaacau

SEQ ID NO: 479082 - RNA, 19 nt, Artificial Sequence
  Description of Artificial Sequence: Synthetic oligonucleotide
  Antisense Strand to SEQ ID NO: 479081
auguuugugcucaaacuga

SEQ ID NO: 479083 - RNA, 19 nt, Artificial Sequence
  Description of Artificial Sequence: Synthetic oligonucleotide
  Sense strand starting at position 266 of SEQ ID NO: 317287
caggauucccugugcaaac

SEQ ID NO: 479084 - RNA, 19 nt, Artificial Sequence
  Description of Artificial Sequence: Synthetic oligonucleotide
  Antisense Strand to SEQ ID NO: 479083
guuugcacagggaauccug

SEQ ID NO: 479085 - RNA, 19 nt, Artificial Sequence
  Description of Artificial Sequence: Synthetic oligonucleotide
  Sense strand starting at position 342 of SEQ ID NO: 317287
ucagaaauguucucugaua

SEQ ID NO: 479086 - RNA, 19 nt, Artificial Sequence
  Description of Artificial Sequence: Synthetic oligonucleotide
  Antisense Strand to SEQ ID NO: 479085
uaucagagaacauuucuga

SEQ ID NO: 479087 - RNA, 19 nt, Artificial Sequence
  Description of Artificial Sequence: Synthetic oligonucleotide
  Sense strand starting at position 527 of SEQ ID NO: 317287
ugacaauuguaauuguaug

SEQ ID NO: 479088 - RNA, 19 nt, Artificial Sequence
  Description of Artificial Sequence: Synthetic oligonucleotide
  Antisense Strand to SEQ ID NO: 479087
cauacaauuacaauuguca

SEQ ID NO: 479089 - RNA, 19 nt, Artificial Sequence
  Description of Artificial Sequence: Synthetic oligonucleotide
  Sense strand starting at position 569 of SEQ ID NO: 317287
agacuugagucaucuacua

SEQ ID NO: 479090 - RNA, 19 nt, Artificial Sequence
  Description of Artificial Sequence: Synthetic oligonucleotide
  Antisense Strand to SEQ ID NO: 479089
uaguagaugacucaagucu

SEQ ID NO: 479091 - RNA, 19 nt, Artificial Sequence
  Description of Artificial Sequence: Synthetic oligonucleotide
  Sense strand starting at position 656 of SEQ ID NO: 317287
gauguagauucagugggua

SEQ ID NO: 479092 - RNA, 19 nt, Artificial Sequence
  Description of Artificial Sequence: Synthetic oligonucleotide
  Antisense Strand to SEQ ID NO: 479091
uacccacugaaucuacauc

SEQ ID NO: 479093 - RNA, 19 nt, Artificial Sequence
  Description of Artificial Sequence: Synthetic oligonucleotide
  Sense strand starting at position 727 of SEQ ID NO: 317287
gugaguugugaagauaggu

SEQ ID NO: 479094 - RNA, 19 nt, Artificial Sequence
  Description of Artificial Sequence: Synthetic oligonucleotide
  Antisense Strand to SEQ ID NO: 479093
accuaucuucacaacucac

SEQ ID NO: 479095 - RNA, 19 nt, Artificial Sequence
  Description of Artificial Sequence: Synthetic oligonucleotide
  Sense strand starting at position 732 of SEQ ID NO: 317287
uugugaagauagguaauau

SEQ ID NO: 479096 - RNA, 19 nt, Artificial Sequence
  Description of Artificial Sequence: Synthetic oligonucleotide
  Antisense Strand to SEQ ID NO: 479095
auauuaccuaucuucacaa

SEQ ID NO: 479097 - RNA, 19 nt, Artificial Sequence
  Description of Artificial Sequence: Synthetic oligonucleotide
  Sense strand starting at position 867 of SEQ ID NO: 317287
cuuucuuucugauugagag

SEQ ID NO: 479098 - RNA, 19 nt, Artificial Sequence
  Description of Artificial Sequence: Synthetic oligonucleotide
  Antisense Strand to SEQ ID NO: 479097
cucucaaucagaaagaaag

SEQ ID NO: 479099 - RNA, 19 nt, Artificial Sequence
  Description of Artificial Sequence: Synthetic oligonucleotide
  Sense strand starting at position 868 of SEQ ID NO: 317287
uuucuuucugauugagaga

SEQ ID NO: 479100 - RNA, 19 nt, Artificial Sequence
  Description of Artificial Sequence: Synthetic oligonucleotide
  Antisense Strand to SEQ ID NO: 479099
ucucucaaucagaaagaaa

SEQ ID NO: 479101 - RNA, 19 nt, Artificial Sequence
  Description of Artificial Sequence: Synthetic oligonucleotide
  Sense strand starting at position 871 of SEQ ID NO: 317287
cuuucugauugagagauuu

SEQ ID NO: 479102 - RNA, 19 nt, Artificial Sequence
  Description of Artificial Sequence: Synthetic oligonucleotide
  Antisense Strand to SEQ ID NO: 479101
aaaucucucaaucagaaag

SEQ ID NO: 479103 - RNA, 19 nt, Artificial Sequence
  Description of Artificial Sequence: Synthetic oligonucleotide
  Sense strand starting at position 908 of SEQ ID NO: 317287
auguuaagagaaugaucuu

SEQ ID NO: 479104 - RNA, 19 nt, Artificial Sequence
  Description of Artificial Sequence: Synthetic oligonucleotide
  Antisense Strand to SEQ ID NO: 479103
aagaucauucucuuaacau

SEQ ID NO: 479105 - RNA, 19 nt, Artificial Sequence
  Description of Artificial Sequence: Synthetic oligonucleotide
  Sense strand starting at position 1017 of SEQ ID NO: 317287
uagaaaucucaugggugau

SEQ ID NO: 479106 - RNA, 19 nt, Artificial Sequence
  Description of Artificial Sequence: Synthetic oligonucleotide
  Antisense Strand to SEQ ID NO: 479105
aucacccaugagauuucua

SEQ ID NO: 479107 - RNA, 19 nt, Artificial Sequence
  Description of Artificial Sequence: Synthetic oligonucleotide
  Sense strand starting at position 1018 of SEQ ID NO: 317287
agaaaucucaugggugauu

SEQ ID NO: 479108 - RNA, 19 nt, Artificial Sequence
  Description of Artificial Sequence: Synthetic oligonucleotide
  Antisense Strand to SEQ ID NO: 479107
aaucacccaugagauuucu

SEQ ID NO: 479109 - RNA, 19 nt, Artificial Sequence
  Description of Artificial Sequence: Synthetic oligonucleotide
  Sense strand starting at position 1031 of SEQ ID NO: 317287
gugauuuccucuuuaugca

SEQ ID NO: 479110 - RNA, 19 nt, Artificial Sequence
  Description of Artificial Sequence: Synthetic oligonucleotide
  Antisense Strand to SEQ ID NO: 479109
ugcauaaagaggaaaucac

SEQ ID NO: 479111 - RNA, 19 nt, Artificial Sequence
  Description of Artificial Sequence: Synthetic oligonucleotide
  Sense strand starting at position 1094 of SEQ ID NO: 317287
guaauagcauuugaaacau

SEQ ID NO: 479112 - RNA, 19 nt, Artificial Sequence
  Description of Artificial Sequence: Synthetic oligonucleotide
  Antisense Strand to SEQ ID NO: 479111
auguuucaaaugcuauuac

SEQ ID NO: 479113 - RNA, 19 nt, Artificial Sequence
  Description of Artificial Sequence: Synthetic oligonucleotide
  Sense strand starting at position 1231 of SEQ ID NO: 317287
agugaauauucgguucuca

SEQ ID NO: 479114 - RNA, 19 nt, Artificial Sequence
  Description of Artificial Sequence: Synthetic oligonucleotide
  Antisense Strand to SEQ ID NO: 479113
ugagaaccgaauauucacu

SEQ ID NO: 479115 - RNA, 19 nt, Artificial Sequence
  Description of Artificial Sequence: Synthetic oligonucleotide
  Sense strand starting at position 1235 of SEQ ID NO: 317287
aauauucgguucucaggau

SEQ ID NO: 479116 - RNA, 19 nt, Artificial Sequence
  Description of Artificial Sequence: Synthetic oligonucleotide
  Antisense Strand to SEQ ID NO: 479115
auccugagaaccgaauauu

SEQ ID NO: 479117 - RNA, 19 nt, Artificial Sequence
  Description of Artificial Sequence: Synthetic oligonucleotide
  Sense strand starting at position 1279 of SEQ ID NO: 317287
uuguuugcccuggauuacu

SEQ ID NO: 479118 - RNA, 19 nt, Artificial Sequence
  Description of Artificial Sequence: Synthetic oligonucleotide
  Antisense Strand to SEQ ID NO: 479117
aguaauccagggcaaacaa

SEQ ID NO: 479119 - RNA, 19 nt, Artificial Sequence
  Description of Artificial Sequence: Synthetic oligonucleotide
  Sense strand starting at position 1287 of SEQ ID NO: 317287
ccuggauuacuguauugau

SEQ ID NO: 479120 - RNA, 19 nt, Artificial Sequence
  Description of Artificial Sequence: Synthetic oligonucleotide
  Antisense Strand to SEQ ID NO: 479119
aucaauacaguaauccagg

SEQ ID NO: 479121 - RNA, 19 nt, Artificial Sequence
  Description of Artificial Sequence: Synthetic oligonucleotide
  Sense strand starting at position 1366 of SEQ ID NO: 317287
agucuuguugcggaagaug

SEQ ID NO: 479122 - RNA, 19 nt, Artificial Sequence
  Description of Artificial Sequence: Synthetic oligonucleotide
  Antisense Strand to SEQ ID NO: 479121
caucuuccgcaacaagacu

SEQ ID NO: 479123 - RNA, 19 nt, Artificial Sequence
  Description of Artificial Sequence: Synthetic oligonucleotide
  Sense strand starting at position 1369 of SEQ ID NO: 317287
cuuguugcggaagaugaua

SEQ ID NO: 479124 - RNA, 19 nt, Artificial Sequence
  Description of Artificial Sequence: Synthetic oligonucleotide
  Antisense Strand to SEQ ID NO: 479123
uaucaucuuccgcaacaag

SEQ ID NO: 479125 - RNA, 19 nt, Artificial Sequence
  Description of Artificial Sequence: Synthetic oligonucleotide
  Sense strand starting at position 1461 of SEQ ID NO: 317287
gagcaaauguagucaaaug

SEQ ID NO: 479126 - RNA, 19 nt, Artificial Sequence
  Description of Artificial Sequence: Synthetic oligonucleotide
  Antisense Strand to SEQ ID NO: 479125
cauuugacuacauuugcuc

SEQ ID NO: 479127 - RNA, 19 nt, Artificial Sequence
  Description of Artificial Sequence: Synthetic oligonucleotide
  Sense strand starting at position 1991 of SEQ ID NO: 317287
ucaguuugagcacaaacau

SEQ ID NO: 479128 - RNA, 19 nt, Artificial Sequence
  Description of Artificial Sequence: Synthetic oligonucleotide
  Antisense Strand to SEQ ID NO: 479127
auguuugugcucaaacuga

SEQ ID NO: 479129 - RNA, 19 nt, Artificial Sequence
  Description of Artificial Sequence: Synthetic oligonucleotide
  Sense strand starting at position 2086 of SEQ ID NO: 317287
gaguguuaauuugccaucu

SEQ ID NO: 479130 - RNA, 19 nt, Artificial Sequence
  Description of Artificial Sequence: Synthetic oligonucleotide
  Antisense Strand to SEQ ID NO: 479129
agauggcaaauuaacacuc

SEQ ID NO: 479131 - RNA, 19 nt, Artificial Sequence
  Description of Artificial Sequence: Synthetic oligonucleotide
  Sense strand starting at position 2126 of SEQ ID NO: 317287
cacuguucuggagggaaca

SEQ ID NO: 479132 - RNA, 19 nt, Artificial Sequence
  Description of Artificial Sequence: Synthetic oligonucleotide
  Antisense Strand to SEQ ID NO: 479131
uguucccuccagaacagug

SEQ ID NO: 479133 - RNA, 19 nt, Artificial Sequence
  Description of Artificial Sequence: Synthetic oligonucleotide
  Sense strand starting at position 2226 of SEQ ID NO: 317287
cggcuccacuuauuacuaa

SEQ ID NO: 479134 - RNA, 19 nt, Artificial Sequence
  Description of Artificial Sequence: Synthetic oligonucleotide
  Antisense Strand to SEQ ID NO: 479133
uuaguaauaaguggagccg

SEQ ID NO: 479135 - RNA, 19 nt, Artificial Sequence
  Description of Artificial Sequence: Synthetic oligonucleotide
  Sense strand starting at position 2293 of SEQ ID NO: 317287
uuggaagaguucuauuuaa

SEQ ID NO: 479136 - RNA, 19 nt, Artificial Sequence
  Description of Artificial Sequence: Synthetic oligonucleotide
  Antisense Strand to SEQ ID NO: 479135
uuaaauagaacucuuccaa

SEQ ID NO: 479137 - RNA, 19 nt, Artificial Sequence
  Description of Artificial Sequence: Synthetic oligonucleotide
  Sense strand starting at position 2328 of SEQ ID NO: 317287
ccugacucaugcuuggaau

SEQ ID NO: 479138 - RNA, 19 nt, Artificial Sequence
  Description of Artificial Sequence: Synthetic oligonucleotide
  Antisense Strand to SEQ ID NO: 479137
auuccaagcaugagucagg

SEQ ID NO: 479139 - RNA, 19 nt, Artificial Sequence
  Description of Artificial Sequence: Synthetic oligonucleotide
  Sense strand starting at position 2329 of SEQ ID NO: 317287
cugacucaugcuuggaaua

SEQ ID NO: 479140 - RNA, 19 nt, Artificial Sequence
  Description of Artificial Sequence: Synthetic oligonucleotide
  Antisense Strand to SEQ ID NO: 479139
uauuccaagcaugagucag

SEQ ID NO: 479141 - RNA, 19 nt, Artificial Sequence
  Description of Artificial Sequence: Synthetic oligonucleotide
  Sense strand starting at position 2350 of SEQ ID NO: 317287
gugaaugcucaauacacag

SEQ ID NO: 479142 - RNA, 19 nt, Artificial Sequence
  Description of Artificial Sequence: Synthetic oligonucleotide
  Antisense Strand to SEQ ID NO: 479141
cuguguauugagcauucac

SEQ ID NO: 479143 - RNA, 19 nt, Artificial Sequence
  Description of Artificial Sequence: Synthetic oligonucleotide
  Sense strand starting at position 2629 of SEQ ID NO: 317287
gcauaaucugagcaaugca

SEQ ID NO: 479144 - RNA, 19 nt, Artificial Sequence
  Description of Artificial Sequence: Synthetic oligonucleotide
  Antisense Strand to SEQ ID NO: 479143
ugcauugcucagauuaugc

SEQ ID NO: 479145 - RNA, 19 nt, Artificial Sequence
  Description of Artificial Sequence: Synthetic oligonucleotide
  Sense strand starting at position 2879 of SEQ ID NO: 317287
cuaguaguagaauauguua

SEQ ID NO: 479146 - RNA, 19 nt, Artificial Sequence
  Description of Artificial Sequence: Synthetic oligonucleotide
  Antisense Strand to SEQ ID NO: 479145
uaacauauucuacuacuag

SEQ ID NO: 479147 - RNA, 19 nt, Artificial Sequence
  Description of Artificial Sequence: Synthetic oligonucleotide
  Sense strand starting at position 2881 of SEQ ID NO: 317287
aguaguagaauauguuaca

SEQ ID NO: 479148 - RNA, 19 nt, Artificial Sequence
  Description of Artificial Sequence: Synthetic oligonucleotide
  Antisense Strand to SEQ ID NO: 479147
uguaacauauucuacuacu

SEQ ID NO: 479149 - RNA, 19 nt, Artificial Sequence
  Description of Artificial Sequence: Synthetic oligonucleotide
  Sense strand starting at position 2892 of SEQ ID NO: 317287
auguuacagugagcuaauu

SEQ ID NO: 479150 - RNA, 19 nt, Artificial Sequence
  Description of Artificial Sequence: Synthetic oligonucleotide
  Antisense Strand to SEQ ID NO: 479149
aauuagcucacuguaacau

SEQ ID NO: 479151 - RNA, 19 nt, Artificial Sequence
  Description of Artificial Sequence: Synthetic oligonucleotide
  Sense strand starting at position 2900 of SEQ ID NO: 317287
gugagcuaauuacuaagaa

SEQ ID NO: 479152 - RNA, 19 nt, Artificial Sequence
  Description of Artificial Sequence: Synthetic oligonucleotide
  Antisense Strand to SEQ ID NO: 479151
uucuuaguaauuagcucac

SEQ ID NO: 479153 - RNA, 19 nt, Artificial Sequence
  Description of Artificial Sequence: Synthetic oligonucleotide
  Sense strand starting at position 3446 of SEQ ID NO: 317287
guuuaaugaucaucaggua

SEQ ID NO: 479154 - RNA, 19 nt, Artificial Sequence
  Description of Artificial Sequence: Synthetic oligonucleotide
  Antisense Strand to SEQ ID NO: 479153
uaccugaugaucauuaaac

SEQ ID NO: 479155 - RNA, 19 nt, Artificial Sequence
  Description of Artificial Sequence: Synthetic oligonucleotide
  Sense strand starting at position 3621 of SEQ ID NO: 317287
ccuucugaguccuuucuga

SEQ ID NO: 479156 - RNA, 19 nt, Artificial Sequence
  Description of Artificial Sequence: Synthetic oligonucleotide
  Antisense Strand to SEQ ID NO: 479155
ucagaaaggacucagaagg

SEQ ID NO: 479157 - RNA, 19 nt, Artificial Sequence
  Description of Artificial Sequence: Synthetic oligonucleotide
  Sense strand starting at position 3636 of SEQ ID NO: 317287
cugagucucuucucugaau

SEQ ID NO: 479158 - RNA, 19 nt, Artificial Sequence
  Description of Artificial Sequence: Synthetic oligonucleotide
  Antisense Strand to SEQ ID NO: 479157
auucagagaagagacucag

SEQ ID NO: 479159 - RNA, 19 nt, Artificial Sequence
  Description of Artificial Sequence: Synthetic oligonucleotide
  Sense strand starting at position 3637 of SEQ ID NO: 317287
ugagucucuucucugaauc

SEQ ID NO: 479160 - RNA, 19 nt, Artificial Sequence
  Description of Artificial Sequence: Synthetic oligonucleotide
  Antisense Strand to SEQ ID NO: 479159
gauucagagaagagacuca

SEQ ID NO: 479161 - RNA, 19 nt, Artificial Sequence
  Description of Artificial Sequence: Synthetic oligonucleotide
  Sense strand starting at position 3645 of SEQ ID NO: 317287
uucucugaaucuuugaaag

SEQ ID NO: 479162 - RNA, 19 nt, Artificial Sequence
  Description of Artificial Sequence: Synthetic oligonucleotide
  Antisense Strand to SEQ ID NO: 479161
cuuucaaagauucagagaa

SEQ ID NO: 479163 - RNA, 19 nt, Artificial Sequence
  Description of Artificial Sequence: Synthetic oligonucleotide
  Sense strand starting at position 335 of SEQ ID NO: 317288
gccagaucaccauggugau

SEQ ID NO: 479164 - RNA, 19 nt, Artificial Sequence
  Description of Artificial Sequence: Synthetic oligonucleotide
  Antisense Strand to SEQ ID NO: 479163
aucaccauggugaucuggc

SEQ ID NO: 479165 - RNA, 19 nt, Artificial Sequence
  Description of Artificial Sequence: Synthetic oligonucleotide
  Sense strand starting at position 536 of SEQ ID NO: 317288
gggugagguuaauuacaga

SEQ ID NO: 479166 - RNA, 19 nt, Artificial Sequence
  Description of Artificial Sequence: Synthetic oligonucleotide
  Antisense Strand to SEQ ID NO: 479165
ucuguaauuaaccucaccc

SEQ ID NO: 479167 - RNA, 19 nt, Artificial Sequence
  Description of Artificial Sequence: Synthetic oligonucleotide
  Sense strand starting at position 591 of SEQ ID NO: 317288
ugguaugaagcaggaaaua

SEQ ID NO: 479168 - RNA, 19 nt, Artificial Sequence
  Description of Artificial Sequence: Synthetic oligonucleotide
  Antisense Strand to SEQ ID NO: 479167
uauuuccugcuucauacca

SEQ ID NO: 479169 - RNA, 19 nt, Artificial Sequence
  Description of Artificial Sequence: Synthetic oligonucleotide
  Sense strand starting at position 750 of SEQ ID NO: 317288
agugaaacaccauguuuag

SEQ ID NO: 479170 - RNA, 19 nt, Artificial Sequence
  Description of Artificial Sequence: Synthetic oligonucleotide
  Antisense Strand to SEQ ID NO: 479169
cuaaacaugguguuucacu

SEQ ID NO: 479171 - RNA, 19 nt, Artificial Sequence
  Description of Artificial Sequence: Synthetic oligonucleotide
  Sense strand starting at position 819 of SEQ ID NO: 317288
uccauauaugcugauugca

SEQ ID NO: 479172 - RNA, 19 nt, Artificial Sequence
  Description of Artificial Sequence: Synthetic oligonucleotide
  Antisense Strand to SEQ ID NO: 479171
ugcaaucagcauauaugga

SEQ ID NO: 479173 - RNA, 19 nt, Artificial Sequence
  Description of Artificial Sequence: Synthetic oligonucleotide
  Sense strand starting at position 831 of SEQ ID NO: 317288
gauugcaucucaccgaaga

SEQ ID NO: 479174 - RNA, 19 nt, Artificial Sequence
  Description of Artificial Sequence: Synthetic oligonucleotide
  Antisense Strand to SEQ ID NO: 479173
ucuucggugagaugcaauc

SEQ ID NO: 479175 - RNA, 19 nt, Artificial Sequence
  Description of Artificial Sequence: Synthetic oligonucleotide
  Sense strand starting at position 833 of SEQ ID NO: 317288
uugcaucucaccgaagagu

SEQ ID NO: 479176 - RNA, 19 nt, Artificial Sequence
  Description of Artificial Sequence: Synthetic oligonucleotide
  Antisense Strand to SEQ ID NO: 479175
acucuucggugagaugcaa

SEQ ID NO: 479177 - RNA, 19 nt, Artificial Sequence
  Description of Artificial Sequence: Synthetic oligonucleotide
  Sense strand starting at position 836 of SEQ ID NO: 317288
caucucaccgaagaguuua

SEQ ID NO: 479178 - RNA, 19 nt, Artificial Sequence
  Description of Artificial Sequence: Synthetic oligonucleotide
  Antisense Strand to SEQ ID NO: 479177
uaaacucuucggugagaug

SEQ ID NO: 479179 - RNA, 19 nt, Artificial Sequence
  Description of Artificial Sequence: Synthetic oligonucleotide
  Sense strand starting at position 928 of SEQ ID NO: 317288
ccacuuugauguuccaguu

SEQ ID NO: 479180 - RNA, 19 nt, Artificial Sequence
  Description of Artificial Sequence: Synthetic oligonucleotide
  Antisense Strand to SEQ ID NO: 479179
aacuggaacaucaaagugg

SEQ ID NO: 479181 - RNA, 19 nt, Artificial Sequence
  Description of Artificial Sequence: Synthetic oligonucleotide
  Sense strand starting at position 1545 of SEQ ID NO: 317288
gagauccaguguccuuuaa

SEQ ID NO: 479182 - RNA, 19 nt, Artificial Sequence
  Description of Artificial Sequence: Synthetic oligonucleotide
  Antisense Strand to SEQ ID NO: 479181
uuaaaggacacuggaucuc

SEQ ID NO: 479183 - RNA, 19 nt, Artificial Sequence
  Description of Artificial Sequence: Synthetic oligonucleotide
  Sense strand starting at position 1547 of SEQ ID NO: 317288
gauccaguguccuuuaagg

SEQ ID NO: 479184 - RNA, 19 nt, Artificial Sequence
  Description of Artificial Sequence: Synthetic oligonucleotide
  Antisense Strand to SEQ ID NO: 479183
ccuuaaaggacacuggauc

SEQ ID NO: 479185 - RNA, 19 nt, Artificial Sequence
  Description of Artificial Sequence: Synthetic oligonucleotide
  Sense strand starting at position 1663 of SEQ ID NO: 317288
ggcucugcccuuugggaaa

SEQ ID NO: 479186 - RNA, 19 nt, Artificial Sequence
  Description of Artificial Sequence: Synthetic oligonucleotide
  Antisense Strand to SEQ ID NO: 479185
uuucccaaagggcagagcc

SEQ ID NO: 479187 - RNA, 19 nt, Artificial Sequence
  Description of Artificial Sequence: Synthetic oligonucleotide
  Sense strand starting at position 1693 of SEQ ID NO: 317288
acgccaccagcaugauuua

SEQ ID NO: 479188 - RNA, 19 nt, Artificial Sequence
  Description of Artificial Sequence: Synthetic oligonucleotide
  Antisense Strand to SEQ ID NO: 479187
uaaaucaugcugguggcgu

SEQ ID NO: 479189 - RNA, 19 nt, Artificial Sequence
  Description of Artificial Sequence: Synthetic oligonucleotide
  Sense strand starting at position 1818 of SEQ ID NO: 317288
uaggaagggcauugucaua

SEQ ID NO: 479190 - RNA, 19 nt, Artificial Sequence
  Description of Artificial Sequence: Synthetic oligonucleotide
  Antisense Strand to SEQ ID NO: 479189
uaugacaaugcccuuccua

SEQ ID NO: 479191 - RNA, 19 nt, Artificial Sequence
  Description of Artificial Sequence: Synthetic oligonucleotide
  Sense strand starting at position 2379 of SEQ ID NO: 317288
cacaguucguaacugggaa

SEQ ID NO: 479192 - RNA, 19 nt, Artificial Sequence
  Description of Artificial Sequence: Synthetic oligonucleotide
  Antisense Strand to SEQ ID NO: 479191
uucccaguuacgaacugug

SEQ ID NO: 479193 - RNA, 19 nt, Artificial Sequence
  Description of Artificial Sequence: Synthetic oligonucleotide
  Sense strand starting at position 2380 of SEQ ID NO: 317288
acaguucguaacugggaau

SEQ ID NO: 479194 - RNA, 19 nt, Artificial Sequence
  Description of Artificial Sequence: Synthetic oligonucleotide
  Antisense Strand to SEQ ID NO: 479193
auucccaguuacgaacugu

SEQ ID NO: 479195 - RNA, 19 nt, Artificial Sequence
  Description of Artificial Sequence: Synthetic oligonucleotide
  Sense strand starting at position 2492 of SEQ ID NO: 317288
auagcacgucguguuaaca

SEQ ID NO: 479196 - RNA, 19 nt, Artificial Sequence
  Description of Artificial Sequence: Synthetic oligonucleotide
  Antisense Strand to SEQ ID NO: 479195
uguuaacacgacgugcuau

SEQ ID NO: 479197 - RNA, 19 nt, Artificial Sequence
  Description of Artificial Sequence: Synthetic oligonucleotide
  Sense strand starting at position 2904 of SEQ ID NO: 317288
caggauucccugugcaaac

SEQ ID NO: 479198 - RNA, 19 nt, Artificial Sequence
  Description of Artificial Sequence: Synthetic oligonucleotide
  Antisense Strand to SEQ ID NO: 479197
guuugcacagggaauccug

SEQ ID NO: 479199 - RNA, 19 nt, Artificial Sequence
  Description of Artificial Sequence: Synthetic oligonucleotide
  Sense strand starting at position 2980 of SEQ ID NO: 317288
ucagaaauguucucugaua

SEQ ID NO: 479200 - RNA, 19 nt, Artificial Sequence
  Description of Artificial Sequence: Synthetic oligonucleotide
  Antisense Strand to SEQ ID NO: 479199
uaucagagaacauuucuga

SEQ ID NO: 479201 - RNA, 19 nt, Artificial Sequence
  Description of Artificial Sequence: Synthetic oligonucleotide
  Sense strand starting at position 3165 of SEQ ID NO: 317288
ugacaauuguaauuguaug

SEQ ID NO: 479202 - RNA, 19 nt, Artificial Sequence
  Description of Artificial Sequence: Synthetic oligonucleotide
  Antisense Strand to SEQ ID NO: 479201
cauacaauuacaauuguca

SEQ ID NO: 479203 - RNA, 19 nt, Artificial Sequence
  Description of Artificial Sequence: Synthetic oligonucleotide
  Sense strand starting at position 3207 of SEQ ID NO: 317288
agacuugagucaucuacua

SEQ ID NO: 479204 - RNA, 19 nt, Artificial Sequence
  Description of Artificial Sequence: Synthetic oligonucleotide
  Antisense Strand to SEQ ID NO: 479203
uaguagaugacucaagucu

SEQ ID NO: 479205 - RNA, 19 nt, Artificial Sequence
  Description of Artificial Sequence: Synthetic oligonucleotide
  Sense strand starting at position 3235 of SEQ ID NO: 317288
aacgcuggguuaguaagau

SEQ ID NO: 479206 - RNA, 19 nt, Artificial Sequence
  Description of Artificial Sequence: Synthetic oligonucleotide
  Antisense Strand to SEQ ID NO: 479205
aucuuacuaacccagcguu

SEQ ID NO: 479207 - RNA, 19 nt, Artificial Sequence
  Description of Artificial Sequence: Synthetic oligonucleotide
  Sense strand starting at position 3241 of SEQ ID NO: 317288
ggguuaguaagaugccuuu

SEQ ID NO: 479208 - RNA, 19 nt, Artificial Sequence
  Description of Artificial Sequence: Synthetic oligonucleotide
  Antisense Strand to SEQ ID NO: 479207
aaaggcaucuuacuaaccc

SEQ ID NO: 479209 - RNA, 19 nt, Artificial Sequence
  Description of Artificial Sequence: Synthetic oligonucleotide
  Sense strand starting at position 3294 of SEQ ID NO: 317288
gauguagauucagugggua

SEQ ID NO: 479210 - RNA, 19 nt, Artificial Sequence
  Description of Artificial Sequence: Synthetic oligonucleotide
  Antisense Strand to SEQ ID NO: 479209
uacccacugaaucuacauc

SEQ ID NO: 479211 - RNA, 19 nt, Artificial Sequence
  Description of Artificial Sequence: Synthetic oligonucleotide
  Sense strand starting at position 3365 of SEQ ID NO: 317288
gugaguugugaagauaggu

SEQ ID NO: 479212 - RNA, 19 nt, Artificial Sequence
  Description of Artificial Sequence: Synthetic oligonucleotide
  Antisense Strand to SEQ ID NO: 479211
accuaucuucacaacucac

SEQ ID NO: 479213 - RNA, 19 nt, Artificial Sequence
  Description of Artificial Sequence: Synthetic oligonucleotide
  Sense strand starting at position 3370 of SEQ ID NO: 317288
uugugaagauagguaauau

SEQ ID NO: 479214 - RNA, 19 nt, Artificial Sequence
  Description of Artificial Sequence: Synthetic oligonucleotide
  Antisense Strand to SEQ ID NO: 479213
auauuaccuaucuucacaa

SEQ ID NO: 479215 - RNA, 19 nt, Artificial Sequence
  Description of Artificial Sequence: Synthetic oligonucleotide
  Sense strand starting at position 3505 of SEQ ID NO: 317288
cuuucuuucugauugagag

SEQ ID NO: 479216 - RNA, 19 nt, Artificial Sequence
  Description of Artificial Sequence: Synthetic oligonucleotide
  Antisense Strand to SEQ ID NO: 479215
cucucaaucagaaagaaag

SEQ ID NO: 479217 - RNA, 19 nt, Artificial Sequence
  Description of Artificial Sequence: Synthetic oligonucleotide
  Sense strand starting at position 3506 of SEQ ID NO: 317288
uuucuuucugauugagaga

SEQ ID NO: 479218 - RNA, 19 nt, Artificial Sequence
  Description of Artificial Sequence: Synthetic oligonucleotide
  Antisense Strand to SEQ ID NO: 479217
ucucucaaucagaaagaaa

SEQ ID NO: 479219 - RNA, 19 nt, Artificial Sequence
  Description of Artificial Sequence: Synthetic oligonucleotide
  Sense strand starting at position 3509 of SEQ ID NO: 317288
cuuucugauugagagauuu

SEQ ID NO: 479220 - RNA, 19 nt, Artificial Sequence
  Description of Artificial Sequence: Synthetic oligonucleotide
  Antisense Strand to SEQ ID NO: 479219
aaaucucucaaucagaaag

SEQ ID NO: 479221 - RNA, 19 nt, Artificial Sequence
  Description of Artificial Sequence: Synthetic oligonucleotide
  Sense strand starting at position 3546 of SEQ ID NO: 317288
auguuaagagaaugaucuu

SEQ ID NO: 479222 - RNA, 19 nt, Artificial Sequence
  Description of Artificial Sequence: Synthetic oligonucleotide
  Antisense Strand to SEQ ID NO: 479221
aagaucauucucuuaacau

SEQ ID NO: 479223 - RNA, 19 nt, Artificial Sequence
  Description of Artificial Sequence: Synthetic oligonucleotide
  Sense strand starting at position 3552 of SEQ ID NO: 317288
agagaaugaucuuaauucu

SEQ ID NO: 479224 - RNA, 19 nt, Artificial Sequence
  Description of Artificial Sequence: Synthetic oligonucleotide
  Antisense Strand to SEQ ID NO: 479223
agaauuaagaucauucucu

SEQ ID NO: 479225 - RNA, 19 nt, Artificial Sequence
  Description of Artificial Sequence: Synthetic oligonucleotide
  Sense strand starting at position 3655 of SEQ ID NO: 317288
uagaaaucucaugggugau

SEQ ID NO: 479226 - RNA, 19 nt, Artificial Sequence
  Description of Artificial Sequence: Synthetic oligonucleotide
  Antisense Strand to SEQ ID NO: 479225
aucacccaugagauuucua

SEQ ID NO: 479227 - RNA, 19 nt, Artificial Sequence
  Description of Artificial Sequence: Synthetic oligonucleotide
  Sense strand starting at position 3656 of SEQ ID NO: 317288
agaaaucucaugggugauu

SEQ ID NO: 479228 - RNA, 19 nt, Artificial Sequence
  Description of Artificial Sequence: Synthetic oligonucleotide
  Antisense Strand to SEQ ID NO: 479227
aaucacccaugagauuucu

SEQ ID NO: 479229 - RNA, 19 nt, Artificial Sequence
  Description of Artificial Sequence: Synthetic oligonucleotide
  Sense strand starting at position 3669 of SEQ ID NO: 317288
gugauuuccucuuuaugca

SEQ ID NO: 479230 - RNA, 19 nt, Artificial Sequence
  Description of Artificial Sequence: Synthetic oligonucleotide
  Antisense Strand to SEQ ID NO: 479229
ugcauaaagaggaaaucac

SEQ ID NO: 479231 - RNA, 19 nt, Artificial Sequence
  Description of Artificial Sequence: Synthetic oligonucleotide
  Sense strand starting at position 3732 of SEQ ID NO: 317288
guaauagcauuugaaacau

SEQ ID NO: 479232 - RNA, 19 nt, Artificial Sequence
  Description of Artificial Sequence: Synthetic oligonucleotide
  Antisense Strand to SEQ ID NO: 479231
auguuucaaaugcuauuac

SEQ ID NO: 479233 - RNA, 19 nt, Artificial Sequence
  Description of Artificial Sequence: Synthetic oligonucleotide
  Sense strand starting at position 3869 of SEQ ID NO: 317288
agugaauauucgguucuca

SEQ ID NO: 479234 - RNA, 19 nt, Artificial Sequence
  Description of Artificial Sequence: Synthetic oligonucleotide
  Antisense Strand to SEQ ID NO: 479233
ugagaaccgaauauucacu

SEQ ID NO: 479235 - RNA, 19 nt, Artificial Sequence
  Description of Artificial Sequence: Synthetic oligonucleotide
  Sense strand starting at position 3873 of SEQ ID NO: 317288
aauauucgguucucaggau

SEQ ID NO: 479236 - RNA, 19 nt, Artificial Sequence
  Description of Artificial Sequence: Synthetic oligonucleotide
  Antisense Strand to SEQ ID NO: 479235
auccugagaaccgaauauu

SEQ ID NO: 479237 - RNA, 19 nt, Artificial Sequence
  Description of Artificial Sequence: Synthetic oligonucleotide
  Sense strand starting at position 3885 of SEQ ID NO: 317288
ucaggauucucagcugcca

SEQ ID NO: 479238 - RNA, 19 nt, Artificial Sequence
  Description of Artificial Sequence: Synthetic oligonucleotide
  Antisense Strand to SEQ ID NO: 479237
uggcagcugagaauccuga

SEQ ID NO: 479239 - RNA, 19 nt, Artificial Sequence
  Description of Artificial Sequence: Synthetic oligonucleotide
  Sense strand starting at position 3917 of SEQ ID NO: 317288
uuguuugcccuggauuacu

SEQ ID NO: 479240 - RNA, 19 nt, Artificial Sequence
  Description of Artificial Sequence: Synthetic oligonucleotide
  Antisense Strand to SEQ ID NO: 479239
aguaauccagggcaaacaa

SEQ ID NO: 479241 - RNA, 19 nt, Artificial Sequence
  Description of Artificial Sequence: Synthetic oligonucleotide
  Sense strand starting at position 3925 of SEQ ID NO: 317288
ccuggauuacuguauugau

SEQ ID NO: 479242 - RNA, 19 nt, Artificial Sequence
  Description of Artificial Sequence: Synthetic oligonucleotide
  Antisense Strand to SEQ ID NO: 479241
aucaauacaguaauccagg

SEQ ID NO: 479243 - RNA, 19 nt, Artificial Sequence
  Description of Artificial Sequence: Synthetic oligonucleotide
  Sense strand starting at position 30 of SEQ ID NO: 317289
agggaaacauugcuuaugu

SEQ ID NO: 479244 - RNA, 19 nt, Artificial Sequence
  Description of Artificial Sequence: Synthetic oligonucleotide
  Antisense Strand to SEQ ID NO: 479243
acauaagcaauguuucccu

SEQ ID NO: 479245 - RNA, 19 nt, Artificial Sequence
  Description of Artificial Sequence: Synthetic oligonucleotide
  Sense strand starting at position 32 of SEQ ID NO: 317289
ggaaacauugcuuauguca

SEQ ID NO: 479246 - RNA, 19 nt, Artificial Sequence
  Description of Artificial Sequence: Synthetic oligonucleotide
  Antisense Strand to SEQ ID NO: 479245
ugacauaagcaauguuucc

SEQ ID NO: 479247 - RNA, 19 nt, Artificial Sequence
  Description of Artificial Sequence: Synthetic oligonucleotide
  Sense strand starting at position 101 of SEQ ID NO: 317289
accugcgaucauuaacaaa

SEQ ID NO: 479248 - RNA, 19 nt, Artificial Sequence
  Description of Artificial Sequence: Synthetic oligonucleotide
  Antisense Strand to SEQ ID NO: 479247
uuuguuaaugaucgcaggu

SEQ ID NO: 479249 - RNA, 19 nt, Artificial Sequence
  Description of Artificial Sequence: Synthetic oligonucleotide
  Sense strand starting at position 300 of SEQ ID NO: 317289
ucaguuucucuggaugaca

SEQ ID NO: 479250 - RNA, 19 nt, Artificial Sequence
  Description of Artificial Sequence: Synthetic oligonucleotide
  Antisense Strand to SEQ ID NO: 479249
ugucauccagagaaacuga

SEQ ID NO: 479251 - RNA, 19 nt, Artificial Sequence
  Description of Artificial Sequence: Synthetic oligonucleotide
  Sense strand starting at position 941 of SEQ ID NO: 317289
acgcguuccggaucuuauc

SEQ ID NO: 479252 - RNA, 19 nt, Artificial Sequence
  Description of Artificial Sequence: Synthetic oligonucleotide
  Antisense Strand to SEQ ID NO: 479251
gauaagauccggaacgcgu

SEQ ID NO: 479253 - RNA, 19 nt, Artificial Sequence
  Description of Artificial Sequence: Synthetic oligonucleotide
  Sense strand starting at position 1101 of SEQ ID NO: 317289
gggcgagugcucuccguag

SEQ ID NO: 479254 - RNA, 19 nt, Artificial Sequence
  Description of Artificial Sequence: Synthetic oligonucleotide
  Antisense Strand to SEQ ID NO: 479253
cuacggagagcacucgccc

SEQ ID NO: 479255 - RNA, 19 nt, Artificial Sequence
  Description of Artificial Sequence: Synthetic oligonucleotide
  Sense strand starting at position 1746 of SEQ ID NO: 317289
gcacgauugcucguagucu

SEQ ID NO: 479256 - RNA, 19 nt, Artificial Sequence
  Description of Artificial Sequence: Synthetic oligonucleotide
  Antisense Strand to SEQ ID NO: 479255
agacuacgagcaaucgugc

SEQ ID NO: 479257 - RNA, 19 nt, Artificial Sequence
  Description of Artificial Sequence: Synthetic oligonucleotide
  Sense strand starting at position 2165 of SEQ ID NO: 317289
acuuaaucuagguggaggu

SEQ ID NO: 479258 - RNA, 19 nt, Artificial Sequence
  Description of Artificial Sequence: Synthetic oligonucleotide
  Antisense Strand to SEQ ID NO: 479257
accuccaccuagauuaagu

SEQ ID NO: 479259 - RNA, 19 nt, Artificial Sequence
  Description of Artificial Sequence: Synthetic oligonucleotide
  Sense strand starting at position 2203 of SEQ ID NO: 317289
gaccuuugaguacgggaau

SEQ ID NO: 479260 - RNA, 19 nt, Artificial Sequence
  Description of Artificial Sequence: Synthetic oligonucleotide
  Antisense Strand to SEQ ID NO: 479259
auucccguacucaaagguc

SEQ ID NO: 479261 - RNA, 19 nt, Artificial Sequence
  Description of Artificial Sequence: Synthetic oligonucleotide
  Sense strand starting at position 2224 of SEQ ID NO: 317289
cuuccugagcguuacauuu

SEQ ID NO: 479262 - RNA, 19 nt, Artificial Sequence
  Description of Artificial Sequence: Synthetic oligonucleotide
  Antisense Strand to SEQ ID NO: 479261
aaauguaacgcucaggaag

SEQ ID NO: 479263 - RNA, 19 nt, Artificial Sequence
  Description of Artificial Sequence: Synthetic oligonucleotide
  Sense strand starting at position 2232 of SEQ ID NO: 317289
gcguuacauuuagcaaaug

SEQ ID NO: 479264 - RNA, 19 nt, Artificial Sequence
  Description of Artificial Sequence: Synthetic oligonucleotide
  Antisense Strand to SEQ ID NO: 479263
cauuugcuaaauguaacgc

SEQ ID NO: 479265 - RNA, 19 nt, Artificial Sequence
  Description of Artificial Sequence: Synthetic oligonucleotide
  Sense strand starting at position 2247 of SEQ ID NO: 317289
aauguaugugccucucgua

SEQ ID NO: 479266 - RNA, 19 nt, Artificial Sequence
  Description of Artificial Sequence: Synthetic oligonucleotide
  Antisense Strand to SEQ ID NO: 479265
uacgagaggcacauacauu

SEQ ID NO: 479267 - RNA, 19 nt, Artificial Sequence
  Description of Artificial Sequence: Synthetic oligonucleotide
  Sense strand starting at position 2248 of SEQ ID NO: 317289
auguaugugccucucguaa

SEQ ID NO: 479268 - RNA, 19 nt, Artificial Sequence
  Description of Artificial Sequence: Synthetic oligonucleotide
  Antisense Strand to SEQ ID NO: 479267
uuacgagaggcacauacau

SEQ ID NO: 479269 - RNA, 19 nt, Artificial Sequence
  Description of Artificial Sequence: Synthetic oligonucleotide
  Sense strand starting at position 2293 of SEQ ID NO: 317289
ugccgugagcucccugauu

SEQ ID NO: 479270 - RNA, 19 nt, Artificial Sequence
  Description of Artificial Sequence: Synthetic oligonucleotide
  Antisense Strand to SEQ ID NO: 479269
aaucagggagcucacggca

SEQ ID NO: 479271 - RNA, 19 nt, Artificial Sequence
  Description of Artificial Sequence: Synthetic oligonucleotide
  Sense strand starting at position 2381 of SEQ ID NO: 317289
uagggcaguggcuaucaaa

SEQ ID NO: 479272 - RNA, 19 nt, Artificial Sequence
  Description of Artificial Sequence: Synthetic oligonucleotide
  Antisense Strand to SEQ ID NO: 479271
uuugauagccacugcccua

SEQ ID NO: 479273 - RNA, 19 nt, Artificial Sequence
  Description of Artificial Sequence: Synthetic oligonucleotide
  Sense strand starting at position 2533 of SEQ ID NO: 317289
uucuguuaagauggguaua

SEQ ID NO: 479274 - RNA, 19 nt, Artificial Sequence
  Description of Artificial Sequence: Synthetic oligonucleotide
  Antisense Strand to SEQ ID NO: 479273
uauacccaucuuaacagaa

SEQ ID NO: 479275 - RNA, 19 nt, Artificial Sequence
  Description of Artificial Sequence: Synthetic oligonucleotide
  Sense strand starting at position 2535 of SEQ ID NO: 317289
cuguuaagauggguauaac

SEQ ID NO: 479276 - RNA, 19 nt, Artificial Sequence
  Description of Artificial Sequence: Synthetic oligonucleotide
  Antisense Strand to SEQ ID NO: 479275
guuauacccaucuuaacag

SEQ ID NO: 479277 - RNA, 19 nt, Artificial Sequence
  Description of Artificial Sequence: Synthetic oligonucleotide
  Sense strand starting at position 2619 of SEQ ID NO: 317289
uuugucacucuguaagaag

SEQ ID NO: 479278 - RNA, 19 nt, Artificial Sequence
  Description of Artificial Sequence: Synthetic oligonucleotide
  Antisense Strand to SEQ ID NO: 479277
cuucuuacagagugacaaa

SEQ ID NO: 479279 - RNA, 19 nt, Artificial Sequence
  Description of Artificial Sequence: Synthetic oligonucleotide
  Sense strand starting at position 2757 of SEQ ID NO: 317289
uccaacugugcauagagau

SEQ ID NO: 479280 - RNA, 19 nt, Artificial Sequence
  Description of Artificial Sequence: Synthetic oligonucleotide
  Antisense Strand to SEQ ID NO: 479279
aucucuaugcacaguugga

SEQ ID NO: 479281 - RNA, 19 nt, Artificial Sequence
  Description of Artificial Sequence: Synthetic oligonucleotide
  Sense strand starting at position 2764 of SEQ ID NO: 317289
gugcauagagauuacagua

SEQ ID NO: 479282 - RNA, 19 nt, Artificial Sequence
  Description of Artificial Sequence: Synthetic oligonucleotide
  Antisense Strand to SEQ ID NO: 479281
uacuguaaucucuaugcac

SEQ ID NO: 479283 - RNA, 19 nt, Artificial Sequence
  Description of Artificial Sequence: Synthetic oligonucleotide
  Sense strand starting at position 3204 of SEQ ID NO: 317289
uggcauuugaugugcugaa

SEQ ID NO: 479284 - RNA, 19 nt, Artificial Sequence
  Description of Artificial Sequence: Synthetic oligonucleotide
  Antisense Strand to SEQ ID NO: 479283
uucagcacaucaaaugcca

SEQ ID NO: 479285 - RNA, 19 nt, Artificial Sequence
  Description of Artificial Sequence: Synthetic oligonucleotide
  Sense strand starting at position 3205 of SEQ ID NO: 317289
ggcauuugaugugcugaau

SEQ ID NO: 479286 - RNA, 19 nt, Artificial Sequence
  Description of Artificial Sequence: Synthetic oligonucleotide
  Antisense Strand to SEQ ID NO: 479285
auucagcacaucaaaugcc

SEQ ID NO: 479287 - RNA, 19 nt, Artificial Sequence
  Description of Artificial Sequence: Synthetic oligonucleotide
  Sense strand starting at position 3219 of SEQ ID NO: 317289
ugaauuuguauguguuccu

SEQ ID NO: 479288 - RNA, 19 nt, Artificial Sequence
  Description of Artificial Sequence: Synthetic oligonucleotide
  Antisense Strand to SEQ ID NO: 479287
aggaacacauacaaauuca

SEQ ID NO: 479289 - RNA, 19 nt, Artificial Sequence
  Description of Artificial Sequence: Synthetic oligonucleotide
  Sense strand starting at position 3220 of SEQ ID NO: 317289
gaauuuguauguguuccua

SEQ ID NO: 479290 - RNA, 19 nt, Artificial Sequence
  Description of Artificial Sequence: Synthetic oligonucleotide
  Antisense Strand to SEQ ID NO: 479289
uaggaacacauacaaauuc

SEQ ID NO: 479291 - RNA, 19 nt, Artificial Sequence
  Description of Artificial Sequence: Synthetic oligonucleotide
  Sense strand starting at position 3362 of SEQ ID NO: 317289
ggaggaguccacugcuaga

SEQ ID NO: 479292 - RNA, 19 nt, Artificial Sequence
  Description of Artificial Sequence: Synthetic oligonucleotide
  Antisense Strand to SEQ ID NO: 479291
ucuagcaguggacuccucc

SEQ ID NO: 479293 - RNA, 19 nt, Artificial Sequence
  Description of Artificial Sequence: Synthetic oligonucleotide
  Sense strand starting at position 3479 of SEQ ID NO: 317289
uggagaagcuauguuauua

SEQ ID NO: 479294 - RNA, 19 nt, Artificial Sequence
  Description of Artificial Sequence: Synthetic oligonucleotide
  Antisense Strand to SEQ ID NO: 479293
uaauaacauagcuucucca

SEQ ID NO: 479295 - RNA, 19 nt, Artificial Sequence
  Description of Artificial Sequence: Synthetic oligonucleotide
  Sense strand starting at position 3493 of SEQ ID NO: 317289
uauuaagaaugugugacua

SEQ ID NO: 479296 - RNA, 19 nt, Artificial Sequence
  Description of Artificial Sequence: Synthetic oligonucleotide
  Antisense Strand to SEQ ID NO: 479295
uagucacacauucuuaaua

SEQ ID NO: 479297 - RNA, 19 nt, Artificial Sequence
  Description of Artificial Sequence: Synthetic oligonucleotide
  Sense strand starting at position 3572 of SEQ ID NO: 317289
aauagcauggcuggaagau

SEQ ID NO: 479298 - RNA, 19 nt, Artificial Sequence
  Description of Artificial Sequence: Synthetic oligonucleotide
  Antisense Strand to SEQ ID NO: 479297
aucuuccagccaugcuauu

SEQ ID NO: 479299 - RNA, 19 nt, Artificial Sequence
  Description of Artificial Sequence: Synthetic oligonucleotide
  Sense strand starting at position 3573 of SEQ ID NO: 317289
auagcauggcuggaagauu

SEQ ID NO: 479300 - RNA, 19 nt, Artificial Sequence
  Description of Artificial Sequence: Synthetic oligonucleotide
  Antisense Strand to SEQ ID NO: 479299
aaucuuccagccaugcuau

SEQ ID NO: 479301 - RNA, 19 nt, Artificial Sequence
  Description of Artificial Sequence: Synthetic oligonucleotide
  Sense strand starting at position 3582 of SEQ ID NO: 317289
cuggaagauugcuuaauua

SEQ ID NO: 479302 - RNA, 19 nt, Artificial Sequence
  Description of Artificial Sequence: Synthetic oligonucleotide
  Antisense Strand to SEQ ID NO: 479301
uaauuaagcaaucuuccag

SEQ ID NO: 479303 - RNA, 19 nt, Artificial Sequence
  Description of Artificial Sequence: Synthetic oligonucleotide
  Sense strand starting at position 3603 of SEQ ID NO: 317289
gggccauugggcuaauaag

SEQ ID NO: 479304 - RNA, 19 nt, Artificial Sequence
  Description of Artificial Sequence: Synthetic oligonucleotide
  Antisense Strand to SEQ ID NO: 479303
cuuauuagcccaauggccc

SEQ ID NO: 479305 - RNA, 19 nt, Artificial Sequence
  Description of Artificial Sequence: Synthetic oligonucleotide
  Sense strand starting at position 3650 of SEQ ID NO: 317289
uuucuuacuguuggagaag

SEQ ID NO: 479306 - RNA, 19 nt, Artificial Sequence
  Description of Artificial Sequence: Synthetic oligonucleotide
  Antisense Strand to SEQ ID NO: 479305
cuucuccaacaguaagaaa

SEQ ID NO: 479307 - RNA, 19 nt, Artificial Sequence
  Description of Artificial Sequence: Synthetic oligonucleotide
  Sense strand starting at position 3699 of SEQ ID NO: 317289
guaaauaaccuugaggcuu

SEQ ID NO: 479308 - RNA, 19 nt, Artificial Sequence
  Description of Artificial Sequence: Synthetic oligonucleotide
  Antisense Strand to SEQ ID NO: 479307
aagccucaagguuauuuac

SEQ ID NO: 479309 - RNA, 19 nt, Artificial Sequence
  Description of Artificial Sequence: Synthetic oligonucleotide
  Sense strand starting at position 3711 of SEQ ID NO: 317289
gaggcuuuaggguggauua

SEQ ID NO: 479310 - RNA, 19 nt, Artificial Sequence
  Description of Artificial Sequence: Synthetic oligonucleotide
  Antisense Strand to SEQ ID NO: 479309
uaauccacccuaaagccuc

SEQ ID NO: 479311 - RNA, 19 nt, Artificial Sequence
  Description of Artificial Sequence: Synthetic oligonucleotide
  Sense strand starting at position 3712 of SEQ ID NO: 317289
aggcuuuaggguggauuaa

SEQ ID NO: 479312 - RNA, 19 nt, Artificial Sequence
  Description of Artificial Sequence: Synthetic oligonucleotide
  Antisense Strand to SEQ ID NO: 479311
uuaauccacccuaaagccu

SEQ ID NO: 479313 - RNA, 19 nt, Artificial Sequence
  Description of Artificial Sequence: Synthetic oligonucleotide
  Sense strand starting at position 3722 of SEQ ID NO: 317289
guggauuaacaaugaguau

SEQ ID NO: 479314 - RNA, 19 nt, Artificial Sequence
  Description of Artificial Sequence: Synthetic oligonucleotide
  Antisense Strand to SEQ ID NO: 479313
auacucauuguuaauccac

SEQ ID NO: 479315 - RNA, 19 nt, Artificial Sequence
  Description of Artificial Sequence: Synthetic oligonucleotide
  Sense strand starting at position 3849 of SEQ ID NO: 317289
agaagaucuucguuucuaa

SEQ ID NO: 479316 - RNA, 19 nt, Artificial Sequence
  Description of Artificial Sequence: Synthetic oligonucleotide
  Antisense Strand to SEQ ID NO: 479315
uuagaaacgaagaucuucu

SEQ ID NO: 479317 - RNA, 19 nt, Artificial Sequence
  Description of Artificial Sequence: Synthetic oligonucleotide
  Sense strand starting at position 3897 of SEQ ID NO: 317289
ugauuauagggcugacacu

SEQ ID NO: 479318 - RNA, 19 nt, Artificial Sequence
  Description of Artificial Sequence: Synthetic oligonucleotide
  Antisense Strand to SEQ ID NO: 479317
agugucagcccuauaauca

SEQ ID NO: 479319 - RNA, 19 nt, Artificial Sequence
  Description of Artificial Sequence: Synthetic oligonucleotide
  Sense strand starting at position 3960 of SEQ ID NO: 317289
ccaagcaugaugggaguau

SEQ ID NO: 479320 - RNA, 19 nt, Artificial Sequence
  Description of Artificial Sequence: Synthetic oligonucleotide
  Antisense Strand to SEQ ID NO: 479319
auacucccaucaugcuugg

SEQ ID NO: 479321 - RNA, 19 nt, Artificial Sequence
  Description of Artificial Sequence: Synthetic oligonucleotide
  Sense strand starting at position 3964 of SEQ ID NO: 317289
gcaugaugggaguauguca

SEQ ID NO: 479322 - RNA, 19 nt, Artificial Sequence
  Description of Artificial Sequence: Synthetic oligonucleotide
  Antisense Strand to SEQ ID NO: 479321
ugacauacucccaucaugc

SEQ ID NO: 479323 - RNA, 19 nt, Artificial Sequence
  Description of Artificial Sequence: Synthetic oligonucleotide
  Sense strand starting at position 6 of SEQ ID NO: 317290
gaacuuugaugugcaaaug

SEQ ID NO: 479324 - RNA, 19 nt, Artificial Sequence
  Description of Artificial Sequence: Synthetic oligonucleotide
  Antisense Strand to SEQ ID NO: 479323
cauuugcacaucaaaguuc

SEQ ID NO: 479325 - RNA, 19 nt, Artificial Sequence
  Description of Artificial Sequence: Synthetic oligonucleotide
  Sense strand starting at position 7 of SEQ ID NO: 317290
aacuuugaugugcaaauga

SEQ ID NO: 479326 - RNA, 19 nt, Artificial Sequence
  Description of Artificial Sequence: Synthetic oligonucleotide
  Antisense Strand to SEQ ID NO: 479325
ucauuugcacaucaaaguu

SEQ ID NO: 479327 - RNA, 19 nt, Artificial Sequence
  Description of Artificial Sequence: Synthetic oligonucleotide
  Sense strand starting at position 143 of SEQ ID NO: 317290
acugucuugccauauggga

SEQ ID NO: 479328 - RNA, 19 nt, Artificial Sequence
  Description of Artificial Sequence: Synthetic oligonucleotide
  Antisense Strand to SEQ ID NO: 479327
ucccauauggcaagacagu

SEQ ID NO: 479329 - RNA, 19 nt, Artificial Sequence
  Description of Artificial Sequence: Synthetic oligonucleotide
  Sense strand starting at position 260 of SEQ ID NO: 317290
gagcaaagaucagcagcaa

SEQ ID NO: 479330 - RNA, 19 nt, Artificial Sequence
  Description of Artificial Sequence: Synthetic oligonucleotide
  Antisense Strand to SEQ ID NO: 479329
uugcugcugaucuuugcuc

SEQ ID NO: 479331 - RNA, 19 nt, Artificial Sequence
  Description of Artificial Sequence: Synthetic oligonucleotide
  Sense strand starting at position 286 of SEQ ID NO: 317290
aguacuagauccucugaca

SEQ ID NO: 479332 - RNA, 19 nt, Artificial Sequence
  Description of Artificial Sequence: Synthetic oligonucleotide
  Antisense Strand to SEQ ID NO: 479331
ugucagaggaucuaguacu

SEQ ID NO: 479333 - RNA, 19 nt, Artificial Sequence
  Description of Artificial Sequence: Synthetic oligonucleotide
  Sense strand starting at position 340 of SEQ ID NO: 317290
uucgauaaucuggguuuga

SEQ ID NO: 479334 - RNA, 19 nt, Artificial Sequence
  Description of Artificial Sequence: Synthetic oligonucleotide
  Antisense Strand to SEQ ID NO: 479333
ucaaacccagauuaucgaa

SEQ ID NO: 479335 - RNA, 19 nt, Artificial Sequence
  Description of Artificial Sequence: Synthetic oligonucleotide
  Sense strand starting at position 341 of SEQ ID NO: 317290
ucgauaaucuggguuugaa

SEQ ID NO: 479336 - RNA, 19 nt, Artificial Sequence
  Description of Artificial Sequence: Synthetic oligonucleotide
  Antisense Strand to SEQ ID NO: 479335
uucaaacccagauuaucga

SEQ ID NO: 479337 - RNA, 19 nt, Artificial Sequence
  Description of Artificial Sequence: Synthetic oligonucleotide
  Sense strand starting at position 365 of SEQ ID NO: 317290
caagaaagucauggaguuu

SEQ ID NO: 479338 - RNA, 19 nt, Artificial Sequence
  Description of Artificial Sequence: Synthetic oligonucleotide
  Antisense Strand to SEQ ID NO: 479337
aaacuccaugacuuucuug

SEQ ID NO: 479339 - RNA, 19 nt, Artificial Sequence
  Description of Artificial Sequence: Synthetic oligonucleotide
  Sense strand starting at position 589 of SEQ ID NO: 317290
agaauucucuggcccauga

SEQ ID NO: 479340 - RNA, 19 nt, Artificial Sequence
  Description of Artificial Sequence: Synthetic oligonucleotide
  Antisense Strand to SEQ ID NO: 479339
ucaugggccagagaauucu

SEQ ID NO: 479341 - RNA, 19 nt, Artificial Sequence
  Description of Artificial Sequence: Synthetic oligonucleotide
  Sense strand starting at position 712 of SEQ ID NO: 317290
aguucuuugccugaaccua

SEQ ID NO: 479342 - RNA, 19 nt, Artificial Sequence
  Description of Artificial Sequence: Synthetic oligonucleotide
  Antisense Strand to SEQ ID NO: 479341
uagguucaggcaaagaacu

SEQ ID NO: 479343 - RNA, 19 nt, Artificial Sequence
  Description of Artificial Sequence: Synthetic oligonucleotide
  Sense strand starting at position 755 of SEQ ID NO: 317290
cccgcucugugagugauuu

SEQ ID NO: 479344 - RNA, 19 nt, Artificial Sequence
  Description of Artificial Sequence: Synthetic oligonucleotide
  Antisense Strand to SEQ ID NO: 479343
aaaucacucacagagcggg

SEQ ID NO: 479345 - RNA, 19 nt, Artificial Sequence
  Description of Artificial Sequence: Synthetic oligonucleotide
  Sense strand starting at position 841 of SEQ ID NO: 317290
uggguuccuccagguaaga

SEQ ID NO: 479346 - RNA, 19 nt, Artificial Sequence
  Description of Artificial Sequence: Synthetic oligonucleotide
  Antisense Strand to SEQ ID NO: 479345
ucuuaccuggaggaaccca

SEQ ID NO: 479347 - RNA, 19 nt, Artificial Sequence
  Description of Artificial Sequence: Synthetic oligonucleotide
  Sense strand starting at position 911 of SEQ ID NO: 317290
agaauuguccuaugaacga

SEQ ID NO: 479348 - RNA, 19 nt, Artificial Sequence
  Description of Artificial Sequence: Synthetic oligonucleotide
  Antisense Strand to SEQ ID NO: 479347
ucguucauaggacaauucu

SEQ ID NO: 479349 - RNA, 19 nt, Artificial Sequence
  Description of Artificial Sequence: Synthetic oligonucleotide
  Sense strand starting at position 915 of SEQ ID NO: 317290
uuguccuaugaacgaagaa

SEQ ID NO: 479350 - RNA, 19 nt, Artificial Sequence
  Description of Artificial Sequence: Synthetic oligonucleotide
  Antisense Strand to SEQ ID NO: 479349
uucuucguucauaggacaa

SEQ ID NO: 479351 - RNA, 19 nt, Artificial Sequence
  Description of Artificial Sequence: Synthetic oligonucleotide
  Sense strand starting at position 936 of SEQ ID NO: 317290
aauuaagauuggguuugca

SEQ ID NO: 479352 - RNA, 19 nt, Artificial Sequence
  Description of Artificial Sequence: Synthetic oligonucleotide
  Antisense Strand to SEQ ID NO: 479351
ugcaaacccaaucuuaauu

SEQ ID NO: 479353 - RNA, 19 nt, Artificial Sequence
  Description of Artificial Sequence: Synthetic oligonucleotide
  Sense strand starting at position 939 of SEQ ID NO: 317290
uaagauuggguuugcaauu

SEQ ID NO: 479354 - RNA, 19 nt, Artificial Sequence
  Description of Artificial Sequence: Synthetic oligonucleotide
  Antisense Strand to SEQ ID NO: 479353
aauugcaaacccaaucuua

SEQ ID NO: 479355 - RNA, 19 nt, Artificial Sequence
  Description of Artificial Sequence: Synthetic oligonucleotide
  Sense strand starting at position 2098 of SEQ ID NO: 317290
gagagaguuuccucucccu

SEQ ID NO: 479356 - RNA, 19 nt, Artificial Sequence
  Description of Artificial Sequence: Synthetic oligonucleotide
  Antisense Strand to SEQ ID NO: 479355
agggagaggaaacucucuc

SEQ ID NO: 479357 - RNA, 19 nt, Artificial Sequence
  Description of Artificial Sequence: Synthetic oligonucleotide
  Sense strand starting at position 2162 of SEQ ID NO: 317290
acagacuuuccucaguuau

SEQ ID NO: 479358 - RNA, 19 nt, Artificial Sequence
  Description of Artificial Sequence: Synthetic oligonucleotide
  Antisense Strand to SEQ ID NO: 479357
auaacugaggaaagucugu

SEQ ID NO: 479359 - RNA, 19 nt, Artificial Sequence
  Description of Artificial Sequence: Synthetic oligonucleotide
  Sense strand starting at position 2164 of SEQ ID NO: 317290
agacuuuccucaguuaucu

SEQ ID NO: 479360 - RNA, 19 nt, Artificial Sequence
  Description of Artificial Sequence: Synthetic oligonucleotide
  Antisense Strand to SEQ ID NO: 479359
agauaacugaggaaagucu

SEQ ID NO: 479361 - RNA, 19 nt, Artificial Sequence
  Description of Artificial Sequence: Synthetic oligonucleotide
  Sense strand starting at position 2181 of SEQ ID NO: 317290
cugugcuuccuccaaagau

SEQ ID NO: 479362 - RNA, 19 nt, Artificial Sequence
  Description of Artificial Sequence: Synthetic oligonucleotide
  Antisense Strand to SEQ ID NO: 479361
aucuuuggaggaagcacag

SEQ ID NO: 479363 - RNA, 19 nt, Artificial Sequence
  Description of Artificial Sequence: Synthetic oligonucleotide
  Sense strand starting at position 2397 of SEQ ID NO: 317290
uuuagaaauaccugggugu

SEQ ID NO: 479364 - RNA, 19 nt, Artificial Sequence
  Description of Artificial Sequence: Synthetic oligonucleotide
  Antisense Strand to SEQ ID NO: 479363
acacccagguauuucuaaa

SEQ ID NO: 479365 - RNA, 19 nt, Artificial Sequence
  Description of Artificial Sequence: Synthetic oligonucleotide
  Sense strand starting at position 2399 of SEQ ID NO: 317290
uagaaauaccuggguguug

SEQ ID NO: 479366 - RNA, 19 nt, Artificial Sequence
  Description of Artificial Sequence: Synthetic oligonucleotide
  Antisense Strand to SEQ ID NO: 479365
caacacccagguauuucua

SEQ ID NO: 479367 - RNA, 19 nt, Artificial Sequence
  Description of Artificial Sequence: Synthetic oligonucleotide
  Sense strand starting at position 2400 of SEQ ID NO: 317290
agaaauaccuggguguuga

SEQ ID NO: 479368 - RNA, 19 nt, Artificial Sequence
  Description of Artificial Sequence: Synthetic oligonucleotide
  Antisense Strand to SEQ ID NO: 479367
ucaacacccagguauuucu

SEQ ID NO: 479369 - RNA, 19 nt, Artificial Sequence
  Description of Artificial Sequence: Synthetic oligonucleotide
  Sense strand starting at position 2401 of SEQ ID NO: 317290
gaaauaccuggguguugau

SEQ ID NO: 479370 - RNA, 19 nt, Artificial Sequence
  Description of Artificial Sequence: Synthetic oligonucleotide
  Antisense Strand to SEQ ID NO: 479369
aucaacacccagguauuuc

SEQ ID NO: 479371 - RNA, 19 nt, Artificial Sequence
  Description of Artificial Sequence: Synthetic oligonucleotide
  Sense strand starting at position 2490 of SEQ ID NO: 317290
guuugugauggcucguauu

SEQ ID NO: 479372 - RNA, 19 nt, Artificial Sequence
  Description of Artificial Sequence: Synthetic oligonucleotide
  Antisense Strand to SEQ ID NO: 479371
aauacgagccaucacaaac

SEQ ID NO: 479373 - RNA, 19 nt, Artificial Sequence
  Description of Artificial Sequence: Synthetic oligonucleotide
  Sense strand starting at position 2496 of SEQ ID NO: 317290
gauggcucguauuugucaa

SEQ ID NO: 479374 - RNA, 19 nt, Artificial Sequence
  Description of Artificial Sequence: Synthetic oligonucleotide
  Antisense Strand to SEQ ID NO: 479373
uugacaaauacgagccauc

SEQ ID NO: 479375 - RNA, 19 nt, Artificial Sequence
  Description of Artificial Sequence: Synthetic oligonucleotide
  Sense strand starting at position 2644 of SEQ ID NO: 317290
gccuuaacugggcaucaga

SEQ ID NO: 479376 - RNA, 19 nt, Artificial Sequence
  Description of Artificial Sequence: Synthetic oligonucleotide
  Antisense Strand to SEQ ID NO: 479375
ucugaugcccaguuaaggc

SEQ ID NO: 479377 - RNA, 19 nt, Artificial Sequence
  Description of Artificial Sequence: Synthetic oligonucleotide
  Sense strand starting at position 2999 of SEQ ID NO: 317290
uucagauugcuggaguuga

SEQ ID NO: 479378 - RNA, 19 nt, Artificial Sequence
  Description of Artificial Sequence: Synthetic oligonucleotide
  Antisense Strand to SEQ ID NO: 479377
ucaacuccagcaaucugaa

SEQ ID NO: 479379 - RNA, 19 nt, Artificial Sequence
  Description of Artificial Sequence: Synthetic oligonucleotide
  Sense strand starting at position 3010 of SEQ ID NO: 317290
ggaguugagcccuagaguu

SEQ ID NO: 479380 - RNA, 19 nt, Artificial Sequence
  Description of Artificial Sequence: Synthetic oligonucleotide
  Antisense Strand to SEQ ID NO: 479379
aacucuagggcucaacucc

SEQ ID NO: 479381 - RNA, 19 nt, Artificial Sequence
  Description of Artificial Sequence: Synthetic oligonucleotide
  Sense strand starting at position 3097 of SEQ ID NO: 317290
ggcuguuaccuacaucuga

SEQ ID NO: 479382 - RNA, 19 nt, Artificial Sequence
  Description of Artificial Sequence: Synthetic oligonucleotide
  Antisense Strand to SEQ ID NO: 479381
ucagauguagguaacagcc

SEQ ID NO: 479383 - RNA, 19 nt, Artificial Sequence
  Description of Artificial Sequence: Synthetic oligonucleotide
  Sense strand starting at position 3113 of SEQ ID NO: 317290
ugaagacuaccuuguagca

SEQ ID NO: 479384 - RNA, 19 nt, Artificial Sequence
  Description of Artificial Sequence: Synthetic oligonucleotide
  Antisense Strand to SEQ ID NO: 479383
ugcuacaagguagucuuca

SEQ ID NO: 479385 - RNA, 19 nt, Artificial Sequence
  Description of Artificial Sequence: Synthetic oligonucleotide
  Sense strand starting at position 3132 of SEQ ID NO: 317290
ugaucagaguguguuggaa

SEQ ID NO: 479386 - RNA, 19 nt, Artificial Sequence
  Description of Artificial Sequence: Synthetic oligonucleotide
  Antisense Strand to SEQ ID NO: 479385
uuccaacacacucugauca

SEQ ID NO: 479387 - RNA, 19 nt, Artificial Sequence
  Description of Artificial Sequence: Synthetic oligonucleotide
  Sense strand starting at position 3146 of SEQ ID NO: 317290
uggaaagagugucugagau

SEQ ID NO: 479388 - RNA, 19 nt, Artificial Sequence
  Description of Artificial Sequence: Synthetic oligonucleotide
  Antisense Strand to SEQ ID NO: 479387
aucucagacacucuuucca

SEQ ID NO: 479389 - RNA, 19 nt, Artificial Sequence
  Description of Artificial Sequence: Synthetic oligonucleotide
  Sense strand starting at position 3231 of SEQ ID NO: 317290
caugguuaacauugauaga

SEQ ID NO: 479390 - RNA, 19 nt, Artificial Sequence
  Description of Artificial Sequence: Synthetic oligonucleotide
  Antisense Strand to SEQ ID NO: 479389
ucuaucaauguuaaccaug

SEQ ID NO: 479391 - RNA, 19 nt, Artificial Sequence
  Description of Artificial Sequence: Synthetic oligonucleotide
  Sense strand starting at position 3312 of SEQ ID NO: 317290
cugacaauccugugaggug

SEQ ID NO: 479392 - RNA, 19 nt, Artificial Sequence
  Description of Artificial Sequence: Synthetic oligonucleotide
  Antisense Strand to SEQ ID NO: 479391
caccucacaggauugucag

SEQ ID NO: 479393 - RNA, 19 nt, Artificial Sequence
  Description of Artificial Sequence: Synthetic oligonucleotide
  Sense strand starting at position 3461 of SEQ ID NO: 317290
cuggguucuuaaucucuca

SEQ ID NO: 479394 - RNA, 19 nt, Artificial Sequence
  Description of Artificial Sequence: Synthetic oligonucleotide
  Antisense Strand to SEQ ID NO: 479393
ugagagauuaagaacccag

SEQ ID NO: 479395 - RNA, 19 nt, Artificial Sequence
  Description of Artificial Sequence: Synthetic oligonucleotide
  Sense strand starting at position 3469 of SEQ ID NO: 317290
uuaaucucucaaggaagua

SEQ ID NO: 479396 - RNA, 19 nt, Artificial Sequence
  Description of Artificial Sequence: Synthetic oligonucleotide
  Antisense Strand to SEQ ID NO: 479395
uacuuccuugagagauuaa

SEQ ID NO: 479397 - RNA, 19 nt, Artificial Sequence
  Description of Artificial Sequence: Synthetic oligonucleotide
  Sense strand starting at position 3629 of SEQ ID NO: 317290
ggaagagggcuaugacuau

SEQ ID NO: 479398 - RNA, 19 nt, Artificial Sequence
  Description of Artificial Sequence: Synthetic oligonucleotide
  Antisense Strand to SEQ ID NO: 479397
auagucauagcccucuucc

SEQ ID NO: 479399 - RNA, 19 nt, Artificial Sequence
  Description of Artificial Sequence: Synthetic oligonucleotide
  Sense strand starting at position 3635 of SEQ ID NO: 317290
gggcuaugacuaugacuca

SEQ ID NO: 479400 - RNA, 19 nt, Artificial Sequence
  Description of Artificial Sequence: Synthetic oligonucleotide
  Antisense Strand to SEQ ID NO: 479399
ugagucauagucauagccc

SEQ ID NO: 479401 - RNA, 19 nt, Artificial Sequence
  Description of Artificial Sequence: Synthetic oligonucleotide
  Sense strand starting at position 3943 of SEQ ID NO: 317290
uggacauguuacuucucua

SEQ ID NO: 479402 - RNA, 19 nt, Artificial Sequence
  Description of Artificial Sequence: Synthetic oligonucleotide
  Antisense Strand to SEQ ID NO: 479401
uagagaaguaacaugucca

SEQ ID NO: 479403 - RNA, 19 nt, Artificial Sequence
  Description of Artificial Sequence: Synthetic oligonucleotide
  Sense strand starting at position 186 of SEQ ID NO: 317291
agaaauguguaccuaagau

SEQ ID NO: 479404 - RNA, 19 nt, Artificial Sequence
  Description of Artificial Sequence: Synthetic oligonucleotide
  Antisense Strand to SEQ ID NO: 479403
aucuuagguacacauuucu

SEQ ID NO: 479405 - RNA, 19 nt, Artificial Sequence
  Description of Artificial Sequence: Synthetic oligonucleotide
  Sense strand starting at position 236 of SEQ ID NO: 317291
agcauuauuucugcagcca

SEQ ID NO: 479406 - RNA, 19 nt, Artificial Sequence
  Description of Artificial Sequence: Synthetic oligonucleotide
  Antisense Strand to SEQ ID NO: 479405
uggcugcagaaauaaugcu

SEQ ID NO: 479407 - RNA, 19 nt, Artificial Sequence
  Description of Artificial Sequence: Synthetic oligonucleotide
  Sense strand starting at position 237 of SEQ ID NO: 317291
gcauuauuucugcagccaa

SEQ ID NO: 479408 - RNA, 19 nt, Artificial Sequence
  Description of Artificial Sequence: Synthetic oligonucleotide
  Antisense Strand to SEQ ID NO: 479407
uuggcugcagaaauaaugc

SEQ ID NO: 479409 - RNA, 19 nt, Artificial Sequence
  Description of Artificial Sequence: Synthetic oligonucleotide
  Sense strand starting at position 415 of SEQ ID NO: 317291
gccggugauuguuagagga

SEQ ID NO: 479410 - RNA, 19 nt, Artificial Sequence
  Description of Artificial Sequence: Synthetic oligonucleotide
  Antisense Strand to SEQ ID NO: 479409
uccucuaacaaucaccggc

SEQ ID NO: 479411 - RNA, 19 nt, Artificial Sequence
  Description of Artificial Sequence: Synthetic oligonucleotide
  Sense strand starting at position 417 of SEQ ID NO: 317291
cggugauuguuagaggaca

SEQ ID NO: 479412 - RNA, 19 nt, Artificial Sequence
  Description of Artificial Sequence: Synthetic oligonucleotide
  Antisense Strand to SEQ ID NO: 479411
uguccucuaacaaucaccg

SEQ ID NO: 479413 - RNA, 19 nt, Artificial Sequence
  Description of Artificial Sequence: Synthetic oligonucleotide
  Sense strand starting at position 418 of SEQ ID NO: 317291
ggugauuguuagaggacag

SEQ ID NO: 479414 - RNA, 19 nt, Artificial Sequence
  Description of Artificial Sequence: Synthetic oligonucleotide
  Antisense Strand to SEQ ID NO: 479413
cuguccucuaacaaucacc

SEQ ID NO: 479415 - RNA, 19 nt, Artificial Sequence
  Description of Artificial Sequence: Synthetic oligonucleotide
  Sense strand starting at position 630 of SEQ ID NO: 317291
ugagcucugccuugaaaga

SEQ ID NO: 479416 - RNA, 19 nt, Artificial Sequence
  Description of Artificial Sequence: Synthetic oligonucleotide
  Antisense Strand to SEQ ID NO: 479415
ucuuucaaggcagagcuca

SEQ ID NO: 479417 - RNA, 19 nt, Artificial Sequence
  Description of Artificial Sequence: Synthetic oligonucleotide
  Sense strand starting at position 631 of SEQ ID NO: 317291
gagcucugccuugaaagag

SEQ ID NO: 479418 - RNA, 19 nt, Artificial Sequence
  Description of Artificial Sequence: Synthetic oligonucleotide
  Antisense Strand to SEQ ID NO: 479417
cucuuucaaggcagagcuc

SEQ ID NO: 479419 - RNA, 19 nt, Artificial Sequence
  Description of Artificial Sequence: Synthetic oligonucleotide
  Sense strand starting at position 979 of SEQ ID NO: 317291
ccgcgcugcccauggaaua

SEQ ID NO: 479420 - RNA, 19 nt, Artificial Sequence
  Description of Artificial Sequence: Synthetic oligonucleotide
  Antisense Strand to SEQ ID NO: 479419
uauuccaugggcagcgcgg

SEQ ID NO: 479421 - RNA, 19 nt, Artificial Sequence
  Description of Artificial Sequence: Synthetic oligonucleotide
  Sense strand starting at position 1864 of SEQ ID NO: 317291
gcuggaagcagcgauuaca

SEQ ID NO: 479422 - RNA, 19 nt, Artificial Sequence
  Description of Artificial Sequence: Synthetic oligonucleotide
  Antisense Strand to SEQ ID NO: 479421
uguaaucgcugcuuccagc

SEQ ID NO: 479423 - RNA, 19 nt, Artificial Sequence
  Description of Artificial Sequence: Synthetic oligonucleotide
  Sense strand starting at position 1867 of SEQ ID NO: 317291
ggaagcagcgauuacagaa

SEQ ID NO: 479424 - RNA, 19 nt, Artificial Sequence
  Description of Artificial Sequence: Synthetic oligonucleotide
  Antisense Strand to SEQ ID NO: 479423
uucuguaaucgcugcuucc

SEQ ID NO: 479425 - RNA, 19 nt, Artificial Sequence
  Description of Artificial Sequence: Synthetic oligonucleotide
  Sense strand starting at position 2095 of SEQ ID NO: 317291
gcgugugacucgucuccca

SEQ ID NO: 479426 - RNA, 19 nt, Artificial Sequence
  Description of Artificial Sequence: Synthetic oligonucleotide
  Antisense Strand to SEQ ID NO: 479425
ugggagacgagucacacgc

SEQ ID NO: 479427 - RNA, 19 nt, Artificial Sequence
  Description of Artificial Sequence: Synthetic oligonucleotide
  Sense strand starting at position 2114 of SEQ ID NO: 317291
ggucguuugggcuggagua

SEQ ID NO: 479428 - RNA, 19 nt, Artificial Sequence
  Description of Artificial Sequence: Synthetic oligonucleotide
  Antisense Strand to SEQ ID NO: 479427
uacuccagcccaaacgacc

SEQ ID NO: 479429 - RNA, 19 nt, Artificial Sequence
  Description of Artificial Sequence: Synthetic oligonucleotide
  Sense strand starting at position 2449 of SEQ ID NO: 317291
gggauaaguggguguggga

SEQ ID NO: 479430 - RNA, 19 nt, Artificial Sequence
  Description of Artificial Sequence: Synthetic oligonucleotide
  Antisense Strand to SEQ ID NO: 479429
ucccacacccacuuauccc

SEQ ID NO: 479431 - RNA, 19 nt, Artificial Sequence
  Description of Artificial Sequence: Synthetic oligonucleotide
  Sense strand starting at position 2819 of SEQ ID NO: 317291
aagugcuugugccgggaga

SEQ ID NO: 479432 - RNA, 19 nt, Artificial Sequence
  Description of Artificial Sequence: Synthetic oligonucleotide
  Antisense Strand to SEQ ID NO: 479431
ucucccggcacaagcacuu

SEQ ID NO: 479433 - RNA, 19 nt, Artificial Sequence
  Description of Artificial Sequence: Synthetic oligonucleotide
  Sense strand starting at position 2886 of SEQ ID NO: 317291
cccgaaagaugugaguaaa

SEQ ID NO: 479434 - RNA, 19 nt, Artificial Sequence
  Description of Artificial Sequence: Synthetic oligonucleotide
  Antisense Strand to SEQ ID NO: 479433
uuuacucacaucuuucggg

SEQ ID NO: 479435 - RNA, 19 nt, Artificial Sequence
  Description of Artificial Sequence: Synthetic oligonucleotide
  Sense strand starting at position 2999 of SEQ ID NO: 317291
auauaucaguagcguugau

SEQ ID NO: 479436 - RNA, 19 nt, Artificial Sequence
  Description of Artificial Sequence: Synthetic oligonucleotide
  Antisense Strand to SEQ ID NO: 479435
aucaacgcuacugauauau

SEQ ID NO: 479437 - RNA, 19 nt, Artificial Sequence
  Description of Artificial Sequence: Synthetic oligonucleotide
  Sense strand starting at position 3268 of SEQ ID NO: 317291
ucuguuagacagugcugau

SEQ ID NO: 479438 - RNA, 19 nt, Artificial Sequence
  Description of Artificial Sequence: Synthetic oligonucleotide
  Antisense Strand to SEQ ID NO: 479437
aucagcacugucuaacaga

SEQ ID NO: 479439 - RNA, 19 nt, Artificial Sequence
  Description of Artificial Sequence: Synthetic oligonucleotide
  Sense strand starting at position 3281 of SEQ ID NO: 317291
gcugaucucuaccaaguuu

SEQ ID NO: 479440 - RNA, 19 nt, Artificial Sequence
  Description of Artificial Sequence: Synthetic oligonucleotide
  Antisense Strand to SEQ ID NO: 479439
aaacuugguagagaucagc

SEQ ID NO: 479441 - RNA, 19 nt, Artificial Sequence
  Description of Artificial Sequence: Synthetic oligonucleotide
  Sense strand starting at position 3508 of SEQ ID NO: 317291
ggaugaggugccuaaucua

SEQ ID NO: 479442 - RNA, 19 nt, Artificial Sequence
  Description of Artificial Sequence: Synthetic oligonucleotide
  Antisense Strand to SEQ ID NO: 479441
uagauuaggcaccucaucc

SEQ ID NO: 479443 - RNA, 19 nt, Artificial Sequence
  Description of Artificial Sequence: Synthetic oligonucleotide
  Sense strand starting at position 3511 of SEQ ID NO: 317291
ugaggugccuaaucuauca

SEQ ID NO: 479444 - RNA, 19 nt, Artificial Sequence
  Description of Artificial Sequence: Synthetic oligonucleotide
  Antisense Strand to SEQ ID NO: 479443
ugauagauuaggcaccuca

SEQ ID NO: 479445 - RNA, 19 nt, Artificial Sequence
  Description of Artificial Sequence: Synthetic oligonucleotide
  Sense strand starting at position 3572 of SEQ ID NO: 317291
augauauaacguuaaucuc

SEQ ID NO: 479446 - RNA, 19 nt, Artificial Sequence
  Description of Artificial Sequence: Synthetic oligonucleotide
  Antisense Strand to SEQ ID NO: 479445
gagauuaacguuauaucau

SEQ ID NO: 479447 - RNA, 19 nt, Artificial Sequence
  Description of Artificial Sequence: Synthetic oligonucleotide
  Sense strand starting at position 3595 of SEQ ID NO: 317291
ucugguaucuuugaaauca

SEQ ID NO: 479448 - RNA, 19 nt, Artificial Sequence
  Description of Artificial Sequence: Synthetic oligonucleotide
  Antisense Strand to SEQ ID NO: 479447
ugauuucaaagauaccaga

SEQ ID NO: 479449 - RNA, 19 nt, Artificial Sequence
  Description of Artificial Sequence: Synthetic oligonucleotide
  Sense strand starting at position 3666 of SEQ ID NO: 317291
ugcagauuauuuguccuua

SEQ ID NO: 479450 - RNA, 19 nt, Artificial Sequence
  Description of Artificial Sequence: Synthetic oligonucleotide
  Antisense Strand to SEQ ID NO: 479449
uaaggacaaauaaucugca

SEQ ID NO: 479451 - RNA, 19 nt, Artificial Sequence
  Description of Artificial Sequence: Synthetic oligonucleotide
  Sense strand starting at position 3667 of SEQ ID NO: 317291
gcagauuauuuguccuuau

SEQ ID NO: 479452 - RNA, 19 nt, Artificial Sequence
  Description of Artificial Sequence: Synthetic oligonucleotide
  Antisense Strand to SEQ ID NO: 479451
auaaggacaaauaaucugc

SEQ ID NO: 479453 - RNA, 19 nt, Artificial Sequence
  Description of Artificial Sequence: Synthetic oligonucleotide
  Sense strand starting at position 3812 of SEQ ID NO: 317291
cuucacuggucguucgaaa

SEQ ID NO: 479454 - RNA, 19 nt, Artificial Sequence
  Description of Artificial Sequence: Synthetic oligonucleotide
  Antisense Strand to SEQ ID NO: 479453
uuucgaacgaccagugaag

SEQ ID NO: 479455 - RNA, 19 nt, Artificial Sequence
  Description of Artificial Sequence: Synthetic oligonucleotide
  Sense strand starting at position 3858 of SEQ ID NO: 317291
gaaguagguuuagugucau

SEQ ID NO: 479456 - RNA, 19 nt, Artificial Sequence
  Description of Artificial Sequence: Synthetic oligonucleotide
  Antisense Strand to SEQ ID NO: 479455
augacacuaaaccuacuuc

SEQ ID NO: 479457 - RNA, 19 nt, Artificial Sequence
  Description of Artificial Sequence: Synthetic oligonucleotide
  Sense strand starting at position 3862 of SEQ ID NO: 317291
uagguuuagugucauaaag

SEQ ID NO: 479458 - RNA, 19 nt, Artificial Sequence
  Description of Artificial Sequence: Synthetic oligonucleotide
  Antisense Strand to SEQ ID NO: 479457
cuuuaugacacuaaaccua

SEQ ID NO: 479459 - RNA, 19 nt, Artificial Sequence
  Description of Artificial Sequence: Synthetic oligonucleotide
  Sense strand starting at position 3864 of SEQ ID NO: 317291
gguuuagugucauaaagua

SEQ ID NO: 479460 - RNA, 19 nt, Artificial Sequence
  Description of Artificial Sequence: Synthetic oligonucleotide
  Antisense Strand to SEQ ID NO: 479459
uacuuuaugacacuaaacc

SEQ ID NO: 479461 - RNA, 19 nt, Artificial Sequence
  Description of Artificial Sequence: Synthetic oligonucleotide
  Sense strand starting at position 3907 of SEQ ID NO: 317291
gguuguugugggcauucaa

SEQ ID NO: 479462 - RNA, 19 nt, Artificial Sequence
  Description of Artificial Sequence: Synthetic oligonucleotide
  Antisense Strand to SEQ ID NO: 479461
uugaaugcccacaacaacc

SEQ ID NO: 479463 - RNA, 19 nt, Artificial Sequence
  Description of Artificial Sequence: Synthetic oligonucleotide
  Sense strand starting at position 3914 of SEQ ID NO: 317291
gugggcauucaagguauuu

SEQ ID NO: 479464 - RNA, 19 nt, Artificial Sequence
  Description of Artificial Sequence: Synthetic oligonucleotide
  Antisense Strand to SEQ ID NO: 479463
aaauaccuugaaugcccac

SEQ ID NO: 479465 - RNA, 19 nt, Artificial Sequence
  Description of Artificial Sequence: Synthetic oligonucleotide
  Sense strand starting at position 8 of SEQ ID NO: 317292
uugugucucaaggaauuga

SEQ ID NO: 479466 - RNA, 19 nt, Artificial Sequence
  Description of Artificial Sequence: Synthetic oligonucleotide
  Antisense Strand to SEQ ID NO: 479465
ucaauuccuugagacacaa

SEQ ID NO: 479467 - RNA, 19 nt, Artificial Sequence
  Description of Artificial Sequence: Synthetic oligonucleotide
  Sense strand starting at position 106 of SEQ ID NO: 317292
ugucuuauaugagugcuau

SEQ ID NO: 479468 - RNA, 19 nt, Artificial Sequence
  Description of Artificial Sequence: Synthetic oligonucleotide
  Antisense Strand to SEQ ID NO: 479467
auagcacucauauaagaca

SEQ ID NO: 479469 - RNA, 19 nt, Artificial Sequence
  Description of Artificial Sequence: Synthetic oligonucleotide
  Sense strand starting at position 107 of SEQ ID NO: 317292
gucuuauaugagugcuauu

SEQ ID NO: 479470 - RNA, 19 nt, Artificial Sequence
  Description of Artificial Sequence: Synthetic oligonucleotide
  Antisense Strand to SEQ ID NO: 479469
aauagcacucauauaagac

SEQ ID NO: 479471 - RNA, 19 nt, Artificial Sequence
  Description of Artificial Sequence: Synthetic oligonucleotide
  Sense strand starting at position 572 of SEQ ID NO: 317292
uacagacuugcucgaugaa

SEQ ID NO: 479472 - RNA, 19 nt, Artificial Sequence
  Description of Artificial Sequence: Synthetic oligonucleotide
  Antisense Strand to SEQ ID NO: 479471
uucaucgagcaagucugua

SEQ ID NO: 479473 - RNA, 19 nt, Artificial Sequence
  Description of Artificial Sequence: Synthetic oligonucleotide
  Sense strand starting at position 573 of SEQ ID NO: 317292
acagacuugcucgaugaau

SEQ ID NO: 479474 - RNA, 19 nt, Artificial Sequence
  Description of Artificial Sequence: Synthetic oligonucleotide
  Antisense Strand to SEQ ID NO: 479473
auucaucgagcaagucugu

SEQ ID NO: 479475 - RNA, 19 nt, Artificial Sequence
  Description of Artificial Sequence: Synthetic oligonucleotide
  Sense strand starting at position 582 of SEQ ID NO: 317292
cucgaugaauccuugcuau

SEQ ID NO: 479476 - RNA, 19 nt, Artificial Sequence
  Description of Artificial Sequence: Synthetic oligonucleotide
  Antisense Strand to SEQ ID NO: 479475
auagcaaggauucaucgag

SEQ ID NO: 479477 - RNA, 19 nt, Artificial Sequence
  Description of Artificial Sequence: Synthetic oligonucleotide
  Sense strand starting at position 725 of SEQ ID NO: 317292
gcagaaagguuggcauaca

SEQ ID NO: 479478 - RNA, 19 nt, Artificial Sequence
  Description of Artificial Sequence: Synthetic oligonucleotide
  Antisense Strand to SEQ ID NO: 479477
uguaugccaaccuuucugc

SEQ ID NO: 479479 - RNA, 19 nt, Artificial Sequence
  Description of Artificial Sequence: Synthetic oligonucleotide
  Sense strand starting at position 811 of SEQ ID NO: 317292
agcacagaugugcauacau

SEQ ID NO: 479480 - RNA, 19 nt, Artificial Sequence
  Description of Artificial Sequence: Synthetic oligonucleotide
  Antisense Strand to SEQ ID NO: 479479
auguaugcacaucugugcu

SEQ ID NO: 479481 - RNA, 19 nt, Artificial Sequence
  Description of Artificial Sequence: Synthetic oligonucleotide
  Sense strand starting at position 843 of SEQ ID NO: 317292
auaguuuacguauggcauu

SEQ ID NO: 479482 - RNA, 19 nt, Artificial Sequence
  Description of Artificial Sequence: Synthetic oligonucleotide
  Antisense Strand to SEQ ID NO: 479481
aaugccauacguaaacuau

SEQ ID NO: 479483 - RNA, 19 nt, Artificial Sequence
  Description of Artificial Sequence: Synthetic oligonucleotide
  Sense strand starting at position 849 of SEQ ID NO: 317292
uacguauggcauuaagauu

SEQ ID NO: 479484 - RNA, 19 nt, Artificial Sequence
  Description of Artificial Sequence: Synthetic oligonucleotide
  Antisense Strand to SEQ ID NO: 479483
aaucuuaaugccauacgua

SEQ ID NO: 479485 - RNA, 19 nt, Artificial Sequence
  Description of Artificial Sequence: Synthetic oligonucleotide
  Sense strand starting at position 900 of SEQ ID NO: 317292
gguccuuacaaagguagua

SEQ ID NO: 479486 - RNA, 19 nt, Artificial Sequence
  Description of Artificial Sequence: Synthetic oligonucleotide
  Antisense Strand to SEQ ID NO: 479485
uacuaccuuuguaaggacc

SEQ ID NO: 479487 - RNA, 19 nt, Artificial Sequence
  Description of Artificial Sequence: Synthetic oligonucleotide
  Sense strand starting at position 931 of SEQ ID NO: 317292
aucaauaaacgauguguua

SEQ ID NO: 479488 - RNA, 19 nt, Artificial Sequence
  Description of Artificial Sequence: Synthetic oligonucleotide
  Antisense Strand to SEQ ID NO: 479487
uaacacaucguuuauugau

SEQ ID NO: 479489 - RNA, 19 nt, Artificial Sequence
  Description of Artificial Sequence: Synthetic oligonucleotide
  Sense strand starting at position 999 of SEQ ID NO: 317292
auaucuugcuacucgaaug

SEQ ID NO: 479490 - RNA, 19 nt, Artificial Sequence
  Description of Artificial Sequence: Synthetic oligonucleotide
  Antisense Strand to SEQ ID NO: 479489
cauucgaguagcaagauau

SEQ ID NO: 479491 - RNA, 19 nt, Artificial Sequence
  Description of Artificial Sequence: Synthetic oligonucleotide
  Sense strand starting at position 1054 of SEQ ID NO: 317292
cccaauauguccuugucca

SEQ ID NO: 479492 - RNA, 19 nt, Artificial Sequence
  Description of Artificial Sequence: Synthetic oligonucleotide
  Antisense Strand to SEQ ID NO: 479491
uggacaaggacauauuggg

SEQ ID NO: 479493 - RNA, 19 nt, Artificial Sequence
  Description of Artificial Sequence: Synthetic oligonucleotide
  Sense strand starting at position 1055 of SEQ ID NO: 317292
ccaauauguccuuguccau

SEQ ID NO: 479494 - RNA, 19 nt, Artificial Sequence
  Description of Artificial Sequence: Synthetic oligonucleotide
  Antisense Strand to SEQ ID NO: 479493
auggacaaggacauauugg

SEQ ID NO: 479495 - RNA, 19 nt, Artificial Sequence
  Description of Artificial Sequence: Synthetic oligonucleotide
  Sense strand starting at position 1058 of SEQ ID NO: 317292
auauguccuuguccauuaa

SEQ ID NO: 479496 - RNA, 19 nt, Artificial Sequence
  Description of Artificial Sequence: Synthetic oligonucleotide
  Antisense Strand to SEQ ID NO: 479495
uuaauggacaaggacauau

SEQ ID NO: 479497 - RNA, 19 nt, Artificial Sequence
  Description of Artificial Sequence: Synthetic oligonucleotide
  Sense strand starting at position 1126 of SEQ ID NO: 317292
uauugacaguggucccaaa

SEQ ID NO: 479498 - RNA, 19 nt, Artificial Sequence
  Description of Artificial Sequence: Synthetic oligonucleotide
  Antisense Strand to SEQ ID NO: 479497
uuugggaccacugucaaua

SEQ ID NO: 479499 - RNA, 19 nt, Artificial Sequence
  Description of Artificial Sequence: Synthetic oligonucleotide
  Sense strand starting at position 1169 of SEQ ID NO: 317292
ccaaaucuugcagguagga

SEQ ID NO: 479500 - RNA, 19 nt, Artificial Sequence
  Description of Artificial Sequence: Synthetic oligonucleotide
  Antisense Strand to SEQ ID NO: 479499
uccuaccugcaagauuugg

SEQ ID NO: 479501 - RNA, 19 nt, Artificial Sequence
  Description of Artificial Sequence: Synthetic oligonucleotide
  Sense strand starting at position 1206 of SEQ ID NO: 317292
caaauagcuggcuauguga

SEQ ID NO: 479502 - RNA, 19 nt, Artificial Sequence
  Description of Artificial Sequence: Synthetic oligonucleotide
  Antisense Strand to SEQ ID NO: 479501
ucacauagccagcuauuug

SEQ ID NO: 479503 - RNA, 19 nt, Artificial Sequence
  Description of Artificial Sequence: Synthetic oligonucleotide
  Sense strand starting at position 1341 of SEQ ID NO: 317292
gaacgaagauuauuaaguu

SEQ ID NO: 479504 - RNA, 19 nt, Artificial Sequence
  Description of Artificial Sequence: Synthetic oligonucleotide
  Antisense Strand to SEQ ID NO: 479503
aacuuaauaaucuucguuc

SEQ ID NO: 479505 - RNA, 19 nt, Artificial Sequence
  Description of Artificial Sequence: Synthetic oligonucleotide
  Sense strand starting at position 1348 of SEQ ID NO: 317292
gauuauuaaguuugugaac

SEQ ID NO: 479506 - RNA, 19 nt, Artificial Sequence
  Description of Artificial Sequence: Synthetic oligonucleotide
  Antisense Strand to SEQ ID NO: 479505
guucacaaacuuaauaauc

SEQ ID NO: 479507 - RNA, 19 nt, Artificial Sequence
  Description of Artificial Sequence: Synthetic oligonucleotide
  Sense strand starting at position 1354 of SEQ ID NO: 317292
uaaguuugugaacgucuau

SEQ ID NO: 479508 - RNA, 19 nt, Artificial Sequence
  Description of Artificial Sequence: Synthetic oligonucleotide
  Antisense Strand to SEQ ID NO: 479507
auagacguucacaaacuua

SEQ ID NO: 479509 - RNA, 19 nt, Artificial Sequence
  Description of Artificial Sequence: Synthetic oligonucleotide
  Sense strand starting at position 2176 of SEQ ID NO: 317292
ucugcaaggcccugacuua

SEQ ID NO: 479510 - RNA, 19 nt, Artificial Sequence
  Description of Artificial Sequence: Synthetic oligonucleotide
  Antisense Strand to SEQ ID NO: 479509
uaagucagggccuugcaga

SEQ ID NO: 479511 - RNA, 19 nt, Artificial Sequence
  Description of Artificial Sequence: Synthetic oligonucleotide
  Sense strand starting at position 2437 of SEQ ID NO: 317292
uuaauccuauuggauaaga

SEQ ID NO: 479512 - RNA, 19 nt, Artificial Sequence
  Description of Artificial Sequence: Synthetic oligonucleotide
  Antisense Strand to SEQ ID NO: 479511
ucuuauccaauaggauuaa

SEQ ID NO: 479513 - RNA, 19 nt, Artificial Sequence
  Description of Artificial Sequence: Synthetic oligonucleotide
  Sense strand starting at position 2838 of SEQ ID NO: 317292
ggccuuugugaggaagguu

SEQ ID NO: 479514 - RNA, 19 nt, Artificial Sequence
  Description of Artificial Sequence: Synthetic oligonucleotide
  Antisense Strand to SEQ ID NO: 479513
aaccuuccucacaaaggcc

SEQ ID NO: 479515 - RNA, 19 nt, Artificial Sequence
  Description of Artificial Sequence: Synthetic oligonucleotide
  Sense strand starting at position 2988 of SEQ ID NO: 317292
gguggagacguguacauaa

SEQ ID NO: 479516 - RNA, 19 nt, Artificial Sequence
  Description of Artificial Sequence: Synthetic oligonucleotide
  Antisense Strand to SEQ ID NO: 479515
uuauguacacgucuccacc

SEQ ID NO: 479517 - RNA, 19 nt, Artificial Sequence
  Description of Artificial Sequence: Synthetic oligonucleotide
  Sense strand starting at position 2990 of SEQ ID NO: 317292
uggagacguguacauaaca

SEQ ID NO: 479518 - RNA, 19 nt, Artificial Sequence
  Description of Artificial Sequence: Synthetic oligonucleotide
  Antisense Strand to SEQ ID NO: 479517
uguuauguacacgucucca

SEQ ID NO: 479519 - RNA, 19 nt, Artificial Sequence
  Description of Artificial Sequence: Synthetic oligonucleotide
  Sense strand starting at position 3122 of SEQ ID NO: 317292
cgacuuugacguggguuua

SEQ ID NO: 479520 - RNA, 19 nt, Artificial Sequence
  Description of Artificial Sequence: Synthetic oligonucleotide
  Antisense Strand to SEQ ID NO: 479519
uaaacccacgucaaagucg

SEQ ID NO: 479521 - RNA, 19 nt, Artificial Sequence
  Description of Artificial Sequence: Synthetic oligonucleotide
  Sense strand starting at position 3262 of SEQ ID NO: 317292
ggguuacauuguuuccuua

SEQ ID NO: 479522 - RNA, 19 nt, Artificial Sequence
  Description of Artificial Sequence: Synthetic oligonucleotide
  Antisense Strand to SEQ ID NO: 479521
uaaggaaacaauguaaccc

SEQ ID NO: 479523 - RNA, 19 nt, Artificial Sequence
  Description of Artificial Sequence: Synthetic oligonucleotide
  Sense strand starting at position 3264 of SEQ ID NO: 317292
guuacauuguuuccuuaca

SEQ ID NO: 479524 - RNA, 19 nt, Artificial Sequence
  Description of Artificial Sequence: Synthetic oligonucleotide
  Antisense Strand to SEQ ID NO: 479523
uguaaggaaacaauguaac

SEQ ID NO: 479525 - RNA, 19 nt, Artificial Sequence
  Description of Artificial Sequence: Synthetic oligonucleotide
  Sense strand starting at position 3272 of SEQ ID NO: 317292
guuuccuuacagugaguuu

SEQ ID NO: 479526 - RNA, 19 nt, Artificial Sequence
  Description of Artificial Sequence: Synthetic oligonucleotide
  Antisense Strand to SEQ ID NO: 479525
aaacucacuguaaggaaac

SEQ ID NO: 479527 - RNA, 19 nt, Artificial Sequence
  Description of Artificial Sequence: Synthetic oligonucleotide
  Sense strand starting at position 3546 of SEQ ID NO: 317292
gccaccuuacagugaguuu

SEQ ID NO: 479528 - RNA, 19 nt, Artificial Sequence
  Description of Artificial Sequence: Synthetic oligonucleotide
  Antisense Strand to SEQ ID NO: 479527
aaacucacuguaagguggc

SEQ ID NO: 479529 - RNA, 19 nt, Artificial Sequence
  Description of Artificial Sequence: Synthetic oligonucleotide
  Sense strand starting at position 3549 of SEQ ID NO: 317292
accuuacagugaguuucua

SEQ ID NO: 479530 - RNA, 19 nt, Artificial Sequence
  Description of Artificial Sequence: Synthetic oligonucleotide
  Antisense Strand to SEQ ID NO: 479529
uagaaacucacuguaaggu

SEQ ID NO: 479531 - RNA, 19 nt, Artificial Sequence
  Description of Artificial Sequence: Synthetic oligonucleotide
  Sense strand starting at position 3557 of SEQ ID NO: 317292
gugaguuucuaaccucgaa

SEQ ID NO: 479532 - RNA, 19 nt, Artificial Sequence
  Description of Artificial Sequence: Synthetic oligonucleotide
  Antisense Strand to SEQ ID NO: 479531
uucgagguuagaaacucac

SEQ ID NO: 479533 - RNA, 19 nt, Artificial Sequence
  Description of Artificial Sequence: Synthetic oligonucleotide
  Sense strand starting at position 3648 of SEQ ID NO: 317292
acaauauguguuugcuauu

SEQ ID NO: 479534 - RNA, 19 nt, Artificial Sequence
  Description of Artificial Sequence: Synthetic oligonucleotide
  Antisense Strand to SEQ ID NO: 479533
aauagcaaacacauauugu

SEQ ID NO: 479535 - RNA, 19 nt, Artificial Sequence
  Description of Artificial Sequence: Synthetic oligonucleotide
  Sense strand starting at position 3670 of SEQ ID NO: 317292
cguaauuguaaggaaaucu

SEQ ID NO: 479536 - RNA, 19 nt, Artificial Sequence
  Description of Artificial Sequence: Synthetic oligonucleotide
  Antisense Strand to SEQ ID NO: 479535
agauuuccuuacaauuacg

SEQ ID NO: 479537 - RNA, 19 nt, Artificial Sequence
  Description of Artificial Sequence: Synthetic oligonucleotide
  Sense strand starting at position 3679 of SEQ ID NO: 317292
aaggaaaucuggcauggua

SEQ ID NO: 479538 - RNA, 19 nt, Artificial Sequence
  Description of Artificial Sequence: Synthetic oligonucleotide
  Antisense Strand to SEQ ID NO: 479537
uaccaugccagauuuccuu

SEQ ID NO: 479539 - RNA, 19 nt, Artificial Sequence
  Description of Artificial Sequence: Synthetic oligonucleotide
  Sense strand starting at position 3681 of SEQ ID NO: 317292
ggaaaucuggcaugguaga

SEQ ID NO: 479540 - RNA, 19 nt, Artificial Sequence
  Description of Artificial Sequence: Synthetic oligonucleotide
  Antisense Strand to SEQ ID NO: 479539
ucuaccaugccagauuucc

SEQ ID NO: 479541 - RNA, 19 nt, Artificial Sequence
  Description of Artificial Sequence: Synthetic oligonucleotide
  Sense strand starting at position 3694 of SEQ ID NO: 317292
gguagaguaucugauagau

SEQ ID NO: 479542 - RNA, 19 nt, Artificial Sequence
  Description of Artificial Sequence: Synthetic oligonucleotide
  Antisense Strand to SEQ ID NO: 479541
aucuaucagauacucuacc

SEQ ID NO: 479543 - RNA, 19 nt, Artificial Sequence
  Description of Artificial Sequence: Synthetic oligonucleotide
  Sense strand starting at position 3696 of SEQ ID NO: 317292
uagaguaucugauagauaa

SEQ ID NO: 479544 - RNA, 19 nt, Artificial Sequence
  Description of Artificial Sequence: Synthetic oligonucleotide
  Antisense Strand to SEQ ID NO: 479543
uuaucuaucagauacucua

SEQ ID NO: 479545 - RNA, 19 nt, Artificial Sequence
  Description of Artificial Sequence: Synthetic oligonucleotide
  Sense strand starting at position 187 of SEQ ID NO: 317293
uacagacuugcucgaugaa

SEQ ID NO: 479546 - RNA, 19 nt, Artificial Sequence
  Description of Artificial Sequence: Synthetic oligonucleotide
  Antisense Strand to SEQ ID NO: 479545
uucaucgagcaagucugua

SEQ ID NO: 479547 - RNA, 19 nt, Artificial Sequence
  Description of Artificial Sequence: Synthetic oligonucleotide
  Sense strand starting at position 188 of SEQ ID NO: 317293
acagacuugcucgaugaau

SEQ ID NO: 479548 - RNA, 19 nt, Artificial Sequence
  Description of Artificial Sequence: Synthetic oligonucleotide
  Antisense Strand to SEQ ID NO: 479547
auucaucgagcaagucugu

SEQ ID NO: 479549 - RNA, 19 nt, Artificial Sequence
  Description of Artificial Sequence: Synthetic oligonucleotide
  Sense strand starting at position 197 of SEQ ID NO: 317293
cucgaugaauccuugcuau

SEQ ID NO: 479550 - RNA, 19 nt, Artificial Sequence
  Description of Artificial Sequence: Synthetic oligonucleotide
  Antisense Strand to SEQ ID NO: 479549
auagcaaggauucaucgag

SEQ ID NO: 479551 - RNA, 19 nt, Artificial Sequence
  Description of Artificial Sequence: Synthetic oligonucleotide
  Sense strand starting at position 340 of SEQ ID NO: 317293
gcagaaagguuggcauaca

SEQ ID NO: 479552 - RNA, 19 nt, Artificial Sequence
  Description of Artificial Sequence: Synthetic oligonucleotide
  Antisense Strand to SEQ ID NO: 479551
uguaugccaaccuuucugc

SEQ ID NO: 479553 - RNA, 19 nt, Artificial Sequence
  Description of Artificial Sequence: Synthetic oligonucleotide
  Sense strand starting at position 377 of SEQ ID NO: 317293
cuacuuugaucuugaggag

SEQ ID NO: 479554 - RNA, 19 nt, Artificial Sequence
  Description of Artificial Sequence: Synthetic oligonucleotide
  Antisense Strand to SEQ ID NO: 479553
cuccucaagaucaaaguag

SEQ ID NO: 479555 - RNA, 19 nt, Artificial Sequence
  Description of Artificial Sequence: Synthetic oligonucleotide
  Sense strand starting at position 426 of SEQ ID NO: 317293
agcacagaugugcauacau

SEQ ID NO: 479556 - RNA, 19 nt, Artificial Sequence
  Description of Artificial Sequence: Synthetic oligonucleotide
  Antisense Strand to SEQ ID NO: 479555
auguaugcacaucugugcu

SEQ ID NO: 479557 - RNA, 19 nt, Artificial Sequence
  Description of Artificial Sequence: Synthetic oligonucleotide
  Sense strand starting at position 458 of SEQ ID NO: 317293
auaguuuacguauggcauu

SEQ ID NO: 479558 - RNA, 19 nt, Artificial Sequence
  Description of Artificial Sequence: Synthetic oligonucleotide
  Antisense Strand to SEQ ID NO: 479557
aaugccauacguaaacuau

SEQ ID NO: 479559 - RNA, 19 nt, Artificial Sequence
  Description of Artificial Sequence: Synthetic oligonucleotide
  Sense strand starting at position 464 of SEQ ID NO: 317293
uacguauggcauuaagauu

SEQ ID NO: 479560 - RNA, 19 nt, Artificial Sequence
  Description of Artificial Sequence: Synthetic oligonucleotide
  Antisense Strand to SEQ ID NO: 479559
aaucuuaaugccauacgua

SEQ ID NO: 479561 - RNA, 19 nt, Artificial Sequence
  Description of Artificial Sequence: Synthetic oligonucleotide
  Sense strand starting at position 515 of SEQ ID NO: 317293
gguccuuacaaagguagua

SEQ ID NO: 479562 - RNA, 19 nt, Artificial Sequence
  Description of Artificial Sequence: Synthetic oligonucleotide
  Antisense Strand to SEQ ID NO: 479561
uacuaccuuuguaaggacc

SEQ ID NO: 479563 - RNA, 19 nt, Artificial Sequence
  Description of Artificial Sequence: Synthetic oligonucleotide
  Sense strand starting at position 546 of SEQ ID NO: 317293
aucaauaaacgauguguua

SEQ ID NO: 479564 - RNA, 19 nt, Artificial Sequence
  Description of Artificial Sequence: Synthetic oligonucleotide
  Antisense Strand to SEQ ID NO: 479563
uaacacaucguuuauugau

SEQ ID NO: 479565 - RNA, 19 nt, Artificial Sequence
  Description of Artificial Sequence: Synthetic oligonucleotide
  Sense strand starting at position 614 of SEQ ID NO: 317293
auaucuugcuacucgaaug

SEQ ID NO: 479566 - RNA, 19 nt, Artificial Sequence
  Description of Artificial Sequence: Synthetic oligonucleotide
  Antisense Strand to SEQ ID NO: 479565
cauucgaguagcaagauau

SEQ ID NO: 479567 - RNA, 19 nt, Artificial Sequence
  Description of Artificial Sequence: Synthetic oligonucleotide
  Sense strand starting at position 669 of SEQ ID NO: 317293
cccaauauguccuugucca

SEQ ID NO: 479568 - RNA, 19 nt, Artificial Sequence
  Description of Artificial Sequence: Synthetic oligonucleotide
  Antisense Strand to SEQ ID NO: 479567
uggacaaggacauauuggg

SEQ ID NO: 479569 - RNA, 19 nt, Artificial Sequence
  Description of Artificial Sequence: Synthetic oligonucleotide
  Sense strand starting at position 670 of SEQ ID NO: 317293
ccaauauguccuuguccau

SEQ ID NO: 479570 - RNA, 19 nt, Artificial Sequence
  Description of Artificial Sequence: Synthetic oligonucleotide
  Antisense Strand to SEQ ID NO: 479569
auggacaaggacauauugg

SEQ ID NO: 479571 - RNA, 19 nt, Artificial Sequence
  Description of Artificial Sequence: Synthetic oligonucleotide
  Sense strand starting at position 673 of SEQ ID NO: 317293
auauguccuuguccauuaa

SEQ ID NO: 479572 - RNA, 19 nt, Artificial Sequence
  Description of Artificial Sequence: Synthetic oligonucleotide
  Antisense Strand to SEQ ID NO: 479571
uuaauggacaaggacauau

SEQ ID NO: 479573 - RNA, 19 nt, Artificial Sequence
  Description of Artificial Sequence: Synthetic oligonucleotide
  Sense strand starting at position 741 of SEQ ID NO: 317293
uauugacaguggucccaaa

SEQ ID NO: 479574 - RNA, 19 nt, Artificial Sequence
  Description of Artificial Sequence: Synthetic oligonucleotide
  Antisense Strand to SEQ ID NO: 479573
uuugggaccacugucaaua

SEQ ID NO: 479575 - RNA, 19 nt, Artificial Sequence
  Description of Artificial Sequence: Synthetic oligonucleotide
  Sense strand starting at position 784 of SEQ ID NO: 317293
ccaaaucuugcagguagga

SEQ ID NO: 479576 - RNA, 19 nt, Artificial Sequence
  Description of Artificial Sequence: Synthetic oligonucleotide
  Antisense Strand to SEQ ID NO: 479575
uccuaccugcaagauuugg

SEQ ID NO: 479577 - RNA, 19 nt, Artificial Sequence
  Description of Artificial Sequence: Synthetic oligonucleotide
  Sense strand starting at position 821 of SEQ ID NO: 317293
caaauagcuggcuauguga

SEQ ID NO: 479578 - RNA, 19 nt, Artificial Sequence
  Description of Artificial Sequence: Synthetic oligonucleotide
  Antisense Strand to SEQ ID NO: 479577
ucacauagccagcuauuug

SEQ ID NO: 479579 - RNA, 19 nt, Artificial Sequence
  Description of Artificial Sequence: Synthetic oligonucleotide
  Sense strand starting at position 956 of SEQ ID NO: 317293
gaacgaagauuauuaaguu

SEQ ID NO: 479580 - RNA, 19 nt, Artificial Sequence
  Description of Artificial Sequence: Synthetic oligonucleotide
  Antisense Strand to SEQ ID NO: 479579
aacuuaauaaucuucguuc

SEQ ID NO: 479581 - RNA, 19 nt, Artificial Sequence
  Description of Artificial Sequence: Synthetic oligonucleotide
  Sense strand starting at position 963 of SEQ ID NO: 317293
gauuauuaaguuugugaac

SEQ ID NO: 479582 - RNA, 19 nt, Artificial Sequence
  Description of Artificial Sequence: Synthetic oligonucleotide
  Antisense Strand to SEQ ID NO: 479581
guucacaaacuuaauaauc

SEQ ID NO: 479583 - RNA, 19 nt, Artificial Sequence
  Description of Artificial Sequence: Synthetic oligonucleotide
  Sense strand starting at position 969 of SEQ ID NO: 317293
uaaguuugugaacgucuau

SEQ ID NO: 479584 - RNA, 19 nt, Artificial Sequence
  Description of Artificial Sequence: Synthetic oligonucleotide
  Antisense Strand to SEQ ID NO: 479583
auagacguucacaaacuua

SEQ ID NO: 479585 - RNA, 19 nt, Artificial Sequence
  Description of Artificial Sequence: Synthetic oligonucleotide
  Sense strand starting at position 1791 of SEQ ID NO: 317293
ucugcaaggcccugacuua

SEQ ID NO: 479586 - RNA, 19 nt, Artificial Sequence
  Description of Artificial Sequence: Synthetic oligonucleotide
  Antisense Strand to SEQ ID NO: 479585
uaagucagggccuugcaga

SEQ ID NO: 479587 - RNA, 19 nt, Artificial Sequence
  Description of Artificial Sequence: Synthetic oligonucleotide
  Sense strand starting at position 2052 of SEQ ID NO: 317293
uuaauccuauuggauaaga

SEQ ID NO: 479588 - RNA, 19 nt, Artificial Sequence
  Description of Artificial Sequence: Synthetic oligonucleotide
  Antisense Strand to SEQ ID NO: 479587
ucuuauccaauaggauuaa

SEQ ID NO: 479589 - RNA, 19 nt, Artificial Sequence
  Description of Artificial Sequence: Synthetic oligonucleotide
  Sense strand starting at position 2430 of SEQ ID NO: 317293
cuuguuuccucgccucuua

SEQ ID NO: 479590 - RNA, 19 nt, Artificial Sequence
  Description of Artificial Sequence: Synthetic oligonucleotide
  Antisense Strand to SEQ ID NO: 479589
uaagaggcgaggaaacaag

SEQ ID NO: 479591 - RNA, 19 nt, Artificial Sequence
  Description of Artificial Sequence: Synthetic oligonucleotide
  Sense strand starting at position 2453 of SEQ ID NO: 317293
ggccuuugugaggaagguu

SEQ ID NO: 479592 - RNA, 19 nt, Artificial Sequence
  Description of Artificial Sequence: Synthetic oligonucleotide
  Antisense Strand to SEQ ID NO: 479591
aaccuuccucacaaaggcc

SEQ ID NO: 479593 - RNA, 19 nt, Artificial Sequence
  Description of Artificial Sequence: Synthetic oligonucleotide
  Sense strand starting at position 2603 of SEQ ID NO: 317293
gguggagacguguacauaa

SEQ ID NO: 479594 - RNA, 19 nt, Artificial Sequence
  Description of Artificial Sequence: Synthetic oligonucleotide
  Antisense Strand to SEQ ID NO: 479593
uuauguacacgucuccacc

SEQ ID NO: 479595 - RNA, 19 nt, Artificial Sequence
  Description of Artificial Sequence: Synthetic oligonucleotide
  Sense strand starting at position 2605 of SEQ ID NO: 317293
uggagacguguacauaaca

SEQ ID NO: 479596 - RNA, 19 nt, Artificial Sequence
  Description of Artificial Sequence: Synthetic oligonucleotide
  Antisense Strand to SEQ ID NO: 479595
uguuauguacacgucucca

SEQ ID NO: 479597 - RNA, 19 nt, Artificial Sequence
  Description of Artificial Sequence: Synthetic oligonucleotide
  Sense strand starting at position 2737 of SEQ ID NO: 317293
cgacuuugacguggguuua

SEQ ID NO: 479598 - RNA, 19 nt, Artificial Sequence
  Description of Artificial Sequence: Synthetic oligonucleotide
  Antisense Strand to SEQ ID NO: 479597
uaaacccacgucaaagucg

SEQ ID NO: 479599 - RNA, 19 nt, Artificial Sequence
  Description of Artificial Sequence: Synthetic oligonucleotide
  Sense strand starting at position 2877 of SEQ ID NO: 317293
ggguuacauuguuuccuua

SEQ ID NO: 479600 - RNA, 19 nt, Artificial Sequence
  Description of Artificial Sequence: Synthetic oligonucleotide
  Antisense Strand to SEQ ID NO: 479599
uaaggaaacaauguaaccc

SEQ ID NO: 479601 - RNA, 19 nt, Artificial Sequence
  Description of Artificial Sequence: Synthetic oligonucleotide
  Sense strand starting at position 2879 of SEQ ID NO: 317293
guuacauuguuuccuuaca

SEQ ID NO: 479602 - RNA, 19 nt, Artificial Sequence
  Description of Artificial Sequence: Synthetic oligonucleotide
  Antisense Strand to SEQ ID NO: 479601
uguaaggaaacaauguaac

SEQ ID NO: 479603 - RNA, 19 nt, Artificial Sequence
  Description of Artificial Sequence: Synthetic oligonucleotide
  Sense strand starting at position 2887 of SEQ ID NO: 317293
guuuccuuacagugaguuu

SEQ ID NO: 479604 - RNA, 19 nt, Artificial Sequence
  Description of Artificial Sequence: Synthetic oligonucleotide
  Antisense Strand to SEQ ID NO: 479603
aaacucacuguaaggaaac

SEQ ID NO: 479605 - RNA, 19 nt, Artificial Sequence
  Description of Artificial Sequence: Synthetic oligonucleotide
  Sense strand starting at position 3161 of SEQ ID NO: 317293
gccaccuuacagugaguuu

SEQ ID NO: 479606 - RNA, 19 nt, Artificial Sequence
  Description of Artificial Sequence: Synthetic oligonucleotide
  Antisense Strand to SEQ ID NO: 479605
aaacucacuguaagguggc

SEQ ID NO: 479607 - RNA, 19 nt, Artificial Sequence
  Description of Artificial Sequence: Synthetic oligonucleotide
  Sense strand starting at position 3164 of SEQ ID NO: 317293
accuuacagugaguuucua

SEQ ID NO: 479608 - RNA, 19 nt, Artificial Sequence
  Description of Artificial Sequence: Synthetic oligonucleotide
  Antisense Strand to SEQ ID NO: 479607
uagaaacucacuguaaggu

SEQ ID NO: 479609 - RNA, 19 nt, Artificial Sequence
  Description of Artificial Sequence: Synthetic oligonucleotide
  Sense strand starting at position 3172 of SEQ ID NO: 317293
gugaguuucuaaccucgaa

SEQ ID NO: 479610 - RNA, 19 nt, Artificial Sequence
  Description of Artificial Sequence: Synthetic oligonucleotide
  Antisense Strand to SEQ ID NO: 479609
uucgagguuagaaacucac

SEQ ID NO: 479611 - RNA, 19 nt, Artificial Sequence
  Description of Artificial Sequence: Synthetic oligonucleotide
  Sense strand starting at position 3263 of SEQ ID NO: 317293
acaauauguguuugcuauu

SEQ ID NO: 479612 - RNA, 19 nt, Artificial Sequence
  Description of Artificial Sequence: Synthetic oligonucleotide
  Antisense Strand to SEQ ID NO: 479611
aauagcaaacacauauugu

SEQ ID NO: 479613 - RNA, 19 nt, Artificial Sequence
  Description of Artificial Sequence: Synthetic oligonucleotide
  Sense strand starting at position 3285 of SEQ ID NO: 317293
cguaauuguaaggaaaucu

SEQ ID NO: 479614 - RNA, 19 nt, Artificial Sequence
  Description of Artificial Sequence: Synthetic oligonucleotide
  Antisense Strand to SEQ ID NO: 479613
agauuuccuuacaauuacg

SEQ ID NO: 479615 - RNA, 19 nt, Artificial Sequence
  Description of Artificial Sequence: Synthetic oligonucleotide
  Sense strand starting at position 3294 of SEQ ID NO: 317293
aaggaaaucuggcauggua

SEQ ID NO: 479616 - RNA, 19 nt, Artificial Sequence
  Description of Artificial Sequence: Synthetic oligonucleotide
  Antisense Strand to SEQ ID NO: 479615
uaccaugccagauuuccuu

SEQ ID NO: 479617 - RNA, 19 nt, Artificial Sequence
  Description of Artificial Sequence: Synthetic oligonucleotide
  Sense strand starting at position 3296 of SEQ ID NO: 317293
ggaaaucuggcaugguaga

SEQ ID NO: 479618 - RNA, 19 nt, Artificial Sequence
  Description of Artificial Sequence: Synthetic oligonucleotide
  Antisense Strand to SEQ ID NO: 479617
ucuaccaugccagauuucc

SEQ ID NO: 479619 - RNA, 19 nt, Artificial Sequence
  Description of Artificial Sequence: Synthetic oligonucleotide
  Sense strand starting at position 3309 of SEQ ID NO: 317293
gguagaguaucugauagau

SEQ ID NO: 479620 - RNA, 19 nt, Artificial Sequence
  Description of Artificial Sequence: Synthetic oligonucleotide
  Antisense Strand to SEQ ID NO: 479619
aucuaucagauacucuacc

SEQ ID NO: 479621 - RNA, 19 nt, Artificial Sequence
  Description of Artificial Sequence: Synthetic oligonucleotide
  Sense strand starting at position 3311 of SEQ ID NO: 317293
uagaguaucugauagauaa

SEQ ID NO: 479622 - RNA, 19 nt, Artificial Sequence
  Description of Artificial Sequence: Synthetic oligonucleotide
  Antisense Strand to SEQ ID NO: 479621
uuaucuaucagauacucua

SEQ ID NO: 479623 - RNA, 19 nt, Artificial Sequence
  Description of Artificial Sequence: Synthetic oligonucleotide
  Sense strand starting at position 3924 of SEQ ID NO: 317293
ggcucaaguuaucugcuca

SEQ ID NO: 479624 - RNA, 19 nt, Artificial Sequence
  Description of Artificial Sequence: Synthetic oligonucleotide
  Antisense Strand to SEQ ID NO: 479623
ugagcagauaacuugagcc

SEQ ID NO: 479625 - RNA, 19 nt, Artificial Sequence
  Description of Artificial Sequence: Synthetic oligonucleotide
  Sense strand starting at position 115 of SEQ ID NO: 317294
aaguguuaagggcaaguuu

SEQ ID NO: 479626 - RNA, 19 nt, Artificial Sequence
  Description of Artificial Sequence: Synthetic oligonucleotide
  Antisense Strand to SEQ ID NO: 479625
aaacuugcccuuaacacuu

SEQ ID NO: 479627 - RNA, 19 nt, Artificial Sequence
  Description of Artificial Sequence: Synthetic oligonucleotide
  Sense strand starting at position 126 of SEQ ID NO: 317294
gcaaguuuaaaguagguua

SEQ ID NO: 479628 - RNA, 19 nt, Artificial Sequence
  Description of Artificial Sequence: Synthetic oligonucleotide
  Antisense Strand to SEQ ID NO: 479627
uaaccuacuuuaaacuugc

SEQ ID NO: 479629 - RNA, 19 nt, Artificial Sequence
  Description of Artificial Sequence: Synthetic oligonucleotide
  Sense strand starting at position 129 of SEQ ID NO: 317294
aguuuaaaguagguuacaa

SEQ ID NO: 479630 - RNA, 19 nt, Artificial Sequence
  Description of Artificial Sequence: Synthetic oligonucleotide
  Antisense Strand to SEQ ID NO: 479629
uuguaaccuacuuuaaacu

SEQ ID NO: 479631 - RNA, 19 nt, Artificial Sequence
  Description of Artificial Sequence: Synthetic oligonucleotide
  Sense strand starting at position 191 of SEQ ID NO: 317294
uuucucagauugguuuaaa

SEQ ID NO: 479632 - RNA, 19 nt, Artificial Sequence
  Description of Artificial Sequence: Synthetic oligonucleotide
  Antisense Strand to SEQ ID NO: 479631
uuuaaaccaaucugagaaa

SEQ ID NO: 479633 - RNA, 19 nt, Artificial Sequence
  Description of Artificial Sequence: Synthetic oligonucleotide
  Sense strand starting at position 234 of SEQ ID NO: 317294
gcucaugaauguuuaguaa

SEQ ID NO: 479634 - RNA, 19 nt, Artificial Sequence
  Description of Artificial Sequence: Synthetic oligonucleotide
  Antisense Strand to SEQ ID NO: 479633
uuacuaaacauucaugagc

SEQ ID NO: 479635 - RNA, 19 nt, Artificial Sequence
  Description of Artificial Sequence: Synthetic oligonucleotide
  Sense strand starting at position 291 of SEQ ID NO: 317294
uccaucgucaagggaugaa

SEQ ID NO: 479636 - RNA, 19 nt, Artificial Sequence
  Description of Artificial Sequence: Synthetic oligonucleotide
  Antisense Strand to SEQ ID NO: 479635
uucaucccuugacgaugga

SEQ ID NO: 479637 - RNA, 19 nt, Artificial Sequence
  Description of Artificial Sequence: Synthetic oligonucleotide
  Sense strand starting at position 304 of SEQ ID NO: 317294
gaugaaagcucaguaaguu

SEQ ID NO: 479638 - RNA, 19 nt, Artificial Sequence
  Description of Artificial Sequence: Synthetic oligonucleotide
  Antisense Strand to SEQ ID NO: 479637
aacuuacugagcuuucauc

SEQ ID NO: 479639 - RNA, 19 nt, Artificial Sequence
  Description of Artificial Sequence: Synthetic oligonucleotide
  Sense strand starting at position 305 of SEQ ID NO: 317294
augaaagcucaguaaguuc

SEQ ID NO: 479640 - RNA, 19 nt, Artificial Sequence
  Description of Artificial Sequence: Synthetic oligonucleotide
  Antisense Strand to SEQ ID NO: 479639
gaacuuacugagcuuucau

SEQ ID NO: 479641 - RNA, 19 nt, Artificial Sequence
  Description of Artificial Sequence: Synthetic oligonucleotide
  Sense strand starting at position 602 of SEQ ID NO: 317294
gaccauucugagugccuaa

SEQ ID NO: 479642 - RNA, 19 nt, Artificial Sequence
  Description of Artificial Sequence: Synthetic oligonucleotide
  Antisense Strand to SEQ ID NO: 479641
uuaggcacucagaaugguc

SEQ ID NO: 479643 - RNA, 19 nt, Artificial Sequence
  Description of Artificial Sequence: Synthetic oligonucleotide
  Sense strand starting at position 625 of SEQ ID NO: 317294
agaauagaguaacaucaaa

SEQ ID NO: 479644 - RNA, 19 nt, Artificial Sequence
  Description of Artificial Sequence: Synthetic oligonucleotide
  Antisense Strand to SEQ ID NO: 479643
uuugauguuacucuauucu

SEQ ID NO: 479645 - RNA, 19 nt, Artificial Sequence
  Description of Artificial Sequence: Synthetic oligonucleotide
  Sense strand starting at position 679 of SEQ ID NO: 317294
aguaucauguggucuauuu

SEQ ID NO: 479646 - RNA, 19 nt, Artificial Sequence
  Description of Artificial Sequence: Synthetic oligonucleotide
  Antisense Strand to SEQ ID NO: 479645
aaauagaccacaugauacu

SEQ ID NO: 479647 - RNA, 19 nt, Artificial Sequence
  Description of Artificial Sequence: Synthetic oligonucleotide
  Sense strand starting at position 806 of SEQ ID NO: 317294
guuagcuuuccugauggua

SEQ ID NO: 479648 - RNA, 19 nt, Artificial Sequence
  Description of Artificial Sequence: Synthetic oligonucleotide
  Antisense Strand to SEQ ID NO: 479647
uaccaucaggaaagcuaac

SEQ ID NO: 479649 - RNA, 19 nt, Artificial Sequence
  Description of Artificial Sequence: Synthetic oligonucleotide
  Sense strand starting at position 988 of SEQ ID NO: 317294
gccauuuacugggaauaua

SEQ ID NO: 479650 - RNA, 19 nt, Artificial Sequence
  Description of Artificial Sequence: Synthetic oligonucleotide
  Antisense Strand to SEQ ID NO: 479649
uauauucccaguaaauggc

SEQ ID NO: 479651 - RNA, 19 nt, Artificial Sequence
  Description of Artificial Sequence: Synthetic oligonucleotide
  Sense strand starting at position 1040 of SEQ ID NO: 317294
ugggaauucugucuacuuu

SEQ ID NO: 479652 - RNA, 19 nt, Artificial Sequence
  Description of Artificial Sequence: Synthetic oligonucleotide
  Antisense Strand to SEQ ID NO: 479651
aaaguagacagaauuccca

SEQ ID NO: 479653 - RNA, 19 nt, Artificial Sequence
  Description of Artificial Sequence: Synthetic oligonucleotide
  Sense strand starting at position 1041 of SEQ ID NO: 317294
gggaauucugucuacuuua

SEQ ID NO: 479654 - RNA, 19 nt, Artificial Sequence
  Description of Artificial Sequence: Synthetic oligonucleotide
  Antisense Strand to SEQ ID NO: 479653
uaaaguagacagaauuccc

SEQ ID NO: 479655 - RNA, 19 nt, Artificial Sequence
  Description of Artificial Sequence: Synthetic oligonucleotide
  Sense strand starting at position 1060 of SEQ ID NO: 317294
uacagcugucauuaggauu

SEQ ID NO: 479656 - RNA, 19 nt, Artificial Sequence
  Description of Artificial Sequence: Synthetic oligonucleotide
  Antisense Strand to SEQ ID NO: 479655
aauccuaaugacagcugua

SEQ ID NO: 479657 - RNA, 19 nt, Artificial Sequence
  Description of Artificial Sequence: Synthetic oligonucleotide
  Sense strand starting at position 1193 of SEQ ID NO: 317294
acacaaguuucuuuggguu

SEQ ID NO: 479658 - RNA, 19 nt, Artificial Sequence
  Description of Artificial Sequence: Synthetic oligonucleotide
  Antisense Strand to SEQ ID NO: 479657
aacccaaagaaacuugugu

SEQ ID NO: 479659 - RNA, 19 nt, Artificial Sequence
  Description of Artificial Sequence: Synthetic oligonucleotide
  Sense strand starting at position 1237 of SEQ ID NO: 317294
uggaaacaucgugauguua

SEQ ID NO: 479660 - RNA, 19 nt, Artificial Sequence
  Description of Artificial Sequence: Synthetic oligonucleotide
  Antisense Strand to SEQ ID NO: 479659
uaacaucacgauguuucca

SEQ ID NO: 479661 - RNA, 19 nt, Artificial Sequence
  Description of Artificial Sequence: Synthetic oligonucleotide
  Sense strand starting at position 1245 of SEQ ID NO: 317294
ucgugauguuauuuagcaa

SEQ ID NO: 479662 - RNA, 19 nt, Artificial Sequence
  Description of Artificial Sequence: Synthetic oligonucleotide
  Antisense Strand to SEQ ID NO: 479661
uugcuaaauaacaucacga

SEQ ID NO: 479663 - RNA, 19 nt, Artificial Sequence
  Description of Artificial Sequence: Synthetic oligonucleotide
  Sense strand starting at position 1258 of SEQ ID NO: 317294
uagcaaaucgguuauacag

SEQ ID NO: 479664 - RNA, 19 nt, Artificial Sequence
  Description of Artificial Sequence: Synthetic oligonucleotide
  Antisense Strand to SEQ ID NO: 479663
cuguauaaccgauuugcua

SEQ ID NO: 479665 - RNA, 19 nt, Artificial Sequence
  Description of Artificial Sequence: Synthetic oligonucleotide
  Sense strand starting at position 1266 of SEQ ID NO: 317294
cgguuauacagauaugcau

SEQ ID NO: 479666 - RNA, 19 nt, Artificial Sequence
  Description of Artificial Sequence: Synthetic oligonucleotide
  Antisense Strand to SEQ ID NO: 479665
augcauaucuguauaaccg

SEQ ID NO: 479667 - RNA, 19 nt, Artificial Sequence
  Description of Artificial Sequence: Synthetic oligonucleotide
  Sense strand starting at position 1287 of SEQ ID NO: 317294
gagcaacuucguuaaggga

SEQ ID NO: 479668 - RNA, 19 nt, Artificial Sequence
  Description of Artificial Sequence: Synthetic oligonucleotide
  Antisense Strand to SEQ ID NO: 479667
ucccuuaacgaaguugcuc

SEQ ID NO: 479669 - RNA, 19 nt, Artificial Sequence
  Description of Artificial Sequence: Synthetic oligonucleotide
  Sense strand starting at position 1453 of SEQ ID NO: 317294
cagugcgagugauuuauga

SEQ ID NO: 479670 - RNA, 19 nt, Artificial Sequence
  Description of Artificial Sequence: Synthetic oligonucleotide
  Antisense Strand to SEQ ID NO: 479669
ucauaaaucacucgcacug

SEQ ID NO: 479671 - RNA, 19 nt, Artificial Sequence
  Description of Artificial Sequence: Synthetic oligonucleotide
  Sense strand starting at position 2023 of SEQ ID NO: 317294
aauagaauugcgcaggaca

SEQ ID NO: 479672 - RNA, 19 nt, Artificial Sequence
  Description of Artificial Sequence: Synthetic oligonucleotide
  Antisense Strand to SEQ ID NO: 479671
uguccugcgcaauucuauu

SEQ ID NO: 479673 - RNA, 19 nt, Artificial Sequence
  Description of Artificial Sequence: Synthetic oligonucleotide
  Sense strand starting at position 2208 of SEQ ID NO: 317294
auuggaaaucgcuguggaa

SEQ ID NO: 479674 - RNA, 19 nt, Artificial Sequence
  Description of Artificial Sequence: Synthetic oligonucleotide
  Antisense Strand to SEQ ID NO: 479673
uuccacagcgauuuccaau

SEQ ID NO: 479675 - RNA, 19 nt, Artificial Sequence
  Description of Artificial Sequence: Synthetic oligonucleotide
  Sense strand starting at position 2210 of SEQ ID NO: 317294
uggaaaucgcuguggaaac

SEQ ID NO: 479676 - RNA, 19 nt, Artificial Sequence
  Description of Artificial Sequence: Synthetic oligonucleotide
  Antisense Strand to SEQ ID NO: 479675
guuuccacagcgauuucca

SEQ ID NO: 479677 - RNA, 19 nt, Artificial Sequence
  Description of Artificial Sequence: Synthetic oligonucleotide
  Sense strand starting at position 2518 of SEQ ID NO: 317294
ugagcaagcccuuaaaucu

SEQ ID NO: 479678 - RNA, 19 nt, Artificial Sequence
  Description of Artificial Sequence: Synthetic oligonucleotide
  Antisense Strand to SEQ ID NO: 479677
agauuuaagggcuugcuca

SEQ ID NO: 479679 - RNA, 19 nt, Artificial Sequence
  Description of Artificial Sequence: Synthetic oligonucleotide
  Sense strand starting at position 2543 of SEQ ID NO: 317294
ggaagauauuaggaacuac

SEQ ID NO: 479680 - RNA, 19 nt, Artificial Sequence
  Description of Artificial Sequence: Synthetic oligonucleotide
  Antisense Strand to SEQ ID NO: 479679
guaguuccuaauaucuucc

SEQ ID NO: 479681 - RNA, 19 nt, Artificial Sequence
  Description of Artificial Sequence: Synthetic oligonucleotide
  Sense strand starting at position 2568 of SEQ ID NO: 317294
auguuaugucaugaucaaa

SEQ ID NO: 479682 - RNA, 19 nt, Artificial Sequence
  Description of Artificial Sequence: Synthetic oligonucleotide
  Antisense Strand to SEQ ID NO: 479681
uuugaucaugacauaacau

SEQ ID NO: 479683 - RNA, 19 nt, Artificial Sequence
  Description of Artificial Sequence: Synthetic oligonucleotide
  Sense strand starting at position 2618 of SEQ ID NO: 317294
gucuuauagagaggaagug

SEQ ID NO: 479684 - RNA, 19 nt, Artificial Sequence
  Description of Artificial Sequence: Synthetic oligonucleotide
  Antisense Strand to SEQ ID NO: 479683
cacuuccucucuauaagac

SEQ ID NO: 479685 - RNA, 19 nt, Artificial Sequence
  Description of Artificial Sequence: Synthetic oligonucleotide
  Sense strand starting at position 2640 of SEQ ID NO: 317294
aguaaaugguugcuaaucu

SEQ ID NO: 479686 - RNA, 19 nt, Artificial Sequence
  Description of Artificial Sequence: Synthetic oligonucleotide
  Antisense Strand to SEQ ID NO: 479685
agauuagcaaccauuuacu

SEQ ID NO: 479687 - RNA, 19 nt, Artificial Sequence
  Description of Artificial Sequence: Synthetic oligonucleotide
  Sense strand starting at position 2700 of SEQ ID NO: 317294
gguaaaguuuaaccuuuaa

SEQ ID NO: 479688 - RNA, 19 nt, Artificial Sequence
  Description of Artificial Sequence: Synthetic oligonucleotide
  Antisense Strand to SEQ ID NO: 479687
uuaaagguuaaacuuuacc

SEQ ID NO: 479689 - RNA, 19 nt, Artificial Sequence
  Description of Artificial Sequence: Synthetic oligonucleotide
  Sense strand starting at position 2887 of SEQ ID NO: 317294
agaucaggcucccuggaaa

SEQ ID NO: 479690 - RNA, 19 nt, Artificial Sequence
  Description of Artificial Sequence: Synthetic oligonucleotide
  Antisense Strand to SEQ ID NO: 479689
uuuccagggagccugaucu

SEQ ID NO: 479691 - RNA, 19 nt, Artificial Sequence
  Description of Artificial Sequence: Synthetic oligonucleotide
  Sense strand starting at position 3149 of SEQ ID NO: 317294
aacugugaggccuauugau

SEQ ID NO: 479692 - RNA, 19 nt, Artificial Sequence
  Description of Artificial Sequence: Synthetic oligonucleotide
  Antisense Strand to SEQ ID NO: 479691
aucaauaggccucacaguu

SEQ ID NO: 479693 - RNA, 19 nt, Artificial Sequence
  Description of Artificial Sequence: Synthetic oligonucleotide
  Sense strand starting at position 3210 of SEQ ID NO: 317294
gauggaaggcucugguuau

SEQ ID NO: 479694 - RNA, 19 nt, Artificial Sequence
  Description of Artificial Sequence: Synthetic oligonucleotide
  Antisense Strand to SEQ ID NO: 479693
auaaccagagccuuccauc

SEQ ID NO: 479695 - RNA, 19 nt, Artificial Sequence
  Description of Artificial Sequence: Synthetic oligonucleotide
  Sense strand starting at position 3347 of SEQ ID NO: 317294
ggcauugagauggaagcuu

SEQ ID NO: 479696 - RNA, 19 nt, Artificial Sequence
  Description of Artificial Sequence: Synthetic oligonucleotide
  Antisense Strand to SEQ ID NO: 479695
aagcuuccaucucaaugcc

SEQ ID NO: 479697 - RNA, 19 nt, Artificial Sequence
  Description of Artificial Sequence: Synthetic oligonucleotide
  Sense strand starting at position 3369 of SEQ ID NO: 317294
uagagagacaaaugugguu

SEQ ID NO: 479698 - RNA, 19 nt, Artificial Sequence
  Description of Artificial Sequence: Synthetic oligonucleotide
  Antisense Strand to SEQ ID NO: 479697
aaccacauuugucucucua

SEQ ID NO: 479699 - RNA, 19 nt, Artificial Sequence
  Description of Artificial Sequence: Synthetic oligonucleotide
  Sense strand starting at position 3543 of SEQ ID NO: 317294
uaagaauaguggucucauu

SEQ ID NO: 479700 - RNA, 19 nt, Artificial Sequence
  Description of Artificial Sequence: Synthetic oligonucleotide
  Antisense Strand to SEQ ID NO: 479699
aaugagaccacuauucuua

SEQ ID NO: 479701 - RNA, 19 nt, Artificial Sequence
  Description of Artificial Sequence: Synthetic oligonucleotide
  Sense strand starting at position 3756 of SEQ ID NO: 317294
cacugagaccuguaguuaa

SEQ ID NO: 479702 - RNA, 19 nt, Artificial Sequence
  Description of Artificial Sequence: Synthetic oligonucleotide
  Antisense Strand to SEQ ID NO: 479701
uuaacuacaggucucagug

SEQ ID NO: 479703 - RNA, 19 nt, Artificial Sequence
  Description of Artificial Sequence: Synthetic oligonucleotide
  Sense strand starting at position 3759 of SEQ ID NO: 317294
ugagaccuguaguuaaaga

SEQ ID NO: 479704 - RNA, 19 nt, Artificial Sequence
  Description of Artificial Sequence: Synthetic oligonucleotide
  Antisense Strand to SEQ ID NO: 479703
ucuuuaacuacaggucuca

SEQ ID NO: 479705 - RNA, 19 nt, Artificial Sequence
  Description of Artificial Sequence: Synthetic oligonucleotide
  Sense strand starting at position 142 of SEQ ID NO: 317295
aaguguuaagggcaaguuu

SEQ ID NO: 479706 - RNA, 19 nt, Artificial Sequence
  Description of Artificial Sequence: Synthetic oligonucleotide
  Antisense Strand to SEQ ID NO: 479705
aaacuugcccuuaacacuu

SEQ ID NO: 479707 - RNA, 19 nt, Artificial Sequence
  Description of Artificial Sequence: Synthetic oligonucleotide
  Sense strand starting at position 153 of SEQ ID NO: 317295
gcaaguuuaaaguagguua

SEQ ID NO: 479708 - RNA, 19 nt, Artificial Sequence
  Description of Artificial Sequence: Synthetic oligonucleotide
  Antisense Strand to SEQ ID NO: 479707
uaaccuacuuuaaacuugc

SEQ ID NO: 479709 - RNA, 19 nt, Artificial Sequence
  Description of Artificial Sequence: Synthetic oligonucleotide
  Sense strand starting at position 156 of SEQ ID NO: 317295
aguuuaaaguagguuacaa

SEQ ID NO: 479710 - RNA, 19 nt, Artificial Sequence
  Description of Artificial Sequence: Synthetic oligonucleotide
  Antisense Strand to SEQ ID NO: 479709
uuguaaccuacuuuaaacu

SEQ ID NO: 479711 - RNA, 19 nt, Artificial Sequence
  Description of Artificial Sequence: Synthetic oligonucleotide
  Sense strand starting at position 218 of SEQ ID NO: 317295
uuucucagauugguuuaaa

SEQ ID NO: 479712 - RNA, 19 nt, Artificial Sequence
  Description of Artificial Sequence: Synthetic oligonucleotide
  Antisense Strand to SEQ ID NO: 479711
uuuaaaccaaucugagaaa

SEQ ID NO: 479713 - RNA, 19 nt, Artificial Sequence
  Description of Artificial Sequence: Synthetic oligonucleotide
  Sense strand starting at position 261 of SEQ ID NO: 317295
gcucaugaauguuuaguaa

SEQ ID NO: 479714 - RNA, 19 nt, Artificial Sequence
  Description of Artificial Sequence: Synthetic oligonucleotide
  Antisense Strand to SEQ ID NO: 479713
uuacuaaacauucaugagc

SEQ ID NO: 479715 - RNA, 19 nt, Artificial Sequence
  Description of Artificial Sequence: Synthetic oligonucleotide
  Sense strand starting at position 318 of SEQ ID NO: 317295
uccaucgucaagggaugaa

SEQ ID NO: 479716 - RNA, 19 nt, Artificial Sequence
  Description of Artificial Sequence: Synthetic oligonucleotide
  Antisense Strand to SEQ ID NO: 479715
uucaucccuugacgaugga

SEQ ID NO: 479717 - RNA, 19 nt, Artificial Sequence
  Description of Artificial Sequence: Synthetic oligonucleotide
  Sense strand starting at position 331 of SEQ ID NO: 317295
gaugaaagcucaguaaguu

SEQ ID NO: 479718 - RNA, 19 nt, Artificial Sequence
  Description of Artificial Sequence: Synthetic oligonucleotide
  Antisense Strand to SEQ ID NO: 479717
aacuuacugagcuuucauc

SEQ ID NO: 479719 - RNA, 19 nt, Artificial Sequence
  Description of Artificial Sequence: Synthetic oligonucleotide
  Sense strand starting at position 332 of SEQ ID NO: 317295
augaaagcucaguaaguuc

SEQ ID NO: 479720 - RNA, 19 nt, Artificial Sequence
  Description of Artificial Sequence: Synthetic oligonucleotide
  Antisense Strand to SEQ ID NO: 479719
gaacuuacugagcuuucau

SEQ ID NO: 479721 - RNA, 19 nt, Artificial Sequence
  Description of Artificial Sequence: Synthetic oligonucleotide
  Sense strand starting at position 629 of SEQ ID NO: 317295
gaccauucugagugccuaa

SEQ ID NO: 479722 - RNA, 19 nt, Artificial Sequence
  Description of Artificial Sequence: Synthetic oligonucleotide
  Antisense Strand to SEQ ID NO: 479721
uuaggcacucagaaugguc

SEQ ID NO: 479723 - RNA, 19 nt, Artificial Sequence
  Description of Artificial Sequence: Synthetic oligonucleotide
  Sense strand starting at position 652 of SEQ ID NO: 317295
agaauagaguaacaucaaa

SEQ ID NO: 479724 - RNA, 19 nt, Artificial Sequence
  Description of Artificial Sequence: Synthetic oligonucleotide
  Antisense Strand to SEQ ID NO: 479723
uuugauguuacucuauucu

SEQ ID NO: 479725 - RNA, 19 nt, Artificial Sequence
  Description of Artificial Sequence: Synthetic oligonucleotide
  Sense strand starting at position 706 of SEQ ID NO: 317295
aguaucauguggucuauuu

SEQ ID NO: 479726 - RNA, 19 nt, Artificial Sequence
  Description of Artificial Sequence: Synthetic oligonucleotide
  Antisense Strand to SEQ ID NO: 479725
aaauagaccacaugauacu

SEQ ID NO: 479727 - RNA, 19 nt, Artificial Sequence
  Description of Artificial Sequence: Synthetic oligonucleotide
  Sense strand starting at position 833 of SEQ ID NO: 317295
guuagcuuuccugauggua

SEQ ID NO: 479728 - RNA, 19 nt, Artificial Sequence
  Description of Artificial Sequence: Synthetic oligonucleotide
  Antisense Strand to SEQ ID NO: 479727
uaccaucaggaaagcuaac

SEQ ID NO: 479729 - RNA, 19 nt, Artificial Sequence
  Description of Artificial Sequence: Synthetic oligonucleotide
  Sense strand starting at position 1015 of SEQ ID NO: 317295
gccauuuacugggaauaua

SEQ ID NO: 479730 - RNA, 19 nt, Artificial Sequence
  Description of Artificial Sequence: Synthetic oligonucleotide
  Antisense Strand to SEQ ID NO: 479729
uauauucccaguaaauggc

SEQ ID NO: 479731 - RNA, 19 nt, Artificial Sequence
  Description of Artificial Sequence: Synthetic oligonucleotide
  Sense strand starting at position 1067 of SEQ ID NO: 317295
ugggaauucugucuacuuu

SEQ ID NO: 479732 - RNA, 19 nt, Artificial Sequence
  Description of Artificial Sequence: Synthetic oligonucleotide
  Antisense Strand to SEQ ID NO: 479731
aaaguagacagaauuccca

SEQ ID NO: 479733 - RNA, 19 nt, Artificial Sequence
  Description of Artificial Sequence: Synthetic oligonucleotide
  Sense strand starting at position 1068 of SEQ ID NO: 317295
gggaauucugucuacuuua

SEQ ID NO: 479734 - RNA, 19 nt, Artificial Sequence
  Description of Artificial Sequence: Synthetic oligonucleotide
  Antisense Strand to SEQ ID NO: 479733
uaaaguagacagaauuccc

SEQ ID NO: 479735 - RNA, 19 nt, Artificial Sequence
  Description of Artificial Sequence: Synthetic oligonucleotide
  Sense strand starting at position 1087 of SEQ ID NO: 317295
uacagcugucauuaggauu

SEQ ID NO: 479736 - RNA, 19 nt, Artificial Sequence
  Description of Artificial Sequence: Synthetic oligonucleotide
  Antisense Strand to SEQ ID NO: 479735
aauccuaaugacagcugua

SEQ ID NO: 479737 - RNA, 19 nt, Artificial Sequence
  Description of Artificial Sequence: Synthetic oligonucleotide
  Sense strand starting at position 1220 of SEQ ID NO: 317295
acacaaguuucuuuggguu

SEQ ID NO: 479738 - RNA, 19 nt, Artificial Sequence
  Description of Artificial Sequence: Synthetic oligonucleotide
  Antisense Strand to SEQ ID NO: 479737
aacccaaagaaacuugugu

SEQ ID NO: 479739 - RNA, 19 nt, Artificial Sequence
  Description of Artificial Sequence: Synthetic oligonucleotide
  Sense strand starting at position 1264 of SEQ ID NO: 317295
uggaaacaucgugauguua

SEQ ID NO: 479740 - RNA, 19 nt, Artificial Sequence
  Description of Artificial Sequence: Synthetic oligonucleotide
  Antisense Strand to SEQ ID NO: 479739
uaacaucacgauguuucca

SEQ ID NO: 479741 - RNA, 19 nt, Artificial Sequence
  Description of Artificial Sequence: Synthetic oligonucleotide
  Sense strand starting at position 1272 of SEQ ID NO: 317295
ucgugauguuauuuagcaa

SEQ ID NO: 479742 - RNA, 19 nt, Artificial Sequence
  Description of Artificial Sequence: Synthetic oligonucleotide
  Antisense Strand to SEQ ID NO: 479741
uugcuaaauaacaucacga

SEQ ID NO: 479743 - RNA, 19 nt, Artificial Sequence
  Description of Artificial Sequence: Synthetic oligonucleotide
  Sense strand starting at position 1285 of SEQ ID NO: 317295
uagcaaaucgguuauacag

SEQ ID NO: 479744 - RNA, 19 nt, Artificial Sequence
  Description of Artificial Sequence: Synthetic oligonucleotide
  Antisense Strand to SEQ ID NO: 479743
cuguauaaccgauuugcua

SEQ ID NO: 479745 - RNA, 19 nt, Artificial Sequence
  Description of Artificial Sequence: Synthetic oligonucleotide
  Sense strand starting at position 1293 of SEQ ID NO: 317295
cgguuauacagauaugcau

SEQ ID NO: 479746 - RNA, 19 nt, Artificial Sequence
  Description of Artificial Sequence: Synthetic oligonucleotide
  Antisense Strand to SEQ ID NO: 479745
augcauaucuguauaaccg

SEQ ID NO: 479747 - RNA, 19 nt, Artificial Sequence
  Description of Artificial Sequence: Synthetic oligonucleotide
  Sense strand starting at position 1314 of SEQ ID NO: 317295
gagcaacuucguuaaggga

SEQ ID NO: 479748 - RNA, 19 nt, Artificial Sequence
  Description of Artificial Sequence: Synthetic oligonucleotide
  Antisense Strand to SEQ ID NO: 479747
ucccuuaacgaaguugcuc

SEQ ID NO: 479749 - RNA, 19 nt, Artificial Sequence
  Description of Artificial Sequence: Synthetic oligonucleotide
  Sense strand starting at position 1480 of SEQ ID NO: 317295
cagugcgagugauuuauga

SEQ ID NO: 479750 - RNA, 19 nt, Artificial Sequence
  Description of Artificial Sequence: Synthetic oligonucleotide
  Antisense Strand to SEQ ID NO: 479749
ucauaaaucacucgcacug

SEQ ID NO: 479751 - RNA, 19 nt, Artificial Sequence
  Description of Artificial Sequence: Synthetic oligonucleotide
  Sense strand starting at position 2050 of SEQ ID NO: 317295
aauagaauugcgcaggaca

SEQ ID NO: 479752 - RNA, 19 nt, Artificial Sequence
  Description of Artificial Sequence: Synthetic oligonucleotide
  Antisense Strand to SEQ ID NO: 479751
uguccugcgcaauucuauu

SEQ ID NO: 479753 - RNA, 19 nt, Artificial Sequence
  Description of Artificial Sequence: Synthetic oligonucleotide
  Sense strand starting at position 2235 of SEQ ID NO: 317295
auuggaaaucgcuguggaa

SEQ ID NO: 479754 - RNA, 19 nt, Artificial Sequence
  Description of Artificial Sequence: Synthetic oligonucleotide
  Antisense Strand to SEQ ID NO: 479753
uuccacagcgauuuccaau

SEQ ID NO: 479755 - RNA, 19 nt, Artificial Sequence
  Description of Artificial Sequence: Synthetic oligonucleotide
  Sense strand starting at position 2237 of SEQ ID NO: 317295
uggaaaucgcuguggaaac

SEQ ID NO: 479756 - RNA, 19 nt, Artificial Sequence
  Description of Artificial Sequence: Synthetic oligonucleotide
  Antisense Strand to SEQ ID NO: 479755
guuuccacagcgauuucca

SEQ ID NO: 479757 - RNA, 19 nt, Artificial Sequence
  Description of Artificial Sequence: Synthetic oligonucleotide
  Sense strand starting at position 2545 of SEQ ID NO: 317295
ugagcaagcccuuaaaucu

SEQ ID NO: 479758 - RNA, 19 nt, Artificial Sequence
  Description of Artificial Sequence: Synthetic oligonucleotide
  Antisense Strand to SEQ ID NO: 479757
agauuuaagggcuugcuca

SEQ ID NO: 479759 - RNA, 19 nt, Artificial Sequence
  Description of Artificial Sequence: Synthetic oligonucleotide
  Sense strand starting at position 2570 of SEQ ID NO: 317295
ggaagauauuaggaacuac

SEQ ID NO: 479760 - RNA, 19 nt, Artificial Sequence
  Description of Artificial Sequence: Synthetic oligonucleotide
  Antisense Strand to SEQ ID NO: 479759
guaguuccuaauaucuucc

SEQ ID NO: 479761 - RNA, 19 nt, Artificial Sequence
  Description of Artificial Sequence: Synthetic oligonucleotide
  Sense strand starting at position 2595 of SEQ ID NO: 317295
auguuaugucaugaucaaa

SEQ ID NO: 479762 - RNA, 19 nt, Artificial Sequence
  Description of Artificial Sequence: Synthetic oligonucleotide
  Antisense Strand to SEQ ID NO: 479761
uuugaucaugacauaacau

SEQ ID NO: 479763 - RNA, 19 nt, Artificial Sequence
  Description of Artificial Sequence: Synthetic oligonucleotide
  Sense strand starting at position 2645 of SEQ ID NO: 317295
gucuuauagagaggaagug

SEQ ID NO: 479764 - RNA, 19 nt, Artificial Sequence
  Description of Artificial Sequence: Synthetic oligonucleotide
  Antisense Strand to SEQ ID NO: 479763
cacuuccucucuauaagac

SEQ ID NO: 479765 - RNA, 19 nt, Artificial Sequence
  Description of Artificial Sequence: Synthetic oligonucleotide
  Sense strand starting at position 2667 of SEQ ID NO: 317295
aguaaaugguugcuaaucu

SEQ ID NO: 479766 - RNA, 19 nt, Artificial Sequence
  Description of Artificial Sequence: Synthetic oligonucleotide
  Antisense Strand to SEQ ID NO: 479765
agauuagcaaccauuuacu

SEQ ID NO: 479767 - RNA, 19 nt, Artificial Sequence
  Description of Artificial Sequence: Synthetic oligonucleotide
  Sense strand starting at position 2727 of SEQ ID NO: 317295
gguaaaguuuaaccuuuaa

SEQ ID NO: 479768 - RNA, 19 nt, Artificial Sequence
  Description of Artificial Sequence: Synthetic oligonucleotide
  Antisense Strand to SEQ ID NO: 479767
uuaaagguuaaacuuuacc

SEQ ID NO: 479769 - RNA, 19 nt, Artificial Sequence
  Description of Artificial Sequence: Synthetic oligonucleotide
  Sense strand starting at position 2914 of SEQ ID NO: 317295
agaucaggcucccuggaaa

SEQ ID NO: 479770 - RNA, 19 nt, Artificial Sequence
  Description of Artificial Sequence: Synthetic oligonucleotide
  Antisense Strand to SEQ ID NO: 479769
uuuccagggagccugaucu

SEQ ID NO: 479771 - RNA, 19 nt, Artificial Sequence
  Description of Artificial Sequence: Synthetic oligonucleotide
  Sense strand starting at position 3176 of SEQ ID NO: 317295
aacugugaggccuauugau

SEQ ID NO: 479772 - RNA, 19 nt, Artificial Sequence
  Description of Artificial Sequence: Synthetic oligonucleotide
  Antisense Strand to SEQ ID NO: 479771
aucaauaggccucacaguu

SEQ ID NO: 479773 - RNA, 19 nt, Artificial Sequence
  Description of Artificial Sequence: Synthetic oligonucleotide
  Sense strand starting at position 3237 of SEQ ID NO: 317295
gauggaaggcucugguuau

SEQ ID NO: 479774 - RNA, 19 nt, Artificial Sequence
  Description of Artificial Sequence: Synthetic oligonucleotide
  Antisense Strand to SEQ ID NO: 479773
auaaccagagccuuccauc

SEQ ID NO: 479775 - RNA, 19 nt, Artificial Sequence
  Description of Artificial Sequence: Synthetic oligonucleotide
  Sense strand starting at position 3374 of SEQ ID NO: 317295
ggcauugagauggaagcuu

SEQ ID NO: 479776 - RNA, 19 nt, Artificial Sequence
  Description of Artificial Sequence: Synthetic oligonucleotide
  Antisense Strand to SEQ ID NO: 479775
aagcuuccaucucaaugcc

SEQ ID NO: 479777 - RNA, 19 nt, Artificial Sequence
  Description of Artificial Sequence: Synthetic oligonucleotide
  Sense strand starting at position 3396 of SEQ ID NO: 317295
uagagagacaaaugugguu

SEQ ID NO: 479778 - RNA, 19 nt, Artificial Sequence
  Description of Artificial Sequence: Synthetic oligonucleotide
  Antisense Strand to SEQ ID NO: 479777
aaccacauuugucucucua

SEQ ID NO: 479779 - RNA, 19 nt, Artificial Sequence
  Description of Artificial Sequence: Synthetic oligonucleotide
  Sense strand starting at position 3570 of SEQ ID NO: 317295
uaagaauaguggucucauu

SEQ ID NO: 479780 - RNA, 19 nt, Artificial Sequence
  Description of Artificial Sequence: Synthetic oligonucleotide
  Antisense Strand to SEQ ID NO: 479779
aaugagaccacuauucuua

SEQ ID NO: 479781 - RNA, 19 nt, Artificial Sequence
  Description of Artificial Sequence: Synthetic oligonucleotide
  Sense strand starting at position 3783 of SEQ ID NO: 317295
cacugagaccuguaguuaa

SEQ ID NO: 479782 - RNA, 19 nt, Artificial Sequence
  Description of Artificial Sequence: Synthetic oligonucleotide
  Antisense Strand to SEQ ID NO: 479781
uuaacuacaggucucagug

SEQ ID NO: 479783 - RNA, 19 nt, Artificial Sequence
  Description of Artificial Sequence: Synthetic oligonucleotide
  Sense strand starting at position 3786 of SEQ ID NO: 317295
ugagaccuguaguuaaaga

SEQ ID NO: 479784 - RNA, 19 nt, Artificial Sequence
  Description of Artificial Sequence: Synthetic oligonucleotide
  Antisense Strand to SEQ ID NO: 479783
ucuuuaacuacaggucuca

SEQ ID NO: 479785 - RNA, 19 nt, Artificial Sequence
  Description of Artificial Sequence: Synthetic oligonucleotide
  Sense strand starting at position 27 of SEQ ID NO: 317296
aggugcauucuagaaggua

SEQ ID NO: 479786 - RNA, 19 nt, Artificial Sequence
  Description of Artificial Sequence: Synthetic oligonucleotide
  Antisense Strand to SEQ ID NO: 479785
uaccuucuagaaugcaccu

SEQ ID NO: 479787 - RNA, 19 nt, Artificial Sequence
  Description of Artificial Sequence: Synthetic oligonucleotide
  Sense strand starting at position 30 of SEQ ID NO: 317296
ugcauucuagaagguauaa

SEQ ID NO: 479788 - RNA, 19 nt, Artificial Sequence
  Description of Artificial Sequence: Synthetic oligonucleotide
  Antisense Strand to SEQ ID NO: 479787
uuauaccuucuagaaugca

SEQ ID NO: 479789 - RNA, 19 nt, Artificial Sequence
  Description of Artificial Sequence: Synthetic oligonucleotide
  Sense strand starting at position 471 of SEQ ID NO: 317296
agcucuaucgcuuaaagac

SEQ ID NO: 479790 - RNA, 19 nt, Artificial Sequence
  Description of Artificial Sequence: Synthetic oligonucleotide
  Antisense Strand to SEQ ID NO: 479789
gucuuuaagcgauagagcu

SEQ ID NO: 479791 - RNA, 19 nt, Artificial Sequence
  Description of Artificial Sequence: Synthetic oligonucleotide
  Sense strand starting at position 507 of SEQ ID NO: 317296
ugccaaguucuugcguauu

SEQ ID NO: 479792 - RNA, 19 nt, Artificial Sequence
  Description of Artificial Sequence: Synthetic oligonucleotide
  Antisense Strand to SEQ ID NO: 479791
aauacgcaagaacuuggca

SEQ ID NO: 479793 - RNA, 19 nt, Artificial Sequence
  Description of Artificial Sequence: Synthetic oligonucleotide
  Sense strand starting at position 518 of SEQ ID NO: 317296
ugcguauuacaccaaauaa

SEQ ID NO: 479794 - RNA, 19 nt, Artificial Sequence
  Description of Artificial Sequence: Synthetic oligonucleotide
  Antisense Strand to SEQ ID NO: 479793
uuauuugguguaauacgca

SEQ ID NO: 479795 - RNA, 19 nt, Artificial Sequence
  Description of Artificial Sequence: Synthetic oligonucleotide
  Sense strand starting at position 543 of SEQ ID NO: 317296
ugacccauucucugaaaga

SEQ ID NO: 479796 - RNA, 19 nt, Artificial Sequence
  Description of Artificial Sequence: Synthetic oligonucleotide
  Antisense Strand to SEQ ID NO: 479795
ucuuucagagaauggguca

SEQ ID NO: 479797 - RNA, 19 nt, Artificial Sequence
  Description of Artificial Sequence: Synthetic oligonucleotide
  Sense strand starting at position 561 of SEQ ID NO: 317296
agacacuuacgcuguauaa

SEQ ID NO: 479798 - RNA, 19 nt, Artificial Sequence
  Description of Artificial Sequence: Synthetic oligonucleotide
  Antisense Strand to SEQ ID NO: 479797
uuauacagcguaagugucu

SEQ ID NO: 479799 - RNA, 19 nt, Artificial Sequence
  Description of Artificial Sequence: Synthetic oligonucleotide
  Sense strand starting at position 563 of SEQ ID NO: 317296
acacuuacgcuguauaaag

SEQ ID NO: 479800 - RNA, 19 nt, Artificial Sequence
  Description of Artificial Sequence: Synthetic oligonucleotide
  Antisense Strand to SEQ ID NO: 479799
cuuuauacagcguaagugu

SEQ ID NO: 479801 - RNA, 19 nt, Artificial Sequence
  Description of Artificial Sequence: Synthetic oligonucleotide
  Sense strand starting at position 574 of SEQ ID NO: 317296
guauaaagcacagguuuga

SEQ ID NO: 479802 - RNA, 19 nt, Artificial Sequence
  Description of Artificial Sequence: Synthetic oligonucleotide
  Antisense Strand to SEQ ID NO: 479801
ucaaaccugugcuuuauac

SEQ ID NO: 479803 - RNA, 19 nt, Artificial Sequence
  Description of Artificial Sequence: Synthetic oligonucleotide
  Sense strand starting at position 578 of SEQ ID NO: 317296
aaagcacagguuugagaaa

SEQ ID NO: 479804 - RNA, 19 nt, Artificial Sequence
  Description of Artificial Sequence: Synthetic oligonucleotide
  Antisense Strand to SEQ ID NO: 479803
uuucucaaaccugugcuuu

SEQ ID NO: 479805 - RNA, 19 nt, Artificial Sequence
  Description of Artificial Sequence: Synthetic oligonucleotide
  Sense strand starting at position 887 of SEQ ID NO: 317296
acaguuaagcuuuguagaa

SEQ ID NO: 479806 - RNA, 19 nt, Artificial Sequence
  Description of Artificial Sequence: Synthetic oligonucleotide
  Antisense Strand to SEQ ID NO: 479805
uucuacaaagcuuaacugu

SEQ ID NO: 479807 - RNA, 19 nt, Artificial Sequence
  Description of Artificial Sequence: Synthetic oligonucleotide
  Sense strand starting at position 888 of SEQ ID NO: 317296
caguuaagcuuuguagaag

SEQ ID NO: 479808 - RNA, 19 nt, Artificial Sequence
  Description of Artificial Sequence: Synthetic oligonucleotide
  Antisense Strand to SEQ ID NO: 479807
cuucuacaaagcuuaacug

SEQ ID NO: 479809 - RNA, 19 nt, Artificial Sequence
  Description of Artificial Sequence: Synthetic oligonucleotide
  Sense strand starting at position 1023 of SEQ ID NO: 317296
uaagacgugucacugauga

SEQ ID NO: 479810 - RNA, 19 nt, Artificial Sequence
  Description of Artificial Sequence: Synthetic oligonucleotide
  Antisense Strand to SEQ ID NO: 479809
ucaucagugacacgucuua

SEQ ID NO: 479811 - RNA, 19 nt, Artificial Sequence
  Description of Artificial Sequence: Synthetic oligonucleotide
  Sense strand starting at position 1031 of SEQ ID NO: 317296
gucacugaugaccacuauu

SEQ ID NO: 479812 - RNA, 19 nt, Artificial Sequence
  Description of Artificial Sequence: Synthetic oligonucleotide
  Antisense Strand to SEQ ID NO: 479811
aauaguggucaucagugac

SEQ ID NO: 479813 - RNA, 19 nt, Artificial Sequence
  Description of Artificial Sequence: Synthetic oligonucleotide
  Sense strand starting at position 1111 of SEQ ID NO: 317296
gcugguauucuggacagca

SEQ ID NO: 479814 - RNA, 19 nt, Artificial Sequence
  Description of Artificial Sequence: Synthetic oligonucleotide
  Antisense Strand to SEQ ID NO: 479813
ugcuguccagaauaccagc

SEQ ID NO: 479815 - RNA, 19 nt, Artificial Sequence
  Description of Artificial Sequence: Synthetic oligonucleotide
  Sense strand starting at position 1147 of SEQ ID NO: 317296
acugaaccuuaauucgaaa

SEQ ID NO: 479816 - RNA, 19 nt, Artificial Sequence
  Description of Artificial Sequence: Synthetic oligonucleotide
  Antisense Strand to SEQ ID NO: 479815
uuucgaauuaagguucagu

SEQ ID NO: 479817 - RNA, 19 nt, Artificial Sequence
  Description of Artificial Sequence: Synthetic oligonucleotide
  Sense strand starting at position 1348 of SEQ ID NO: 317296
cagaguaaugucgacuaga

SEQ ID NO: 479818 - RNA, 19 nt, Artificial Sequence
  Description of Artificial Sequence: Synthetic oligonucleotide
  Antisense Strand to SEQ ID NO: 479817
ucuagucgacauuacucug

SEQ ID NO: 479819 - RNA, 19 nt, Artificial Sequence
  Description of Artificial Sequence: Synthetic oligonucleotide
  Sense strand starting at position 1400 of SEQ ID NO: 317296
uggaacgugcaguaaagau

SEQ ID NO: 479820 - RNA, 19 nt, Artificial Sequence
  Description of Artificial Sequence: Synthetic oligonucleotide
  Antisense Strand to SEQ ID NO: 479819
aucuuuacugcacguucca

SEQ ID NO: 479821 - RNA, 19 nt, Artificial Sequence
  Description of Artificial Sequence: Synthetic oligonucleotide
  Sense strand starting at position 1408 of SEQ ID NO: 317296
gcaguaaagauguaaguaa

SEQ ID NO: 479822 - RNA, 19 nt, Artificial Sequence
  Description of Artificial Sequence: Synthetic oligonucleotide
  Antisense Strand to SEQ ID NO: 479821
uuacuuacaucuuuacugc

SEQ ID NO: 479823 - RNA, 19 nt, Artificial Sequence
  Description of Artificial Sequence: Synthetic oligonucleotide
  Sense strand starting at position 1587 of SEQ ID NO: 317296
gcggaaguuccagacaaga

SEQ ID NO: 479824 - RNA, 19 nt, Artificial Sequence
  Description of Artificial Sequence: Synthetic oligonucleotide
  Antisense Strand to SEQ ID NO: 479823
ucuugucuggaacuuccgc

SEQ ID NO: 479825 - RNA, 19 nt, Artificial Sequence
  Description of Artificial Sequence: Synthetic oligonucleotide
  Sense strand starting at position 1878 of SEQ ID NO: 317296
cagccuuucccagagcaga

SEQ ID NO: 479826 - RNA, 19 nt, Artificial Sequence
  Description of Artificial Sequence: Synthetic oligonucleotide
  Antisense Strand to SEQ ID NO: 479825
ucugcucugggaaaggcug

SEQ ID NO: 479827 - RNA, 19 nt, Artificial Sequence
  Description of Artificial Sequence: Synthetic oligonucleotide
  Sense strand starting at position 1977 of SEQ ID NO: 317296
cgucauuacguacuuguau

SEQ ID NO: 479828 - RNA, 19 nt, Artificial Sequence
  Description of Artificial Sequence: Synthetic oligonucleotide
  Antisense Strand to SEQ ID NO: 479827
auacaaguacguaaugacg

SEQ ID NO: 479829 - RNA, 19 nt, Artificial Sequence
  Description of Artificial Sequence: Synthetic oligonucleotide
  Sense strand starting at position 2008 of SEQ ID NO: 317296
cugcguauugcgucaugag

SEQ ID NO: 479830 - RNA, 19 nt, Artificial Sequence
  Description of Artificial Sequence: Synthetic oligonucleotide
  Antisense Strand to SEQ ID NO: 479829
cucaugacgcaauacgcag

SEQ ID NO: 479831 - RNA, 19 nt, Artificial Sequence
  Description of Artificial Sequence: Synthetic oligonucleotide
  Sense strand starting at position 2384 of SEQ ID NO: 317296
gauauagagucucuggcau

SEQ ID NO: 479832 - RNA, 19 nt, Artificial Sequence
  Description of Artificial Sequence: Synthetic oligonucleotide
  Antisense Strand to SEQ ID NO: 479831
augccagagacucuauauc

SEQ ID NO: 479833 - RNA, 19 nt, Artificial Sequence
  Description of Artificial Sequence: Synthetic oligonucleotide
  Sense strand starting at position 2586 of SEQ ID NO: 317296
gcggcagacauugagaagu

SEQ ID NO: 479834 - RNA, 19 nt, Artificial Sequence
  Description of Artificial Sequence: Synthetic oligonucleotide
  Antisense Strand to SEQ ID NO: 479833
acuucucaaugucugccgc

SEQ ID NO: 479835 - RNA, 19 nt, Artificial Sequence
  Description of Artificial Sequence: Synthetic oligonucleotide
  Sense strand starting at position 2592 of SEQ ID NO: 317296
gacauugagaagugcagua

SEQ ID NO: 479836 - RNA, 19 nt, Artificial Sequence
  Description of Artificial Sequence: Synthetic oligonucleotide
  Antisense Strand to SEQ ID NO: 479835
uacugcacuucucaauguc

SEQ ID NO: 479837 - RNA, 19 nt, Artificial Sequence
  Description of Artificial Sequence: Synthetic oligonucleotide
  Sense strand starting at position 2597 of SEQ ID NO: 317296
ugagaagugcaguagcaau

SEQ ID NO: 479838 - RNA, 19 nt, Artificial Sequence
  Description of Artificial Sequence: Synthetic oligonucleotide
  Antisense Strand to SEQ ID NO: 479837
auugcuacugcacuucuca

SEQ ID NO: 479839 - RNA, 19 nt, Artificial Sequence
  Description of Artificial Sequence: Synthetic oligonucleotide
  Sense strand starting at position 2639 of SEQ ID NO: 317296
cuuugaguugucgaagguu

SEQ ID NO: 479840 - RNA, 19 nt, Artificial Sequence
  Description of Artificial Sequence: Synthetic oligonucleotide
  Antisense Strand to SEQ ID NO: 479839
aaccuucgacaacucaaag

SEQ ID NO: 479841 - RNA, 19 nt, Artificial Sequence
  Description of Artificial Sequence: Synthetic oligonucleotide
  Sense strand starting at position 3059 of SEQ ID NO: 317296
accuuccaguugucugaaa

SEQ ID NO: 479842 - RNA, 19 nt, Artificial Sequence
  Description of Artificial Sequence: Synthetic oligonucleotide
  Antisense Strand to SEQ ID NO: 479841
uuucagacaacuggaaggu

SEQ ID NO: 479843 - RNA, 19 nt, Artificial Sequence
  Description of Artificial Sequence: Synthetic oligonucleotide
  Sense strand starting at position 3061 of SEQ ID NO: 317296
cuuccaguugucugaaacu

SEQ ID NO: 479844 - RNA, 19 nt, Artificial Sequence
  Description of Artificial Sequence: Synthetic oligonucleotide
  Antisense Strand to SEQ ID NO: 479843
aguuucagacaacuggaag

SEQ ID NO: 479845 - RNA, 19 nt, Artificial Sequence
  Description of Artificial Sequence: Synthetic oligonucleotide
  Sense strand starting at position 3070 of SEQ ID NO: 317296
gucugaaacuaauugggca

SEQ ID NO: 479846 - RNA, 19 nt, Artificial Sequence
  Description of Artificial Sequence: Synthetic oligonucleotide
  Antisense Strand to SEQ ID NO: 479845
ugcccaauuaguuucagac

SEQ ID NO: 479847 - RNA, 19 nt, Artificial Sequence
  Description of Artificial Sequence: Synthetic oligonucleotide
  Sense strand starting at position 3078 of SEQ ID NO: 317296
cuaauugggcauuauuaac

SEQ ID NO: 479848 - RNA, 19 nt, Artificial Sequence
  Description of Artificial Sequence: Synthetic oligonucleotide
  Antisense Strand to SEQ ID NO: 479847
guuaauaaugcccaauuag

SEQ ID NO: 479849 - RNA, 19 nt, Artificial Sequence
  Description of Artificial Sequence: Synthetic oligonucleotide
  Sense strand starting at position 3125 of SEQ ID NO: 317296
agagauuuauugcacacuu

SEQ ID NO: 479850 - RNA, 19 nt, Artificial Sequence
  Description of Artificial Sequence: Synthetic oligonucleotide
  Antisense Strand to SEQ ID NO: 479849
aagugugcaauaaaucucu

SEQ ID NO: 479851 - RNA, 19 nt, Artificial Sequence
  Description of Artificial Sequence: Synthetic oligonucleotide
  Sense strand starting at position 3275 of SEQ ID NO: 317296
gauauauguuaguuccaga

SEQ ID NO: 479852 - RNA, 19 nt, Artificial Sequence
  Description of Artificial Sequence: Synthetic oligonucleotide
  Antisense Strand to SEQ ID NO: 479851
ucuggaacuaacauauauc

SEQ ID NO: 479853 - RNA, 19 nt, Artificial Sequence
  Description of Artificial Sequence: Synthetic oligonucleotide
  Sense strand starting at position 3620 of SEQ ID NO: 317296
auucuaaacucaguaguaa

SEQ ID NO: 479854 - RNA, 19 nt, Artificial Sequence
  Description of Artificial Sequence: Synthetic oligonucleotide
  Antisense Strand to SEQ ID NO: 479853
uuacuacugaguuuagaau

SEQ ID NO: 479855 - RNA, 19 nt, Artificial Sequence
  Description of Artificial Sequence: Synthetic oligonucleotide
  Sense strand starting at position 3710 of SEQ ID NO: 317296
uagagcuccuaguuugaca

SEQ ID NO: 479856 - RNA, 19 nt, Artificial Sequence
  Description of Artificial Sequence: Synthetic oligonucleotide
  Antisense Strand to SEQ ID NO: 479855
ugucaaacuaggagcucua

SEQ ID NO: 479857 - RNA, 19 nt, Artificial Sequence
  Description of Artificial Sequence: Synthetic oligonucleotide
  Sense strand starting at position 3712 of SEQ ID NO: 317296
gagcuccuaguuugacaua

SEQ ID NO: 479858 - RNA, 19 nt, Artificial Sequence
  Description of Artificial Sequence: Synthetic oligonucleotide
  Antisense Strand to SEQ ID NO: 479857
uaugucaaacuaggagcuc

SEQ ID NO: 479859 - RNA, 19 nt, Artificial Sequence
  Description of Artificial Sequence: Synthetic oligonucleotide
  Sense strand starting at position 3768 of SEQ ID NO: 317296
agguguuaugauggguuaa

SEQ ID NO: 479860 - RNA, 19 nt, Artificial Sequence
  Description of Artificial Sequence: Synthetic oligonucleotide
  Antisense Strand to SEQ ID NO: 479859
uuaacccaucauaacaccu

SEQ ID NO: 479861 - RNA, 19 nt, Artificial Sequence
  Description of Artificial Sequence: Synthetic oligonucleotide
  Sense strand starting at position 3769 of SEQ ID NO: 317296
gguguuaugauggguuaaa

SEQ ID NO: 479862 - RNA, 19 nt, Artificial Sequence
  Description of Artificial Sequence: Synthetic oligonucleotide
  Antisense Strand to SEQ ID NO: 479861
uuuaacccaucauaacacc

SEQ ID NO: 479863 - RNA, 19 nt, Artificial Sequence
  Description of Artificial Sequence: Synthetic oligonucleotide
  Sense strand starting at position 3838 of SEQ ID NO: 317296
uuagguauuugggagauau

SEQ ID NO: 479864 - RNA, 19 nt, Artificial Sequence
  Description of Artificial Sequence: Synthetic oligonucleotide
  Antisense Strand to SEQ ID NO: 479863
auaucucccaaauaccuaa

SEQ ID NO: 479865 - RNA, 19 nt, Artificial Sequence
  Description of Artificial Sequence: Synthetic oligonucleotide
  Sense strand starting at position 388 of SEQ ID NO: 317297
aggugcauucuagaaggua

SEQ ID NO: 479866 - RNA, 19 nt, Artificial Sequence
  Description of Artificial Sequence: Synthetic oligonucleotide
  Antisense Strand to SEQ ID NO: 479865
uaccuucuagaaugcaccu

SEQ ID NO: 479867 - RNA, 19 nt, Artificial Sequence
  Description of Artificial Sequence: Synthetic oligonucleotide
  Sense strand starting at position 391 of SEQ ID NO: 317297
ugcauucuagaagguauaa

SEQ ID NO: 479868 - RNA, 19 nt, Artificial Sequence
  Description of Artificial Sequence: Synthetic oligonucleotide
  Antisense Strand to SEQ ID NO: 479867
uuauaccuucuagaaugca

SEQ ID NO: 479869 - RNA, 19 nt, Artificial Sequence
  Description of Artificial Sequence: Synthetic oligonucleotide
  Sense strand starting at position 466 of SEQ ID NO: 317297
uggaaagaauaaugacaua

SEQ ID NO: 479870 - RNA, 19 nt, Artificial Sequence
  Description of Artificial Sequence: Synthetic oligonucleotide
  Antisense Strand to SEQ ID NO: 479869
uaugucauuauucuuucca

SEQ ID NO: 479871 - RNA, 19 nt, Artificial Sequence
  Description of Artificial Sequence: Synthetic oligonucleotide
  Sense strand starting at position 832 of SEQ ID NO: 317297
agcucuaucgcuuaaagac

SEQ ID NO: 479872 - RNA, 19 nt, Artificial Sequence
  Description of Artificial Sequence: Synthetic oligonucleotide
  Antisense Strand to SEQ ID NO: 479871
gucuuuaagcgauagagcu

SEQ ID NO: 479873 - RNA, 19 nt, Artificial Sequence
  Description of Artificial Sequence: Synthetic oligonucleotide
  Sense strand starting at position 868 of SEQ ID NO: 317297
ugccaaguucuugcguauu

SEQ ID NO: 479874 - RNA, 19 nt, Artificial Sequence
  Description of Artificial Sequence: Synthetic oligonucleotide
  Antisense Strand to SEQ ID NO: 479873
aauacgcaagaacuuggca

SEQ ID NO: 479875 - RNA, 19 nt, Artificial Sequence
  Description of Artificial Sequence: Synthetic oligonucleotide
  Sense strand starting at position 871 of SEQ ID NO: 317297
caaguucuugcguauuaca

SEQ ID NO: 479876 - RNA, 19 nt, Artificial Sequence
  Description of Artificial Sequence: Synthetic oligonucleotide
  Antisense Strand to SEQ ID NO: 479875
uguaauacgcaagaacuug

SEQ ID NO: 479877 - RNA, 19 nt, Artificial Sequence
  Description of Artificial Sequence: Synthetic oligonucleotide
  Sense strand starting at position 879 of SEQ ID NO: 317297
ugcguauuacaccaaauaa

SEQ ID NO: 479878 - RNA, 19 nt, Artificial Sequence
  Description of Artificial Sequence: Synthetic oligonucleotide
  Antisense Strand to SEQ ID NO: 479877
uuauuugguguaauacgca

SEQ ID NO: 479879 - RNA, 19 nt, Artificial Sequence
  Description of Artificial Sequence: Synthetic oligonucleotide
  Sense strand starting at position 904 of SEQ ID NO: 317297
ugacccauucucugaaaga

SEQ ID NO: 479880 - RNA, 19 nt, Artificial Sequence
  Description of Artificial Sequence: Synthetic oligonucleotide
  Antisense Strand to SEQ ID NO: 479879
ucuuucagagaauggguca

SEQ ID NO: 479881 - RNA, 19 nt, Artificial Sequence
  Description of Artificial Sequence: Synthetic oligonucleotide
  Sense strand starting at position 922 of SEQ ID NO: 317297
agacacuuacgcuguauaa

SEQ ID NO: 479882 - RNA, 19 nt, Artificial Sequence
  Description of Artificial Sequence: Synthetic oligonucleotide
  Antisense Strand to SEQ ID NO: 479881
uuauacagcguaagugucu

SEQ ID NO: 479883 - RNA, 19 nt, Artificial Sequence
  Description of Artificial Sequence: Synthetic oligonucleotide
  Sense strand starting at position 924 of SEQ ID NO: 317297
acacuuacgcuguauaaag

SEQ ID NO: 479884 - RNA, 19 nt, Artificial Sequence
  Description of Artificial Sequence: Synthetic oligonucleotide
  Antisense Strand to SEQ ID NO: 479883
cuuuauacagcguaagugu

SEQ ID NO: 479885 - RNA, 19 nt, Artificial Sequence
  Description of Artificial Sequence: Synthetic oligonucleotide
  Sense strand starting at position 935 of SEQ ID NO: 317297
guauaaagcacagguuuga

SEQ ID NO: 479886 - RNA, 19 nt, Artificial Sequence
  Description of Artificial Sequence: Synthetic oligonucleotide
  Antisense Strand to SEQ ID NO: 479885
ucaaaccugugcuuuauac

SEQ ID NO: 479887 - RNA, 19 nt, Artificial Sequence
  Description of Artificial Sequence: Synthetic oligonucleotide
  Sense strand starting at position 939 of SEQ ID NO: 317297
aaagcacagguuugagaaa

SEQ ID NO: 479888 - RNA, 19 nt, Artificial Sequence
  Description of Artificial Sequence: Synthetic oligonucleotide
  Antisense Strand to SEQ ID NO: 479887
uuucucaaaccugugcuuu

SEQ ID NO: 479889 - RNA, 19 nt, Artificial Sequence
  Description of Artificial Sequence: Synthetic oligonucleotide
  Sense strand starting at position 1248 of SEQ ID NO: 317297
acaguuaagcuuuguagaa

SEQ ID NO: 479890 - RNA, 19 nt, Artificial Sequence
  Description of Artificial Sequence: Synthetic oligonucleotide
  Antisense Strand to SEQ ID NO: 479889
uucuacaaagcuuaacugu

SEQ ID NO: 479891 - RNA, 19 nt, Artificial Sequence
  Description of Artificial Sequence: Synthetic oligonucleotide
  Sense strand starting at position 1249 of SEQ ID NO: 317297
caguuaagcuuuguagaag

SEQ ID NO: 479892 - RNA, 19 nt, Artificial Sequence
  Description of Artificial Sequence: Synthetic oligonucleotide
  Antisense Strand to SEQ ID NO: 479891
cuucuacaaagcuuaacug

SEQ ID NO: 479893 - RNA, 19 nt, Artificial Sequence
  Description of Artificial Sequence: Synthetic oligonucleotide
  Sense strand starting at position 1384 of SEQ ID NO: 317297
uaagacgugucacugauga

SEQ ID NO: 479894 - RNA, 19 nt, Artificial Sequence
  Description of Artificial Sequence: Synthetic oligonucleotide
  Antisense Strand to SEQ ID NO: 479893
ucaucagugacacgucuua

SEQ ID NO: 479895 - RNA, 19 nt, Artificial Sequence
  Description of Artificial Sequence: Synthetic oligonucleotide
  Sense strand starting at position 1392 of SEQ ID NO: 317297
gucacugaugaccacuauu

SEQ ID NO: 479896 - RNA, 19 nt, Artificial Sequence
  Description of Artificial Sequence: Synthetic oligonucleotide
  Antisense Strand to SEQ ID NO: 479895
aauaguggucaucagugac

SEQ ID NO: 479897 - RNA, 19 nt, Artificial Sequence
  Description of Artificial Sequence: Synthetic oligonucleotide
  Sense strand starting at position 1472 of SEQ ID NO: 317297
gcugguauucuggacagca

SEQ ID NO: 479898 - RNA, 19 nt, Artificial Sequence
  Description of Artificial Sequence: Synthetic oligonucleotide
  Antisense Strand to SEQ ID NO: 479897
ugcuguccagaauaccagc

SEQ ID NO: 479899 - RNA, 19 nt, Artificial Sequence
  Description of Artificial Sequence: Synthetic oligonucleotide
  Sense strand starting at position 1508 of SEQ ID NO: 317297
acugaaccuuaauucgaaa

SEQ ID NO: 479900 - RNA, 19 nt, Artificial Sequence
  Description of Artificial Sequence: Synthetic oligonucleotide
  Antisense Strand to SEQ ID NO: 479899
uuucgaauuaagguucagu

SEQ ID NO: 479901 - RNA, 19 nt, Artificial Sequence
  Description of Artificial Sequence: Synthetic oligonucleotide
  Sense strand starting at position 1709 of SEQ ID NO: 317297
cagaguaaugucgacuaga

SEQ ID NO: 479902 - RNA, 19 nt, Artificial Sequence
  Description of Artificial Sequence: Synthetic oligonucleotide
  Antisense Strand to SEQ ID NO: 479901
ucuagucgacauuacucug

SEQ ID NO: 479903 - RNA, 19 nt, Artificial Sequence
  Description of Artificial Sequence: Synthetic oligonucleotide
  Sense strand starting at position 1761 of SEQ ID NO: 317297
uggaacgugcaguaaagau

SEQ ID NO: 479904 - RNA, 19 nt, Artificial Sequence
  Description of Artificial Sequence: Synthetic oligonucleotide
  Antisense Strand to SEQ ID NO: 479903
aucuuuacugcacguucca

SEQ ID NO: 479905 - RNA, 19 nt, Artificial Sequence
  Description of Artificial Sequence: Synthetic oligonucleotide
  Sense strand starting at position 1769 of SEQ ID NO: 317297
gcaguaaagauguaaguaa

SEQ ID NO: 479906 - RNA, 19 nt, Artificial Sequence
  Description of Artificial Sequence: Synthetic oligonucleotide
  Antisense Strand to SEQ ID NO: 479905
uuacuuacaucuuuacugc

SEQ ID NO: 479907 - RNA, 19 nt, Artificial Sequence
  Description of Artificial Sequence: Synthetic oligonucleotide
  Sense strand starting at position 1948 of SEQ ID NO: 317297
gcggaaguuccagacaaga

SEQ ID NO: 479908 - RNA, 19 nt, Artificial Sequence
  Description of Artificial Sequence: Synthetic oligonucleotide
  Antisense Strand to SEQ ID NO: 479907
ucuugucuggaacuuccgc

SEQ ID NO: 479909 - RNA, 19 nt, Artificial Sequence
  Description of Artificial Sequence: Synthetic oligonucleotide
  Sense strand starting at position 2239 of SEQ ID NO: 317297
cagccuuucccagagcaga

SEQ ID NO: 479910 - RNA, 19 nt, Artificial Sequence
  Description of Artificial Sequence: Synthetic oligonucleotide
  Antisense Strand to SEQ ID NO: 479909
ucugcucugggaaaggcug

SEQ ID NO: 479911 - RNA, 19 nt, Artificial Sequence
  Description of Artificial Sequence: Synthetic oligonucleotide
  Sense strand starting at position 2338 of SEQ ID NO: 317297
cgucauuacguacuuguau

SEQ ID NO: 479912 - RNA, 19 nt, Artificial Sequence
  Description of Artificial Sequence: Synthetic oligonucleotide
  Antisense Strand to SEQ ID NO: 479911
auacaaguacguaaugacg

SEQ ID NO: 479913 - RNA, 19 nt, Artificial Sequence
  Description of Artificial Sequence: Synthetic oligonucleotide
  Sense strand starting at position 2369 of SEQ ID NO: 317297
cugcguauugcgucaugag

SEQ ID NO: 479914 - RNA, 19 nt, Artificial Sequence
  Description of Artificial Sequence: Synthetic oligonucleotide
  Antisense Strand to SEQ ID NO: 479913
cucaugacgcaauacgcag

SEQ ID NO: 479915 - RNA, 19 nt, Artificial Sequence
  Description of Artificial Sequence: Synthetic oligonucleotide
  Sense strand starting at position 2745 of SEQ ID NO: 317297
gauauagagucucuggcau

SEQ ID NO: 479916 - RNA, 19 nt, Artificial Sequence
  Description of Artificial Sequence: Synthetic oligonucleotide
  Antisense Strand to SEQ ID NO: 479915
augccagagacucuauauc

SEQ ID NO: 479917 - RNA, 19 nt, Artificial Sequence
  Description of Artificial Sequence: Synthetic oligonucleotide
  Sense strand starting at position 2818 of SEQ ID NO: 317297
agugguuuguacccuauau

SEQ ID NO: 479918 - RNA, 19 nt, Artificial Sequence
  Description of Artificial Sequence: Synthetic oligonucleotide
  Antisense Strand to SEQ ID NO: 479917
auauaggguacaaaccacu

SEQ ID NO: 479919 - RNA, 19 nt, Artificial Sequence
  Description of Artificial Sequence: Synthetic oligonucleotide
  Sense strand starting at position 2866 of SEQ ID NO: 317297
uagcuauucugucuuggac

SEQ ID NO: 479920 - RNA, 19 nt, Artificial Sequence
  Description of Artificial Sequence: Synthetic oligonucleotide
  Antisense Strand to SEQ ID NO: 479919
guccaagacagaauagcua

SEQ ID NO: 479921 - RNA, 19 nt, Artificial Sequence
  Description of Artificial Sequence: Synthetic oligonucleotide
  Sense strand starting at position 2939 of SEQ ID NO: 317297
aggcuucagcggcagacau

SEQ ID NO: 479922 - RNA, 19 nt, Artificial Sequence
  Description of Artificial Sequence: Synthetic oligonucleotide
  Antisense Strand to SEQ ID NO: 479921
augucugccgcugaagccu

SEQ ID NO: 479923 - RNA, 19 nt, Artificial Sequence
  Description of Artificial Sequence: Synthetic oligonucleotide
  Sense strand starting at position 2947 of SEQ ID NO: 317297
gcggcagacauugagaagu

SEQ ID NO: 479924 - RNA, 19 nt, Artificial Sequence
  Description of Artificial Sequence: Synthetic oligonucleotide
  Antisense Strand to SEQ ID NO: 479923
acuucucaaugucugccgc

SEQ ID NO: 479925 - RNA, 19 nt, Artificial Sequence
  Description of Artificial Sequence: Synthetic oligonucleotide
  Sense strand starting at position 2953 of SEQ ID NO: 317297
gacauugagaagugcagua

SEQ ID NO: 479926 - RNA, 19 nt, Artificial Sequence
  Description of Artificial Sequence: Synthetic oligonucleotide
  Antisense Strand to SEQ ID NO: 479925
uacugcacuucucaauguc

SEQ ID NO: 479927 - RNA, 19 nt, Artificial Sequence
  Description of Artificial Sequence: Synthetic oligonucleotide
  Sense strand starting at position 2958 of SEQ ID NO: 317297
ugagaagugcaguagcaau

SEQ ID NO: 479928 - RNA, 19 nt, Artificial Sequence
  Description of Artificial Sequence: Synthetic oligonucleotide
  Antisense Strand to SEQ ID NO: 479927
auugcuacugcacuucuca

SEQ ID NO: 479929 - RNA, 19 nt, Artificial Sequence
  Description of Artificial Sequence: Synthetic oligonucleotide
  Sense strand starting at position 3000 of SEQ ID NO: 317297
cuuugaguugucgaagguu

SEQ ID NO: 479930 - RNA, 19 nt, Artificial Sequence
  Description of Artificial Sequence: Synthetic oligonucleotide
  Antisense Strand to SEQ ID NO: 479929
aaccuucgacaacucaaag

SEQ ID NO: 479931 - RNA, 19 nt, Artificial Sequence
  Description of Artificial Sequence: Synthetic oligonucleotide
  Sense strand starting at position 3420 of SEQ ID NO: 317297
accuuccaguugucugaaa

SEQ ID NO: 479932 - RNA, 19 nt, Artificial Sequence
  Description of Artificial Sequence: Synthetic oligonucleotide
  Antisense Strand to SEQ ID NO: 479931
uuucagacaacuggaaggu

SEQ ID NO: 479933 - RNA, 19 nt, Artificial Sequence
  Description of Artificial Sequence: Synthetic oligonucleotide
  Sense strand starting at position 3422 of SEQ ID NO: 317297
cuuccaguugucugaaacu

SEQ ID NO: 479934 - RNA, 19 nt, Artificial Sequence
  Description of Artificial Sequence: Synthetic oligonucleotide
  Antisense Strand to SEQ ID NO: 479933
aguuucagacaacuggaag

SEQ ID NO: 479935 - RNA, 19 nt, Artificial Sequence
  Description of Artificial Sequence: Synthetic oligonucleotide
  Sense strand starting at position 3431 of SEQ ID NO: 317297
gucugaaacuaauugggca

SEQ ID NO: 479936 - RNA, 19 nt, Artificial Sequence
  Description of Artificial Sequence: Synthetic oligonucleotide
  Antisense Strand to SEQ ID NO: 479935
ugcccaauuaguuucagac

SEQ ID NO: 479937 - RNA, 19 nt, Artificial Sequence
  Description of Artificial Sequence: Synthetic oligonucleotide
  Sense strand starting at position 3439 of SEQ ID NO: 317297
cuaauugggcauuauuaac

SEQ ID NO: 479938 - RNA, 19 nt, Artificial Sequence
  Description of Artificial Sequence: Synthetic oligonucleotide
  Antisense Strand to SEQ ID NO: 479937
guuaauaaugcccaauuag

SEQ ID NO: 479939 - RNA, 19 nt, Artificial Sequence
  Description of Artificial Sequence: Synthetic oligonucleotide
  Sense strand starting at position 3486 of SEQ ID NO: 317297
agagauuuauugcacacuu

SEQ ID NO: 479940 - RNA, 19 nt, Artificial Sequence
  Description of Artificial Sequence: Synthetic oligonucleotide
  Antisense Strand to SEQ ID NO: 479939
aagugugcaauaaaucucu

SEQ ID NO: 479941 - RNA, 19 nt, Artificial Sequence
  Description of Artificial Sequence: Synthetic oligonucleotide
  Sense strand starting at position 3636 of SEQ ID NO: 317297
gauauauguuaguuccaga

SEQ ID NO: 479942 - RNA, 19 nt, Artificial Sequence
  Description of Artificial Sequence: Synthetic oligonucleotide
  Antisense Strand to SEQ ID NO: 479941
ucuggaacuaacauauauc

SEQ ID NO: 479943 - RNA, 19 nt, Artificial Sequence
  Description of Artificial Sequence: Synthetic oligonucleotide
  Sense strand starting at position 3981 of SEQ ID NO: 317297
auucuaaacucaguaguaa

SEQ ID NO: 479944 - RNA, 19 nt, Artificial Sequence
  Description of Artificial Sequence: Synthetic oligonucleotide
  Antisense Strand to SEQ ID NO: 479943
uuacuacugaguuuagaau

SEQ ID NO: 479945 - RNA, 19 nt, Artificial Sequence
  Description of Artificial Sequence: Synthetic oligonucleotide
  Sense strand starting at position 43 of SEQ ID NO: 317298
gcucuacugccacaguuaa

SEQ ID NO: 479946 - RNA, 19 nt, Artificial Sequence
  Description of Artificial Sequence: Synthetic oligonucleotide
  Antisense Strand to SEQ ID NO: 479945
uuaacuguggcaguagagc

SEQ ID NO: 479947 - RNA, 19 nt, Artificial Sequence
  Description of Artificial Sequence: Synthetic oligonucleotide
  Sense strand starting at position 69 of SEQ ID NO: 317298
ucacucaauucugagguca

SEQ ID NO: 479948 - RNA, 19 nt, Artificial Sequence
  Description of Artificial Sequence: Synthetic oligonucleotide
  Antisense Strand to SEQ ID NO: 479947
ugaccucagaauugaguga

SEQ ID NO: 479949 - RNA, 19 nt, Artificial Sequence
  Description of Artificial Sequence: Synthetic oligonucleotide
  Sense strand starting at position 169 of SEQ ID NO: 317298
aucugacuuugaugauaca

SEQ ID NO: 479950 - RNA, 19 nt, Artificial Sequence
  Description of Artificial Sequence: Synthetic oligonucleotide
  Antisense Strand to SEQ ID NO: 479949
uguaucaucaaagucagau

SEQ ID NO: 479951 - RNA, 19 nt, Artificial Sequence
  Description of Artificial Sequence: Synthetic oligonucleotide
  Sense strand starting at position 280 of SEQ ID NO: 317298
aaaugaacuuuguggacau

SEQ ID NO: 479952 - RNA, 19 nt, Artificial Sequence
  Description of Artificial Sequence: Synthetic oligonucleotide
  Antisense Strand to SEQ ID NO: 479951
auguccacaaaguucauuu

SEQ ID NO: 479953 - RNA, 19 nt, Artificial Sequence
  Description of Artificial Sequence: Synthetic oligonucleotide
  Sense strand starting at position 352 of SEQ ID NO: 317298
ccaugcuauccuuggucaa

SEQ ID NO: 479954 - RNA, 19 nt, Artificial Sequence
  Description of Artificial Sequence: Synthetic oligonucleotide
  Antisense Strand to SEQ ID NO: 479953
uugaccaaggauagcaugg

SEQ ID NO: 479955 - RNA, 19 nt, Artificial Sequence
  Description of Artificial Sequence: Synthetic oligonucleotide
  Sense strand starting at position 354 of SEQ ID NO: 317298
augcuauccuuggucaaac

SEQ ID NO: 479956 - RNA, 19 nt, Artificial Sequence
  Description of Artificial Sequence: Synthetic oligonucleotide
  Antisense Strand to SEQ ID NO: 479955
guuugaccaaggauagcau

SEQ ID NO: 479957 - RNA, 19 nt, Artificial Sequence
  Description of Artificial Sequence: Synthetic oligonucleotide
  Sense strand starting at position 355 of SEQ ID NO: 317298
ugcuauccuuggucaaaca

SEQ ID NO: 479958 - RNA, 19 nt, Artificial Sequence
  Description of Artificial Sequence: Synthetic oligonucleotide
  Antisense Strand to SEQ ID NO: 479957
uguuugaccaaggauagca

SEQ ID NO: 479959 - RNA, 19 nt, Artificial Sequence
  Description of Artificial Sequence: Synthetic oligonucleotide
  Sense strand starting at position 670 of SEQ ID NO: 317298
gguagaaauuaaguuaaug

SEQ ID NO: 479960 - RNA, 19 nt, Artificial Sequence
  Description of Artificial Sequence: Synthetic oligonucleotide
  Antisense Strand to SEQ ID NO: 479959
cauuaacuuaauuucuacc

SEQ ID NO: 479961 - RNA, 19 nt, Artificial Sequence
  Description of Artificial Sequence: Synthetic oligonucleotide
  Sense strand starting at position 727 of SEQ ID NO: 317298
uccagacaccagugacuua

SEQ ID NO: 479962 - RNA, 19 nt, Artificial Sequence
  Description of Artificial Sequence: Synthetic oligonucleotide
  Antisense Strand to SEQ ID NO: 479961
uaagucacuggugucugga

SEQ ID NO: 479963 - RNA, 19 nt, Artificial Sequence
  Description of Artificial Sequence: Synthetic oligonucleotide
  Sense strand starting at position 734 of SEQ ID NO: 317298
accagugacuuaucaacag

SEQ ID NO: 479964 - RNA, 19 nt, Artificial Sequence
  Description of Artificial Sequence: Synthetic oligonucleotide
  Antisense Strand to SEQ ID NO: 479963
cuguugauaagucacuggu

SEQ ID NO: 479965 - RNA, 19 nt, Artificial Sequence
  Description of Artificial Sequence: Synthetic oligonucleotide
  Sense strand starting at position 738 of SEQ ID NO: 317298
gugacuuaucaacaguacu

SEQ ID NO: 479966 - RNA, 19 nt, Artificial Sequence
  Description of Artificial Sequence: Synthetic oligonucleotide
  Antisense Strand to SEQ ID NO: 479965
aguacuguugauaagucac

SEQ ID NO: 479967 - RNA, 19 nt, Artificial Sequence
  Description of Artificial Sequence: Synthetic oligonucleotide
  Sense strand starting at position 820 of SEQ ID NO: 317298
cuccaagugcuguacuaaa

SEQ ID NO: 479968 - RNA, 19 nt, Artificial Sequence
  Description of Artificial Sequence: Synthetic oligonucleotide
  Antisense Strand to SEQ ID NO: 479967
uuuaguacagcacuuggag

SEQ ID NO: 479969 - RNA, 19 nt, Artificial Sequence
  Description of Artificial Sequence: Synthetic oligonucleotide
  Sense strand starting at position 921 of SEQ ID NO: 317298
agaugccugcuacaauaua

SEQ ID NO: 479970 - RNA, 19 nt, Artificial Sequence
  Description of Artificial Sequence: Synthetic oligonucleotide
  Antisense Strand to SEQ ID NO: 479969
uauauuguagcaggcaucu

SEQ ID NO: 479971 - RNA, 19 nt, Artificial Sequence
  Description of Artificial Sequence: Synthetic oligonucleotide
  Sense strand starting at position 1097 of SEQ ID NO: 317298
uuaagaagaugcuuaaguu

SEQ ID NO: 479972 - RNA, 19 nt, Artificial Sequence
  Description of Artificial Sequence: Synthetic oligonucleotide
  Antisense Strand to SEQ ID NO: 479971
aacuuaagcaucuucuuaa

SEQ ID NO: 479973 - RNA, 19 nt, Artificial Sequence
  Description of Artificial Sequence: Synthetic oligonucleotide
  Sense strand starting at position 1112 of SEQ ID NO: 317298
aguuccauugcagaucaau

SEQ ID NO: 479974 - RNA, 19 nt, Artificial Sequence
  Description of Artificial Sequence: Synthetic oligonucleotide
  Antisense Strand to SEQ ID NO: 479973
auugaucugcaauggaacu

SEQ ID NO: 479975 - RNA, 19 nt, Artificial Sequence
  Description of Artificial Sequence: Synthetic oligonucleotide
  Sense strand starting at position 1121 of SEQ ID NO: 317298
gcagaucaauucuuacugu

SEQ ID NO: 479976 - RNA, 19 nt, Artificial Sequence
  Description of Artificial Sequence: Synthetic oligonucleotide
  Antisense Strand to SEQ ID NO: 479975
acaguaagaauugaucugc

SEQ ID NO: 479977 - RNA, 19 nt, Artificial Sequence
  Description of Artificial Sequence: Synthetic oligonucleotide
  Sense strand starting at position 1187 of SEQ ID NO: 317298
ccggcaauuugauaccaaa

SEQ ID NO: 479978 - RNA, 19 nt, Artificial Sequence
  Description of Artificial Sequence: Synthetic oligonucleotide
  Antisense Strand to SEQ ID NO: 479977
uuugguaucaaauugccgg

SEQ ID NO: 479979 - RNA, 19 nt, Artificial Sequence
  Description of Artificial Sequence: Synthetic oligonucleotide
  Sense strand starting at position 1190 of SEQ ID NO: 317298
gcaauuugauaccaaagua

SEQ ID NO: 479980 - RNA, 19 nt, Artificial Sequence
  Description of Artificial Sequence: Synthetic oligonucleotide
  Antisense Strand to SEQ ID NO: 479979
uacuuugguaucaaauugc

SEQ ID NO: 479981 - RNA, 19 nt, Artificial Sequence
  Description of Artificial Sequence: Synthetic oligonucleotide
  Sense strand starting at position 1204 of SEQ ID NO: 317298
aaguauaucucacagugag

SEQ ID NO: 479982 - RNA, 19 nt, Artificial Sequence
  Description of Artificial Sequence: Synthetic oligonucleotide
  Antisense Strand to SEQ ID NO: 479981
cucacugugagauauacuu

SEQ ID NO: 479983 - RNA, 19 nt, Artificial Sequence
  Description of Artificial Sequence: Synthetic oligonucleotide
  Sense strand starting at position 1374 of SEQ ID NO: 317298
gcacgaguaacaugcaauc

SEQ ID NO: 479984 - RNA, 19 nt, Artificial Sequence
  Description of Artificial Sequence: Synthetic oligonucleotide
  Antisense Strand to SEQ ID NO: 479983
gauugcauguuacucgugc

SEQ ID NO: 479985 - RNA, 19 nt, Artificial Sequence
  Description of Artificial Sequence: Synthetic oligonucleotide
  Sense strand starting at position 1415 of SEQ ID NO: 317298
auggcauguacugguaacu

SEQ ID NO: 479986 - RNA, 19 nt, Artificial Sequence
  Description of Artificial Sequence: Synthetic oligonucleotide
  Antisense Strand to SEQ ID NO: 479985
aguuaccaguacaugccau

SEQ ID NO: 479987 - RNA, 19 nt, Artificial Sequence
  Description of Artificial Sequence: Synthetic oligonucleotide
  Sense strand starting at position 1750 of SEQ ID NO: 317298
gcacaauccgacuggaauc

SEQ ID NO: 479988 - RNA, 19 nt, Artificial Sequence
  Description of Artificial Sequence: Synthetic oligonucleotide
  Antisense Strand to SEQ ID NO: 479987
gauuccagucggauugugc

SEQ ID NO: 479989 - RNA, 19 nt, Artificial Sequence
  Description of Artificial Sequence: Synthetic oligonucleotide
  Sense strand starting at position 2004 of SEQ ID NO: 317298
ugaccuuugcccuguuauu

SEQ ID NO: 479990 - RNA, 19 nt, Artificial Sequence
  Description of Artificial Sequence: Synthetic oligonucleotide
  Antisense Strand to SEQ ID NO: 479989
aauaacagggcaaagguca

SEQ ID NO: 479991 - RNA, 19 nt, Artificial Sequence
  Description of Artificial Sequence: Synthetic oligonucleotide
  Sense strand starting at position 2021 of SEQ ID NO: 317298
uucuuccggccucaagaau

SEQ ID NO: 479992 - RNA, 19 nt, Artificial Sequence
  Description of Artificial Sequence: Synthetic oligonucleotide
  Antisense Strand to SEQ ID NO: 479991
auucuugaggccggaagaa

SEQ ID NO: 479993 - RNA, 19 nt, Artificial Sequence
  Description of Artificial Sequence: Synthetic oligonucleotide
  Sense strand starting at position 2032 of SEQ ID NO: 317298
ucaagaauuccgggacagu

SEQ ID NO: 479994 - RNA, 19 nt, Artificial Sequence
  Description of Artificial Sequence: Synthetic oligonucleotide
  Antisense Strand to SEQ ID NO: 479993
acugucccggaauucuuga

SEQ ID NO: 479995 - RNA, 19 nt, Artificial Sequence
  Description of Artificial Sequence: Synthetic oligonucleotide
  Sense strand starting at position 2202 of SEQ ID NO: 317298
ggcugugacgucgggaagu

SEQ ID NO: 479996 - RNA, 19 nt, Artificial Sequence
  Description of Artificial Sequence: Synthetic oligonucleotide
  Antisense Strand to SEQ ID NO: 479995
acuucccgacgucacagcc

SEQ ID NO: 479997 - RNA, 19 nt, Artificial Sequence
  Description of Artificial Sequence: Synthetic oligonucleotide
  Sense strand starting at position 2204 of SEQ ID NO: 317298
cugugacgucgggaaguaa

SEQ ID NO: 479998 - RNA, 19 nt, Artificial Sequence
  Description of Artificial Sequence: Synthetic oligonucleotide
  Antisense Strand to SEQ ID NO: 479997
uuacuucccgacgucacag

SEQ ID NO: 479999 - RNA, 19 nt, Artificial Sequence
  Description of Artificial Sequence: Synthetic oligonucleotide
  Sense strand starting at position 2215 of SEQ ID NO: 317298
ggaaguaaguuucuguaaa

SEQ ID NO: 480000 - RNA, 19 nt, Artificial Sequence
  Description of Artificial Sequence: Synthetic oligonucleotide
  Antisense Strand to SEQ ID NO: 479999
uuuacagaaacuuacuucc

SEQ ID NO: 480001 - RNA, 19 nt, Artificial Sequence
  Description of Artificial Sequence: Synthetic oligonucleotide
  Sense strand starting at position 2261 of SEQ ID NO: 317298
agcugaacucaccgucuaa

SEQ ID NO: 480002 - RNA, 19 nt, Artificial Sequence
  Description of Artificial Sequence: Synthetic oligonucleotide
  Antisense Strand to SEQ ID NO: 480001
uuagacggugaguucagcu

SEQ ID NO: 480003 - RNA, 19 nt, Artificial Sequence
  Description of Artificial Sequence: Synthetic oligonucleotide
  Sense strand starting at position 2386 of SEQ ID NO: 317298
guuuccucaugcguaauau

SEQ ID NO: 480004 - RNA, 19 nt, Artificial Sequence
  Description of Artificial Sequence: Synthetic oligonucleotide
  Antisense Strand to SEQ ID NO: 480003
auauuacgcaugaggaaac

SEQ ID NO: 480005 - RNA, 19 nt, Artificial Sequence
  Description of Artificial Sequence: Synthetic oligonucleotide
  Sense strand starting at position 2387 of SEQ ID NO: 317298
uuuccucaugcguaauaug

SEQ ID NO: 480006 - RNA, 19 nt, Artificial Sequence
  Description of Artificial Sequence: Synthetic oligonucleotide
  Antisense Strand to SEQ ID NO: 480005
cauauuacgcaugaggaaa

SEQ ID NO: 480007 - RNA, 19 nt, Artificial Sequence
  Description of Artificial Sequence: Synthetic oligonucleotide
  Sense strand starting at position 2442 of SEQ ID NO: 317298
gggcuaaaugagcaucacu

SEQ ID NO: 480008 - RNA, 19 nt, Artificial Sequence
  Description of Artificial Sequence: Synthetic oligonucleotide
  Antisense Strand to SEQ ID NO: 480007
agugaugcucauuuagccc

SEQ ID NO: 480009 - RNA, 19 nt, Artificial Sequence
  Description of Artificial Sequence: Synthetic oligonucleotide
  Sense strand starting at position 2512 of SEQ ID NO: 317298
agguguuguugcuuuguga

SEQ ID NO: 480010 - RNA, 19 nt, Artificial Sequence
  Description of Artificial Sequence: Synthetic oligonucleotide
  Antisense Strand to SEQ ID NO: 480009
ucacaaagcaacaacaccu

SEQ ID NO: 480011 - RNA, 19 nt, Artificial Sequence
  Description of Artificial Sequence: Synthetic oligonucleotide
  Sense strand starting at position 2513 of SEQ ID NO: 317298
gguguuguugcuuugugaa

SEQ ID NO: 480012 - RNA, 19 nt, Artificial Sequence
  Description of Artificial Sequence: Synthetic oligonucleotide
  Antisense Strand to SEQ ID NO: 480011
uucacaaagcaacaacacc

SEQ ID NO: 480013 - RNA, 19 nt, Artificial Sequence
  Description of Artificial Sequence: Synthetic oligonucleotide
  Sense strand starting at position 2515 of SEQ ID NO: 317298
uguuguugcuuugugaaca

SEQ ID NO: 480014 - RNA, 19 nt, Artificial Sequence
  Description of Artificial Sequence: Synthetic oligonucleotide
  Antisense Strand to SEQ ID NO: 480013
uguucacaaagcaacaaca

SEQ ID NO: 480015 - RNA, 19 nt, Artificial Sequence
  Description of Artificial Sequence: Synthetic oligonucleotide
  Sense strand starting at position 2547 of SEQ ID NO: 317298
acgcuuauuuguguccuuu

SEQ ID NO: 480016 - RNA, 19 nt, Artificial Sequence
  Description of Artificial Sequence: Synthetic oligonucleotide
  Antisense Strand to SEQ ID NO: 480015
aaaggacacaaauaagcgu

SEQ ID NO: 480017 - RNA, 19 nt, Artificial Sequence
  Description of Artificial Sequence: Synthetic oligonucleotide
  Sense strand starting at position 2616 of SEQ ID NO: 317298
gaccgaacucguuggcuca

SEQ ID NO: 480018 - RNA, 19 nt, Artificial Sequence
  Description of Artificial Sequence: Synthetic oligonucleotide
  Antisense Strand to SEQ ID NO: 480017
ugagccaacgaguucgguc

SEQ ID NO: 480019 - RNA, 19 nt, Artificial Sequence
  Description of Artificial Sequence: Synthetic oligonucleotide
  Sense strand starting at position 3200 of SEQ ID NO: 317298
gccagugguguguugaguu

SEQ ID NO: 480020 - RNA, 19 nt, Artificial Sequence
  Description of Artificial Sequence: Synthetic oligonucleotide
  Antisense Strand to SEQ ID NO: 480019
aacucaacacaccacuggc

SEQ ID NO: 480021 - RNA, 19 nt, Artificial Sequence
  Description of Artificial Sequence: Synthetic oligonucleotide
  Sense strand starting at position 3425 of SEQ ID NO: 317298
cucaguugccuggaggaua

SEQ ID NO: 480022 - RNA, 19 nt, Artificial Sequence
  Description of Artificial Sequence: Synthetic oligonucleotide
  Antisense Strand to SEQ ID NO: 480021
uauccuccaggcaacugag

SEQ ID NO: 480023 - RNA, 19 nt, Artificial Sequence
  Description of Artificial Sequence: Synthetic oligonucleotide
  Sense strand starting at position 3541 of SEQ ID NO: 317298
ccgcuaguuccagguauuc

SEQ ID NO: 480024 - RNA, 19 nt, Artificial Sequence
  Description of Artificial Sequence: Synthetic oligonucleotide
  Antisense Strand to SEQ ID NO: 480023
gaauaccuggaacuagcgg

SEQ ID NO: 480025 - RNA, 19 nt, Artificial Sequence
  Description of Artificial Sequence: Synthetic oligonucleotide
  Sense strand starting at position 182 of SEQ ID NO: 317299
cucauuguauaccuugaua

SEQ ID NO: 480026 - RNA, 19 nt, Artificial Sequence
  Description of Artificial Sequence: Synthetic oligonucleotide
  Antisense Strand to SEQ ID NO: 480025
uaucaagguauacaaugag

SEQ ID NO: 480027 - RNA, 19 nt, Artificial Sequence
  Description of Artificial Sequence: Synthetic oligonucleotide
  Sense strand starting at position 290 of SEQ ID NO: 317299
uggacaaguuucuuaagcu

SEQ ID NO: 480028 - RNA, 19 nt, Artificial Sequence
  Description of Artificial Sequence: Synthetic oligonucleotide
  Antisense Strand to SEQ ID NO: 480027
agcuuaagaaacuugucca

SEQ ID NO: 480029 - RNA, 19 nt, Artificial Sequence
  Description of Artificial Sequence: Synthetic oligonucleotide
  Sense strand starting at position 365 of SEQ ID NO: 317299
aaggaugaauuauucugua

SEQ ID NO: 480030 - RNA, 19 nt, Artificial Sequence
  Description of Artificial Sequence: Synthetic oligonucleotide
  Antisense Strand to SEQ ID NO: 480029
uacagaauaauucauccuu

SEQ ID NO: 480031 - RNA, 19 nt, Artificial Sequence
  Description of Artificial Sequence: Synthetic oligonucleotide
  Sense strand starting at position 678 of SEQ ID NO: 317299
acuagaacuugucuaguac

SEQ ID NO: 480032 - RNA, 19 nt, Artificial Sequence
  Description of Artificial Sequence: Synthetic oligonucleotide
  Antisense Strand to SEQ ID NO: 480031
guacuagacaaguucuagu

SEQ ID NO: 480033 - RNA, 19 nt, Artificial Sequence
  Description of Artificial Sequence: Synthetic oligonucleotide
  Sense strand starting at position 679 of SEQ ID NO: 317299
cuagaacuugucuaguacu

SEQ ID NO: 480034 - RNA, 19 nt, Artificial Sequence
  Description of Artificial Sequence: Synthetic oligonucleotide
  Antisense Strand to SEQ ID NO: 480033
aguacuagacaaguucuag

SEQ ID NO: 480035 - RNA, 19 nt, Artificial Sequence
  Description of Artificial Sequence: Synthetic oligonucleotide
  Sense strand starting at position 720 of SEQ ID NO: 317299
acgagauaacgucacuaaa

SEQ ID NO: 480036 - RNA, 19 nt, Artificial Sequence
  Description of Artificial Sequence: Synthetic oligonucleotide
  Antisense Strand to SEQ ID NO: 480035
uuuagugacguuaucucgu

SEQ ID NO: 480037 - RNA, 19 nt, Artificial Sequence
  Description of Artificial Sequence: Synthetic oligonucleotide
  Sense strand starting at position 766 of SEQ ID NO: 317299
uuuccaguacuagaaguaa

SEQ ID NO: 480038 - RNA, 19 nt, Artificial Sequence
  Description of Artificial Sequence: Synthetic oligonucleotide
  Antisense Strand to SEQ ID NO: 480037
uuacuucuaguacuggaaa

SEQ ID NO: 480039 - RNA, 19 nt, Artificial Sequence
  Description of Artificial Sequence: Synthetic oligonucleotide
  Sense strand starting at position 775 of SEQ ID NO: 317299
cuagaaguaauacgcugaa

SEQ ID NO: 480040 - RNA, 19 nt, Artificial Sequence
  Description of Artificial Sequence: Synthetic oligonucleotide
  Antisense Strand to SEQ ID NO: 480039
uucagcguauuacuucuag

SEQ ID NO: 480041 - RNA, 19 nt, Artificial Sequence
  Description of Artificial Sequence: Synthetic oligonucleotide
  Sense strand starting at position 778 of SEQ ID NO: 317299
gaaguaauacgcugaauua

SEQ ID NO: 480042 - RNA, 19 nt, Artificial Sequence
  Description of Artificial Sequence: Synthetic oligonucleotide
  Antisense Strand to SEQ ID NO: 480041
uaauucagcguauuacuuc

SEQ ID NO: 480043 - RNA, 19 nt, Artificial Sequence
  Description of Artificial Sequence: Synthetic oligonucleotide
  Sense strand starting at position 830 of SEQ ID NO: 317299
auaggaugguguguuauac

SEQ ID NO: 480044 - RNA, 19 nt, Artificial Sequence
  Description of Artificial Sequence: Synthetic oligonucleotide
  Antisense Strand to SEQ ID NO: 480043
guauaacacaccauccuau

SEQ ID NO: 480045 - RNA, 19 nt, Artificial Sequence
  Description of Artificial Sequence: Synthetic oligonucleotide
  Sense strand starting at position 928 of SEQ ID NO: 317299
ucuacaacucguuagagua

SEQ ID NO: 480046 - RNA, 19 nt, Artificial Sequence
  Description of Artificial Sequence: Synthetic oligonucleotide
  Antisense Strand to SEQ ID NO: 480045
uacucuaacgaguuguaga

SEQ ID NO: 480047 - RNA, 19 nt, Artificial Sequence
  Description of Artificial Sequence: Synthetic oligonucleotide
  Sense strand starting at position 935 of SEQ ID NO: 317299
cucguuagaguauaaaguu

SEQ ID NO: 480048 - RNA, 19 nt, Artificial Sequence
  Description of Artificial Sequence: Synthetic oligonucleotide
  Antisense Strand to SEQ ID NO: 480047
aacuuuauacucuaacgag

SEQ ID NO: 480049 - RNA, 19 nt, Artificial Sequence
  Description of Artificial Sequence: Synthetic oligonucleotide
  Sense strand starting at position 959 of SEQ ID NO: 317299
uuaagugauugcucaauau

SEQ ID NO: 480050 - RNA, 19 nt, Artificial Sequence
  Description of Artificial Sequence: Synthetic oligonucleotide
  Antisense Strand to SEQ ID NO: 480049
auauugagcaaucacuuaa

SEQ ID NO: 480051 - RNA, 19 nt, Artificial Sequence
  Description of Artificial Sequence: Synthetic oligonucleotide
  Sense strand starting at position 1058 of SEQ ID NO: 317299
ccuuuacaucaaugagugu

SEQ ID NO: 480052 - RNA, 19 nt, Artificial Sequence
  Description of Artificial Sequence: Synthetic oligonucleotide
  Antisense Strand to SEQ ID NO: 480051
acacucauugauguaaagg

SEQ ID NO: 480053 - RNA, 19 nt, Artificial Sequence
  Description of Artificial Sequence: Synthetic oligonucleotide
  Sense strand starting at position 1061 of SEQ ID NO: 317299
uuacaucaaugagugugua

SEQ ID NO: 480054 - RNA, 19 nt, Artificial Sequence
  Description of Artificial Sequence: Synthetic oligonucleotide
  Antisense Strand to SEQ ID NO: 480053
uacacacucauugauguaa

SEQ ID NO: 480055 - RNA, 19 nt, Artificial Sequence
  Description of Artificial Sequence: Synthetic oligonucleotide
  Sense strand starting at position 1127 of SEQ ID NO: 317299
uggcauuuaugugucacuu

SEQ ID NO: 480056 - RNA, 19 nt, Artificial Sequence
  Description of Artificial Sequence: Synthetic oligonucleotide
  Antisense Strand to SEQ ID NO: 480055
aagugacacauaaaugcca

SEQ ID NO: 480057 - RNA, 19 nt, Artificial Sequence
  Description of Artificial Sequence: Synthetic oligonucleotide
  Sense strand starting at position 1228 of SEQ ID NO: 317299
gaagauacaugcucacagu

SEQ ID NO: 480058 - RNA, 19 nt, Artificial Sequence
  Description of Artificial Sequence: Synthetic oligonucleotide
  Antisense Strand to SEQ ID NO: 480057
acugugagcauguaucuuc

SEQ ID NO: 480059 - RNA, 19 nt, Artificial Sequence
  Description of Artificial Sequence: Synthetic oligonucleotide
  Sense strand starting at position 1697 of SEQ ID NO: 317299
agaguaucaucauccucau

SEQ ID NO: 480060 - RNA, 19 nt, Artificial Sequence
  Description of Artificial Sequence: Synthetic oligonucleotide
  Antisense Strand to SEQ ID NO: 480059
augaggaugaugauacucu

SEQ ID NO: 480061 - RNA, 19 nt, Artificial Sequence
  Description of Artificial Sequence: Synthetic oligonucleotide
  Sense strand starting at position 1737 of SEQ ID NO: 317299
caggauaaaugacuuguca

SEQ ID NO: 480062 - RNA, 19 nt, Artificial Sequence
  Description of Artificial Sequence: Synthetic oligonucleotide
  Antisense Strand to SEQ ID NO: 480061
ugacaagucauuuauccug

SEQ ID NO: 480063 - RNA, 19 nt, Artificial Sequence
  Description of Artificial Sequence: Synthetic oligonucleotide
  Sense strand starting at position 1741 of SEQ ID NO: 317299
auaaaugacuugucaaggu

SEQ ID NO: 480064 - RNA, 19 nt, Artificial Sequence
  Description of Artificial Sequence: Synthetic oligonucleotide
  Antisense Strand to SEQ ID NO: 480063
accuugacaagucauuuau

SEQ ID NO: 480065 - RNA, 19 nt, Artificial Sequence
  Description of Artificial Sequence: Synthetic oligonucleotide
  Sense strand starting at position 1751 of SEQ ID NO: 317299
ugucaagguuggccaauaa

SEQ ID NO: 480066 - RNA, 19 nt, Artificial Sequence
  Description of Artificial Sequence: Synthetic oligonucleotide
  Antisense Strand to SEQ ID NO: 480065
uuauuggccaaccuugaca

SEQ ID NO: 480067 - RNA, 19 nt, Artificial Sequence
  Description of Artificial Sequence: Synthetic oligonucleotide
  Sense strand starting at position 1779 of SEQ ID NO: 317299
ugaaacaaugcaugccuua

SEQ ID NO: 480068 - RNA, 19 nt, Artificial Sequence
  Description of Artificial Sequence: Synthetic oligonucleotide
  Antisense Strand to SEQ ID NO: 480067
uaaggcaugcauuguuuca

SEQ ID NO: 480069 - RNA, 19 nt, Artificial Sequence
  Description of Artificial Sequence: Synthetic oligonucleotide
  Sense strand starting at position 1997 of SEQ ID NO: 317299
auaauaagccuucgauaau

SEQ ID NO: 480070 - RNA, 19 nt, Artificial Sequence
  Description of Artificial Sequence: Synthetic oligonucleotide
  Antisense Strand to SEQ ID NO: 480069
auuaucgaaggcuuauuau

SEQ ID NO: 480071 - RNA, 19 nt, Artificial Sequence
  Description of Artificial Sequence: Synthetic oligonucleotide
  Sense strand starting at position 2000 of SEQ ID NO: 317299
auaagccuucgauaauuau

SEQ ID NO: 480072 - RNA, 19 nt, Artificial Sequence
  Description of Artificial Sequence: Synthetic oligonucleotide
  Antisense Strand to SEQ ID NO: 480071
auaauuaucgaaggcuuau

SEQ ID NO: 480073 - RNA, 19 nt, Artificial Sequence
  Description of Artificial Sequence: Synthetic oligonucleotide
  Sense strand starting at position 2003 of SEQ ID NO: 317299
agccuucgauaauuaugaa

SEQ ID NO: 480074 - RNA, 19 nt, Artificial Sequence
  Description of Artificial Sequence: Synthetic oligonucleotide
  Antisense Strand to SEQ ID NO: 480073
uucauaauuaucgaaggcu

SEQ ID NO: 480075 - RNA, 19 nt, Artificial Sequence
  Description of Artificial Sequence: Synthetic oligonucleotide
  Sense strand starting at position 2229 of SEQ ID NO: 317299
ucagucuucuaucuaagga

SEQ ID NO: 480076 - RNA, 19 nt, Artificial Sequence
  Description of Artificial Sequence: Synthetic oligonucleotide
  Antisense Strand to SEQ ID NO: 480075
uccuuagauagaagacuga

SEQ ID NO: 480077 - RNA, 19 nt, Artificial Sequence
  Description of Artificial Sequence: Synthetic oligonucleotide
  Sense strand starting at position 2629 of SEQ ID NO: 317299
cccauaaggcuguauuaua

SEQ ID NO: 480078 - RNA, 19 nt, Artificial Sequence
  Description of Artificial Sequence: Synthetic oligonucleotide
  Antisense Strand to SEQ ID NO: 480077
uauaauacagccuuauggg

SEQ ID NO: 480079 - RNA, 19 nt, Artificial Sequence
  Description of Artificial Sequence: Synthetic oligonucleotide
  Sense strand starting at position 2760 of SEQ ID NO: 317299
guuugauaugcacaugagu

SEQ ID NO: 480080 - RNA, 19 nt, Artificial Sequence
  Description of Artificial Sequence: Synthetic oligonucleotide
  Antisense Strand to SEQ ID NO: 480079
acucaugugcauaucaaac

SEQ ID NO: 480081 - RNA, 19 nt, Artificial Sequence
  Description of Artificial Sequence: Synthetic oligonucleotide
  Sense strand starting at position 2763 of SEQ ID NO: 317299
ugauaugcacaugaguaau

SEQ ID NO: 480082 - RNA, 19 nt, Artificial Sequence
  Description of Artificial Sequence: Synthetic oligonucleotide
  Antisense Strand to SEQ ID NO: 480081
auuacucaugugcauauca

SEQ ID NO: 480083 - RNA, 19 nt, Artificial Sequence
  Description of Artificial Sequence: Synthetic oligonucleotide
  Sense strand starting at position 2765 of SEQ ID NO: 317299
auaugcacaugaguaauua

SEQ ID NO: 480084 - RNA, 19 nt, Artificial Sequence
  Description of Artificial Sequence: Synthetic oligonucleotide
  Antisense Strand to SEQ ID NO: 480083
uaauuacucaugugcauau

SEQ ID NO: 480085 - RNA, 19 nt, Artificial Sequence
  Description of Artificial Sequence: Synthetic oligonucleotide
  Sense strand starting at position 2769 of SEQ ID NO: 317299
gcacaugaguaauuaauau

SEQ ID NO: 480086 - RNA, 19 nt, Artificial Sequence
  Description of Artificial Sequence: Synthetic oligonucleotide
  Antisense Strand to SEQ ID NO: 480085
auauuaauuacucaugugc

SEQ ID NO: 480087 - RNA, 19 nt, Artificial Sequence
  Description of Artificial Sequence: Synthetic oligonucleotide
  Sense strand starting at position 2792 of SEQ ID NO: 317299
ugaugauaguaaucauugu

SEQ ID NO: 480088 - RNA, 19 nt, Artificial Sequence
  Description of Artificial Sequence: Synthetic oligonucleotide
  Antisense Strand to SEQ ID NO: 480087
acaaugauuacuaucauca

SEQ ID NO: 480089 - RNA, 19 nt, Artificial Sequence
  Description of Artificial Sequence: Synthetic oligonucleotide
  Sense strand starting at position 2816 of SEQ ID NO: 317299
uugccagaguaucugaauu

SEQ ID NO: 480090 - RNA, 19 nt, Artificial Sequence
  Description of Artificial Sequence: Synthetic oligonucleotide
  Antisense Strand to SEQ ID NO: 480089
aauucagauacucuggcaa

SEQ ID NO: 480091 - RNA, 19 nt, Artificial Sequence
  Description of Artificial Sequence: Synthetic oligonucleotide
  Sense strand starting at position 3043 of SEQ ID NO: 317299
aaguuaacaguguaagcau

SEQ ID NO: 480092 - RNA, 19 nt, Artificial Sequence
  Description of Artificial Sequence: Synthetic oligonucleotide
  Antisense Strand to SEQ ID NO: 480091
augcuuacacuguuaacuu

SEQ ID NO: 480093 - RNA, 19 nt, Artificial Sequence
  Description of Artificial Sequence: Synthetic oligonucleotide
  Sense strand starting at position 3046 of SEQ ID NO: 317299
uuaacaguguaagcauaaa

SEQ ID NO: 480094 - RNA, 19 nt, Artificial Sequence
  Description of Artificial Sequence: Synthetic oligonucleotide
  Antisense Strand to SEQ ID NO: 480093
uuuaugcuuacacuguuaa

SEQ ID NO: 480095 - RNA, 19 nt, Artificial Sequence
  Description of Artificial Sequence: Synthetic oligonucleotide
  Sense strand starting at position 3161 of SEQ ID NO: 317299
guucucuugccuguguaua

SEQ ID NO: 480096 - RNA, 19 nt, Artificial Sequence
  Description of Artificial Sequence: Synthetic oligonucleotide
  Antisense Strand to SEQ ID NO: 480095
uauacacaggcaagagaac

SEQ ID NO: 480097 - RNA, 19 nt, Artificial Sequence
  Description of Artificial Sequence: Synthetic oligonucleotide
  Sense strand starting at position 3411 of SEQ ID NO: 317299
uuugcuuugggucauacua

SEQ ID NO: 480098 - RNA, 19 nt, Artificial Sequence
  Description of Artificial Sequence: Synthetic oligonucleotide
  Antisense Strand to SEQ ID NO: 480097
uaguaugacccaaagcaaa

SEQ ID NO: 480099 - RNA, 19 nt, Artificial Sequence
  Description of Artificial Sequence: Synthetic oligonucleotide
  Sense strand starting at position 3535 of SEQ ID NO: 317299
cuuucugcugcagaugaaa

SEQ ID NO: 480100 - RNA, 19 nt, Artificial Sequence
  Description of Artificial Sequence: Synthetic oligonucleotide
  Antisense Strand to SEQ ID NO: 480099
uuucaucugcagcagaaag

SEQ ID NO: 480101 - RNA, 19 nt, Artificial Sequence
  Description of Artificial Sequence: Synthetic oligonucleotide
  Sense strand starting at position 3564 of SEQ ID NO: 317299
gagugagguaggugcauuu

SEQ ID NO: 480102 - RNA, 19 nt, Artificial Sequence
  Description of Artificial Sequence: Synthetic oligonucleotide
  Antisense Strand to SEQ ID NO: 480101
aaaugcaccuaccucacuc

SEQ ID NO: 480103 - RNA, 19 nt, Artificial Sequence
  Description of Artificial Sequence: Synthetic oligonucleotide
  Sense strand starting at position 3624 of SEQ ID NO: 317299
gcuauauugggauaaggcu

SEQ ID NO: 480104 - RNA, 19 nt, Artificial Sequence
  Description of Artificial Sequence: Synthetic oligonucleotide
  Antisense Strand to SEQ ID NO: 480103
agccuuaucccaauauagc

SEQ ID NO: 480105 - RNA, 19 nt, Artificial Sequence
  Description of Artificial Sequence: Synthetic oligonucleotide
  Sense strand starting at position 37 of SEQ ID NO: 317300
cccaucugcuagguacaau

SEQ ID NO: 480106 - RNA, 19 nt, Artificial Sequence
  Description of Artificial Sequence: Synthetic oligonucleotide
  Antisense Strand to SEQ ID NO: 480105
auuguaccuagcagauggg

SEQ ID NO: 480107 - RNA, 19 nt, Artificial Sequence
  Description of Artificial Sequence: Synthetic oligonucleotide
  Sense strand starting at position 78 of SEQ ID NO: 317300
ugucgaugugccuaacuau

SEQ ID NO: 480108 - RNA, 19 nt, Artificial Sequence
  Description of Artificial Sequence: Synthetic oligonucleotide
  Antisense Strand to SEQ ID NO: 480107
auaguuaggcacaucgaca

SEQ ID NO: 480109 - RNA, 19 nt, Artificial Sequence
  Description of Artificial Sequence: Synthetic oligonucleotide
  Sense strand starting at position 91 of SEQ ID NO: 317300
aacuaucaggcagauguuu

SEQ ID NO: 480110 - RNA, 19 nt, Artificial Sequence
  Description of Artificial Sequence: Synthetic oligonucleotide
  Antisense Strand to SEQ ID NO: 480109
aaacaucugccugauaguu

SEQ ID NO: 480111 - RNA, 19 nt, Artificial Sequence
  Description of Artificial Sequence: Synthetic oligonucleotide
  Sense strand starting at position 96 of SEQ ID NO: 317300
ucaggcagauguuuauaaa

SEQ ID NO: 480112 - RNA, 19 nt, Artificial Sequence
  Description of Artificial Sequence: Synthetic oligonucleotide
  Antisense Strand to SEQ ID NO: 480111
uuuauaaacaucugccuga

SEQ ID NO: 480113 - RNA, 19 nt, Artificial Sequence
  Description of Artificial Sequence: Synthetic oligonucleotide
  Sense strand starting at position 236 of SEQ ID NO: 317300
agcucucuuucugugguau

SEQ ID NO: 480114 - RNA, 19 nt, Artificial Sequence
  Description of Artificial Sequence: Synthetic oligonucleotide
  Antisense Strand to SEQ ID NO: 480113
auaccacagaaagagagcu

SEQ ID NO: 480115 - RNA, 19 nt, Artificial Sequence
  Description of Artificial Sequence: Synthetic oligonucleotide
  Sense strand starting at position 333 of SEQ ID NO: 317300
ccacaaagaucucagaggu

SEQ ID NO: 480116 - RNA, 19 nt, Artificial Sequence
  Description of Artificial Sequence: Synthetic oligonucleotide
  Antisense Strand to SEQ ID NO: 480115
accucugagaucuuugugg

SEQ ID NO: 480117 - RNA, 19 nt, Artificial Sequence
  Description of Artificial Sequence: Synthetic oligonucleotide
  Sense strand starting at position 348 of SEQ ID NO: 317300
agguacugacaguggaaau

SEQ ID NO: 480118 - RNA, 19 nt, Artificial Sequence
  Description of Artificial Sequence: Synthetic oligonucleotide
  Antisense Strand to SEQ ID NO: 480117
auuuccacugucaguaccu

SEQ ID NO: 480119 - RNA, 19 nt, Artificial Sequence
  Description of Artificial Sequence: Synthetic oligonucleotide
  Sense strand starting at position 368 of SEQ ID NO: 317300
ucaaauggaucauaauagu

SEQ ID NO: 480120 - RNA, 19 nt, Artificial Sequence
  Description of Artificial Sequence: Synthetic oligonucleotide
  Antisense Strand to SEQ ID NO: 480119
acuauuaugauccauuuga

SEQ ID NO: 480121 - RNA, 19 nt, Artificial Sequence
  Description of Artificial Sequence: Synthetic oligonucleotide
  Sense strand starting at position 445 of SEQ ID NO: 317300
guaaucuauagggaugcca

SEQ ID NO: 480122 - RNA, 19 nt, Artificial Sequence
  Description of Artificial Sequence: Synthetic oligonucleotide
  Antisense Strand to SEQ ID NO: 480121
uggcaucccuauagauuac

SEQ ID NO: 480123 - RNA, 19 nt, Artificial Sequence
  Description of Artificial Sequence: Synthetic oligonucleotide
  Sense strand starting at position 489 of SEQ ID NO: 317300
gcauuaugcuuucuuagga

SEQ ID NO: 480124 - RNA, 19 nt, Artificial Sequence
  Description of Artificial Sequence: Synthetic oligonucleotide
  Antisense Strand to SEQ ID NO: 480123
uccuaagaaagcauaaugc

SEQ ID NO: 480125 - RNA, 19 nt, Artificial Sequence
  Description of Artificial Sequence: Synthetic oligonucleotide
  Sense strand starting at position 654 of SEQ ID NO: 317300
accaaauacccugguguuu

SEQ ID NO: 480126 - RNA, 19 nt, Artificial Sequence
  Description of Artificial Sequence: Synthetic oligonucleotide
  Antisense Strand to SEQ ID NO: 480125
aaacaccaggguauuuggu

SEQ ID NO: 480127 - RNA, 19 nt, Artificial Sequence
  Description of Artificial Sequence: Synthetic oligonucleotide
  Sense strand starting at position 705 of SEQ ID NO: 317300
auagucauguugucuuaac

SEQ ID NO: 480128 - RNA, 19 nt, Artificial Sequence
  Description of Artificial Sequence: Synthetic oligonucleotide
  Antisense Strand to SEQ ID NO: 480127
guuaagacaacaugacuau

SEQ ID NO: 480129 - RNA, 19 nt, Artificial Sequence
  Description of Artificial Sequence: Synthetic oligonucleotide
  Sense strand starting at position 713 of SEQ ID NO: 317300
guugucuuaacuuaguguu

SEQ ID NO: 480130 - RNA, 19 nt, Artificial Sequence
  Description of Artificial Sequence: Synthetic oligonucleotide
  Antisense Strand to SEQ ID NO: 480129
aacacuaaguuaagacaac

SEQ ID NO: 480131 - RNA, 19 nt, Artificial Sequence
  Description of Artificial Sequence: Synthetic oligonucleotide
  Sense strand starting at position 715 of SEQ ID NO: 317300
ugucuuaacuuaguguuau

SEQ ID NO: 480132 - RNA, 19 nt, Artificial Sequence
  Description of Artificial Sequence: Synthetic oligonucleotide
  Antisense Strand to SEQ ID NO: 480131
auaacacuaaguuaagaca

SEQ ID NO: 480133 - RNA, 19 nt, Artificial Sequence
  Description of Artificial Sequence: Synthetic oligonucleotide
  Sense strand starting at position 795 of SEQ ID NO: 317300
ugaauagaaucagauguga

SEQ ID NO: 480134 - RNA, 19 nt, Artificial Sequence
  Description of Artificial Sequence: Synthetic oligonucleotide
  Antisense Strand to SEQ ID NO: 480133
ucacaucugauucuauuca

SEQ ID NO: 480135 - RNA, 19 nt, Artificial Sequence
  Description of Artificial Sequence: Synthetic oligonucleotide
  Sense strand starting at position 800 of SEQ ID NO: 317300
agaaucagaugugauaagu

SEQ ID NO: 480136 - RNA, 19 nt, Artificial Sequence
  Description of Artificial Sequence: Synthetic oligonucleotide
  Antisense Strand to SEQ ID NO: 480135
acuuaucacaucugauucu

SEQ ID NO: 480137 - RNA, 19 nt, Artificial Sequence
  Description of Artificial Sequence: Synthetic oligonucleotide
  Sense strand starting at position 809 of SEQ ID NO: 317300
ugugauaagugaccucaaa

SEQ ID NO: 480138 - RNA, 19 nt, Artificial Sequence
  Description of Artificial Sequence: Synthetic oligonucleotide
  Antisense Strand to SEQ ID NO: 480137
uuugaggucacuuaucaca

SEQ ID NO: 480139 - RNA, 19 nt, Artificial Sequence
  Description of Artificial Sequence: Synthetic oligonucleotide
  Sense strand starting at position 864 of SEQ ID NO: 317300
acgaguauccagcaucuuu

SEQ ID NO: 480140 - RNA, 19 nt, Artificial Sequence
  Description of Artificial Sequence: Synthetic oligonucleotide
  Antisense Strand to SEQ ID NO: 480139
aaagaugcuggauacucgu

SEQ ID NO: 480141 - RNA, 19 nt, Artificial Sequence
  Description of Artificial Sequence: Synthetic oligonucleotide
  Sense strand starting at position 951 of SEQ ID NO: 317300
gugguaaguaaggaugcaa

SEQ ID NO: 480142 - RNA, 19 nt, Artificial Sequence
  Description of Artificial Sequence: Synthetic oligonucleotide
  Antisense Strand to SEQ ID NO: 480141
uugcauccuuacuuaccac

SEQ ID NO: 480143 - RNA, 19 nt, Artificial Sequence
  Description of Artificial Sequence: Synthetic oligonucleotide
  Sense strand starting at position 980 of SEQ ID NO: 317300
acuguuaacaguugagagu

SEQ ID NO: 480144 - RNA, 19 nt, Artificial Sequence
  Description of Artificial Sequence: Synthetic oligonucleotide
  Antisense Strand to SEQ ID NO: 480143
acucucaacuguuaacagu

SEQ ID NO: 480145 - RNA, 19 nt, Artificial Sequence
  Description of Artificial Sequence: Synthetic oligonucleotide
  Sense strand starting at position 995 of SEQ ID NO: 317300
gaguguagguucuuucuac

SEQ ID NO: 480146 - RNA, 19 nt, Artificial Sequence
  Description of Artificial Sequence: Synthetic oligonucleotide
  Antisense Strand to SEQ ID NO: 480145
guagaaagaaccuacacuc

SEQ ID NO: 480147 - RNA, 19 nt, Artificial Sequence
  Description of Artificial Sequence: Synthetic oligonucleotide
  Sense strand starting at position 1072 of SEQ ID NO: 317300
cggacaggaucugaccaua

SEQ ID NO: 480148 - RNA, 19 nt, Artificial Sequence
  Description of Artificial Sequence: Synthetic oligonucleotide
  Antisense Strand to SEQ ID NO: 480147
uauggucagauccuguccg

SEQ ID NO: 480149 - RNA, 19 nt, Artificial Sequence
  Description of Artificial Sequence: Synthetic oligonucleotide
  Sense strand starting at position 2024 of SEQ ID NO: 317300
gucaaacugugaucagaca

SEQ ID NO: 480150 - RNA, 19 nt, Artificial Sequence
  Description of Artificial Sequence: Synthetic oligonucleotide
  Antisense Strand to SEQ ID NO: 480149
ugucugaucacaguuugac

SEQ ID NO: 480151 - RNA, 19 nt, Artificial Sequence
  Description of Artificial Sequence: Synthetic oligonucleotide
  Sense strand starting at position 2808 of SEQ ID NO: 317300
agccuuaagcaugaaauau

SEQ ID NO: 480152 - RNA, 19 nt, Artificial Sequence
  Description of Artificial Sequence: Synthetic oligonucleotide
  Antisense Strand to SEQ ID NO: 480151
auauuucaugcuuaaggcu

SEQ ID NO: 480153 - RNA, 19 nt, Artificial Sequence
  Description of Artificial Sequence: Synthetic oligonucleotide
  Sense strand starting at position 2819 of SEQ ID NO: 317300
ugaaauauguuucuaagca

SEQ ID NO: 480154 - RNA, 19 nt, Artificial Sequence
  Description of Artificial Sequence: Synthetic oligonucleotide
  Antisense Strand to SEQ ID NO: 480153
ugcuuagaaacauauuuca

SEQ ID NO: 480155 - RNA, 19 nt, Artificial Sequence
  Description of Artificial Sequence: Synthetic oligonucleotide
  Sense strand starting at position 2823 of SEQ ID NO: 317300
auauguuucuaagcagauu

SEQ ID NO: 480156 - RNA, 19 nt, Artificial Sequence
  Description of Artificial Sequence: Synthetic oligonucleotide
  Antisense Strand to SEQ ID NO: 480155
aaucugcuuagaaacauau

SEQ ID NO: 480157 - RNA, 19 nt, Artificial Sequence
  Description of Artificial Sequence: Synthetic oligonucleotide
  Sense strand starting at position 3001 of SEQ ID NO: 317300
gcagguacuugcuuuauga

SEQ ID NO: 480158 - RNA, 19 nt, Artificial Sequence
  Description of Artificial Sequence: Synthetic oligonucleotide
  Antisense Strand to SEQ ID NO: 480157
ucauaaagcaaguaccugc

SEQ ID NO: 480159 - RNA, 19 nt, Artificial Sequence
  Description of Artificial Sequence: Synthetic oligonucleotide
  Sense strand starting at position 3003 of SEQ ID NO: 317300
agguacuugcuuuaugaac

SEQ ID NO: 480160 - RNA, 19 nt, Artificial Sequence
  Description of Artificial Sequence: Synthetic oligonucleotide
  Antisense Strand to SEQ ID NO: 480159
guucauaaagcaaguaccu

SEQ ID NO: 480161 - RNA, 19 nt, Artificial Sequence
  Description of Artificial Sequence: Synthetic oligonucleotide
  Sense strand starting at position 3075 of SEQ ID NO: 317300
auugaaagaaaguguuugu

SEQ ID NO: 480162 - RNA, 19 nt, Artificial Sequence
  Description of Artificial Sequence: Synthetic oligonucleotide
  Antisense Strand to SEQ ID NO: 480161
acaaacacuuucuuucaau

SEQ ID NO: 480163 - RNA, 19 nt, Artificial Sequence
  Description of Artificial Sequence: Synthetic oligonucleotide
  Sense strand starting at position 3079 of SEQ ID NO: 317300
aaagaaaguguuuguuugu

SEQ ID NO: 480164 - RNA, 19 nt, Artificial Sequence
  Description of Artificial Sequence: Synthetic oligonucleotide
  Antisense Strand to SEQ ID NO: 480163
acaaacaaacacuuucuuu

SEQ ID NO: 480165 - RNA, 19 nt, Artificial Sequence
  Description of Artificial Sequence: Synthetic oligonucleotide
  Sense strand starting at position 3080 of SEQ ID NO: 317300
aagaaaguguuuguuuguu

SEQ ID NO: 480166 - RNA, 19 nt, Artificial Sequence
  Description of Artificial Sequence: Synthetic oligonucleotide
  Antisense Strand to SEQ ID NO: 480165
aacaaacaaacacuuucuu

SEQ ID NO: 480167 - RNA, 19 nt, Artificial Sequence
  Description of Artificial Sequence: Synthetic oligonucleotide
  Sense strand starting at position 3156 of SEQ ID NO: 317300
ugagacuauuccuuucuag

SEQ ID NO: 480168 - RNA, 19 nt, Artificial Sequence
  Description of Artificial Sequence: Synthetic oligonucleotide
  Antisense Strand to SEQ ID NO: 480167
cuagaaaggaauagucuca

SEQ ID NO: 480169 - RNA, 19 nt, Artificial Sequence
  Description of Artificial Sequence: Synthetic oligonucleotide
  Sense strand starting at position 3159 of SEQ ID NO: 317300
gacuauuccuuucuaggga

SEQ ID NO: 480170 - RNA, 19 nt, Artificial Sequence
  Description of Artificial Sequence: Synthetic oligonucleotide
  Antisense Strand to SEQ ID NO: 480169
ucccuagaaaggaauaguc

SEQ ID NO: 480171 - RNA, 19 nt, Artificial Sequence
  Description of Artificial Sequence: Synthetic oligonucleotide
  Sense strand starting at position 3167 of SEQ ID NO: 317300
cuuucuagggauuguuauc

SEQ ID NO: 480172 - RNA, 19 nt, Artificial Sequence
  Description of Artificial Sequence: Synthetic oligonucleotide
  Antisense Strand to SEQ ID NO: 480171
gauaacaaucccuagaaag

SEQ ID NO: 480173 - RNA, 19 nt, Artificial Sequence
  Description of Artificial Sequence: Synthetic oligonucleotide
  Sense strand starting at position 3177 of SEQ ID NO: 317300
auuguuaucagagggacau

SEQ ID NO: 480174 - RNA, 19 nt, Artificial Sequence
  Description of Artificial Sequence: Synthetic oligonucleotide
  Antisense Strand to SEQ ID NO: 480173
augucccucugauaacaau

SEQ ID NO: 480175 - RNA, 19 nt, Artificial Sequence
  Description of Artificial Sequence: Synthetic oligonucleotide
  Sense strand starting at position 3178 of SEQ ID NO: 317300
uuguuaucagagggacauc

SEQ ID NO: 480176 - RNA, 19 nt, Artificial Sequence
  Description of Artificial Sequence: Synthetic oligonucleotide
  Antisense Strand to SEQ ID NO: 480175
gaugucccucugauaacaa

SEQ ID NO: 480177 - RNA, 19 nt, Artificial Sequence
  Description of Artificial Sequence: Synthetic oligonucleotide
  Sense strand starting at position 3264 of SEQ ID NO: 317300
aucauaauuugagacugaa

SEQ ID NO: 480178 - RNA, 19 nt, Artificial Sequence
  Description of Artificial Sequence: Synthetic oligonucleotide
  Antisense Strand to SEQ ID NO: 480177
uucagucucaaauuaugau

SEQ ID NO: 480179 - RNA, 19 nt, Artificial Sequence
  Description of Artificial Sequence: Synthetic oligonucleotide
  Sense strand starting at position 3774 of SEQ ID NO: 317300
gguauacugguacaaugua

SEQ ID NO: 480180 - RNA, 19 nt, Artificial Sequence
  Description of Artificial Sequence: Synthetic oligonucleotide
  Antisense Strand to SEQ ID NO: 480179
uacauuguaccaguauacc

SEQ ID NO: 480181 - RNA, 19 nt, Artificial Sequence
  Description of Artificial Sequence: Synthetic oligonucleotide
  Sense strand starting at position 3965 of SEQ ID NO: 317300
ccacaugccagguagugau

SEQ ID NO: 480182 - RNA, 19 nt, Artificial Sequence
  Description of Artificial Sequence: Synthetic oligonucleotide
  Antisense Strand to SEQ ID NO: 480181
aucacuaccuggcaugugg

SEQ ID NO: 480183 - RNA, 19 nt, Artificial Sequence
  Description of Artificial Sequence: Synthetic oligonucleotide
  Sense strand starting at position 3975 of SEQ ID NO: 317300
gguagugauccaggcacua

SEQ ID NO: 480184 - RNA, 19 nt, Artificial Sequence
  Description of Artificial Sequence: Synthetic oligonucleotide
  Antisense Strand to SEQ ID NO: 480183
uagugccuggaucacuacc

SEQ ID NO: 480185 - RNA, 19 nt, Artificial Sequence
  Description of Artificial Sequence: Synthetic oligonucleotide
  Sense strand starting at position 37 of SEQ ID NO: 317301
agaggcgguguuuaaagua

SEQ ID NO: 480186 - RNA, 19 nt, Artificial Sequence
  Description of Artificial Sequence: Synthetic oligonucleotide
  Antisense Strand to SEQ ID NO: 480185
uacuuuaaacaccgccucu

SEQ ID NO: 480187 - RNA, 19 nt, Artificial Sequence
  Description of Artificial Sequence: Synthetic oligonucleotide
  Sense strand starting at position 44 of SEQ ID NO: 317301
guguuuaaaguacaaagua

SEQ ID NO: 480188 - RNA, 19 nt, Artificial Sequence
  Description of Artificial Sequence: Synthetic oligonucleotide
  Antisense Strand to SEQ ID NO: 480187
uacuuuguacuuuaaacac

SEQ ID NO: 480189 - RNA, 19 nt, Artificial Sequence
  Description of Artificial Sequence: Synthetic oligonucleotide
  Sense strand starting at position 85 of SEQ ID NO: 317301
agcaaagucuccuugagaa

SEQ ID NO: 480190 - RNA, 19 nt, Artificial Sequence
  Description of Artificial Sequence: Synthetic oligonucleotide
  Antisense Strand to SEQ ID NO: 480189
uucucaaggagacuuugcu

SEQ ID NO: 480191 - RNA, 19 nt, Artificial Sequence
  Description of Artificial Sequence: Synthetic oligonucleotide
  Sense strand starting at position 240 of SEQ ID NO: 317301
acugacuuauuacucagua

SEQ ID NO: 480192 - RNA, 19 nt, Artificial Sequence
  Description of Artificial Sequence: Synthetic oligonucleotide
  Antisense Strand to SEQ ID NO: 480191
uacugaguaauaagucagu

SEQ ID NO: 480193 - RNA, 19 nt, Artificial Sequence
  Description of Artificial Sequence: Synthetic oligonucleotide
  Sense strand starting at position 244 of SEQ ID NO: 317301
acuuauuacucaguaagua

SEQ ID NO: 480194 - RNA, 19 nt, Artificial Sequence
  Description of Artificial Sequence: Synthetic oligonucleotide
  Antisense Strand to SEQ ID NO: 480193
uacuuacugaguaauaagu

SEQ ID NO: 480195 - RNA, 19 nt, Artificial Sequence
  Description of Artificial Sequence: Synthetic oligonucleotide
  Sense strand starting at position 245 of SEQ ID NO: 317301
cuuauuacucaguaaguaa

SEQ ID NO: 480196 - RNA, 19 nt, Artificial Sequence
  Description of Artificial Sequence: Synthetic oligonucleotide
  Antisense Strand to SEQ ID NO: 480195
uuacuuacugaguaauaag

SEQ ID NO: 480197 - RNA, 19 nt, Artificial Sequence
  Description of Artificial Sequence: Synthetic oligonucleotide
  Sense strand starting at position 258 of SEQ ID NO: 317301
aaguaauaaggagguguga

SEQ ID NO: 480198 - RNA, 19 nt, Artificial Sequence
  Description of Artificial Sequence: Synthetic oligonucleotide
  Antisense Strand to SEQ ID NO: 480197
ucacaccuccuuauuacuu

SEQ ID NO: 480199 - RNA, 19 nt, Artificial Sequence
  Description of Artificial Sequence: Synthetic oligonucleotide
  Sense strand starting at position 260 of SEQ ID NO: 317301
guaauaaggaggugugaac

SEQ ID NO: 480200 - RNA, 19 nt, Artificial Sequence
  Description of Artificial Sequence: Synthetic oligonucleotide
  Antisense Strand to SEQ ID NO: 480199
guucacaccuccuuauuac

SEQ ID NO: 480201 - RNA, 19 nt, Artificial Sequence
  Description of Artificial Sequence: Synthetic oligonucleotide
  Sense strand starting at position 344 of SEQ ID NO: 317301
uuggaucucuuguuagauu

SEQ ID NO: 480202 - RNA, 19 nt, Artificial Sequence
  Description of Artificial Sequence: Synthetic oligonucleotide
  Antisense Strand to SEQ ID NO: 480201
aaucuaacaagagauccaa

SEQ ID NO: 480203 - RNA, 19 nt, Artificial Sequence
  Description of Artificial Sequence: Synthetic oligonucleotide
  Sense strand starting at position 361 of SEQ ID NO: 317301
uuuaaagagcauggguuua

SEQ ID NO: 480204 - RNA, 19 nt, Artificial Sequence
  Description of Artificial Sequence: Synthetic oligonucleotide
  Antisense Strand to SEQ ID NO: 480203
uaaacccaugcucuuuaaa

SEQ ID NO: 480205 - RNA, 19 nt, Artificial Sequence
  Description of Artificial Sequence: Synthetic oligonucleotide
  Sense strand starting at position 366 of SEQ ID NO: 317301
agagcauggguuuagcaga

SEQ ID NO: 480206 - RNA, 19 nt, Artificial Sequence
  Description of Artificial Sequence: Synthetic oligonucleotide
  Antisense Strand to SEQ ID NO: 480205
ucugcuaaacccaugcucu

SEQ ID NO: 480207 - RNA, 19 nt, Artificial Sequence
  Description of Artificial Sequence: Synthetic oligonucleotide
  Sense strand starting at position 610 of SEQ ID NO: 317301
aaagauuuguacuugugcu

SEQ ID NO: 480208 - RNA, 19 nt, Artificial Sequence
  Description of Artificial Sequence: Synthetic oligonucleotide
  Antisense Strand to SEQ ID NO: 480207
agcacaaguacaaaucuuu

SEQ ID NO: 480209 - RNA, 19 nt, Artificial Sequence
  Description of Artificial Sequence: Synthetic oligonucleotide
  Sense strand starting at position 614 of SEQ ID NO: 317301
auuuguacuugugcuuuaa

SEQ ID NO: 480210 - RNA, 19 nt, Artificial Sequence
  Description of Artificial Sequence: Synthetic oligonucleotide
  Antisense Strand to SEQ ID NO: 480209
uuaaagcacaaguacaaau

SEQ ID NO: 480211 - RNA, 19 nt, Artificial Sequence
  Description of Artificial Sequence: Synthetic oligonucleotide
  Sense strand starting at position 765 of SEQ ID NO: 317301
acuguaagagcuuguauuu

SEQ ID NO: 480212 - RNA, 19 nt, Artificial Sequence
  Description of Artificial Sequence: Synthetic oligonucleotide
  Antisense Strand to SEQ ID NO: 480211
aaauacaagcucuuacagu

SEQ ID NO: 480213 - RNA, 19 nt, Artificial Sequence
  Description of Artificial Sequence: Synthetic oligonucleotide
  Sense strand starting at position 844 of SEQ ID NO: 317301
acucguuugccagcacagu

SEQ ID NO: 480214 - RNA, 19 nt, Artificial Sequence
  Description of Artificial Sequence: Synthetic oligonucleotide
  Antisense Strand to SEQ ID NO: 480213
acugugcuggcaaacgagu

SEQ ID NO: 480215 - RNA, 19 nt, Artificial Sequence
  Description of Artificial Sequence: Synthetic oligonucleotide
  Sense strand starting at position 967 of SEQ ID NO: 317301
cgauauaacccugggaggu

SEQ ID NO: 480216 - RNA, 19 nt, Artificial Sequence
  Description of Artificial Sequence: Synthetic oligonucleotide
  Antisense Strand to SEQ ID NO: 480215
accucccaggguuauaucg

SEQ ID NO: 480217 - RNA, 19 nt, Artificial Sequence
  Description of Artificial Sequence: Synthetic oligonucleotide
  Sense strand starting at position 1064 of SEQ ID NO: 317301
cugucauauuuaccggcau

SEQ ID NO: 480218 - RNA, 19 nt, Artificial Sequence
  Description of Artificial Sequence: Synthetic oligonucleotide
  Antisense Strand to SEQ ID NO: 480217
augccgguaaauaugacag

SEQ ID NO: 480219 - RNA, 19 nt, Artificial Sequence
  Description of Artificial Sequence: Synthetic oligonucleotide
  Sense strand starting at position 2573 of SEQ ID NO: 317301
cggguauuaaacuguacca

SEQ ID NO: 480220 - RNA, 19 nt, Artificial Sequence
  Description of Artificial Sequence: Synthetic oligonucleotide
  Antisense Strand to SEQ ID NO: 480219
ugguacaguuuaauacccg

SEQ ID NO: 480221 - RNA, 19 nt, Artificial Sequence
  Description of Artificial Sequence: Synthetic oligonucleotide
  Sense strand starting at position 2575 of SEQ ID NO: 317301
gguauuaaacuguaccauu

SEQ ID NO: 480222 - RNA, 19 nt, Artificial Sequence
  Description of Artificial Sequence: Synthetic oligonucleotide
  Antisense Strand to SEQ ID NO: 480221
aaugguacaguuuaauacc

SEQ ID NO: 480223 - RNA, 19 nt, Artificial Sequence
  Description of Artificial Sequence: Synthetic oligonucleotide
  Sense strand starting at position 2640 of SEQ ID NO: 317301
uauugagcucuuuauguga

SEQ ID NO: 480224 - RNA, 19 nt, Artificial Sequence
  Description of Artificial Sequence: Synthetic oligonucleotide
  Antisense Strand to SEQ ID NO: 480223
ucacauaaagagcucaaua

SEQ ID NO: 480225 - RNA, 19 nt, Artificial Sequence
  Description of Artificial Sequence: Synthetic oligonucleotide
  Sense strand starting at position 2643 of SEQ ID NO: 317301
ugagcucuuuaugugagaa

SEQ ID NO: 480226 - RNA, 19 nt, Artificial Sequence
  Description of Artificial Sequence: Synthetic oligonucleotide
  Antisense Strand to SEQ ID NO: 480225
uucucacauaaagagcuca

SEQ ID NO: 480227 - RNA, 19 nt, Artificial Sequence
  Description of Artificial Sequence: Synthetic oligonucleotide
  Sense strand starting at position 2725 of SEQ ID NO: 317301
uccuguauuugcuuugacu

SEQ ID NO: 480228 - RNA, 19 nt, Artificial Sequence
  Description of Artificial Sequence: Synthetic oligonucleotide
  Antisense Strand to SEQ ID NO: 480227
agucaaagcaaauacagga

SEQ ID NO: 480229 - RNA, 19 nt, Artificial Sequence
  Description of Artificial Sequence: Synthetic oligonucleotide
  Sense strand starting at position 2727 of SEQ ID NO: 317301
cuguauuugcuuugacuuu

SEQ ID NO: 480230 - RNA, 19 nt, Artificial Sequence
  Description of Artificial Sequence: Synthetic oligonucleotide
  Antisense Strand to SEQ ID NO: 480229
aaagucaaagcaaauacag

SEQ ID NO: 480231 - RNA, 19 nt, Artificial Sequence
  Description of Artificial Sequence: Synthetic oligonucleotide
  Sense strand starting at position 2824 of SEQ ID NO: 317301
ucaauuacaggucgacagu

SEQ ID NO: 480232 - RNA, 19 nt, Artificial Sequence
  Description of Artificial Sequence: Synthetic oligonucleotide
  Antisense Strand to SEQ ID NO: 480231
acugucgaccuguaauuga

SEQ ID NO: 480233 - RNA, 19 nt, Artificial Sequence
  Description of Artificial Sequence: Synthetic oligonucleotide
  Sense strand starting at position 2825 of SEQ ID NO: 317301
caauuacaggucgacaguu

SEQ ID NO: 480234 - RNA, 19 nt, Artificial Sequence
  Description of Artificial Sequence: Synthetic oligonucleotide
  Antisense Strand to SEQ ID NO: 480233
aacugucgaccuguaauug

SEQ ID NO: 480235 - RNA, 19 nt, Artificial Sequence
  Description of Artificial Sequence: Synthetic oligonucleotide
  Sense strand starting at position 2861 of SEQ ID NO: 317301
cgugucucgcuaguaauua

SEQ ID NO: 480236 - RNA, 19 nt, Artificial Sequence
  Description of Artificial Sequence: Synthetic oligonucleotide
  Antisense Strand to SEQ ID NO: 480235
uaauuacuagcgagacacg

SEQ ID NO: 480237 - RNA, 19 nt, Artificial Sequence
  Description of Artificial Sequence: Synthetic oligonucleotide
  Sense strand starting at position 2900 of SEQ ID NO: 317301
ucgaaucaaugauuacuga

SEQ ID NO: 480238 - RNA, 19 nt, Artificial Sequence
  Description of Artificial Sequence: Synthetic oligonucleotide
  Antisense Strand to SEQ ID NO: 480237
ucaguaaucauugauucga

SEQ ID NO: 480239 - RNA, 19 nt, Artificial Sequence
  Description of Artificial Sequence: Synthetic oligonucleotide
  Sense strand starting at position 2919 of SEQ ID NO: 317301
uccaguaauucccuuaagu

SEQ ID NO: 480240 - RNA, 19 nt, Artificial Sequence
  Description of Artificial Sequence: Synthetic oligonucleotide
  Antisense Strand to SEQ ID NO: 480239
acuuaagggaauuacugga

SEQ ID NO: 480241 - RNA, 19 nt, Artificial Sequence
  Description of Artificial Sequence: Synthetic oligonucleotide
  Sense strand starting at position 2936 of SEQ ID NO: 317301
guaaacauuucuuucggca

SEQ ID NO: 480242 - RNA, 19 nt, Artificial Sequence
  Description of Artificial Sequence: Synthetic oligonucleotide
  Antisense Strand to SEQ ID NO: 480241
ugccgaaagaaauguuuac

SEQ ID NO: 480243 - RNA, 19 nt, Artificial Sequence
  Description of Artificial Sequence: Synthetic oligonucleotide
  Sense strand starting at position 2993 of SEQ ID NO: 317301
cuggauuccuagcugauua

SEQ ID NO: 480244 - RNA, 19 nt, Artificial Sequence
  Description of Artificial Sequence: Synthetic oligonucleotide
  Antisense Strand to SEQ ID NO: 480243
uaaucagcuaggaauccag

SEQ ID NO: 480245 - RNA, 19 nt, Artificial Sequence
  Description of Artificial Sequence: Synthetic oligonucleotide
  Sense strand starting at position 2994 of SEQ ID NO: 317301
uggauuccuagcugauuag

SEQ ID NO: 480246 - RNA, 19 nt, Artificial Sequence
  Description of Artificial Sequence: Synthetic oligonucleotide
  Antisense Strand to SEQ ID NO: 480245
cuaaucagcuaggaaucca

SEQ ID NO: 480247 - RNA, 19 nt, Artificial Sequence
  Description of Artificial Sequence: Synthetic oligonucleotide
  Sense strand starting at position 3061 of SEQ ID NO: 317301
aucacuguuguguaacauu

SEQ ID NO: 480248 - RNA, 19 nt, Artificial Sequence
  Description of Artificial Sequence: Synthetic oligonucleotide
  Antisense Strand to SEQ ID NO: 480247
aauguuacacaacagugau

SEQ ID NO: 480249 - RNA, 19 nt, Artificial Sequence
  Description of Artificial Sequence: Synthetic oligonucleotide
  Sense strand starting at position 3132 of SEQ ID NO: 317301
aguuguacuucuuugaaag

SEQ ID NO: 480250 - RNA, 19 nt, Artificial Sequence
  Description of Artificial Sequence: Synthetic oligonucleotide
  Antisense Strand to SEQ ID NO: 480249
cuuucaaagaaguacaacu

SEQ ID NO: 480251 - RNA, 19 nt, Artificial Sequence
  Description of Artificial Sequence: Synthetic oligonucleotide
  Sense strand starting at position 3133 of SEQ ID NO: 317301
guuguacuucuuugaaagg

SEQ ID NO: 480252 - RNA, 19 nt, Artificial Sequence
  Description of Artificial Sequence: Synthetic oligonucleotide
  Antisense Strand to SEQ ID NO: 480251
ccuuucaaagaaguacaac

SEQ ID NO: 480253 - RNA, 19 nt, Artificial Sequence
  Description of Artificial Sequence: Synthetic oligonucleotide
  Sense strand starting at position 3199 of SEQ ID NO: 317301
ugaaauuacuacucgcaau

SEQ ID NO: 480254 - RNA, 19 nt, Artificial Sequence
  Description of Artificial Sequence: Synthetic oligonucleotide
  Antisense Strand to SEQ ID NO: 480253
auugcgaguaguaauuuca

SEQ ID NO: 480255 - RNA, 19 nt, Artificial Sequence
  Description of Artificial Sequence: Synthetic oligonucleotide
  Sense strand starting at position 3211 of SEQ ID NO: 317301
ucgcaauuaccaugagacu

SEQ ID NO: 480256 - RNA, 19 nt, Artificial Sequence
  Description of Artificial Sequence: Synthetic oligonucleotide
  Antisense Strand to SEQ ID NO: 480255
agucucaugguaauugcga

SEQ ID NO: 480257 - RNA, 19 nt, Artificial Sequence
  Description of Artificial Sequence: Synthetic oligonucleotide
  Sense strand starting at position 3212 of SEQ ID NO: 317301
cgcaauuaccaugagacuu

SEQ ID NO: 480258 - RNA, 19 nt, Artificial Sequence
  Description of Artificial Sequence: Synthetic oligonucleotide
  Antisense Strand to SEQ ID NO: 480257
aagucucaugguaauugcg

SEQ ID NO: 480259 - RNA, 19 nt, Artificial Sequence
  Description of Artificial Sequence: Synthetic oligonucleotide
  Sense strand starting at position 3377 of SEQ ID NO: 317301
guaaguuauuuguccagcu

SEQ ID NO: 480260 - RNA, 19 nt, Artificial Sequence
  Description of Artificial Sequence: Synthetic oligonucleotide
  Antisense Strand to SEQ ID NO: 480259
agcuggacaaauaacuuac

SEQ ID NO: 480261 - RNA, 19 nt, Artificial Sequence
  Description of Artificial Sequence: Synthetic oligonucleotide
  Sense strand starting at position 3420 of SEQ ID NO: 317301
agauacugugagggcuaaa

SEQ ID NO: 480262 - RNA, 19 nt, Artificial Sequence
  Description of Artificial Sequence: Synthetic oligonucleotide
  Antisense Strand to SEQ ID NO: 480261
uuuagcccucacaguaucu

SEQ ID NO: 480263 - RNA, 19 nt, Artificial Sequence
  Description of Artificial Sequence: Synthetic oligonucleotide
  Sense strand starting at position 3748 of SEQ ID NO: 317301
acuuuagcuugggcaauaa

SEQ ID NO: 480264 - RNA, 19 nt, Artificial Sequence
  Description of Artificial Sequence: Synthetic oligonucleotide
  Antisense Strand to SEQ ID NO: 480263
uuauugcccaagcuaaagu

SEQ ID NO: 480265 - RNA, 19 nt, Artificial Sequence
  Description of Artificial Sequence: Synthetic oligonucleotide
  Sense strand starting at position 1 of SEQ ID NO: 317302
agugguuaucccuagguau

SEQ ID NO: 480266 - RNA, 19 nt, Artificial Sequence
  Description of Artificial Sequence: Synthetic oligonucleotide
  Antisense Strand to SEQ ID NO: 480265
auaccuagggauaaccacu

SEQ ID NO: 480267 - RNA, 19 nt, Artificial Sequence
  Description of Artificial Sequence: Synthetic oligonucleotide
  Sense strand starting at position 65 of SEQ ID NO: 317302
uguaucuugugacuuacaa

SEQ ID NO: 480268 - RNA, 19 nt, Artificial Sequence
  Description of Artificial Sequence: Synthetic oligonucleotide
  Antisense Strand to SEQ ID NO: 480267
uuguaagucacaagauaca

SEQ ID NO: 480269 - RNA, 19 nt, Artificial Sequence
  Description of Artificial Sequence: Synthetic oligonucleotide
  Sense strand starting at position 72 of SEQ ID NO: 317302
ugugacuuacaaugcaaau

SEQ ID NO: 480270 - RNA, 19 nt, Artificial Sequence
  Description of Artificial Sequence: Synthetic oligonucleotide
  Antisense Strand to SEQ ID NO: 480269
auuugcauuguaagucaca

SEQ ID NO: 480271 - RNA, 19 nt, Artificial Sequence
  Description of Artificial Sequence: Synthetic oligonucleotide
  Sense strand starting at position 1163 of SEQ ID NO: 317302
acagaauaugguggauguu

SEQ ID NO: 480272 - RNA, 19 nt, Artificial Sequence
  Description of Artificial Sequence: Synthetic oligonucleotide
  Antisense Strand to SEQ ID NO: 480271
aacauccaccauauucugu

SEQ ID NO: 480273 - RNA, 19 nt, Artificial Sequence
  Description of Artificial Sequence: Synthetic oligonucleotide
  Sense strand starting at position 1169 of SEQ ID NO: 317302
uaugguggauguucucaga

SEQ ID NO: 480274 - RNA, 19 nt, Artificial Sequence
  Description of Artificial Sequence: Synthetic oligonucleotide
  Antisense Strand to SEQ ID NO: 480273
ucugagaacauccaccaua

SEQ ID NO: 480275 - RNA, 19 nt, Artificial Sequence
  Description of Artificial Sequence: Synthetic oligonucleotide
  Sense strand starting at position 1223 of SEQ ID NO: 317302
gguacucaggcuugggaau

SEQ ID NO: 480276 - RNA, 19 nt, Artificial Sequence
  Description of Artificial Sequence: Synthetic oligonucleotide
  Antisense Strand to SEQ ID NO: 480275
auucccaagccugaguacc

SEQ ID NO: 480277 - RNA, 19 nt, Artificial Sequence
  Description of Artificial Sequence: Synthetic oligonucleotide
  Sense strand starting at position 1237 of SEQ ID NO: 317302
ggaaucugacaacgugaau

SEQ ID NO: 480278 - RNA, 19 nt, Artificial Sequence
  Description of Artificial Sequence: Synthetic oligonucleotide
  Antisense Strand to SEQ ID NO: 480277
auucacguugucagauucc

SEQ ID NO: 480279 - RNA, 19 nt, Artificial Sequence
  Description of Artificial Sequence: Synthetic oligonucleotide
  Sense strand starting at position 1249 of SEQ ID NO: 317302
cgugaauuccguucugagc

SEQ ID NO: 480280 - RNA, 19 nt, Artificial Sequence
  Description of Artificial Sequence: Synthetic oligonucleotide
  Antisense Strand to SEQ ID NO: 480279
gcucagaacggaauucacg

SEQ ID NO: 480281 - RNA, 19 nt, Artificial Sequence
  Description of Artificial Sequence: Synthetic oligonucleotide
  Sense strand starting at position 1268 of SEQ ID NO: 317302
ucuaucacugaguggcaau

SEQ ID NO: 480282 - RNA, 19 nt, Artificial Sequence
  Description of Artificial Sequence: Synthetic oligonucleotide
  Antisense Strand to SEQ ID NO: 480281
auugccacucagugauaga

SEQ ID NO: 480283 - RNA, 19 nt, Artificial Sequence
  Description of Artificial Sequence: Synthetic oligonucleotide
  Sense strand starting at position 1353 of SEQ ID NO: 317302
augacucuugggugucaga

SEQ ID NO: 480284 - RNA, 19 nt, Artificial Sequence
  Description of Artificial Sequence: Synthetic oligonucleotide
  Antisense Strand to SEQ ID NO: 480283
ucugacacccaagagucau

SEQ ID NO: 480285 - RNA, 19 nt, Artificial Sequence
  Description of Artificial Sequence: Synthetic oligonucleotide
  Sense strand starting at position 1404 of SEQ ID NO: 317302
ucuguuaugaagggcacaa

SEQ ID NO: 480286 - RNA, 19 nt, Artificial Sequence
  Description of Artificial Sequence: Synthetic oligonucleotide
  Antisense Strand to SEQ ID NO: 480285
uugugcccuucauaacaga

SEQ ID NO: 480287 - RNA, 19 nt, Artificial Sequence
  Description of Artificial Sequence: Synthetic oligonucleotide
  Sense strand starting at position 1564 of SEQ ID NO: 317302
aacugaaaguaguccugaa

SEQ ID NO: 480288 - RNA, 19 nt, Artificial Sequence
  Description of Artificial Sequence: Synthetic oligonucleotide
  Antisense Strand to SEQ ID NO: 480287
uucaggacuacuuucaguu

SEQ ID NO: 480289 - RNA, 19 nt, Artificial Sequence
  Description of Artificial Sequence: Synthetic oligonucleotide
  Sense strand starting at position 1612 of SEQ ID NO: 317302
guauguuacggucagauca

SEQ ID NO: 480290 - RNA, 19 nt, Artificial Sequence
  Description of Artificial Sequence: Synthetic oligonucleotide
  Antisense Strand to SEQ ID NO: 480289
ugaucugaccguaacauac

SEQ ID NO: 480291 - RNA, 19 nt, Artificial Sequence
  Description of Artificial Sequence: Synthetic oligonucleotide
  Sense strand starting at position 2192 of SEQ ID NO: 317302
agagcaugccaguaaauaa

SEQ ID NO: 480292 - RNA, 19 nt, Artificial Sequence
  Description of Artificial Sequence: Synthetic oligonucleotide
  Antisense Strand to SEQ ID NO: 480291
uuauuuacuggcaugcucu

SEQ ID NO: 480293 - RNA, 19 nt, Artificial Sequence
  Description of Artificial Sequence: Synthetic oligonucleotide
  Sense strand starting at position 2210 of SEQ ID NO: 317302
aacacaggucuguguuuga

SEQ ID NO: 480294 - RNA, 19 nt, Artificial Sequence
  Description of Artificial Sequence: Synthetic oligonucleotide
  Antisense Strand to SEQ ID NO: 480293
ucaaacacagaccuguguu

SEQ ID NO: 480295 - RNA, 19 nt, Artificial Sequence
  Description of Artificial Sequence: Synthetic oligonucleotide
  Sense strand starting at position 2310 of SEQ ID NO: 317302
aggcaaauguucccacuca

SEQ ID NO: 480296 - RNA, 19 nt, Artificial Sequence
  Description of Artificial Sequence: Synthetic oligonucleotide
  Antisense Strand to SEQ ID NO: 480295
ugagugggaacauuugccu

SEQ ID NO: 480297 - RNA, 19 nt, Artificial Sequence
  Description of Artificial Sequence: Synthetic oligonucleotide
  Sense strand starting at position 2325 of SEQ ID NO: 317302
cucacagaugugugaaacu

SEQ ID NO: 480298 - RNA, 19 nt, Artificial Sequence
  Description of Artificial Sequence: Synthetic oligonucleotide
  Antisense Strand to SEQ ID NO: 480297
aguuucacacaucugugag

SEQ ID NO: 480299 - RNA, 19 nt, Artificial Sequence
  Description of Artificial Sequence: Synthetic oligonucleotide
  Sense strand starting at position 2367 of SEQ ID NO: 317302
auacaaauaucuguuggau

SEQ ID NO: 480300 - RNA, 19 nt, Artificial Sequence
  Description of Artificial Sequence: Synthetic oligonucleotide
  Antisense Strand to SEQ ID NO: 480299
auccaacagauauuuguau

SEQ ID NO: 480301 - RNA, 19 nt, Artificial Sequence
  Description of Artificial Sequence: Synthetic oligonucleotide
  Sense strand starting at position 2370 of SEQ ID NO: 317302
caaauaucuguuggaugga

SEQ ID NO: 480302 - RNA, 19 nt, Artificial Sequence
  Description of Artificial Sequence: Synthetic oligonucleotide
  Antisense Strand to SEQ ID NO: 480301
uccauccaacagauauuug

SEQ ID NO: 480303 - RNA, 19 nt, Artificial Sequence
  Description of Artificial Sequence: Synthetic oligonucleotide
  Sense strand starting at position 2373 of SEQ ID NO: 317302
auaucuguuggauggauga

SEQ ID NO: 480304 - RNA, 19 nt, Artificial Sequence
  Description of Artificial Sequence: Synthetic oligonucleotide
  Antisense Strand to SEQ ID NO: 480303
ucauccauccaacagauau

SEQ ID NO: 480305 - RNA, 19 nt, Artificial Sequence
  Description of Artificial Sequence: Synthetic oligonucleotide
  Sense strand starting at position 2455 of SEQ ID NO: 317302
agaguaauauguccucuug

SEQ ID NO: 480306 - RNA, 19 nt, Artificial Sequence
  Description of Artificial Sequence: Synthetic oligonucleotide
  Antisense Strand to SEQ ID NO: 480305
caagaggacauauuacucu

SEQ ID NO: 480307 - RNA, 19 nt, Artificial Sequence
  Description of Artificial Sequence: Synthetic oligonucleotide
  Sense strand starting at position 2464 of SEQ ID NO: 317302
uguccucuuguagaauauu

SEQ ID NO: 480308 - RNA, 19 nt, Artificial Sequence
  Description of Artificial Sequence: Synthetic oligonucleotide
  Antisense Strand to SEQ ID NO: 480307
aauauucuacaagaggaca

SEQ ID NO: 480309 - RNA, 19 nt, Artificial Sequence
  Description of Artificial Sequence: Synthetic oligonucleotide
  Sense strand starting at position 2472 of SEQ ID NO: 317302
uguagaauauuugggagau

SEQ ID NO: 480310 - RNA, 19 nt, Artificial Sequence
  Description of Artificial Sequence: Synthetic oligonucleotide
  Antisense Strand to SEQ ID NO: 480309
aucucccaaauauucuaca

SEQ ID NO: 480311 - RNA, 19 nt, Artificial Sequence
  Description of Artificial Sequence: Synthetic oligonucleotide
  Sense strand starting at position 2473 of SEQ ID NO: 317302
guagaauauuugggagaua

SEQ ID NO: 480312 - RNA, 19 nt, Artificial Sequence
  Description of Artificial Sequence: Synthetic oligonucleotide
  Antisense Strand to SEQ ID NO: 480311
uaucucccaaauauucuac

SEQ ID NO: 480313 - RNA, 19 nt, Artificial Sequence
  Description of Artificial Sequence: Synthetic oligonucleotide
  Sense strand starting at position 2584 of SEQ ID NO: 317302
uguguuuauguauaccuau

SEQ ID NO: 480314 - RNA, 19 nt, Artificial Sequence
  Description of Artificial Sequence: Synthetic oligonucleotide
  Antisense Strand to SEQ ID NO: 480313
auagguauacauaaacaca

SEQ ID NO: 480315 - RNA, 19 nt, Artificial Sequence
  Description of Artificial Sequence: Synthetic oligonucleotide
  Sense strand starting at position 2587 of SEQ ID NO: 317302
guuuauguauaccuauacu

SEQ ID NO: 480316 - RNA, 19 nt, Artificial Sequence
  Description of Artificial Sequence: Synthetic oligonucleotide
  Antisense Strand to SEQ ID NO: 480315
aguauagguauacauaaac

SEQ ID NO: 480317 - RNA, 19 nt, Artificial Sequence
  Description of Artificial Sequence: Synthetic oligonucleotide
  Sense strand starting at position 2745 of SEQ ID NO: 317302
cucuuaggcuauuuaaguu

SEQ ID NO: 480318 - RNA, 19 nt, Artificial Sequence
  Description of Artificial Sequence: Synthetic oligonucleotide
  Antisense Strand to SEQ ID NO: 480317
aacuuaaauagccuaagag

SEQ ID NO: 480319 - RNA, 19 nt, Artificial Sequence
  Description of Artificial Sequence: Synthetic oligonucleotide
  Sense strand starting at position 2788 of SEQ ID NO: 317302
gucagaauaccgugauaaa

SEQ ID NO: 480320 - RNA, 19 nt, Artificial Sequence
  Description of Artificial Sequence: Synthetic oligonucleotide
  Antisense Strand to SEQ ID NO: 480319
uuuaucacgguauucugac

SEQ ID NO: 480321 - RNA, 19 nt, Artificial Sequence
  Description of Artificial Sequence: Synthetic oligonucleotide
  Sense strand starting at position 2856 of SEQ ID NO: 317302
aggauaggugucugguaca

SEQ ID NO: 480322 - RNA, 19 nt, Artificial Sequence
  Description of Artificial Sequence: Synthetic oligonucleotide
  Antisense Strand to SEQ ID NO: 480321
uguaccagacaccuauccu

SEQ ID NO: 480323 - RNA, 19 nt, Artificial Sequence
  Description of Artificial Sequence: Synthetic oligonucleotide
  Sense strand starting at position 2867 of SEQ ID NO: 317302
cugguacaauuacugagaa

SEQ ID NO: 480324 - RNA, 19 nt, Artificial Sequence
  Description of Artificial Sequence: Synthetic oligonucleotide
  Antisense Strand to SEQ ID NO: 480323
uucucaguaauuguaccag

SEQ ID NO: 480325 - RNA, 19 nt, Artificial Sequence
  Description of Artificial Sequence: Synthetic oligonucleotide
  Sense strand starting at position 2947 of SEQ ID NO: 317302
gcacauucccacuagcaga

SEQ ID NO: 480326 - RNA, 19 nt, Artificial Sequence
  Description of Artificial Sequence: Synthetic oligonucleotide
  Antisense Strand to SEQ ID NO: 480325
ucugcuagugggaaugugc

SEQ ID NO: 480327 - RNA, 19 nt, Artificial Sequence
  Description of Artificial Sequence: Synthetic oligonucleotide
  Sense strand starting at position 3072 of SEQ ID NO: 317302
gucgguccagaauaugaga

SEQ ID NO: 480328 - RNA, 19 nt, Artificial Sequence
  Description of Artificial Sequence: Synthetic oligonucleotide
  Antisense Strand to SEQ ID NO: 480327
ucucauauucuggaccgac

SEQ ID NO: 480329 - RNA, 19 nt, Artificial Sequence
  Description of Artificial Sequence: Synthetic oligonucleotide
  Sense strand starting at position 3074 of SEQ ID NO: 317302
cgguccagaauaugagaua

SEQ ID NO: 480330 - RNA, 19 nt, Artificial Sequence
  Description of Artificial Sequence: Synthetic oligonucleotide
  Antisense Strand to SEQ ID NO: 480329
uaucucauauucuggaccg

SEQ ID NO: 480331 - RNA, 19 nt, Artificial Sequence
  Description of Artificial Sequence: Synthetic oligonucleotide
  Sense strand starting at position 3077 of SEQ ID NO: 317302
uccagaauaugagauaaac

SEQ ID NO: 480332 - RNA, 19 nt, Artificial Sequence
  Description of Artificial Sequence: Synthetic oligonucleotide
  Antisense Strand to SEQ ID NO: 480331
guuuaucucauauucugga

SEQ ID NO: 480333 - RNA, 19 nt, Artificial Sequence
  Description of Artificial Sequence: Synthetic oligonucleotide
  Sense strand starting at position 3445 of SEQ ID NO: 317302
cuuuaaguuccggaguaca

SEQ ID NO: 480334 - RNA, 19 nt, Artificial Sequence
  Description of Artificial Sequence: Synthetic oligonucleotide
  Antisense Strand to SEQ ID NO: 480333
uguacuccggaacuuaaag

SEQ ID NO: 480335 - RNA, 19 nt, Artificial Sequence
  Description of Artificial Sequence: Synthetic oligonucleotide
  Sense strand starting at position 3820 of SEQ ID NO: 317302
uguauuauugauggauauc

SEQ ID NO: 480336 - RNA, 19 nt, Artificial Sequence
  Description of Artificial Sequence: Synthetic oligonucleotide
  Antisense Strand to SEQ ID NO: 480335
gauauccaucaauaauaca

SEQ ID NO: 480337 - RNA, 19 nt, Artificial Sequence
  Description of Artificial Sequence: Synthetic oligonucleotide
  Sense strand starting at position 3970 of SEQ ID NO: 317302
accagaaguuuguuggaua

SEQ ID NO: 480338 - RNA, 19 nt, Artificial Sequence
  Description of Artificial Sequence: Synthetic oligonucleotide
  Antisense Strand to SEQ ID NO: 480337
uauccaacaaacuucuggu

SEQ ID NO: 480339 - RNA, 19 nt, Artificial Sequence
  Description of Artificial Sequence: Synthetic oligonucleotide
  Sense strand starting at position 3975 of SEQ ID NO: 317302
aaguuuguuggauaucuac

SEQ ID NO: 480340 - RNA, 19 nt, Artificial Sequence
  Description of Artificial Sequence: Synthetic oligonucleotide
  Antisense Strand to SEQ ID NO: 480339
guagauauccaacaaacuu

SEQ ID NO: 480341 - RNA, 19 nt, Artificial Sequence
  Description of Artificial Sequence: Synthetic oligonucleotide
  Sense strand starting at position 3978 of SEQ ID NO: 317302
uuuguuggauaucuacgau

SEQ ID NO: 480342 - RNA, 19 nt, Artificial Sequence
  Description of Artificial Sequence: Synthetic oligonucleotide
  Antisense Strand to SEQ ID NO: 480341
aucguagauauccaacaaa

SEQ ID NO: 480343 - RNA, 19 nt, Artificial Sequence
  Description of Artificial Sequence: Synthetic oligonucleotide
  Sense strand starting at position 3981 of SEQ ID NO: 317302
guuggauaucuacgauaaa

SEQ ID NO: 480344 - RNA, 19 nt, Artificial Sequence
  Description of Artificial Sequence: Synthetic oligonucleotide
  Antisense Strand to SEQ ID NO: 480343
uuuaucguagauauccaac

SEQ ID NO: 480345 - RNA, 19 nt, Artificial Sequence
  Description of Artificial Sequence: Synthetic oligonucleotide
  Sense strand starting at position 225 of SEQ ID NO: 317303
gaggcaaguuuauuaaauu

SEQ ID NO: 480346 - RNA, 19 nt, Artificial Sequence
  Description of Artificial Sequence: Synthetic oligonucleotide
  Antisense Strand to SEQ ID NO: 480345
aauuuaauaaacuugccuc

SEQ ID NO: 480347 - RNA, 19 nt, Artificial Sequence
  Description of Artificial Sequence: Synthetic oligonucleotide
  Sense strand starting at position 235 of SEQ ID NO: 317303
uauuaaauuuguggaugac

SEQ ID NO: 480348 - RNA, 19 nt, Artificial Sequence
  Description of Artificial Sequence: Synthetic oligonucleotide
  Antisense Strand to SEQ ID NO: 480347
gucauccacaaauuuaaua

SEQ ID NO: 480349 - RNA, 19 nt, Artificial Sequence
  Description of Artificial Sequence: Synthetic oligonucleotide
  Sense strand starting at position 249 of SEQ ID NO: 317303
augacaauuuguugggaca

SEQ ID NO: 480350 - RNA, 19 nt, Artificial Sequence
  Description of Artificial Sequence: Synthetic oligonucleotide
  Antisense Strand to SEQ ID NO: 480349
ugucccaacaaauugucau

SEQ ID NO: 480351 - RNA, 19 nt, Artificial Sequence
  Description of Artificial Sequence: Synthetic oligonucleotide
  Sense strand starting at position 273 of SEQ ID NO: 317303
uaaugcugauggcugaaua

SEQ ID NO: 480352 - RNA, 19 nt, Artificial Sequence
  Description of Artificial Sequence: Synthetic oligonucleotide
  Antisense Strand to SEQ ID NO: 480351
uauucagccaucagcauua

SEQ ID NO: 480353 - RNA, 19 nt, Artificial Sequence
  Description of Artificial Sequence: Synthetic oligonucleotide
  Sense strand starting at position 274 of SEQ ID NO: 317303
aaugcugauggcugaauaa

SEQ ID NO: 480354 - RNA, 19 nt, Artificial Sequence
  Description of Artificial Sequence: Synthetic oligonucleotide
  Antisense Strand to SEQ ID NO: 480353
uuauucagccaucagcauu

SEQ ID NO: 480355 - RNA, 19 nt, Artificial Sequence
  Description of Artificial Sequence: Synthetic oligonucleotide
  Sense strand starting at position 325 of SEQ ID NO: 317303
gaugaaauuuagcagggua

SEQ ID NO: 480356 - RNA, 19 nt, Artificial Sequence
  Description of Artificial Sequence: Synthetic oligonucleotide
  Antisense Strand to SEQ ID NO: 480355
uacccugcuaaauuucauc

SEQ ID NO: 480357 - RNA, 19 nt, Artificial Sequence
  Description of Artificial Sequence: Synthetic oligonucleotide
  Sense strand starting at position 520 of SEQ ID NO: 317303
acgugauuccaggauagug

SEQ ID NO: 480358 - RNA, 19 nt, Artificial Sequence
  Description of Artificial Sequence: Synthetic oligonucleotide
  Antisense Strand to SEQ ID NO: 480357
cacuauccuggaaucacgu

SEQ ID NO: 480359 - RNA, 19 nt, Artificial Sequence
  Description of Artificial Sequence: Synthetic oligonucleotide
  Sense strand starting at position 537 of SEQ ID NO: 317303
ugaagagauuaacaaagaa

SEQ ID NO: 480360 - RNA, 19 nt, Artificial Sequence
  Description of Artificial Sequence: Synthetic oligonucleotide
  Antisense Strand to SEQ ID NO: 480359
uucuuuguuaaucucuuca

SEQ ID NO: 480361 - RNA, 19 nt, Artificial Sequence
  Description of Artificial Sequence: Synthetic oligonucleotide
  Sense strand starting at position 593 of SEQ ID NO: 317303
cagagaaggucugagaaac

SEQ ID NO: 480362 - RNA, 19 nt, Artificial Sequence
  Description of Artificial Sequence: Synthetic oligonucleotide
  Antisense Strand to SEQ ID NO: 480361
guuucucagaccuucucug

SEQ ID NO: 480363 - RNA, 19 nt, Artificial Sequence
  Description of Artificial Sequence: Synthetic oligonucleotide
  Sense strand starting at position 639 of SEQ ID NO: 317303
gaacaucggucaucugaaa

SEQ ID NO: 480364 - RNA, 19 nt, Artificial Sequence
  Description of Artificial Sequence: Synthetic oligonucleotide
  Antisense Strand to SEQ ID NO: 480363
uuucagaugaccgauguuc

SEQ ID NO: 480365 - RNA, 19 nt, Artificial Sequence
  Description of Artificial Sequence: Synthetic oligonucleotide
  Sense strand starting at position 789 of SEQ ID NO: 317303
augguccaacucugagaaa

SEQ ID NO: 480366 - RNA, 19 nt, Artificial Sequence
  Description of Artificial Sequence: Synthetic oligonucleotide
  Antisense Strand to SEQ ID NO: 480365
uuucucagaguuggaccau

SEQ ID NO: 480367 - RNA, 19 nt, Artificial Sequence
  Description of Artificial Sequence: Synthetic oligonucleotide
  Sense strand starting at position 824 of SEQ ID NO: 317303
cuuugcuuugcagggagaa

SEQ ID NO: 480368 - RNA, 19 nt, Artificial Sequence
  Description of Artificial Sequence: Synthetic oligonucleotide
  Antisense Strand to SEQ ID NO: 480367
uucucccugcaaagcaaag

SEQ ID NO: 480369 - RNA, 19 nt, Artificial Sequence
  Description of Artificial Sequence: Synthetic oligonucleotide
  Sense strand starting at position 826 of SEQ ID NO: 317303
uugcuuugcagggagaaga

SEQ ID NO: 480370 - RNA, 19 nt, Artificial Sequence
  Description of Artificial Sequence: Synthetic oligonucleotide
  Antisense Strand to SEQ ID NO: 480369
ucuucucccugcaaagcaa

SEQ ID NO: 480371 - RNA, 19 nt, Artificial Sequence
  Description of Artificial Sequence: Synthetic oligonucleotide
  Sense strand starting at position 926 of SEQ ID NO: 317303
gacuuuggguccuuuaaag

SEQ ID NO: 480372 - RNA, 19 nt, Artificial Sequence
  Description of Artificial Sequence: Synthetic oligonucleotide
  Antisense Strand to SEQ ID NO: 480371
cuuuaaaggacccaaaguc

SEQ ID NO: 480373 - RNA, 19 nt, Artificial Sequence
  Description of Artificial Sequence: Synthetic oligonucleotide
  Sense strand starting at position 1041 of SEQ ID NO: 317303
ccaauaagaccugguuucu

SEQ ID NO: 480374 - RNA, 19 nt, Artificial Sequence
  Description of Artificial Sequence: Synthetic oligonucleotide
  Antisense Strand to SEQ ID NO: 480373
agaaaccaggucuuauugg

SEQ ID NO: 480375 - RNA, 19 nt, Artificial Sequence
  Description of Artificial Sequence: Synthetic oligonucleotide
  Sense strand starting at position 1054 of SEQ ID NO: 317303
guuucuagucccgauucua

SEQ ID NO: 480376 - RNA, 19 nt, Artificial Sequence
  Description of Artificial Sequence: Synthetic oligonucleotide
  Antisense Strand to SEQ ID NO: 480375
uagaaucgggacuagaaac

SEQ ID NO: 480377 - RNA, 19 nt, Artificial Sequence
  Description of Artificial Sequence: Synthetic oligonucleotide
  Sense strand starting at position 1198 of SEQ ID NO: 317303
ggcaucucacaaggaaaua

SEQ ID NO: 480378 - RNA, 19 nt, Artificial Sequence
  Description of Artificial Sequence: Synthetic oligonucleotide
  Antisense Strand to SEQ ID NO: 480377
uauuuccuugugagaugcc

SEQ ID NO: 480379 - RNA, 19 nt, Artificial Sequence
  Description of Artificial Sequence: Synthetic oligonucleotide
  Sense strand starting at position 1241 of SEQ ID NO: 317303
gugguacaugaaugcucaa

SEQ ID NO: 480380 - RNA, 19 nt, Artificial Sequence
  Description of Artificial Sequence: Synthetic oligonucleotide
  Antisense Strand to SEQ ID NO: 480379
uugagcauucauguaccac

SEQ ID NO: 480381 - RNA, 19 nt, Artificial Sequence
  Description of Artificial Sequence: Synthetic oligonucleotide
  Sense strand starting at position 1409 of SEQ ID NO: 317303
aggugaucagccuaacuca

SEQ ID NO: 480382 - RNA, 19 nt, Artificial Sequence
  Description of Artificial Sequence: Synthetic oligonucleotide
  Antisense Strand to SEQ ID NO: 480381
ugaguuaggcugaucaccu

SEQ ID NO: 480383 - RNA, 19 nt, Artificial Sequence
  Description of Artificial Sequence: Synthetic oligonucleotide
  Sense strand starting at position 1495 of SEQ ID NO: 317303
ucaucccuguuauuaagua

SEQ ID NO: 480384 - RNA, 19 nt, Artificial Sequence
  Description of Artificial Sequence: Synthetic oligonucleotide
  Antisense Strand to SEQ ID NO: 480383
uacuuaauaacagggauga

SEQ ID NO: 480385 - RNA, 19 nt, Artificial Sequence
  Description of Artificial Sequence: Synthetic oligonucleotide
  Sense strand starting at position 1499 of SEQ ID NO: 317303
cccuguuauuaaguaacca

SEQ ID NO: 480386 - RNA, 19 nt, Artificial Sequence
  Description of Artificial Sequence: Synthetic oligonucleotide
  Antisense Strand to SEQ ID NO: 480385
ugguuacuuaauaacaggg

SEQ ID NO: 480387 - RNA, 19 nt, Artificial Sequence
  Description of Artificial Sequence: Synthetic oligonucleotide
  Sense strand starting at position 2463 of SEQ ID NO: 317303
ggaggaagauaucugccuu

SEQ ID NO: 480388 - RNA, 19 nt, Artificial Sequence
  Description of Artificial Sequence: Synthetic oligonucleotide
  Antisense Strand to SEQ ID NO: 480387
aaggcagauaucuuccucc

SEQ ID NO: 480389 - RNA, 19 nt, Artificial Sequence
  Description of Artificial Sequence: Synthetic oligonucleotide
  Sense strand starting at position 2467 of SEQ ID NO: 317303
gaagauaucugccuuuagg

SEQ ID NO: 480390 - RNA, 19 nt, Artificial Sequence
  Description of Artificial Sequence: Synthetic oligonucleotide
  Antisense Strand to SEQ ID NO: 480389
ccuaaaggcagauaucuuc

SEQ ID NO: 480391 - RNA, 19 nt, Artificial Sequence
  Description of Artificial Sequence: Synthetic oligonucleotide
  Sense strand starting at position 2482 of SEQ ID NO: 317303
uagggacugcaagguuauu

SEQ ID NO: 480392 - RNA, 19 nt, Artificial Sequence
  Description of Artificial Sequence: Synthetic oligonucleotide
  Antisense Strand to SEQ ID NO: 480391
aauaaccuugcagucccua

SEQ ID NO: 480393 - RNA, 19 nt, Artificial Sequence
  Description of Artificial Sequence: Synthetic oligonucleotide
  Sense strand starting at position 2488 of SEQ ID NO: 317303
cugcaagguuauuucucua

SEQ ID NO: 480394 - RNA, 19 nt, Artificial Sequence
  Description of Artificial Sequence: Synthetic oligonucleotide
  Antisense Strand to SEQ ID NO: 480393
uagagaaauaaccuugcag

SEQ ID NO: 480395 - RNA, 19 nt, Artificial Sequence
  Description of Artificial Sequence: Synthetic oligonucleotide
  Sense strand starting at position 2647 of SEQ ID NO: 317303
aguugaacaucucugaauc

SEQ ID NO: 480396 - RNA, 19 nt, Artificial Sequence
  Description of Artificial Sequence: Synthetic oligonucleotide
  Antisense Strand to SEQ ID NO: 480395
gauucagagauguucaacu

SEQ ID NO: 480397 - RNA, 19 nt, Artificial Sequence
  Description of Artificial Sequence: Synthetic oligonucleotide
  Sense strand starting at position 2773 of SEQ ID NO: 317303
gggucaccuuucuuaucuu

SEQ ID NO: 480398 - RNA, 19 nt, Artificial Sequence
  Description of Artificial Sequence: Synthetic oligonucleotide
  Antisense Strand to SEQ ID NO: 480397
aagauaagaaaggugaccc

SEQ ID NO: 480399 - RNA, 19 nt, Artificial Sequence
  Description of Artificial Sequence: Synthetic oligonucleotide
  Sense strand starting at position 2863 of SEQ ID NO: 317303
gccuccuuucguguauagu

SEQ ID NO: 480400 - RNA, 19 nt, Artificial Sequence
  Description of Artificial Sequence: Synthetic oligonucleotide
  Antisense Strand to SEQ ID NO: 480399
acuauacacgaaaggaggc

SEQ ID NO: 480401 - RNA, 19 nt, Artificial Sequence
  Description of Artificial Sequence: Synthetic oligonucleotide
  Sense strand starting at position 2891 of SEQ ID NO: 317303
ugcuccauuggauaucuga

SEQ ID NO: 480402 - RNA, 19 nt, Artificial Sequence
  Description of Artificial Sequence: Synthetic oligonucleotide
  Antisense Strand to SEQ ID NO: 480401
ucagauauccaauggagca

SEQ ID NO: 480403 - RNA, 19 nt, Artificial Sequence
  Description of Artificial Sequence: Synthetic oligonucleotide
  Sense strand starting at position 2921 of SEQ ID NO: 317303
uccagccugucauugaaau

SEQ ID NO: 480404 - RNA, 19 nt, Artificial Sequence
  Description of Artificial Sequence: Synthetic oligonucleotide
  Antisense Strand to SEQ ID NO: 480403
auuucaaugacaggcugga

SEQ ID NO: 480405 - RNA, 19 nt, Artificial Sequence
  Description of Artificial Sequence: Synthetic oligonucleotide
  Sense strand starting at position 2922 of SEQ ID NO: 317303
ccagccugucauugaaauc

SEQ ID NO: 480406 - RNA, 19 nt, Artificial Sequence
  Description of Artificial Sequence: Synthetic oligonucleotide
  Antisense Strand to SEQ ID NO: 480405
gauuucaaugacaggcugg

SEQ ID NO: 480407 - RNA, 19 nt, Artificial Sequence
  Description of Artificial Sequence: Synthetic oligonucleotide
  Sense strand starting at position 2982 of SEQ ID NO: 317303
auuccuuugcugcagaaua

SEQ ID NO: 480408 - RNA, 19 nt, Artificial Sequence
  Description of Artificial Sequence: Synthetic oligonucleotide
  Antisense Strand to SEQ ID NO: 480407
uauucugcagcaaaggaau

SEQ ID NO: 480409 - RNA, 19 nt, Artificial Sequence
  Description of Artificial Sequence: Synthetic oligonucleotide
  Sense strand starting at position 2993 of SEQ ID NO: 317303
gcagaauaagcacgaccau

SEQ ID NO: 480410 - RNA, 19 nt, Artificial Sequence
  Description of Artificial Sequence: Synthetic oligonucleotide
  Antisense Strand to SEQ ID NO: 480409
auggucgugcuuauucugc

SEQ ID NO: 480411 - RNA, 19 nt, Artificial Sequence
  Description of Artificial Sequence: Synthetic oligonucleotide
  Sense strand starting at position 3033 of SEQ ID NO: 317303
uggcaagacuuucugauac

SEQ ID NO: 480412 - RNA, 19 nt, Artificial Sequence
  Description of Artificial Sequence: Synthetic oligonucleotide
  Antisense Strand to SEQ ID NO: 480411
guaucagaaagucuugcca

SEQ ID NO: 480413 - RNA, 19 nt, Artificial Sequence
  Description of Artificial Sequence: Synthetic oligonucleotide
  Sense strand starting at position 3098 of SEQ ID NO: 317303
ucugcuguccaguucugua

SEQ ID NO: 480414 - RNA, 19 nt, Artificial Sequence
  Description of Artificial Sequence: Synthetic oligonucleotide
  Antisense Strand to SEQ ID NO: 480413
uacagaacuggacagcaga

SEQ ID NO: 480415 - RNA, 19 nt, Artificial Sequence
  Description of Artificial Sequence: Synthetic oligonucleotide
  Sense strand starting at position 3276 of SEQ ID NO: 317303
acuguacugcguuaaauug

SEQ ID NO: 480416 - RNA, 19 nt, Artificial Sequence
  Description of Artificial Sequence: Synthetic oligonucleotide
  Antisense Strand to SEQ ID NO: 480415
caauuuaacgcaguacagu

SEQ ID NO: 480417 - RNA, 19 nt, Artificial Sequence
  Description of Artificial Sequence: Synthetic oligonucleotide
  Sense strand starting at position 3363 of SEQ ID NO: 317303
ugugacuuguauuucuauu

SEQ ID NO: 480418 - RNA, 19 nt, Artificial Sequence
  Description of Artificial Sequence: Synthetic oligonucleotide
  Antisense Strand to SEQ ID NO: 480417
aauagaaauacaagucaca

SEQ ID NO: 480419 - RNA, 19 nt, Artificial Sequence
  Description of Artificial Sequence: Synthetic oligonucleotide
  Sense strand starting at position 3371 of SEQ ID NO: 317303
guauuucuauuggaugaca

SEQ ID NO: 480420 - RNA, 19 nt, Artificial Sequence
  Description of Artificial Sequence: Synthetic oligonucleotide
  Antisense Strand to SEQ ID NO: 480419
ugucauccaauagaaauac

SEQ ID NO: 480421 - RNA, 19 nt, Artificial Sequence
  Description of Artificial Sequence: Synthetic oligonucleotide
  Sense strand starting at position 3449 of SEQ ID NO: 317303
ggccucuggaguuauuaca

SEQ ID NO: 480422 - RNA, 19 nt, Artificial Sequence
  Description of Artificial Sequence: Synthetic oligonucleotide
  Antisense Strand to SEQ ID NO: 480421
uguaauaacuccagaggcc

SEQ ID NO: 480423 - RNA, 19 nt, Artificial Sequence
  Description of Artificial Sequence: Synthetic oligonucleotide
  Sense strand starting at position 3468 of SEQ ID NO: 317303
ggaaauggccucuagucua

SEQ ID NO: 480424 - RNA, 19 nt, Artificial Sequence
  Description of Artificial Sequence: Synthetic oligonucleotide
  Antisense Strand to SEQ ID NO: 480423
uagacuagaggccauuucc

SEQ ID NO: 480425 - RNA, 19 nt, Artificial Sequence
  Description of Artificial Sequence: Synthetic oligonucleotide
  Sense strand starting at position 25 of SEQ ID NO: 317304
auaccauguagcgaggaau

SEQ ID NO: 480426 - RNA, 19 nt, Artificial Sequence
  Description of Artificial Sequence: Synthetic oligonucleotide
  Antisense Strand to SEQ ID NO: 480425
auuccucgcuacaugguau

SEQ ID NO: 480427 - RNA, 19 nt, Artificial Sequence
  Description of Artificial Sequence: Synthetic oligonucleotide
  Sense strand starting at position 287 of SEQ ID NO: 317304
accugaaaugacugguaac

SEQ ID NO: 480428 - RNA, 19 nt, Artificial Sequence
  Description of Artificial Sequence: Synthetic oligonucleotide
  Antisense Strand to SEQ ID NO: 480427
guuaccagucauuucaggu

SEQ ID NO: 480429 - RNA, 19 nt, Artificial Sequence
  Description of Artificial Sequence: Synthetic oligonucleotide
  Sense strand starting at position 466 of SEQ ID NO: 317304
gaagcuguuggccacaaau

SEQ ID NO: 480430 - RNA, 19 nt, Artificial Sequence
  Description of Artificial Sequence: Synthetic oligonucleotide
  Antisense Strand to SEQ ID NO: 480429
auuuguggccaacagcuuc

SEQ ID NO: 480431 - RNA, 19 nt, Artificial Sequence
  Description of Artificial Sequence: Synthetic oligonucleotide
  Sense strand starting at position 581 of SEQ ID NO: 317304
auaggacugucaguaauca

SEQ ID NO: 480432 - RNA, 19 nt, Artificial Sequence
  Description of Artificial Sequence: Synthetic oligonucleotide
  Antisense Strand to SEQ ID NO: 480431
ugauuacugacaguccuau

SEQ ID NO: 480433 - RNA, 19 nt, Artificial Sequence
  Description of Artificial Sequence: Synthetic oligonucleotide
  Sense strand starting at position 585 of SEQ ID NO: 317304
gacugucaguaaucaagau

SEQ ID NO: 480434 - RNA, 19 nt, Artificial Sequence
  Description of Artificial Sequence: Synthetic oligonucleotide
  Antisense Strand to SEQ ID NO: 480433
aucuugauuacugacaguc

SEQ ID NO: 480435 - RNA, 19 nt, Artificial Sequence
  Description of Artificial Sequence: Synthetic oligonucleotide
  Sense strand starting at position 762 of SEQ ID NO: 317304
gagagucaggauugaaagu

SEQ ID NO: 480436 - RNA, 19 nt, Artificial Sequence
  Description of Artificial Sequence: Synthetic oligonucleotide
  Antisense Strand to SEQ ID NO: 480435
acuuucaauccugacucuc

SEQ ID NO: 480437 - RNA, 19 nt, Artificial Sequence
  Description of Artificial Sequence: Synthetic oligonucleotide
  Sense strand starting at position 772 of SEQ ID NO: 317304
auugaaaguuacccugaga

SEQ ID NO: 480438 - RNA, 19 nt, Artificial Sequence
  Description of Artificial Sequence: Synthetic oligonucleotide
  Antisense Strand to SEQ ID NO: 480437
ucucaggguaacuuucaau

SEQ ID NO: 480439 - RNA, 19 nt, Artificial Sequence
  Description of Artificial Sequence: Synthetic oligonucleotide
  Sense strand starting at position 890 of SEQ ID NO: 317304
cccacauucccggaaucau

SEQ ID NO: 480440 - RNA, 19 nt, Artificial Sequence
  Description of Artificial Sequence: Synthetic oligonucleotide
  Antisense Strand to SEQ ID NO: 480439
augauuccgggaauguggg

SEQ ID NO: 480441 - RNA, 19 nt, Artificial Sequence
  Description of Artificial Sequence: Synthetic oligonucleotide
  Sense strand starting at position 1207 of SEQ ID NO: 317304
agugauaaaccuugcuaaa

SEQ ID NO: 480442 - RNA, 19 nt, Artificial Sequence
  Description of Artificial Sequence: Synthetic oligonucleotide
  Antisense Strand to SEQ ID NO: 480441
uuuagcaagguuuaucacu

SEQ ID NO: 480443 - RNA, 19 nt, Artificial Sequence
  Description of Artificial Sequence: Synthetic oligonucleotide
  Sense strand starting at position 1297 of SEQ ID NO: 317304
gcgacagagcauuacaacu

SEQ ID NO: 480444 - RNA, 19 nt, Artificial Sequence
  Description of Artificial Sequence: Synthetic oligonucleotide
  Antisense Strand to SEQ ID NO: 480443
aguuguaaugcucugucgc

SEQ ID NO: 480445 - RNA, 19 nt, Artificial Sequence
  Description of Artificial Sequence: Synthetic oligonucleotide
  Sense strand starting at position 1336 of SEQ ID NO: 317304
gugagaacuuuccuaggag

SEQ ID NO: 480446 - RNA, 19 nt, Artificial Sequence
  Description of Artificial Sequence: Synthetic oligonucleotide
  Antisense Strand to SEQ ID NO: 480445
cuccuaggaaaguucucac

SEQ ID NO: 480447 - RNA, 19 nt, Artificial Sequence
  Description of Artificial Sequence: Synthetic oligonucleotide
  Sense strand starting at position 1668 of SEQ ID NO: 317304
auuagauacugagcauacu

SEQ ID NO: 480448 - RNA, 19 nt, Artificial Sequence
  Description of Artificial Sequence: Synthetic oligonucleotide
  Antisense Strand to SEQ ID NO: 480447
aguaugcucaguaucuaau

SEQ ID NO: 480449 - RNA, 19 nt, Artificial Sequence
  Description of Artificial Sequence: Synthetic oligonucleotide
  Sense strand starting at position 2081 of SEQ ID NO: 317304
gggcguauacgaagucuga

SEQ ID NO: 480450 - RNA, 19 nt, Artificial Sequence
  Description of Artificial Sequence: Synthetic oligonucleotide
  Antisense Strand to SEQ ID NO: 480449
ucagacuucguauacgccc

SEQ ID NO: 480451 - RNA, 19 nt, Artificial Sequence
  Description of Artificial Sequence: Synthetic oligonucleotide
  Sense strand starting at position 2085 of SEQ ID NO: 317304
guauacgaagucugagaaa

SEQ ID NO: 480452 - RNA, 19 nt, Artificial Sequence
  Description of Artificial Sequence: Synthetic oligonucleotide
  Antisense Strand to SEQ ID NO: 480451
uuucucagacuucguauac

SEQ ID NO: 480453 - RNA, 19 nt, Artificial Sequence
  Description of Artificial Sequence: Synthetic oligonucleotide
  Sense strand starting at position 2096 of SEQ ID NO: 317304
cugagaaaugucugaacug

SEQ ID NO: 480454 - RNA, 19 nt, Artificial Sequence
  Description of Artificial Sequence: Synthetic oligonucleotide
  Antisense Strand to SEQ ID NO: 480453
caguucagacauuucucag

SEQ ID NO: 480455 - RNA, 19 nt, Artificial Sequence
  Description of Artificial Sequence: Synthetic oligonucleotide
  Sense strand starting at position 2235 of SEQ ID NO: 317304
uguggaauuaacuguggga

SEQ ID NO: 480456 - RNA, 19 nt, Artificial Sequence
  Description of Artificial Sequence: Synthetic oligonucleotide
  Antisense Strand to SEQ ID NO: 480455
ucccacaguuaauuccaca

SEQ ID NO: 480457 - RNA, 19 nt, Artificial Sequence
  Description of Artificial Sequence: Synthetic oligonucleotide
  Sense strand starting at position 2256 of SEQ ID NO: 317304
gcgauuaaagucuaacuac

SEQ ID NO: 480458 - RNA, 19 nt, Artificial Sequence
  Description of Artificial Sequence: Synthetic oligonucleotide
  Antisense Strand to SEQ ID NO: 480457
guaguuagacuuuaaucgc

SEQ ID NO: 480459 - RNA, 19 nt, Artificial Sequence
  Description of Artificial Sequence: Synthetic oligonucleotide
  Sense strand starting at position 2273 of SEQ ID NO: 317304
acagcaaucguuuauaaac

SEQ ID NO: 480460 - RNA, 19 nt, Artificial Sequence
  Description of Artificial Sequence: Synthetic oligonucleotide
  Antisense Strand to SEQ ID NO: 480459
guuuauaaacgauugcugu

SEQ ID NO: 480461 - RNA, 19 nt, Artificial Sequence
  Description of Artificial Sequence: Synthetic oligonucleotide
  Sense strand starting at position 2412 of SEQ ID NO: 317304
guggauguccuggagcaaa

SEQ ID NO: 480462 - RNA, 19 nt, Artificial Sequence
  Description of Artificial Sequence: Synthetic oligonucleotide
  Antisense Strand to SEQ ID NO: 480461
uuugcuccaggacauccac

SEQ ID NO: 480463 - RNA, 19 nt, Artificial Sequence
  Description of Artificial Sequence: Synthetic oligonucleotide
  Sense strand starting at position 2462 of SEQ ID NO: 317304
ugacuuuagaguuaugcag

SEQ ID NO: 480464 - RNA, 19 nt, Artificial Sequence
  Description of Artificial Sequence: Synthetic oligonucleotide
  Antisense Strand to SEQ ID NO: 480463
cugcauaacucuaaaguca

SEQ ID NO: 480465 - RNA, 19 nt, Artificial Sequence
  Description of Artificial Sequence: Synthetic oligonucleotide
  Sense strand starting at position 2584 of SEQ ID NO: 317304
ugcauuauaggugauuacu

SEQ ID NO: 480466 - RNA, 19 nt, Artificial Sequence
  Description of Artificial Sequence: Synthetic oligonucleotide
  Antisense Strand to SEQ ID NO: 480465
aguaaucaccuauaaugca

SEQ ID NO: 480467 - RNA, 19 nt, Artificial Sequence
  Description of Artificial Sequence: Synthetic oligonucleotide
  Sense strand starting at position 2703 of SEQ ID NO: 317304
cagacugggucauucuuau

SEQ ID NO: 480468 - RNA, 19 nt, Artificial Sequence
  Description of Artificial Sequence: Synthetic oligonucleotide
  Antisense Strand to SEQ ID NO: 480467
auaagaaugacccagucug

SEQ ID NO: 480469 - RNA, 19 nt, Artificial Sequence
  Description of Artificial Sequence: Synthetic oligonucleotide
  Sense strand starting at position 2762 of SEQ ID NO: 317304
agcccuuugacaugaggaa

SEQ ID NO: 480470 - RNA, 19 nt, Artificial Sequence
  Description of Artificial Sequence: Synthetic oligonucleotide
  Antisense Strand to SEQ ID NO: 480469
uuccucaugucaaagggcu

SEQ ID NO: 480471 - RNA, 19 nt, Artificial Sequence
  Description of Artificial Sequence: Synthetic oligonucleotide
  Sense strand starting at position 2801 of SEQ ID NO: 317304
ucccuacucguagauauac

SEQ ID NO: 480472 - RNA, 19 nt, Artificial Sequence
  Description of Artificial Sequence: Synthetic oligonucleotide
  Antisense Strand to SEQ ID NO: 480471
guauaucuacgaguaggga

SEQ ID NO: 480473 - RNA, 19 nt, Artificial Sequence
  Description of Artificial Sequence: Synthetic oligonucleotide
  Sense strand starting at position 2844 of SEQ ID NO: 317304
aucuguauaucauugacuu

SEQ ID NO: 480474 - RNA, 19 nt, Artificial Sequence
  Description of Artificial Sequence: Synthetic oligonucleotide
  Antisense Strand to SEQ ID NO: 480473
aagucaaugauauacagau

SEQ ID NO: 480475 - RNA, 19 nt, Artificial Sequence
  Description of Artificial Sequence: Synthetic oligonucleotide
  Sense strand starting at position 2879 of SEQ ID NO: 317304
uuucuaaaugagggcuaaa

SEQ ID NO: 480476 - RNA, 19 nt, Artificial Sequence
  Description of Artificial Sequence: Synthetic oligonucleotide
  Antisense Strand to SEQ ID NO: 480475
uuuagcccucauuuagaaa

SEQ ID NO: 480477 - RNA, 19 nt, Artificial Sequence
  Description of Artificial Sequence: Synthetic oligonucleotide
  Sense strand starting at position 3026 of SEQ ID NO: 317304
gauggacaugcuuaugguu

SEQ ID NO: 480478 - RNA, 19 nt, Artificial Sequence
  Description of Artificial Sequence: Synthetic oligonucleotide
  Antisense Strand to SEQ ID NO: 480477
aaccauaagcauguccauc

SEQ ID NO: 480479 - RNA, 19 nt, Artificial Sequence
  Description of Artificial Sequence: Synthetic oligonucleotide
  Sense strand starting at position 3032 of SEQ ID NO: 317304
caugcuuaugguuaacuga

SEQ ID NO: 480480 - RNA, 19 nt, Artificial Sequence
  Description of Artificial Sequence: Synthetic oligonucleotide
  Antisense Strand to SEQ ID NO: 480479
ucaguuaaccauaagcaug

SEQ ID NO: 480481 - RNA, 19 nt, Artificial Sequence
  Description of Artificial Sequence: Synthetic oligonucleotide
  Sense strand starting at position 3110 of SEQ ID NO: 317304
augugagugguucauggau

SEQ ID NO: 480482 - RNA, 19 nt, Artificial Sequence
  Description of Artificial Sequence: Synthetic oligonucleotide
  Antisense Strand to SEQ ID NO: 480481
auccaugaaccacucacau

SEQ ID NO: 480483 - RNA, 19 nt, Artificial Sequence
  Description of Artificial Sequence: Synthetic oligonucleotide
  Sense strand starting at position 3210 of SEQ ID NO: 317304
auaagaagcuucuuaauag

SEQ ID NO: 480484 - RNA, 19 nt, Artificial Sequence
  Description of Artificial Sequence: Synthetic oligonucleotide
  Antisense Strand to SEQ ID NO: 480483
cuauuaagaagcuucuuau

SEQ ID NO: 480485 - RNA, 19 nt, Artificial Sequence
  Description of Artificial Sequence: Synthetic oligonucleotide
  Sense strand starting at position 3237 of SEQ ID NO: 317304
aaggacuugcuuugggaau

SEQ ID NO: 480486 - RNA, 19 nt, Artificial Sequence
  Description of Artificial Sequence: Synthetic oligonucleotide
  Antisense Strand to SEQ ID NO: 480485
auucccaaagcaaguccuu

SEQ ID NO: 480487 - RNA, 19 nt, Artificial Sequence
  Description of Artificial Sequence: Synthetic oligonucleotide
  Sense strand starting at position 3380 of SEQ ID NO: 317304
ggaaguacucguuaacaau

SEQ ID NO: 480488 - RNA, 19 nt, Artificial Sequence
  Description of Artificial Sequence: Synthetic oligonucleotide
  Antisense Strand to SEQ ID NO: 480487
auuguuaacgaguacuucc

SEQ ID NO: 480489 - RNA, 19 nt, Artificial Sequence
  Description of Artificial Sequence: Synthetic oligonucleotide
  Sense strand starting at position 3386 of SEQ ID NO: 317304
acucguuaacaauguauuu

SEQ ID NO: 480490 - RNA, 19 nt, Artificial Sequence
  Description of Artificial Sequence: Synthetic oligonucleotide
  Antisense Strand to SEQ ID NO: 480489
aaauacauuguuaacgagu

SEQ ID NO: 480491 - RNA, 19 nt, Artificial Sequence
  Description of Artificial Sequence: Synthetic oligonucleotide
  Sense strand starting at position 3656 of SEQ ID NO: 317304
ucuacuaugggcuggagaa

SEQ ID NO: 480492 - RNA, 19 nt, Artificial Sequence
  Description of Artificial Sequence: Synthetic oligonucleotide
  Antisense Strand to SEQ ID NO: 480491
uucuccagcccauaguaga

SEQ ID NO: 480493 - RNA, 19 nt, Artificial Sequence
  Description of Artificial Sequence: Synthetic oligonucleotide
  Sense strand starting at position 3657 of SEQ ID NO: 317304
cuacuaugggcuggagaau

SEQ ID NO: 480494 - RNA, 19 nt, Artificial Sequence
  Description of Artificial Sequence: Synthetic oligonucleotide
  Antisense Strand to SEQ ID NO: 480493
auucuccagcccauaguag

SEQ ID NO: 480495 - RNA, 19 nt, Artificial Sequence
  Description of Artificial Sequence: Synthetic oligonucleotide
  Sense strand starting at position 3666 of SEQ ID NO: 317304
gcuggagaauuccuuauug

SEQ ID NO: 480496 - RNA, 19 nt, Artificial Sequence
  Description of Artificial Sequence: Synthetic oligonucleotide
  Antisense Strand to SEQ ID NO: 480495
caauaaggaauucuccagc

SEQ ID NO: 480497 - RNA, 19 nt, Artificial Sequence
  Description of Artificial Sequence: Synthetic oligonucleotide
  Sense strand starting at position 3670 of SEQ ID NO: 317304
gagaauuccuuauugugag

SEQ ID NO: 480498 - RNA, 19 nt, Artificial Sequence
  Description of Artificial Sequence: Synthetic oligonucleotide
  Antisense Strand to SEQ ID NO: 480497
cucacaauaaggaauucuc

SEQ ID NO: 480499 - RNA, 19 nt, Artificial Sequence
  Description of Artificial Sequence: Synthetic oligonucleotide
  Sense strand starting at position 3796 of SEQ ID NO: 317304
gcaaauguuccugaaggac

SEQ ID NO: 480500 - RNA, 19 nt, Artificial Sequence
  Description of Artificial Sequence: Synthetic oligonucleotide
  Antisense Strand to SEQ ID NO: 480499
guccuucaggaacauuugc

SEQ ID NO: 480501 - RNA, 19 nt, Artificial Sequence
  Description of Artificial Sequence: Synthetic oligonucleotide
  Sense strand starting at position 3830 of SEQ ID NO: 317304
ugagaaccacugcauugua

SEQ ID NO: 480502 - RNA, 19 nt, Artificial Sequence
  Description of Artificial Sequence: Synthetic oligonucleotide
  Antisense Strand to SEQ ID NO: 480501
uacaaugcagugguucuca

SEQ ID NO: 480503 - RNA, 19 nt, Artificial Sequence
  Description of Artificial Sequence: Synthetic oligonucleotide
  Sense strand starting at position 3862 of SEQ ID NO: 317304
cucaguaauguuuagguau

SEQ ID NO: 480504 - RNA, 19 nt, Artificial Sequence
  Description of Artificial Sequence: Synthetic oligonucleotide
  Antisense Strand to SEQ ID NO: 480503
auaccuaaacauuacugag

SEQ ID NO: 480505 - RNA, 19 nt, Artificial Sequence
  Description of Artificial Sequence: Synthetic oligonucleotide
  Sense strand starting at position 43 of SEQ ID NO: 317305
ggcggacauuguucucuga

SEQ ID NO: 480506 - RNA, 19 nt, Artificial Sequence
  Description of Artificial Sequence: Synthetic oligonucleotide
  Antisense Strand to SEQ ID NO: 480505
ucagagaacaauguccgcc

SEQ ID NO: 480507 - RNA, 19 nt, Artificial Sequence
  Description of Artificial Sequence: Synthetic oligonucleotide
  Sense strand starting at position 45 of SEQ ID NO: 317305
cggacauuguucucugacu

SEQ ID NO: 480508 - RNA, 19 nt, Artificial Sequence
  Description of Artificial Sequence: Synthetic oligonucleotide
  Antisense Strand to SEQ ID NO: 480507
agucagagaacaauguccg

SEQ ID NO: 480509 - RNA, 19 nt, Artificial Sequence
  Description of Artificial Sequence: Synthetic oligonucleotide
  Sense strand starting at position 46 of SEQ ID NO: 317305
ggacauuguucucugacuc

SEQ ID NO: 480510 - RNA, 19 nt, Artificial Sequence
  Description of Artificial Sequence: Synthetic oligonucleotide
  Antisense Strand to SEQ ID NO: 480509
gagucagagaacaaugucc

SEQ ID NO: 480511 - RNA, 19 nt, Artificial Sequence
  Description of Artificial Sequence: Synthetic oligonucleotide
  Sense strand starting at position 129 of SEQ ID NO: 317305
aggugauucuaauguaaca

SEQ ID NO: 480512 - RNA, 19 nt, Artificial Sequence
  Description of Artificial Sequence: Synthetic oligonucleotide
  Antisense Strand to SEQ ID NO: 480511
uguuacauuagaaucaccu

SEQ ID NO: 480513 - RNA, 19 nt, Artificial Sequence
  Description of Artificial Sequence: Synthetic oligonucleotide
  Sense strand starting at position 170 of SEQ ID NO: 317305
gccauugcuucucaaagug

SEQ ID NO: 480514 - RNA, 19 nt, Artificial Sequence
  Description of Artificial Sequence: Synthetic oligonucleotide
  Antisense Strand to SEQ ID NO: 480513
cacuuugagaagcaauggc

SEQ ID NO: 480515 - RNA, 19 nt, Artificial Sequence
  Description of Artificial Sequence: Synthetic oligonucleotide
  Sense strand starting at position 186 of SEQ ID NO: 317305
guguguucccaggacaccu

SEQ ID NO: 480516 - RNA, 19 nt, Artificial Sequence
  Description of Artificial Sequence: Synthetic oligonucleotide
  Antisense Strand to SEQ ID NO: 480515
agguguccugggaacacac

SEQ ID NO: 480517 - RNA, 19 nt, Artificial Sequence
  Description of Artificial Sequence: Synthetic oligonucleotide
  Sense strand starting at position 225 of SEQ ID NO: 317305
cccaguaucuuggaucaaa

SEQ ID NO: 480518 - RNA, 19 nt, Artificial Sequence
  Description of Artificial Sequence: Synthetic oligonucleotide
  Antisense Strand to SEQ ID NO: 480517
uuugauccaagauacuggg

SEQ ID NO: 480519 - RNA, 19 nt, Artificial Sequence
  Description of Artificial Sequence: Synthetic oligonucleotide
  Sense strand starting at position 237 of SEQ ID NO: 317305
gaucaaaguccucaugggu

SEQ ID NO: 480520 - RNA, 19 nt, Artificial Sequence
  Description of Artificial Sequence: Synthetic oligonucleotide
  Antisense Strand to SEQ ID NO: 480519
acccaugaggacuuugauc

SEQ ID NO: 480521 - RNA, 19 nt, Artificial Sequence
  Description of Artificial Sequence: Synthetic oligonucleotide
  Sense strand starting at position 338 of SEQ ID NO: 317305
acaucagaguuugagaauu

SEQ ID NO: 480522 - RNA, 19 nt, Artificial Sequence
  Description of Artificial Sequence: Synthetic oligonucleotide
  Antisense Strand to SEQ ID NO: 480521
aauucucaaacucugaugu

SEQ ID NO: 480523 - RNA, 19 nt, Artificial Sequence
  Description of Artificial Sequence: Synthetic oligonucleotide
  Sense strand starting at position 340 of SEQ ID NO: 317305
aucagaguuugagaauuua

SEQ ID NO: 480524 - RNA, 19 nt, Artificial Sequence
  Description of Artificial Sequence: Synthetic oligonucleotide
  Antisense Strand to SEQ ID NO: 480523
uaaauucucaaacucugau

SEQ ID NO: 480525 - RNA, 19 nt, Artificial Sequence
  Description of Artificial Sequence: Synthetic oligonucleotide
  Sense strand starting at position 350 of SEQ ID NO: 317305
gagaauuuauguuguaaug

SEQ ID NO: 480526 - RNA, 19 nt, Artificial Sequence
  Description of Artificial Sequence: Synthetic oligonucleotide
  Antisense Strand to SEQ ID NO: 480525
cauuacaacauaaauucuc

SEQ ID NO: 480527 - RNA, 19 nt, Artificial Sequence
  Description of Artificial Sequence: Synthetic oligonucleotide
  Sense strand starting at position 361 of SEQ ID NO: 317305
uuguaauguuaagcucaaa

SEQ ID NO: 480528 - RNA, 19 nt, Artificial Sequence
  Description of Artificial Sequence: Synthetic oligonucleotide
  Antisense Strand to SEQ ID NO: 480527
uuugagcuuaacauuacaa

SEQ ID NO: 480529 - RNA, 19 nt, Artificial Sequence
  Description of Artificial Sequence: Synthetic oligonucleotide
  Sense strand starting at position 445 of SEQ ID NO: 317305
agaggaagcgucuguauuc

SEQ ID NO: 480530 - RNA, 19 nt, Artificial Sequence
  Description of Artificial Sequence: Synthetic oligonucleotide
  Antisense Strand to SEQ ID NO: 480529
gaauacagacgcuuccucu

SEQ ID NO: 480531 - RNA, 19 nt, Artificial Sequence
  Description of Artificial Sequence: Synthetic oligonucleotide
  Sense strand starting at position 629 of SEQ ID NO: 317305
gacgcauugccugagcaca

SEQ ID NO: 480532 - RNA, 19 nt, Artificial Sequence
  Description of Artificial Sequence: Synthetic oligonucleotide
  Antisense Strand to SEQ ID NO: 480531
ugugcucaggcaaugcguc

SEQ ID NO: 480533 - RNA, 19 nt, Artificial Sequence
  Description of Artificial Sequence: Synthetic oligonucleotide
  Sense strand starting at position 890 of SEQ ID NO: 317305
gaagcaauauucugaagug

SEQ ID NO: 480534 - RNA, 19 nt, Artificial Sequence
  Description of Artificial Sequence: Synthetic oligonucleotide
  Antisense Strand to SEQ ID NO: 480533
cacuucagaauauugcuuc

SEQ ID NO: 480535 - RNA, 19 nt, Artificial Sequence
  Description of Artificial Sequence: Synthetic oligonucleotide
  Sense strand starting at position 891 of SEQ ID NO: 317305
aagcaauauucugaagugu

SEQ ID NO: 480536 - RNA, 19 nt, Artificial Sequence
  Description of Artificial Sequence: Synthetic oligonucleotide
  Antisense Strand to SEQ ID NO: 480535
acacuucagaauauugcuu

SEQ ID NO: 480537 - RNA, 19 nt, Artificial Sequence
  Description of Artificial Sequence: Synthetic oligonucleotide
  Sense strand starting at position 966 of SEQ ID NO: 317305
ucagcaucuauguggguua

SEQ ID NO: 480538 - RNA, 19 nt, Artificial Sequence
  Description of Artificial Sequence: Synthetic oligonucleotide
  Antisense Strand to SEQ ID NO: 480537
uaacccacauagaugcuga

SEQ ID NO: 480539 - RNA, 19 nt, Artificial Sequence
  Description of Artificial Sequence: Synthetic oligonucleotide
  Sense strand starting at position 1993 of SEQ ID NO: 317305
gcagccucauauugacaca

SEQ ID NO: 480540 - RNA, 19 nt, Artificial Sequence
  Description of Artificial Sequence: Synthetic oligonucleotide
  Antisense Strand to SEQ ID NO: 480539
ugugucaauaugaggcugc

SEQ ID NO: 480541 - RNA, 19 nt, Artificial Sequence
  Description of Artificial Sequence: Synthetic oligonucleotide
  Sense strand starting at position 2066 of SEQ ID NO: 317305
ugugcucaguucugaugaa

SEQ ID NO: 480542 - RNA, 19 nt, Artificial Sequence
  Description of Artificial Sequence: Synthetic oligonucleotide
  Antisense Strand to SEQ ID NO: 480541
uucaucagaacugagcaca

SEQ ID NO: 480543 - RNA, 19 nt, Artificial Sequence
  Description of Artificial Sequence: Synthetic oligonucleotide
  Sense strand starting at position 2067 of SEQ ID NO: 317305
gugcucaguucugaugaaa

SEQ ID NO: 480544 - RNA, 19 nt, Artificial Sequence
  Description of Artificial Sequence: Synthetic oligonucleotide
  Antisense Strand to SEQ ID NO: 480543
uuucaucagaacugagcac

SEQ ID NO: 480545 - RNA, 19 nt, Artificial Sequence
  Description of Artificial Sequence: Synthetic oligonucleotide
  Sense strand starting at position 2079 of SEQ ID NO: 317305
gaugaaaugcaucguugug

SEQ ID NO: 480546 - RNA, 19 nt, Artificial Sequence
  Description of Artificial Sequence: Synthetic oligonucleotide
  Antisense Strand to SEQ ID NO: 480545
cacaacgaugcauuucauc

SEQ ID NO: 480547 - RNA, 19 nt, Artificial Sequence
  Description of Artificial Sequence: Synthetic oligonucleotide
  Sense strand starting at position 2081 of SEQ ID NO: 317305
ugaaaugcaucguugugau

SEQ ID NO: 480548 - RNA, 19 nt, Artificial Sequence
  Description of Artificial Sequence: Synthetic oligonucleotide
  Antisense Strand to SEQ ID NO: 480547
aucacaacgaugcauuuca

SEQ ID NO: 480549 - RNA, 19 nt, Artificial Sequence
  Description of Artificial Sequence: Synthetic oligonucleotide
  Sense strand starting at position 2088 of SEQ ID NO: 317305
caucguugugaugacguuu

SEQ ID NO: 480550 - RNA, 19 nt, Artificial Sequence
  Description of Artificial Sequence: Synthetic oligonucleotide
  Antisense Strand to SEQ ID NO: 480549
aaacgucaucacaacgaug

SEQ ID NO: 480551 - RNA, 19 nt, Artificial Sequence
  Description of Artificial Sequence: Synthetic oligonucleotide
  Sense strand starting at position 2281 of SEQ ID NO: 317305
guggcccuuugugucaaua

SEQ ID NO: 480552 - RNA, 19 nt, Artificial Sequence
  Description of Artificial Sequence: Synthetic oligonucleotide
  Antisense Strand to SEQ ID NO: 480551
uauugacacaaagggccac

SEQ ID NO: 480553 - RNA, 19 nt, Artificial Sequence
  Description of Artificial Sequence: Synthetic oligonucleotide
  Sense strand starting at position 2283 of SEQ ID NO: 317305
ggcccuuugugucaauauc

SEQ ID NO: 480554 - RNA, 19 nt, Artificial Sequence
  Description of Artificial Sequence: Synthetic oligonucleotide
  Antisense Strand to SEQ ID NO: 480553
gauauugacacaaagggcc

SEQ ID NO: 480555 - RNA, 19 nt, Artificial Sequence
  Description of Artificial Sequence: Synthetic oligonucleotide
  Sense strand starting at position 2331 of SEQ ID NO: 317305
cgaggagacaucugagagu

SEQ ID NO: 480556 - RNA, 19 nt, Artificial Sequence
  Description of Artificial Sequence: Synthetic oligonucleotide
  Antisense Strand to SEQ ID NO: 480555
acucucagaugucuccucg

SEQ ID NO: 480557 - RNA, 19 nt, Artificial Sequence
  Description of Artificial Sequence: Synthetic oligonucleotide
  Sense strand starting at position 2334 of SEQ ID NO: 317305
ggagacaucugagagugaa

SEQ ID NO: 480558 - RNA, 19 nt, Artificial Sequence
  Description of Artificial Sequence: Synthetic oligonucleotide
  Antisense Strand to SEQ ID NO: 480557
uucacucucagaugucucc

SEQ ID NO: 480559 - RNA, 19 nt, Artificial Sequence
  Description of Artificial Sequence: Synthetic oligonucleotide
  Sense strand starting at position 2337 of SEQ ID NO: 317305
gacaucugagagugaauuc

SEQ ID NO: 480560 - RNA, 19 nt, Artificial Sequence
  Description of Artificial Sequence: Synthetic oligonucleotide
  Antisense Strand to SEQ ID NO: 480559
gaauucacucucagauguc

SEQ ID NO: 480561 - RNA, 19 nt, Artificial Sequence
  Description of Artificial Sequence: Synthetic oligonucleotide
  Sense strand starting at position 2360 of SEQ ID NO: 317305
gggcguguuugugaacaug

SEQ ID NO: 480562 - RNA, 19 nt, Artificial Sequence
  Description of Artificial Sequence: Synthetic oligonucleotide
  Antisense Strand to SEQ ID NO: 480561
cauguucacaaacacgccc

SEQ ID NO: 480563 - RNA, 19 nt, Artificial Sequence
  Description of Artificial Sequence: Synthetic oligonucleotide
  Sense strand starting at position 2362 of SEQ ID NO: 317305
gcguguuugugaacaugga

SEQ ID NO: 480564 - RNA, 19 nt, Artificial Sequence
  Description of Artificial Sequence: Synthetic oligonucleotide
  Antisense Strand to SEQ ID NO: 480563
uccauguucacaaacacgc

SEQ ID NO: 480565 - RNA, 19 nt, Artificial Sequence
  Description of Artificial Sequence: Synthetic oligonucleotide
  Sense strand starting at position 2363 of SEQ ID NO: 317305
cguguuugugaacauggau

SEQ ID NO: 480566 - RNA, 19 nt, Artificial Sequence
  Description of Artificial Sequence: Synthetic oligonucleotide
  Antisense Strand to SEQ ID NO: 480565
auccauguucacaaacacg

SEQ ID NO: 480567 - RNA, 19 nt, Artificial Sequence
  Description of Artificial Sequence: Synthetic oligonucleotide
  Sense strand starting at position 2527 of SEQ ID NO: 317305
gcagaugaauaggagaaga

SEQ ID NO: 480568 - RNA, 19 nt, Artificial Sequence
  Description of Artificial Sequence: Synthetic oligonucleotide
  Antisense Strand to SEQ ID NO: 480567
ucuucuccuauucaucugc

SEQ ID NO: 480569 - RNA, 19 nt, Artificial Sequence
  Description of Artificial Sequence: Synthetic oligonucleotide
  Sense strand starting at position 2556 of SEQ ID NO: 317305
uguauuugaucauagcuua

SEQ ID NO: 480570 - RNA, 19 nt, Artificial Sequence
  Description of Artificial Sequence: Synthetic oligonucleotide
  Antisense Strand to SEQ ID NO: 480569
uaagcuaugaucaaauaca

SEQ ID NO: 480571 - RNA, 19 nt, Artificial Sequence
  Description of Artificial Sequence: Synthetic oligonucleotide
  Sense strand starting at position 2602 of SEQ ID NO: 317305
auccaaagaucugguggaa

SEQ ID NO: 480572 - RNA, 19 nt, Artificial Sequence
  Description of Artificial Sequence: Synthetic oligonucleotide
  Antisense Strand to SEQ ID NO: 480571
uuccaccagaucuuuggau

SEQ ID NO: 480573 - RNA, 19 nt, Artificial Sequence
  Description of Artificial Sequence: Synthetic oligonucleotide
  Sense strand starting at position 2885 of SEQ ID NO: 317305
gagucauauuucuggguuu

SEQ ID NO: 480574 - RNA, 19 nt, Artificial Sequence
  Description of Artificial Sequence: Synthetic oligonucleotide
  Antisense Strand to SEQ ID NO: 480573
aaacccagaaauaugacuc

SEQ ID NO: 480575 - RNA, 19 nt, Artificial Sequence
  Description of Artificial Sequence: Synthetic oligonucleotide
  Sense strand starting at position 3252 of SEQ ID NO: 317305
agagaucuuccagaguguc

SEQ ID NO: 480576 - RNA, 19 nt, Artificial Sequence
  Description of Artificial Sequence: Synthetic oligonucleotide
  Antisense Strand to SEQ ID NO: 480575
gacacucuggaagaucucu

SEQ ID NO: 480577 - RNA, 19 nt, Artificial Sequence
  Description of Artificial Sequence: Synthetic oligonucleotide
  Sense strand starting at position 3403 of SEQ ID NO: 317305
ccggcuuucucagaacaca

SEQ ID NO: 480578 - RNA, 19 nt, Artificial Sequence
  Description of Artificial Sequence: Synthetic oligonucleotide
  Antisense Strand to SEQ ID NO: 480577
uguguucugagaaagccgg

SEQ ID NO: 480579 - RNA, 19 nt, Artificial Sequence
  Description of Artificial Sequence: Synthetic oligonucleotide
  Sense strand starting at position 3522 of SEQ ID NO: 317305
gcaguucccucuugggaua

SEQ ID NO: 480580 - RNA, 19 nt, Artificial Sequence
  Description of Artificial Sequence: Synthetic oligonucleotide
  Antisense Strand to SEQ ID NO: 480579
uaucccaagagggaacugc

SEQ ID NO: 480581 - RNA, 19 nt, Artificial Sequence
  Description of Artificial Sequence: Synthetic oligonucleotide
  Sense strand starting at position 3523 of SEQ ID NO: 317305
caguucccucuugggauaa

SEQ ID NO: 480582 - RNA, 19 nt, Artificial Sequence
  Description of Artificial Sequence: Synthetic oligonucleotide
  Antisense Strand to SEQ ID NO: 480581
uuaucccaagagggaacug

SEQ ID NO: 480583 - RNA, 19 nt, Artificial Sequence
  Description of Artificial Sequence: Synthetic oligonucleotide
  Sense strand starting at position 3636 of SEQ ID NO: 317305
gggcauucacugcguuaua

SEQ ID NO: 480584 - RNA, 19 nt, Artificial Sequence
  Description of Artificial Sequence: Synthetic oligonucleotide
  Antisense Strand to SEQ ID NO: 480583
uauaacgcagugaaugccc

SEQ ID NO: 480585 - RNA, 19 nt, Artificial Sequence
  Description of Artificial Sequence: Synthetic oligonucleotide
  Sense strand starting at position 218 of SEQ ID NO: 317306
agaugauguugcucacagu

SEQ ID NO: 480586 - RNA, 19 nt, Artificial Sequence
  Description of Artificial Sequence: Synthetic oligonucleotide
  Antisense Strand to SEQ ID NO: 480585
acugugagcaacaucaucu

SEQ ID NO: 480587 - RNA, 19 nt, Artificial Sequence
  Description of Artificial Sequence: Synthetic oligonucleotide
  Sense strand starting at position 219 of SEQ ID NO: 317306
gaugauguugcucacaguu

SEQ ID NO: 480588 - RNA, 19 nt, Artificial Sequence
  Description of Artificial Sequence: Synthetic oligonucleotide
  Antisense Strand to SEQ ID NO: 480587
aacugugagcaacaucauc

SEQ ID NO: 480589 - RNA, 19 nt, Artificial Sequence
  Description of Artificial Sequence: Synthetic oligonucleotide
  Sense strand starting at position 462 of SEQ ID NO: 317306
aucugaaauuaugcaaguu

SEQ ID NO: 480590 - RNA, 19 nt, Artificial Sequence
  Description of Artificial Sequence: Synthetic oligonucleotide
  Antisense Strand to SEQ ID NO: 480589
aacuugcauaauuucagau

SEQ ID NO: 480591 - RNA, 19 nt, Artificial Sequence
  Description of Artificial Sequence: Synthetic oligonucleotide
  Sense strand starting at position 488 of SEQ ID NO: 317306
agaguuucucauggauaac

SEQ ID NO: 480592 - RNA, 19 nt, Artificial Sequence
  Description of Artificial Sequence: Synthetic oligonucleotide
  Antisense Strand to SEQ ID NO: 480591
guuauccaugagaaacucu

SEQ ID NO: 480593 - RNA, 19 nt, Artificial Sequence
  Description of Artificial Sequence: Synthetic oligonucleotide
  Sense strand starting at position 491 of SEQ ID NO: 317306
guuucucauggauaacacu

SEQ ID NO: 480594 - RNA, 19 nt, Artificial Sequence
  Description of Artificial Sequence: Synthetic oligonucleotide
  Antisense Strand to SEQ ID NO: 480593
aguguuauccaugagaaac

SEQ ID NO: 480595 - RNA, 19 nt, Artificial Sequence
  Description of Artificial Sequence: Synthetic oligonucleotide
  Sense strand starting at position 580 of SEQ ID NO: 317306
cgagcuguagacuagcauu

SEQ ID NO: 480596 - RNA, 19 nt, Artificial Sequence
  Description of Artificial Sequence: Synthetic oligonucleotide
  Antisense Strand to SEQ ID NO: 480595
aaugcuagucuacagcucg

SEQ ID NO: 480597 - RNA, 19 nt, Artificial Sequence
  Description of Artificial Sequence: Synthetic oligonucleotide
  Sense strand starting at position 588 of SEQ ID NO: 317306
agacuagcauuugaaacaa

SEQ ID NO: 480598 - RNA, 19 nt, Artificial Sequence
  Description of Artificial Sequence: Synthetic oligonucleotide
  Antisense Strand to SEQ ID NO: 480597
uuguuucaaaugcuagucu

SEQ ID NO: 480599 - RNA, 19 nt, Artificial Sequence
  Description of Artificial Sequence: Synthetic oligonucleotide
  Sense strand starting at position 664 of SEQ ID NO: 317306
auaugcaggacuuguggua

SEQ ID NO: 480600 - RNA, 19 nt, Artificial Sequence
  Description of Artificial Sequence: Synthetic oligonucleotide
  Antisense Strand to SEQ ID NO: 480599
uaccacaaguccugcauau

SEQ ID NO: 480601 - RNA, 19 nt, Artificial Sequence
  Description of Artificial Sequence: Synthetic oligonucleotide
  Sense strand starting at position 680 of SEQ ID NO: 317306
guagguucucgauaccaug

SEQ ID NO: 480602 - RNA, 19 nt, Artificial Sequence
  Description of Artificial Sequence: Synthetic oligonucleotide
  Antisense Strand to SEQ ID NO: 480601
caugguaucgagaaccuac

SEQ ID NO: 480603 - RNA, 19 nt, Artificial Sequence
  Description of Artificial Sequence: Synthetic oligonucleotide
  Sense strand starting at position 873 of SEQ ID NO: 317306
gcgcaaacgccguuuacaa

SEQ ID NO: 480604 - RNA, 19 nt, Artificial Sequence
  Description of Artificial Sequence: Synthetic oligonucleotide
  Antisense Strand to SEQ ID NO: 480603
uuguaaacggcguuugcgc

SEQ ID NO: 480605 - RNA, 19 nt, Artificial Sequence
  Description of Artificial Sequence: Synthetic oligonucleotide
  Sense strand starting at position 973 of SEQ ID NO: 317306
ggaucuuccuuguucguga

SEQ ID NO: 480606 - RNA, 19 nt, Artificial Sequence
  Description of Artificial Sequence: Synthetic oligonucleotide
  Antisense Strand to SEQ ID NO: 480605
ucacgaacaaggaagaucc

SEQ ID NO: 480607 - RNA, 19 nt, Artificial Sequence
  Description of Artificial Sequence: Synthetic oligonucleotide
  Sense strand starting at position 974 of SEQ ID NO: 317306
gaucuuccuuguucgugaa

SEQ ID NO: 480608 - RNA, 19 nt, Artificial Sequence
  Description of Artificial Sequence: Synthetic oligonucleotide
  Antisense Strand to SEQ ID NO: 480607
uucacgaacaaggaagauc

SEQ ID NO: 480609 - RNA, 19 nt, Artificial Sequence
  Description of Artificial Sequence: Synthetic oligonucleotide
  Sense strand starting at position 1283 of SEQ ID NO: 317306
aguugcagcgacuuuguua

SEQ ID NO: 480610 - RNA, 19 nt, Artificial Sequence
  Description of Artificial Sequence: Synthetic oligonucleotide
  Antisense Strand to SEQ ID NO: 480609
uaacaaagucgcugcaacu

SEQ ID NO: 480611 - RNA, 19 nt, Artificial Sequence
  Description of Artificial Sequence: Synthetic oligonucleotide
  Sense strand starting at position 1284 of SEQ ID NO: 317306
guugcagcgacuuuguuau

SEQ ID NO: 480612 - RNA, 19 nt, Artificial Sequence
  Description of Artificial Sequence: Synthetic oligonucleotide
  Antisense Strand to SEQ ID NO: 480611
auaacaaagucgcugcaac

SEQ ID NO: 480613 - RNA, 19 nt, Artificial Sequence
  Description of Artificial Sequence: Synthetic oligonucleotide
  Sense strand starting at position 1290 of SEQ ID NO: 317306
gcgacuuuguuauuugcuu

SEQ ID NO: 480614 - RNA, 19 nt, Artificial Sequence
  Description of Artificial Sequence: Synthetic oligonucleotide
  Antisense Strand to SEQ ID NO: 480613
aagcaaauaacaaagucgc

SEQ ID NO: 480615 - RNA, 19 nt, Artificial Sequence
  Description of Artificial Sequence: Synthetic oligonucleotide
  Sense strand starting at position 2311 of SEQ ID NO: 317306
gggaauucgggcuguguuu

SEQ ID NO: 480616 - RNA, 19 nt, Artificial Sequence
  Description of Artificial Sequence: Synthetic oligonucleotide
  Antisense Strand to SEQ ID NO: 480615
aaacacagcccgaauuccc

SEQ ID NO: 480617 - RNA, 19 nt, Artificial Sequence
  Description of Artificial Sequence: Synthetic oligonucleotide
  Sense strand starting at position 2325 of SEQ ID NO: 317306
uguuuagcugcuggaauau

SEQ ID NO: 480618 - RNA, 19 nt, Artificial Sequence
  Description of Artificial Sequence: Synthetic oligonucleotide
  Antisense Strand to SEQ ID NO: 480617
auauuccagcagcuaaaca

SEQ ID NO: 480619 - RNA, 19 nt, Artificial Sequence
  Description of Artificial Sequence: Synthetic oligonucleotide
  Sense strand starting at position 2359 of SEQ ID NO: 317306
cagagaaguuccucgacuc

SEQ ID NO: 480620 - RNA, 19 nt, Artificial Sequence
  Description of Artificial Sequence: Synthetic oligonucleotide
  Antisense Strand to SEQ ID NO: 480619
gagucgaggaacuucucug

SEQ ID NO: 480621 - RNA, 19 nt, Artificial Sequence
  Description of Artificial Sequence: Synthetic oligonucleotide
  Sense strand starting at position 2698 of SEQ ID NO: 317306
acacuugcauguucuuaca

SEQ ID NO: 480622 - RNA, 19 nt, Artificial Sequence
  Description of Artificial Sequence: Synthetic oligonucleotide
  Antisense Strand to SEQ ID NO: 480621
uguaagaacaugcaagugu

SEQ ID NO: 480623 - RNA, 19 nt, Artificial Sequence
  Description of Artificial Sequence: Synthetic oligonucleotide
  Sense strand starting at position 2706 of SEQ ID NO: 317306
auguucuuacaagggaaau

SEQ ID NO: 480624 - RNA, 19 nt, Artificial Sequence
  Description of Artificial Sequence: Synthetic oligonucleotide
  Antisense Strand to SEQ ID NO: 480623
auuucccuuguaagaacau

SEQ ID NO: 480625 - RNA, 19 nt, Artificial Sequence
  Description of Artificial Sequence: Synthetic oligonucleotide
  Sense strand starting at position 2707 of SEQ ID NO: 317306
uguucuuacaagggaaaug

SEQ ID NO: 480626 - RNA, 19 nt, Artificial Sequence
  Description of Artificial Sequence: Synthetic oligonucleotide
  Antisense Strand to SEQ ID NO: 480625
cauuucccuuguaagaaca

SEQ ID NO: 480627 - RNA, 19 nt, Artificial Sequence
  Description of Artificial Sequence: Synthetic oligonucleotide
  Sense strand starting at position 2904 of SEQ ID NO: 317306
ggucgaauguucccagaaa

SEQ ID NO: 480628 - RNA, 19 nt, Artificial Sequence
  Description of Artificial Sequence: Synthetic oligonucleotide
  Antisense Strand to SEQ ID NO: 480627
uuucugggaacauucgacc

SEQ ID NO: 480629 - RNA, 19 nt, Artificial Sequence
  Description of Artificial Sequence: Synthetic oligonucleotide
  Sense strand starting at position 2963 of SEQ ID NO: 317306
cgcauuuccugaguccuga

SEQ ID NO: 480630 - RNA, 19 nt, Artificial Sequence
  Description of Artificial Sequence: Synthetic oligonucleotide
  Antisense Strand to SEQ ID NO: 480629
ucaggacucaggaaaugcg

SEQ ID NO: 480631 - RNA, 19 nt, Artificial Sequence
  Description of Artificial Sequence: Synthetic oligonucleotide
  Sense strand starting at position 3132 of SEQ ID NO: 317306
gagggaugggcguggcuaa

SEQ ID NO: 480632 - RNA, 19 nt, Artificial Sequence
  Description of Artificial Sequence: Synthetic oligonucleotide
  Antisense Strand to SEQ ID NO: 480631
uuagccacgcccaucccuc

SEQ ID NO: 480633 - RNA, 19 nt, Artificial Sequence
  Description of Artificial Sequence: Synthetic oligonucleotide
  Sense strand starting at position 3150 of SEQ ID NO: 317306
auaugaaagcugcaucuuu

SEQ ID NO: 480634 - RNA, 19 nt, Artificial Sequence
  Description of Artificial Sequence: Synthetic oligonucleotide
  Antisense Strand to SEQ ID NO: 480633
aaagaugcagcuuucauau

SEQ ID NO: 480635 - RNA, 19 nt, Artificial Sequence
  Description of Artificial Sequence: Synthetic oligonucleotide
  Sense strand starting at position 3177 of SEQ ID NO: 317306
gcuaccaugcgucauuauu

SEQ ID NO: 480636 - RNA, 19 nt, Artificial Sequence
  Description of Artificial Sequence: Synthetic oligonucleotide
  Antisense Strand to SEQ ID NO: 480635
aauaaugacgcaugguagc

SEQ ID NO: 480637 - RNA, 19 nt, Artificial Sequence
  Description of Artificial Sequence: Synthetic oligonucleotide
  Sense strand starting at position 3183 of SEQ ID NO: 317306
augcgucauuauuuaucaa

SEQ ID NO: 480638 - RNA, 19 nt, Artificial Sequence
  Description of Artificial Sequence: Synthetic oligonucleotide
  Antisense Strand to SEQ ID NO: 480637
uugauaaauaaugacgcau

SEQ ID NO: 480639 - RNA, 19 nt, Artificial Sequence
  Description of Artificial Sequence: Synthetic oligonucleotide
  Sense strand starting at position 3518 of SEQ ID NO: 317306
uguaucugugcguuugagu

SEQ ID NO: 480640 - RNA, 19 nt, Artificial Sequence
  Description of Artificial Sequence: Synthetic oligonucleotide
  Antisense Strand to SEQ ID NO: 480639
acucaaacgcacagauaca

SEQ ID NO: 480641 - RNA, 19 nt, Artificial Sequence
  Description of Artificial Sequence: Synthetic oligonucleotide
  Sense strand starting at position 3519 of SEQ ID NO: 317306
guaucugugcguuugaguu

SEQ ID NO: 480642 - RNA, 19 nt, Artificial Sequence
  Description of Artificial Sequence: Synthetic oligonucleotide
  Antisense Strand to SEQ ID NO: 480641
aacucaaacgcacagauac

SEQ ID NO: 480643 - RNA, 19 nt, Artificial Sequence
  Description of Artificial Sequence: Synthetic oligonucleotide
  Sense strand starting at position 3529 of SEQ ID NO: 317306
guuugaguucuaggauaug

SEQ ID NO: 480644 - RNA, 19 nt, Artificial Sequence
  Description of Artificial Sequence: Synthetic oligonucleotide
  Antisense Strand to SEQ ID NO: 480643
cauauccuagaacucaaac

SEQ ID NO: 480645 - RNA, 19 nt, Artificial Sequence
  Description of Artificial Sequence: Synthetic oligonucleotide
  Sense strand starting at position 3590 of SEQ ID NO: 317306
aaagaaagaugaugacuga

SEQ ID NO: 480646 - RNA, 19 nt, Artificial Sequence
  Description of Artificial Sequence: Synthetic oligonucleotide
  Antisense Strand to SEQ ID NO: 480645
ucagucaucaucuuucuuu

SEQ ID NO: 480647 - RNA, 19 nt, Artificial Sequence
  Description of Artificial Sequence: Synthetic oligonucleotide
  Sense strand starting at position 3597 of SEQ ID NO: 317306
gaugaugacugauaaguac

SEQ ID NO: 480648 - RNA, 19 nt, Artificial Sequence
  Description of Artificial Sequence: Synthetic oligonucleotide
  Antisense Strand to SEQ ID NO: 480647
guacuuaucagucaucauc

SEQ ID NO: 480649 - RNA, 19 nt, Artificial Sequence
  Description of Artificial Sequence: Synthetic oligonucleotide
  Sense strand starting at position 3600 of SEQ ID NO: 317306
gaugacugauaaguacauu

SEQ ID NO: 480650 - RNA, 19 nt, Artificial Sequence
  Description of Artificial Sequence: Synthetic oligonucleotide
  Antisense Strand to SEQ ID NO: 480649
aauguacuuaucagucauc

SEQ ID NO: 480651 - RNA, 19 nt, Artificial Sequence
  Description of Artificial Sequence: Synthetic oligonucleotide
  Sense strand starting at position 3606 of SEQ ID NO: 317306
ugauaaguacauuguguac

SEQ ID NO: 480652 - RNA, 19 nt, Artificial Sequence
  Description of Artificial Sequence: Synthetic oligonucleotide
  Antisense Strand to SEQ ID NO: 480651
guacacaauguacuuauca

SEQ ID NO: 480653 - RNA, 19 nt, Artificial Sequence
  Description of Artificial Sequence: Synthetic oligonucleotide
  Sense strand starting at position 3630 of SEQ ID NO: 317306
uaagcugugcuguccagua

SEQ ID NO: 480654 - RNA, 19 nt, Artificial Sequence
  Description of Artificial Sequence: Synthetic oligonucleotide
  Antisense Strand to SEQ ID NO: 480653
uacuggacagcacagcuua

SEQ ID NO: 480655 - RNA, 19 nt, Artificial Sequence
  Description of Artificial Sequence: Synthetic oligonucleotide
  Sense strand starting at position 3682 of SEQ ID NO: 317306
cuugaaaugugguugagac

SEQ ID NO: 480656 - RNA, 19 nt, Artificial Sequence
  Description of Artificial Sequence: Synthetic oligonucleotide
  Antisense Strand to SEQ ID NO: 480655
gucucaaccacauuucaag

SEQ ID NO: 480657 - RNA, 19 nt, Artificial Sequence
  Description of Artificial Sequence: Synthetic oligonucleotide
  Sense strand starting at position 3708 of SEQ ID NO: 317306
cugaaucguuaauugaauu

SEQ ID NO: 480658 - RNA, 19 nt, Artificial Sequence
  Description of Artificial Sequence: Synthetic oligonucleotide
  Antisense Strand to SEQ ID NO: 480657
aauucaauuaacgauucag

SEQ ID NO: 480659 - RNA, 19 nt, Artificial Sequence
  Description of Artificial Sequence: Synthetic oligonucleotide
  Sense strand starting at position 3780 of SEQ ID NO: 317306
uuaaguguguuugcaacaa

SEQ ID NO: 480660 - RNA, 19 nt, Artificial Sequence
  Description of Artificial Sequence: Synthetic oligonucleotide
  Antisense Strand to SEQ ID NO: 480659
uuguugcaaacacacuuaa

SEQ ID NO: 480661 - RNA, 19 nt, Artificial Sequence
  Description of Artificial Sequence: Synthetic oligonucleotide
  Sense strand starting at position 3784 of SEQ ID NO: 317306
guguguuugcaacaacuca

SEQ ID NO: 480662 - RNA, 19 nt, Artificial Sequence
  Description of Artificial Sequence: Synthetic oligonucleotide
  Antisense Strand to SEQ ID NO: 480661
ugaguuguugcaaacacac

SEQ ID NO: 480663 - RNA, 19 nt, Artificial Sequence
  Description of Artificial Sequence: Synthetic oligonucleotide
  Sense strand starting at position 3866 of SEQ ID NO: 317306
augugcuguaaguauauau

SEQ ID NO: 480664 - RNA, 19 nt, Artificial Sequence
  Description of Artificial Sequence: Synthetic oligonucleotide
  Antisense Strand to SEQ ID NO: 480663
auauauacuuacagcacau

SEQ ID NO: 480665 - RNA, 19 nt, Artificial Sequence
  Description of Artificial Sequence: Synthetic oligonucleotide
  Sense strand starting at position 3 of SEQ ID NO: 317307
agaguccauuccucaugga

SEQ ID NO: 480666 - RNA, 19 nt, Artificial Sequence
  Description of Artificial Sequence: Synthetic oligonucleotide
  Antisense Strand to SEQ ID NO: 480665
uccaugaggaauggacucu

SEQ ID NO: 480667 - RNA, 19 nt, Artificial Sequence
  Description of Artificial Sequence: Synthetic oligonucleotide
  Sense strand starting at position 7 of SEQ ID NO: 317307
uccauuccucauggagaaa

SEQ ID NO: 480668 - RNA, 19 nt, Artificial Sequence
  Description of Artificial Sequence: Synthetic oligonucleotide
  Antisense Strand to SEQ ID NO: 480667
uuucuccaugaggaaugga

SEQ ID NO: 480669 - RNA, 19 nt, Artificial Sequence
  Description of Artificial Sequence: Synthetic oligonucleotide
  Sense strand starting at position 114 of SEQ ID NO: 317307
aaucuaagggcuggcuaua

SEQ ID NO: 480670 - RNA, 19 nt, Artificial Sequence
  Description of Artificial Sequence: Synthetic oligonucleotide
  Antisense Strand to SEQ ID NO: 480669
uauagccagcccuuagauu

SEQ ID NO: 480671 - RNA, 19 nt, Artificial Sequence
  Description of Artificial Sequence: Synthetic oligonucleotide
  Sense strand starting at position 216 of SEQ ID NO: 317307
cuauaauuggauugcuuua

SEQ ID NO: 480672 - RNA, 19 nt, Artificial Sequence
  Description of Artificial Sequence: Synthetic oligonucleotide
  Antisense Strand to SEQ ID NO: 480671
uaaagcaauccaauuauag

SEQ ID NO: 480673 - RNA, 19 nt, Artificial Sequence
  Description of Artificial Sequence: Synthetic oligonucleotide
  Sense strand starting at position 221 of SEQ ID NO: 317307
auuggauugcuuuacucua

SEQ ID NO: 480674 - RNA, 19 nt, Artificial Sequence
  Description of Artificial Sequence: Synthetic oligonucleotide
  Antisense Strand to SEQ ID NO: 480673
uagaguaaagcaauccaau

SEQ ID NO: 480675 - RNA, 19 nt, Artificial Sequence
  Description of Artificial Sequence: Synthetic oligonucleotide
  Sense strand starting at position 332 of SEQ ID NO: 317307
cuugaacaugauugcucaa

SEQ ID NO: 480676 - RNA, 19 nt, Artificial Sequence
  Description of Artificial Sequence: Synthetic oligonucleotide
  Antisense Strand to SEQ ID NO: 480675
uugagcaaucauguucaag

SEQ ID NO: 480677 - RNA, 19 nt, Artificial Sequence
  Description of Artificial Sequence: Synthetic oligonucleotide
  Sense strand starting at position 334 of SEQ ID NO: 317307
ugaacaugauugcucaaag

SEQ ID NO: 480678 - RNA, 19 nt, Artificial Sequence
  Description of Artificial Sequence: Synthetic oligonucleotide
  Antisense Strand to SEQ ID NO: 480677
cuuugagcaaucauguuca

SEQ ID NO: 480679 - RNA, 19 nt, Artificial Sequence
  Description of Artificial Sequence: Synthetic oligonucleotide
  Sense strand starting at position 335 of SEQ ID NO: 317307
gaacaugauugcucaaagg

SEQ ID NO: 480680 - RNA, 19 nt, Artificial Sequence
  Description of Artificial Sequence: Synthetic oligonucleotide
  Antisense Strand to SEQ ID NO: 480679
ccuuugagcaaucauguuc

SEQ ID NO: 480681 - RNA, 19 nt, Artificial Sequence
  Description of Artificial Sequence: Synthetic oligonucleotide
  Sense strand starting at position 543 of SEQ ID NO: 317307
uagcuuuacugacuggaga

SEQ ID NO: 480682 - RNA, 19 nt, Artificial Sequence
  Description of Artificial Sequence: Synthetic oligonucleotide
  Antisense Strand to SEQ ID NO: 480681
ucuccagucaguaaagcua

SEQ ID NO: 480683 - RNA, 19 nt, Artificial Sequence
  Description of Artificial Sequence: Synthetic oligonucleotide
  Sense strand starting at position 545 of SEQ ID NO: 317307
gcuuuacugacuggagagu

SEQ ID NO: 480684 - RNA, 19 nt, Artificial Sequence
  Description of Artificial Sequence: Synthetic oligonucleotide
  Antisense Strand to SEQ ID NO: 480683
acucuccagucaguaaagc

SEQ ID NO: 480685 - RNA, 19 nt, Artificial Sequence
  Description of Artificial Sequence: Synthetic oligonucleotide
  Sense strand starting at position 556 of SEQ ID NO: 317307
uggagagugcagugauuca

SEQ ID NO: 480686 - RNA, 19 nt, Artificial Sequence
  Description of Artificial Sequence: Synthetic oligonucleotide
  Antisense Strand to SEQ ID NO: 480685
ugaaucacugcacucucca

SEQ ID NO: 480687 - RNA, 19 nt, Artificial Sequence
  Description of Artificial Sequence: Synthetic oligonucleotide
  Sense strand starting at position 668 of SEQ ID NO: 317307
gcugcugcuccagugauua

SEQ ID NO: 480688 - RNA, 19 nt, Artificial Sequence
  Description of Artificial Sequence: Synthetic oligonucleotide
  Antisense Strand to SEQ ID NO: 480687
uaaucacuggagcagcagc

SEQ ID NO: 480689 - RNA, 19 nt, Artificial Sequence
  Description of Artificial Sequence: Synthetic oligonucleotide
  Sense strand starting at position 798 of SEQ ID NO: 317307
gaugaagucuucuuaaagg

SEQ ID NO: 480690 - RNA, 19 nt, Artificial Sequence
  Description of Artificial Sequence: Synthetic oligonucleotide
  Antisense Strand to SEQ ID NO: 480689
ccuuuaagaagacuucauc

SEQ ID NO: 480691 - RNA, 19 nt, Artificial Sequence
  Description of Artificial Sequence: Synthetic oligonucleotide
  Sense strand starting at position 861 of SEQ ID NO: 317307
auucuuguaggguaucuaa

SEQ ID NO: 480692 - RNA, 19 nt, Artificial Sequence
  Description of Artificial Sequence: Synthetic oligonucleotide
  Antisense Strand to SEQ ID NO: 480691
uuagauacccuacaagaau

SEQ ID NO: 480693 - RNA, 19 nt, Artificial Sequence
  Description of Artificial Sequence: Synthetic oligonucleotide
  Sense strand starting at position 864 of SEQ ID NO: 317307
cuuguaggguaucuaaaug

SEQ ID NO: 480694 - RNA, 19 nt, Artificial Sequence
  Description of Artificial Sequence: Synthetic oligonucleotide
  Antisense Strand to SEQ ID NO: 480693
cauuuagauacccuacaag

SEQ ID NO: 480695 - RNA, 19 nt, Artificial Sequence
  Description of Artificial Sequence: Synthetic oligonucleotide
  Sense strand starting at position 1441 of SEQ ID NO: 317307
uggucuuucccauacaaga

SEQ ID NO: 480696 - RNA, 19 nt, Artificial Sequence
  Description of Artificial Sequence: Synthetic oligonucleotide
  Antisense Strand to SEQ ID NO: 480695
ucuuguaugggaaagacca

SEQ ID NO: 480697 - RNA, 19 nt, Artificial Sequence
  Description of Artificial Sequence: Synthetic oligonucleotide
  Sense strand starting at position 2669 of SEQ ID NO: 317307
uccuguuaaagauguggaa

SEQ ID NO: 480698 - RNA, 19 nt, Artificial Sequence
  Description of Artificial Sequence: Synthetic oligonucleotide
  Antisense Strand to SEQ ID NO: 480697
uuccacaucuuuaacagga

SEQ ID NO: 480699 - RNA, 19 nt, Artificial Sequence
  Description of Artificial Sequence: Synthetic oligonucleotide
  Sense strand starting at position 2671 of SEQ ID NO: 317307
cuguuaaagauguggaagu

SEQ ID NO: 480700 - RNA, 19 nt, Artificial Sequence
  Description of Artificial Sequence: Synthetic oligonucleotide
  Antisense Strand to SEQ ID NO: 480699
acuuccacaucuuuaacag

SEQ ID NO: 480701 - RNA, 19 nt, Artificial Sequence
  Description of Artificial Sequence: Synthetic oligonucleotide
  Sense strand starting at position 2792 of SEQ ID NO: 317307
agaaguguucguuaaauga

SEQ ID NO: 480702 - RNA, 19 nt, Artificial Sequence
  Description of Artificial Sequence: Synthetic oligonucleotide
  Antisense Strand to SEQ ID NO: 480701
ucauuuaacgaacacuucu

SEQ ID NO: 480703 - RNA, 19 nt, Artificial Sequence
  Description of Artificial Sequence: Synthetic oligonucleotide
  Sense strand starting at position 2872 of SEQ ID NO: 317307
uuggcaguccuaugaauag

SEQ ID NO: 480704 - RNA, 19 nt, Artificial Sequence
  Description of Artificial Sequence: Synthetic oligonucleotide
  Antisense Strand to SEQ ID NO: 480703
cuauucauaggacugccaa

SEQ ID NO: 480705 - RNA, 19 nt, Artificial Sequence
  Description of Artificial Sequence: Synthetic oligonucleotide
  Sense strand starting at position 2878 of SEQ ID NO: 317307
guccuaugaauaggagguu

SEQ ID NO: 480706 - RNA, 19 nt, Artificial Sequence
  Description of Artificial Sequence: Synthetic oligonucleotide
  Antisense Strand to SEQ ID NO: 480705
aaccuccuauucauaggac

SEQ ID NO: 480707 - RNA, 19 nt, Artificial Sequence
  Description of Artificial Sequence: Synthetic oligonucleotide
  Sense strand starting at position 2903 of SEQ ID NO: 317307
gucccaguccuccagaaac

SEQ ID NO: 480708 - RNA, 19 nt, Artificial Sequence
  Description of Artificial Sequence: Synthetic oligonucleotide
  Antisense Strand to SEQ ID NO: 480707
guuucuggaggacugggac

SEQ ID NO: 480709 - RNA, 19 nt, Artificial Sequence
  Description of Artificial Sequence: Synthetic oligonucleotide
  Sense strand starting at position 2935 of SEQ ID NO: 317307
gguacuaugcaagagaguu

SEQ ID NO: 480710 - RNA, 19 nt, Artificial Sequence
  Description of Artificial Sequence: Synthetic oligonucleotide
  Antisense Strand to SEQ ID NO: 480709
aacucucuugcauaguacc

SEQ ID NO: 480711 - RNA, 19 nt, Artificial Sequence
  Description of Artificial Sequence: Synthetic oligonucleotide
  Sense strand starting at position 3056 of SEQ ID NO: 317307
auauacaguccauguauaa

SEQ ID NO: 480712 - RNA, 19 nt, Artificial Sequence
  Description of Artificial Sequence: Synthetic oligonucleotide
  Antisense Strand to SEQ ID NO: 480711
uuauacauggacuguauau

SEQ ID NO: 480713 - RNA, 19 nt, Artificial Sequence
  Description of Artificial Sequence: Synthetic oligonucleotide
  Sense strand starting at position 3100 of SEQ ID NO: 317307
gggaauccuuuagccaaau

SEQ ID NO: 480714 - RNA, 19 nt, Artificial Sequence
  Description of Artificial Sequence: Synthetic oligonucleotide
  Antisense Strand to SEQ ID NO: 480713
auuuggcuaaaggauuccc

SEQ ID NO: 480715 - RNA, 19 nt, Artificial Sequence
  Description of Artificial Sequence: Synthetic oligonucleotide
  Sense strand starting at position 3101 of SEQ ID NO: 317307
ggaauccuuuagccaaaug

SEQ ID NO: 480716 - RNA, 19 nt, Artificial Sequence
  Description of Artificial Sequence: Synthetic oligonucleotide
  Antisense Strand to SEQ ID NO: 480715
cauuuggcuaaaggauucc

SEQ ID NO: 480717 - RNA, 19 nt, Artificial Sequence
  Description of Artificial Sequence: Synthetic oligonucleotide
  Sense strand starting at position 3119 of SEQ ID NO: 317307
gggcuugucccagaagucu

SEQ ID NO: 480718 - RNA, 19 nt, Artificial Sequence
  Description of Artificial Sequence: Synthetic oligonucleotide
  Antisense Strand to SEQ ID NO: 480717
agacuucugggacaagccc

SEQ ID NO: 480719 - RNA, 19 nt, Artificial Sequence
  Description of Artificial Sequence: Synthetic oligonucleotide
  Sense strand starting at position 3280 of SEQ ID NO: 317307
ggagccauuggucaguuau

SEQ ID NO: 480720 - RNA, 19 nt, Artificial Sequence
  Description of Artificial Sequence: Synthetic oligonucleotide
  Antisense Strand to SEQ ID NO: 480719
auaacugaccaauggcucc

SEQ ID NO: 480721 - RNA, 19 nt, Artificial Sequence
  Description of Artificial Sequence: Synthetic oligonucleotide
  Sense strand starting at position 3338 of SEQ ID NO: 317307
gcaacuauaguguauuauc

SEQ ID NO: 480722 - RNA, 19 nt, Artificial Sequence
  Description of Artificial Sequence: Synthetic oligonucleotide
  Antisense Strand to SEQ ID NO: 480721
gauaauacacuauaguugc

SEQ ID NO: 480723 - RNA, 19 nt, Artificial Sequence
  Description of Artificial Sequence: Synthetic oligonucleotide
  Sense strand starting at position 3387 of SEQ ID NO: 317307
ugaguuaaguaaccuaaca

SEQ ID NO: 480724 - RNA, 19 nt, Artificial Sequence
  Description of Artificial Sequence: Synthetic oligonucleotide
  Antisense Strand to SEQ ID NO: 480723
uguuagguuacuuaacuca

SEQ ID NO: 480725 - RNA, 19 nt, Artificial Sequence
  Description of Artificial Sequence: Synthetic oligonucleotide
  Sense strand starting at position 3434 of SEQ ID NO: 317307
cugcuugaaccaggaugua

SEQ ID NO: 480726 - RNA, 19 nt, Artificial Sequence
  Description of Artificial Sequence: Synthetic oligonucleotide
  Antisense Strand to SEQ ID NO: 480725
uacauccugguucaagcag

SEQ ID NO: 480727 - RNA, 19 nt, Artificial Sequence
  Description of Artificial Sequence: Synthetic oligonucleotide
  Sense strand starting at position 3502 of SEQ ID NO: 317307
gcugcaucccgaucuguca

SEQ ID NO: 480728 - RNA, 19 nt, Artificial Sequence
  Description of Artificial Sequence: Synthetic oligonucleotide
  Antisense Strand to SEQ ID NO: 480727
ugacagaucgggaugcagc

SEQ ID NO: 480729 - RNA, 19 nt, Artificial Sequence
  Description of Artificial Sequence: Synthetic oligonucleotide
  Sense strand starting at position 3509 of SEQ ID NO: 317307
cccgaucugucacuaauga

SEQ ID NO: 480730 - RNA, 19 nt, Artificial Sequence
  Description of Artificial Sequence: Synthetic oligonucleotide
  Antisense Strand to SEQ ID NO: 480729
ucauuagugacagaucggg

SEQ ID NO: 480731 - RNA, 19 nt, Artificial Sequence
  Description of Artificial Sequence: Synthetic oligonucleotide
  Sense strand starting at position 3510 of SEQ ID NO: 317307
ccgaucugucacuaaugag

SEQ ID NO: 480732 - RNA, 19 nt, Artificial Sequence
  Description of Artificial Sequence: Synthetic oligonucleotide
  Antisense Strand to SEQ ID NO: 480731
cucauuagugacagaucgg

SEQ ID NO: 480733 - RNA, 19 nt, Artificial Sequence
  Description of Artificial Sequence: Synthetic oligonucleotide
  Sense strand starting at position 3561 of SEQ ID NO: 317307
uguugaggacuuggugaga

SEQ ID NO: 480734 - RNA, 19 nt, Artificial Sequence
  Description of Artificial Sequence: Synthetic oligonucleotide
  Antisense Strand to SEQ ID NO: 480733
ucucaccaaguccucaaca

SEQ ID NO: 480735 - RNA, 19 nt, Artificial Sequence
  Description of Artificial Sequence: Synthetic oligonucleotide
  Sense strand starting at position 3574 of SEQ ID NO: 317307
gugagauagcaugaugguu

SEQ ID NO: 480736 - RNA, 19 nt, Artificial Sequence
  Description of Artificial Sequence: Synthetic oligonucleotide
  Antisense Strand to SEQ ID NO: 480735
aaccaucaugcuaucucac

SEQ ID NO: 480737 - RNA, 19 nt, Artificial Sequence
  Description of Artificial Sequence: Synthetic oligonucleotide
  Sense strand starting at position 3611 of SEQ ID NO: 317307
auuuguuacuccuuucguu

SEQ ID NO: 480738 - RNA, 19 nt, Artificial Sequence
  Description of Artificial Sequence: Synthetic oligonucleotide
  Antisense Strand to SEQ ID NO: 480737
aacgaaaggaguaacaaau

SEQ ID NO: 480739 - RNA, 19 nt, Artificial Sequence
  Description of Artificial Sequence: Synthetic oligonucleotide
  Sense strand starting at position 3618 of SEQ ID NO: 317307
acuccuuucguugagaggu

SEQ ID NO: 480740 - RNA, 19 nt, Artificial Sequence
  Description of Artificial Sequence: Synthetic oligonucleotide
  Antisense Strand to SEQ ID NO: 480739
accucucaacgaaaggagu

SEQ ID NO: 480741 - RNA, 19 nt, Artificial Sequence
  Description of Artificial Sequence: Synthetic oligonucleotide
  Sense strand starting at position 3646 of SEQ ID NO: 317307
acuuucucgcuuugaauuu

SEQ ID NO: 480742 - RNA, 19 nt, Artificial Sequence
  Description of Artificial Sequence: Synthetic oligonucleotide
  Antisense Strand to SEQ ID NO: 480741
aaauucaaagcgagaaagu

SEQ ID NO: 480743 - RNA, 19 nt, Artificial Sequence
  Description of Artificial Sequence: Synthetic oligonucleotide
  Sense strand starting at position 3710 of SEQ ID NO: 317307
ugaccauauccuggaacuu

SEQ ID NO: 480744 - RNA, 19 nt, Artificial Sequence
  Description of Artificial Sequence: Synthetic oligonucleotide
  Antisense Strand to SEQ ID NO: 480743
aaguuccaggauaugguca

SEQ ID NO: 480745 - RNA, 19 nt, Artificial Sequence
  Description of Artificial Sequence: Synthetic oligonucleotide
  Sense strand starting at position 103 of SEQ ID NO: 317308
ggagacuuuaaaggcuuua

SEQ ID NO: 480746 - RNA, 19 nt, Artificial Sequence
  Description of Artificial Sequence: Synthetic oligonucleotide
  Antisense Strand to SEQ ID NO: 480745
uaaagccuuuaaagucucc

SEQ ID NO: 480747 - RNA, 19 nt, Artificial Sequence
  Description of Artificial Sequence: Synthetic oligonucleotide
  Sense strand starting at position 202 of SEQ ID NO: 317308
ccacuucuggauggguuua

SEQ ID NO: 480748 - RNA, 19 nt, Artificial Sequence
  Description of Artificial Sequence: Synthetic oligonucleotide
  Antisense Strand to SEQ ID NO: 480747
uaaacccauccagaagugg

SEQ ID NO: 480749 - RNA, 19 nt, Artificial Sequence
  Description of Artificial Sequence: Synthetic oligonucleotide
  Sense strand starting at position 322 of SEQ ID NO: 317308
ccuguagaaagaggucuua

SEQ ID NO: 480750 - RNA, 19 nt, Artificial Sequence
  Description of Artificial Sequence: Synthetic oligonucleotide
  Antisense Strand to SEQ ID NO: 480749
uaagaccucuuucuacagg

SEQ ID NO: 480751 - RNA, 19 nt, Artificial Sequence
  Description of Artificial Sequence: Synthetic oligonucleotide
  Sense strand starting at position 435 of SEQ ID NO: 317308
cuuggauuaccucgucaaa

SEQ ID NO: 480752 - RNA, 19 nt, Artificial Sequence
  Description of Artificial Sequence: Synthetic oligonucleotide
  Antisense Strand to SEQ ID NO: 480751
uuugacgagguaauccaag

SEQ ID NO: 480753 - RNA, 19 nt, Artificial Sequence
  Description of Artificial Sequence: Synthetic oligonucleotide
  Sense strand starting at position 437 of SEQ ID NO: 317308
uggauuaccucgucaaauu

SEQ ID NO: 480754 - RNA, 19 nt, Artificial Sequence
  Description of Artificial Sequence: Synthetic oligonucleotide
  Antisense Strand to SEQ ID NO: 480753
aauuugacgagguaaucca

SEQ ID NO: 480755 - RNA, 19 nt, Artificial Sequence
  Description of Artificial Sequence: Synthetic oligonucleotide
  Sense strand starting at position 438 of SEQ ID NO: 317308
ggauuaccucgucaaauuc

SEQ ID NO: 480756 - RNA, 19 nt, Artificial Sequence
  Description of Artificial Sequence: Synthetic oligonucleotide
  Antisense Strand to SEQ ID NO: 480755
gaauuugacgagguaaucc

SEQ ID NO: 480757 - RNA, 19 nt, Artificial Sequence
  Description of Artificial Sequence: Synthetic oligonucleotide
  Sense strand starting at position 547 of SEQ ID NO: 317308
ugcgaagugguucaaagau

SEQ ID NO: 480758 - RNA, 19 nt, Artificial Sequence
  Description of Artificial Sequence: Synthetic oligonucleotide
  Antisense Strand to SEQ ID NO: 480757
aucuuugaaccacuucgca

SEQ ID NO: 480759 - RNA, 19 nt, Artificial Sequence
  Description of Artificial Sequence: Synthetic oligonucleotide
  Sense strand starting at position 801 of SEQ ID NO: 317308
uuugcucaccgagaaacuu

SEQ ID NO: 480760 - RNA, 19 nt, Artificial Sequence
  Description of Artificial Sequence: Synthetic oligonucleotide
  Antisense Strand to SEQ ID NO: 480759
aaguuucucggugagcaaa

SEQ ID NO: 480761 - RNA, 19 nt, Artificial Sequence
  Description of Artificial Sequence: Synthetic oligonucleotide
  Sense strand starting at position 915 of SEQ ID NO: 317308
cgcguaaaccaagacucua

SEQ ID NO: 480762 - RNA, 19 nt, Artificial Sequence
  Description of Artificial Sequence: Synthetic oligonucleotide
  Antisense Strand to SEQ ID NO: 480761
uagagucuugguuuacgcg

SEQ ID NO: 480763 - RNA, 19 nt, Artificial Sequence
  Description of Artificial Sequence: Synthetic oligonucleotide
  Sense strand starting at position 1246 of SEQ ID NO: 317308
uugaaauacugggacagaa

SEQ ID NO: 480764 - RNA, 19 nt, Artificial Sequence
  Description of Artificial Sequence: Synthetic oligonucleotide
  Antisense Strand to SEQ ID NO: 480763
uucugucccaguauuucaa

SEQ ID NO: 480765 - RNA, 19 nt, Artificial Sequence
  Description of Artificial Sequence: Synthetic oligonucleotide
  Sense strand starting at position 1518 of SEQ ID NO: 317308
agcucaucaggacgacauu

SEQ ID NO: 480766 - RNA, 19 nt, Artificial Sequence
  Description of Artificial Sequence: Synthetic oligonucleotide
  Antisense Strand to SEQ ID NO: 480765
aaugucguccugaugagcu

SEQ ID NO: 480767 - RNA, 19 nt, Artificial Sequence
  Description of Artificial Sequence: Synthetic oligonucleotide
  Sense strand starting at position 1529 of SEQ ID NO: 317308
acgacauuccuccagacga

SEQ ID NO: 480768 - RNA, 19 nt, Artificial Sequence
  Description of Artificial Sequence: Synthetic oligonucleotide
  Antisense Strand to SEQ ID NO: 480767
ucgucuggaggaaugucgu

SEQ ID NO: 480769 - RNA, 19 nt, Artificial Sequence
  Description of Artificial Sequence: Synthetic oligonucleotide
  Sense strand starting at position 1627 of SEQ ID NO: 317308
uuccuuggcgucgcagaaa

SEQ ID NO: 480770 - RNA, 19 nt, Artificial Sequence
  Description of Artificial Sequence: Synthetic oligonucleotide
  Antisense Strand to SEQ ID NO: 480769
uuucugcgacgccaaggaa

SEQ ID NO: 480771 - RNA, 19 nt, Artificial Sequence
  Description of Artificial Sequence: Synthetic oligonucleotide
  Sense strand starting at position 2316 of SEQ ID NO: 317308
cugucaucccuuugagaag

SEQ ID NO: 480772 - RNA, 19 nt, Artificial Sequence
  Description of Artificial Sequence: Synthetic oligonucleotide
  Antisense Strand to SEQ ID NO: 480771
cuucucaaagggaugacag

SEQ ID NO: 480773 - RNA, 19 nt, Artificial Sequence
  Description of Artificial Sequence: Synthetic oligonucleotide
  Sense strand starting at position 2380 of SEQ ID NO: 317308
uuaaauacuugcuuggagu

SEQ ID NO: 480774 - RNA, 19 nt, Artificial Sequence
  Description of Artificial Sequence: Synthetic oligonucleotide
  Antisense Strand to SEQ ID NO: 480773
acuccaagcaaguauuuaa

SEQ ID NO: 480775 - RNA, 19 nt, Artificial Sequence
  Description of Artificial Sequence: Synthetic oligonucleotide
  Sense strand starting at position 2493 of SEQ ID NO: 317308
gcagcugcucguucuuaau

SEQ ID NO: 480776 - RNA, 19 nt, Artificial Sequence
  Description of Artificial Sequence: Synthetic oligonucleotide
  Antisense Strand to SEQ ID NO: 480775
auuaagaacgagcagcugc

SEQ ID NO: 480777 - RNA, 19 nt, Artificial Sequence
  Description of Artificial Sequence: Synthetic oligonucleotide
  Sense strand starting at position 2636 of SEQ ID NO: 317308
ggucaauucuagcuaauca

SEQ ID NO: 480778 - RNA, 19 nt, Artificial Sequence
  Description of Artificial Sequence: Synthetic oligonucleotide
  Antisense Strand to SEQ ID NO: 480777
ugauuagcuagaauugacc

SEQ ID NO: 480779 - RNA, 19 nt, Artificial Sequence
  Description of Artificial Sequence: Synthetic oligonucleotide
  Sense strand starting at position 2675 of SEQ ID NO: 317308
cuuagcucucagugaggaa

SEQ ID NO: 480780 - RNA, 19 nt, Artificial Sequence
  Description of Artificial Sequence: Synthetic oligonucleotide
  Antisense Strand to SEQ ID NO: 480779
uuccucacugagagcuaag

SEQ ID NO: 480781 - RNA, 19 nt, Artificial Sequence
  Description of Artificial Sequence: Synthetic oligonucleotide
  Sense strand starting at position 2770 of SEQ ID NO: 317308
cugugaaagauuugugucu

SEQ ID NO: 480782 - RNA, 19 nt, Artificial Sequence
  Description of Artificial Sequence: Synthetic oligonucleotide
  Antisense Strand to SEQ ID NO: 480781
agacacaaaucuuucacag

SEQ ID NO: 480783 - RNA, 19 nt, Artificial Sequence
  Description of Artificial Sequence: Synthetic oligonucleotide
  Sense strand starting at position 2775 of SEQ ID NO: 317308
aaagauuugugucugccca

SEQ ID NO: 480784 - RNA, 19 nt, Artificial Sequence
  Description of Artificial Sequence: Synthetic oligonucleotide
  Antisense Strand to SEQ ID NO: 480783
ugggcagacacaaaucuuu

SEQ ID NO: 480785 - RNA, 19 nt, Artificial Sequence
  Description of Artificial Sequence: Synthetic oligonucleotide
  Sense strand starting at position 2777 of SEQ ID NO: 317308
agauuugugucugcccacu

SEQ ID NO: 480786 - RNA, 19 nt, Artificial Sequence
  Description of Artificial Sequence: Synthetic oligonucleotide
  Antisense Strand to SEQ ID NO: 480785
agugggcagacacaaaucu

SEQ ID NO: 480787 - RNA, 19 nt, Artificial Sequence
  Description of Artificial Sequence: Synthetic oligonucleotide
  Sense strand starting at position 2801 of SEQ ID NO: 317308
ccuagagcugauggcuuaa

SEQ ID NO: 480788 - RNA, 19 nt, Artificial Sequence
  Description of Artificial Sequence: Synthetic oligonucleotide
  Antisense Strand to SEQ ID NO: 480787
uuaagccaucagcucuagg

SEQ ID NO: 480789 - RNA, 19 nt, Artificial Sequence
  Description of Artificial Sequence: Synthetic oligonucleotide
  Sense strand starting at position 2803 of SEQ ID NO: 317308
uagagcugauggcuuaaga

SEQ ID NO: 480790 - RNA, 19 nt, Artificial Sequence
  Description of Artificial Sequence: Synthetic oligonucleotide
  Antisense Strand to SEQ ID NO: 480789
ucuuaagccaucagcucua

SEQ ID NO: 480791 - RNA, 19 nt, Artificial Sequence
  Description of Artificial Sequence: Synthetic oligonucleotide
  Sense strand starting at position 2860 of SEQ ID NO: 317308
ggaggauugagcuggaagu

SEQ ID NO: 480792 - RNA, 19 nt, Artificial Sequence
  Description of Artificial Sequence: Synthetic oligonucleotide
  Antisense Strand to SEQ ID NO: 480791
acuuccagcucaauccucc

SEQ ID NO: 480793 - RNA, 19 nt, Artificial Sequence
  Description of Artificial Sequence: Synthetic oligonucleotide
  Sense strand starting at position 2933 of SEQ ID NO: 317308
gggacagcaucucugaguu

SEQ ID NO: 480794 - RNA, 19 nt, Artificial Sequence
  Description of Artificial Sequence: Synthetic oligonucleotide
  Antisense Strand to SEQ ID NO: 480793
aacucagagaugcuguccc

SEQ ID NO: 480795 - RNA, 19 nt, Artificial Sequence
  Description of Artificial Sequence: Synthetic oligonucleotide
  Sense strand starting at position 3044 of SEQ ID NO: 317308
uccauauuccaugaaugug

SEQ ID NO: 480796 - RNA, 19 nt, Artificial Sequence
  Description of Artificial Sequence: Synthetic oligonucleotide
  Antisense Strand to SEQ ID NO: 480795
cacauucauggaauaugga

SEQ ID NO: 480797 - RNA, 19 nt, Artificial Sequence
  Description of Artificial Sequence: Synthetic oligonucleotide
  Sense strand starting at position 3052 of SEQ ID NO: 317308
ccaugaaugugaguucgaa

SEQ ID NO: 480798 - RNA, 19 nt, Artificial Sequence
  Description of Artificial Sequence: Synthetic oligonucleotide
  Antisense Strand to SEQ ID NO: 480797
uucgaacucacauucaugg

SEQ ID NO: 480799 - RNA, 19 nt, Artificial Sequence
  Description of Artificial Sequence: Synthetic oligonucleotide
  Sense strand starting at position 3107 of SEQ ID NO: 317308
uagauuaaccguuguuagg

SEQ ID NO: 480800 - RNA, 19 nt, Artificial Sequence
  Description of Artificial Sequence: Synthetic oligonucleotide
  Antisense Strand to SEQ ID NO: 480799
ccuaacaacgguuaaucua

SEQ ID NO: 480801 - RNA, 19 nt, Artificial Sequence
  Description of Artificial Sequence: Synthetic oligonucleotide
  Sense strand starting at position 3109 of SEQ ID NO: 317308
gauuaaccguuguuaggaa

SEQ ID NO: 480802 - RNA, 19 nt, Artificial Sequence
  Description of Artificial Sequence: Synthetic oligonucleotide
  Antisense Strand to SEQ ID NO: 480801
uuccuaacaacgguuaauc

SEQ ID NO: 480803 - RNA, 19 nt, Artificial Sequence
  Description of Artificial Sequence: Synthetic oligonucleotide
  Sense strand starting at position 3123 of SEQ ID NO: 317308
aggaaucauuuccaggauu

SEQ ID NO: 480804 - RNA, 19 nt, Artificial Sequence
  Description of Artificial Sequence: Synthetic oligonucleotide
  Antisense Strand to SEQ ID NO: 480803
aauccuggaaaugauuccu

SEQ ID NO: 480805 - RNA, 19 nt, Artificial Sequence
  Description of Artificial Sequence: Synthetic oligonucleotide
  Sense strand starting at position 3175 of SEQ ID NO: 317308
gcaugaaagggccaugcau

SEQ ID NO: 480806 - RNA, 19 nt, Artificial Sequence
  Description of Artificial Sequence: Synthetic oligonucleotide
  Antisense Strand to SEQ ID NO: 480805
augcauggcccuuucaugc

SEQ ID NO: 480807 - RNA, 19 nt, Artificial Sequence
  Description of Artificial Sequence: Synthetic oligonucleotide
  Sense strand starting at position 3177 of SEQ ID NO: 317308
augaaagggccaugcauaa

SEQ ID NO: 480808 - RNA, 19 nt, Artificial Sequence
  Description of Artificial Sequence: Synthetic oligonucleotide
  Antisense Strand to SEQ ID NO: 480807
uuaugcauggcccuuucau

SEQ ID NO: 480809 - RNA, 19 nt, Artificial Sequence
  Description of Artificial Sequence: Synthetic oligonucleotide
  Sense strand starting at position 3274 of SEQ ID NO: 317308
guggcacuuguggaaucua

SEQ ID NO: 480810 - RNA, 19 nt, Artificial Sequence
  Description of Artificial Sequence: Synthetic oligonucleotide
  Antisense Strand to SEQ ID NO: 480809
uagauuccacaagugccac

SEQ ID NO: 480811 - RNA, 19 nt, Artificial Sequence
  Description of Artificial Sequence: Synthetic oligonucleotide
  Sense strand starting at position 3360 of SEQ ID NO: 317308
agauaaaugucggcccuau

SEQ ID NO: 480812 - RNA, 19 nt, Artificial Sequence
  Description of Artificial Sequence: Synthetic oligonucleotide
  Antisense Strand to SEQ ID NO: 480811
auagggccgacauuuaucu

SEQ ID NO: 480813 - RNA, 19 nt, Artificial Sequence
  Description of Artificial Sequence: Synthetic oligonucleotide
  Sense strand starting at position 3364 of SEQ ID NO: 317308
aaaugucggcccuauauaa

SEQ ID NO: 480814 - RNA, 19 nt, Artificial Sequence
  Description of Artificial Sequence: Synthetic oligonucleotide
  Antisense Strand to SEQ ID NO: 480813
uuauauagggccgacauuu

SEQ ID NO: 480815 - RNA, 19 nt, Artificial Sequence
  Description of Artificial Sequence: Synthetic oligonucleotide
  Sense strand starting at position 3589 of SEQ ID NO: 317308
gguuauuggaaaggcucaa

SEQ ID NO: 480816 - RNA, 19 nt, Artificial Sequence
  Description of Artificial Sequence: Synthetic oligonucleotide
  Antisense Strand to SEQ ID NO: 480815
uugagccuuuccaauaacc

SEQ ID NO: 480817 - RNA, 19 nt, Artificial Sequence
  Description of Artificial Sequence: Synthetic oligonucleotide
  Sense strand starting at position 3601 of SEQ ID NO: 317308
ggcucaaugcuguaaagac

SEQ ID NO: 480818 - RNA, 19 nt, Artificial Sequence
  Description of Artificial Sequence: Synthetic oligonucleotide
  Antisense Strand to SEQ ID NO: 480817
gucuuuacagcauugagcc

SEQ ID NO: 480819 - RNA, 19 nt, Artificial Sequence
  Description of Artificial Sequence: Synthetic oligonucleotide
  Sense strand starting at position 3806 of SEQ ID NO: 317308
guuacaguccauuaucgga

SEQ ID NO: 480820 - RNA, 19 nt, Artificial Sequence
  Description of Artificial Sequence: Synthetic oligonucleotide
  Antisense Strand to SEQ ID NO: 480819
uccgauaauggacuguaac

SEQ ID NO: 480821 - RNA, 19 nt, Artificial Sequence
  Description of Artificial Sequence: Synthetic oligonucleotide
  Sense strand starting at position 3808 of SEQ ID NO: 317308
uacaguccauuaucggaaa

SEQ ID NO: 480822 - RNA, 19 nt, Artificial Sequence
  Description of Artificial Sequence: Synthetic oligonucleotide
  Antisense Strand to SEQ ID NO: 480821
uuuccgauaauggacugua

SEQ ID NO: 480823 - RNA, 19 nt, Artificial Sequence
  Description of Artificial Sequence: Synthetic oligonucleotide
  Sense strand starting at position 3901 of SEQ ID NO: 317308
cugagaaccuuauuagguc

SEQ ID NO: 480824 - RNA, 19 nt, Artificial Sequence
  Description of Artificial Sequence: Synthetic oligonucleotide
  Antisense Strand to SEQ ID NO: 480823
gaccuaauaagguucucag

SEQ ID NO: 480825 - RNA, 19 nt, Artificial Sequence
  Description of Artificial Sequence: Synthetic oligonucleotide
  Sense strand starting at position 16 of SEQ ID NO: 317309
augcuacaguuauuacuua

SEQ ID NO: 480826 - RNA, 19 nt, Artificial Sequence
  Description of Artificial Sequence: Synthetic oligonucleotide
  Antisense Strand to SEQ ID NO: 480825
uaaguaauaacuguagcau

SEQ ID NO: 480827 - RNA, 19 nt, Artificial Sequence
  Description of Artificial Sequence: Synthetic oligonucleotide
  Sense strand starting at position 69 of SEQ ID NO: 317309
ccagucacauaauuaaguu

SEQ ID NO: 480828 - RNA, 19 nt, Artificial Sequence
  Description of Artificial Sequence: Synthetic oligonucleotide
  Antisense Strand to SEQ ID NO: 480827
aacuuaauuaugugacugg

SEQ ID NO: 480829 - RNA, 19 nt, Artificial Sequence
  Description of Artificial Sequence: Synthetic oligonucleotide
  Sense strand starting at position 85 of SEQ ID NO: 317309
guuuacaucucaguauuac

SEQ ID NO: 480830 - RNA, 19 nt, Artificial Sequence
  Description of Artificial Sequence: Synthetic oligonucleotide
  Antisense Strand to SEQ ID NO: 480829
guaauacugagauguaaac

SEQ ID NO: 480831 - RNA, 19 nt, Artificial Sequence
  Description of Artificial Sequence: Synthetic oligonucleotide
  Sense strand starting at position 243 of SEQ ID NO: 317309
uccgauuauucucccugga

SEQ ID NO: 480832 - RNA, 19 nt, Artificial Sequence
  Description of Artificial Sequence: Synthetic oligonucleotide
  Antisense Strand to SEQ ID NO: 480831
uccagggagaauaaucgga

SEQ ID NO: 480833 - RNA, 19 nt, Artificial Sequence
  Description of Artificial Sequence: Synthetic oligonucleotide
  Sense strand starting at position 245 of SEQ ID NO: 317309
cgauuauucucccuggacu

SEQ ID NO: 480834 - RNA, 19 nt, Artificial Sequence
  Description of Artificial Sequence: Synthetic oligonucleotide
  Antisense Strand to SEQ ID NO: 480833
aguccagggagaauaaucg

SEQ ID NO: 480835 - RNA, 19 nt, Artificial Sequence
  Description of Artificial Sequence: Synthetic oligonucleotide
  Sense strand starting at position 265 of SEQ ID NO: 317309
ggaaguggcuaggcuauau

SEQ ID NO: 480836 - RNA, 19 nt, Artificial Sequence
  Description of Artificial Sequence: Synthetic oligonucleotide
  Antisense Strand to SEQ ID NO: 480835
auauagccuagccacuucc

SEQ ID NO: 480837 - RNA, 19 nt, Artificial Sequence
  Description of Artificial Sequence: Synthetic oligonucleotide
  Sense strand starting at position 269 of SEQ ID NO: 317309
guggcuaggcuauauuacu

SEQ ID NO: 480838 - RNA, 19 nt, Artificial Sequence
  Description of Artificial Sequence: Synthetic oligonucleotide
  Antisense Strand to SEQ ID NO: 480837
aguaauauagccuagccac

SEQ ID NO: 480839 - RNA, 19 nt, Artificial Sequence
  Description of Artificial Sequence: Synthetic oligonucleotide
  Sense strand starting at position 570 of SEQ ID NO: 317309
accucaauugucuguaaua

SEQ ID NO: 480840 - RNA, 19 nt, Artificial Sequence
  Description of Artificial Sequence: Synthetic oligonucleotide
  Antisense Strand to SEQ ID NO: 480839
uauuacagacaauugaggu

SEQ ID NO: 480841 - RNA, 19 nt, Artificial Sequence
  Description of Artificial Sequence: Synthetic oligonucleotide
  Sense strand starting at position 654 of SEQ ID NO: 317309
accagagucuucuuaugaa

SEQ ID NO: 480842 - RNA, 19 nt, Artificial Sequence
  Description of Artificial Sequence: Synthetic oligonucleotide
  Antisense Strand to SEQ ID NO: 480841
uucauaagaagacucuggu

SEQ ID NO: 480843 - RNA, 19 nt, Artificial Sequence
  Description of Artificial Sequence: Synthetic oligonucleotide
  Sense strand starting at position 750 of SEQ ID NO: 317309
auaaucuugggcuaaaguu

SEQ ID NO: 480844 - RNA, 19 nt, Artificial Sequence
  Description of Artificial Sequence: Synthetic oligonucleotide
  Antisense Strand to SEQ ID NO: 480843
aacuuuagcccaagauuau

SEQ ID NO: 480845 - RNA, 19 nt, Artificial Sequence
  Description of Artificial Sequence: Synthetic oligonucleotide
  Sense strand starting at position 763 of SEQ ID NO: 317309
aaaguuguuguuuaacaag

SEQ ID NO: 480846 - RNA, 19 nt, Artificial Sequence
  Description of Artificial Sequence: Synthetic oligonucleotide
  Antisense Strand to SEQ ID NO: 480845
cuuguuaaacaacaacuuu

SEQ ID NO: 480847 - RNA, 19 nt, Artificial Sequence
  Description of Artificial Sequence: Synthetic oligonucleotide
  Sense strand starting at position 1020 of SEQ ID NO: 317309
ugcacuuaccugugagauc

SEQ ID NO: 480848 - RNA, 19 nt, Artificial Sequence
  Description of Artificial Sequence: Synthetic oligonucleotide
  Antisense Strand to SEQ ID NO: 480847
gaucucacagguaagugca

SEQ ID NO: 480849 - RNA, 19 nt, Artificial Sequence
  Description of Artificial Sequence: Synthetic oligonucleotide
  Sense strand starting at position 1029 of SEQ ID NO: 317309
cugugagauccaggguucu

SEQ ID NO: 480850 - RNA, 19 nt, Artificial Sequence
  Description of Artificial Sequence: Synthetic oligonucleotide
  Antisense Strand to SEQ ID NO: 480849
agaacccuggaucucacag

SEQ ID NO: 480851 - RNA, 19 nt, Artificial Sequence
  Description of Artificial Sequence: Synthetic oligonucleotide
  Sense strand starting at position 1104 of SEQ ID NO: 317309
gggcauaauuggccagauc

SEQ ID NO: 480852 - RNA, 19 nt, Artificial Sequence
  Description of Artificial Sequence: Synthetic oligonucleotide
  Antisense Strand to SEQ ID NO: 480851
gaucuggccaauuaugccc

SEQ ID NO: 480853 - RNA, 19 nt, Artificial Sequence
  Description of Artificial Sequence: Synthetic oligonucleotide
  Sense strand starting at position 1125 of SEQ ID NO: 317309
cagcgaugaccugacuuaa

SEQ ID NO: 480854 - RNA, 19 nt, Artificial Sequence
  Description of Artificial Sequence: Synthetic oligonucleotide
  Antisense Strand to SEQ ID NO: 480853
uuaagucaggucaucgcug

SEQ ID NO: 480855 - RNA, 19 nt, Artificial Sequence
  Description of Artificial Sequence: Synthetic oligonucleotide
  Sense strand starting at position 1511 of SEQ ID NO: 317309
gggacaugauuagcuguga

SEQ ID NO: 480856 - RNA, 19 nt, Artificial Sequence
  Description of Artificial Sequence: Synthetic oligonucleotide
  Antisense Strand to SEQ ID NO: 480855
ucacagcuaaucauguccc

SEQ ID NO: 480857 - RNA, 19 nt, Artificial Sequence
  Description of Artificial Sequence: Synthetic oligonucleotide
  Sense strand starting at position 1515 of SEQ ID NO: 317309
caugauuagcugugaggug

SEQ ID NO: 480858 - RNA, 19 nt, Artificial Sequence
  Description of Artificial Sequence: Synthetic oligonucleotide
  Antisense Strand to SEQ ID NO: 480857
caccucacagcuaaucaug

SEQ ID NO: 480859 - RNA, 19 nt, Artificial Sequence
  Description of Artificial Sequence: Synthetic oligonucleotide
  Sense strand starting at position 1549 of SEQ ID NO: 317309
gguugugaccaccacacaa

SEQ ID NO: 480860 - RNA, 19 nt, Artificial Sequence
  Description of Artificial Sequence: Synthetic oligonucleotide
  Antisense Strand to SEQ ID NO: 480859
uugugugguggucacaacc

SEQ ID NO: 480861 - RNA, 19 nt, Artificial Sequence
  Description of Artificial Sequence: Synthetic oligonucleotide
  Sense strand starting at position 1588 of SEQ ID NO: 317309
gaugaugucccguaggauc

SEQ ID NO: 480862 - RNA, 19 nt, Artificial Sequence
  Description of Artificial Sequence: Synthetic oligonucleotide
  Antisense Strand to SEQ ID NO: 480861
gauccuacgggacaucauc

SEQ ID NO: 480863 - RNA, 19 nt, Artificial Sequence
  Description of Artificial Sequence: Synthetic oligonucleotide
  Sense strand starting at position 1824 of SEQ ID NO: 317309
cccauccuugcuggguaaa

SEQ ID NO: 480864 - RNA, 19 nt, Artificial Sequence
  Description of Artificial Sequence: Synthetic oligonucleotide
  Antisense Strand to SEQ ID NO: 480863
uuuacccagcaaggauggg

SEQ ID NO: 480865 - RNA, 19 nt, Artificial Sequence
  Description of Artificial Sequence: Synthetic oligonucleotide
  Sense strand starting at position 1932 of SEQ ID NO: 317309
gaaauugggcuccgggaga

SEQ ID NO: 480866 - RNA, 19 nt, Artificial Sequence
  Description of Artificial Sequence: Synthetic oligonucleotide
  Antisense Strand to SEQ ID NO: 480865
ucucccggagcccaauuuc

SEQ ID NO: 480867 - RNA, 19 nt, Artificial Sequence
  Description of Artificial Sequence: Synthetic oligonucleotide
  Sense strand starting at position 2008 of SEQ ID NO: 317309
cggugaugacguuaaacug

SEQ ID NO: 480868 - RNA, 19 nt, Artificial Sequence
  Description of Artificial Sequence: Synthetic oligonucleotide
  Antisense Strand to SEQ ID NO: 480867
caguuuaacgucaucaccg

SEQ ID NO: 480869 - RNA, 19 nt, Artificial Sequence
  Description of Artificial Sequence: Synthetic oligonucleotide
  Sense strand starting at position 2027 of SEQ ID NO: 317309
agcggugauuggcuagaga

SEQ ID NO: 480870 - RNA, 19 nt, Artificial Sequence
  Description of Artificial Sequence: Synthetic oligonucleotide
  Antisense Strand to SEQ ID NO: 480869
ucucuagccaaucaccgcu

SEQ ID NO: 480871 - RNA, 19 nt, Artificial Sequence
  Description of Artificial Sequence: Synthetic oligonucleotide
  Sense strand starting at position 2130 of SEQ ID NO: 317309
gagaucagguguuuccuga

SEQ ID NO: 480872 - RNA, 19 nt, Artificial Sequence
  Description of Artificial Sequence: Synthetic oligonucleotide
  Antisense Strand to SEQ ID NO: 480871
ucaggaaacaccugaucuc

SEQ ID NO: 480873 - RNA, 19 nt, Artificial Sequence
  Description of Artificial Sequence: Synthetic oligonucleotide
  Sense strand starting at position 2191 of SEQ ID NO: 317309
cgcagauaaucuucucaga

SEQ ID NO: 480874 - RNA, 19 nt, Artificial Sequence
  Description of Artificial Sequence: Synthetic oligonucleotide
  Antisense Strand to SEQ ID NO: 480873
ucugagaagauuaucugcg

SEQ ID NO: 480875 - RNA, 19 nt, Artificial Sequence
  Description of Artificial Sequence: Synthetic oligonucleotide
  Sense strand starting at position 2262 of SEQ ID NO: 317309
uuugguaucuuccuuagau

SEQ ID NO: 480876 - RNA, 19 nt, Artificial Sequence
  Description of Artificial Sequence: Synthetic oligonucleotide
  Antisense Strand to SEQ ID NO: 480875
aucuaaggaagauaccaaa

SEQ ID NO: 480877 - RNA, 19 nt, Artificial Sequence
  Description of Artificial Sequence: Synthetic oligonucleotide
  Sense strand starting at position 2263 of SEQ ID NO: 317309
uugguaucuuccuuagaua

SEQ ID NO: 480878 - RNA, 19 nt, Artificial Sequence
  Description of Artificial Sequence: Synthetic oligonucleotide
  Antisense Strand to SEQ ID NO: 480877
uaucuaaggaagauaccaa

SEQ ID NO: 480879 - RNA, 19 nt, Artificial Sequence
  Description of Artificial Sequence: Synthetic oligonucleotide
  Sense strand starting at position 2264 of SEQ ID NO: 317309
ugguaucuuccuuagauau

SEQ ID NO: 480880 - RNA, 19 nt, Artificial Sequence
  Description of Artificial Sequence: Synthetic oligonucleotide
  Antisense Strand to SEQ ID NO: 480879
auaucuaaggaagauacca

SEQ ID NO: 480881 - RNA, 19 nt, Artificial Sequence
  Description of Artificial Sequence: Synthetic oligonucleotide
  Sense strand starting at position 2565 of SEQ ID NO: 317309
aggcaaugaucucccaaca

SEQ ID NO: 480882 - RNA, 19 nt, Artificial Sequence
  Description of Artificial Sequence: Synthetic oligonucleotide
  Antisense Strand to SEQ ID NO: 480881
uguugggagaucauugccu

SEQ ID NO: 480883 - RNA, 19 nt, Artificial Sequence
  Description of Artificial Sequence: Synthetic oligonucleotide
  Sense strand starting at position 2679 of SEQ ID NO: 317309
cccaguugccuauaggaua

SEQ ID NO: 480884 - RNA, 19 nt, Artificial Sequence
  Description of Artificial Sequence: Synthetic oligonucleotide
  Antisense Strand to SEQ ID NO: 480883
uauccuauaggcaacuggg

SEQ ID NO: 480885 - RNA, 19 nt, Artificial Sequence
  Description of Artificial Sequence: Synthetic oligonucleotide
  Sense strand starting at position 2861 of SEQ ID NO: 317309
aguauaaucucugugcuaa

SEQ ID NO: 480886 - RNA, 19 nt, Artificial Sequence
  Description of Artificial Sequence: Synthetic oligonucleotide
  Antisense Strand to SEQ ID NO: 480885
uuagcacagagauuauacu

SEQ ID NO: 480887 - RNA, 19 nt, Artificial Sequence
  Description of Artificial Sequence: Synthetic oligonucleotide
  Sense strand starting at position 2862 of SEQ ID NO: 317309
guauaaucucugugcuaag

SEQ ID NO: 480888 - RNA, 19 nt, Artificial Sequence
  Description of Artificial Sequence: Synthetic oligonucleotide
  Antisense Strand to SEQ ID NO: 480887
cuuagcacagagauuauac

SEQ ID NO: 480889 - RNA, 19 nt, Artificial Sequence
  Description of Artificial Sequence: Synthetic oligonucleotide
  Sense strand starting at position 2964 of SEQ ID NO: 317309
aacaguacugccugugaga

SEQ ID NO: 480890 - RNA, 19 nt, Artificial Sequence
  Description of Artificial Sequence: Synthetic oligonucleotide
  Antisense Strand to SEQ ID NO: 480889
ucucacaggcaguacuguu

SEQ ID NO: 480891 - RNA, 19 nt, Artificial Sequence
  Description of Artificial Sequence: Synthetic oligonucleotide
  Sense strand starting at position 2966 of SEQ ID NO: 317309
caguacugccugugagaga

SEQ ID NO: 480892 - RNA, 19 nt, Artificial Sequence
  Description of Artificial Sequence: Synthetic oligonucleotide
  Antisense Strand to SEQ ID NO: 480891
ucucucacaggcaguacug

SEQ ID NO: 480893 - RNA, 19 nt, Artificial Sequence
  Description of Artificial Sequence: Synthetic oligonucleotide
  Sense strand starting at position 3051 of SEQ ID NO: 317309
auugauacauucgcuaagu

SEQ ID NO: 480894 - RNA, 19 nt, Artificial Sequence
  Description of Artificial Sequence: Synthetic oligonucleotide
  Antisense Strand to SEQ ID NO: 480893
acuuagcgaauguaucaau

SEQ ID NO: 480895 - RNA, 19 nt, Artificial Sequence
  Description of Artificial Sequence: Synthetic oligonucleotide
  Sense strand starting at position 3052 of SEQ ID NO: 317309
uugauacauucgcuaagua

SEQ ID NO: 480896 - RNA, 19 nt, Artificial Sequence
  Description of Artificial Sequence: Synthetic oligonucleotide
  Antisense Strand to SEQ ID NO: 480895
uacuuagcgaauguaucaa

SEQ ID NO: 480897 - RNA, 19 nt, Artificial Sequence
  Description of Artificial Sequence: Synthetic oligonucleotide
  Sense strand starting at position 3053 of SEQ ID NO: 317309
ugauacauucgcuaaguac

SEQ ID NO: 480898 - RNA, 19 nt, Artificial Sequence
  Description of Artificial Sequence: Synthetic oligonucleotide
  Antisense Strand to SEQ ID NO: 480897
guacuuagcgaauguauca

SEQ ID NO: 480899 - RNA, 19 nt, Artificial Sequence
  Description of Artificial Sequence: Synthetic oligonucleotide
  Sense strand starting at position 3771 of SEQ ID NO: 317309
ucauauagggcaugaguuu

SEQ ID NO: 480900 - RNA, 19 nt, Artificial Sequence
  Description of Artificial Sequence: Synthetic oligonucleotide
  Antisense Strand to SEQ ID NO: 480899
aaacucaugcccuauauga

SEQ ID NO: 480901 - RNA, 19 nt, Artificial Sequence
  Description of Artificial Sequence: Synthetic oligonucleotide
  Sense strand starting at position 3906 of SEQ ID NO: 317309
acaauauguucucuggaac

SEQ ID NO: 480902 - RNA, 19 nt, Artificial Sequence
  Description of Artificial Sequence: Synthetic oligonucleotide
  Antisense Strand to SEQ ID NO: 480901
guuccagagaacauauugu

SEQ ID NO: 480903 - RNA, 19 nt, Artificial Sequence
  Description of Artificial Sequence: Synthetic oligonucleotide
  Sense strand starting at position 3909 of SEQ ID NO: 317309
auauguucucuggaacuac

SEQ ID NO: 480904 - RNA, 19 nt, Artificial Sequence
  Description of Artificial Sequence: Synthetic oligonucleotide
  Antisense Strand to SEQ ID NO: 480903
guaguuccagagaacauau

SEQ ID NO: 480905 - RNA, 19 nt, Artificial Sequence
  Description of Artificial Sequence: Synthetic oligonucleotide
  Sense strand starting at position 86 of SEQ ID NO: 317310
gccagacacuaugcucaau

SEQ ID NO: 480906 - RNA, 19 nt, Artificial Sequence
  Description of Artificial Sequence: Synthetic oligonucleotide
  Antisense Strand to SEQ ID NO: 480905
auugagcauagugucuggc

SEQ ID NO: 480907 - RNA, 19 nt, Artificial Sequence
  Description of Artificial Sequence: Synthetic oligonucleotide
  Sense strand starting at position 138 of SEQ ID NO: 317310
ucaagaggauucuuguguu

SEQ ID NO: 480908 - RNA, 19 nt, Artificial Sequence
  Description of Artificial Sequence: Synthetic oligonucleotide
  Antisense Strand to SEQ ID NO: 480907
aacacaagaauccucuuga

SEQ ID NO: 480909 - RNA, 19 nt, Artificial Sequence
  Description of Artificial Sequence: Synthetic oligonucleotide
  Sense strand starting at position 142 of SEQ ID NO: 317310
gaggauucuuguguucuua

SEQ ID NO: 480910 - RNA, 19 nt, Artificial Sequence
  Description of Artificial Sequence: Synthetic oligonucleotide
  Antisense Strand to SEQ ID NO: 480909
uaagaacacaagaauccuc

SEQ ID NO: 480911 - RNA, 19 nt, Artificial Sequence
  Description of Artificial Sequence: Synthetic oligonucleotide
  Sense strand starting at position 203 of SEQ ID NO: 317310
ggaaacuugcucgagguca

SEQ ID NO: 480912 - RNA, 19 nt, Artificial Sequence
  Description of Artificial Sequence: Synthetic oligonucleotide
  Antisense Strand to SEQ ID NO: 480911
ugaccucgagcaaguuucc

SEQ ID NO: 480913 - RNA, 19 nt, Artificial Sequence
  Description of Artificial Sequence: Synthetic oligonucleotide
  Sense strand starting at position 268 of SEQ ID NO: 317310
gaggcugacugaguucuua

SEQ ID NO: 480914 - RNA, 19 nt, Artificial Sequence
  Description of Artificial Sequence: Synthetic oligonucleotide
  Antisense Strand to SEQ ID NO: 480913
uaagaacucagucagccuc

SEQ ID NO: 480915 - RNA, 19 nt, Artificial Sequence
  Description of Artificial Sequence: Synthetic oligonucleotide
  Sense strand starting at position 567 of SEQ ID NO: 317310
guccauacuccuuagcaca

SEQ ID NO: 480916 - RNA, 19 nt, Artificial Sequence
  Description of Artificial Sequence: Synthetic oligonucleotide
  Antisense Strand to SEQ ID NO: 480915
ugugcuaaggaguauggac

SEQ ID NO: 480917 - RNA, 19 nt, Artificial Sequence
  Description of Artificial Sequence: Synthetic oligonucleotide
  Sense strand starting at position 697 of SEQ ID NO: 317310
gccguauugcaagucuuua

SEQ ID NO: 480918 - RNA, 19 nt, Artificial Sequence
  Description of Artificial Sequence: Synthetic oligonucleotide
  Antisense Strand to SEQ ID NO: 480917
uaaagacuugcaauacggc

SEQ ID NO: 480919 - RNA, 19 nt, Artificial Sequence
  Description of Artificial Sequence: Synthetic oligonucleotide
  Sense strand starting at position 874 of SEQ ID NO: 317310
uguuuaacacaauguauca

SEQ ID NO: 480920 - RNA, 19 nt, Artificial Sequence
  Description of Artificial Sequence: Synthetic oligonucleotide
  Antisense Strand to SEQ ID NO: 480919
ugauacauuguguuaaaca

SEQ ID NO: 480921 - RNA, 19 nt, Artificial Sequence
  Description of Artificial Sequence: Synthetic oligonucleotide
  Sense strand starting at position 1021 of SEQ ID NO: 317310
aauuaaauucuuggaggua

SEQ ID NO: 480922 - RNA, 19 nt, Artificial Sequence
  Description of Artificial Sequence: Synthetic oligonucleotide
  Antisense Strand to SEQ ID NO: 480921
uaccuccaagaauuuaauu

SEQ ID NO: 480923 - RNA, 19 nt, Artificial Sequence
  Description of Artificial Sequence: Synthetic oligonucleotide
  Sense strand starting at position 1064 of SEQ ID NO: 317310
gcagcuguucuuccauagu

SEQ ID NO: 480924 - RNA, 19 nt, Artificial Sequence
  Description of Artificial Sequence: Synthetic oligonucleotide
  Antisense Strand to SEQ ID NO: 480923
acuauggaagaacagcugc

SEQ ID NO: 480925 - RNA, 19 nt, Artificial Sequence
  Description of Artificial Sequence: Synthetic oligonucleotide
  Sense strand starting at position 1081 of SEQ ID NO: 317310
gugucugguacauaauaga

SEQ ID NO: 480926 - RNA, 19 nt, Artificial Sequence
  Description of Artificial Sequence: Synthetic oligonucleotide
  Antisense Strand to SEQ ID NO: 480925
ucuauuauguaccagacac

SEQ ID NO: 480927 - RNA, 19 nt, Artificial Sequence
  Description of Artificial Sequence: Synthetic oligonucleotide
  Sense strand starting at position 1247 of SEQ ID NO: 317310
uagaauucuguguaagcua

SEQ ID NO: 480928 - RNA, 19 nt, Artificial Sequence
  Description of Artificial Sequence: Synthetic oligonucleotide
  Antisense Strand to SEQ ID NO: 480927
uagcuuacacagaauucua

SEQ ID NO: 480929 - RNA, 19 nt, Artificial Sequence
  Description of Artificial Sequence: Synthetic oligonucleotide
  Sense strand starting at position 1278 of SEQ ID NO: 317310
cacgguucugcuuaaauau

SEQ ID NO: 480930 - RNA, 19 nt, Artificial Sequence
  Description of Artificial Sequence: Synthetic oligonucleotide
  Antisense Strand to SEQ ID NO: 480929
auauuuaagcagaaccgug

SEQ ID NO: 480931 - RNA, 19 nt, Artificial Sequence
  Description of Artificial Sequence: Synthetic oligonucleotide
  Sense strand starting at position 1308 of SEQ ID NO: 317310
cacguauaacaucaagguu

SEQ ID NO: 480932 - RNA, 19 nt, Artificial Sequence
  Description of Artificial Sequence: Synthetic oligonucleotide
  Antisense Strand to SEQ ID NO: 480931
aaccuugauguuauacgug

SEQ ID NO: 480933 - RNA, 19 nt, Artificial Sequence
  Description of Artificial Sequence: Synthetic oligonucleotide
  Sense strand starting at position 1407 of SEQ ID NO: 317310
caacgacgacgauauuaaa

SEQ ID NO: 480934 - RNA, 19 nt, Artificial Sequence
  Description of Artificial Sequence: Synthetic oligonucleotide
  Antisense Strand to SEQ ID NO: 480933
uuuaauaucgucgucguug

SEQ ID NO: 480935 - RNA, 19 nt, Artificial Sequence
  Description of Artificial Sequence: Synthetic oligonucleotide
  Sense strand starting at position 1478 of SEQ ID NO: 317310
agucgauuucugcagccau

SEQ ID NO: 480936 - RNA, 19 nt, Artificial Sequence
  Description of Artificial Sequence: Synthetic oligonucleotide
  Antisense Strand to SEQ ID NO: 480935
auggcugcagaaaucgacu

SEQ ID NO: 480937 - RNA, 19 nt, Artificial Sequence
  Description of Artificial Sequence: Synthetic oligonucleotide
  Sense strand starting at position 2439 of SEQ ID NO: 317310
cuuugugggucuuuagaca

SEQ ID NO: 480938 - RNA, 19 nt, Artificial Sequence
  Description of Artificial Sequence: Synthetic oligonucleotide
  Antisense Strand to SEQ ID NO: 480937
ugucuaaagacccacaaag

SEQ ID NO: 480939 - RNA, 19 nt, Artificial Sequence
  Description of Artificial Sequence: Synthetic oligonucleotide
  Sense strand starting at position 2462 of SEQ ID NO: 317310
agacaacuguuguuuaaau

SEQ ID NO: 480940 - RNA, 19 nt, Artificial Sequence
  Description of Artificial Sequence: Synthetic oligonucleotide
  Antisense Strand to SEQ ID NO: 480939
auuuaaacaacaguugucu

SEQ ID NO: 480941 - RNA, 19 nt, Artificial Sequence
  Description of Artificial Sequence: Synthetic oligonucleotide
  Sense strand starting at position 2823 of SEQ ID NO: 317310
acuaaacaggcaugucaua

SEQ ID NO: 480942 - RNA, 19 nt, Artificial Sequence
  Description of Artificial Sequence: Synthetic oligonucleotide
  Antisense Strand to SEQ ID NO: 480941
uaugacaugccuguuuagu

SEQ ID NO: 480943 - RNA, 19 nt, Artificial Sequence
  Description of Artificial Sequence: Synthetic oligonucleotide
  Sense strand starting at position 2916 of SEQ ID NO: 317310
aaaguaaccuuagcgauau

SEQ ID NO: 480944 - RNA, 19 nt, Artificial Sequence
  Description of Artificial Sequence: Synthetic oligonucleotide
  Antisense Strand to SEQ ID NO: 480943
auaucgcuaagguuacuuu

SEQ ID NO: 480945 - RNA, 19 nt, Artificial Sequence
  Description of Artificial Sequence: Synthetic oligonucleotide
  Sense strand starting at position 2980 of SEQ ID NO: 317310
aucugaaggccuuacucaa

SEQ ID NO: 480946 - RNA, 19 nt, Artificial Sequence
  Description of Artificial Sequence: Synthetic oligonucleotide
  Antisense Strand to SEQ ID NO: 480945
uugaguaaggccuucagau

SEQ ID NO: 480947 - RNA, 19 nt, Artificial Sequence
  Description of Artificial Sequence: Synthetic oligonucleotide
  Sense strand starting at position 3045 of SEQ ID NO: 317310
cuguuaaauauggaugugu

SEQ ID NO: 480948 - RNA, 19 nt, Artificial Sequence
  Description of Artificial Sequence: Synthetic oligonucleotide
  Antisense Strand to SEQ ID NO: 480947
acacauccauauuuaacag

SEQ ID NO: 480949 - RNA, 19 nt, Artificial Sequence
  Description of Artificial Sequence: Synthetic oligonucleotide
  Sense strand starting at position 3047 of SEQ ID NO: 317310
guuaaauauggauguguag

SEQ ID NO: 480950 - RNA, 19 nt, Artificial Sequence
  Description of Artificial Sequence: Synthetic oligonucleotide
  Antisense Strand to SEQ ID NO: 480949
cuacacauccauauuuaac

SEQ ID NO: 480951 - RNA, 19 nt, Artificial Sequence
  Description of Artificial Sequence: Synthetic oligonucleotide
  Sense strand starting at position 3054 of SEQ ID NO: 317310
auggauguguagcuuaaua

SEQ ID NO: 480952 - RNA, 19 nt, Artificial Sequence
  Description of Artificial Sequence: Synthetic oligonucleotide
  Antisense Strand to SEQ ID NO: 480951
uauuaagcuacacauccau

SEQ ID NO: 480953 - RNA, 19 nt, Artificial Sequence
  Description of Artificial Sequence: Synthetic oligonucleotide
  Sense strand starting at position 3056 of SEQ ID NO: 317310
ggauguguagcuuaauaau

SEQ ID NO: 480954 - RNA, 19 nt, Artificial Sequence
  Description of Artificial Sequence: Synthetic oligonucleotide
  Antisense Strand to SEQ ID NO: 480953
auuauuaagcuacacaucc

SEQ ID NO: 480955 - RNA, 19 nt, Artificial Sequence
  Description of Artificial Sequence: Synthetic oligonucleotide
  Sense strand starting at position 3062 of SEQ ID NO: 317310
guagcuuaauaaucauuga

SEQ ID NO: 480956 - RNA, 19 nt, Artificial Sequence
  Description of Artificial Sequence: Synthetic oligonucleotide
  Antisense Strand to SEQ ID NO: 480955
ucaaugauuauuaagcuac

SEQ ID NO: 480957 - RNA, 19 nt, Artificial Sequence
  Description of Artificial Sequence: Synthetic oligonucleotide
  Sense strand starting at position 3094 of SEQ ID NO: 317310
agcuuugaguuggugauaa

SEQ ID NO: 480958 - RNA, 19 nt, Artificial Sequence
  Description of Artificial Sequence: Synthetic oligonucleotide
  Antisense Strand to SEQ ID NO: 480957
uuaucaccaacucaaagcu

SEQ ID NO: 480959 - RNA, 19 nt, Artificial Sequence
  Description of Artificial Sequence: Synthetic oligonucleotide
  Sense strand starting at position 3096 of SEQ ID NO: 317310
cuuugaguuggugauaauu

SEQ ID NO: 480960 - RNA, 19 nt, Artificial Sequence
  Description of Artificial Sequence: Synthetic oligonucleotide
  Antisense Strand to SEQ ID NO: 480959
aauuaucaccaacucaaag

SEQ ID NO: 480961 - RNA, 19 nt, Artificial Sequence
  Description of Artificial Sequence: Synthetic oligonucleotide
  Sense strand starting at position 3102 of SEQ ID NO: 317310
guuggugauaauugaacuu

SEQ ID NO: 480962 - RNA, 19 nt, Artificial Sequence
  Description of Artificial Sequence: Synthetic oligonucleotide
  Antisense Strand to SEQ ID NO: 480961
aaguucaauuaucaccaac

SEQ ID NO: 480963 - RNA, 19 nt, Artificial Sequence
  Description of Artificial Sequence: Synthetic oligonucleotide
  Sense strand starting at position 3136 of SEQ ID NO: 317310
agcuauaacguuuacacaa

SEQ ID NO: 480964 - RNA, 19 nt, Artificial Sequence
  Description of Artificial Sequence: Synthetic oligonucleotide
  Antisense Strand to SEQ ID NO: 480963
uuguguaaacguuauagcu

SEQ ID NO: 480965 - RNA, 19 nt, Artificial Sequence
  Description of Artificial Sequence: Synthetic oligonucleotide
  Sense strand starting at position 3265 of SEQ ID NO: 317310
caaggacuugcuuguaacu

SEQ ID NO: 480966 - RNA, 19 nt, Artificial Sequence
  Description of Artificial Sequence: Synthetic oligonucleotide
  Antisense Strand to SEQ ID NO: 480965
aguuacaagcaaguccuug

SEQ ID NO: 480967 - RNA, 19 nt, Artificial Sequence
  Description of Artificial Sequence: Synthetic oligonucleotide
  Sense strand starting at position 3292 of SEQ ID NO: 317310
auuugaaccuuguauauug

SEQ ID NO: 480968 - RNA, 19 nt, Artificial Sequence
  Description of Artificial Sequence: Synthetic oligonucleotide
  Antisense Strand to SEQ ID NO: 480967
caauauacaagguucaaau

SEQ ID NO: 480969 - RNA, 19 nt, Artificial Sequence
  Description of Artificial Sequence: Synthetic oligonucleotide
  Sense strand starting at position 3311 of SEQ ID NO: 317310
ucguauuucuacuuggcau

SEQ ID NO: 480970 - RNA, 19 nt, Artificial Sequence
  Description of Artificial Sequence: Synthetic oligonucleotide
  Antisense Strand to SEQ ID NO: 480969
augccaaguagaaauacga

SEQ ID NO: 480971 - RNA, 19 nt, Artificial Sequence
  Description of Artificial Sequence: Synthetic oligonucleotide
  Sense strand starting at position 3313 of SEQ ID NO: 317310
guauuucuacuuggcauca

SEQ ID NO: 480972 - RNA, 19 nt, Artificial Sequence
  Description of Artificial Sequence: Synthetic oligonucleotide
  Antisense Strand to SEQ ID NO: 480971
ugaugccaaguagaaauac

SEQ ID NO: 480973 - RNA, 19 nt, Artificial Sequence
  Description of Artificial Sequence: Synthetic oligonucleotide
  Sense strand starting at position 3393 of SEQ ID NO: 317310
cuggcuauaacugaugagu

SEQ ID NO: 480974 - RNA, 19 nt, Artificial Sequence
  Description of Artificial Sequence: Synthetic oligonucleotide
  Antisense Strand to SEQ ID NO: 480973
acucaucaguuauagccag

SEQ ID NO: 480975 - RNA, 19 nt, Artificial Sequence
  Description of Artificial Sequence: Synthetic oligonucleotide
  Sense strand starting at position 3396 of SEQ ID NO: 317310
gcuauaacugaugaguggu

SEQ ID NO: 480976 - RNA, 19 nt, Artificial Sequence
  Description of Artificial Sequence: Synthetic oligonucleotide
  Antisense Strand to SEQ ID NO: 480975
accacucaucaguuauagc

SEQ ID NO: 480977 - RNA, 19 nt, Artificial Sequence
  Description of Artificial Sequence: Synthetic oligonucleotide
  Sense strand starting at position 3399 of SEQ ID NO: 317310
auaacugaugagugguauu

SEQ ID NO: 480978 - RNA, 19 nt, Artificial Sequence
  Description of Artificial Sequence: Synthetic oligonucleotide
  Antisense Strand to SEQ ID NO: 480977
aauaccacucaucaguuau

SEQ ID NO: 480979 - RNA, 19 nt, Artificial Sequence
  Description of Artificial Sequence: Synthetic oligonucleotide
  Sense strand starting at position 3521 of SEQ ID NO: 317310
uguguuugugguuacaaga

SEQ ID NO: 480980 - RNA, 19 nt, Artificial Sequence
  Description of Artificial Sequence: Synthetic oligonucleotide
  Antisense Strand to SEQ ID NO: 480979
ucuuguaaccacaaacaca

SEQ ID NO: 480981 - RNA, 19 nt, Artificial Sequence
  Description of Artificial Sequence: Synthetic oligonucleotide
  Sense strand starting at position 3752 of SEQ ID NO: 317310
gucuccaggcuccaucaua

SEQ ID NO: 480982 - RNA, 19 nt, Artificial Sequence
  Description of Artificial Sequence: Synthetic oligonucleotide
  Antisense Strand to SEQ ID NO: 480981
uaugauggagccuggagac

SEQ ID NO: 480983 - RNA, 19 nt, Artificial Sequence
  Description of Artificial Sequence: Synthetic oligonucleotide
  Sense strand starting at position 3963 of SEQ ID NO: 317310
ccuaaaguuguauagauug

SEQ ID NO: 480984 - RNA, 19 nt, Artificial Sequence
  Description of Artificial Sequence: Synthetic oligonucleotide
  Antisense Strand to SEQ ID NO: 480983
caaucuauacaacuuuagg

SEQ ID NO: 480985 - RNA, 19 nt, Artificial Sequence
  Description of Artificial Sequence: Synthetic oligonucleotide
  Sense strand starting at position 74 of SEQ ID NO: 317311
auacuaguuccugagucca

SEQ ID NO: 480986 - RNA, 19 nt, Artificial Sequence
  Description of Artificial Sequence: Synthetic oligonucleotide
  Antisense Strand to SEQ ID NO: 480985
uggacucaggaacuaguau

SEQ ID NO: 480987 - RNA, 19 nt, Artificial Sequence
  Description of Artificial Sequence: Synthetic oligonucleotide
  Sense strand starting at position 146 of SEQ ID NO: 317311
ugugacucagucuaacaaa

SEQ ID NO: 480988 - RNA, 19 nt, Artificial Sequence
  Description of Artificial Sequence: Synthetic oligonucleotide
  Antisense Strand to SEQ ID NO: 480987
uuuguuagacugagucaca

SEQ ID NO: 480989 - RNA, 19 nt, Artificial Sequence
  Description of Artificial Sequence: Synthetic oligonucleotide
  Sense strand starting at position 393 of SEQ ID NO: 317311
cuccacuggaagugugaaa

SEQ ID NO: 480990 - RNA, 19 nt, Artificial Sequence
  Description of Artificial Sequence: Synthetic oligonucleotide
  Antisense Strand to SEQ ID NO: 480989
uuucacacuuccaguggag

SEQ ID NO: 480991 - RNA, 19 nt, Artificial Sequence
  Description of Artificial Sequence: Synthetic oligonucleotide
  Sense strand starting at position 641 of SEQ ID NO: 317311
agcuaagaaacauggguuu

SEQ ID NO: 480992 - RNA, 19 nt, Artificial Sequence
  Description of Artificial Sequence: Synthetic oligonucleotide
  Antisense Strand to SEQ ID NO: 480991
aaacccauguuucuuagcu

SEQ ID NO: 480993 - RNA, 19 nt, Artificial Sequence
  Description of Artificial Sequence: Synthetic oligonucleotide
  Sense strand starting at position 956 of SEQ ID NO: 317311
ggcuguaugaaagagcaau

SEQ ID NO: 480994 - RNA, 19 nt, Artificial Sequence
  Description of Artificial Sequence: Synthetic oligonucleotide
  Antisense Strand to SEQ ID NO: 480993
auugcucuuucauacagcc

SEQ ID NO: 480995 - RNA, 19 nt, Artificial Sequence
  Description of Artificial Sequence: Synthetic oligonucleotide
  Sense strand starting at position 1059 of SEQ ID NO: 317311
cuaugauugcgcuaaagga

SEQ ID NO: 480996 - RNA, 19 nt, Artificial Sequence
  Description of Artificial Sequence: Synthetic oligonucleotide
  Antisense Strand to SEQ ID NO: 480995
uccuuuagcgcaaucauag

SEQ ID NO: 480997 - RNA, 19 nt, Artificial Sequence
  Description of Artificial Sequence: Synthetic oligonucleotide
  Sense strand starting at position 1207 of SEQ ID NO: 317311
uguugaaugaaccaugguu

SEQ ID NO: 480998 - RNA, 19 nt, Artificial Sequence
  Description of Artificial Sequence: Synthetic oligonucleotide
  Antisense Strand to SEQ ID NO: 480997
aaccaugguucauucaaca

SEQ ID NO: 480999 - RNA, 19 nt, Artificial Sequence
  Description of Artificial Sequence: Synthetic oligonucleotide
  Sense strand starting at position 1209 of SEQ ID NO: 317311
uugaaugaaccaugguuau

SEQ ID NO: 481000 - RNA, 19 nt, Artificial Sequence
  Description of Artificial Sequence: Synthetic oligonucleotide
  Antisense Strand to SEQ ID NO: 480999
auaaccaugguucauucaa

SEQ ID NO: 481001 - RNA, 19 nt, Artificial Sequence
  Description of Artificial Sequence: Synthetic oligonucleotide
  Sense strand starting at position 1632 of SEQ ID NO: 317311
augaguaugcuuuaucauu

SEQ ID NO: 481002 - RNA, 19 nt, Artificial Sequence
  Description of Artificial Sequence: Synthetic oligonucleotide
  Antisense Strand to SEQ ID NO: 481001
aaugauaaagcauacucau

SEQ ID NO: 481003 - RNA, 19 nt, Artificial Sequence
  Description of Artificial Sequence: Synthetic oligonucleotide
  Sense strand starting at position 1697 of SEQ ID NO: 317311
uugaauguauguuugagaa

SEQ ID NO: 481004 - RNA, 19 nt, Artificial Sequence
  Description of Artificial Sequence: Synthetic oligonucleotide
  Antisense Strand to SEQ ID NO: 481003
uucucaaacauacauucaa

SEQ ID NO: 481005 - RNA, 19 nt, Artificial Sequence
  Description of Artificial Sequence: Synthetic oligonucleotide
  Sense strand starting at position 2109 of SEQ ID NO: 317311
ggcugaauugcucaaggaa

SEQ ID NO: 481006 - RNA, 19 nt, Artificial Sequence
  Description of Artificial Sequence: Synthetic oligonucleotide
  Antisense Strand to SEQ ID NO: 481005
uuccuugagcaauucagcc

SEQ ID NO: 481007 - RNA, 19 nt, Artificial Sequence
  Description of Artificial Sequence: Synthetic oligonucleotide
  Sense strand starting at position 2112 of SEQ ID NO: 317311
ugaauugcucaaggaaauu

SEQ ID NO: 481008 - RNA, 19 nt, Artificial Sequence
  Description of Artificial Sequence: Synthetic oligonucleotide
  Antisense Strand to SEQ ID NO: 481007
aauuuccuugagcaauuca

SEQ ID NO: 481009 - RNA, 19 nt, Artificial Sequence
  Description of Artificial Sequence: Synthetic oligonucleotide
  Sense strand starting at position 2192 of SEQ ID NO: 317311
uuuagauacccacgguaaa

SEQ ID NO: 481010 - RNA, 19 nt, Artificial Sequence
  Description of Artificial Sequence: Synthetic oligonucleotide
  Antisense Strand to SEQ ID NO: 481009
uuuaccguggguaucuaaa

SEQ ID NO: 481011 - RNA, 19 nt, Artificial Sequence
  Description of Artificial Sequence: Synthetic oligonucleotide
  Sense strand starting at position 2203 of SEQ ID NO: 317311
acgguaaacuucucaagga

SEQ ID NO: 481012 - RNA, 19 nt, Artificial Sequence
  Description of Artificial Sequence: Synthetic oligonucleotide
  Antisense Strand to SEQ ID NO: 481011
uccuugagaaguuuaccgu

SEQ ID NO: 481013 - RNA, 19 nt, Artificial Sequence
  Description of Artificial Sequence: Synthetic oligonucleotide
  Sense strand starting at position 2263 of SEQ ID NO: 317311
cccucagagccucaauguu

SEQ ID NO: 481014 - RNA, 19 nt, Artificial Sequence
  Description of Artificial Sequence: Synthetic oligonucleotide
  Antisense Strand to SEQ ID NO: 481013
aacauugaggcucugaggg

SEQ ID NO: 481015 - RNA, 19 nt, Artificial Sequence
  Description of Artificial Sequence: Synthetic oligonucleotide
  Sense strand starting at position 2277 of SEQ ID NO: 317311
auguucuaucuguaauaug

SEQ ID NO: 481016 - RNA, 19 nt, Artificial Sequence
  Description of Artificial Sequence: Synthetic oligonucleotide
  Antisense Strand to SEQ ID NO: 481015
cauauuacagauagaacau

SEQ ID NO: 481017 - RNA, 19 nt, Artificial Sequence
  Description of Artificial Sequence: Synthetic oligonucleotide
  Sense strand starting at position 2295 of SEQ ID NO: 317311
gaggauaagucuguuguga

SEQ ID NO: 481018 - RNA, 19 nt, Artificial Sequence
  Description of Artificial Sequence: Synthetic oligonucleotide
  Antisense Strand to SEQ ID NO: 481017
ucacaacagacuuauccuc

SEQ ID NO: 481019 - RNA, 19 nt, Artificial Sequence
  Description of Artificial Sequence: Synthetic oligonucleotide
  Sense strand starting at position 2321 of SEQ ID NO: 317311
auggaaacugccugguaca

SEQ ID NO: 481020 - RNA, 19 nt, Artificial Sequence
  Description of Artificial Sequence: Synthetic oligonucleotide
  Antisense Strand to SEQ ID NO: 481019
uguaccaggcaguuuccau

SEQ ID NO: 481021 - RNA, 19 nt, Artificial Sequence
  Description of Artificial Sequence: Synthetic oligonucleotide
  Sense strand starting at position 2332 of SEQ ID NO: 317311
cugguacauguaugaagaa

SEQ ID NO: 481022 - RNA, 19 nt, Artificial Sequence
  Description of Artificial Sequence: Synthetic oligonucleotide
  Antisense Strand to SEQ ID NO: 481021
uucuucauacauguaccag

SEQ ID NO: 481023 - RNA, 19 nt, Artificial Sequence
  Description of Artificial Sequence: Synthetic oligonucleotide
  Sense strand starting at position 2592 of SEQ ID NO: 317311
aggagagauguuggcuuca

SEQ ID NO: 481024 - RNA, 19 nt, Artificial Sequence
  Description of Artificial Sequence: Synthetic oligonucleotide
  Antisense Strand to SEQ ID NO: 481023
ugaagccaacaucucuccu

SEQ ID NO: 481025 - RNA, 19 nt, Artificial Sequence
  Description of Artificial Sequence: Synthetic oligonucleotide
  Sense strand starting at position 2632 of SEQ ID NO: 317311
uuuguuugaggaggaagua

SEQ ID NO: 481026 - RNA, 19 nt, Artificial Sequence
  Description of Artificial Sequence: Synthetic oligonucleotide
  Antisense Strand to SEQ ID NO: 481025
uacuuccuccucaaacaaa

SEQ ID NO: 481027 - RNA, 19 nt, Artificial Sequence
  Description of Artificial Sequence: Synthetic oligonucleotide
  Sense strand starting at position 3149 of SEQ ID NO: 317311
ugagaugcaugaucaauga

SEQ ID NO: 481028 - RNA, 19 nt, Artificial Sequence
  Description of Artificial Sequence: Synthetic oligonucleotide
  Antisense Strand to SEQ ID NO: 481027
ucauugaucaugcaucuca

SEQ ID NO: 481029 - RNA, 19 nt, Artificial Sequence
  Description of Artificial Sequence: Synthetic oligonucleotide
  Sense strand starting at position 3207 of SEQ ID NO: 317311
ugcuuucucagugaaggag

SEQ ID NO: 481030 - RNA, 19 nt, Artificial Sequence
  Description of Artificial Sequence: Synthetic oligonucleotide
  Antisense Strand to SEQ ID NO: 481029
cuccuucacugagaaagca

SEQ ID NO: 481031 - RNA, 19 nt, Artificial Sequence
  Description of Artificial Sequence: Synthetic oligonucleotide
  Sense strand starting at position 3210 of SEQ ID NO: 317311
uuucucagugaaggaguau

SEQ ID NO: 481032 - RNA, 19 nt, Artificial Sequence
  Description of Artificial Sequence: Synthetic oligonucleotide
  Antisense Strand to SEQ ID NO: 481031
auacuccuucacugagaaa

SEQ ID NO: 481033 - RNA, 19 nt, Artificial Sequence
  Description of Artificial Sequence: Synthetic oligonucleotide
  Sense strand starting at position 3279 of SEQ ID NO: 317311
guaugagauacagguaaau

SEQ ID NO: 481034 - RNA, 19 nt, Artificial Sequence
  Description of Artificial Sequence: Synthetic oligonucleotide
  Antisense Strand to SEQ ID NO: 481033
auuuaccuguaucucauac

SEQ ID NO: 481035 - RNA, 19 nt, Artificial Sequence
  Description of Artificial Sequence: Synthetic oligonucleotide
  Sense strand starting at position 3332 of SEQ ID NO: 317311
auaucuaagagugguuuga

SEQ ID NO: 481036 - RNA, 19 nt, Artificial Sequence
  Description of Artificial Sequence: Synthetic oligonucleotide
  Antisense Strand to SEQ ID NO: 481035
ucaaaccacucuuagauau

SEQ ID NO: 481037 - RNA, 19 nt, Artificial Sequence
  Description of Artificial Sequence: Synthetic oligonucleotide
  Sense strand starting at position 3334 of SEQ ID NO: 317311
aucuaagagugguuugaau

SEQ ID NO: 481038 - RNA, 19 nt, Artificial Sequence
  Description of Artificial Sequence: Synthetic oligonucleotide
  Antisense Strand to SEQ ID NO: 481037
auucaaaccacucuuagau

SEQ ID NO: 481039 - RNA, 19 nt, Artificial Sequence
  Description of Artificial Sequence: Synthetic oligonucleotide
  Sense strand starting at position 3345 of SEQ ID NO: 317311
guuugaaugcuagauugug

SEQ ID NO: 481040 - RNA, 19 nt, Artificial Sequence
  Description of Artificial Sequence: Synthetic oligonucleotide
  Antisense Strand to SEQ ID NO: 481039
cacaaucuagcauucaaac

SEQ ID NO: 481041 - RNA, 19 nt, Artificial Sequence
  Description of Artificial Sequence: Synthetic oligonucleotide
  Sense strand starting at position 3450 of SEQ ID NO: 317311
acauuagcccaugaugcaa

SEQ ID NO: 481042 - RNA, 19 nt, Artificial Sequence
  Description of Artificial Sequence: Synthetic oligonucleotide
  Antisense Strand to SEQ ID NO: 481041
uugcaucaugggcuaaugu

SEQ ID NO: 481043 - RNA, 19 nt, Artificial Sequence
  Description of Artificial Sequence: Synthetic oligonucleotide
  Sense strand starting at position 3514 of SEQ ID NO: 317311
ccagcuugaucaucagaau

SEQ ID NO: 481044 - RNA, 19 nt, Artificial Sequence
  Description of Artificial Sequence: Synthetic oligonucleotide
  Antisense Strand to SEQ ID NO: 481043
auucugaugaucaagcugg

SEQ ID NO: 481045 - RNA, 19 nt, Artificial Sequence
  Description of Artificial Sequence: Synthetic oligonucleotide
  Sense strand starting at position 3666 of SEQ ID NO: 317311
aagugagaccucuguacaa

SEQ ID NO: 481046 - RNA, 19 nt, Artificial Sequence
  Description of Artificial Sequence: Synthetic oligonucleotide
  Antisense Strand to SEQ ID NO: 481045
uuguacagaggucucacuu

SEQ ID NO: 481047 - RNA, 19 nt, Artificial Sequence
  Description of Artificial Sequence: Synthetic oligonucleotide
  Sense strand starting at position 3668 of SEQ ID NO: 317311
gugagaccucuguacaaau

SEQ ID NO: 481048 - RNA, 19 nt, Artificial Sequence
  Description of Artificial Sequence: Synthetic oligonucleotide
  Antisense Strand to SEQ ID NO: 481047
auuuguacagaggucucac

SEQ ID NO: 481049 - RNA, 19 nt, Artificial Sequence
  Description of Artificial Sequence: Synthetic oligonucleotide
  Sense strand starting at position 3670 of SEQ ID NO: 317311
gagaccucuguacaaaugu

SEQ ID NO: 481050 - RNA, 19 nt, Artificial Sequence
  Description of Artificial Sequence: Synthetic oligonucleotide
  Antisense Strand to SEQ ID NO: 481049
acauuuguacagaggucuc

SEQ ID NO: 481051 - RNA, 19 nt, Artificial Sequence
  Description of Artificial Sequence: Synthetic oligonucleotide
  Sense strand starting at position 3679 of SEQ ID NO: 317311
guacaaauguaguuaugga

SEQ ID NO: 481052 - RNA, 19 nt, Artificial Sequence
  Description of Artificial Sequence: Synthetic oligonucleotide
  Antisense Strand to SEQ ID NO: 481051
uccauaacuacauuuguac

SEQ ID NO: 481053 - RNA, 19 nt, Artificial Sequence
  Description of Artificial Sequence: Synthetic oligonucleotide
  Sense strand starting at position 3715 of SEQ ID NO: 317311
ugagguccuugauuaguua

SEQ ID NO: 481054 - RNA, 19 nt, Artificial Sequence
  Description of Artificial Sequence: Synthetic oligonucleotide
  Antisense Strand to SEQ ID NO: 481053
uaacuaaucaaggaccuca

SEQ ID NO: 481055 - RNA, 19 nt, Artificial Sequence
  Description of Artificial Sequence: Synthetic oligonucleotide
  Sense strand starting at position 3803 of SEQ ID NO: 317311
cucuguauauaaucaugga

SEQ ID NO: 481056 - RNA, 19 nt, Artificial Sequence
  Description of Artificial Sequence: Synthetic oligonucleotide
  Antisense Strand to SEQ ID NO: 481055
uccaugauuauauacagag

SEQ ID NO: 481057 - RNA, 19 nt, Artificial Sequence
  Description of Artificial Sequence: Synthetic oligonucleotide
  Sense strand starting at position 3850 of SEQ ID NO: 317311
ucucuuggcugauccauuu

SEQ ID NO: 481058 - RNA, 19 nt, Artificial Sequence
  Description of Artificial Sequence: Synthetic oligonucleotide
  Antisense Strand to SEQ ID NO: 481057
aaauggaucagccaagaga

SEQ ID NO: 481059 - RNA, 19 nt, Artificial Sequence
  Description of Artificial Sequence: Synthetic oligonucleotide
  Sense strand starting at position 3870 of SEQ ID NO: 317311
cugucaguccuagaaauaa

SEQ ID NO: 481060 - RNA, 19 nt, Artificial Sequence
  Description of Artificial Sequence: Synthetic oligonucleotide
  Antisense Strand to SEQ ID NO: 481059
uuauuucuaggacugacag

SEQ ID NO: 481061 - RNA, 19 nt, Artificial Sequence
  Description of Artificial Sequence: Synthetic oligonucleotide
  Sense strand starting at position 3935 of SEQ ID NO: 317311
acagguaggcacuaauauu

SEQ ID NO: 481062 - RNA, 19 nt, Artificial Sequence
  Description of Artificial Sequence: Synthetic oligonucleotide
  Antisense Strand to SEQ ID NO: 481061
aauauuagugccuaccugu

SEQ ID NO: 481063 - RNA, 19 nt, Artificial Sequence
  Description of Artificial Sequence: Synthetic oligonucleotide
  Sense strand starting at position 3980 of SEQ ID NO: 317311
gaggcauguagagaguuua

SEQ ID NO: 481064 - RNA, 19 nt, Artificial Sequence
  Description of Artificial Sequence: Synthetic oligonucleotide
  Antisense Strand to SEQ ID NO: 481063
uaaacucucuacaugccuc

SEQ ID NO: 481065 - RNA, 19 nt, Artificial Sequence
  Description of Artificial Sequence: Synthetic oligonucleotide
  Sense strand starting at position 121 of SEQ ID NO: 317312
ggauaauaaccguacguau

SEQ ID NO: 481066 - RNA, 19 nt, Artificial Sequence
  Description of Artificial Sequence: Synthetic oligonucleotide
  Antisense Strand to SEQ ID NO: 481065
auacguacgguuauuaucc

SEQ ID NO: 481067 - RNA, 19 nt, Artificial Sequence
  Description of Artificial Sequence: Synthetic oligonucleotide
  Sense strand starting at position 152 of SEQ ID NO: 317312
uugugagaaugaguggaua

SEQ ID NO: 481068 - RNA, 19 nt, Artificial Sequence
  Description of Artificial Sequence: Synthetic oligonucleotide
  Antisense Strand to SEQ ID NO: 481067
uauccacucauucucacaa

SEQ ID NO: 481069 - RNA, 19 nt, Artificial Sequence
  Description of Artificial Sequence: Synthetic oligonucleotide
  Sense strand starting at position 330 of SEQ ID NO: 317312
gacaauggcuuacugaaga

SEQ ID NO: 481070 - RNA, 19 nt, Artificial Sequence
  Description of Artificial Sequence: Synthetic oligonucleotide
  Antisense Strand to SEQ ID NO: 481069
ucuucaguaagccauuguc

SEQ ID NO: 481071 - RNA, 19 nt, Artificial Sequence
  Description of Artificial Sequence: Synthetic oligonucleotide
  Sense strand starting at position 557 of SEQ ID NO: 317312
ugucuucgugcauuaaugu

SEQ ID NO: 481072 - RNA, 19 nt, Artificial Sequence
  Description of Artificial Sequence: Synthetic oligonucleotide
  Antisense Strand to SEQ ID NO: 481071
acauuaaugcacgaagaca

SEQ ID NO: 481073 - RNA, 19 nt, Artificial Sequence
  Description of Artificial Sequence: Synthetic oligonucleotide
  Sense strand starting at position 827 of SEQ ID NO: 317312
gucaaacuccucuggaauc

SEQ ID NO: 481074 - RNA, 19 nt, Artificial Sequence
  Description of Artificial Sequence: Synthetic oligonucleotide
  Antisense Strand to SEQ ID NO: 481073
gauuccagaggaguuugac

SEQ ID NO: 481075 - RNA, 19 nt, Artificial Sequence
  Description of Artificial Sequence: Synthetic oligonucleotide
  Sense strand starting at position 838 of SEQ ID NO: 317312
cuggaaucuuuacuaagca

SEQ ID NO: 481076 - RNA, 19 nt, Artificial Sequence
  Description of Artificial Sequence: Synthetic oligonucleotide
  Antisense Strand to SEQ ID NO: 481075
ugcuuaguaaagauuccag

SEQ ID NO: 481077 - RNA, 19 nt, Artificial Sequence
  Description of Artificial Sequence: Synthetic oligonucleotide
  Sense strand starting at position 936 of SEQ ID NO: 317312
acuuguccugguuaaauaa

SEQ ID NO: 481078 - RNA, 19 nt, Artificial Sequence
  Description of Artificial Sequence: Synthetic oligonucleotide
  Antisense Strand to SEQ ID NO: 481077
uuauuuaaccaggacaagu

SEQ ID NO: 481079 - RNA, 19 nt, Artificial Sequence
  Description of Artificial Sequence: Synthetic oligonucleotide
  Sense strand starting at position 979 of SEQ ID NO: 317312
caaggaacuguuuggccaa

SEQ ID NO: 481080 - RNA, 19 nt, Artificial Sequence
  Description of Artificial Sequence: Synthetic oligonucleotide
  Antisense Strand to SEQ ID NO: 481079
uuggccaaacaguuccuug

SEQ ID NO: 481081 - RNA, 19 nt, Artificial Sequence
  Description of Artificial Sequence: Synthetic oligonucleotide
  Sense strand starting at position 981 of SEQ ID NO: 317312
aggaacuguuuggccaaau

SEQ ID NO: 481082 - RNA, 19 nt, Artificial Sequence
  Description of Artificial Sequence: Synthetic oligonucleotide
  Antisense Strand to SEQ ID NO: 481081
auuuggccaaacaguuccu

SEQ ID NO: 481083 - RNA, 19 nt, Artificial Sequence
  Description of Artificial Sequence: Synthetic oligonucleotide
  Sense strand starting at position 982 of SEQ ID NO: 317312
ggaacuguuuggccaaaug

SEQ ID NO: 481084 - RNA, 19 nt, Artificial Sequence
  Description of Artificial Sequence: Synthetic oligonucleotide
  Antisense Strand to SEQ ID NO: 481083
cauuuggccaaacaguucc

SEQ ID NO: 481085 - RNA, 19 nt, Artificial Sequence
  Description of Artificial Sequence: Synthetic oligonucleotide
  Sense strand starting at position 1092 of SEQ ID NO: 317312
uggguccucgggcauagaa

SEQ ID NO: 481086 - RNA, 19 nt, Artificial Sequence
  Description of Artificial Sequence: Synthetic oligonucleotide
  Antisense Strand to SEQ ID NO: 481085
uucuaugcccgaggaccca

SEQ ID NO: 481087 - RNA, 19 nt, Artificial Sequence
  Description of Artificial Sequence: Synthetic oligonucleotide
  Sense strand starting at position 1139 of SEQ ID NO: 317312
guccuuauuguugcguaau

SEQ ID NO: 481088 - RNA, 19 nt, Artificial Sequence
  Description of Artificial Sequence: Synthetic oligonucleotide
  Antisense Strand to SEQ ID NO: 481087
auuacgcaacaauaaggac

SEQ ID NO: 481089 - RNA, 19 nt, Artificial Sequence
  Description of Artificial Sequence: Synthetic oligonucleotide
  Sense strand starting at position 1152 of SEQ ID NO: 317312
cguaauagugugagguuga

SEQ ID NO: 481090 - RNA, 19 nt, Artificial Sequence
  Description of Artificial Sequence: Synthetic oligonucleotide
  Antisense Strand to SEQ ID NO: 481089
ucaaccucacacuauuacg

SEQ ID NO: 481091 - RNA, 19 nt, Artificial Sequence
  Description of Artificial Sequence: Synthetic oligonucleotide
  Sense strand starting at position 1198 of SEQ ID NO: 317312
ucaggaauguauccucuuu

SEQ ID NO: 481092 - RNA, 19 nt, Artificial Sequence
  Description of Artificial Sequence: Synthetic oligonucleotide
  Antisense Strand to SEQ ID NO: 481091
aaagaggauacauuccuga

SEQ ID NO: 481093 - RNA, 19 nt, Artificial Sequence
  Description of Artificial Sequence: Synthetic oligonucleotide
  Sense strand starting at position 1200 of SEQ ID NO: 317312
aggaauguauccucuuucu

SEQ ID NO: 481094 - RNA, 19 nt, Artificial Sequence
  Description of Artificial Sequence: Synthetic oligonucleotide
  Antisense Strand to SEQ ID NO: 481093
agaaagaggauacauuccu

SEQ ID NO: 481095 - RNA, 19 nt, Artificial Sequence
  Description of Artificial Sequence: Synthetic oligonucleotide
  Sense strand starting at position 1297 of SEQ ID NO: 317312
cgcuuucgccgccuggaaa

SEQ ID NO: 481096 - RNA, 19 nt, Artificial Sequence
  Description of Artificial Sequence: Synthetic oligonucleotide
  Antisense Strand to SEQ ID NO: 481095
uuuccaggcggcgaaagcg

SEQ ID NO: 481097 - RNA, 19 nt, Artificial Sequence
  Description of Artificial Sequence: Synthetic oligonucleotide
  Sense strand starting at position 2016 of SEQ ID NO: 317312
gggauccaccuuugccaua

SEQ ID NO: 481098 - RNA, 19 nt, Artificial Sequence
  Description of Artificial Sequence: Synthetic oligonucleotide
  Antisense Strand to SEQ ID NO: 481097
uauggcaaagguggauccc

SEQ ID NO: 481099 - RNA, 19 nt, Artificial Sequence
  Description of Artificial Sequence: Synthetic oligonucleotide
  Sense strand starting at position 2180 of SEQ ID NO: 317312
ugagaaucccaguguggaa

SEQ ID NO: 481100 - RNA, 19 nt, Artificial Sequence
  Description of Artificial Sequence: Synthetic oligonucleotide
  Antisense Strand to SEQ ID NO: 481099
uuccacacugggauucuca

SEQ ID NO: 481101 - RNA, 19 nt, Artificial Sequence
  Description of Artificial Sequence: Synthetic oligonucleotide
  Sense strand starting at position 2214 of SEQ ID NO: 317312
ugguaugagcgacagagaa

SEQ ID NO: 481102 - RNA, 19 nt, Artificial Sequence
  Description of Artificial Sequence: Synthetic oligonucleotide
  Antisense Strand to SEQ ID NO: 481101
uucucugucgcucauacca

SEQ ID NO: 481103 - RNA, 19 nt, Artificial Sequence
  Description of Artificial Sequence: Synthetic oligonucleotide
  Sense strand starting at position 2216 of SEQ ID NO: 317312
guaugagcgacagagaagu

SEQ ID NO: 481104 - RNA, 19 nt, Artificial Sequence
  Description of Artificial Sequence: Synthetic oligonucleotide
  Antisense Strand to SEQ ID NO: 481103
acuucucugucgcucauac

SEQ ID NO: 481105 - RNA, 19 nt, Artificial Sequence
  Description of Artificial Sequence: Synthetic oligonucleotide
  Sense strand starting at position 2607 of SEQ ID NO: 317312
ucacauauacgguaucaag

SEQ ID NO: 481106 - RNA, 19 nt, Artificial Sequence
  Description of Artificial Sequence: Synthetic oligonucleotide
  Antisense Strand to SEQ ID NO: 481105
cuugauaccguauauguga

SEQ ID NO: 481107 - RNA, 19 nt, Artificial Sequence
  Description of Artificial Sequence: Synthetic oligonucleotide
  Sense strand starting at position 2618 of SEQ ID NO: 317312
guaucaagaguggaguguu

SEQ ID NO: 481108 - RNA, 19 nt, Artificial Sequence
  Description of Artificial Sequence: Synthetic oligonucleotide
  Antisense Strand to SEQ ID NO: 481107
aacacuccacucuugauac

SEQ ID NO: 481109 - RNA, 19 nt, Artificial Sequence
  Description of Artificial Sequence: Synthetic oligonucleotide
  Sense strand starting at position 2691 of SEQ ID NO: 317312
uuaauauucguugaguaca

SEQ ID NO: 481110 - RNA, 19 nt, Artificial Sequence
  Description of Artificial Sequence: Synthetic oligonucleotide
  Antisense Strand to SEQ ID NO: 481109
uguacucaacgaauauuaa

SEQ ID NO: 481111 - RNA, 19 nt, Artificial Sequence
  Description of Artificial Sequence: Synthetic oligonucleotide
  Sense strand starting at position 2696 of SEQ ID NO: 317312
auucguugaguacaaggua

SEQ ID NO: 481112 - RNA, 19 nt, Artificial Sequence
  Description of Artificial Sequence: Synthetic oligonucleotide
  Antisense Strand to SEQ ID NO: 481111
uaccuuguacucaacgaau

SEQ ID NO: 481113 - RNA, 19 nt, Artificial Sequence
  Description of Artificial Sequence: Synthetic oligonucleotide
  Sense strand starting at position 2711 of SEQ ID NO: 317312
gguagacauccacagcaau

SEQ ID NO: 481114 - RNA, 19 nt, Artificial Sequence
  Description of Artificial Sequence: Synthetic oligonucleotide
  Antisense Strand to SEQ ID NO: 481113
auugcuguggaugucuacc

SEQ ID NO: 481115 - RNA, 19 nt, Artificial Sequence
  Description of Artificial Sequence: Synthetic oligonucleotide
  Sense strand starting at position 2769 of SEQ ID NO: 317312
agagacaagccuuaugucu

SEQ ID NO: 481116 - RNA, 19 nt, Artificial Sequence
  Description of Artificial Sequence: Synthetic oligonucleotide
  Antisense Strand to SEQ ID NO: 481115
agacauaaggcuugucucu

SEQ ID NO: 481117 - RNA, 19 nt, Artificial Sequence
  Description of Artificial Sequence: Synthetic oligonucleotide
  Sense strand starting at position 2777 of SEQ ID NO: 317312
gccuuaugucucccuguuu

SEQ ID NO: 481118 - RNA, 19 nt, Artificial Sequence
  Description of Artificial Sequence: Synthetic oligonucleotide
  Antisense Strand to SEQ ID NO: 481117
aaacagggagacauaaggc

SEQ ID NO: 481119 - RNA, 19 nt, Artificial Sequence
  Description of Artificial Sequence: Synthetic oligonucleotide
  Sense strand starting at position 2933 of SEQ ID NO: 317312
acuagaaugcaauguagga

SEQ ID NO: 481120 - RNA, 19 nt, Artificial Sequence
  Description of Artificial Sequence: Synthetic oligonucleotide
  Antisense Strand to SEQ ID NO: 481119
uccuacauugcauucuagu

SEQ ID NO: 481121 - RNA, 19 nt, Artificial Sequence
  Description of Artificial Sequence: Synthetic oligonucleotide
  Sense strand starting at position 2982 of SEQ ID NO: 317312
aucuaauaggagugccaaa

SEQ ID NO: 481122 - RNA, 19 nt, Artificial Sequence
  Description of Artificial Sequence: Synthetic oligonucleotide
  Antisense Strand to SEQ ID NO: 481121
uuuggcacuccuauuagau

SEQ ID NO: 481123 - RNA, 19 nt, Artificial Sequence
  Description of Artificial Sequence: Synthetic oligonucleotide
  Sense strand starting at position 3101 of SEQ ID NO: 317312
acuuauucuugagcaggau

SEQ ID NO: 481124 - RNA, 19 nt, Artificial Sequence
  Description of Artificial Sequence: Synthetic oligonucleotide
  Antisense Strand to SEQ ID NO: 481123
auccugcucaagaauaagu

SEQ ID NO: 481125 - RNA, 19 nt, Artificial Sequence
  Description of Artificial Sequence: Synthetic oligonucleotide
  Sense strand starting at position 3102 of SEQ ID NO: 317312
cuuauucuugagcaggauu

SEQ ID NO: 481126 - RNA, 19 nt, Artificial Sequence
  Description of Artificial Sequence: Synthetic oligonucleotide
  Antisense Strand to SEQ ID NO: 481125
aauccugcucaagaauaag

SEQ ID NO: 481127 - RNA, 19 nt, Artificial Sequence
  Description of Artificial Sequence: Synthetic oligonucleotide
  Sense strand starting at position 3124 of SEQ ID NO: 317312
auaagaauucuaugcaacg

SEQ ID NO: 481128 - RNA, 19 nt, Artificial Sequence
  Description of Artificial Sequence: Synthetic oligonucleotide
  Antisense Strand to SEQ ID NO: 481127
cguugcauagaauucuuau

SEQ ID NO: 481129 - RNA, 19 nt, Artificial Sequence
  Description of Artificial Sequence: Synthetic oligonucleotide
  Sense strand starting at position 3407 of SEQ ID NO: 317312
auccucuggcaguaaucau

SEQ ID NO: 481130 - RNA, 19 nt, Artificial Sequence
  Description of Artificial Sequence: Synthetic oligonucleotide
  Antisense Strand to SEQ ID NO: 481129
augauuacugccagaggau

SEQ ID NO: 481131 - RNA, 19 nt, Artificial Sequence
  Description of Artificial Sequence: Synthetic oligonucleotide
  Sense strand starting at position 3574 of SEQ ID NO: 317312
aaggcugaauaguucuaua

SEQ ID NO: 481132 - RNA, 19 nt, Artificial Sequence
  Description of Artificial Sequence: Synthetic oligonucleotide
  Antisense Strand to SEQ ID NO: 481131
uauagaacuauucagccuu

SEQ ID NO: 481133 - RNA, 19 nt, Artificial Sequence
  Description of Artificial Sequence: Synthetic oligonucleotide
  Sense strand starting at position 3760 of SEQ ID NO: 317312
guguguuaauuugugcuga

SEQ ID NO: 481134 - RNA, 19 nt, Artificial Sequence
  Description of Artificial Sequence: Synthetic oligonucleotide
  Antisense Strand to SEQ ID NO: 481133
ucagcacaaauuaacacac

SEQ ID NO: 481135 - RNA, 19 nt, Artificial Sequence
  Description of Artificial Sequence: Synthetic oligonucleotide
  Sense strand starting at position 3762 of SEQ ID NO: 317312
guguuaauuugugcugaau

SEQ ID NO: 481136 - RNA, 19 nt, Artificial Sequence
  Description of Artificial Sequence: Synthetic oligonucleotide
  Antisense Strand to SEQ ID NO: 481135
auucagcacaaauuaacac

SEQ ID NO: 481137 - RNA, 19 nt, Artificial Sequence
  Description of Artificial Sequence: Synthetic oligonucleotide
  Sense strand starting at position 3902 of SEQ ID NO: 317312
aggaauaacuguuucuaag

SEQ ID NO: 481138 - RNA, 19 nt, Artificial Sequence
  Description of Artificial Sequence: Synthetic oligonucleotide
  Antisense Strand to SEQ ID NO: 481137
cuuagaaacaguuauuccu

SEQ ID NO: 481139 - RNA, 19 nt, Artificial Sequence
  Description of Artificial Sequence: Synthetic oligonucleotide
  Sense strand starting at position 3904 of SEQ ID NO: 317312
gaauaacuguuucuaaggu

SEQ ID NO: 481140 - RNA, 19 nt, Artificial Sequence
  Description of Artificial Sequence: Synthetic oligonucleotide
  Antisense Strand to SEQ ID NO: 481139
accuuagaaacaguuauuc

SEQ ID NO: 481141 - RNA, 19 nt, Artificial Sequence
  Description of Artificial Sequence: Synthetic oligonucleotide
  Sense strand starting at position 3947 of SEQ ID NO: 317312
uacuguugggaguguaaau

SEQ ID NO: 481142 - RNA, 19 nt, Artificial Sequence
  Description of Artificial Sequence: Synthetic oligonucleotide
  Antisense Strand to SEQ ID NO: 481141
auuuacacucccaacagua

SEQ ID NO: 481143 - RNA, 19 nt, Artificial Sequence
  Description of Artificial Sequence: Synthetic oligonucleotide
  Sense strand starting at position 3977 of SEQ ID NO: 317312
cuguucgugggauauagaa

SEQ ID NO: 481144 - RNA, 19 nt, Artificial Sequence
  Description of Artificial Sequence: Synthetic oligonucleotide
  Antisense Strand to SEQ ID NO: 481143
uucuauaucccacgaacag

SEQ ID NO: 481145 - RNA, 19 nt, Artificial Sequence
  Description of Artificial Sequence: Synthetic oligonucleotide
  Sense strand starting at position 92 of SEQ ID NO: 317313
auacuaguuccugagucca

SEQ ID NO: 481146 - RNA, 19 nt, Artificial Sequence
  Description of Artificial Sequence: Synthetic oligonucleotide
  Antisense Strand to SEQ ID NO: 481145
uggacucaggaacuaguau

SEQ ID NO: 481147 - RNA, 19 nt, Artificial Sequence
  Description of Artificial Sequence: Synthetic oligonucleotide
  Sense strand starting at position 164 of SEQ ID NO: 317313
ugugacucagucuaacaaa

SEQ ID NO: 481148 - RNA, 19 nt, Artificial Sequence
  Description of Artificial Sequence: Synthetic oligonucleotide
  Antisense Strand to SEQ ID NO: 481147
uuuguuagacugagucaca

SEQ ID NO: 481149 - RNA, 19 nt, Artificial Sequence
  Description of Artificial Sequence: Synthetic oligonucleotide
  Sense strand starting at position 411 of SEQ ID NO: 317313
cuccacuggaagugugaaa

SEQ ID NO: 481150 - RNA, 19 nt, Artificial Sequence
  Description of Artificial Sequence: Synthetic oligonucleotide
  Antisense Strand to SEQ ID NO: 481149
uuucacacuuccaguggag

SEQ ID NO: 481151 - RNA, 19 nt, Artificial Sequence
  Description of Artificial Sequence: Synthetic oligonucleotide
  Sense strand starting at position 659 of SEQ ID NO: 317313
agcuaagaaacauggguuu

SEQ ID NO: 481152 - RNA, 19 nt, Artificial Sequence
  Description of Artificial Sequence: Synthetic oligonucleotide
  Antisense Strand to SEQ ID NO: 481151
aaacccauguuucuuagcu

SEQ ID NO: 481153 - RNA, 19 nt, Artificial Sequence
  Description of Artificial Sequence: Synthetic oligonucleotide
  Sense strand starting at position 974 of SEQ ID NO: 317313
ggcuguaugaaagagcaau

SEQ ID NO: 481154 - RNA, 19 nt, Artificial Sequence
  Description of Artificial Sequence: Synthetic oligonucleotide
  Antisense Strand to SEQ ID NO: 481153
auugcucuuucauacagcc

SEQ ID NO: 481155 - RNA, 19 nt, Artificial Sequence
  Description of Artificial Sequence: Synthetic oligonucleotide
  Sense strand starting at position 1077 of SEQ ID NO: 317313
cuaugauugcgcuaaagga

SEQ ID NO: 481156 - RNA, 19 nt, Artificial Sequence
  Description of Artificial Sequence: Synthetic oligonucleotide
  Antisense Strand to SEQ ID NO: 481155
uccuuuagcgcaaucauag

SEQ ID NO: 481157 - RNA, 19 nt, Artificial Sequence
  Description of Artificial Sequence: Synthetic oligonucleotide
  Sense strand starting at position 1225 of SEQ ID NO: 317313
uguugaaugaaccaugguu

SEQ ID NO: 481158 - RNA, 19 nt, Artificial Sequence
  Description of Artificial Sequence: Synthetic oligonucleotide
  Antisense Strand to SEQ ID NO: 481157
aaccaugguucauucaaca

SEQ ID NO: 481159 - RNA, 19 nt, Artificial Sequence
  Description of Artificial Sequence: Synthetic oligonucleotide
  Sense strand starting at position 1227 of SEQ ID NO: 317313
uugaaugaaccaugguuau

SEQ ID NO: 481160 - RNA, 19 nt, Artificial Sequence
  Description of Artificial Sequence: Synthetic oligonucleotide
  Antisense Strand to SEQ ID NO: 481159
auaaccaugguucauucaa

SEQ ID NO: 481161 - RNA, 19 nt, Artificial Sequence
  Description of Artificial Sequence: Synthetic oligonucleotide
  Sense strand starting at position 1650 of SEQ ID NO: 317313
augaguaugcuuuaucauu

SEQ ID NO: 481162 - RNA, 19 nt, Artificial Sequence
  Description of Artificial Sequence: Synthetic oligonucleotide
  Antisense Strand to SEQ ID NO: 481161
aaugauaaagcauacucau

SEQ ID NO: 481163 - RNA, 19 nt, Artificial Sequence
  Description of Artificial Sequence: Synthetic oligonucleotide
  Sense strand starting at position 1715 of SEQ ID NO: 317313
uugaauguauguuugagaa

SEQ ID NO: 481164 - RNA, 19 nt, Artificial Sequence
  Description of Artificial Sequence: Synthetic oligonucleotide
  Antisense Strand to SEQ ID NO: 481163
uucucaaacauacauucaa

SEQ ID NO: 481165 - RNA, 19 nt, Artificial Sequence
  Description of Artificial Sequence: Synthetic oligonucleotide
  Sense strand starting at position 2127 of SEQ ID NO: 317313
ggcugaauugcucaaggaa

SEQ ID NO: 481166 - RNA, 19 nt, Artificial Sequence
  Description of Artificial Sequence: Synthetic oligonucleotide
  Antisense Strand to SEQ ID NO: 481165
uuccuugagcaauucagcc

SEQ ID NO: 481167 - RNA, 19 nt, Artificial Sequence
  Description of Artificial Sequence: Synthetic oligonucleotide
  Sense strand starting at position 2130 of SEQ ID NO: 317313
ugaauugcucaaggaaauu

SEQ ID NO: 481168 - RNA, 19 nt, Artificial Sequence
  Description of Artificial Sequence: Synthetic oligonucleotide
  Antisense Strand to SEQ ID NO: 481167
aauuuccuugagcaauuca

SEQ ID NO: 481169 - RNA, 19 nt, Artificial Sequence
  Description of Artificial Sequence: Synthetic oligonucleotide
  Sense strand starting at position 2210 of SEQ ID NO: 317313
uuuagauacccacgguaaa

SEQ ID NO: 481170 - RNA, 19 nt, Artificial Sequence
  Description of Artificial Sequence: Synthetic oligonucleotide
  Antisense Strand to SEQ ID NO: 481169
uuuaccguggguaucuaaa

SEQ ID NO: 481171 - RNA, 19 nt, Artificial Sequence
  Description of Artificial Sequence: Synthetic oligonucleotide
  Sense strand starting at position 2221 of SEQ ID NO: 317313
acgguaaacuucucaagga

SEQ ID NO: 481172 - RNA, 19 nt, Artificial Sequence
  Description of Artificial Sequence: Synthetic oligonucleotide
  Antisense Strand to SEQ ID NO: 481171
uccuugagaaguuuaccgu

SEQ ID NO: 481173 - RNA, 19 nt, Artificial Sequence
  Description of Artificial Sequence: Synthetic oligonucleotide
  Sense strand starting at position 2281 of SEQ ID NO: 317313
cccucagagccucaauguu

SEQ ID NO: 481174 - RNA, 19 nt, Artificial Sequence
  Description of Artificial Sequence: Synthetic oligonucleotide
  Antisense Strand to SEQ ID NO: 481173
aacauugaggcucugaggg

SEQ ID NO: 481175 - RNA, 19 nt, Artificial Sequence
  Description of Artificial Sequence: Synthetic oligonucleotide
  Sense strand starting at position 2295 of SEQ ID NO: 317313
auguucuaucuguaauaug

SEQ ID NO: 481176 - RNA, 19 nt, Artificial Sequence
  Description of Artificial Sequence: Synthetic oligonucleotide
  Antisense Strand to SEQ ID NO: 481175
cauauuacagauagaacau

SEQ ID NO: 481177 - RNA, 19 nt, Artificial Sequence
  Description of Artificial Sequence: Synthetic oligonucleotide
  Sense strand starting at position 2313 of SEQ ID NO: 317313
gaggauaagucuguuguga

SEQ ID NO: 481178 - RNA, 19 nt, Artificial Sequence
  Description of Artificial Sequence: Synthetic oligonucleotide
  Antisense Strand to SEQ ID NO: 481177
ucacaacagacuuauccuc

SEQ ID NO: 481179 - RNA, 19 nt, Artificial Sequence
  Description of Artificial Sequence: Synthetic oligonucleotide
  Sense strand starting at position 2339 of SEQ ID NO: 317313
auggaaacugccugguaca

SEQ ID NO: 481180 - RNA, 19 nt, Artificial Sequence
  Description of Artificial Sequence: Synthetic oligonucleotide
  Antisense Strand to SEQ ID NO: 481179
uguaccaggcaguuuccau

SEQ ID NO: 481181 - RNA, 19 nt, Artificial Sequence
  Description of Artificial Sequence: Synthetic oligonucleotide
  Sense strand starting at position 2350 of SEQ ID NO: 317313
cugguacauguaugaagaa

SEQ ID NO: 481182 - RNA, 19 nt, Artificial Sequence
  Description of Artificial Sequence: Synthetic oligonucleotide
  Antisense Strand to SEQ ID NO: 481181
uucuucauacauguaccag

SEQ ID NO: 481183 - RNA, 19 nt, Artificial Sequence
  Description of Artificial Sequence: Synthetic oligonucleotide
  Sense strand starting at position 2610 of SEQ ID NO: 317313
aggagagauguuggcuuca

SEQ ID NO: 481184 - RNA, 19 nt, Artificial Sequence
  Description of Artificial Sequence: Synthetic oligonucleotide
  Antisense Strand to SEQ ID NO: 481183
ugaagccaacaucucuccu

SEQ ID NO: 481185 - RNA, 19 nt, Artificial Sequence
  Description of Artificial Sequence: Synthetic oligonucleotide
  Sense strand starting at position 2650 of SEQ ID NO: 317313
uuuguuugaggaggaagua

SEQ ID NO: 481186 - RNA, 19 nt, Artificial Sequence
  Description of Artificial Sequence: Synthetic oligonucleotide
  Antisense Strand to SEQ ID NO: 481185
uacuuccuccucaaacaaa

SEQ ID NO: 481187 - RNA, 19 nt, Artificial Sequence
  Description of Artificial Sequence: Synthetic oligonucleotide
  Sense strand starting at position 3167 of SEQ ID NO: 317313
ugagaugcaugaucaauga

SEQ ID NO: 481188 - RNA, 19 nt, Artificial Sequence
  Description of Artificial Sequence: Synthetic oligonucleotide
  Antisense Strand to SEQ ID NO: 481187
ucauugaucaugcaucuca

SEQ ID NO: 481189 - RNA, 19 nt, Artificial Sequence
  Description of Artificial Sequence: Synthetic oligonucleotide
  Sense strand starting at position 3225 of SEQ ID NO: 317313
ugcuuucucagugaaggag

SEQ ID NO: 481190 - RNA, 19 nt, Artificial Sequence
  Description of Artificial Sequence: Synthetic oligonucleotide
  Antisense Strand to SEQ ID NO: 481189
cuccuucacugagaaagca

SEQ ID NO: 481191 - RNA, 19 nt, Artificial Sequence
  Description of Artificial Sequence: Synthetic oligonucleotide
  Sense strand starting at position 3228 of SEQ ID NO: 317313
uuucucagugaaggaguau

SEQ ID NO: 481192 - RNA, 19 nt, Artificial Sequence
  Description of Artificial Sequence: Synthetic oligonucleotide
  Antisense Strand to SEQ ID NO: 481191
auacuccuucacugagaaa

SEQ ID NO: 481193 - RNA, 19 nt, Artificial Sequence
  Description of Artificial Sequence: Synthetic oligonucleotide
  Sense strand starting at position 3297 of SEQ ID NO: 317313
guaugagauacagguaaau

SEQ ID NO: 481194 - RNA, 19 nt, Artificial Sequence
  Description of Artificial Sequence: Synthetic oligonucleotide
  Antisense Strand to SEQ ID NO: 481193
auuuaccuguaucucauac

SEQ ID NO: 481195 - RNA, 19 nt, Artificial Sequence
  Description of Artificial Sequence: Synthetic oligonucleotide
  Sense strand starting at position 3350 of SEQ ID NO: 317313
auaucuaagagugguuuga

SEQ ID NO: 481196 - RNA, 19 nt, Artificial Sequence
  Description of Artificial Sequence: Synthetic oligonucleotide
  Antisense Strand to SEQ ID NO: 481195
ucaaaccacucuuagauau

SEQ ID NO: 481197 - RNA, 19 nt, Artificial Sequence
  Description of Artificial Sequence: Synthetic oligonucleotide
  Sense strand starting at position 3352 of SEQ ID NO: 317313
aucuaagagugguuugaau

SEQ ID NO: 481198 - RNA, 19 nt, Artificial Sequence
  Description of Artificial Sequence: Synthetic oligonucleotide
  Antisense Strand to SEQ ID NO: 481197
auucaaaccacucuuagau

SEQ ID NO: 481199 - RNA, 19 nt, Artificial Sequence
  Description of Artificial Sequence: Synthetic oligonucleotide
  Sense strand starting at position 3363 of SEQ ID NO: 317313
guuugaaugcuagauugug

SEQ ID NO: 481200 - RNA, 19 nt, Artificial Sequence
  Description of Artificial Sequence: Synthetic oligonucleotide
  Antisense Strand to SEQ ID NO: 481199
cacaaucuagcauucaaac

SEQ ID NO: 481201 - RNA, 19 nt, Artificial Sequence
  Description of Artificial Sequence: Synthetic oligonucleotide
  Sense strand starting at position 3468 of SEQ ID NO: 317313
acauuagcccaugaugcaa

SEQ ID NO: 481202 - RNA, 19 nt, Artificial Sequence
  Description of Artificial Sequence: Synthetic oligonucleotide
  Antisense Strand to SEQ ID NO: 481201
uugcaucaugggcuaaugu

SEQ ID NO: 481203 - RNA, 19 nt, Artificial Sequence
  Description of Artificial Sequence: Synthetic oligonucleotide
  Sense strand starting at position 3526 of SEQ ID NO: 317313
gaagguccagcuugaucau

SEQ ID NO: 481204 - RNA, 19 nt, Artificial Sequence
  Description of Artificial Sequence: Synthetic oligonucleotide
  Antisense Strand to SEQ ID NO: 481203
augaucaagcuggaccuuc

SEQ ID NO: 481205 - RNA, 19 nt, Artificial Sequence
  Description of Artificial Sequence: Synthetic oligonucleotide
  Sense strand starting at position 3532 of SEQ ID NO: 317313
ccagcuugaucaucagaau

SEQ ID NO: 481206 - RNA, 19 nt, Artificial Sequence
  Description of Artificial Sequence: Synthetic oligonucleotide
  Antisense Strand to SEQ ID NO: 481205
auucugaugaucaagcugg

SEQ ID NO: 481207 - RNA, 19 nt, Artificial Sequence
  Description of Artificial Sequence: Synthetic oligonucleotide
  Sense strand starting at position 3684 of SEQ ID NO: 317313
aagugagaccucuguacaa

SEQ ID NO: 481208 - RNA, 19 nt, Artificial Sequence
  Description of Artificial Sequence: Synthetic oligonucleotide
  Antisense Strand to SEQ ID NO: 481207
uuguacagaggucucacuu

SEQ ID NO: 481209 - RNA, 19 nt, Artificial Sequence
  Description of Artificial Sequence: Synthetic oligonucleotide
  Sense strand starting at position 3686 of SEQ ID NO: 317313
gugagaccucuguacaaau

SEQ ID NO: 481210 - RNA, 19 nt, Artificial Sequence
  Description of Artificial Sequence: Synthetic oligonucleotide
  Antisense Strand to SEQ ID NO: 481209
auuuguacagaggucucac

SEQ ID NO: 481211 - RNA, 19 nt, Artificial Sequence
  Description of Artificial Sequence: Synthetic oligonucleotide
  Sense strand starting at position 3688 of SEQ ID NO: 317313
gagaccucuguacaaaugu

SEQ ID NO: 481212 - RNA, 19 nt, Artificial Sequence
  Description of Artificial Sequence: Synthetic oligonucleotide
  Antisense Strand to SEQ ID NO: 481211
acauuuguacagaggucuc

SEQ ID NO: 481213 - RNA, 19 nt, Artificial Sequence
  Description of Artificial Sequence: Synthetic oligonucleotide
  Sense strand starting at position 3697 of SEQ ID NO: 317313
guacaaauguaguuaugga

SEQ ID NO: 481214 - RNA, 19 nt, Artificial Sequence
  Description of Artificial Sequence: Synthetic oligonucleotide
  Antisense Strand to SEQ ID NO: 481213
uccauaacuacauuuguac

SEQ ID NO: 481215 - RNA, 19 nt, Artificial Sequence
  Description of Artificial Sequence: Synthetic oligonucleotide
  Sense strand starting at position 3733 of SEQ ID NO: 317313
ugagguccuugauuaguua

SEQ ID NO: 481216 - RNA, 19 nt, Artificial Sequence
  Description of Artificial Sequence: Synthetic oligonucleotide
  Antisense Strand to SEQ ID NO: 481215
uaacuaaucaaggaccuca

SEQ ID NO: 481217 - RNA, 19 nt, Artificial Sequence
  Description of Artificial Sequence: Synthetic oligonucleotide
  Sense strand starting at position 3821 of SEQ ID NO: 317313
cucuguauauaaucaugga

SEQ ID NO: 481218 - RNA, 19 nt, Artificial Sequence
  Description of Artificial Sequence: Synthetic oligonucleotide
  Antisense Strand to SEQ ID NO: 481217
uccaugauuauauacagag

SEQ ID NO: 481219 - RNA, 19 nt, Artificial Sequence
  Description of Artificial Sequence: Synthetic oligonucleotide
  Sense strand starting at position 3868 of SEQ ID NO: 317313
ucucuuggcugauccauuu

SEQ ID NO: 481220 - RNA, 19 nt, Artificial Sequence
  Description of Artificial Sequence: Synthetic oligonucleotide
  Antisense Strand to SEQ ID NO: 481219
aaauggaucagccaagaga

SEQ ID NO: 481221 - RNA, 19 nt, Artificial Sequence
  Description of Artificial Sequence: Synthetic oligonucleotide
  Sense strand starting at position 3888 of SEQ ID NO: 317313
cugucaguccuagaaauaa

SEQ ID NO: 481222 - RNA, 19 nt, Artificial Sequence
  Description of Artificial Sequence: Synthetic oligonucleotide
  Antisense Strand to SEQ ID NO: 481221
uuauuucuaggacugacag

SEQ ID NO: 481223 - RNA, 19 nt, Artificial Sequence
  Description of Artificial Sequence: Synthetic oligonucleotide
  Sense strand starting at position 3953 of SEQ ID NO: 317313
acagguaggcacuaauauu

SEQ ID NO: 481224 - RNA, 19 nt, Artificial Sequence
  Description of Artificial Sequence: Synthetic oligonucleotide
  Antisense Strand to SEQ ID NO: 481223
aauauuagugccuaccugu

SEQ ID NO: 481225 - RNA, 19 nt, Artificial Sequence
  Description of Artificial Sequence: Synthetic oligonucleotide
  Sense strand starting at position 90 of SEQ ID NO: 317314
guaaguauugaucaccucu

SEQ ID NO: 481226 - RNA, 19 nt, Artificial Sequence
  Description of Artificial Sequence: Synthetic oligonucleotide
  Antisense Strand to SEQ ID NO: 481225
agaggugaucaauacuuac

SEQ ID NO: 481227 - RNA, 19 nt, Artificial Sequence
  Description of Artificial Sequence: Synthetic oligonucleotide
  Sense strand starting at position 155 of SEQ ID NO: 317314
gagccuugcccaugcauuu

SEQ ID NO: 481228 - RNA, 19 nt, Artificial Sequence
  Description of Artificial Sequence: Synthetic oligonucleotide
  Antisense Strand to SEQ ID NO: 481227
aaaugcaugggcaaggcuc

SEQ ID NO: 481229 - RNA, 19 nt, Artificial Sequence
  Description of Artificial Sequence: Synthetic oligonucleotide
  Sense strand starting at position 438 of SEQ ID NO: 317314
ggagaaccaugauaaggaa

SEQ ID NO: 481230 - RNA, 19 nt, Artificial Sequence
  Description of Artificial Sequence: Synthetic oligonucleotide
  Antisense Strand to SEQ ID NO: 481229
uuccuuaucaugguucucc

SEQ ID NO: 481231 - RNA, 19 nt, Artificial Sequence
  Description of Artificial Sequence: Synthetic oligonucleotide
  Sense strand starting at position 454 of SEQ ID NO: 317314
gaagaaaugucagcacaua

SEQ ID NO: 481232 - RNA, 19 nt, Artificial Sequence
  Description of Artificial Sequence: Synthetic oligonucleotide
  Antisense Strand to SEQ ID NO: 481231
uaugugcugacauuucuuc

SEQ ID NO: 481233 - RNA, 19 nt, Artificial Sequence
  Description of Artificial Sequence: Synthetic oligonucleotide
  Sense strand starting at position 517 of SEQ ID NO: 317314
ggauuugguuccuaaggga

SEQ ID NO: 481234 - RNA, 19 nt, Artificial Sequence
  Description of Artificial Sequence: Synthetic oligonucleotide
  Antisense Strand to SEQ ID NO: 481233
ucccuuaggaaccaaaucc

SEQ ID NO: 481235 - RNA, 19 nt, Artificial Sequence
  Description of Artificial Sequence: Synthetic oligonucleotide
  Sense strand starting at position 557 of SEQ ID NO: 317314
gggcuuacucaacaacuca

SEQ ID NO: 481236 - RNA, 19 nt, Artificial Sequence
  Description of Artificial Sequence: Synthetic oligonucleotide
  Antisense Strand to SEQ ID NO: 481235
ugaguuguugaguaagccc

SEQ ID NO: 481237 - RNA, 19 nt, Artificial Sequence
  Description of Artificial Sequence: Synthetic oligonucleotide
  Sense strand starting at position 669 of SEQ ID NO: 317314
augaaugaaucucugguaa

SEQ ID NO: 481238 - RNA, 19 nt, Artificial Sequence
  Description of Artificial Sequence: Synthetic oligonucleotide
  Antisense Strand to SEQ ID NO: 481237
uuaccagagauucauucau

SEQ ID NO: 481239 - RNA, 19 nt, Artificial Sequence
  Description of Artificial Sequence: Synthetic oligonucleotide
  Sense strand starting at position 721 of SEQ ID NO: 317314
gagagauuggcauggcauu

SEQ ID NO: 481240 - RNA, 19 nt, Artificial Sequence
  Description of Artificial Sequence: Synthetic oligonucleotide
  Antisense Strand to SEQ ID NO: 481239
aaugccaugccaaucucuc

SEQ ID NO: 481241 - RNA, 19 nt, Artificial Sequence
  Description of Artificial Sequence: Synthetic oligonucleotide
  Sense strand starting at position 784 of SEQ ID NO: 317314
ggccuaauuacauggagug

SEQ ID NO: 481242 - RNA, 19 nt, Artificial Sequence
  Description of Artificial Sequence: Synthetic oligonucleotide
  Antisense Strand to SEQ ID NO: 481241
cacuccauguaauuaggcc

SEQ ID NO: 481243 - RNA, 19 nt, Artificial Sequence
  Description of Artificial Sequence: Synthetic oligonucleotide
  Sense strand starting at position 804 of SEQ ID NO: 317314
gucuuaucuggaggagggu

SEQ ID NO: 481244 - RNA, 19 nt, Artificial Sequence
  Description of Artificial Sequence: Synthetic oligonucleotide
  Antisense Strand to SEQ ID NO: 481243
acccuccuccagauaagac

SEQ ID NO: 481245 - RNA, 19 nt, Artificial Sequence
  Description of Artificial Sequence: Synthetic oligonucleotide
  Sense strand starting at position 860 of SEQ ID NO: 317314
caguguuugacggagauag

SEQ ID NO: 481246 - RNA, 19 nt, Artificial Sequence
  Description of Artificial Sequence: Synthetic oligonucleotide
  Antisense Strand to SEQ ID NO: 481245
cuaucuccgucaaacacug

SEQ ID NO: 481247 - RNA, 19 nt, Artificial Sequence
  Description of Artificial Sequence: Synthetic oligonucleotide
  Sense strand starting at position 862 of SEQ ID NO: 317314
guguuugacggagauagga

SEQ ID NO: 481248 - RNA, 19 nt, Artificial Sequence
  Description of Artificial Sequence: Synthetic oligonucleotide
  Antisense Strand to SEQ ID NO: 481247
uccuaucuccgucaaacac

SEQ ID NO: 481249 - RNA, 19 nt, Artificial Sequence
  Description of Artificial Sequence: Synthetic oligonucleotide
  Sense strand starting at position 1231 of SEQ ID NO: 317314
ggacgaccuaugugaggaa

SEQ ID NO: 481250 - RNA, 19 nt, Artificial Sequence
  Description of Artificial Sequence: Synthetic oligonucleotide
  Antisense Strand to SEQ ID NO: 481249
uuccucacauaggucgucc

SEQ ID NO: 481251 - RNA, 19 nt, Artificial Sequence
  Description of Artificial Sequence: Synthetic oligonucleotide
  Sense strand starting at position 1275 of SEQ ID NO: 317314
gcaagaacugucugaggac

SEQ ID NO: 481252 - RNA, 19 nt, Artificial Sequence
  Description of Artificial Sequence: Synthetic oligonucleotide
  Antisense Strand to SEQ ID NO: 481251
guccucagacaguucuugc

SEQ ID NO: 481253 - RNA, 19 nt, Artificial Sequence
  Description of Artificial Sequence: Synthetic oligonucleotide
  Sense strand starting at position 1294 of SEQ ID NO: 317314
cccacucaugccugggauu

SEQ ID NO: 481254 - RNA, 19 nt, Artificial Sequence
  Description of Artificial Sequence: Synthetic oligonucleotide
  Antisense Strand to SEQ ID NO: 481253
aaucccaggcaugaguggg

SEQ ID NO: 481255 - RNA, 19 nt, Artificial Sequence
  Description of Artificial Sequence: Synthetic oligonucleotide
  Sense strand starting at position 1416 of SEQ ID NO: 317314
acaucucugguguauggau

SEQ ID NO: 481256 - RNA, 19 nt, Artificial Sequence
  Description of Artificial Sequence: Synthetic oligonucleotide
  Antisense Strand to SEQ ID NO: 481255
auccauacaccagagaugu

SEQ ID NO: 481257 - RNA, 19 nt, Artificial Sequence
  Description of Artificial Sequence: Synthetic oligonucleotide
  Sense strand starting at position 1428 of SEQ ID NO: 317314
uauggauuccuccagcagu

SEQ ID NO: 481258 - RNA, 19 nt, Artificial Sequence
  Description of Artificial Sequence: Synthetic oligonucleotide
  Antisense Strand to SEQ ID NO: 481257
acugcuggaggaauccaua

SEQ ID NO: 481259 - RNA, 19 nt, Artificial Sequence
  Description of Artificial Sequence: Synthetic oligonucleotide
  Sense strand starting at position 1445 of SEQ ID NO: 317314
guucuagggaccuggcaaa

SEQ ID NO: 481260 - RNA, 19 nt, Artificial Sequence
  Description of Artificial Sequence: Synthetic oligonucleotide
  Antisense Strand to SEQ ID NO: 481259
uuugccaggucccuagaac

SEQ ID NO: 481261 - RNA, 19 nt, Artificial Sequence
  Description of Artificial Sequence: Synthetic oligonucleotide
  Sense strand starting at position 1823 of SEQ ID NO: 317314
agcagaugccuugaacaaa

SEQ ID NO: 481262 - RNA, 19 nt, Artificial Sequence
  Description of Artificial Sequence: Synthetic oligonucleotide
  Antisense Strand to SEQ ID NO: 481261
uuuguucaaggcaucugcu

SEQ ID NO: 481263 - RNA, 19 nt, Artificial Sequence
  Description of Artificial Sequence: Synthetic oligonucleotide
  Sense strand starting at position 2045 of SEQ ID NO: 317314
ggaagagauuuaugagaug

SEQ ID NO: 481264 - RNA, 19 nt, Artificial Sequence
  Description of Artificial Sequence: Synthetic oligonucleotide
  Antisense Strand to SEQ ID NO: 481263
caucucauaaaucucuucc

SEQ ID NO: 481265 - RNA, 19 nt, Artificial Sequence
  Description of Artificial Sequence: Synthetic oligonucleotide
  Sense strand starting at position 2048 of SEQ ID NO: 317314
agagauuuaugagauguaa

SEQ ID NO: 481266 - RNA, 19 nt, Artificial Sequence
  Description of Artificial Sequence: Synthetic oligonucleotide
  Antisense Strand to SEQ ID NO: 481265
uuacaucucauaaaucucu

SEQ ID NO: 481267 - RNA, 19 nt, Artificial Sequence
  Description of Artificial Sequence: Synthetic oligonucleotide
  Sense strand starting at position 2087 of SEQ ID NO: 317314
ucccuuaguggcuauuaga

SEQ ID NO: 481268 - RNA, 19 nt, Artificial Sequence
  Description of Artificial Sequence: Synthetic oligonucleotide
  Antisense Strand to SEQ ID NO: 481267
ucuaauagccacuaaggga

SEQ ID NO: 481269 - RNA, 19 nt, Artificial Sequence
  Description of Artificial Sequence: Synthetic oligonucleotide
  Sense strand starting at position 2119 of SEQ ID NO: 317314
uaccauaaaugugugaaag

SEQ ID NO: 481270 - RNA, 19 nt, Artificial Sequence
  Description of Artificial Sequence: Synthetic oligonucleotide
  Antisense Strand to SEQ ID NO: 481269
cuuucacacauuuauggua

SEQ ID NO: 481271 - RNA, 19 nt, Artificial Sequence
  Description of Artificial Sequence: Synthetic oligonucleotide
  Sense strand starting at position 2120 of SEQ ID NO: 317314
accauaaaugugugaaaga

SEQ ID NO: 481272 - RNA, 19 nt, Artificial Sequence
  Description of Artificial Sequence: Synthetic oligonucleotide
  Antisense Strand to SEQ ID NO: 481271
ucuuucacacauuuauggu

SEQ ID NO: 481273 - RNA, 19 nt, Artificial Sequence
  Description of Artificial Sequence: Synthetic oligonucleotide
  Sense strand starting at position 2431 of SEQ ID NO: 317314
gucagauucugggucuaag

SEQ ID NO: 481274 - RNA, 19 nt, Artificial Sequence
  Description of Artificial Sequence: Synthetic oligonucleotide
  Antisense Strand to SEQ ID NO: 481273
cuuagacccagaaucugac

SEQ ID NO: 481275 - RNA, 19 nt, Artificial Sequence
  Description of Artificial Sequence: Synthetic oligonucleotide
  Sense strand starting at position 2434 of SEQ ID NO: 317314
agauucugggucuaagugu

SEQ ID NO: 481276 - RNA, 19 nt, Artificial Sequence
  Description of Artificial Sequence: Synthetic oligonucleotide
  Antisense Strand to SEQ ID NO: 481275
acacuuagacccagaaucu

SEQ ID NO: 481277 - RNA, 19 nt, Artificial Sequence
  Description of Artificial Sequence: Synthetic oligonucleotide
  Sense strand starting at position 2545 of SEQ ID NO: 317314
auaagcauccagugaguua

SEQ ID NO: 481278 - RNA, 19 nt, Artificial Sequence
  Description of Artificial Sequence: Synthetic oligonucleotide
  Antisense Strand to SEQ ID NO: 481277
uaacucacuggaugcuuau

SEQ ID NO: 481279 - RNA, 19 nt, Artificial Sequence
  Description of Artificial Sequence: Synthetic oligonucleotide
  Sense strand starting at position 2800 of SEQ ID NO: 317314
gguuaaaccaggugaugug

SEQ ID NO: 481280 - RNA, 19 nt, Artificial Sequence
  Description of Artificial Sequence: Synthetic oligonucleotide
  Antisense Strand to SEQ ID NO: 481279
cacaucaccugguuuaacc

SEQ ID NO: 481281 - RNA, 19 nt, Artificial Sequence
  Description of Artificial Sequence: Synthetic oligonucleotide
  Sense strand starting at position 2847 of SEQ ID NO: 317314
ugucuugagcaggagguaa

SEQ ID NO: 481282 - RNA, 19 nt, Artificial Sequence
  Description of Artificial Sequence: Synthetic oligonucleotide
  Antisense Strand to SEQ ID NO: 481281
uuaccuccugcucaagaca

SEQ ID NO: 481283 - RNA, 19 nt, Artificial Sequence
  Description of Artificial Sequence: Synthetic oligonucleotide
  Sense strand starting at position 3095 of SEQ ID NO: 317314
uucuaagauuugcucaugu

SEQ ID NO: 481284 - RNA, 19 nt, Artificial Sequence
  Description of Artificial Sequence: Synthetic oligonucleotide
  Antisense Strand to SEQ ID NO: 481283
acaugagcaaaucuuagaa

SEQ ID NO: 481285 - RNA, 19 nt, Artificial Sequence
  Description of Artificial Sequence: Synthetic oligonucleotide
  Sense strand starting at position 3161 of SEQ ID NO: 317314
ucccauggccuguaagaga

SEQ ID NO: 481286 - RNA, 19 nt, Artificial Sequence
  Description of Artificial Sequence: Synthetic oligonucleotide
  Antisense Strand to SEQ ID NO: 481285
ucucuuacaggccauggga

SEQ ID NO: 481287 - RNA, 19 nt, Artificial Sequence
  Description of Artificial Sequence: Synthetic oligonucleotide
  Sense strand starting at position 3333 of SEQ ID NO: 317314
ucaugaagcacuugugaag

SEQ ID NO: 481288 - RNA, 19 nt, Artificial Sequence
  Description of Artificial Sequence: Synthetic oligonucleotide
  Antisense Strand to SEQ ID NO: 481287
cuucacaagugcuucauga

SEQ ID NO: 481289 - RNA, 19 nt, Artificial Sequence
  Description of Artificial Sequence: Synthetic oligonucleotide
  Sense strand starting at position 3347 of SEQ ID NO: 317314
ugaaguuagcgauauggag

SEQ ID NO: 481290 - RNA, 19 nt, Artificial Sequence
  Description of Artificial Sequence: Synthetic oligonucleotide
  Antisense Strand to SEQ ID NO: 481289
cuccauaucgcuaacuuca

SEQ ID NO: 481291 - RNA, 19 nt, Artificial Sequence
  Description of Artificial Sequence: Synthetic oligonucleotide
  Sense strand starting at position 3429 of SEQ ID NO: 317314
uguaucugaccaggagagu

SEQ ID NO: 481292 - RNA, 19 nt, Artificial Sequence
  Description of Artificial Sequence: Synthetic oligonucleotide
  Antisense Strand to SEQ ID NO: 481291
acucuccuggucagauaca

SEQ ID NO: 481293 - RNA, 19 nt, Artificial Sequence
  Description of Artificial Sequence: Synthetic oligonucleotide
  Sense strand starting at position 3532 of SEQ ID NO: 317314
gagaauggugacugaagca

SEQ ID NO: 481294 - RNA, 19 nt, Artificial Sequence
  Description of Artificial Sequence: Synthetic oligonucleotide
  Antisense Strand to SEQ ID NO: 481293
ugcuucagucaccauucuc

SEQ ID NO: 481295 - RNA, 19 nt, Artificial Sequence
  Description of Artificial Sequence: Synthetic oligonucleotide
  Sense strand starting at position 3646 of SEQ ID NO: 317314
agcaaugagucaccaguau

SEQ ID NO: 481296 - RNA, 19 nt, Artificial Sequence
  Description of Artificial Sequence: Synthetic oligonucleotide
  Antisense Strand to SEQ ID NO: 481295
auacuggugacucauugcu

SEQ ID NO: 481297 - RNA, 19 nt, Artificial Sequence
  Description of Artificial Sequence: Synthetic oligonucleotide
  Sense strand starting at position 3682 of SEQ ID NO: 317314
uccaacaugaugugaggau

SEQ ID NO: 481298 - RNA, 19 nt, Artificial Sequence
  Description of Artificial Sequence: Synthetic oligonucleotide
  Antisense Strand to SEQ ID NO: 481297
auccucacaucauguugga

SEQ ID NO: 481299 - RNA, 19 nt, Artificial Sequence
  Description of Artificial Sequence: Synthetic oligonucleotide
  Sense strand starting at position 3691 of SEQ ID NO: 317314
augugaggauauucuuuaa

SEQ ID NO: 481300 - RNA, 19 nt, Artificial Sequence
  Description of Artificial Sequence: Synthetic oligonucleotide
  Antisense Strand to SEQ ID NO: 481299
uuaaagaauauccucacau

SEQ ID NO: 481301 - RNA, 19 nt, Artificial Sequence
  Description of Artificial Sequence: Synthetic oligonucleotide
  Sense strand starting at position 3741 of SEQ ID NO: 317314
aagcuuuacccuugaagug

SEQ ID NO: 481302 - RNA, 19 nt, Artificial Sequence
  Description of Artificial Sequence: Synthetic oligonucleotide
  Antisense Strand to SEQ ID NO: 481301
cacuucaaggguaaagcuu

SEQ ID NO: 481303 - RNA, 19 nt, Artificial Sequence
  Description of Artificial Sequence: Synthetic oligonucleotide
  Sense strand starting at position 3948 of SEQ ID NO: 317314
acagcagugcuccaauuaa

SEQ ID NO: 481304 - RNA, 19 nt, Artificial Sequence
  Description of Artificial Sequence: Synthetic oligonucleotide
  Antisense Strand to SEQ ID NO: 481303
uuaauuggagcacugcugu

SEQ ID NO: 481305 - RNA, 19 nt, Artificial Sequence
  Description of Artificial Sequence: Synthetic oligonucleotide
  Sense strand starting at position 72 of SEQ ID NO: 317315
uuuaauagaucauugcaga

SEQ ID NO: 481306 - RNA, 19 nt, Artificial Sequence
  Description of Artificial Sequence: Synthetic oligonucleotide
  Antisense Strand to SEQ ID NO: 481305
ucugcaaugaucuauuaaa

SEQ ID NO: 481307 - RNA, 19 nt, Artificial Sequence
  Description of Artificial Sequence: Synthetic oligonucleotide
  Sense strand starting at position 73 of SEQ ID NO: 317315
uuaauagaucauugcagag

SEQ ID NO: 481308 - RNA, 19 nt, Artificial Sequence
  Description of Artificial Sequence: Synthetic oligonucleotide
  Antisense Strand to SEQ ID NO: 481307
cucugcaaugaucuauuaa

SEQ ID NO: 481309 - RNA, 19 nt, Artificial Sequence
  Description of Artificial Sequence: Synthetic oligonucleotide
  Sense strand starting at position 475 of SEQ ID NO: 317315
cccagaacuugacauuuga

SEQ ID NO: 481310 - RNA, 19 nt, Artificial Sequence
  Description of Artificial Sequence: Synthetic oligonucleotide
  Antisense Strand to SEQ ID NO: 481309
ucaaaugucaaguucuggg

SEQ ID NO: 481311 - RNA, 19 nt, Artificial Sequence
  Description of Artificial Sequence: Synthetic oligonucleotide
  Sense strand starting at position 553 of SEQ ID NO: 317315
cucaucucucuuggaggau

SEQ ID NO: 481312 - RNA, 19 nt, Artificial Sequence
  Description of Artificial Sequence: Synthetic oligonucleotide
  Antisense Strand to SEQ ID NO: 481311
auccuccaagagagaugag

SEQ ID NO: 481313 - RNA, 19 nt, Artificial Sequence
  Description of Artificial Sequence: Synthetic oligonucleotide
  Sense strand starting at position 634 of SEQ ID NO: 317315
guuagaaugacugaguccu

SEQ ID NO: 481314 - RNA, 19 nt, Artificial Sequence
  Description of Artificial Sequence: Synthetic oligonucleotide
  Antisense Strand to SEQ ID NO: 481313
aggacucagucauucuaac

SEQ ID NO: 481315 - RNA, 19 nt, Artificial Sequence
  Description of Artificial Sequence: Synthetic oligonucleotide
  Sense strand starting at position 636 of SEQ ID NO: 317315
uagaaugacugaguccuua

SEQ ID NO: 481316 - RNA, 19 nt, Artificial Sequence
  Description of Artificial Sequence: Synthetic oligonucleotide
  Antisense Strand to SEQ ID NO: 481315
uaaggacucagucauucua

SEQ ID NO: 481317 - RNA, 19 nt, Artificial Sequence
  Description of Artificial Sequence: Synthetic oligonucleotide
  Sense strand starting at position 738 of SEQ ID NO: 317315
ugaauaagcugcuuaaaga

SEQ ID NO: 481318 - RNA, 19 nt, Artificial Sequence
  Description of Artificial Sequence: Synthetic oligonucleotide
  Antisense Strand to SEQ ID NO: 481317
ucuuuaagcagcuuauuca

SEQ ID NO: 481319 - RNA, 19 nt, Artificial Sequence
  Description of Artificial Sequence: Synthetic oligonucleotide
  Sense strand starting at position 1263 of SEQ ID NO: 317315
aguucugaggacugggaua

SEQ ID NO: 481320 - RNA, 19 nt, Artificial Sequence
  Description of Artificial Sequence: Synthetic oligonucleotide
  Antisense Strand to SEQ ID NO: 481319
uaucccaguccucagaacu

SEQ ID NO: 481321 - RNA, 19 nt, Artificial Sequence
  Description of Artificial Sequence: Synthetic oligonucleotide
  Sense strand starting at position 1368 of SEQ ID NO: 317315
ugaaaugacuuuccuaguc

SEQ ID NO: 481322 - RNA, 19 nt, Artificial Sequence
  Description of Artificial Sequence: Synthetic oligonucleotide
  Antisense Strand to SEQ ID NO: 481321
gacuaggaaagucauuuca

SEQ ID NO: 481323 - RNA, 19 nt, Artificial Sequence
  Description of Artificial Sequence: Synthetic oligonucleotide
  Sense strand starting at position 1373 of SEQ ID NO: 317315
ugacuuuccuagucaagaa

SEQ ID NO: 481324 - RNA, 19 nt, Artificial Sequence
  Description of Artificial Sequence: Synthetic oligonucleotide
  Antisense Strand to SEQ ID NO: 481323
uucuugacuaggaaaguca

SEQ ID NO: 481325 - RNA, 19 nt, Artificial Sequence
  Description of Artificial Sequence: Synthetic oligonucleotide
  Sense strand starting at position 1467 of SEQ ID NO: 317315
gcaucaucuccucagagga

SEQ ID NO: 481326 - RNA, 19 nt, Artificial Sequence
  Description of Artificial Sequence: Synthetic oligonucleotide
  Antisense Strand to SEQ ID NO: 481325
uccucugaggagaugaugc

SEQ ID NO: 481327 - RNA, 19 nt, Artificial Sequence
  Description of Artificial Sequence: Synthetic oligonucleotide
  Sense strand starting at position 1538 of SEQ ID NO: 317315
acaguaauacuuuggagua

SEQ ID NO: 481328 - RNA, 19 nt, Artificial Sequence
  Description of Artificial Sequence: Synthetic oligonucleotide
  Antisense Strand to SEQ ID NO: 481327
uacuccaaaguauuacugu

SEQ ID NO: 481329 - RNA, 19 nt, Artificial Sequence
  Description of Artificial Sequence: Synthetic oligonucleotide
  Sense strand starting at position 1630 of SEQ ID NO: 317315
agaggaugcuucuuaaaug

SEQ ID NO: 481330 - RNA, 19 nt, Artificial Sequence
  Description of Artificial Sequence: Synthetic oligonucleotide
  Antisense Strand to SEQ ID NO: 481329
cauuuaagaagcauccucu

SEQ ID NO: 481331 - RNA, 19 nt, Artificial Sequence
  Description of Artificial Sequence: Synthetic oligonucleotide
  Sense strand starting at position 1870 of SEQ ID NO: 317315
agaacagcuucuuuacaga

SEQ ID NO: 481332 - RNA, 19 nt, Artificial Sequence
  Description of Artificial Sequence: Synthetic oligonucleotide
  Antisense Strand to SEQ ID NO: 481331
ucuguaaagaagcuguucu

SEQ ID NO: 481333 - RNA, 19 nt, Artificial Sequence
  Description of Artificial Sequence: Synthetic oligonucleotide
  Sense strand starting at position 2181 of SEQ ID NO: 317315
cccaaagacucauuaguag

SEQ ID NO: 481334 - RNA, 19 nt, Artificial Sequence
  Description of Artificial Sequence: Synthetic oligonucleotide
  Antisense Strand to SEQ ID NO: 481333
cuacuaaugagucuuuggg

SEQ ID NO: 481335 - RNA, 19 nt, Artificial Sequence
  Description of Artificial Sequence: Synthetic oligonucleotide
  Sense strand starting at position 2192 of SEQ ID NO: 317315
auuaguagucaauggaaag

SEQ ID NO: 481336 - RNA, 19 nt, Artificial Sequence
  Description of Artificial Sequence: Synthetic oligonucleotide
  Antisense Strand to SEQ ID NO: 481335
cuuuccauugacuacuaau

SEQ ID NO: 481337 - RNA, 19 nt, Artificial Sequence
  Description of Artificial Sequence: Synthetic oligonucleotide
  Sense strand starting at position 2382 of SEQ ID NO: 317315
uuguaauggaguuggaauu

SEQ ID NO: 481338 - RNA, 19 nt, Artificial Sequence
  Description of Artificial Sequence: Synthetic oligonucleotide
  Antisense Strand to SEQ ID NO: 481337
aauuccaacuccauuacaa

SEQ ID NO: 481339 - RNA, 19 nt, Artificial Sequence
  Description of Artificial Sequence: Synthetic oligonucleotide
  Sense strand starting at position 2383 of SEQ ID NO: 317315
uguaauggaguuggaauua

SEQ ID NO: 481340 - RNA, 19 nt, Artificial Sequence
  Description of Artificial Sequence: Synthetic oligonucleotide
  Antisense Strand to SEQ ID NO: 481339
uaauuccaacuccauuaca

SEQ ID NO: 481341 - RNA, 19 nt, Artificial Sequence
  Description of Artificial Sequence: Synthetic oligonucleotide
  Sense strand starting at position 2422 of SEQ ID NO: 317315
aagggcauuccagguugaa

SEQ ID NO: 481342 - RNA, 19 nt, Artificial Sequence
  Description of Artificial Sequence: Synthetic oligonucleotide
  Antisense Strand to SEQ ID NO: 481341
uucaaccuggaaugcccuu

SEQ ID NO: 481343 - RNA, 19 nt, Artificial Sequence
  Description of Artificial Sequence: Synthetic oligonucleotide
  Sense strand starting at position 2467 of SEQ ID NO: 317315
gggugacaacuucggagau

SEQ ID NO: 481344 - RNA, 19 nt, Artificial Sequence
  Description of Artificial Sequence: Synthetic oligonucleotide
  Antisense Strand to SEQ ID NO: 481343
aucuccgaaguugucaccc

SEQ ID NO: 481345 - RNA, 19 nt, Artificial Sequence
  Description of Artificial Sequence: Synthetic oligonucleotide
  Sense strand starting at position 2668 of SEQ ID NO: 317315
gaaggaugguuuccuggga

SEQ ID NO: 481346 - RNA, 19 nt, Artificial Sequence
  Description of Artificial Sequence: Synthetic oligonucleotide
  Antisense Strand to SEQ ID NO: 481345
ucccaggaaaccauccuuc

SEQ ID NO: 481347 - RNA, 19 nt, Artificial Sequence
  Description of Artificial Sequence: Synthetic oligonucleotide
  Sense strand starting at position 2672 of SEQ ID NO: 317315
gaugguuuccugggaggaa

SEQ ID NO: 481348 - RNA, 19 nt, Artificial Sequence
  Description of Artificial Sequence: Synthetic oligonucleotide
  Antisense Strand to SEQ ID NO: 481347
uuccucccaggaaaccauc

SEQ ID NO: 481349 - RNA, 19 nt, Artificial Sequence
  Description of Artificial Sequence: Synthetic oligonucleotide
  Sense strand starting at position 2721 of SEQ ID NO: 317315
ugcuguaguccagaaggga

SEQ ID NO: 481350 - RNA, 19 nt, Artificial Sequence
  Description of Artificial Sequence: Synthetic oligonucleotide
  Antisense Strand to SEQ ID NO: 481349
ucccuucuggacuacagca

SEQ ID NO: 481351 - RNA, 19 nt, Artificial Sequence
  Description of Artificial Sequence: Synthetic oligonucleotide
  Sense strand starting at position 2784 of SEQ ID NO: 317315
uuauguuuagcauagagau

SEQ ID NO: 481352 - RNA, 19 nt, Artificial Sequence
  Description of Artificial Sequence: Synthetic oligonucleotide
  Antisense Strand to SEQ ID NO: 481351
aucucuaugcuaaacauaa

SEQ ID NO: 481353 - RNA, 19 nt, Artificial Sequence
  Description of Artificial Sequence: Synthetic oligonucleotide
  Sense strand starting at position 2831 of SEQ ID NO: 317315
gggccuuuggacgaugaua

SEQ ID NO: 481354 - RNA, 19 nt, Artificial Sequence
  Description of Artificial Sequence: Synthetic oligonucleotide
  Antisense Strand to SEQ ID NO: 481353
uaucaucguccaaaggccc

SEQ ID NO: 481355 - RNA, 19 nt, Artificial Sequence
  Description of Artificial Sequence: Synthetic oligonucleotide
  Sense strand starting at position 2948 of SEQ ID NO: 317315
aaaugaguuaguuggugaa

SEQ ID NO: 481356 - RNA, 19 nt, Artificial Sequence
  Description of Artificial Sequence: Synthetic oligonucleotide
  Antisense Strand to SEQ ID NO: 481355
uucaccaacuaacucauuu

SEQ ID NO: 481357 - RNA, 19 nt, Artificial Sequence
  Description of Artificial Sequence: Synthetic oligonucleotide
  Sense strand starting at position 2954 of SEQ ID NO: 317315
guuaguuggugaacguuga

SEQ ID NO: 481358 - RNA, 19 nt, Artificial Sequence
  Description of Artificial Sequence: Synthetic oligonucleotide
  Antisense Strand to SEQ ID NO: 481357
ucaacguucaccaacuaac

SEQ ID NO: 481359 - RNA, 19 nt, Artificial Sequence
  Description of Artificial Sequence: Synthetic oligonucleotide
  Sense strand starting at position 2964 of SEQ ID NO: 317315
gaacguugaguuuaaggaa

SEQ ID NO: 481360 - RNA, 19 nt, Artificial Sequence
  Description of Artificial Sequence: Synthetic oligonucleotide
  Antisense Strand to SEQ ID NO: 481359
uuccuuaaacucaacguuc

SEQ ID NO: 481361 - RNA, 19 nt, Artificial Sequence
  Description of Artificial Sequence: Synthetic oligonucleotide
  Sense strand starting at position 3045 of SEQ ID NO: 317315
aagccuggucuagagaauu

SEQ ID NO: 481362 - RNA, 19 nt, Artificial Sequence
  Description of Artificial Sequence: Synthetic oligonucleotide
  Antisense Strand to SEQ ID NO: 481361
aauucucuagaccaggcuu

SEQ ID NO: 481363 - RNA, 19 nt, Artificial Sequence
  Description of Artificial Sequence: Synthetic oligonucleotide
  Sense strand starting at position 3349 of SEQ ID NO: 317315
guuucuagugucuuuguuu

SEQ ID NO: 481364 - RNA, 19 nt, Artificial Sequence
  Description of Artificial Sequence: Synthetic oligonucleotide
  Antisense Strand to SEQ ID NO: 481363
aaacaaagacacuagaaac

SEQ ID NO: 481365 - RNA, 19 nt, Artificial Sequence
  Description of Artificial Sequence: Synthetic oligonucleotide
  Sense strand starting at position 3499 of SEQ ID NO: 317315
aaauuaggagagugucauc

SEQ ID NO: 481366 - RNA, 19 nt, Artificial Sequence
  Description of Artificial Sequence: Synthetic oligonucleotide
  Antisense Strand to SEQ ID NO: 481365
gaugacacucuccuaauuu

SEQ ID NO: 481367 - RNA, 19 nt, Artificial Sequence
  Description of Artificial Sequence: Synthetic oligonucleotide
  Sense strand starting at position 3504 of SEQ ID NO: 317315
aggagagugucaucaugga

SEQ ID NO: 481368 - RNA, 19 nt, Artificial Sequence
  Description of Artificial Sequence: Synthetic oligonucleotide
  Antisense Strand to SEQ ID NO: 481367
uccaugaugacacucuccu

SEQ ID NO: 481369 - RNA, 19 nt, Artificial Sequence
  Description of Artificial Sequence: Synthetic oligonucleotide
  Sense strand starting at position 3509 of SEQ ID NO: 317315
agugucaucauggaaguua

SEQ ID NO: 481370 - RNA, 19 nt, Artificial Sequence
  Description of Artificial Sequence: Synthetic oligonucleotide
  Antisense Strand to SEQ ID NO: 481369
uaacuuccaugaugacacu

SEQ ID NO: 481371 - RNA, 19 nt, Artificial Sequence
  Description of Artificial Sequence: Synthetic oligonucleotide
  Sense strand starting at position 3692 of SEQ ID NO: 317315
ggucuccauuucgcugaaa

SEQ ID NO: 481372 - RNA, 19 nt, Artificial Sequence
  Description of Artificial Sequence: Synthetic oligonucleotide
  Antisense Strand to SEQ ID NO: 481371
uuucagcgaaauggagacc

SEQ ID NO: 481373 - RNA, 19 nt, Artificial Sequence
  Description of Artificial Sequence: Synthetic oligonucleotide
  Sense strand starting at position 3694 of SEQ ID NO: 317315
ucuccauuucgcugaaacu

SEQ ID NO: 481374 - RNA, 19 nt, Artificial Sequence
  Description of Artificial Sequence: Synthetic oligonucleotide
  Antisense Strand to SEQ ID NO: 481373
aguuucagcgaaauggaga

SEQ ID NO: 481375 - RNA, 19 nt, Artificial Sequence
  Description of Artificial Sequence: Synthetic oligonucleotide
  Sense strand starting at position 3842 of SEQ ID NO: 317315
uggaguuaauuuguuugca

SEQ ID NO: 481376 - RNA, 19 nt, Artificial Sequence
  Description of Artificial Sequence: Synthetic oligonucleotide
  Antisense Strand to SEQ ID NO: 481375
ugcaaacaaauuaacucca

SEQ ID NO: 481377 - RNA, 19 nt, Artificial Sequence
  Description of Artificial Sequence: Synthetic oligonucleotide
  Sense strand starting at position 3843 of SEQ ID NO: 317315
ggaguuaauuuguuugcau

SEQ ID NO: 481378 - RNA, 19 nt, Artificial Sequence
  Description of Artificial Sequence: Synthetic oligonucleotide
  Antisense Strand to SEQ ID NO: 481377
augcaaacaaauuaacucc

SEQ ID NO: 481379 - RNA, 19 nt, Artificial Sequence
  Description of Artificial Sequence: Synthetic oligonucleotide
  Sense strand starting at position 3844 of SEQ ID NO: 317315
gaguuaauuuguuugcaug

SEQ ID NO: 481380 - RNA, 19 nt, Artificial Sequence
  Description of Artificial Sequence: Synthetic oligonucleotide
  Antisense Strand to SEQ ID NO: 481379
caugcaaacaaauuaacuc

SEQ ID NO: 481381 - RNA, 19 nt, Artificial Sequence
  Description of Artificial Sequence: Synthetic oligonucleotide
  Sense strand starting at position 3845 of SEQ ID NO: 317315
aguuaauuuguuugcauga

SEQ ID NO: 481382 - RNA, 19 nt, Artificial Sequence
  Description of Artificial Sequence: Synthetic oligonucleotide
  Antisense Strand to SEQ ID NO: 481381
ucaugcaaacaaauuaacu

SEQ ID NO: 481383 - RNA, 19 nt, Artificial Sequence
  Description of Artificial Sequence: Synthetic oligonucleotide
  Sense strand starting at position 3846 of SEQ ID NO: 317315
guuaauuuguuugcaugau

SEQ ID NO: 481384 - RNA, 19 nt, Artificial Sequence
  Description of Artificial Sequence: Synthetic oligonucleotide
  Antisense Strand to SEQ ID NO: 481383
aucaugcaaacaaauuaac

SEQ ID NO: 481385 - RNA, 19 nt, Artificial Sequence
  Description of Artificial Sequence: Synthetic oligonucleotide
  Sense strand starting at position 113 of SEQ ID NO: 317316
ggcacucagagugaaaucu

SEQ ID NO: 481386 - RNA, 19 nt, Artificial Sequence
  Description of Artificial Sequence: Synthetic oligonucleotide
  Antisense Strand to SEQ ID NO: 481385
agauuucacucugagugcc

SEQ ID NO: 481387 - RNA, 19 nt, Artificial Sequence
  Description of Artificial Sequence: Synthetic oligonucleotide
  Sense strand starting at position 462 of SEQ ID NO: 317316
agagaagaaugcuuucuua

SEQ ID NO: 481388 - RNA, 19 nt, Artificial Sequence
  Description of Artificial Sequence: Synthetic oligonucleotide
  Antisense Strand to SEQ ID NO: 481387
uaagaaagcauucuucucu

SEQ ID NO: 481389 - RNA, 19 nt, Artificial Sequence
  Description of Artificial Sequence: Synthetic oligonucleotide
  Sense strand starting at position 625 of SEQ ID NO: 317316
gcgauuaaccugcuucggu

SEQ ID NO: 481390 - RNA, 19 nt, Artificial Sequence
  Description of Artificial Sequence: Synthetic oligonucleotide
  Antisense Strand to SEQ ID NO: 481389
accgaagcagguuaaucgc

SEQ ID NO: 481391 - RNA, 19 nt, Artificial Sequence
  Description of Artificial Sequence: Synthetic oligonucleotide
  Sense strand starting at position 667 of SEQ ID NO: 317316
agcagcaggaguuaucuaa

SEQ ID NO: 481392 - RNA, 19 nt, Artificial Sequence
  Description of Artificial Sequence: Synthetic oligonucleotide
  Antisense Strand to SEQ ID NO: 481391
uuagauaacuccugcugcu

SEQ ID NO: 481393 - RNA, 19 nt, Artificial Sequence
  Description of Artificial Sequence: Synthetic oligonucleotide
  Sense strand starting at position 671 of SEQ ID NO: 317316
gcaggaguuaucuaacgga

SEQ ID NO: 481394 - RNA, 19 nt, Artificial Sequence
  Description of Artificial Sequence: Synthetic oligonucleotide
  Antisense Strand to SEQ ID NO: 481393
uccguuagauaacuccugc

SEQ ID NO: 481395 - RNA, 19 nt, Artificial Sequence
  Description of Artificial Sequence: Synthetic oligonucleotide
  Sense strand starting at position 721 of SEQ ID NO: 317316
ugcgaauggcuauacaaug

SEQ ID NO: 481396 - RNA, 19 nt, Artificial Sequence
  Description of Artificial Sequence: Synthetic oligonucleotide
  Antisense Strand to SEQ ID NO: 481395
cauuguauagccauucgca

SEQ ID NO: 481397 - RNA, 19 nt, Artificial Sequence
  Description of Artificial Sequence: Synthetic oligonucleotide
  Sense strand starting at position 809 of SEQ ID NO: 317316
cuaccuugauccuuggaga

SEQ ID NO: 481398 - RNA, 19 nt, Artificial Sequence
  Description of Artificial Sequence: Synthetic oligonucleotide
  Antisense Strand to SEQ ID NO: 481397
ucuccaaggaucaagguag

SEQ ID NO: 481399 - RNA, 19 nt, Artificial Sequence
  Description of Artificial Sequence: Synthetic oligonucleotide
  Sense strand starting at position 810 of SEQ ID NO: 317316
uaccuugauccuuggagag

SEQ ID NO: 481400 - RNA, 19 nt, Artificial Sequence
  Description of Artificial Sequence: Synthetic oligonucleotide
  Antisense Strand to SEQ ID NO: 481399
cucuccaaggaucaaggua

SEQ ID NO: 481401 - RNA, 19 nt, Artificial Sequence
  Description of Artificial Sequence: Synthetic oligonucleotide
  Sense strand starting at position 822 of SEQ ID NO: 317316
uggagaggcuuucucuacu

SEQ ID NO: 481402 - RNA, 19 nt, Artificial Sequence
  Description of Artificial Sequence: Synthetic oligonucleotide
  Antisense Strand to SEQ ID NO: 481401
aguagagaaagccucucca

SEQ ID NO: 481403 - RNA, 19 nt, Artificial Sequence
  Description of Artificial Sequence: Synthetic oligonucleotide
  Sense strand starting at position 1020 of SEQ ID NO: 317316
agagauaccuguuuaaugc

SEQ ID NO: 481404 - RNA, 19 nt, Artificial Sequence
  Description of Artificial Sequence: Synthetic oligonucleotide
  Antisense Strand to SEQ ID NO: 481403
gcauuaaacagguaucucu

SEQ ID NO: 481405 - RNA, 19 nt, Artificial Sequence
  Description of Artificial Sequence: Synthetic oligonucleotide
  Sense strand starting at position 1043 of SEQ ID NO: 317316
cugauaaaugagugucuga

SEQ ID NO: 481406 - RNA, 19 nt, Artificial Sequence
  Description of Artificial Sequence: Synthetic oligonucleotide
  Antisense Strand to SEQ ID NO: 481405
ucagacacucauuuaucag

SEQ ID NO: 481407 - RNA, 19 nt, Artificial Sequence
  Description of Artificial Sequence: Synthetic oligonucleotide
  Sense strand starting at position 1252 of SEQ ID NO: 317316
uuugaauccuggcuuaacu

SEQ ID NO: 481408 - RNA, 19 nt, Artificial Sequence
  Description of Artificial Sequence: Synthetic oligonucleotide
  Antisense Strand to SEQ ID NO: 481407
aguuaagccaggauucaaa

SEQ ID NO: 481409 - RNA, 19 nt, Artificial Sequence
  Description of Artificial Sequence: Synthetic oligonucleotide
  Sense strand starting at position 1359 of SEQ ID NO: 317316
cucagaaacggacgucaau

SEQ ID NO: 481410 - RNA, 19 nt, Artificial Sequence
  Description of Artificial Sequence: Synthetic oligonucleotide
  Antisense Strand to SEQ ID NO: 481409
auugacguccguuucugag

SEQ ID NO: 481411 - RNA, 19 nt, Artificial Sequence
  Description of Artificial Sequence: Synthetic oligonucleotide
  Sense strand starting at position 1968 of SEQ ID NO: 317316
ucguguuuccggguaugac

SEQ ID NO: 481412 - RNA, 19 nt, Artificial Sequence
  Description of Artificial Sequence: Synthetic oligonucleotide
  Antisense Strand to SEQ ID NO: 481411
gucauacccggaaacacga

SEQ ID NO: 481413 - RNA, 19 nt, Artificial Sequence
  Description of Artificial Sequence: Synthetic oligonucleotide
  Sense strand starting at position 1976 of SEQ ID NO: 317316
ccggguaugaccggaaaua

SEQ ID NO: 481414 - RNA, 19 nt, Artificial Sequence
  Description of Artificial Sequence: Synthetic oligonucleotide
  Antisense Strand to SEQ ID NO: 481413
uauuuccggucauacccgg

SEQ ID NO: 481415 - RNA, 19 nt, Artificial Sequence
  Description of Artificial Sequence: Synthetic oligonucleotide
  Sense strand starting at position 1977 of SEQ ID NO: 317316
cggguaugaccggaaauag

SEQ ID NO: 481416 - RNA, 19 nt, Artificial Sequence
  Description of Artificial Sequence: Synthetic oligonucleotide
  Antisense Strand to SEQ ID NO: 481415
cuauuuccggucauacccg

SEQ ID NO: 481417 - RNA, 19 nt, Artificial Sequence
  Description of Artificial Sequence: Synthetic oligonucleotide
  Sense strand starting at position 1988 of SEQ ID NO: 317316
ggaaauagcgcaugggacu

SEQ ID NO: 481418 - RNA, 19 nt, Artificial Sequence
  Description of Artificial Sequence: Synthetic oligonucleotide
  Antisense Strand to SEQ ID NO: 481417
agucccaugcgcuauuucc

SEQ ID NO: 481419 - RNA, 19 nt, Artificial Sequence
  Description of Artificial Sequence: Synthetic oligonucleotide
  Sense strand starting at position 2053 of SEQ ID NO: 317316
gaagccucagagugucaaa

SEQ ID NO: 481420 - RNA, 19 nt, Artificial Sequence
  Description of Artificial Sequence: Synthetic oligonucleotide
  Antisense Strand to SEQ ID NO: 481419
uuugacacucugaggcuuc

SEQ ID NO: 481421 - RNA, 19 nt, Artificial Sequence
  Description of Artificial Sequence: Synthetic oligonucleotide
  Sense strand starting at position 2158 of SEQ ID NO: 317316
cuuaauauugccuugcguu

SEQ ID NO: 481422 - RNA, 19 nt, Artificial Sequence
  Description of Artificial Sequence: Synthetic oligonucleotide
  Antisense Strand to SEQ ID NO: 481421
aacgcaaggcaauauuaag

SEQ ID NO: 481423 - RNA, 19 nt, Artificial Sequence
  Description of Artificial Sequence: Synthetic oligonucleotide
  Sense strand starting at position 2165 of SEQ ID NO: 317316
uugccuugcguuucugaaa

SEQ ID NO: 481424 - RNA, 19 nt, Artificial Sequence
  Description of Artificial Sequence: Synthetic oligonucleotide
  Antisense Strand to SEQ ID NO: 481423
uuucagaaacgcaaggcaa

SEQ ID NO: 481425 - RNA, 19 nt, Artificial Sequence
  Description of Artificial Sequence: Synthetic oligonucleotide
  Sense strand starting at position 2209 of SEQ ID NO: 317316
guguguuagcauguaucgu

SEQ ID NO: 481426 - RNA, 19 nt, Artificial Sequence
  Description of Artificial Sequence: Synthetic oligonucleotide
  Antisense Strand to SEQ ID NO: 481425
acgauacaugcuaacacac

SEQ ID NO: 481427 - RNA, 19 nt, Artificial Sequence
  Description of Artificial Sequence: Synthetic oligonucleotide
  Sense strand starting at position 2641 of SEQ ID NO: 317316
agcaacgagggucauauaa

SEQ ID NO: 481428 - RNA, 19 nt, Artificial Sequence
  Description of Artificial Sequence: Synthetic oligonucleotide
  Antisense Strand to SEQ ID NO: 481427
uuauaugacccucguugcu

SEQ ID NO: 481429 - RNA, 19 nt, Artificial Sequence
  Description of Artificial Sequence: Synthetic oligonucleotide
  Sense strand starting at position 2753 of SEQ ID NO: 317316
ugugaucauguugaccauu

SEQ ID NO: 481430 - RNA, 19 nt, Artificial Sequence
  Description of Artificial Sequence: Synthetic oligonucleotide
  Antisense Strand to SEQ ID NO: 481429
aauggucaacaugaucaca

SEQ ID NO: 481431 - RNA, 19 nt, Artificial Sequence
  Description of Artificial Sequence: Synthetic oligonucleotide
  Sense strand starting at position 2755 of SEQ ID NO: 317316
ugaucauguugaccauuaa

SEQ ID NO: 481432 - RNA, 19 nt, Artificial Sequence
  Description of Artificial Sequence: Synthetic oligonucleotide
  Antisense Strand to SEQ ID NO: 481431
uuaauggucaacaugauca

SEQ ID NO: 481433 - RNA, 19 nt, Artificial Sequence
  Description of Artificial Sequence: Synthetic oligonucleotide
  Sense strand starting at position 2882 of SEQ ID NO: 317316
cuacaaucucaagguguaa

SEQ ID NO: 481434 - RNA, 19 nt, Artificial Sequence
  Description of Artificial Sequence: Synthetic oligonucleotide
  Antisense Strand to SEQ ID NO: 481433
uuacaccuugagauuguag

SEQ ID NO: 481435 - RNA, 19 nt, Artificial Sequence
  Description of Artificial Sequence: Synthetic oligonucleotide
  Sense strand starting at position 2932 of SEQ ID NO: 317316
gguguugugaauuagagag

SEQ ID NO: 481436 - RNA, 19 nt, Artificial Sequence
  Description of Artificial Sequence: Synthetic oligonucleotide
  Antisense Strand to SEQ ID NO: 481435
cucucuaauucacaacacc

SEQ ID NO: 481437 - RNA, 19 nt, Artificial Sequence
  Description of Artificial Sequence: Synthetic oligonucleotide
  Sense strand starting at position 3091 of SEQ ID NO: 317316
gaaguugacugccucaauu

SEQ ID NO: 481438 - RNA, 19 nt, Artificial Sequence
  Description of Artificial Sequence: Synthetic oligonucleotide
  Antisense Strand to SEQ ID NO: 481437
aauugaggcagucaacuuc

SEQ ID NO: 481439 - RNA, 19 nt, Artificial Sequence
  Description of Artificial Sequence: Synthetic oligonucleotide
  Sense strand starting at position 3140 of SEQ ID NO: 317316
cuagacagucuugauugua

SEQ ID NO: 481440 - RNA, 19 nt, Artificial Sequence
  Description of Artificial Sequence: Synthetic oligonucleotide
  Antisense Strand to SEQ ID NO: 481439
uacaaucaagacugucuag

SEQ ID NO: 481441 - RNA, 19 nt, Artificial Sequence
  Description of Artificial Sequence: Synthetic oligonucleotide
  Sense strand starting at position 3143 of SEQ ID NO: 317316
gacagucuugauuguaacu

SEQ ID NO: 481442 - RNA, 19 nt, Artificial Sequence
  Description of Artificial Sequence: Synthetic oligonucleotide
  Antisense Strand to SEQ ID NO: 481441
aguuacaaucaagacuguc

SEQ ID NO: 481443 - RNA, 19 nt, Artificial Sequence
  Description of Artificial Sequence: Synthetic oligonucleotide
  Sense strand starting at position 3227 of SEQ ID NO: 317316
uaggguucugcuuaaccaa

SEQ ID NO: 481444 - RNA, 19 nt, Artificial Sequence
  Description of Artificial Sequence: Synthetic oligonucleotide
  Antisense Strand to SEQ ID NO: 481443
uugguuaagcagaacccua

SEQ ID NO: 481445 - RNA, 19 nt, Artificial Sequence
  Description of Artificial Sequence: Synthetic oligonucleotide
  Sense strand starting at position 3264 of SEQ ID NO: 317316
caaccucaucugugacgau

SEQ ID NO: 481446 - RNA, 19 nt, Artificial Sequence
  Description of Artificial Sequence: Synthetic oligonucleotide
  Antisense Strand to SEQ ID NO: 481445
aucgucacagaugagguug

SEQ ID NO: 481447 - RNA, 19 nt, Artificial Sequence
  Description of Artificial Sequence: Synthetic oligonucleotide
  Sense strand starting at position 3268 of SEQ ID NO: 317316
cucaucugugacgaugaua

SEQ ID NO: 481448 - RNA, 19 nt, Artificial Sequence
  Description of Artificial Sequence: Synthetic oligonucleotide
  Antisense Strand to SEQ ID NO: 481447
uaucaucgucacagaugag

SEQ ID NO: 481449 - RNA, 19 nt, Artificial Sequence
  Description of Artificial Sequence: Synthetic oligonucleotide
  Sense strand starting at position 3597 of SEQ ID NO: 317316
ugagcuggguaguucaaga

SEQ ID NO: 481450 - RNA, 19 nt, Artificial Sequence
  Description of Artificial Sequence: Synthetic oligonucleotide
  Antisense Strand to SEQ ID NO: 481449
ucuugaacuacccagcuca

SEQ ID NO: 481451 - RNA, 19 nt, Artificial Sequence
  Description of Artificial Sequence: Synthetic oligonucleotide
  Sense strand starting at position 3847 of SEQ ID NO: 317316
aaaugucugguguauugaa

SEQ ID NO: 481452 - RNA, 19 nt, Artificial Sequence
  Description of Artificial Sequence: Synthetic oligonucleotide
  Antisense Strand to SEQ ID NO: 481451
uucaauacaccagacauuu

SEQ ID NO: 481453 - RNA, 19 nt, Artificial Sequence
  Description of Artificial Sequence: Synthetic oligonucleotide
  Sense strand starting at position 3875 of SEQ ID NO: 317316
auaaguuuggugugacuaa

SEQ ID NO: 481454 - RNA, 19 nt, Artificial Sequence
  Description of Artificial Sequence: Synthetic oligonucleotide
  Antisense Strand to SEQ ID NO: 481453
uuagucacaccaaacuuau

SEQ ID NO: 481455 - RNA, 19 nt, Artificial Sequence
  Description of Artificial Sequence: Synthetic oligonucleotide
  Sense strand starting at position 3922 of SEQ ID NO: 317316
aagagcugagaagguuaua

SEQ ID NO: 481456 - RNA, 19 nt, Artificial Sequence
  Description of Artificial Sequence: Synthetic oligonucleotide
  Antisense Strand to SEQ ID NO: 481455
uauaaccuucucagcucuu

SEQ ID NO: 481457 - RNA, 19 nt, Artificial Sequence
  Description of Artificial Sequence: Synthetic oligonucleotide
  Sense strand starting at position 3932 of SEQ ID NO: 317316
aagguuauauuguccugau

SEQ ID NO: 481458 - RNA, 19 nt, Artificial Sequence
  Description of Artificial Sequence: Synthetic oligonucleotide
  Antisense Strand to SEQ ID NO: 481457
aucaggacaauauaaccuu

SEQ ID NO: 481459 - RNA, 19 nt, Artificial Sequence
  Description of Artificial Sequence: Synthetic oligonucleotide
  Sense strand starting at position 3933 of SEQ ID NO: 317316
agguuauauuguccugaua

SEQ ID NO: 481460 - RNA, 19 nt, Artificial Sequence
  Description of Artificial Sequence: Synthetic oligonucleotide
  Antisense Strand to SEQ ID NO: 481459
uaucaggacaauauaaccu

SEQ ID NO: 481461 - RNA, 19 nt, Artificial Sequence
  Description of Artificial Sequence: Synthetic oligonucleotide
  Sense strand starting at position 3936 of SEQ ID NO: 317316
uuauauuguccugauauga

SEQ ID NO: 481462 - RNA, 19 nt, Artificial Sequence
  Description of Artificial Sequence: Synthetic oligonucleotide
  Antisense Strand to SEQ ID NO: 481461
ucauaucaggacaauauaa

SEQ ID NO: 481463 - RNA, 19 nt, Artificial Sequence
  Description of Artificial Sequence: Synthetic oligonucleotide
  Sense strand starting at position 3980 of SEQ ID NO: 317316
gggcauauaggucaguuca

SEQ ID NO: 481464 - RNA, 19 nt, Artificial Sequence
  Description of Artificial Sequence: Synthetic oligonucleotide
  Antisense Strand to SEQ ID NO: 481463
ugaacugaccuauaugccc

SEQ ID NO: 481465 - RNA, 19 nt, Artificial Sequence
  Description of Artificial Sequence: Synthetic oligonucleotide
  Sense strand starting at position 27 of SEQ ID NO: 317317
uguugaaaugauuauugca

SEQ ID NO: 481466 - RNA, 19 nt, Artificial Sequence
  Description of Artificial Sequence: Synthetic oligonucleotide
  Antisense Strand to SEQ ID NO: 481465
ugcaauaaucauuucaaca

SEQ ID NO: 481467 - RNA, 19 nt, Artificial Sequence
  Description of Artificial Sequence: Synthetic oligonucleotide
  Sense strand starting at position 29 of SEQ ID NO: 317317
uugaaaugauuauugcaac

SEQ ID NO: 481468 - RNA, 19 nt, Artificial Sequence
  Description of Artificial Sequence: Synthetic oligonucleotide
  Antisense Strand to SEQ ID NO: 481467
guugcaauaaucauuucaa

SEQ ID NO: 481469 - RNA, 19 nt, Artificial Sequence
  Description of Artificial Sequence: Synthetic oligonucleotide
  Sense strand starting at position 142 of SEQ ID NO: 317317
ugauuacacuuggcugagu

SEQ ID NO: 481470 - RNA, 19 nt, Artificial Sequence
  Description of Artificial Sequence: Synthetic oligonucleotide
  Antisense Strand to SEQ ID NO: 481469
acucagccaaguguaauca

SEQ ID NO: 481471 - RNA, 19 nt, Artificial Sequence
  Description of Artificial Sequence: Synthetic oligonucleotide
  Sense strand starting at position 143 of SEQ ID NO: 317317
gauuacacuuggcugagua

SEQ ID NO: 481472 - RNA, 19 nt, Artificial Sequence
  Description of Artificial Sequence: Synthetic oligonucleotide
  Antisense Strand to SEQ ID NO: 481471
uacucagccaaguguaauc

SEQ ID NO: 481473 - RNA, 19 nt, Artificial Sequence
  Description of Artificial Sequence: Synthetic oligonucleotide
  Sense strand starting at position 147 of SEQ ID NO: 317317
acacuuggcugaguacaua

SEQ ID NO: 481474 - RNA, 19 nt, Artificial Sequence
  Description of Artificial Sequence: Synthetic oligonucleotide
  Antisense Strand to SEQ ID NO: 481473
uauguacucagccaagugu

SEQ ID NO: 481475 - RNA, 19 nt, Artificial Sequence
  Description of Artificial Sequence: Synthetic oligonucleotide
  Sense strand starting at position 279 of SEQ ID NO: 317317
auccuugaaucacugguaa

SEQ ID NO: 481476 - RNA, 19 nt, Artificial Sequence
  Description of Artificial Sequence: Synthetic oligonucleotide
  Antisense Strand to SEQ ID NO: 481475
uuaccagugauucaaggau

SEQ ID NO: 481477 - RNA, 19 nt, Artificial Sequence
  Description of Artificial Sequence: Synthetic oligonucleotide
  Sense strand starting at position 292 of SEQ ID NO: 317317
ugguaaacaugagucuaca

SEQ ID NO: 481478 - RNA, 19 nt, Artificial Sequence
  Description of Artificial Sequence: Synthetic oligonucleotide
  Antisense Strand to SEQ ID NO: 481477
uguagacucauguuuacca

SEQ ID NO: 481479 - RNA, 19 nt, Artificial Sequence
  Description of Artificial Sequence: Synthetic oligonucleotide
  Sense strand starting at position 300 of SEQ ID NO: 317317
augagucuacaauguucua

SEQ ID NO: 481480 - RNA, 19 nt, Artificial Sequence
  Description of Artificial Sequence: Synthetic oligonucleotide
  Antisense Strand to SEQ ID NO: 481479
uagaacauuguagacucau

SEQ ID NO: 481481 - RNA, 19 nt, Artificial Sequence
  Description of Artificial Sequence: Synthetic oligonucleotide
  Sense strand starting at position 500 of SEQ ID NO: 317317
cugagaguacagcauguaa

SEQ ID NO: 481482 - RNA, 19 nt, Artificial Sequence
  Description of Artificial Sequence: Synthetic oligonucleotide
  Antisense Strand to SEQ ID NO: 481481
uuacaugcuguacucucag

SEQ ID NO: 481483 - RNA, 19 nt, Artificial Sequence
  Description of Artificial Sequence: Synthetic oligonucleotide
  Sense strand starting at position 502 of SEQ ID NO: 317317
gagaguacagcauguaaua

SEQ ID NO: 481484 - RNA, 19 nt, Artificial Sequence
  Description of Artificial Sequence: Synthetic oligonucleotide
  Antisense Strand to SEQ ID NO: 481483
uauuacaugcuguacucuc

SEQ ID NO: 481485 - RNA, 19 nt, Artificial Sequence
  Description of Artificial Sequence: Synthetic oligonucleotide
  Sense strand starting at position 511 of SEQ ID NO: 317317
gcauguaauacugauaggu

SEQ ID NO: 481486 - RNA, 19 nt, Artificial Sequence
  Description of Artificial Sequence: Synthetic oligonucleotide
  Antisense Strand to SEQ ID NO: 481485
accuaucaguauuacaugc

SEQ ID NO: 481487 - RNA, 19 nt, Artificial Sequence
  Description of Artificial Sequence: Synthetic oligonucleotide
  Sense strand starting at position 628 of SEQ ID NO: 317317
cuuagauguugauuaaacu

SEQ ID NO: 481488 - RNA, 19 nt, Artificial Sequence
  Description of Artificial Sequence: Synthetic oligonucleotide
  Antisense Strand to SEQ ID NO: 481487
aguuuaaucaacaucuaag

SEQ ID NO: 481489 - RNA, 19 nt, Artificial Sequence
  Description of Artificial Sequence: Synthetic oligonucleotide
  Sense strand starting at position 768 of SEQ ID NO: 317317
gucaauuacuuuccaaggu

SEQ ID NO: 481490 - RNA, 19 nt, Artificial Sequence
  Description of Artificial Sequence: Synthetic oligonucleotide
  Antisense Strand to SEQ ID NO: 481489
accuuggaaaguaauugac

SEQ ID NO: 481491 - RNA, 19 nt, Artificial Sequence
  Description of Artificial Sequence: Synthetic oligonucleotide
  Sense strand starting at position 864 of SEQ ID NO: 317317
agcauuagggaaugcauau

SEQ ID NO: 481492 - RNA, 19 nt, Artificial Sequence
  Description of Artificial Sequence: Synthetic oligonucleotide
  Antisense Strand to SEQ ID NO: 481491
auaugcauucccuaaugcu

SEQ ID NO: 481493 - RNA, 19 nt, Artificial Sequence
  Description of Artificial Sequence: Synthetic oligonucleotide
  Sense strand starting at position 871 of SEQ ID NO: 317317
gggaaugcauauccaucau

SEQ ID NO: 481494 - RNA, 19 nt, Artificial Sequence
  Description of Artificial Sequence: Synthetic oligonucleotide
  Antisense Strand to SEQ ID NO: 481493
augauggauaugcauuccc

SEQ ID NO: 481495 - RNA, 19 nt, Artificial Sequence
  Description of Artificial Sequence: Synthetic oligonucleotide
  Sense strand starting at position 1050 of SEQ ID NO: 317317
guucguuuaaauccguuua

SEQ ID NO: 481496 - RNA, 19 nt, Artificial Sequence
  Description of Artificial Sequence: Synthetic oligonucleotide
  Antisense Strand to SEQ ID NO: 481495
uaaacggauuuaaacgaac

SEQ ID NO: 481497 - RNA, 19 nt, Artificial Sequence
  Description of Artificial Sequence: Synthetic oligonucleotide
  Sense strand starting at position 1203 of SEQ ID NO: 317317
cuacaaacuugagugcaaa

SEQ ID NO: 481498 - RNA, 19 nt, Artificial Sequence
  Description of Artificial Sequence: Synthetic oligonucleotide
  Antisense Strand to SEQ ID NO: 481497
uuugcacucaaguuuguag

SEQ ID NO: 481499 - RNA, 19 nt, Artificial Sequence
  Description of Artificial Sequence: Synthetic oligonucleotide
  Sense strand starting at position 2306 of SEQ ID NO: 317317
ucguguugaggcgaaagga

SEQ ID NO: 481500 - RNA, 19 nt, Artificial Sequence
  Description of Artificial Sequence: Synthetic oligonucleotide
  Antisense Strand to SEQ ID NO: 481499
uccuuucgccucaacacga

SEQ ID NO: 481501 - RNA, 19 nt, Artificial Sequence
  Description of Artificial Sequence: Synthetic oligonucleotide
  Sense strand starting at position 2491 of SEQ ID NO: 317317
ggaacaauggcuuggguuu

SEQ ID NO: 481502 - RNA, 19 nt, Artificial Sequence
  Description of Artificial Sequence: Synthetic oligonucleotide
  Antisense Strand to SEQ ID NO: 481501
aaacccaagccauuguucc

SEQ ID NO: 481503 - RNA, 19 nt, Artificial Sequence
  Description of Artificial Sequence: Synthetic oligonucleotide
  Sense strand starting at position 2593 of SEQ ID NO: 317317
auauaauuccuuggcaaag

SEQ ID NO: 481504 - RNA, 19 nt, Artificial Sequence
  Description of Artificial Sequence: Synthetic oligonucleotide
  Antisense Strand to SEQ ID NO: 481503
cuuugccaaggaauuauau

SEQ ID NO: 481505 - RNA, 19 nt, Artificial Sequence
  Description of Artificial Sequence: Synthetic oligonucleotide
  Sense strand starting at position 2793 of SEQ ID NO: 317317
guugguguuccgagaaguu

SEQ ID NO: 481506 - RNA, 19 nt, Artificial Sequence
  Description of Artificial Sequence: Synthetic oligonucleotide
  Antisense Strand to SEQ ID NO: 481505
aacuucucggaacaccaac

SEQ ID NO: 481507 - RNA, 19 nt, Artificial Sequence
  Description of Artificial Sequence: Synthetic oligonucleotide
  Sense strand starting at position 2827 of SEQ ID NO: 317317
uugucuacauuaguggaau

SEQ ID NO: 481508 - RNA, 19 nt, Artificial Sequence
  Description of Artificial Sequence: Synthetic oligonucleotide
  Antisense Strand to SEQ ID NO: 481507
auuccacuaauguagacaa

SEQ ID NO: 481509 - RNA, 19 nt, Artificial Sequence
  Description of Artificial Sequence: Synthetic oligonucleotide
  Sense strand starting at position 2830 of SEQ ID NO: 317317
ucuacauuaguggaaucuu

SEQ ID NO: 481510 - RNA, 19 nt, Artificial Sequence
  Description of Artificial Sequence: Synthetic oligonucleotide
  Antisense Strand to SEQ ID NO: 481509
aagauuccacuaauguaga

SEQ ID NO: 481511 - RNA, 19 nt, Artificial Sequence
  Description of Artificial Sequence: Synthetic oligonucleotide
  Sense strand starting at position 2922 of SEQ ID NO: 317317
uuggaauccugaguauguc

SEQ ID NO: 481512 - RNA, 19 nt, Artificial Sequence
  Description of Artificial Sequence: Synthetic oligonucleotide
  Antisense Strand to SEQ ID NO: 481511
gacauacucaggauuccaa

SEQ ID NO: 481513 - RNA, 19 nt, Artificial Sequence
  Description of Artificial Sequence: Synthetic oligonucleotide
  Sense strand starting at position 2923 of SEQ ID NO: 317317
uggaauccugaguauguca

SEQ ID NO: 481514 - RNA, 19 nt, Artificial Sequence
  Description of Artificial Sequence: Synthetic oligonucleotide
  Antisense Strand to SEQ ID NO: 481513
ugacauacucaggauucca

SEQ ID NO: 481515 - RNA, 19 nt, Artificial Sequence
  Description of Artificial Sequence: Synthetic oligonucleotide
  Sense strand starting at position 2947 of SEQ ID NO: 317317
cuguauuggagaugagauu

SEQ ID NO: 481516 - RNA, 19 nt, Artificial Sequence
  Description of Artificial Sequence: Synthetic oligonucleotide
  Antisense Strand to SEQ ID NO: 481515
aaucucaucuccaauacag

SEQ ID NO: 481517 - RNA, 19 nt, Artificial Sequence
  Description of Artificial Sequence: Synthetic oligonucleotide
  Sense strand starting at position 3060 of SEQ ID NO: 317317
auuguaguccuagaauaau

SEQ ID NO: 481518 - RNA, 19 nt, Artificial Sequence
  Description of Artificial Sequence: Synthetic oligonucleotide
  Antisense Strand to SEQ ID NO: 481517
auuauucuaggacuacaau

SEQ ID NO: 481519 - RNA, 19 nt, Artificial Sequence
  Description of Artificial Sequence: Synthetic oligonucleotide
  Sense strand starting at position 3089 of SEQ ID NO: 317317
ccuuuaguuguugccguaa

SEQ ID NO: 481520 - RNA, 19 nt, Artificial Sequence
  Description of Artificial Sequence: Synthetic oligonucleotide
  Antisense Strand to SEQ ID NO: 481519
uuacggcaacaacuaaagg

SEQ ID NO: 481521 - RNA, 19 nt, Artificial Sequence
  Description of Artificial Sequence: Synthetic oligonucleotide
  Sense strand starting at position 3092 of SEQ ID NO: 317317
uuaguuguugccguaaauu

SEQ ID NO: 481522 - RNA, 19 nt, Artificial Sequence
  Description of Artificial Sequence: Synthetic oligonucleotide
  Antisense Strand to SEQ ID NO: 481521
aauuuacggcaacaacuaa

SEQ ID NO: 481523 - RNA, 19 nt, Artificial Sequence
  Description of Artificial Sequence: Synthetic oligonucleotide
  Sense strand starting at position 3358 of SEQ ID NO: 317317
ucuauaauuacguggguaa

SEQ ID NO: 481524 - RNA, 19 nt, Artificial Sequence
  Description of Artificial Sequence: Synthetic oligonucleotide
  Antisense Strand to SEQ ID NO: 481523
uuacccacguaauuauaga

SEQ ID NO: 481525 - RNA, 19 nt, Artificial Sequence
  Description of Artificial Sequence: Synthetic oligonucleotide
  Sense strand starting at position 3359 of SEQ ID NO: 317317
cuauaauuacguggguaag

SEQ ID NO: 481526 - RNA, 19 nt, Artificial Sequence
  Description of Artificial Sequence: Synthetic oligonucleotide
  Antisense Strand to SEQ ID NO: 481525
cuuacccacguaauuauag

SEQ ID NO: 481527 - RNA, 19 nt, Artificial Sequence
  Description of Artificial Sequence: Synthetic oligonucleotide
  Sense strand starting at position 3412 of SEQ ID NO: 317317
auguauucuccuggguaua

SEQ ID NO: 481528 - RNA, 19 nt, Artificial Sequence
  Description of Artificial Sequence: Synthetic oligonucleotide
  Antisense Strand to SEQ ID NO: 481527
uauacccaggagaauacau

SEQ ID NO: 481529 - RNA, 19 nt, Artificial Sequence
  Description of Artificial Sequence: Synthetic oligonucleotide
  Sense strand starting at position 3413 of SEQ ID NO: 317317
uguauucuccuggguauaa

SEQ ID NO: 481530 - RNA, 19 nt, Artificial Sequence
  Description of Artificial Sequence: Synthetic oligonucleotide
  Antisense Strand to SEQ ID NO: 481529
uuauacccaggagaauaca

SEQ ID NO: 481531 - RNA, 19 nt, Artificial Sequence
  Description of Artificial Sequence: Synthetic oligonucleotide
  Sense strand starting at position 3414 of SEQ ID NO: 317317
guauucuccuggguauaag

SEQ ID NO: 481532 - RNA, 19 nt, Artificial Sequence
  Description of Artificial Sequence: Synthetic oligonucleotide
  Antisense Strand to SEQ ID NO: 481531
cuuauacccaggagaauac

SEQ ID NO: 481533 - RNA, 19 nt, Artificial Sequence
  Description of Artificial Sequence: Synthetic oligonucleotide
  Sense strand starting at position 3463 of SEQ ID NO: 317317
gaaagugaacccugucucu

SEQ ID NO: 481534 - RNA, 19 nt, Artificial Sequence
  Description of Artificial Sequence: Synthetic oligonucleotide
  Antisense Strand to SEQ ID NO: 481533
agagacaggguucacuuuc

SEQ ID NO: 481535 - RNA, 19 nt, Artificial Sequence
  Description of Artificial Sequence: Synthetic oligonucleotide
  Sense strand starting at position 3466 of SEQ ID NO: 317317
agugaacccugucucuuaa

SEQ ID NO: 481536 - RNA, 19 nt, Artificial Sequence
  Description of Artificial Sequence: Synthetic oligonucleotide
  Antisense Strand to SEQ ID NO: 481535
uuaagagacaggguucacu

SEQ ID NO: 481537 - RNA, 19 nt, Artificial Sequence
  Description of Artificial Sequence: Synthetic oligonucleotide
  Sense strand starting at position 3680 of SEQ ID NO: 317317
ugagaaauggcagguguga

SEQ ID NO: 481538 - RNA, 19 nt, Artificial Sequence
  Description of Artificial Sequence: Synthetic oligonucleotide
  Antisense Strand to SEQ ID NO: 481537
ucacaccugccauuucuca

SEQ ID NO: 481539 - RNA, 19 nt, Artificial Sequence
  Description of Artificial Sequence: Synthetic oligonucleotide
  Sense strand starting at position 3693 of SEQ ID NO: 317317
gugugaggacucugaccuu

SEQ ID NO: 481540 - RNA, 19 nt, Artificial Sequence
  Description of Artificial Sequence: Synthetic oligonucleotide
  Antisense Strand to SEQ ID NO: 481539
aaggucagaguccucacac

SEQ ID NO: 481541 - RNA, 19 nt, Artificial Sequence
  Description of Artificial Sequence: Synthetic oligonucleotide
  Sense strand starting at position 3752 of SEQ ID NO: 317317
cucucuauaccuggagaaa

SEQ ID NO: 481542 - RNA, 19 nt, Artificial Sequence
  Description of Artificial Sequence: Synthetic oligonucleotide
  Antisense Strand to SEQ ID NO: 481541
uuucuccagguauagagag

SEQ ID NO: 481543 - RNA, 19 nt, Artificial Sequence
  Description of Artificial Sequence: Synthetic oligonucleotide
  Sense strand starting at position 3906 of SEQ ID NO: 317317
ucaucaagcuugguauaaa

SEQ ID NO: 481544 - RNA, 19 nt, Artificial Sequence
  Description of Artificial Sequence: Synthetic oligonucleotide
  Antisense Strand to SEQ ID NO: 481543
uuuauaccaagcuugauga

SEQ ID NO: 481545 - RNA, 19 nt, Artificial Sequence
  Description of Artificial Sequence: Synthetic oligonucleotide
  Sense strand starting at position 84 of SEQ ID NO: 317318
cguugauaaugggcuuauu

SEQ ID NO: 481546 - RNA, 19 nt, Artificial Sequence
  Description of Artificial Sequence: Synthetic oligonucleotide
  Antisense Strand to SEQ ID NO: 481545
aauaagcccauuaucaacg

SEQ ID NO: 481547 - RNA, 19 nt, Artificial Sequence
  Description of Artificial Sequence: Synthetic oligonucleotide
  Sense strand starting at position 123 of SEQ ID NO: 317318
gagccagguggucacuaua

SEQ ID NO: 481548 - RNA, 19 nt, Artificial Sequence
  Description of Artificial Sequence: Synthetic oligonucleotide
  Antisense Strand to SEQ ID NO: 481547
uauagugaccaccuggcuc

SEQ ID NO: 481549 - RNA, 19 nt, Artificial Sequence
  Description of Artificial Sequence: Synthetic oligonucleotide
  Sense strand starting at position 147 of SEQ ID NO: 317318
uugaguguugucagugguu

SEQ ID NO: 481550 - RNA, 19 nt, Artificial Sequence
  Description of Artificial Sequence: Synthetic oligonucleotide
  Antisense Strand to SEQ ID NO: 481549
aaccacugacaacacucaa

SEQ ID NO: 481551 - RNA, 19 nt, Artificial Sequence
  Description of Artificial Sequence: Synthetic oligonucleotide
  Sense strand starting at position 472 of SEQ ID NO: 317318
ccauucuaugucugccaua

SEQ ID NO: 481552 - RNA, 19 nt, Artificial Sequence
  Description of Artificial Sequence: Synthetic oligonucleotide
  Antisense Strand to SEQ ID NO: 481551
uauggcagacauagaaugg

SEQ ID NO: 481553 - RNA, 19 nt, Artificial Sequence
  Description of Artificial Sequence: Synthetic oligonucleotide
  Sense strand starting at position 488 of SEQ ID NO: 317318
auacuuaacugugugacau

SEQ ID NO: 481554 - RNA, 19 nt, Artificial Sequence
  Description of Artificial Sequence: Synthetic oligonucleotide
  Antisense Strand to SEQ ID NO: 481553
augucacacaguuaaguau

SEQ ID NO: 481555 - RNA, 19 nt, Artificial Sequence
  Description of Artificial Sequence: Synthetic oligonucleotide
  Sense strand starting at position 489 of SEQ ID NO: 317318
uacuuaacugugugacaug

SEQ ID NO: 481556 - RNA, 19 nt, Artificial Sequence
  Description of Artificial Sequence: Synthetic oligonucleotide
  Antisense Strand to SEQ ID NO: 481555
caugucacacaguuaagua

SEQ ID NO: 481557 - RNA, 19 nt, Artificial Sequence
  Description of Artificial Sequence: Synthetic oligonucleotide
  Sense strand starting at position 492 of SEQ ID NO: 317318
uuaacugugugacauggaa

SEQ ID NO: 481558 - RNA, 19 nt, Artificial Sequence
  Description of Artificial Sequence: Synthetic oligonucleotide
  Antisense Strand to SEQ ID NO: 481557
uuccaugucacacaguuaa

SEQ ID NO: 481559 - RNA, 19 nt, Artificial Sequence
  Description of Artificial Sequence: Synthetic oligonucleotide
  Sense strand starting at position 1017 of SEQ ID NO: 317318
ccuguugcugagugacaga

SEQ ID NO: 481560 - RNA, 19 nt, Artificial Sequence
  Description of Artificial Sequence: Synthetic oligonucleotide
  Antisense Strand to SEQ ID NO: 481559
ucugucacucagcaacagg

SEQ ID NO: 481561 - RNA, 19 nt, Artificial Sequence
  Description of Artificial Sequence: Synthetic oligonucleotide
  Sense strand starting at position 1045 of SEQ ID NO: 317318
cugagauggucacuccaaa

SEQ ID NO: 481562 - RNA, 19 nt, Artificial Sequence
  Description of Artificial Sequence: Synthetic oligonucleotide
  Antisense Strand to SEQ ID NO: 481561
uuuggagugaccaucucag

SEQ ID NO: 481563 - RNA, 19 nt, Artificial Sequence
  Description of Artificial Sequence: Synthetic oligonucleotide
  Sense strand starting at position 1125 of SEQ ID NO: 317318
cccaguuugccacgucaaa

SEQ ID NO: 481564 - RNA, 19 nt, Artificial Sequence
  Description of Artificial Sequence: Synthetic oligonucleotide
  Antisense Strand to SEQ ID NO: 481563
uuugacguggcaaacuggg

SEQ ID NO: 481565 - RNA, 19 nt, Artificial Sequence
  Description of Artificial Sequence: Synthetic oligonucleotide
  Sense strand starting at position 1327 of SEQ ID NO: 317318
guucguauuuggccagauc

SEQ ID NO: 481566 - RNA, 19 nt, Artificial Sequence
  Description of Artificial Sequence: Synthetic oligonucleotide
  Antisense Strand to SEQ ID NO: 481565
gaucuggccaaauacgaac

SEQ ID NO: 481567 - RNA, 19 nt, Artificial Sequence
  Description of Artificial Sequence: Synthetic oligonucleotide
  Sense strand starting at position 1330 of SEQ ID NO: 317318
cguauuuggccagaucagu

SEQ ID NO: 481568 - RNA, 19 nt, Artificial Sequence
  Description of Artificial Sequence: Synthetic oligonucleotide
  Antisense Strand to SEQ ID NO: 481567
acugaucuggccaaauacg

SEQ ID NO: 481569 - RNA, 19 nt, Artificial Sequence
  Description of Artificial Sequence: Synthetic oligonucleotide
  Sense strand starting at position 1936 of SEQ ID NO: 317318
ugggaacugccacgucaaa

SEQ ID NO: 481570 - RNA, 19 nt, Artificial Sequence
  Description of Artificial Sequence: Synthetic oligonucleotide
  Antisense Strand to SEQ ID NO: 481569
uuugacguggcaguuccca

SEQ ID NO: 481571 - RNA, 19 nt, Artificial Sequence
  Description of Artificial Sequence: Synthetic oligonucleotide
  Sense strand starting at position 2175 of SEQ ID NO: 317318
gccuuuaacgucguggcua

SEQ ID NO: 481572 - RNA, 19 nt, Artificial Sequence
  Description of Artificial Sequence: Synthetic oligonucleotide
  Antisense Strand to SEQ ID NO: 481571
uagccacgacguuaaaggc

SEQ ID NO: 481573 - RNA, 19 nt, Artificial Sequence
  Description of Artificial Sequence: Synthetic oligonucleotide
  Sense strand starting at position 2177 of SEQ ID NO: 317318
cuuuaacgucguggcuaaa

SEQ ID NO: 481574 - RNA, 19 nt, Artificial Sequence
  Description of Artificial Sequence: Synthetic oligonucleotide
  Antisense Strand to SEQ ID NO: 481573
uuuagccacgacguuaaag

SEQ ID NO: 481575 - RNA, 19 nt, Artificial Sequence
  Description of Artificial Sequence: Synthetic oligonucleotide
  Sense strand starting at position 2180 of SEQ ID NO: 317318
uaacgucguggcuaaauca

SEQ ID NO: 481576 - RNA, 19 nt, Artificial Sequence
  Description of Artificial Sequence: Synthetic oligonucleotide
  Antisense Strand to SEQ ID NO: 481575
ugauuuagccacgacguua

SEQ ID NO: 481577 - RNA, 19 nt, Artificial Sequence
  Description of Artificial Sequence: Synthetic oligonucleotide
  Sense strand starting at position 2334 of SEQ ID NO: 317318
ccguuacauacgggaaagu

SEQ ID NO: 481578 - RNA, 19 nt, Artificial Sequence
  Description of Artificial Sequence: Synthetic oligonucleotide
  Antisense Strand to SEQ ID NO: 481577
acuuucccguauguaacgg

SEQ ID NO: 481579 - RNA, 19 nt, Artificial Sequence
  Description of Artificial Sequence: Synthetic oligonucleotide
  Sense strand starting at position 2335 of SEQ ID NO: 317318
cguuacauacgggaaagua

SEQ ID NO: 481580 - RNA, 19 nt, Artificial Sequence
  Description of Artificial Sequence: Synthetic oligonucleotide
  Antisense Strand to SEQ ID NO: 481579
uacuuucccguauguaacg

SEQ ID NO: 481581 - RNA, 19 nt, Artificial Sequence
  Description of Artificial Sequence: Synthetic oligonucleotide
  Sense strand starting at position 2554 of SEQ ID NO: 317318
ggguuguuagcguugugua

SEQ ID NO: 481582 - RNA, 19 nt, Artificial Sequence
  Description of Artificial Sequence: Synthetic oligonucleotide
  Antisense Strand to SEQ ID NO: 481581
uacacaacgcuaacaaccc

SEQ ID NO: 481583 - RNA, 19 nt, Artificial Sequence
  Description of Artificial Sequence: Synthetic oligonucleotide
  Sense strand starting at position 2556 of SEQ ID NO: 317318
guuguuagcguuguguaua

SEQ ID NO: 481584 - RNA, 19 nt, Artificial Sequence
  Description of Artificial Sequence: Synthetic oligonucleotide
  Antisense Strand to SEQ ID NO: 481583
uauacacaacgcuaacaac

SEQ ID NO: 481585 - RNA, 19 nt, Artificial Sequence
  Description of Artificial Sequence: Synthetic oligonucleotide
  Sense strand starting at position 2586 of SEQ ID NO: 317318
gcauauuccuuguuuguga

SEQ ID NO: 481586 - RNA, 19 nt, Artificial Sequence
  Description of Artificial Sequence: Synthetic oligonucleotide
  Antisense Strand to SEQ ID NO: 481585
ucacaaacaaggaauaugc

SEQ ID NO: 481587 - RNA, 19 nt, Artificial Sequence
  Description of Artificial Sequence: Synthetic oligonucleotide
  Sense strand starting at position 2589 of SEQ ID NO: 317318
uauuccuuguuugugaagu

SEQ ID NO: 481588 - RNA, 19 nt, Artificial Sequence
  Description of Artificial Sequence: Synthetic oligonucleotide
  Antisense Strand to SEQ ID NO: 481587
acuucacaaacaaggaaua

SEQ ID NO: 481589 - RNA, 19 nt, Artificial Sequence
  Description of Artificial Sequence: Synthetic oligonucleotide
  Sense strand starting at position 2631 of SEQ ID NO: 317318
acaggaaucucugcaugga

SEQ ID NO: 481590 - RNA, 19 nt, Artificial Sequence
  Description of Artificial Sequence: Synthetic oligonucleotide
  Antisense Strand to SEQ ID NO: 481589
uccaugcagagauuccugu

SEQ ID NO: 481591 - RNA, 19 nt, Artificial Sequence
  Description of Artificial Sequence: Synthetic oligonucleotide
  Sense strand starting at position 2668 of SEQ ID NO: 317318
cucaccguccugugagaaa

SEQ ID NO: 481592 - RNA, 19 nt, Artificial Sequence
  Description of Artificial Sequence: Synthetic oligonucleotide
  Antisense Strand to SEQ ID NO: 481591
uuucucacaggacggugag

SEQ ID NO: 481593 - RNA, 19 nt, Artificial Sequence
  Description of Artificial Sequence: Synthetic oligonucleotide
  Sense strand starting at position 2682 of SEQ ID NO: 317318
agaaacagcucagaaauaa

SEQ ID NO: 481594 - RNA, 19 nt, Artificial Sequence
  Description of Artificial Sequence: Synthetic oligonucleotide
  Antisense Strand to SEQ ID NO: 481593
uuauuucugagcuguuucu

SEQ ID NO: 481595 - RNA, 19 nt, Artificial Sequence
  Description of Artificial Sequence: Synthetic oligonucleotide
  Sense strand starting at position 2708 of SEQ ID NO: 317318
cuauaugagaucuggagcu

SEQ ID NO: 481596 - RNA, 19 nt, Artificial Sequence
  Description of Artificial Sequence: Synthetic oligonucleotide
  Antisense Strand to SEQ ID NO: 481595
agcuccagaucucauauag

SEQ ID NO: 481597 - RNA, 19 nt, Artificial Sequence
  Description of Artificial Sequence: Synthetic oligonucleotide
  Sense strand starting at position 2892 of SEQ ID NO: 317318
uuucuucccggcuacaaga

SEQ ID NO: 481598 - RNA, 19 nt, Artificial Sequence
  Description of Artificial Sequence: Synthetic oligonucleotide
  Antisense Strand to SEQ ID NO: 481597
ucuuguagccgggaagaaa

SEQ ID NO: 481599 - RNA, 19 nt, Artificial Sequence
  Description of Artificial Sequence: Synthetic oligonucleotide
  Sense strand starting at position 2935 of SEQ ID NO: 317318
ugaugaacugccuagguaa

SEQ ID NO: 481600 - RNA, 19 nt, Artificial Sequence
  Description of Artificial Sequence: Synthetic oligonucleotide
  Antisense Strand to SEQ ID NO: 481599
uuaccuaggcaguucauca

SEQ ID NO: 481601 - RNA, 19 nt, Artificial Sequence
  Description of Artificial Sequence: Synthetic oligonucleotide
  Sense strand starting at position 2966 of SEQ ID NO: 317318
ggauguugcuacucccgaa

SEQ ID NO: 481602 - RNA, 19 nt, Artificial Sequence
  Description of Artificial Sequence: Synthetic oligonucleotide
  Antisense Strand to SEQ ID NO: 481601
uucgggaguagcaacaucc

SEQ ID NO: 481603 - RNA, 19 nt, Artificial Sequence
  Description of Artificial Sequence: Synthetic oligonucleotide
  Sense strand starting at position 2979 of SEQ ID NO: 317318
cccgaaaugcuacaugaau

SEQ ID NO: 481604 - RNA, 19 nt, Artificial Sequence
  Description of Artificial Sequence: Synthetic oligonucleotide
  Antisense Strand to SEQ ID NO: 481603
auucauguagcauuucggg

SEQ ID NO: 481605 - RNA, 19 nt, Artificial Sequence
  Description of Artificial Sequence: Synthetic oligonucleotide
  Sense strand starting at position 3023 of SEQ ID NO: 317318
gcaguaaagauauaugguc

SEQ ID NO: 481606 - RNA, 19 nt, Artificial Sequence
  Description of Artificial Sequence: Synthetic oligonucleotide
  Antisense Strand to SEQ ID NO: 481605
gaccauauaucuuuacugc

SEQ ID NO: 481607 - RNA, 19 nt, Artificial Sequence
  Description of Artificial Sequence: Synthetic oligonucleotide
  Sense strand starting at position 3238 of SEQ ID NO: 317318
agguaagauaucuggccua

SEQ ID NO: 481608 - RNA, 19 nt, Artificial Sequence
  Description of Artificial Sequence: Synthetic oligonucleotide
  Antisense Strand to SEQ ID NO: 481607
uaggccagauaucuuaccu

SEQ ID NO: 481609 - RNA, 19 nt, Artificial Sequence
  Description of Artificial Sequence: Synthetic oligonucleotide
  Sense strand starting at position 3315 of SEQ ID NO: 317318
uguuucuuguauucucaau

SEQ ID NO: 481610 - RNA, 19 nt, Artificial Sequence
  Description of Artificial Sequence: Synthetic oligonucleotide
  Antisense Strand to SEQ ID NO: 481609
auugagaauacaagaaaca

SEQ ID NO: 481611 - RNA, 19 nt, Artificial Sequence
  Description of Artificial Sequence: Synthetic oligonucleotide
  Sense strand starting at position 3317 of SEQ ID NO: 317318
uuucuuguauucucaaugu

SEQ ID NO: 481612 - RNA, 19 nt, Artificial Sequence
  Description of Artificial Sequence: Synthetic oligonucleotide
  Antisense Strand to SEQ ID NO: 481611
acauugagaauacaagaaa

SEQ ID NO: 481613 - RNA, 19 nt, Artificial Sequence
  Description of Artificial Sequence: Synthetic oligonucleotide
  Sense strand starting at position 3321 of SEQ ID NO: 317318
uuguauucucaaugugaug

SEQ ID NO: 481614 - RNA, 19 nt, Artificial Sequence
  Description of Artificial Sequence: Synthetic oligonucleotide
  Antisense Strand to SEQ ID NO: 481613
caucacauugagaauacaa

SEQ ID NO: 481615 - RNA, 19 nt, Artificial Sequence
  Description of Artificial Sequence: Synthetic oligonucleotide
  Sense strand starting at position 3444 of SEQ ID NO: 317318
gagugaagcuaugauacaa

SEQ ID NO: 481616 - RNA, 19 nt, Artificial Sequence
  Description of Artificial Sequence: Synthetic oligonucleotide
  Antisense Strand to SEQ ID NO: 481615
uuguaucauagcuucacuc

SEQ ID NO: 481617 - RNA, 19 nt, Artificial Sequence
  Description of Artificial Sequence: Synthetic oligonucleotide
  Sense strand starting at position 3504 of SEQ ID NO: 317318
ugaccugcuugacuuguua

SEQ ID NO: 481618 - RNA, 19 nt, Artificial Sequence
  Description of Artificial Sequence: Synthetic oligonucleotide
  Antisense Strand to SEQ ID NO: 481617
uaacaagucaagcagguca

SEQ ID NO: 481619 - RNA, 19 nt, Artificial Sequence
  Description of Artificial Sequence: Synthetic oligonucleotide
  Sense strand starting at position 3577 of SEQ ID NO: 317318
guaccaaacuugucugaaa

SEQ ID NO: 481620 - RNA, 19 nt, Artificial Sequence
  Description of Artificial Sequence: Synthetic oligonucleotide
  Antisense Strand to SEQ ID NO: 481619
uuucagacaaguuugguac

SEQ ID NO: 481621 - RNA, 19 nt, Artificial Sequence
  Description of Artificial Sequence: Synthetic oligonucleotide
  Sense strand starting at position 3974 of SEQ ID NO: 317318
ggacuuuagcgauaugagu

SEQ ID NO: 481622 - RNA, 19 nt, Artificial Sequence
  Description of Artificial Sequence: Synthetic oligonucleotide
  Antisense Strand to SEQ ID NO: 481621
acucauaucgcuaaagucc

SEQ ID NO: 481623 - RNA, 19 nt, Artificial Sequence
  Description of Artificial Sequence: Synthetic oligonucleotide
  Sense strand starting at position 3976 of SEQ ID NO: 317318
acuuuagcgauaugaguau

SEQ ID NO: 481624 - RNA, 19 nt, Artificial Sequence
  Description of Artificial Sequence: Synthetic oligonucleotide
  Antisense Strand to SEQ ID NO: 481623
auacucauaucgcuaaagu

SEQ ID NO: 481625 - RNA, 19 nt, Artificial Sequence
  Description of Artificial Sequence: Synthetic oligonucleotide
  Sense strand starting at position 323 of SEQ ID NO: 317319
auccuacauguguguauau

SEQ ID NO: 481626 - RNA, 19 nt, Artificial Sequence
  Description of Artificial Sequence: Synthetic oligonucleotide
  Antisense Strand to SEQ ID NO: 481625
auauacacacauguaggau

SEQ ID NO: 481627 - RNA, 19 nt, Artificial Sequence
  Description of Artificial Sequence: Synthetic oligonucleotide
  Sense strand starting at position 333 of SEQ ID NO: 317319
uguguauaugugcauucuu

SEQ ID NO: 481628 - RNA, 19 nt, Artificial Sequence
  Description of Artificial Sequence: Synthetic oligonucleotide
  Antisense Strand to SEQ ID NO: 481627
aagaaugcacauauacaca

SEQ ID NO: 481629 - RNA, 19 nt, Artificial Sequence
  Description of Artificial Sequence: Synthetic oligonucleotide
  Sense strand starting at position 363 of SEQ ID NO: 317319
auuagauucccguaagaca

SEQ ID NO: 481630 - RNA, 19 nt, Artificial Sequence
  Description of Artificial Sequence: Synthetic oligonucleotide
  Antisense Strand to SEQ ID NO: 481629
ugucuuacgggaaucuaau

SEQ ID NO: 481631 - RNA, 19 nt, Artificial Sequence
  Description of Artificial Sequence: Synthetic oligonucleotide
  Sense strand starting at position 371 of SEQ ID NO: 317319
cccguaagacagugaaauc

SEQ ID NO: 481632 - RNA, 19 nt, Artificial Sequence
  Description of Artificial Sequence: Synthetic oligonucleotide
  Antisense Strand to SEQ ID NO: 481631
gauuucacugucuuacggg

SEQ ID NO: 481633 - RNA, 19 nt, Artificial Sequence
  Description of Artificial Sequence: Synthetic oligonucleotide
  Sense strand starting at position 526 of SEQ ID NO: 317319
caaauaaccgcggacguau

SEQ ID NO: 481634 - RNA, 19 nt, Artificial Sequence
  Description of Artificial Sequence: Synthetic oligonucleotide
  Antisense Strand to SEQ ID NO: 481633
auacguccgcgguuauuug

SEQ ID NO: 481635 - RNA, 19 nt, Artificial Sequence
  Description of Artificial Sequence: Synthetic oligonucleotide
  Sense strand starting at position 534 of SEQ ID NO: 317319
cgcggacguauuuaagaua

SEQ ID NO: 481636 - RNA, 19 nt, Artificial Sequence
  Description of Artificial Sequence: Synthetic oligonucleotide
  Antisense Strand to SEQ ID NO: 481635
uaucuuaaauacguccgcg

SEQ ID NO: 481637 - RNA, 19 nt, Artificial Sequence
  Description of Artificial Sequence: Synthetic oligonucleotide
  Sense strand starting at position 626 of SEQ ID NO: 317319
cuguuaauuaagggauagu

SEQ ID NO: 481638 - RNA, 19 nt, Artificial Sequence
  Description of Artificial Sequence: Synthetic oligonucleotide
  Antisense Strand to SEQ ID NO: 481637
acuaucccuuaauuaacag

SEQ ID NO: 481639 - RNA, 19 nt, Artificial Sequence
  Description of Artificial Sequence: Synthetic oligonucleotide
  Sense strand starting at position 988 of SEQ ID NO: 317319
ucuugaauaaacggaggua

SEQ ID NO: 481640 - RNA, 19 nt, Artificial Sequence
  Description of Artificial Sequence: Synthetic oligonucleotide
  Antisense Strand to SEQ ID NO: 481639
uaccuccguuuauucaaga

SEQ ID NO: 481641 - RNA, 19 nt, Artificial Sequence
  Description of Artificial Sequence: Synthetic oligonucleotide
  Sense strand starting at position 1058 of SEQ ID NO: 317319
guuauaacugcccacaaag

SEQ ID NO: 481642 - RNA, 19 nt, Artificial Sequence
  Description of Artificial Sequence: Synthetic oligonucleotide
  Antisense Strand to SEQ ID NO: 481641
cuuugugggcaguuauaac

SEQ ID NO: 481643 - RNA, 19 nt, Artificial Sequence
  Description of Artificial Sequence: Synthetic oligonucleotide
  Sense strand starting at position 1124 of SEQ ID NO: 317319
aaggauuugucacagacua

SEQ ID NO: 481644 - RNA, 19 nt, Artificial Sequence
  Description of Artificial Sequence: Synthetic oligonucleotide
  Antisense Strand to SEQ ID NO: 481643
uagucugugacaaauccuu

SEQ ID NO: 481645 - RNA, 19 nt, Artificial Sequence
  Description of Artificial Sequence: Synthetic oligonucleotide
  Sense strand starting at position 1182 of SEQ ID NO: 317319
auuccuuaagcgcaagaaa

SEQ ID NO: 481646 - RNA, 19 nt, Artificial Sequence
  Description of Artificial Sequence: Synthetic oligonucleotide
  Antisense Strand to SEQ ID NO: 481645
uuucuugcgcuuaaggaau

SEQ ID NO: 481647 - RNA, 19 nt, Artificial Sequence
  Description of Artificial Sequence: Synthetic oligonucleotide
  Sense strand starting at position 1297 of SEQ ID NO: 317319
ugagacugcccucaaagua

SEQ ID NO: 481648 - RNA, 19 nt, Artificial Sequence
  Description of Artificial Sequence: Synthetic oligonucleotide
  Antisense Strand to SEQ ID NO: 481647
uacuuugagggcagucuca

SEQ ID NO: 481649 - RNA, 19 nt, Artificial Sequence
  Description of Artificial Sequence: Synthetic oligonucleotide
  Sense strand starting at position 1356 of SEQ ID NO: 317319
guuaaaugacaguagacgu

SEQ ID NO: 481650 - RNA, 19 nt, Artificial Sequence
  Description of Artificial Sequence: Synthetic oligonucleotide
  Antisense Strand to SEQ ID NO: 481649
acgucuacugucauuuaac

SEQ ID NO: 481651 - RNA, 19 nt, Artificial Sequence
  Description of Artificial Sequence: Synthetic oligonucleotide
  Sense strand starting at position 1499 of SEQ ID NO: 317319
ugcacaagggucugaaagu

SEQ ID NO: 481652 - RNA, 19 nt, Artificial Sequence
  Description of Artificial Sequence: Synthetic oligonucleotide
  Antisense Strand to SEQ ID NO: 481651
acuuucagacccuugugca

SEQ ID NO: 481653 - RNA, 19 nt, Artificial Sequence
  Description of Artificial Sequence: Synthetic oligonucleotide
  Sense strand starting at position 1508 of SEQ ID NO: 317319
gucugaaagucuccuaauc

SEQ ID NO: 481654 - RNA, 19 nt, Artificial Sequence
  Description of Artificial Sequence: Synthetic oligonucleotide
  Antisense Strand to SEQ ID NO: 481653
gauuaggagacuuucagac

SEQ ID NO: 481655 - RNA, 19 nt, Artificial Sequence
  Description of Artificial Sequence: Synthetic oligonucleotide
  Sense strand starting at position 2319 of SEQ ID NO: 317319
cugcaagggcuuuauugua

SEQ ID NO: 481656 - RNA, 19 nt, Artificial Sequence
  Description of Artificial Sequence: Synthetic oligonucleotide
  Antisense Strand to SEQ ID NO: 481655
uacaauaaagcccuugcag

SEQ ID NO: 481657 - RNA, 19 nt, Artificial Sequence
  Description of Artificial Sequence: Synthetic oligonucleotide
  Sense strand starting at position 2327 of SEQ ID NO: 317319
gcuuuauuguaauuuguga

SEQ ID NO: 481658 - RNA, 19 nt, Artificial Sequence
  Description of Artificial Sequence: Synthetic oligonucleotide
  Antisense Strand to SEQ ID NO: 481657
ucacaaauuacaauaaagc

SEQ ID NO: 481659 - RNA, 19 nt, Artificial Sequence
  Description of Artificial Sequence: Synthetic oligonucleotide
  Sense strand starting at position 2331 of SEQ ID NO: 317319
uauuguaauuugugacuga

SEQ ID NO: 481660 - RNA, 19 nt, Artificial Sequence
  Description of Artificial Sequence: Synthetic oligonucleotide
  Antisense Strand to SEQ ID NO: 481659
ucagucacaaauuacaaua

SEQ ID NO: 481661 - RNA, 19 nt, Artificial Sequence
  Description of Artificial Sequence: Synthetic oligonucleotide
  Sense strand starting at position 2335 of SEQ ID NO: 317319
guaauuugugacugaguuc

SEQ ID NO: 481662 - RNA, 19 nt, Artificial Sequence
  Description of Artificial Sequence: Synthetic oligonucleotide
  Antisense Strand to SEQ ID NO: 481661
gaacucagucacaaauuac

SEQ ID NO: 481663 - RNA, 19 nt, Artificial Sequence
  Description of Artificial Sequence: Synthetic oligonucleotide
  Sense strand starting at position 2498 of SEQ ID NO: 317319
guuacuaucccaugguauu

SEQ ID NO: 481664 - RNA, 19 nt, Artificial Sequence
  Description of Artificial Sequence: Synthetic oligonucleotide
  Antisense Strand to SEQ ID NO: 481663
aauaccaugggauaguaac

SEQ ID NO: 481665 - RNA, 19 nt, Artificial Sequence
  Description of Artificial Sequence: Synthetic oligonucleotide
  Sense strand starting at position 2973 of SEQ ID NO: 317319
uuaucacuuuggccugaau

SEQ ID NO: 481666 - RNA, 19 nt, Artificial Sequence
  Description of Artificial Sequence: Synthetic oligonucleotide
  Antisense Strand to SEQ ID NO: 481665
auucaggccaaagugauaa

SEQ ID NO: 481667 - RNA, 19 nt, Artificial Sequence
  Description of Artificial Sequence: Synthetic oligonucleotide
  Sense strand starting at position 2985 of SEQ ID NO: 317319
ccugaaugcuagucaaacu

SEQ ID NO: 481668 - RNA, 19 nt, Artificial Sequence
  Description of Artificial Sequence: Synthetic oligonucleotide
  Antisense Strand to SEQ ID NO: 481667
aguuugacuagcauucagg

SEQ ID NO: 481669 - RNA, 19 nt, Artificial Sequence
  Description of Artificial Sequence: Synthetic oligonucleotide
  Sense strand starting at position 2994 of SEQ ID NO: 317319
uagucaaacugauugggau

SEQ ID NO: 481670 - RNA, 19 nt, Artificial Sequence
  Description of Artificial Sequence: Synthetic oligonucleotide
  Antisense Strand to SEQ ID NO: 481669
aucccaaucaguuugacua

SEQ ID NO: 481671 - RNA, 19 nt, Artificial Sequence
  Description of Artificial Sequence: Synthetic oligonucleotide
  Sense strand starting at position 2995 of SEQ ID NO: 317319
agucaaacugauugggauu

SEQ ID NO: 481672 - RNA, 19 nt, Artificial Sequence
  Description of Artificial Sequence: Synthetic oligonucleotide
  Antisense Strand to SEQ ID NO: 481671
aaucccaaucaguuugacu

SEQ ID NO: 481673 - RNA, 19 nt, Artificial Sequence
  Description of Artificial Sequence: Synthetic oligonucleotide
  Sense strand starting at position 3075 of SEQ ID NO: 317319
cuguuccuagugcaauuaa

SEQ ID NO: 481674 - RNA, 19 nt, Artificial Sequence
  Description of Artificial Sequence: Synthetic oligonucleotide
  Antisense Strand to SEQ ID NO: 481673
uuaauugcacuaggaacag

SEQ ID NO: 481675 - RNA, 19 nt, Artificial Sequence
  Description of Artificial Sequence: Synthetic oligonucleotide
  Sense strand starting at position 3269 of SEQ ID NO: 317319
cuguccuuuguugaccaau

SEQ ID NO: 481676 - RNA, 19 nt, Artificial Sequence
  Description of Artificial Sequence: Synthetic oligonucleotide
  Antisense Strand to SEQ ID NO: 481675
auuggucaacaaaggacag

SEQ ID NO: 481677 - RNA, 19 nt, Artificial Sequence
  Description of Artificial Sequence: Synthetic oligonucleotide
  Sense strand starting at position 3271 of SEQ ID NO: 317319
guccuuuguugaccaauua

SEQ ID NO: 481678 - RNA, 19 nt, Artificial Sequence
  Description of Artificial Sequence: Synthetic oligonucleotide
  Antisense Strand to SEQ ID NO: 481677
uaauuggucaacaaaggac

SEQ ID NO: 481679 - RNA, 19 nt, Artificial Sequence
  Description of Artificial Sequence: Synthetic oligonucleotide
  Sense strand starting at position 3309 of SEQ ID NO: 317319
uuuauaaauggucacaagu

SEQ ID NO: 481680 - RNA, 19 nt, Artificial Sequence
  Description of Artificial Sequence: Synthetic oligonucleotide
  Antisense Strand to SEQ ID NO: 481679
acuugugaccauuuauaaa

SEQ ID NO: 481681 - RNA, 19 nt, Artificial Sequence
  Description of Artificial Sequence: Synthetic oligonucleotide
  Sense strand starting at position 3362 of SEQ ID NO: 317319
gcacuuugugcucugcuau

SEQ ID NO: 481682 - RNA, 19 nt, Artificial Sequence
  Description of Artificial Sequence: Synthetic oligonucleotide
  Antisense Strand to SEQ ID NO: 481681
auagcagagcacaaagugc

SEQ ID NO: 481683 - RNA, 19 nt, Artificial Sequence
  Description of Artificial Sequence: Synthetic oligonucleotide
  Sense strand starting at position 3374 of SEQ ID NO: 317319
cugcuaucugugcaugaac

SEQ ID NO: 481684 - RNA, 19 nt, Artificial Sequence
  Description of Artificial Sequence: Synthetic oligonucleotide
  Antisense Strand to SEQ ID NO: 481683
guucaugcacagauagcag

SEQ ID NO: 481685 - RNA, 19 nt, Artificial Sequence
  Description of Artificial Sequence: Synthetic oligonucleotide
  Sense strand starting at position 3376 of SEQ ID NO: 317319
gcuaucugugcaugaacua

SEQ ID NO: 481686 - RNA, 19 nt, Artificial Sequence
  Description of Artificial Sequence: Synthetic oligonucleotide
  Antisense Strand to SEQ ID NO: 481685
uaguucaugcacagauagc

SEQ ID NO: 481687 - RNA, 19 nt, Artificial Sequence
  Description of Artificial Sequence: Synthetic oligonucleotide
  Sense strand starting at position 3377 of SEQ ID NO: 317319
cuaucugugcaugaacuaa

SEQ ID NO: 481688 - RNA, 19 nt, Artificial Sequence
  Description of Artificial Sequence: Synthetic oligonucleotide
  Antisense Strand to SEQ ID NO: 481687
uuaguucaugcacagauag

SEQ ID NO: 481689 - RNA, 19 nt, Artificial Sequence
  Description of Artificial Sequence: Synthetic oligonucleotide
  Sense strand starting at position 3441 of SEQ ID NO: 317319
guaacuggcgacugaucau

SEQ ID NO: 481690 - RNA, 19 nt, Artificial Sequence
  Description of Artificial Sequence: Synthetic oligonucleotide
  Antisense Strand to SEQ ID NO: 481689
augaucagucgccaguuac

SEQ ID NO: 481691 - RNA, 19 nt, Artificial Sequence
  Description of Artificial Sequence: Synthetic oligonucleotide
  Sense strand starting at position 3489 of SEQ ID NO: 317319
cacaaugauuuguggacua

SEQ ID NO: 481692 - RNA, 19 nt, Artificial Sequence
  Description of Artificial Sequence: Synthetic oligonucleotide
  Antisense Strand to SEQ ID NO: 481691
uaguccacaaaucauugug

SEQ ID NO: 481693 - RNA, 19 nt, Artificial Sequence
  Description of Artificial Sequence: Synthetic oligonucleotide
  Sense strand starting at position 3537 of SEQ ID NO: 317319
uucucaguacugugguaau

SEQ ID NO: 481694 - RNA, 19 nt, Artificial Sequence
  Description of Artificial Sequence: Synthetic oligonucleotide
  Antisense Strand to SEQ ID NO: 481693
auuaccacaguacugagaa

SEQ ID NO: 481695 - RNA, 19 nt, Artificial Sequence
  Description of Artificial Sequence: Synthetic oligonucleotide
  Sense strand starting at position 3592 of SEQ ID NO: 317319
aacuguggucacugguauu

SEQ ID NO: 481696 - RNA, 19 nt, Artificial Sequence
  Description of Artificial Sequence: Synthetic oligonucleotide
  Antisense Strand to SEQ ID NO: 481695
aauaccagugaccacaguu

SEQ ID NO: 481697 - RNA, 19 nt, Artificial Sequence
  Description of Artificial Sequence: Synthetic oligonucleotide
  Sense strand starting at position 3732 of SEQ ID NO: 317319
cugaauugcucacuagaag

SEQ ID NO: 481698 - RNA, 19 nt, Artificial Sequence
  Description of Artificial Sequence: Synthetic oligonucleotide
  Antisense Strand to SEQ ID NO: 481697
cuucuagugagcaauucag

SEQ ID NO: 481699 - RNA, 19 nt, Artificial Sequence
  Description of Artificial Sequence: Synthetic oligonucleotide
  Sense strand starting at position 3746 of SEQ ID NO: 317319
agaagaauguuuggagaga

SEQ ID NO: 481700 - RNA, 19 nt, Artificial Sequence
  Description of Artificial Sequence: Synthetic oligonucleotide
  Antisense Strand to SEQ ID NO: 481699
ucucuccaaacauucuucu

SEQ ID NO: 481701 - RNA, 19 nt, Artificial Sequence
  Description of Artificial Sequence: Synthetic oligonucleotide
  Sense strand starting at position 3747 of SEQ ID NO: 317319
gaagaauguuuggagagaa

SEQ ID NO: 481702 - RNA, 19 nt, Artificial Sequence
  Description of Artificial Sequence: Synthetic oligonucleotide
  Antisense Strand to SEQ ID NO: 481701
uucucuccaaacauucuuc

SEQ ID NO: 481703 - RNA, 19 nt, Artificial Sequence
  Description of Artificial Sequence: Synthetic oligonucleotide
  Sense strand starting at position 3801 of SEQ ID NO: 317319
gcacaaagauauucuaggu

SEQ ID NO: 481704 - RNA, 19 nt, Artificial Sequence
  Description of Artificial Sequence: Synthetic oligonucleotide
  Antisense Strand to SEQ ID NO: 481703
accuagaauaucuuugugc

SEQ ID NO: 481705 - RNA, 19 nt, Artificial Sequence
  Description of Artificial Sequence: Synthetic oligonucleotide
  Sense strand starting at position 400 of SEQ ID NO: 317320
auccuacauguguguauau

SEQ ID NO: 481706 - RNA, 19 nt, Artificial Sequence
  Description of Artificial Sequence: Synthetic oligonucleotide
  Antisense Strand to SEQ ID NO: 481705
auauacacacauguaggau

SEQ ID NO: 481707 - RNA, 19 nt, Artificial Sequence
  Description of Artificial Sequence: Synthetic oligonucleotide
  Sense strand starting at position 410 of SEQ ID NO: 317320
uguguauaugugcauucuu

SEQ ID NO: 481708 - RNA, 19 nt, Artificial Sequence
  Description of Artificial Sequence: Synthetic oligonucleotide
  Antisense Strand to SEQ ID NO: 481707
aagaaugcacauauacaca

SEQ ID NO: 481709 - RNA, 19 nt, Artificial Sequence
  Description of Artificial Sequence: Synthetic oligonucleotide
  Sense strand starting at position 440 of SEQ ID NO: 317320
auuagauucccguaagaca

SEQ ID NO: 481710 - RNA, 19 nt, Artificial Sequence
  Description of Artificial Sequence: Synthetic oligonucleotide
  Antisense Strand to SEQ ID NO: 481709
ugucuuacgggaaucuaau

SEQ ID NO: 481711 - RNA, 19 nt, Artificial Sequence
  Description of Artificial Sequence: Synthetic oligonucleotide
  Sense strand starting at position 448 of SEQ ID NO: 317320
cccguaagacagugaaauc

SEQ ID NO: 481712 - RNA, 19 nt, Artificial Sequence
  Description of Artificial Sequence: Synthetic oligonucleotide
  Antisense Strand to SEQ ID NO: 481711
gauuucacugucuuacggg

SEQ ID NO: 481713 - RNA, 19 nt, Artificial Sequence
  Description of Artificial Sequence: Synthetic oligonucleotide
  Sense strand starting at position 603 of SEQ ID NO: 317320
caaauaaccgcggacguau

SEQ ID NO: 481714 - RNA, 19 nt, Artificial Sequence
  Description of Artificial Sequence: Synthetic oligonucleotide
  Antisense Strand to SEQ ID NO: 481713
auacguccgcgguuauuug

SEQ ID NO: 481715 - RNA, 19 nt, Artificial Sequence
  Description of Artificial Sequence: Synthetic oligonucleotide
  Sense strand starting at position 611 of SEQ ID NO: 317320
cgcggacguauuuaagaua

SEQ ID NO: 481716 - RNA, 19 nt, Artificial Sequence
  Description of Artificial Sequence: Synthetic oligonucleotide
  Antisense Strand to SEQ ID NO: 481715
uaucuuaaauacguccgcg

SEQ ID NO: 481717 - RNA, 19 nt, Artificial Sequence
  Description of Artificial Sequence: Synthetic oligonucleotide
  Sense strand starting at position 703 of SEQ ID NO: 317320
cuguuaauuaagggauagu

SEQ ID NO: 481718 - RNA, 19 nt, Artificial Sequence
  Description of Artificial Sequence: Synthetic oligonucleotide
  Antisense Strand to SEQ ID NO: 481717
acuaucccuuaauuaacag

SEQ ID NO: 481719 - RNA, 19 nt, Artificial Sequence
  Description of Artificial Sequence: Synthetic oligonucleotide
  Sense strand starting at position 1065 of SEQ ID NO: 317320
ucuugaauaaacggaggua

SEQ ID NO: 481720 - RNA, 19 nt, Artificial Sequence
  Description of Artificial Sequence: Synthetic oligonucleotide
  Antisense Strand to SEQ ID NO: 481719
uaccuccguuuauucaaga

SEQ ID NO: 481721 - RNA, 19 nt, Artificial Sequence
  Description of Artificial Sequence: Synthetic oligonucleotide
  Sense strand starting at position 1135 of SEQ ID NO: 317320
guuauaacugcccacaaag

SEQ ID NO: 481722 - RNA, 19 nt, Artificial Sequence
  Description of Artificial Sequence: Synthetic oligonucleotide
  Antisense Strand to SEQ ID NO: 481721
cuuugugggcaguuauaac

SEQ ID NO: 481723 - RNA, 19 nt, Artificial Sequence
  Description of Artificial Sequence: Synthetic oligonucleotide
  Sense strand starting at position 1201 of SEQ ID NO: 317320
aaggauuugucacagacua

SEQ ID NO: 481724 - RNA, 19 nt, Artificial Sequence
  Description of Artificial Sequence: Synthetic oligonucleotide
  Antisense Strand to SEQ ID NO: 481723
uagucugugacaaauccuu

SEQ ID NO: 481725 - RNA, 19 nt, Artificial Sequence
  Description of Artificial Sequence: Synthetic oligonucleotide
  Sense strand starting at position 1259 of SEQ ID NO: 317320
auuccuuaagcgcaagaaa

SEQ ID NO: 481726 - RNA, 19 nt, Artificial Sequence
  Description of Artificial Sequence: Synthetic oligonucleotide
  Antisense Strand to SEQ ID NO: 481725
uuucuugcgcuuaaggaau

SEQ ID NO: 481727 - RNA, 19 nt, Artificial Sequence
  Description of Artificial Sequence: Synthetic oligonucleotide
  Sense strand starting at position 1374 of SEQ ID NO: 317320
ugagacugcccucaaagua

SEQ ID NO: 481728 - RNA, 19 nt, Artificial Sequence
  Description of Artificial Sequence: Synthetic oligonucleotide
  Antisense Strand to SEQ ID NO: 481727
uacuuugagggcagucuca

SEQ ID NO: 481729 - RNA, 19 nt, Artificial Sequence
  Description of Artificial Sequence: Synthetic oligonucleotide
  Sense strand starting at position 1433 of SEQ ID NO: 317320
guuaaaugacaguagacgu

SEQ ID NO: 481730 - RNA, 19 nt, Artificial Sequence
  Description of Artificial Sequence: Synthetic oligonucleotide
  Antisense Strand to SEQ ID NO: 481729
acgucuacugucauuuaac

SEQ ID NO: 481731 - RNA, 19 nt, Artificial Sequence
  Description of Artificial Sequence: Synthetic oligonucleotide
  Sense strand starting at position 1576 of SEQ ID NO: 317320
ugcacaagggucugaaagu

SEQ ID NO: 481732 - RNA, 19 nt, Artificial Sequence
  Description of Artificial Sequence: Synthetic oligonucleotide
  Antisense Strand to SEQ ID NO: 481731
acuuucagacccuugugca

SEQ ID NO: 481733 - RNA, 19 nt, Artificial Sequence
  Description of Artificial Sequence: Synthetic oligonucleotide
  Sense strand starting at position 1585 of SEQ ID NO: 317320
gucugaaagucuccuaauc

SEQ ID NO: 481734 - RNA, 19 nt, Artificial Sequence
  Description of Artificial Sequence: Synthetic oligonucleotide
  Antisense Strand to SEQ ID NO: 481733
gauuaggagacuuucagac

SEQ ID NO: 481735 - RNA, 19 nt, Artificial Sequence
  Description of Artificial Sequence: Synthetic oligonucleotide
  Sense strand starting at position 2396 of SEQ ID NO: 317320
cugcaagggcuuuauugua

SEQ ID NO: 481736 - RNA, 19 nt, Artificial Sequence
  Description of Artificial Sequence: Synthetic oligonucleotide
  Antisense Strand to SEQ ID NO: 481735
uacaauaaagcccuugcag

SEQ ID NO: 481737 - RNA, 19 nt, Artificial Sequence
  Description of Artificial Sequence: Synthetic oligonucleotide
  Sense strand starting at position 2404 of SEQ ID NO: 317320
gcuuuauuguaauuuguga

SEQ ID NO: 481738 - RNA, 19 nt, Artificial Sequence
  Description of Artificial Sequence: Synthetic oligonucleotide
  Antisense Strand to SEQ ID NO: 481737
ucacaaauuacaauaaagc

SEQ ID NO: 481739 - RNA, 19 nt, Artificial Sequence
  Description of Artificial Sequence: Synthetic oligonucleotide
  Sense strand starting at position 2408 of SEQ ID NO: 317320
uauuguaauuugugacuga

SEQ ID NO: 481740 - RNA, 19 nt, Artificial Sequence
  Description of Artificial Sequence: Synthetic oligonucleotide
  Antisense Strand to SEQ ID NO: 481739
ucagucacaaauuacaaua

SEQ ID NO: 481741 - RNA, 19 nt, Artificial Sequence
  Description of Artificial Sequence: Synthetic oligonucleotide
  Sense strand starting at position 2412 of SEQ ID NO: 317320
guaauuugugacugaguuc

SEQ ID NO: 481742 - RNA, 19 nt, Artificial Sequence
  Description of Artificial Sequence: Synthetic oligonucleotide
  Antisense Strand to SEQ ID NO: 481741
gaacucagucacaaauuac

SEQ ID NO: 481743 - RNA, 19 nt, Artificial Sequence
  Description of Artificial Sequence: Synthetic oligonucleotide
  Sense strand starting at position 2575 of SEQ ID NO: 317320
guuacuaucccaugguauu

SEQ ID NO: 481744 - RNA, 19 nt, Artificial Sequence
  Description of Artificial Sequence: Synthetic oligonucleotide
  Antisense Strand to SEQ ID NO: 481743
aauaccaugggauaguaac

SEQ ID NO: 481745 - RNA, 19 nt, Artificial Sequence
  Description of Artificial Sequence: Synthetic oligonucleotide
  Sense strand starting at position 3050 of SEQ ID NO: 317320
uuaucacuuuggccugaau

SEQ ID NO: 481746 - RNA, 19 nt, Artificial Sequence
  Description of Artificial Sequence: Synthetic oligonucleotide
  Antisense Strand to SEQ ID NO: 481745
auucaggccaaagugauaa

SEQ ID NO: 481747 - RNA, 19 nt, Artificial Sequence
  Description of Artificial Sequence: Synthetic oligonucleotide
  Sense strand starting at position 3062 of SEQ ID NO: 317320
ccugaaugcuagucaaacu

SEQ ID NO: 481748 - RNA, 19 nt, Artificial Sequence
  Description of Artificial Sequence: Synthetic oligonucleotide
  Antisense Strand to SEQ ID NO: 481747
aguuugacuagcauucagg

SEQ ID NO: 481749 - RNA, 19 nt, Artificial Sequence
  Description of Artificial Sequence: Synthetic oligonucleotide
  Sense strand starting at position 3071 of SEQ ID NO: 317320
uagucaaacugauugggau

SEQ ID NO: 481750 - RNA, 19 nt, Artificial Sequence
  Description of Artificial Sequence: Synthetic oligonucleotide
  Antisense Strand to SEQ ID NO: 481749
aucccaaucaguuugacua

SEQ ID NO: 481751 - RNA, 19 nt, Artificial Sequence
  Description of Artificial Sequence: Synthetic oligonucleotide
  Sense strand starting at position 3072 of SEQ ID NO: 317320
agucaaacugauugggauu

SEQ ID NO: 481752 - RNA, 19 nt, Artificial Sequence
  Description of Artificial Sequence: Synthetic oligonucleotide
  Antisense Strand to SEQ ID NO: 481751
aaucccaaucaguuugacu

SEQ ID NO: 481753 - RNA, 19 nt, Artificial Sequence
  Description of Artificial Sequence: Synthetic oligonucleotide
  Sense strand starting at position 3152 of SEQ ID NO: 317320
cuguuccuagugcaauuaa

SEQ ID NO: 481754 - RNA, 19 nt, Artificial Sequence
  Description of Artificial Sequence: Synthetic oligonucleotide
  Antisense Strand to SEQ ID NO: 481753
uuaauugcacuaggaacag

SEQ ID NO: 481755 - RNA, 19 nt, Artificial Sequence
  Description of Artificial Sequence: Synthetic oligonucleotide
  Sense strand starting at position 3346 of SEQ ID NO: 317320
cuguccuuuguugaccaau

SEQ ID NO: 481756 - RNA, 19 nt, Artificial Sequence
  Description of Artificial Sequence: Synthetic oligonucleotide
  Antisense Strand to SEQ ID NO: 481755
auuggucaacaaaggacag

SEQ ID NO: 481757 - RNA, 19 nt, Artificial Sequence
  Description of Artificial Sequence: Synthetic oligonucleotide
  Sense strand starting at position 3348 of SEQ ID NO: 317320
guccuuuguugaccaauua

SEQ ID NO: 481758 - RNA, 19 nt, Artificial Sequence
  Description of Artificial Sequence: Synthetic oligonucleotide
  Antisense Strand to SEQ ID NO: 481757
uaauuggucaacaaaggac

SEQ ID NO: 481759 - RNA, 19 nt, Artificial Sequence
  Description of Artificial Sequence: Synthetic oligonucleotide
  Sense strand starting at position 3386 of SEQ ID NO: 317320
uuuauaaauggucacaagu

SEQ ID NO: 481760 - RNA, 19 nt, Artificial Sequence
  Description of Artificial Sequence: Synthetic oligonucleotide
  Antisense Strand to SEQ ID NO: 481759
acuugugaccauuuauaaa

SEQ ID NO: 481761 - RNA, 19 nt, Artificial Sequence
  Description of Artificial Sequence: Synthetic oligonucleotide
  Sense strand starting at position 3439 of SEQ ID NO: 317320
gcacuuugugcucugcuau

SEQ ID NO: 481762 - RNA, 19 nt, Artificial Sequence
  Description of Artificial Sequence: Synthetic oligonucleotide
  Antisense Strand to SEQ ID NO: 481761
auagcagagcacaaagugc

SEQ ID NO: 481763 - RNA, 19 nt, Artificial Sequence
  Description of Artificial Sequence: Synthetic oligonucleotide
  Sense strand starting at position 3451 of SEQ ID NO: 317320
cugcuaucugugcaugaac

SEQ ID NO: 481764 - RNA, 19 nt, Artificial Sequence
  Description of Artificial Sequence: Synthetic oligonucleotide
  Antisense Strand to SEQ ID NO: 481763
guucaugcacagauagcag

SEQ ID NO: 481765 - RNA, 19 nt, Artificial Sequence
  Description of Artificial Sequence: Synthetic oligonucleotide
  Sense strand starting at position 3453 of SEQ ID NO: 317320
gcuaucugugcaugaacua

SEQ ID NO: 481766 - RNA, 19 nt, Artificial Sequence
  Description of Artificial Sequence: Synthetic oligonucleotide
  Antisense Strand to SEQ ID NO: 481765
uaguucaugcacagauagc

SEQ ID NO: 481767 - RNA, 19 nt, Artificial Sequence
  Description of Artificial Sequence: Synthetic oligonucleotide
  Sense strand starting at position 3454 of SEQ ID NO: 317320
cuaucugugcaugaacuaa

SEQ ID NO: 481768 - RNA, 19 nt, Artificial Sequence
  Description of Artificial Sequence: Synthetic oligonucleotide
  Antisense Strand to SEQ ID NO: 481767
uuaguucaugcacagauag

SEQ ID NO: 481769 - RNA, 19 nt, Artificial Sequence
  Description of Artificial Sequence: Synthetic oligonucleotide
  Sense strand starting at position 3518 of SEQ ID NO: 317320
guaacuggcgacugaucau

SEQ ID NO: 481770 - RNA, 19 nt, Artificial Sequence
  Description of Artificial Sequence: Synthetic oligonucleotide
  Antisense Strand to SEQ ID NO: 481769
augaucagucgccaguuac

SEQ ID NO: 481771 - RNA, 19 nt, Artificial Sequence
  Description of Artificial Sequence: Synthetic oligonucleotide
  Sense strand starting at position 3566 of SEQ ID NO: 317320
cacaaugauuuguggacua

SEQ ID NO: 481772 - RNA, 19 nt, Artificial Sequence
  Description of Artificial Sequence: Synthetic oligonucleotide
  Antisense Strand to SEQ ID NO: 481771
uaguccacaaaucauugug

SEQ ID NO: 481773 - RNA, 19 nt, Artificial Sequence
  Description of Artificial Sequence: Synthetic oligonucleotide
  Sense strand starting at position 3614 of SEQ ID NO: 317320
uucucaguacugugguaau

SEQ ID NO: 481774 - RNA, 19 nt, Artificial Sequence
  Description of Artificial Sequence: Synthetic oligonucleotide
  Antisense Strand to SEQ ID NO: 481773
auuaccacaguacugagaa

SEQ ID NO: 481775 - RNA, 19 nt, Artificial Sequence
  Description of Artificial Sequence: Synthetic oligonucleotide
  Sense strand starting at position 3669 of SEQ ID NO: 317320
aacuguggucacugguauu

SEQ ID NO: 481776 - RNA, 19 nt, Artificial Sequence
  Description of Artificial Sequence: Synthetic oligonucleotide
  Antisense Strand to SEQ ID NO: 481775
aauaccagugaccacaguu

SEQ ID NO: 481777 - RNA, 19 nt, Artificial Sequence
  Description of Artificial Sequence: Synthetic oligonucleotide
  Sense strand starting at position 3809 of SEQ ID NO: 317320
cugaauugcucacuagaag

SEQ ID NO: 481778 - RNA, 19 nt, Artificial Sequence
  Description of Artificial Sequence: Synthetic oligonucleotide
  Antisense Strand to SEQ ID NO: 481777
cuucuagugagcaauucag

SEQ ID NO: 481779 - RNA, 19 nt, Artificial Sequence
  Description of Artificial Sequence: Synthetic oligonucleotide
  Sense strand starting at position 3823 of SEQ ID NO: 317320
agaagaauguuuggagaga

SEQ ID NO: 481780 - RNA, 19 nt, Artificial Sequence
  Description of Artificial Sequence: Synthetic oligonucleotide
  Antisense Strand to SEQ ID NO: 481779
ucucuccaaacauucuucu

SEQ ID NO: 481781 - RNA, 19 nt, Artificial Sequence
  Description of Artificial Sequence: Synthetic oligonucleotide
  Sense strand starting at position 3824 of SEQ ID NO: 317320
gaagaauguuuggagagaa

SEQ ID NO: 481782 - RNA, 19 nt, Artificial Sequence
  Description of Artificial Sequence: Synthetic oligonucleotide
  Antisense Strand to SEQ ID NO: 481781
uucucuccaaacauucuuc

SEQ ID NO: 481783 - RNA, 19 nt, Artificial Sequence
  Description of Artificial Sequence: Synthetic oligonucleotide
  Sense strand starting at position 3878 of SEQ ID NO: 317320
gcacaaagauauucuaggu

SEQ ID NO: 481784 - RNA, 19 nt, Artificial Sequence
  Description of Artificial Sequence: Synthetic oligonucleotide
  Antisense Strand to SEQ ID NO: 481783
accuagaauaucuuugugc

SEQ ID NO: 481785 - RNA, 19 nt, Artificial Sequence
  Description of Artificial Sequence: Synthetic oligonucleotide
  Sense strand starting at position 302 of SEQ ID NO: 317321
auccuacauguguguauau

SEQ ID NO: 481786 - RNA, 19 nt, Artificial Sequence
  Description of Artificial Sequence: Synthetic oligonucleotide
  Antisense Strand to SEQ ID NO: 481785
auauacacacauguaggau

SEQ ID NO: 481787 - RNA, 19 nt, Artificial Sequence
  Description of Artificial Sequence: Synthetic oligonucleotide
  Sense strand starting at position 312 of SEQ ID NO: 317321
uguguauaugugcauucuu

SEQ ID NO: 481788 - RNA, 19 nt, Artificial Sequence
  Description of Artificial Sequence: Synthetic oligonucleotide
  Antisense Strand to SEQ ID NO: 481787
aagaaugcacauauacaca

SEQ ID NO: 481789 - RNA, 19 nt, Artificial Sequence
  Description of Artificial Sequence: Synthetic oligonucleotide
  Sense strand starting at position 342 of SEQ ID NO: 317321
auuagauucccguaagaca

SEQ ID NO: 481790 - RNA, 19 nt, Artificial Sequence
  Description of Artificial Sequence: Synthetic oligonucleotide
  Antisense Strand to SEQ ID NO: 481789
ugucuuacgggaaucuaau

SEQ ID NO: 481791 - RNA, 19 nt, Artificial Sequence
  Description of Artificial Sequence: Synthetic oligonucleotide
  Sense strand starting at position 350 of SEQ ID NO: 317321
cccguaagacagugaaauc

SEQ ID NO: 481792 - RNA, 19 nt, Artificial Sequence
  Description of Artificial Sequence: Synthetic oligonucleotide
  Antisense Strand to SEQ ID NO: 481791
gauuucacugucuuacggg

SEQ ID NO: 481793 - RNA, 19 nt, Artificial Sequence
  Description of Artificial Sequence: Synthetic oligonucleotide
  Sense strand starting at position 505 of SEQ ID NO: 317321
caaauaaccgcggacguau

SEQ ID NO: 481794 - RNA, 19 nt, Artificial Sequence
  Description of Artificial Sequence: Synthetic oligonucleotide
  Antisense Strand to SEQ ID NO: 481793
auacguccgcgguuauuug

SEQ ID NO: 481795 - RNA, 19 nt, Artificial Sequence
  Description of Artificial Sequence: Synthetic oligonucleotide
  Sense strand starting at position 513 of SEQ ID NO: 317321
cgcggacguauuuaagaua

SEQ ID NO: 481796 - RNA, 19 nt, Artificial Sequence
  Description of Artificial Sequence: Synthetic oligonucleotide
  Antisense Strand to SEQ ID NO: 481795
uaucuuaaauacguccgcg

SEQ ID NO: 481797 - RNA, 19 nt, Artificial Sequence
  Description of Artificial Sequence: Synthetic oligonucleotide
  Sense strand starting at position 605 of SEQ ID NO: 317321
cuguuaauuaagggauagu

SEQ ID NO: 481798 - RNA, 19 nt, Artificial Sequence
  Description of Artificial Sequence: Synthetic oligonucleotide
  Antisense Strand to SEQ ID NO: 481797
acuaucccuuaauuaacag

SEQ ID NO: 481799 - RNA, 19 nt, Artificial Sequence
  Description of Artificial Sequence: Synthetic oligonucleotide
  Sense strand starting at position 967 of SEQ ID NO: 317321
ucuugaauaaacggaggua

SEQ ID NO: 481800 - RNA, 19 nt, Artificial Sequence
  Description of Artificial Sequence: Synthetic oligonucleotide
  Antisense Strand to SEQ ID NO: 481799
uaccuccguuuauucaaga

SEQ ID NO: 481801 - RNA, 19 nt, Artificial Sequence
  Description of Artificial Sequence: Synthetic oligonucleotide
  Sense strand starting at position 1037 of SEQ ID NO: 317321
guuauaacugcccacaaag

SEQ ID NO: 481802 - RNA, 19 nt, Artificial Sequence
  Description of Artificial Sequence: Synthetic oligonucleotide
  Antisense Strand to SEQ ID NO: 481801
cuuugugggcaguuauaac

SEQ ID NO: 481803 - RNA, 19 nt, Artificial Sequence
  Description of Artificial Sequence: Synthetic oligonucleotide
  Sense strand starting at position 1103 of SEQ ID NO: 317321
aaggauuugucacagacua

SEQ ID NO: 481804 - RNA, 19 nt, Artificial Sequence
  Description of Artificial Sequence: Synthetic oligonucleotide
  Antisense Strand to SEQ ID NO: 481803
uagucugugacaaauccuu

SEQ ID NO: 481805 - RNA, 19 nt, Artificial Sequence
  Description of Artificial Sequence: Synthetic oligonucleotide
  Sense strand starting at position 1161 of SEQ ID NO: 317321
auuccuuaagcgcaagaaa

SEQ ID NO: 481806 - RNA, 19 nt, Artificial Sequence
  Description of Artificial Sequence: Synthetic oligonucleotide
  Antisense Strand to SEQ ID NO: 481805
uuucuugcgcuuaaggaau

SEQ ID NO: 481807 - RNA, 19 nt, Artificial Sequence
  Description of Artificial Sequence: Synthetic oligonucleotide
  Sense strand starting at position 1276 of SEQ ID NO: 317321
ugagacugcccucaaagua

SEQ ID NO: 481808 - RNA, 19 nt, Artificial Sequence
  Description of Artificial Sequence: Synthetic oligonucleotide
  Antisense Strand to SEQ ID NO: 481807
uacuuugagggcagucuca

SEQ ID NO: 481809 - RNA, 19 nt, Artificial Sequence
  Description of Artificial Sequence: Synthetic oligonucleotide
  Sense strand starting at position 1335 of SEQ ID NO: 317321
guuaaaugacaguagacgu

SEQ ID NO: 481810 - RNA, 19 nt, Artificial Sequence
  Description of Artificial Sequence: Synthetic oligonucleotide
  Antisense Strand to SEQ ID NO: 481809
acgucuacugucauuuaac

SEQ ID NO: 481811 - RNA, 19 nt, Artificial Sequence
  Description of Artificial Sequence: Synthetic oligonucleotide
  Sense strand starting at position 1478 of SEQ ID NO: 317321
ugcacaagggucugaaagu

SEQ ID NO: 481812 - RNA, 19 nt, Artificial Sequence
  Description of Artificial Sequence: Synthetic oligonucleotide
  Antisense Strand to SEQ ID NO: 481811
acuuucagacccuugugca

SEQ ID NO: 481813 - RNA, 19 nt, Artificial Sequence
  Description of Artificial Sequence: Synthetic oligonucleotide
  Sense strand starting at position 1487 of SEQ ID NO: 317321
gucugaaagucuccuaauc

SEQ ID NO: 481814 - RNA, 19 nt, Artificial Sequence
  Description of Artificial Sequence: Synthetic oligonucleotide
  Antisense Strand to SEQ ID NO: 481813
gauuaggagacuuucagac

SEQ ID NO: 481815 - RNA, 19 nt, Artificial Sequence
  Description of Artificial Sequence: Synthetic oligonucleotide
  Sense strand starting at position 2298 of SEQ ID NO: 317321
cugcaagggcuuuauugua

SEQ ID NO: 481816 - RNA, 19 nt, Artificial Sequence
  Description of Artificial Sequence: Synthetic oligonucleotide
  Antisense Strand to SEQ ID NO: 481815
uacaauaaagcccuugcag

SEQ ID NO: 481817 - RNA, 19 nt, Artificial Sequence
  Description of Artificial Sequence: Synthetic oligonucleotide
  Sense strand starting at position 2306 of SEQ ID NO: 317321
gcuuuauuguaauuuguga

SEQ ID NO: 481818 - RNA, 19 nt, Artificial Sequence
  Description of Artificial Sequence: Synthetic oligonucleotide
  Antisense Strand to SEQ ID NO: 481817
ucacaaauuacaauaaagc

SEQ ID NO: 481819 - RNA, 19 nt, Artificial Sequence
  Description of Artificial Sequence: Synthetic oligonucleotide
  Sense strand starting at position 2310 of SEQ ID NO: 317321
uauuguaauuugugacuga

SEQ ID NO: 481820 - RNA, 19 nt, Artificial Sequence
  Description of Artificial Sequence: Synthetic oligonucleotide
  Antisense Strand to SEQ ID NO: 481819
ucagucacaaauuacaaua

SEQ ID NO: 481821 - RNA, 19 nt, Artificial Sequence
  Description of Artificial Sequence: Synthetic oligonucleotide
  Sense strand starting at position 2314 of SEQ ID NO: 317321
guaauuugugacugaguuc

SEQ ID NO: 481822 - RNA, 19 nt, Artificial Sequence
  Description of Artificial Sequence: Synthetic oligonucleotide
  Antisense Strand to SEQ ID NO: 481821
gaacucagucacaaauuac

SEQ ID NO: 481823 - RNA, 19 nt, Artificial Sequence
  Description of Artificial Sequence: Synthetic oligonucleotide
  Sense strand starting at position 2477 of SEQ ID NO: 317321
guuacuaucccaugguauu

SEQ ID NO: 481824 - RNA, 19 nt, Artificial Sequence
  Description of Artificial Sequence: Synthetic oligonucleotide
  Antisense Strand to SEQ ID NO: 481823
aauaccaugggauaguaac

SEQ ID NO: 481825 - RNA, 19 nt, Artificial Sequence
  Description of Artificial Sequence: Synthetic oligonucleotide
  Sense strand starting at position 2952 of SEQ ID NO: 317321
uuaucacuuuggccugaau

SEQ ID NO: 481826 - RNA, 19 nt, Artificial Sequence
  Description of Artificial Sequence: Synthetic oligonucleotide
  Antisense Strand to SEQ ID NO: 481825
auucaggccaaagugauaa

SEQ ID NO: 481827 - RNA, 19 nt, Artificial Sequence
  Description of Artificial Sequence: Synthetic oligonucleotide
  Sense strand starting at position 2964 of SEQ ID NO: 317321
ccugaaugcuagucaaacu

SEQ ID NO: 481828 - RNA, 19 nt, Artificial Sequence
  Description of Artificial Sequence: Synthetic oligonucleotide
  Antisense Strand to SEQ ID NO: 481827
aguuugacuagcauucagg

SEQ ID NO: 481829 - RNA, 19 nt, Artificial Sequence
  Description of Artificial Sequence: Synthetic oligonucleotide
  Sense strand starting at position 2973 of SEQ ID NO: 317321
uagucaaacugauugggau

SEQ ID NO: 481830 - RNA, 19 nt, Artificial Sequence
  Description of Artificial Sequence: Synthetic oligonucleotide
  Antisense Strand to SEQ ID NO: 481829
aucccaaucaguuugacua

SEQ ID NO: 481831 - RNA, 19 nt, Artificial Sequence
  Description of Artificial Sequence: Synthetic oligonucleotide
  Sense strand starting at position 2974 of SEQ ID NO: 317321
agucaaacugauugggauu

SEQ ID NO: 481832 - RNA, 19 nt, Artificial Sequence
  Description of Artificial Sequence: Synthetic oligonucleotide
  Antisense Strand to SEQ ID NO: 481831
aaucccaaucaguuugacu

SEQ ID NO: 481833 - RNA, 19 nt, Artificial Sequence
  Description of Artificial Sequence: Synthetic oligonucleotide
  Sense strand starting at position 3054 of SEQ ID NO: 317321
cuguuccuagugcaauuaa

SEQ ID NO: 481834 - RNA, 19 nt, Artificial Sequence
  Description of Artificial Sequence: Synthetic oligonucleotide
  Antisense Strand to SEQ ID NO: 481833
uuaauugcacuaggaacag

SEQ ID NO: 481835 - RNA, 19 nt, Artificial Sequence
  Description of Artificial Sequence: Synthetic oligonucleotide
  Sense strand starting at position 3248 of SEQ ID NO: 317321
cuguccuuuguugaccaau

SEQ ID NO: 481836 - RNA, 19 nt, Artificial Sequence
  Description of Artificial Sequence: Synthetic oligonucleotide
  Antisense Strand to SEQ ID NO: 481835
auuggucaacaaaggacag

SEQ ID NO: 481837 - RNA, 19 nt, Artificial Sequence
  Description of Artificial Sequence: Synthetic oligonucleotide
  Sense strand starting at position 3250 of SEQ ID NO: 317321
guccuuuguugaccaauua

SEQ ID NO: 481838 - RNA, 19 nt, Artificial Sequence
  Description of Artificial Sequence: Synthetic oligonucleotide
  Antisense Strand to SEQ ID NO: 481837
uaauuggucaacaaaggac

SEQ ID NO: 481839 - RNA, 19 nt, Artificial Sequence
  Description of Artificial Sequence: Synthetic oligonucleotide
  Sense strand starting at position 3288 of SEQ ID NO: 317321
uuuauaaauggucacaagu

SEQ ID NO: 481840 - RNA, 19 nt, Artificial Sequence
  Description of Artificial Sequence: Synthetic oligonucleotide
  Antisense Strand to SEQ ID NO: 481839
acuugugaccauuuauaaa

SEQ ID NO: 481841 - RNA, 19 nt, Artificial Sequence
  Description of Artificial Sequence: Synthetic oligonucleotide
  Sense strand starting at position 3341 of SEQ ID NO: 317321
gcacuuugugcucugcuau

SEQ ID NO: 481842 - RNA, 19 nt, Artificial Sequence
  Description of Artificial Sequence: Synthetic oligonucleotide
  Antisense Strand to SEQ ID NO: 481841
auagcagagcacaaagugc

SEQ ID NO: 481843 - RNA, 19 nt, Artificial Sequence
  Description of Artificial Sequence: Synthetic oligonucleotide
  Sense strand starting at position 3353 of SEQ ID NO: 317321
cugcuaucugugcaugaac

SEQ ID NO: 481844 - RNA, 19 nt, Artificial Sequence
  Description of Artificial Sequence: Synthetic oligonucleotide
  Antisense Strand to SEQ ID NO: 481843
guucaugcacagauagcag

SEQ ID NO: 481845 - RNA, 19 nt, Artificial Sequence
  Description of Artificial Sequence: Synthetic oligonucleotide
  Sense strand starting at position 3355 of SEQ ID NO: 317321
gcuaucugugcaugaacua

SEQ ID NO: 481846 - RNA, 19 nt, Artificial Sequence
  Description of Artificial Sequence: Synthetic oligonucleotide
  Antisense Strand to SEQ ID NO: 481845
uaguucaugcacagauagc

SEQ ID NO: 481847 - RNA, 19 nt, Artificial Sequence
  Description of Artificial Sequence: Synthetic oligonucleotide
  Sense strand starting at position 3356 of SEQ ID NO: 317321
cuaucugugcaugaacuaa

SEQ ID NO: 481848 - RNA, 19 nt, Artificial Sequence
  Description of Artificial Sequence: Synthetic oligonucleotide
  Antisense Strand to SEQ ID NO: 481847
uuaguucaugcacagauag

SEQ ID NO: 481849 - RNA, 19 nt, Artificial Sequence
  Description of Artificial Sequence: Synthetic oligonucleotide
  Sense strand starting at position 3420 of SEQ ID NO: 317321
guaacuggcgacugaucau

SEQ ID NO: 481850 - RNA, 19 nt, Artificial Sequence
  Description of Artificial Sequence: Synthetic oligonucleotide
  Antisense Strand to SEQ ID NO: 481849
augaucagucgccaguuac

SEQ ID NO: 481851 - RNA, 19 nt, Artificial Sequence
  Description of Artificial Sequence: Synthetic oligonucleotide
  Sense strand starting at position 3468 of SEQ ID NO: 317321
cacaaugauuuguggacua

SEQ ID NO: 481852 - RNA, 19 nt, Artificial Sequence
  Description of Artificial Sequence: Synthetic oligonucleotide
  Antisense Strand to SEQ ID NO: 481851
uaguccacaaaucauugug

SEQ ID NO: 481853 - RNA, 19 nt, Artificial Sequence
  Description of Artificial Sequence: Synthetic oligonucleotide
  Sense strand starting at position 3516 of SEQ ID NO: 317321
uucucaguacugugguaau

SEQ ID NO: 481854 - RNA, 19 nt, Artificial Sequence
  Description of Artificial Sequence: Synthetic oligonucleotide
  Antisense Strand to SEQ ID NO: 481853
auuaccacaguacugagaa

SEQ ID NO: 481855 - RNA, 19 nt, Artificial Sequence
  Description of Artificial Sequence: Synthetic oligonucleotide
  Sense strand starting at position 3571 of SEQ ID NO: 317321
aacuguggucacugguauu

SEQ ID NO: 481856 - RNA, 19 nt, Artificial Sequence
  Description of Artificial Sequence: Synthetic oligonucleotide
  Antisense Strand to SEQ ID NO: 481855
aauaccagugaccacaguu

SEQ ID NO: 481857 - RNA, 19 nt, Artificial Sequence
  Description of Artificial Sequence: Synthetic oligonucleotide
  Sense strand starting at position 3711 of SEQ ID NO: 317321
cugaauugcucacuagaag

SEQ ID NO: 481858 - RNA, 19 nt, Artificial Sequence
  Description of Artificial Sequence: Synthetic oligonucleotide
  Antisense Strand to SEQ ID NO: 481857
cuucuagugagcaauucag

SEQ ID NO: 481859 - RNA, 19 nt, Artificial Sequence
  Description of Artificial Sequence: Synthetic oligonucleotide
  Sense strand starting at position 3725 of SEQ ID NO: 317321
agaagaauguuuggagaga

SEQ ID NO: 481860 - RNA, 19 nt, Artificial Sequence
  Description of Artificial Sequence: Synthetic oligonucleotide
  Antisense Strand to SEQ ID NO: 481859
ucucuccaaacauucuucu

SEQ ID NO: 481861 - RNA, 19 nt, Artificial Sequence
  Description of Artificial Sequence: Synthetic oligonucleotide
  Sense strand starting at position 3726 of SEQ ID NO: 317321
gaagaauguuuggagagaa

SEQ ID NO: 481862 - RNA, 19 nt, Artificial Sequence
  Description of Artificial Sequence: Synthetic oligonucleotide
  Antisense Strand to SEQ ID NO: 481861
uucucuccaaacauucuuc

SEQ ID NO: 481863 - RNA, 19 nt, Artificial Sequence
  Description of Artificial Sequence: Synthetic oligonucleotide
  Sense strand starting at position 3780 of SEQ ID NO: 317321
gcacaaagauauucuaggu

SEQ ID NO: 481864 - RNA, 19 nt, Artificial Sequence
  Description of Artificial Sequence: Synthetic oligonucleotide
  Antisense Strand to SEQ ID NO: 481863
accuagaauaucuuugugc

SEQ ID NO: 481865 - RNA, 19 nt, Artificial Sequence
  Description of Artificial Sequence: Synthetic oligonucleotide
  Sense strand starting at position 316 of SEQ ID NO: 317322
auccuacauguguguauau

SEQ ID NO: 481866 - RNA, 19 nt, Artificial Sequence
  Description of Artificial Sequence: Synthetic oligonucleotide
  Antisense Strand to SEQ ID NO: 481865
auauacacacauguaggau

SEQ ID NO: 481867 - RNA, 19 nt, Artificial Sequence
  Description of Artificial Sequence: Synthetic oligonucleotide
  Sense strand starting at position 326 of SEQ ID NO: 317322
uguguauaugugcauucuu

SEQ ID NO: 481868 - RNA, 19 nt, Artificial Sequence
  Description of Artificial Sequence: Synthetic oligonucleotide
  Antisense Strand to SEQ ID NO: 481867
aagaaugcacauauacaca

SEQ ID NO: 481869 - RNA, 19 nt, Artificial Sequence
  Description of Artificial Sequence: Synthetic oligonucleotide
  Sense strand starting at position 356 of SEQ ID NO: 317322
auuagauucccguaagaca

SEQ ID NO: 481870 - RNA, 19 nt, Artificial Sequence
  Description of Artificial Sequence: Synthetic oligonucleotide
  Antisense Strand to SEQ ID NO: 481869
ugucuuacgggaaucuaau

SEQ ID NO: 481871 - RNA, 19 nt, Artificial Sequence
  Description of Artificial Sequence: Synthetic oligonucleotide
  Sense strand starting at position 364 of SEQ ID NO: 317322
cccguaagacagugaaauc

SEQ ID NO: 481872 - RNA, 19 nt, Artificial Sequence
  Description of Artificial Sequence: Synthetic oligonucleotide
  Antisense Strand to SEQ ID NO: 481871
gauuucacugucuuacggg

SEQ ID NO: 481873 - RNA, 19 nt, Artificial Sequence
  Description of Artificial Sequence: Synthetic oligonucleotide
  Sense strand starting at position 519 of SEQ ID NO: 317322
caaauaaccgcggacguau

SEQ ID NO: 481874 - RNA, 19 nt, Artificial Sequence
  Description of Artificial Sequence: Synthetic oligonucleotide
  Antisense Strand to SEQ ID NO: 481873
auacguccgcgguuauuug

SEQ ID NO: 481875 - RNA, 19 nt, Artificial Sequence
  Description of Artificial Sequence: Synthetic oligonucleotide
  Sense strand starting at position 527 of SEQ ID NO: 317322
cgcggacguauuuaagaua

SEQ ID NO: 481876 - RNA, 19 nt, Artificial Sequence
  Description of Artificial Sequence: Synthetic oligonucleotide
  Antisense Strand to SEQ ID NO: 481875
uaucuuaaauacguccgcg

SEQ ID NO: 481877 - RNA, 19 nt, Artificial Sequence
  Description of Artificial Sequence: Synthetic oligonucleotide
  Sense strand starting at position 619 of SEQ ID NO: 317322
cuguuaauuaagggauagu

SEQ ID NO: 481878 - RNA, 19 nt, Artificial Sequence
  Description of Artificial Sequence: Synthetic oligonucleotide
  Antisense Strand to SEQ ID NO: 481877
acuaucccuuaauuaacag

SEQ ID NO: 481879 - RNA, 19 nt, Artificial Sequence
  Description of Artificial Sequence: Synthetic oligonucleotide
  Sense strand starting at position 981 of SEQ ID NO: 317322
ucuugaauaaacggaggua

SEQ ID NO: 481880 - RNA, 19 nt, Artificial Sequence
  Description of Artificial Sequence: Synthetic oligonucleotide
  Antisense Strand to SEQ ID NO: 481879
uaccuccguuuauucaaga

SEQ ID NO: 481881 - RNA, 19 nt, Artificial Sequence
  Description of Artificial Sequence: Synthetic oligonucleotide
  Sense strand starting at position 1051 of SEQ ID NO: 317322
guuauaacugcccacaaag

SEQ ID NO: 481882 - RNA, 19 nt, Artificial Sequence
  Description of Artificial Sequence: Synthetic oligonucleotide
  Antisense Strand to SEQ ID NO: 481881
cuuugugggcaguuauaac

SEQ ID NO: 481883 - RNA, 19 nt, Artificial Sequence
  Description of Artificial Sequence: Synthetic oligonucleotide
  Sense strand starting at position 1117 of SEQ ID NO: 317322
aaggauuugucacagacua

SEQ ID NO: 481884 - RNA, 19 nt, Artificial Sequence
  Description of Artificial Sequence: Synthetic oligonucleotide
  Antisense Strand to SEQ ID NO: 481883
uagucugugacaaauccuu

SEQ ID NO: 481885 - RNA, 19 nt, Artificial Sequence
  Description of Artificial Sequence: Synthetic oligonucleotide
  Sense strand starting at position 1175 of SEQ ID NO: 317322
auuccuuaagcgcaagaaa

SEQ ID NO: 481886 - RNA, 19 nt, Artificial Sequence
  Description of Artificial Sequence: Synthetic oligonucleotide
  Antisense Strand to SEQ ID NO: 481885
uuucuugcgcuuaaggaau

SEQ ID NO: 481887 - RNA, 19 nt, Artificial Sequence
  Description of Artificial Sequence: Synthetic oligonucleotide
  Sense strand starting at position 1290 of SEQ ID NO: 317322
ugagacugcccucaaagua

SEQ ID NO: 481888 - RNA, 19 nt, Artificial Sequence
  Description of Artificial Sequence: Synthetic oligonucleotide
  Antisense Strand to SEQ ID NO: 481887
uacuuugagggcagucuca

SEQ ID NO: 481889 - RNA, 19 nt, Artificial Sequence
  Description of Artificial Sequence: Synthetic oligonucleotide
  Sense strand starting at position 1349 of SEQ ID NO: 317322
guuaaaugacaguagacgu

SEQ ID NO: 481890 - RNA, 19 nt, Artificial Sequence
  Description of Artificial Sequence: Synthetic oligonucleotide
  Antisense Strand to SEQ ID NO: 481889
acgucuacugucauuuaac

SEQ ID NO: 481891 - RNA, 19 nt, Artificial Sequence
  Description of Artificial Sequence: Synthetic oligonucleotide
  Sense strand starting at position 1492 of SEQ ID NO: 317322
ugcacaagggucugaaagu

SEQ ID NO: 481892 - RNA, 19 nt, Artificial Sequence
  Description of Artificial Sequence: Synthetic oligonucleotide
  Antisense Strand to SEQ ID NO: 481891
acuuucagacccuugugca

SEQ ID NO: 481893 - RNA, 19 nt, Artificial Sequence
  Description of Artificial Sequence: Synthetic oligonucleotide
  Sense strand starting at position 1501 of SEQ ID NO: 317322
gucugaaagucuccuaauc

SEQ ID NO: 481894 - RNA, 19 nt, Artificial Sequence
  Description of Artificial Sequence: Synthetic oligonucleotide
  Antisense Strand to SEQ ID NO: 481893
gauuaggagacuuucagac

SEQ ID NO: 481895 - RNA, 19 nt, Artificial Sequence
  Description of Artificial Sequence: Synthetic oligonucleotide
  Sense strand starting at position 2312 of SEQ ID NO: 317322
cugcaagggcuuuauugua

SEQ ID NO: 481896 - RNA, 19 nt, Artificial Sequence
  Description of Artificial Sequence: Synthetic oligonucleotide
  Antisense Strand to SEQ ID NO: 481895
uacaauaaagcccuugcag

SEQ ID NO: 481897 - RNA, 19 nt, Artificial Sequence
  Description of Artificial Sequence: Synthetic oligonucleotide
  Sense strand starting at position 2320 of SEQ ID NO: 317322
gcuuuauuguaauuuguga

SEQ ID NO: 481898 - RNA, 19 nt, Artificial Sequence
  Description of Artificial Sequence: Synthetic oligonucleotide
  Antisense Strand to SEQ ID NO: 481897
ucacaaauuacaauaaagc

SEQ ID NO: 481899 - RNA, 19 nt, Artificial Sequence
  Description of Artificial Sequence: Synthetic oligonucleotide
  Sense strand starting at position 2324 of SEQ ID NO: 317322
uauuguaauuugugacuga

SEQ ID NO: 481900 - RNA, 19 nt, Artificial Sequence
  Description of Artificial Sequence: Synthetic oligonucleotide
  Antisense Strand to SEQ ID NO: 481899
ucagucacaaauuacaaua

SEQ ID NO: 481901 - RNA, 19 nt, Artificial Sequence
  Description of Artificial Sequence: Synthetic oligonucleotide
  Sense strand starting at position 2328 of SEQ ID NO: 317322
guaauuugugacugaguuc

SEQ ID NO: 481902 - RNA, 19 nt, Artificial Sequence
  Description of Artificial Sequence: Synthetic oligonucleotide
  Antisense Strand to SEQ ID NO: 481901
gaacucagucacaaauuac

SEQ ID NO: 481903 - RNA, 19 nt, Artificial Sequence
  Description of Artificial Sequence: Synthetic oligonucleotide
  Sense strand starting at position 2491 of SEQ ID NO: 317322
guuacuaucccaugguauu

SEQ ID NO: 481904 - RNA, 19 nt, Artificial Sequence
  Description of Artificial Sequence: Synthetic oligonucleotide
  Antisense Strand to SEQ ID NO: 481903
aauaccaugggauaguaac

SEQ ID NO: 481905 - RNA, 19 nt, Artificial Sequence
  Description of Artificial Sequence: Synthetic oligonucleotide
  Sense strand starting at position 2966 of SEQ ID NO: 317322
uuaucacuuuggccugaau

SEQ ID NO: 481906 - RNA, 19 nt, Artificial Sequence
  Description of Artificial Sequence: Synthetic oligonucleotide
  Antisense Strand to SEQ ID NO: 481905
auucaggccaaagugauaa

SEQ ID NO: 481907 - RNA, 19 nt, Artificial Sequence
  Description of Artificial Sequence: Synthetic oligonucleotide
  Sense strand starting at position 2978 of SEQ ID NO: 317322
ccugaaugcuagucaaacu

SEQ ID NO: 481908 - RNA, 19 nt, Artificial Sequence
  Description of Artificial Sequence: Synthetic oligonucleotide
  Antisense Strand to SEQ ID NO: 481907
aguuugacuagcauucagg

SEQ ID NO: 481909 - RNA, 19 nt, Artificial Sequence
  Description of Artificial Sequence: Synthetic oligonucleotide
  Sense strand starting at position 2987 of SEQ ID NO: 317322
uagucaaacugauugggau

SEQ ID NO: 481910 - RNA, 19 nt, Artificial Sequence
  Description of Artificial Sequence: Synthetic oligonucleotide
  Antisense Strand to SEQ ID NO: 481909
aucccaaucaguuugacua

SEQ ID NO: 481911 - RNA, 19 nt, Artificial Sequence
  Description of Artificial Sequence: Synthetic oligonucleotide
  Sense strand starting at position 2988 of SEQ ID NO: 317322
agucaaacugauugggauu

SEQ ID NO: 481912 - RNA, 19 nt, Artificial Sequence
  Description of Artificial Sequence: Synthetic oligonucleotide
  Antisense Strand to SEQ ID NO: 481911
aaucccaaucaguuugacu

SEQ ID NO: 481913 - RNA, 19 nt, Artificial Sequence
  Description of Artificial Sequence: Synthetic oligonucleotide
  Sense strand starting at position 3068 of SEQ ID NO: 317322
cuguuccuagugcaauuaa

SEQ ID NO: 481914 - RNA, 19 nt, Artificial Sequence
  Description of Artificial Sequence: Synthetic oligonucleotide
  Antisense Strand to SEQ ID NO: 481913
uuaauugcacuaggaacag

SEQ ID NO: 481915 - RNA, 19 nt, Artificial Sequence
  Description of Artificial Sequence: Synthetic oligonucleotide
  Sense strand starting at position 3262 of SEQ ID NO: 317322
cuguccuuuguugaccaau

SEQ ID NO: 481916 - RNA, 19 nt, Artificial Sequence
  Description of Artificial Sequence: Synthetic oligonucleotide
  Antisense Strand to SEQ ID NO: 481915
auuggucaacaaaggacag

SEQ ID NO: 481917 - RNA, 19 nt, Artificial Sequence
  Description of Artificial Sequence: Synthetic oligonucleotide
  Sense strand starting at position 3264 of SEQ ID NO: 317322
guccuuuguugaccaauua

SEQ ID NO: 481918 - RNA, 19 nt, Artificial Sequence
  Description of Artificial Sequence: Synthetic oligonucleotide
  Antisense Strand to SEQ ID NO: 481917
uaauuggucaacaaaggac

SEQ ID NO: 481919 - RNA, 19 nt, Artificial Sequence
  Description of Artificial Sequence: Synthetic oligonucleotide
  Sense strand starting at position 3302 of SEQ ID NO: 317322
uuuauaaauggucacaagu

SEQ ID NO: 481920 - RNA, 19 nt, Artificial Sequence
  Description of Artificial Sequence: Synthetic oligonucleotide
  Antisense Strand to SEQ ID NO: 481919
acuugugaccauuuauaaa

SEQ ID NO: 481921 - RNA, 19 nt, Artificial Sequence
  Description of Artificial Sequence: Synthetic oligonucleotide
  Sense strand starting at position 3355 of SEQ ID NO: 317322
gcacuuugugcucugcuau

SEQ ID NO: 481922 - RNA, 19 nt, Artificial Sequence
  Description of Artificial Sequence: Synthetic oligonucleotide
  Antisense Strand to SEQ ID NO: 481921
auagcagagcacaaagugc

SEQ ID NO: 481923 - RNA, 19 nt, Artificial Sequence
  Description of Artificial Sequence: Synthetic oligonucleotide
  Sense strand starting at position 3367 of SEQ ID NO: 317322
cugcuaucugugcaugaac

SEQ ID NO: 481924 - RNA, 19 nt, Artificial Sequence
  Description of Artificial Sequence: Synthetic oligonucleotide
  Antisense Strand to SEQ ID NO: 481923
guucaugcacagauagcag

SEQ ID NO: 481925 - RNA, 19 nt, Artificial Sequence
  Description of Artificial Sequence: Synthetic oligonucleotide
  Sense strand starting at position 3369 of SEQ ID NO: 317322
gcuaucugugcaugaacua

SEQ ID NO: 481926 - RNA, 19 nt, Artificial Sequence
  Description of Artificial Sequence: Synthetic oligonucleotide
  Antisense Strand to SEQ ID NO: 481925
uaguucaugcacagauagc

SEQ ID NO: 481927 - RNA, 19 nt, Artificial Sequence
  Description of Artificial Sequence: Synthetic oligonucleotide
  Sense strand starting at position 3370 of SEQ ID NO: 317322
cuaucugugcaugaacuaa

SEQ ID NO: 481928 - RNA, 19 nt, Artificial Sequence
  Description of Artificial Sequence: Synthetic oligonucleotide
  Antisense Strand to SEQ ID NO: 481927
uuaguucaugcacagauag

SEQ ID NO: 481929 - RNA, 19 nt, Artificial Sequence
  Description of Artificial Sequence: Synthetic oligonucleotide
  Sense strand starting at position 3434 of SEQ ID NO: 317322
guaacuggcgacugaucau

SEQ ID NO: 481930 - RNA, 19 nt, Artificial Sequence
  Description of Artificial Sequence: Synthetic oligonucleotide
  Antisense Strand to SEQ ID NO: 481929
augaucagucgccaguuac

SEQ ID NO: 481931 - RNA, 19 nt, Artificial Sequence
  Description of Artificial Sequence: Synthetic oligonucleotide
  Sense strand starting at position 3482 of SEQ ID NO: 317322
cacaaugauuuguggacua

SEQ ID NO: 481932 - RNA, 19 nt, Artificial Sequence
  Description of Artificial Sequence: Synthetic oligonucleotide
  Antisense Strand to SEQ ID NO: 481931
uaguccacaaaucauugug

SEQ ID NO: 481933 - RNA, 19 nt, Artificial Sequence
  Description of Artificial Sequence: Synthetic oligonucleotide
  Sense strand starting at position 3530 of SEQ ID NO: 317322
uucucaguacugugguaau

SEQ ID NO: 481934 - RNA, 19 nt, Artificial Sequence
  Description of Artificial Sequence: Synthetic oligonucleotide
  Antisense Strand to SEQ ID NO: 481933
auuaccacaguacugagaa

SEQ ID NO: 481935 - RNA, 19 nt, Artificial Sequence
  Description of Artificial Sequence: Synthetic oligonucleotide
  Sense strand starting at position 3585 of SEQ ID NO: 317322
aacuguggucacugguauu

SEQ ID NO: 481936 - RNA, 19 nt, Artificial Sequence
  Description of Artificial Sequence: Synthetic oligonucleotide
  Antisense Strand to SEQ ID NO: 481935
aauaccagugaccacaguu

SEQ ID NO: 481937 - RNA, 19 nt, Artificial Sequence
  Description of Artificial Sequence: Synthetic oligonucleotide
  Sense strand starting at position 3725 of SEQ ID NO: 317322
cugaauugcucacuagaag

SEQ ID NO: 481938 - RNA, 19 nt, Artificial Sequence
  Description of Artificial Sequence: Synthetic oligonucleotide
  Antisense Strand to SEQ ID NO: 481937
cuucuagugagcaauucag

SEQ ID NO: 481939 - RNA, 19 nt, Artificial Sequence
  Description of Artificial Sequence: Synthetic oligonucleotide
  Sense strand starting at position 3739 of SEQ ID NO: 317322
agaagaauguuuggagaga

SEQ ID NO: 481940 - RNA, 19 nt, Artificial Sequence
  Description of Artificial Sequence: Synthetic oligonucleotide
  Antisense Strand to SEQ ID NO: 481939
ucucuccaaacauucuucu

SEQ ID NO: 481941 - RNA, 19 nt, Artificial Sequence
  Description of Artificial Sequence: Synthetic oligonucleotide
  Sense strand starting at position 3740 of SEQ ID NO: 317322
gaagaauguuuggagagaa

SEQ ID NO: 481942 - RNA, 19 nt, Artificial Sequence
  Description of Artificial Sequence: Synthetic oligonucleotide
  Antisense Strand to SEQ ID NO: 481941
uucucuccaaacauucuuc

SEQ ID NO: 481943 - RNA, 19 nt, Artificial Sequence
  Description of Artificial Sequence: Synthetic oligonucleotide
  Sense strand starting at position 3794 of SEQ ID NO: 317322
gcacaaagauauucuaggu

SEQ ID NO: 481944 - RNA, 19 nt, Artificial Sequence
  Description of Artificial Sequence: Synthetic oligonucleotide
  Antisense Strand to SEQ ID NO: 481943
accuagaauaucuuugugc

SEQ ID NO: 481945 - RNA, 19 nt, Artificial Sequence
  Description of Artificial Sequence: Synthetic oligonucleotide
  Sense strand starting at position 6 of SEQ ID NO: 317323
ugaaaugaauucuggacaa

SEQ ID NO: 481946 - RNA, 19 nt, Artificial Sequence
  Description of Artificial Sequence: Synthetic oligonucleotide
  Antisense Strand to SEQ ID NO: 481945
uuguccagaauucauuuca

SEQ ID NO: 481947 - RNA, 19 nt, Artificial Sequence
  Description of Artificial Sequence: Synthetic oligonucleotide
  Sense strand starting at position 119 of SEQ ID NO: 317323
guaauauauggcgagauaa

SEQ ID NO: 481948 - RNA, 19 nt, Artificial Sequence
  Description of Artificial Sequence: Synthetic oligonucleotide
  Antisense Strand to SEQ ID NO: 481947
uuaucucgccauauauuac

SEQ ID NO: 481949 - RNA, 19 nt, Artificial Sequence
  Description of Artificial Sequence: Synthetic oligonucleotide
  Sense strand starting at position 131 of SEQ ID NO: 317323
gagauaacccaagguuucu

SEQ ID NO: 481950 - RNA, 19 nt, Artificial Sequence
  Description of Artificial Sequence: Synthetic oligonucleotide
  Antisense Strand to SEQ ID NO: 481949
agaaaccuuggguuaucuc

SEQ ID NO: 481951 - RNA, 19 nt, Artificial Sequence
  Description of Artificial Sequence: Synthetic oligonucleotide
  Sense strand starting at position 141 of SEQ ID NO: 317323
aagguuucugcaggauugu

SEQ ID NO: 481952 - RNA, 19 nt, Artificial Sequence
  Description of Artificial Sequence: Synthetic oligonucleotide
  Antisense Strand to SEQ ID NO: 481951
acaauccugcagaaaccuu

SEQ ID NO: 481953 - RNA, 19 nt, Artificial Sequence
  Description of Artificial Sequence: Synthetic oligonucleotide
  Sense strand starting at position 189 of SEQ ID NO: 317323
ugucgccuucuguaaauuu

SEQ ID NO: 481954 - RNA, 19 nt, Artificial Sequence
  Description of Artificial Sequence: Synthetic oligonucleotide
  Antisense Strand to SEQ ID NO: 481953
aaauuuacagaaggcgaca

SEQ ID NO: 481955 - RNA, 19 nt, Artificial Sequence
  Description of Artificial Sequence: Synthetic oligonucleotide
  Sense strand starting at position 369 of SEQ ID NO: 317323
agccaagaagugugcaaau

SEQ ID NO: 481956 - RNA, 19 nt, Artificial Sequence
  Description of Artificial Sequence: Synthetic oligonucleotide
  Antisense Strand to SEQ ID NO: 481955
auuugcacacuucuuggcu

SEQ ID NO: 481957 - RNA, 19 nt, Artificial Sequence
  Description of Artificial Sequence: Synthetic oligonucleotide
  Sense strand starting at position 371 of SEQ ID NO: 317323
ccaagaagugugcaaauug

SEQ ID NO: 481958 - RNA, 19 nt, Artificial Sequence
  Description of Artificial Sequence: Synthetic oligonucleotide
  Antisense Strand to SEQ ID NO: 481957
caauuugcacacuucuugg

SEQ ID NO: 481959 - RNA, 19 nt, Artificial Sequence
  Description of Artificial Sequence: Synthetic oligonucleotide
  Sense strand starting at position 464 of SEQ ID NO: 317323
gcgguaagcguguuacaga

SEQ ID NO: 481960 - RNA, 19 nt, Artificial Sequence
  Description of Artificial Sequence: Synthetic oligonucleotide
  Antisense Strand to SEQ ID NO: 481959
ucuguaacacgcuuaccgc

SEQ ID NO: 481961 - RNA, 19 nt, Artificial Sequence
  Description of Artificial Sequence: Synthetic oligonucleotide
  Sense strand starting at position 471 of SEQ ID NO: 317323
gcguguuacagagaacuag

SEQ ID NO: 481962 - RNA, 19 nt, Artificial Sequence
  Description of Artificial Sequence: Synthetic oligonucleotide
  Antisense Strand to SEQ ID NO: 481961
cuaguucucuguaacacgc

SEQ ID NO: 481963 - RNA, 19 nt, Artificial Sequence
  Description of Artificial Sequence: Synthetic oligonucleotide
  Sense strand starting at position 486 of SEQ ID NO: 317323
cuagauuucuuuccggcau

SEQ ID NO: 481964 - RNA, 19 nt, Artificial Sequence
  Description of Artificial Sequence: Synthetic oligonucleotide
  Antisense Strand to SEQ ID NO: 481963
augccggaaagaaaucuag

SEQ ID NO: 481965 - RNA, 19 nt, Artificial Sequence
  Description of Artificial Sequence: Synthetic oligonucleotide
  Sense strand starting at position 535 of SEQ ID NO: 317323
guugaagagcgcuggagau

SEQ ID NO: 481966 - RNA, 19 nt, Artificial Sequence
  Description of Artificial Sequence: Synthetic oligonucleotide
  Antisense Strand to SEQ ID NO: 481965
aucuccagcgcucuucaac

SEQ ID NO: 481967 - RNA, 19 nt, Artificial Sequence
  Description of Artificial Sequence: Synthetic oligonucleotide
  Sense strand starting at position 2168 of SEQ ID NO: 317323
uuuaauuguccagaguauu

SEQ ID NO: 481968 - RNA, 19 nt, Artificial Sequence
  Description of Artificial Sequence: Synthetic oligonucleotide
  Antisense Strand to SEQ ID NO: 481967
aauacucuggacaauuaaa

SEQ ID NO: 481969 - RNA, 19 nt, Artificial Sequence
  Description of Artificial Sequence: Synthetic oligonucleotide
  Sense strand starting at position 2192 of SEQ ID NO: 317323
ccaggacggguuuguauuu

SEQ ID NO: 481970 - RNA, 19 nt, Artificial Sequence
  Description of Artificial Sequence: Synthetic oligonucleotide
  Antisense Strand to SEQ ID NO: 481969
aaauacaaacccguccugg

SEQ ID NO: 481971 - RNA, 19 nt, Artificial Sequence
  Description of Artificial Sequence: Synthetic oligonucleotide
  Sense strand starting at position 2570 of SEQ ID NO: 317323
ucccuuuagcacugguaga

SEQ ID NO: 481972 - RNA, 19 nt, Artificial Sequence
  Description of Artificial Sequence: Synthetic oligonucleotide
  Antisense Strand to SEQ ID NO: 481971
ucuaccagugcuaaaggga

SEQ ID NO: 481973 - RNA, 19 nt, Artificial Sequence
  Description of Artificial Sequence: Synthetic oligonucleotide
  Sense strand starting at position 2583 of SEQ ID NO: 317323
gguagauuugugcggauug

SEQ ID NO: 481974 - RNA, 19 nt, Artificial Sequence
  Description of Artificial Sequence: Synthetic oligonucleotide
  Antisense Strand to SEQ ID NO: 481973
caauccgcacaaaucuacc

SEQ ID NO: 481975 - RNA, 19 nt, Artificial Sequence
  Description of Artificial Sequence: Synthetic oligonucleotide
  Sense strand starting at position 2839 of SEQ ID NO: 317323
ugaguucccuggccuuauu

SEQ ID NO: 481976 - RNA, 19 nt, Artificial Sequence
  Description of Artificial Sequence: Synthetic oligonucleotide
  Antisense Strand to SEQ ID NO: 481975
aauaaggccagggaacuca

SEQ ID NO: 481977 - RNA, 19 nt, Artificial Sequence
  Description of Artificial Sequence: Synthetic oligonucleotide
  Sense strand starting at position 2924 of SEQ ID NO: 317323
ccuagaauuucugacucag

SEQ ID NO: 481978 - RNA, 19 nt, Artificial Sequence
  Description of Artificial Sequence: Synthetic oligonucleotide
  Antisense Strand to SEQ ID NO: 481977
cugagucagaaauucuagg

SEQ ID NO: 481979 - RNA, 19 nt, Artificial Sequence
  Description of Artificial Sequence: Synthetic oligonucleotide
  Sense strand starting at position 2960 of SEQ ID NO: 317323
uugagaauguaccuuucua

SEQ ID NO: 481980 - RNA, 19 nt, Artificial Sequence
  Description of Artificial Sequence: Synthetic oligonucleotide
  Antisense Strand to SEQ ID NO: 481979
uagaaagguacauucucaa

SEQ ID NO: 481981 - RNA, 19 nt, Artificial Sequence
  Description of Artificial Sequence: Synthetic oligonucleotide
  Sense strand starting at position 3133 of SEQ ID NO: 317323
uguuccacuucugcagaaa

SEQ ID NO: 481982 - RNA, 19 nt, Artificial Sequence
  Description of Artificial Sequence: Synthetic oligonucleotide
  Antisense Strand to SEQ ID NO: 481981
uuucugcagaaguggaaca

SEQ ID NO: 481983 - RNA, 19 nt, Artificial Sequence
  Description of Artificial Sequence: Synthetic oligonucleotide
  Sense strand starting at position 3134 of SEQ ID NO: 317323
guuccacuucugcagaaac

SEQ ID NO: 481984 - RNA, 19 nt, Artificial Sequence
  Description of Artificial Sequence: Synthetic oligonucleotide
  Antisense Strand to SEQ ID NO: 481983
guuucugcagaaguggaac

SEQ ID NO: 481985 - RNA, 19 nt, Artificial Sequence
  Description of Artificial Sequence: Synthetic oligonucleotide
  Sense strand starting at position 3192 of SEQ ID NO: 317323
uauucuaucgaguguccaa

SEQ ID NO: 481986 - RNA, 19 nt, Artificial Sequence
  Description of Artificial Sequence: Synthetic oligonucleotide
  Antisense Strand to SEQ ID NO: 481985
uuggacacucgauagaaua

SEQ ID NO: 481987 - RNA, 19 nt, Artificial Sequence
  Description of Artificial Sequence: Synthetic oligonucleotide
  Sense strand starting at position 3199 of SEQ ID NO: 317323
ucgaguguccaagggaaca

SEQ ID NO: 481988 - RNA, 19 nt, Artificial Sequence
  Description of Artificial Sequence: Synthetic oligonucleotide
  Antisense Strand to SEQ ID NO: 481987
uguucccuuggacacucga

SEQ ID NO: 481989 - RNA, 19 nt, Artificial Sequence
  Description of Artificial Sequence: Synthetic oligonucleotide
  Sense strand starting at position 3237 of SEQ ID NO: 317323
cccagauccugucuauauc

SEQ ID NO: 481990 - RNA, 19 nt, Artificial Sequence
  Description of Artificial Sequence: Synthetic oligonucleotide
  Antisense Strand to SEQ ID NO: 481989
gauauagacaggaucuggg

SEQ ID NO: 481991 - RNA, 19 nt, Artificial Sequence
  Description of Artificial Sequence: Synthetic oligonucleotide
  Sense strand starting at position 3238 of SEQ ID NO: 317323
ccagauccugucuauaucu

SEQ ID NO: 481992 - RNA, 19 nt, Artificial Sequence
  Description of Artificial Sequence: Synthetic oligonucleotide
  Antisense Strand to SEQ ID NO: 481991
agauauagacaggaucugg

SEQ ID NO: 481993 - RNA, 19 nt, Artificial Sequence
  Description of Artificial Sequence: Synthetic oligonucleotide
  Sense strand starting at position 3392 of SEQ ID NO: 317323
cggaguuucucuccuccca

SEQ ID NO: 481994 - RNA, 19 nt, Artificial Sequence
  Description of Artificial Sequence: Synthetic oligonucleotide
  Antisense Strand to SEQ ID NO: 481993
ugggaggagagaaacuccg

SEQ ID NO: 481995 - RNA, 19 nt, Artificial Sequence
  Description of Artificial Sequence: Synthetic oligonucleotide
  Sense strand starting at position 3460 of SEQ ID NO: 317323
gguuguuuguaaucaggau

SEQ ID NO: 481996 - RNA, 19 nt, Artificial Sequence
  Description of Artificial Sequence: Synthetic oligonucleotide
  Antisense Strand to SEQ ID NO: 481995
auccugauuacaaacaacc

SEQ ID NO: 481997 - RNA, 19 nt, Artificial Sequence
  Description of Artificial Sequence: Synthetic oligonucleotide
  Sense strand starting at position 3461 of SEQ ID NO: 317323
guuguuuguaaucaggauu

SEQ ID NO: 481998 - RNA, 19 nt, Artificial Sequence
  Description of Artificial Sequence: Synthetic oligonucleotide
  Antisense Strand to SEQ ID NO: 481997
aauccugauuacaaacaac

SEQ ID NO: 481999 - RNA, 19 nt, Artificial Sequence
  Description of Artificial Sequence: Synthetic oligonucleotide
  Sense strand starting at position 3503 of SEQ ID NO: 317323
ccuugugagcuuugaggau

SEQ ID NO: 482000 - RNA, 19 nt, Artificial Sequence
  Description of Artificial Sequence: Synthetic oligonucleotide
  Antisense Strand to SEQ ID NO: 481999
auccucaaagcucacaagg

SEQ ID NO: 482001 - RNA, 19 nt, Artificial Sequence
  Description of Artificial Sequence: Synthetic oligonucleotide
  Sense strand starting at position 3512 of SEQ ID NO: 317323
cuuugaggauuuggguuua

SEQ ID NO: 482002 - RNA, 19 nt, Artificial Sequence
  Description of Artificial Sequence: Synthetic oligonucleotide
  Antisense Strand to SEQ ID NO: 482001
uaaacccaaauccucaaag

SEQ ID NO: 482003 - RNA, 19 nt, Artificial Sequence
  Description of Artificial Sequence: Synthetic oligonucleotide
  Sense strand starting at position 3525 of SEQ ID NO: 317323
gguuuaccuaaguguaggu

SEQ ID NO: 482004 - RNA, 19 nt, Artificial Sequence
  Description of Artificial Sequence: Synthetic oligonucleotide
  Antisense Strand to SEQ ID NO: 482003
accuacacuuagguaaacc

SEQ ID NO: 482005 - RNA, 19 nt, Artificial Sequence
  Description of Artificial Sequence: Synthetic oligonucleotide
  Sense strand starting at position 3622 of SEQ ID NO: 317323
cuccuauuguguuccuacu

SEQ ID NO: 482006 - RNA, 19 nt, Artificial Sequence
  Description of Artificial Sequence: Synthetic oligonucleotide
  Antisense Strand to SEQ ID NO: 482005
aguaggaacacaauaggag

SEQ ID NO: 482007 - RNA, 19 nt, Artificial Sequence
  Description of Artificial Sequence: Synthetic oligonucleotide
  Sense strand starting at position 3683 of SEQ ID NO: 317323
gcaggaaggcucuguuucu

SEQ ID NO: 482008 - RNA, 19 nt, Artificial Sequence
  Description of Artificial Sequence: Synthetic oligonucleotide
  Antisense Strand to SEQ ID NO: 482007
agaaacagagccuuccugc

SEQ ID NO: 482009 - RNA, 19 nt, Artificial Sequence
  Description of Artificial Sequence: Synthetic oligonucleotide
  Sense strand starting at position 3690 of SEQ ID NO: 317323
ggcucuguuucugcaagga

SEQ ID NO: 482010 - RNA, 19 nt, Artificial Sequence
  Description of Artificial Sequence: Synthetic oligonucleotide
  Antisense Strand to SEQ ID NO: 482009
uccuugcagaaacagagcc

SEQ ID NO: 482011 - RNA, 19 nt, Artificial Sequence
  Description of Artificial Sequence: Synthetic oligonucleotide
  Sense strand starting at position 3731 of SEQ ID NO: 317323
gccagaguuuggucuucua

SEQ ID NO: 482012 - RNA, 19 nt, Artificial Sequence
  Description of Artificial Sequence: Synthetic oligonucleotide
  Antisense Strand to SEQ ID NO: 482011
uagaagaccaaacucuggc

SEQ ID NO: 482013 - RNA, 19 nt, Artificial Sequence
  Description of Artificial Sequence: Synthetic oligonucleotide
  Sense strand starting at position 3734 of SEQ ID NO: 317323
agaguuuggucuucuaaga

SEQ ID NO: 482014 - RNA, 19 nt, Artificial Sequence
  Description of Artificial Sequence: Synthetic oligonucleotide
  Antisense Strand to SEQ ID NO: 482013
ucuuagaagaccaaacucu

SEQ ID NO: 482015 - RNA, 19 nt, Artificial Sequence
  Description of Artificial Sequence: Synthetic oligonucleotide
  Sense strand starting at position 3741 of SEQ ID NO: 317323
ggucuucuaagagggaugu

SEQ ID NO: 482016 - RNA, 19 nt, Artificial Sequence
  Description of Artificial Sequence: Synthetic oligonucleotide
  Antisense Strand to SEQ ID NO: 482015
acaucccucuuagaagacc

SEQ ID NO: 482017 - RNA, 19 nt, Artificial Sequence
  Description of Artificial Sequence: Synthetic oligonucleotide
  Sense strand starting at position 3747 of SEQ ID NO: 317323
cuaagagggaugugugagu

SEQ ID NO: 482018 - RNA, 19 nt, Artificial Sequence
  Description of Artificial Sequence: Synthetic oligonucleotide
  Antisense Strand to SEQ ID NO: 482017
acucacacaucccucuuag

SEQ ID NO: 482019 - RNA, 19 nt, Artificial Sequence
  Description of Artificial Sequence: Synthetic oligonucleotide
  Sense strand starting at position 3782 of SEQ ID NO: 317323
gcuagagguggugggauua

SEQ ID NO: 482020 - RNA, 19 nt, Artificial Sequence
  Description of Artificial Sequence: Synthetic oligonucleotide
  Antisense Strand to SEQ ID NO: 482019
uaaucccaccaccucuagc

SEQ ID NO: 482021 - RNA, 19 nt, Artificial Sequence
  Description of Artificial Sequence: Synthetic oligonucleotide
  Sense strand starting at position 3919 of SEQ ID NO: 317323
guuugugucagucauugaa

SEQ ID NO: 482022 - RNA, 19 nt, Artificial Sequence
  Description of Artificial Sequence: Synthetic oligonucleotide
  Antisense Strand to SEQ ID NO: 482021
uucaaugacugacacaaac

SEQ ID NO: 482023 - RNA, 19 nt, Artificial Sequence
  Description of Artificial Sequence: Synthetic oligonucleotide
  Sense strand starting at position 3943 of SEQ ID NO: 317323
guggucugauuucagaaga

SEQ ID NO: 482024 - RNA, 19 nt, Artificial Sequence
  Description of Artificial Sequence: Synthetic oligonucleotide
  Antisense Strand to SEQ ID NO: 482023
ucuucugaaaucagaccac

SEQ ID NO: 482025 - RNA, 19 nt, Artificial Sequence
  Description of Artificial Sequence: Synthetic oligonucleotide
  Sense strand starting at position 25 of SEQ ID NO: 317324
uugagauguccacguggaa

SEQ ID NO: 482026 - RNA, 19 nt, Artificial Sequence
  Description of Artificial Sequence: Synthetic oligonucleotide
  Antisense Strand to SEQ ID NO: 482025
uuccacguggacaucucaa

SEQ ID NO: 482027 - RNA, 19 nt, Artificial Sequence
  Description of Artificial Sequence: Synthetic oligonucleotide
  Sense strand starting at position 58 of SEQ ID NO: 317324
ccauuuguauaugaauguu

SEQ ID NO: 482028 - RNA, 19 nt, Artificial Sequence
  Description of Artificial Sequence: Synthetic oligonucleotide
  Antisense Strand to SEQ ID NO: 482027
aacauucauauacaaaugg

SEQ ID NO: 482029 - RNA, 19 nt, Artificial Sequence
  Description of Artificial Sequence: Synthetic oligonucleotide
  Sense strand starting at position 128 of SEQ ID NO: 317324
cccuguguacagggaucau

SEQ ID NO: 482030 - RNA, 19 nt, Artificial Sequence
  Description of Artificial Sequence: Synthetic oligonucleotide
  Antisense Strand to SEQ ID NO: 482029
augaucccuguacacaggg

SEQ ID NO: 482031 - RNA, 19 nt, Artificial Sequence
  Description of Artificial Sequence: Synthetic oligonucleotide
  Sense strand starting at position 137 of SEQ ID NO: 317324
cagggaucaucuguuuaaa

SEQ ID NO: 482032 - RNA, 19 nt, Artificial Sequence
  Description of Artificial Sequence: Synthetic oligonucleotide
  Antisense Strand to SEQ ID NO: 482031
uuuaaacagaugaucccug

SEQ ID NO: 482033 - RNA, 19 nt, Artificial Sequence
  Description of Artificial Sequence: Synthetic oligonucleotide
  Sense strand starting at position 139 of SEQ ID NO: 317324
gggaucaucuguuuaaacu

SEQ ID NO: 482034 - RNA, 19 nt, Artificial Sequence
  Description of Artificial Sequence: Synthetic oligonucleotide
  Antisense Strand to SEQ ID NO: 482033
aguuuaaacagaugauccc

SEQ ID NO: 482035 - RNA, 19 nt, Artificial Sequence
  Description of Artificial Sequence: Synthetic oligonucleotide
  Sense strand starting at position 156 of SEQ ID NO: 317324
cugaaaucuugucauuugu

SEQ ID NO: 482036 - RNA, 19 nt, Artificial Sequence
  Description of Artificial Sequence: Synthetic oligonucleotide
  Antisense Strand to SEQ ID NO: 482035
acaaaugacaagauuucag

SEQ ID NO: 482037 - RNA, 19 nt, Artificial Sequence
  Description of Artificial Sequence: Synthetic oligonucleotide
  Sense strand starting at position 186 of SEQ ID NO: 317324
uauuuaugagccugugugu

SEQ ID NO: 482038 - RNA, 19 nt, Artificial Sequence
  Description of Artificial Sequence: Synthetic oligonucleotide
  Antisense Strand to SEQ ID NO: 482037
acacacaggcucauaaaua

SEQ ID NO: 482039 - RNA, 19 nt, Artificial Sequence
  Description of Artificial Sequence: Synthetic oligonucleotide
  Sense strand starting at position 233 of SEQ ID NO: 317324
auaauaucucuugggcaaa

SEQ ID NO: 482040 - RNA, 19 nt, Artificial Sequence
  Description of Artificial Sequence: Synthetic oligonucleotide
  Antisense Strand to SEQ ID NO: 482039
uuugcccaagagauauuau

SEQ ID NO: 482041 - RNA, 19 nt, Artificial Sequence
  Description of Artificial Sequence: Synthetic oligonucleotide
  Sense strand starting at position 311 of SEQ ID NO: 317324
acaauuugauauuggcuaa

SEQ ID NO: 482042 - RNA, 19 nt, Artificial Sequence
  Description of Artificial Sequence: Synthetic oligonucleotide
  Antisense Strand to SEQ ID NO: 482041
uuagccaauaucaaauugu

SEQ ID NO: 482043 - RNA, 19 nt, Artificial Sequence
  Description of Artificial Sequence: Synthetic oligonucleotide
  Sense strand starting at position 315 of SEQ ID NO: 317324
uuugauauuggcuaauucu

SEQ ID NO: 482044 - RNA, 19 nt, Artificial Sequence
  Description of Artificial Sequence: Synthetic oligonucleotide
  Antisense Strand to SEQ ID NO: 482043
agaauuagccaauaucaaa

SEQ ID NO: 482045 - RNA, 19 nt, Artificial Sequence
  Description of Artificial Sequence: Synthetic oligonucleotide
  Sense strand starting at position 322 of SEQ ID NO: 317324
uuggcuaauucugaaauau

SEQ ID NO: 482046 - RNA, 19 nt, Artificial Sequence
  Description of Artificial Sequence: Synthetic oligonucleotide
  Antisense Strand to SEQ ID NO: 482045
auauuucagaauuagccaa

SEQ ID NO: 482047 - RNA, 19 nt, Artificial Sequence
  Description of Artificial Sequence: Synthetic oligonucleotide
  Sense strand starting at position 370 of SEQ ID NO: 317324
gaugcacaggcagaauuau

SEQ ID NO: 482048 - RNA, 19 nt, Artificial Sequence
  Description of Artificial Sequence: Synthetic oligonucleotide
  Antisense Strand to SEQ ID NO: 482047
auaauucugccugugcauc

SEQ ID NO: 482049 - RNA, 19 nt, Artificial Sequence
  Description of Artificial Sequence: Synthetic oligonucleotide
  Sense strand starting at position 458 of SEQ ID NO: 317324
cgggcugaguggcaaauuu

SEQ ID NO: 482050 - RNA, 19 nt, Artificial Sequence
  Description of Artificial Sequence: Synthetic oligonucleotide
  Antisense Strand to SEQ ID NO: 482049
aaauuugccacucagcccg

SEQ ID NO: 482051 - RNA, 19 nt, Artificial Sequence
  Description of Artificial Sequence: Synthetic oligonucleotide
  Sense strand starting at position 570 of SEQ ID NO: 317324
ugaaaugaauucuggacaa

SEQ ID NO: 482052 - RNA, 19 nt, Artificial Sequence
  Description of Artificial Sequence: Synthetic oligonucleotide
  Antisense Strand to SEQ ID NO: 482051
uuguccagaauucauuuca

SEQ ID NO: 482053 - RNA, 19 nt, Artificial Sequence
  Description of Artificial Sequence: Synthetic oligonucleotide
  Sense strand starting at position 615 of SEQ ID NO: 317324
uuggcauucugugaauuuc

SEQ ID NO: 482054 - RNA, 19 nt, Artificial Sequence
  Description of Artificial Sequence: Synthetic oligonucleotide
  Antisense Strand to SEQ ID NO: 482053
gaaauucacagaaugccaa

SEQ ID NO: 482055 - RNA, 19 nt, Artificial Sequence
  Description of Artificial Sequence: Synthetic oligonucleotide
  Sense strand starting at position 683 of SEQ ID NO: 317324
guaauauauggcgagauaa

SEQ ID NO: 482056 - RNA, 19 nt, Artificial Sequence
  Description of Artificial Sequence: Synthetic oligonucleotide
  Antisense Strand to SEQ ID NO: 482055
uuaucucgccauauauuac

SEQ ID NO: 482057 - RNA, 19 nt, Artificial Sequence
  Description of Artificial Sequence: Synthetic oligonucleotide
  Sense strand starting at position 695 of SEQ ID NO: 317324
gagauaacccaagguuucu

SEQ ID NO: 482058 - RNA, 19 nt, Artificial Sequence
  Description of Artificial Sequence: Synthetic oligonucleotide
  Antisense Strand to SEQ ID NO: 482057
agaaaccuuggguuaucuc

SEQ ID NO: 482059 - RNA, 19 nt, Artificial Sequence
  Description of Artificial Sequence: Synthetic oligonucleotide
  Sense strand starting at position 705 of SEQ ID NO: 317324
aagguuucugcaggauugu

SEQ ID NO: 482060 - RNA, 19 nt, Artificial Sequence
  Description of Artificial Sequence: Synthetic oligonucleotide
  Antisense Strand to SEQ ID NO: 482059
acaauccugcagaaaccuu

SEQ ID NO: 482061 - RNA, 19 nt, Artificial Sequence
  Description of Artificial Sequence: Synthetic oligonucleotide
  Sense strand starting at position 753 of SEQ ID NO: 317324
ugucgccuucuguaaauuu

SEQ ID NO: 482062 - RNA, 19 nt, Artificial Sequence
  Description of Artificial Sequence: Synthetic oligonucleotide
  Antisense Strand to SEQ ID NO: 482061
aaauuuacagaaggcgaca

SEQ ID NO: 482063 - RNA, 19 nt, Artificial Sequence
  Description of Artificial Sequence: Synthetic oligonucleotide
  Sense strand starting at position 772 of SEQ ID NO: 317324
acuauuguuuaggagaacu

SEQ ID NO: 482064 - RNA, 19 nt, Artificial Sequence
  Description of Artificial Sequence: Synthetic oligonucleotide
  Antisense Strand to SEQ ID NO: 482063
aguucuccuaaacaauagu

SEQ ID NO: 482065 - RNA, 19 nt, Artificial Sequence
  Description of Artificial Sequence: Synthetic oligonucleotide
  Sense strand starting at position 933 of SEQ ID NO: 317324
agccaagaagugugcaaau

SEQ ID NO: 482066 - RNA, 19 nt, Artificial Sequence
  Description of Artificial Sequence: Synthetic oligonucleotide
  Antisense Strand to SEQ ID NO: 482065
auuugcacacuucuuggcu

SEQ ID NO: 482067 - RNA, 19 nt, Artificial Sequence
  Description of Artificial Sequence: Synthetic oligonucleotide
  Sense strand starting at position 935 of SEQ ID NO: 317324
ccaagaagugugcaaauug

SEQ ID NO: 482068 - RNA, 19 nt, Artificial Sequence
  Description of Artificial Sequence: Synthetic oligonucleotide
  Antisense Strand to SEQ ID NO: 482067
caauuugcacacuucuugg

SEQ ID NO: 482069 - RNA, 19 nt, Artificial Sequence
  Description of Artificial Sequence: Synthetic oligonucleotide
  Sense strand starting at position 1028 of SEQ ID NO: 317324
gcgguaagcguguuacaga

SEQ ID NO: 482070 - RNA, 19 nt, Artificial Sequence
  Description of Artificial Sequence: Synthetic oligonucleotide
  Antisense Strand to SEQ ID NO: 482069
ucuguaacacgcuuaccgc

SEQ ID NO: 482071 - RNA, 19 nt, Artificial Sequence
  Description of Artificial Sequence: Synthetic oligonucleotide
  Sense strand starting at position 1035 of SEQ ID NO: 317324
gcguguuacagagaacuag

SEQ ID NO: 482072 - RNA, 19 nt, Artificial Sequence
  Description of Artificial Sequence: Synthetic oligonucleotide
  Antisense Strand to SEQ ID NO: 482071
cuaguucucuguaacacgc

SEQ ID NO: 482073 - RNA, 19 nt, Artificial Sequence
  Description of Artificial Sequence: Synthetic oligonucleotide
  Sense strand starting at position 1050 of SEQ ID NO: 317324
cuagauuucuuuccggcau

SEQ ID NO: 482074 - RNA, 19 nt, Artificial Sequence
  Description of Artificial Sequence: Synthetic oligonucleotide
  Antisense Strand to SEQ ID NO: 482073
augccggaaagaaaucuag

SEQ ID NO: 482075 - RNA, 19 nt, Artificial Sequence
  Description of Artificial Sequence: Synthetic oligonucleotide
  Sense strand starting at position 1099 of SEQ ID NO: 317324
guugaagagcgcuggagau

SEQ ID NO: 482076 - RNA, 19 nt, Artificial Sequence
  Description of Artificial Sequence: Synthetic oligonucleotide
  Antisense Strand to SEQ ID NO: 482075
aucuccagcgcucuucaac

SEQ ID NO: 482077 - RNA, 19 nt, Artificial Sequence
  Description of Artificial Sequence: Synthetic oligonucleotide
  Sense strand starting at position 2732 of SEQ ID NO: 317324
uuuaauuguccagaguauu

SEQ ID NO: 482078 - RNA, 19 nt, Artificial Sequence
  Description of Artificial Sequence: Synthetic oligonucleotide
  Antisense Strand to SEQ ID NO: 482077
aauacucuggacaauuaaa

SEQ ID NO: 482079 - RNA, 19 nt, Artificial Sequence
  Description of Artificial Sequence: Synthetic oligonucleotide
  Sense strand starting at position 2756 of SEQ ID NO: 317324
ccaggacggguuuguauuu

SEQ ID NO: 482080 - RNA, 19 nt, Artificial Sequence
  Description of Artificial Sequence: Synthetic oligonucleotide
  Antisense Strand to SEQ ID NO: 482079
aaauacaaacccguccugg

SEQ ID NO: 482081 - RNA, 19 nt, Artificial Sequence
  Description of Artificial Sequence: Synthetic oligonucleotide
  Sense strand starting at position 3134 of SEQ ID NO: 317324
ucccuuuagcacugguaga

SEQ ID NO: 482082 - RNA, 19 nt, Artificial Sequence
  Description of Artificial Sequence: Synthetic oligonucleotide
  Antisense Strand to SEQ ID NO: 482081
ucuaccagugcuaaaggga

SEQ ID NO: 482083 - RNA, 19 nt, Artificial Sequence
  Description of Artificial Sequence: Synthetic oligonucleotide
  Sense strand starting at position 3147 of SEQ ID NO: 317324
gguagauuugugcggauug

SEQ ID NO: 482084 - RNA, 19 nt, Artificial Sequence
  Description of Artificial Sequence: Synthetic oligonucleotide
  Antisense Strand to SEQ ID NO: 482083
caauccgcacaaaucuacc

SEQ ID NO: 482085 - RNA, 19 nt, Artificial Sequence
  Description of Artificial Sequence: Synthetic oligonucleotide
  Sense strand starting at position 3403 of SEQ ID NO: 317324
ugaguucccuggccuuauu

SEQ ID NO: 482086 - RNA, 19 nt, Artificial Sequence
  Description of Artificial Sequence: Synthetic oligonucleotide
  Antisense Strand to SEQ ID NO: 482085
aauaaggccagggaacuca

SEQ ID NO: 482087 - RNA, 19 nt, Artificial Sequence
  Description of Artificial Sequence: Synthetic oligonucleotide
  Sense strand starting at position 3488 of SEQ ID NO: 317324
ccuagaauuucugacucag

SEQ ID NO: 482088 - RNA, 19 nt, Artificial Sequence
  Description of Artificial Sequence: Synthetic oligonucleotide
  Antisense Strand to SEQ ID NO: 482087
cugagucagaaauucuagg

SEQ ID NO: 482089 - RNA, 19 nt, Artificial Sequence
  Description of Artificial Sequence: Synthetic oligonucleotide
  Sense strand starting at position 3524 of SEQ ID NO: 317324
uugagaauguaccuuucua

SEQ ID NO: 482090 - RNA, 19 nt, Artificial Sequence
  Description of Artificial Sequence: Synthetic oligonucleotide
  Antisense Strand to SEQ ID NO: 482089
uagaaagguacauucucaa

SEQ ID NO: 482091 - RNA, 19 nt, Artificial Sequence
  Description of Artificial Sequence: Synthetic oligonucleotide
  Sense strand starting at position 3697 of SEQ ID NO: 317324
uguuccacuucugcagaaa

SEQ ID NO: 482092 - RNA, 19 nt, Artificial Sequence
  Description of Artificial Sequence: Synthetic oligonucleotide
  Antisense Strand to SEQ ID NO: 482091
uuucugcagaaguggaaca

SEQ ID NO: 482093 - RNA, 19 nt, Artificial Sequence
  Description of Artificial Sequence: Synthetic oligonucleotide
  Sense strand starting at position 3698 of SEQ ID NO: 317324
guuccacuucugcagaaac

SEQ ID NO: 482094 - RNA, 19 nt, Artificial Sequence
  Description of Artificial Sequence: Synthetic oligonucleotide
  Antisense Strand to SEQ ID NO: 482093
guuucugcagaaguggaac

SEQ ID NO: 482095 - RNA, 19 nt, Artificial Sequence
  Description of Artificial Sequence: Synthetic oligonucleotide
  Sense strand starting at position 3756 of SEQ ID NO: 317324
uauucuaucgaguguccaa

SEQ ID NO: 482096 - RNA, 19 nt, Artificial Sequence
  Description of Artificial Sequence: Synthetic oligonucleotide
  Antisense Strand to SEQ ID NO: 482095
uuggacacucgauagaaua

SEQ ID NO: 482097 - RNA, 19 nt, Artificial Sequence
  Description of Artificial Sequence: Synthetic oligonucleotide
  Sense strand starting at position 3763 of SEQ ID NO: 317324
ucgaguguccaagggaaca

SEQ ID NO: 482098 - RNA, 19 nt, Artificial Sequence
  Description of Artificial Sequence: Synthetic oligonucleotide
  Antisense Strand to SEQ ID NO: 482097
uguucccuuggacacucga

SEQ ID NO: 482099 - RNA, 19 nt, Artificial Sequence
  Description of Artificial Sequence: Synthetic oligonucleotide
  Sense strand starting at position 3801 of SEQ ID NO: 317324
cccagauccugucuauauc

SEQ ID NO: 482100 - RNA, 19 nt, Artificial Sequence
  Description of Artificial Sequence: Synthetic oligonucleotide
  Antisense Strand to SEQ ID NO: 482099
gauauagacaggaucuggg

SEQ ID NO: 482101 - RNA, 19 nt, Artificial Sequence
  Description of Artificial Sequence: Synthetic oligonucleotide
  Sense strand starting at position 3802 of SEQ ID NO: 317324
ccagauccugucuauaucu

SEQ ID NO: 482102 - RNA, 19 nt, Artificial Sequence
  Description of Artificial Sequence: Synthetic oligonucleotide
  Antisense Strand to SEQ ID NO: 482101
agauauagacaggaucugg

SEQ ID NO: 482103 - RNA, 19 nt, Artificial Sequence
  Description of Artificial Sequence: Synthetic oligonucleotide
  Sense strand starting at position 3956 of SEQ ID NO: 317324
cggaguuucucuccuccca

SEQ ID NO: 482104 - RNA, 19 nt, Artificial Sequence
  Description of Artificial Sequence: Synthetic oligonucleotide
  Antisense Strand to SEQ ID NO: 482103
ugggaggagagaaacuccg

SEQ ID NO: 482105 - RNA, 19 nt, Artificial Sequence
  Description of Artificial Sequence: Synthetic oligonucleotide
  Sense strand starting at position 77 of SEQ ID NO: 317325
cagauauguuuauuagggu

SEQ ID NO: 482106 - RNA, 19 nt, Artificial Sequence
  Description of Artificial Sequence: Synthetic oligonucleotide
  Antisense Strand to SEQ ID NO: 482105
acccuaauaaacauaucug

SEQ ID NO: 482107 - RNA, 19 nt, Artificial Sequence
  Description of Artificial Sequence: Synthetic oligonucleotide
  Sense strand starting at position 83 of SEQ ID NO: 317325
uguuuauuaggguaaccgu

SEQ ID NO: 482108 - RNA, 19 nt, Artificial Sequence
  Description of Artificial Sequence: Synthetic oligonucleotide
  Antisense Strand to SEQ ID NO: 482107
acgguuacccuaauaaaca

SEQ ID NO: 482109 - RNA, 19 nt, Artificial Sequence
  Description of Artificial Sequence: Synthetic oligonucleotide
  Sense strand starting at position 92 of SEQ ID NO: 317325
ggguaaccguuccuaagaa

SEQ ID NO: 482110 - RNA, 19 nt, Artificial Sequence
  Description of Artificial Sequence: Synthetic oligonucleotide
  Antisense Strand to SEQ ID NO: 482109
uucuuaggaacgguuaccc

SEQ ID NO: 482111 - RNA, 19 nt, Artificial Sequence
  Description of Artificial Sequence: Synthetic oligonucleotide
  Sense strand starting at position 121 of SEQ ID NO: 317325
cuguguuagucacccagaa

SEQ ID NO: 482112 - RNA, 19 nt, Artificial Sequence
  Description of Artificial Sequence: Synthetic oligonucleotide
  Antisense Strand to SEQ ID NO: 482111
uucugggugacuaacacag

SEQ ID NO: 482113 - RNA, 19 nt, Artificial Sequence
  Description of Artificial Sequence: Synthetic oligonucleotide
  Sense strand starting at position 221 of SEQ ID NO: 317325
uguugcauuuggcuuacau

SEQ ID NO: 482114 - RNA, 19 nt, Artificial Sequence
  Description of Artificial Sequence: Synthetic oligonucleotide
  Antisense Strand to SEQ ID NO: 482113
auguaagccaaaugcaaca

SEQ ID NO: 482115 - RNA, 19 nt, Artificial Sequence
  Description of Artificial Sequence: Synthetic oligonucleotide
  Sense strand starting at position 339 of SEQ ID NO: 317325
auguaucuccuguacuacu

SEQ ID NO: 482116 - RNA, 19 nt, Artificial Sequence
  Description of Artificial Sequence: Synthetic oligonucleotide
  Antisense Strand to SEQ ID NO: 482115
aguaguacaggagauacau

SEQ ID NO: 482117 - RNA, 19 nt, Artificial Sequence
  Description of Artificial Sequence: Synthetic oligonucleotide
  Sense strand starting at position 371 of SEQ ID NO: 317325
cuguaaugacgacgagcaa

SEQ ID NO: 482118 - RNA, 19 nt, Artificial Sequence
  Description of Artificial Sequence: Synthetic oligonucleotide
  Antisense Strand to SEQ ID NO: 482117
uugcucgucgucauuacag

SEQ ID NO: 482119 - RNA, 19 nt, Artificial Sequence
  Description of Artificial Sequence: Synthetic oligonucleotide
  Sense strand starting at position 440 of SEQ ID NO: 317325
aagaaauuguugcugucca

SEQ ID NO: 482120 - RNA, 19 nt, Artificial Sequence
  Description of Artificial Sequence: Synthetic oligonucleotide
  Antisense Strand to SEQ ID NO: 482119
uggacagcaacaauuucuu

SEQ ID NO: 482121 - RNA, 19 nt, Artificial Sequence
  Description of Artificial Sequence: Synthetic oligonucleotide
  Sense strand starting at position 445 of SEQ ID NO: 317325
auuguugcuguccaugauu

SEQ ID NO: 482122 - RNA, 19 nt, Artificial Sequence
  Description of Artificial Sequence: Synthetic oligonucleotide
  Antisense Strand to SEQ ID NO: 482121
aaucauggacagcaacaau

SEQ ID NO: 482123 - RNA, 19 nt, Artificial Sequence
  Description of Artificial Sequence: Synthetic oligonucleotide
  Sense strand starting at position 504 of SEQ ID NO: 317325
agccauucucuggacacuu

SEQ ID NO: 482124 - RNA, 19 nt, Artificial Sequence
  Description of Artificial Sequence: Synthetic oligonucleotide
  Antisense Strand to SEQ ID NO: 482123
aaguguccagagaauggcu

SEQ ID NO: 482125 - RNA, 19 nt, Artificial Sequence
  Description of Artificial Sequence: Synthetic oligonucleotide
  Sense strand starting at position 513 of SEQ ID NO: 317325
cuggacacuugcccuuaaa

SEQ ID NO: 482126 - RNA, 19 nt, Artificial Sequence
  Description of Artificial Sequence: Synthetic oligonucleotide
  Antisense Strand to SEQ ID NO: 482125
uuuaagggcaaguguccag

SEQ ID NO: 482127 - RNA, 19 nt, Artificial Sequence
  Description of Artificial Sequence: Synthetic oligonucleotide
  Sense strand starting at position 565 of SEQ ID NO: 317325
acuaccguucucuagaaua

SEQ ID NO: 482128 - RNA, 19 nt, Artificial Sequence
  Description of Artificial Sequence: Synthetic oligonucleotide
  Antisense Strand to SEQ ID NO: 482127
uauucuagagaacgguagu

SEQ ID NO: 482129 - RNA, 19 nt, Artificial Sequence
  Description of Artificial Sequence: Synthetic oligonucleotide
  Sense strand starting at position 570 of SEQ ID NO: 317325
cguucucuagaauacuaca

SEQ ID NO: 482130 - RNA, 19 nt, Artificial Sequence
  Description of Artificial Sequence: Synthetic oligonucleotide
  Antisense Strand to SEQ ID NO: 482129
uguaguauucuagagaacg

SEQ ID NO: 482131 - RNA, 19 nt, Artificial Sequence
  Description of Artificial Sequence: Synthetic oligonucleotide
  Sense strand starting at position 714 of SEQ ID NO: 317325
uuuacagauuucgagaagu

SEQ ID NO: 482132 - RNA, 19 nt, Artificial Sequence
  Description of Artificial Sequence: Synthetic oligonucleotide
  Antisense Strand to SEQ ID NO: 482131
acuucucgaaaucuguaaa

SEQ ID NO: 482133 - RNA, 19 nt, Artificial Sequence
  Description of Artificial Sequence: Synthetic oligonucleotide
  Sense strand starting at position 748 of SEQ ID NO: 317325
caaugagguuuacugagau

SEQ ID NO: 482134 - RNA, 19 nt, Artificial Sequence
  Description of Artificial Sequence: Synthetic oligonucleotide
  Antisense Strand to SEQ ID NO: 482133
aucucaguaaaccucauug

SEQ ID NO: 482135 - RNA, 19 nt, Artificial Sequence
  Description of Artificial Sequence: Synthetic oligonucleotide
  Sense strand starting at position 954 of SEQ ID NO: 317325
ccaagaauggccgaucacu

SEQ ID NO: 482136 - RNA, 19 nt, Artificial Sequence
  Description of Artificial Sequence: Synthetic oligonucleotide
  Antisense Strand to SEQ ID NO: 482135
agugaucggccauucuugg

SEQ ID NO: 482137 - RNA, 19 nt, Artificial Sequence
  Description of Artificial Sequence: Synthetic oligonucleotide
  Sense strand starting at position 1247 of SEQ ID NO: 317325
gagggagaccugugaaguu

SEQ ID NO: 482138 - RNA, 19 nt, Artificial Sequence
  Description of Artificial Sequence: Synthetic oligonucleotide
  Antisense Strand to SEQ ID NO: 482137
aacuucacaggucucccuc

SEQ ID NO: 482139 - RNA, 19 nt, Artificial Sequence
  Description of Artificial Sequence: Synthetic oligonucleotide
  Sense strand starting at position 1285 of SEQ ID NO: 317325
cgaguuagcauacagucua

SEQ ID NO: 482140 - RNA, 19 nt, Artificial Sequence
  Description of Artificial Sequence: Synthetic oligonucleotide
  Antisense Strand to SEQ ID NO: 482139
uagacuguaugcuaacucg

SEQ ID NO: 482141 - RNA, 19 nt, Artificial Sequence
  Description of Artificial Sequence: Synthetic oligonucleotide
  Sense strand starting at position 1307 of SEQ ID NO: 317325
acaccauuauguguucuga

SEQ ID NO: 482142 - RNA, 19 nt, Artificial Sequence
  Description of Artificial Sequence: Synthetic oligonucleotide
  Antisense Strand to SEQ ID NO: 482141
ucagaacacauaauggugu

SEQ ID NO: 482143 - RNA, 19 nt, Artificial Sequence
  Description of Artificial Sequence: Synthetic oligonucleotide
  Sense strand starting at position 1320 of SEQ ID NO: 317325
uucugagucguugaggguu

SEQ ID NO: 482144 - RNA, 19 nt, Artificial Sequence
  Description of Artificial Sequence: Synthetic oligonucleotide
  Antisense Strand to SEQ ID NO: 482143
aacccucaacgacucagaa

SEQ ID NO: 482145 - RNA, 19 nt, Artificial Sequence
  Description of Artificial Sequence: Synthetic oligonucleotide
  Sense strand starting at position 1327 of SEQ ID NO: 317325
ucguugaggguuggugaaa

SEQ ID NO: 482146 - RNA, 19 nt, Artificial Sequence
  Description of Artificial Sequence: Synthetic oligonucleotide
  Antisense Strand to SEQ ID NO: 482145
uuucaccaacccucaacga

SEQ ID NO: 482147 - RNA, 19 nt, Artificial Sequence
  Description of Artificial Sequence: Synthetic oligonucleotide
  Sense strand starting at position 1666 of SEQ ID NO: 317325
cucgguaccuucuccagaa

SEQ ID NO: 482148 - RNA, 19 nt, Artificial Sequence
  Description of Artificial Sequence: Synthetic oligonucleotide
  Antisense Strand to SEQ ID NO: 482147
uucuggagaagguaccgag

SEQ ID NO: 482149 - RNA, 19 nt, Artificial Sequence
  Description of Artificial Sequence: Synthetic oligonucleotide
  Sense strand starting at position 2205 of SEQ ID NO: 317325
ccuguuggaugguugagau

SEQ ID NO: 482150 - RNA, 19 nt, Artificial Sequence
  Description of Artificial Sequence: Synthetic oligonucleotide
  Antisense Strand to SEQ ID NO: 482149
aucucaaccauccaacagg

SEQ ID NO: 482151 - RNA, 19 nt, Artificial Sequence
  Description of Artificial Sequence: Synthetic oligonucleotide
  Sense strand starting at position 2274 of SEQ ID NO: 317325
cuucgaucuuuacuuugau

SEQ ID NO: 482152 - RNA, 19 nt, Artificial Sequence
  Description of Artificial Sequence: Synthetic oligonucleotide
  Antisense Strand to SEQ ID NO: 482151
aucaaaguaaagaucgaag

SEQ ID NO: 482153 - RNA, 19 nt, Artificial Sequence
  Description of Artificial Sequence: Synthetic oligonucleotide
  Sense strand starting at position 2275 of SEQ ID NO: 317325
uucgaucuuuacuuugaua

SEQ ID NO: 482154 - RNA, 19 nt, Artificial Sequence
  Description of Artificial Sequence: Synthetic oligonucleotide
  Antisense Strand to SEQ ID NO: 482153
uaucaaaguaaagaucgaa

SEQ ID NO: 482155 - RNA, 19 nt, Artificial Sequence
  Description of Artificial Sequence: Synthetic oligonucleotide
  Sense strand starting at position 2277 of SEQ ID NO: 317325
cgaucuuuacuuugauaca

SEQ ID NO: 482156 - RNA, 19 nt, Artificial Sequence
  Description of Artificial Sequence: Synthetic oligonucleotide
  Antisense Strand to SEQ ID NO: 482155
uguaucaaaguaaagaucg

SEQ ID NO: 482157 - RNA, 19 nt, Artificial Sequence
  Description of Artificial Sequence: Synthetic oligonucleotide
  Sense strand starting at position 2367 of SEQ ID NO: 317325
acuguuuagccauagcacu

SEQ ID NO: 482158 - RNA, 19 nt, Artificial Sequence
  Description of Artificial Sequence: Synthetic oligonucleotide
  Antisense Strand to SEQ ID NO: 482157
agugcuauggcuaaacagu

SEQ ID NO: 482159 - RNA, 19 nt, Artificial Sequence
  Description of Artificial Sequence: Synthetic oligonucleotide
  Sense strand starting at position 2654 of SEQ ID NO: 317325
ggcuuacagcugcuguuau

SEQ ID NO: 482160 - RNA, 19 nt, Artificial Sequence
  Description of Artificial Sequence: Synthetic oligonucleotide
  Antisense Strand to SEQ ID NO: 482159
auaacagcagcuguaagcc

SEQ ID NO: 482161 - RNA, 19 nt, Artificial Sequence
  Description of Artificial Sequence: Synthetic oligonucleotide
  Sense strand starting at position 2788 of SEQ ID NO: 317325
cuaagacauuaugagaaga

SEQ ID NO: 482162 - RNA, 19 nt, Artificial Sequence
  Description of Artificial Sequence: Synthetic oligonucleotide
  Antisense Strand to SEQ ID NO: 482161
ucuucucauaaugucuuag

SEQ ID NO: 482163 - RNA, 19 nt, Artificial Sequence
  Description of Artificial Sequence: Synthetic oligonucleotide
  Sense strand starting at position 2860 of SEQ ID NO: 317325
gacgccaacuugucuggaa

SEQ ID NO: 482164 - RNA, 19 nt, Artificial Sequence
  Description of Artificial Sequence: Synthetic oligonucleotide
  Antisense Strand to SEQ ID NO: 482163
uuccagacaaguuggcguc

SEQ ID NO: 482165 - RNA, 19 nt, Artificial Sequence
  Description of Artificial Sequence: Synthetic oligonucleotide
  Sense strand starting at position 3033 of SEQ ID NO: 317325
uggauugaagcuugagaac

SEQ ID NO: 482166 - RNA, 19 nt, Artificial Sequence
  Description of Artificial Sequence: Synthetic oligonucleotide
  Antisense Strand to SEQ ID NO: 482165
guucucaagcuucaaucca

SEQ ID NO: 482167 - RNA, 19 nt, Artificial Sequence
  Description of Artificial Sequence: Synthetic oligonucleotide
  Sense strand starting at position 3045 of SEQ ID NO: 317325
ugagaacucuuccuguuuc

SEQ ID NO: 482168 - RNA, 19 nt, Artificial Sequence
  Description of Artificial Sequence: Synthetic oligonucleotide
  Antisense Strand to SEQ ID NO: 482167
gaaacaggaagaguucuca

SEQ ID NO: 482169 - RNA, 19 nt, Artificial Sequence
  Description of Artificial Sequence: Synthetic oligonucleotide
  Sense strand starting at position 3102 of SEQ ID NO: 317325
gcaagccugcugucggaau

SEQ ID NO: 482170 - RNA, 19 nt, Artificial Sequence
  Description of Artificial Sequence: Synthetic oligonucleotide
  Antisense Strand to SEQ ID NO: 482169
auuccgacagcaggcuugc

SEQ ID NO: 482171 - RNA, 19 nt, Artificial Sequence
  Description of Artificial Sequence: Synthetic oligonucleotide
  Sense strand starting at position 3116 of SEQ ID NO: 317325
ggaauacuggucuguuucu

SEQ ID NO: 482172 - RNA, 19 nt, Artificial Sequence
  Description of Artificial Sequence: Synthetic oligonucleotide
  Antisense Strand to SEQ ID NO: 482171
agaaacagaccaguauucc

SEQ ID NO: 482173 - RNA, 19 nt, Artificial Sequence
  Description of Artificial Sequence: Synthetic oligonucleotide
  Sense strand starting at position 3282 of SEQ ID NO: 317325
guccauuugcacugaguca

SEQ ID NO: 482174 - RNA, 19 nt, Artificial Sequence
  Description of Artificial Sequence: Synthetic oligonucleotide
  Antisense Strand to SEQ ID NO: 482173
ugacucagugcaaauggac

SEQ ID NO: 482175 - RNA, 19 nt, Artificial Sequence
  Description of Artificial Sequence: Synthetic oligonucleotide
  Sense strand starting at position 3476 of SEQ ID NO: 317325
uaucuauaugguggaaauu

SEQ ID NO: 482176 - RNA, 19 nt, Artificial Sequence
  Description of Artificial Sequence: Synthetic oligonucleotide
  Antisense Strand to SEQ ID NO: 482175
aauuuccaccauauagaua

SEQ ID NO: 482177 - RNA, 19 nt, Artificial Sequence
  Description of Artificial Sequence: Synthetic oligonucleotide
  Sense strand starting at position 3712 of SEQ ID NO: 317325
gucuauuuaugguauuugu

SEQ ID NO: 482178 - RNA, 19 nt, Artificial Sequence
  Description of Artificial Sequence: Synthetic oligonucleotide
  Antisense Strand to SEQ ID NO: 482177
acaaauaccauaaauagac

SEQ ID NO: 482179 - RNA, 19 nt, Artificial Sequence
  Description of Artificial Sequence: Synthetic oligonucleotide
  Sense strand starting at position 3792 of SEQ ID NO: 317325
gggcuauaccaauaucugu

SEQ ID NO: 482180 - RNA, 19 nt, Artificial Sequence
  Description of Artificial Sequence: Synthetic oligonucleotide
  Antisense Strand to SEQ ID NO: 482179
acagauauugguauagccc

SEQ ID NO: 482181 - RNA, 19 nt, Artificial Sequence
  Description of Artificial Sequence: Synthetic oligonucleotide
  Sense strand starting at position 3957 of SEQ ID NO: 317325
uuggaaaguuguguuccua

SEQ ID NO: 482182 - RNA, 19 nt, Artificial Sequence
  Description of Artificial Sequence: Synthetic oligonucleotide
  Antisense Strand to SEQ ID NO: 482181
uaggaacacaacuuuccaa

SEQ ID NO: 482183 - RNA, 19 nt, Artificial Sequence
  Description of Artificial Sequence: Synthetic oligonucleotide
  Sense strand starting at position 3965 of SEQ ID NO: 317325
uuguguuccuauucucaaa

SEQ ID NO: 482184 - RNA, 19 nt, Artificial Sequence
  Description of Artificial Sequence: Synthetic oligonucleotide
  Antisense Strand to SEQ ID NO: 482183
uuugagaauaggaacacaa

SEQ ID NO: 482185 - RNA, 19 nt, Artificial Sequence
  Description of Artificial Sequence: Synthetic oligonucleotide
  Sense strand starting at position 47 of SEQ ID NO: 317326
ucaagaaugcaccagcaau

SEQ ID NO: 482186 - RNA, 19 nt, Artificial Sequence
  Description of Artificial Sequence: Synthetic oligonucleotide
  Antisense Strand to SEQ ID NO: 482185
auugcuggugcauucuuga

SEQ ID NO: 482187 - RNA, 19 nt, Artificial Sequence
  Description of Artificial Sequence: Synthetic oligonucleotide
  Sense strand starting at position 63 of SEQ ID NO: 317326
aauaauacguguuacugaa

SEQ ID NO: 482188 - RNA, 19 nt, Artificial Sequence
  Description of Artificial Sequence: Synthetic oligonucleotide
  Antisense Strand to SEQ ID NO: 482187
uucaguaacacguauuauu

SEQ ID NO: 482189 - RNA, 19 nt, Artificial Sequence
  Description of Artificial Sequence: Synthetic oligonucleotide
  Sense strand starting at position 112 of SEQ ID NO: 317326
auccuaaacguuugccaau

SEQ ID NO: 482190 - RNA, 19 nt, Artificial Sequence
  Description of Artificial Sequence: Synthetic oligonucleotide
  Antisense Strand to SEQ ID NO: 482189
auuggcaaacguuuaggau

SEQ ID NO: 482191 - RNA, 19 nt, Artificial Sequence
  Description of Artificial Sequence: Synthetic oligonucleotide
  Sense strand starting at position 113 of SEQ ID NO: 317326
uccuaaacguuugccaauu

SEQ ID NO: 482192 - RNA, 19 nt, Artificial Sequence
  Description of Artificial Sequence: Synthetic oligonucleotide
  Antisense Strand to SEQ ID NO: 482191
aauuggcaaacguuuagga

SEQ ID NO: 482193 - RNA, 19 nt, Artificial Sequence
  Description of Artificial Sequence: Synthetic oligonucleotide
  Sense strand starting at position 114 of SEQ ID NO: 317326
ccuaaacguuugccaauuu

SEQ ID NO: 482194 - RNA, 19 nt, Artificial Sequence
  Description of Artificial Sequence: Synthetic oligonucleotide
  Antisense Strand to SEQ ID NO: 482193
aaauuggcaaacguuuagg

SEQ ID NO: 482195 - RNA, 19 nt, Artificial Sequence
  Description of Artificial Sequence: Synthetic oligonucleotide
  Sense strand starting at position 115 of SEQ ID NO: 317326
cuaaacguuugccaauuua

SEQ ID NO: 482196 - RNA, 19 nt, Artificial Sequence
  Description of Artificial Sequence: Synthetic oligonucleotide
  Antisense Strand to SEQ ID NO: 482195
uaaauuggcaaacguuuag

SEQ ID NO: 482197 - RNA, 19 nt, Artificial Sequence
  Description of Artificial Sequence: Synthetic oligonucleotide
  Sense strand starting at position 163 of SEQ ID NO: 317326
cugaaucuaugccugcuaa

SEQ ID NO: 482198 - RNA, 19 nt, Artificial Sequence
  Description of Artificial Sequence: Synthetic oligonucleotide
  Antisense Strand to SEQ ID NO: 482197
uuagcaggcauagauucag

SEQ ID NO: 482199 - RNA, 19 nt, Artificial Sequence
  Description of Artificial Sequence: Synthetic oligonucleotide
  Sense strand starting at position 164 of SEQ ID NO: 317326
ugaaucuaugccugcuaau

SEQ ID NO: 482200 - RNA, 19 nt, Artificial Sequence
  Description of Artificial Sequence: Synthetic oligonucleotide
  Antisense Strand to SEQ ID NO: 482199
auuagcaggcauagauuca

SEQ ID NO: 482201 - RNA, 19 nt, Artificial Sequence
  Description of Artificial Sequence: Synthetic oligonucleotide
  Sense strand starting at position 173 of SEQ ID NO: 317326
gccugcuaauaaguauaau

SEQ ID NO: 482202 - RNA, 19 nt, Artificial Sequence
  Description of Artificial Sequence: Synthetic oligonucleotide
  Antisense Strand to SEQ ID NO: 482201
auuauacuuauuagcaggc

SEQ ID NO: 482203 - RNA, 19 nt, Artificial Sequence
  Description of Artificial Sequence: Synthetic oligonucleotide
  Sense strand starting at position 275 of SEQ ID NO: 317326
cccagagacuaugcaaauu

SEQ ID NO: 482204 - RNA, 19 nt, Artificial Sequence
  Description of Artificial Sequence: Synthetic oligonucleotide
  Antisense Strand to SEQ ID NO: 482203
aauuugcauagucucuggg

SEQ ID NO: 482205 - RNA, 19 nt, Artificial Sequence
  Description of Artificial Sequence: Synthetic oligonucleotide
  Sense strand starting at position 335 of SEQ ID NO: 317326
gagcacaauuuaugugcaa

SEQ ID NO: 482206 - RNA, 19 nt, Artificial Sequence
  Description of Artificial Sequence: Synthetic oligonucleotide
  Antisense Strand to SEQ ID NO: 482205
uugcacauaaauugugcuc

SEQ ID NO: 482207 - RNA, 19 nt, Artificial Sequence
  Description of Artificial Sequence: Synthetic oligonucleotide
  Sense strand starting at position 375 of SEQ ID NO: 317326
agagccaugucauuaaauc

SEQ ID NO: 482208 - RNA, 19 nt, Artificial Sequence
  Description of Artificial Sequence: Synthetic oligonucleotide
  Antisense Strand to SEQ ID NO: 482207
gauuuaaugacauggcucu

SEQ ID NO: 482209 - RNA, 19 nt, Artificial Sequence
  Description of Artificial Sequence: Synthetic oligonucleotide
  Sense strand starting at position 376 of SEQ ID NO: 317326
gagccaugucauuaaaucg

SEQ ID NO: 482210 - RNA, 19 nt, Artificial Sequence
  Description of Artificial Sequence: Synthetic oligonucleotide
  Antisense Strand to SEQ ID NO: 482209
cgauuuaaugacauggcuc

SEQ ID NO: 482211 - RNA, 19 nt, Artificial Sequence
  Description of Artificial Sequence: Synthetic oligonucleotide
  Sense strand starting at position 385 of SEQ ID NO: 317326
cauuaaaucguagaguuga

SEQ ID NO: 482212 - RNA, 19 nt, Artificial Sequence
  Description of Artificial Sequence: Synthetic oligonucleotide
  Antisense Strand to SEQ ID NO: 482211
ucaacucuacgauuuaaug

SEQ ID NO: 482213 - RNA, 19 nt, Artificial Sequence
  Description of Artificial Sequence: Synthetic oligonucleotide
  Sense strand starting at position 417 of SEQ ID NO: 317326
acagucaugauucgauaug

SEQ ID NO: 482214 - RNA, 19 nt, Artificial Sequence
  Description of Artificial Sequence: Synthetic oligonucleotide
  Antisense Strand to SEQ ID NO: 482213
cauaucgaaucaugacugu

SEQ ID NO: 482215 - RNA, 19 nt, Artificial Sequence
  Description of Artificial Sequence: Synthetic oligonucleotide
  Sense strand starting at position 418 of SEQ ID NO: 317326
cagucaugauucgauauga

SEQ ID NO: 482216 - RNA, 19 nt, Artificial Sequence
  Description of Artificial Sequence: Synthetic oligonucleotide
  Antisense Strand to SEQ ID NO: 482215
ucauaucgaaucaugacug

SEQ ID NO: 482217 - RNA, 19 nt, Artificial Sequence
  Description of Artificial Sequence: Synthetic oligonucleotide
  Sense strand starting at position 428 of SEQ ID NO: 317326
ucgauaugaccgcuguguu

SEQ ID NO: 482218 - RNA, 19 nt, Artificial Sequence
  Description of Artificial Sequence: Synthetic oligonucleotide
  Antisense Strand to SEQ ID NO: 482217
aacacagcggucauaucga

SEQ ID NO: 482219 - RNA, 19 nt, Artificial Sequence
  Description of Artificial Sequence: Synthetic oligonucleotide
  Sense strand starting at position 429 of SEQ ID NO: 317326
cgauaugaccgcuguguuu

SEQ ID NO: 482220 - RNA, 19 nt, Artificial Sequence
  Description of Artificial Sequence: Synthetic oligonucleotide
  Antisense Strand to SEQ ID NO: 482219
aaacacagcggucauaucg

SEQ ID NO: 482221 - RNA, 19 nt, Artificial Sequence
  Description of Artificial Sequence: Synthetic oligonucleotide
  Sense strand starting at position 501 of SEQ ID NO: 317326
cgaauuagaauccgcaaag

SEQ ID NO: 482222 - RNA, 19 nt, Artificial Sequence
  Description of Artificial Sequence: Synthetic oligonucleotide
  Antisense Strand to SEQ ID NO: 482221
cuuugcggauucuaauucg

SEQ ID NO: 482223 - RNA, 19 nt, Artificial Sequence
  Description of Artificial Sequence: Synthetic oligonucleotide
  Sense strand starting at position 642 of SEQ ID NO: 317326
ccgagcuuccaguaucuca

SEQ ID NO: 482224 - RNA, 19 nt, Artificial Sequence
  Description of Artificial Sequence: Synthetic oligonucleotide
  Antisense Strand to SEQ ID NO: 482223
ugagauacuggaagcucgg

SEQ ID NO: 482225 - RNA, 19 nt, Artificial Sequence
  Description of Artificial Sequence: Synthetic oligonucleotide
  Sense strand starting at position 649 of SEQ ID NO: 317326
uccaguaucucaguaaguc

SEQ ID NO: 482226 - RNA, 19 nt, Artificial Sequence
  Description of Artificial Sequence: Synthetic oligonucleotide
  Antisense Strand to SEQ ID NO: 482225
gacuuacugagauacugga

SEQ ID NO: 482227 - RNA, 19 nt, Artificial Sequence
  Description of Artificial Sequence: Synthetic oligonucleotide
  Sense strand starting at position 650 of SEQ ID NO: 317326
ccaguaucucaguaagucu

SEQ ID NO: 482228 - RNA, 19 nt, Artificial Sequence
  Description of Artificial Sequence: Synthetic oligonucleotide
  Antisense Strand to SEQ ID NO: 482227
agacuuacugagauacugg

SEQ ID NO: 482229 - RNA, 19 nt, Artificial Sequence
  Description of Artificial Sequence: Synthetic oligonucleotide
  Sense strand starting at position 661 of SEQ ID NO: 317326
guaagucuuucgucuguaa

SEQ ID NO: 482230 - RNA, 19 nt, Artificial Sequence
  Description of Artificial Sequence: Synthetic oligonucleotide
  Antisense Strand to SEQ ID NO: 482229
uuacagacgaaagacuuac

SEQ ID NO: 482231 - RNA, 19 nt, Artificial Sequence
  Description of Artificial Sequence: Synthetic oligonucleotide
  Sense strand starting at position 663 of SEQ ID NO: 317326
aagucuuucgucuguaacu

SEQ ID NO: 482232 - RNA, 19 nt, Artificial Sequence
  Description of Artificial Sequence: Synthetic oligonucleotide
  Antisense Strand to SEQ ID NO: 482231
aguuacagacgaaagacuu

SEQ ID NO: 482233 - RNA, 19 nt, Artificial Sequence
  Description of Artificial Sequence: Synthetic oligonucleotide
  Sense strand starting at position 664 of SEQ ID NO: 317326
agucuuucgucuguaacua

SEQ ID NO: 482234 - RNA, 19 nt, Artificial Sequence
  Description of Artificial Sequence: Synthetic oligonucleotide
  Antisense Strand to SEQ ID NO: 482233
uaguuacagacgaaagacu

SEQ ID NO: 482235 - RNA, 19 nt, Artificial Sequence
  Description of Artificial Sequence: Synthetic oligonucleotide
  Sense strand starting at position 665 of SEQ ID NO: 317326
gucuuucgucuguaacuac

SEQ ID NO: 482236 - RNA, 19 nt, Artificial Sequence
  Description of Artificial Sequence: Synthetic oligonucleotide
  Antisense Strand to SEQ ID NO: 482235
guaguuacagacgaaagac

SEQ ID NO: 482237 - RNA, 19 nt, Artificial Sequence
  Description of Artificial Sequence: Synthetic oligonucleotide
  Sense strand starting at position 668 of SEQ ID NO: 317326
uuucgucuguaacuacaaa

SEQ ID NO: 482238 - RNA, 19 nt, Artificial Sequence
  Description of Artificial Sequence: Synthetic oligonucleotide
  Antisense Strand to SEQ ID NO: 482237
uuuguaguuacagacgaaa

SEQ ID NO: 482239 - RNA, 19 nt, Artificial Sequence
  Description of Artificial Sequence: Synthetic oligonucleotide
  Sense strand starting at position 802 of SEQ ID NO: 317326
gcgaguggacugugaacau

SEQ ID NO: 482240 - RNA, 19 nt, Artificial Sequence
  Description of Artificial Sequence: Synthetic oligonucleotide
  Antisense Strand to SEQ ID NO: 482239
auguucacaguccacucgc

SEQ ID NO: 482241 - RNA, 19 nt, Artificial Sequence
  Description of Artificial Sequence: Synthetic oligonucleotide
  Sense strand starting at position 809 of SEQ ID NO: 317326
gacugugaacaucgacgau

SEQ ID NO: 482242 - RNA, 19 nt, Artificial Sequence
  Description of Artificial Sequence: Synthetic oligonucleotide
  Antisense Strand to SEQ ID NO: 482241
aucgucgauguucacaguc

SEQ ID NO: 482243 - RNA, 19 nt, Artificial Sequence
  Description of Artificial Sequence: Synthetic oligonucleotide
  Sense strand starting at position 1614 of SEQ ID NO: 317326
uguugcaucacguaacuga

SEQ ID NO: 482244 - RNA, 19 nt, Artificial Sequence
  Description of Artificial Sequence: Synthetic oligonucleotide
  Antisense Strand to SEQ ID NO: 482243
ucaguuacgugaugcaaca

SEQ ID NO: 482245 - RNA, 19 nt, Artificial Sequence
  Description of Artificial Sequence: Synthetic oligonucleotide
  Sense strand starting at position 2014 of SEQ ID NO: 317326
gcuuuauuagagcaacaug

SEQ ID NO: 482246 - RNA, 19 nt, Artificial Sequence
  Description of Artificial Sequence: Synthetic oligonucleotide
  Antisense Strand to SEQ ID NO: 482245
cauguugcucuaauaaagc

SEQ ID NO: 482247 - RNA, 19 nt, Artificial Sequence
  Description of Artificial Sequence: Synthetic oligonucleotide
  Sense strand starting at position 2246 of SEQ ID NO: 317326
ggugcuggaaucugaguaa

SEQ ID NO: 482248 - RNA, 19 nt, Artificial Sequence
  Description of Artificial Sequence: Synthetic oligonucleotide
  Antisense Strand to SEQ ID NO: 482247
uuacucagauuccagcacc

SEQ ID NO: 482249 - RNA, 19 nt, Artificial Sequence
  Description of Artificial Sequence: Synthetic oligonucleotide
  Sense strand starting at position 2579 of SEQ ID NO: 317326
caccgcuucccuugagaag

SEQ ID NO: 482250 - RNA, 19 nt, Artificial Sequence
  Description of Artificial Sequence: Synthetic oligonucleotide
  Antisense Strand to SEQ ID NO: 482249
cuucucaagggaagcggug

SEQ ID NO: 482251 - RNA, 19 nt, Artificial Sequence
  Description of Artificial Sequence: Synthetic oligonucleotide
  Sense strand starting at position 2665 of SEQ ID NO: 317326
gaggaagagccguaguagu

SEQ ID NO: 482252 - RNA, 19 nt, Artificial Sequence
  Description of Artificial Sequence: Synthetic oligonucleotide
  Antisense Strand to SEQ ID NO: 482251
acuacuacggcucuuccuc

SEQ ID NO: 482253 - RNA, 19 nt, Artificial Sequence
  Description of Artificial Sequence: Synthetic oligonucleotide
  Sense strand starting at position 3282 of SEQ ID NO: 317326
gacaaccggucucuuuaga

SEQ ID NO: 482254 - RNA, 19 nt, Artificial Sequence
  Description of Artificial Sequence: Synthetic oligonucleotide
  Antisense Strand to SEQ ID NO: 482253
ucuaaagagaccgguuguc

SEQ ID NO: 482255 - RNA, 19 nt, Artificial Sequence
  Description of Artificial Sequence: Synthetic oligonucleotide
  Sense strand starting at position 3474 of SEQ ID NO: 317326
cuggauuucgcugguaggu

SEQ ID NO: 482256 - RNA, 19 nt, Artificial Sequence
  Description of Artificial Sequence: Synthetic oligonucleotide
  Antisense Strand to SEQ ID NO: 482255
accuaccagcgaaauccag

SEQ ID NO: 482257 - RNA, 19 nt, Artificial Sequence
  Description of Artificial Sequence: Synthetic oligonucleotide
  Sense strand starting at position 3557 of SEQ ID NO: 317326
aaagucuggccaugaaaga

SEQ ID NO: 482258 - RNA, 19 nt, Artificial Sequence
  Description of Artificial Sequence: Synthetic oligonucleotide
  Antisense Strand to SEQ ID NO: 482257
ucuuucauggccagacuuu

SEQ ID NO: 482259 - RNA, 19 nt, Artificial Sequence
  Description of Artificial Sequence: Synthetic oligonucleotide
  Sense strand starting at position 3590 of SEQ ID NO: 317326
cgacgcagagcuuauuuau

SEQ ID NO: 482260 - RNA, 19 nt, Artificial Sequence
  Description of Artificial Sequence: Synthetic oligonucleotide
  Antisense Strand to SEQ ID NO: 482259
auaaauaagcucugcgucg

SEQ ID NO: 482261 - RNA, 19 nt, Artificial Sequence
  Description of Artificial Sequence: Synthetic oligonucleotide
  Sense strand starting at position 3823 of SEQ ID NO: 317326
ggugaaaccuuggcucuaa

SEQ ID NO: 482262 - RNA, 19 nt, Artificial Sequence
  Description of Artificial Sequence: Synthetic oligonucleotide
  Antisense Strand to SEQ ID NO: 482261
uuagagccaagguuucacc

SEQ ID NO: 482263 - RNA, 19 nt, Artificial Sequence
  Description of Artificial Sequence: Synthetic oligonucleotide
  Sense strand starting at position 3824 of SEQ ID NO: 317326
gugaaaccuuggcucuaaa

SEQ ID NO: 482264 - RNA, 19 nt, Artificial Sequence
  Description of Artificial Sequence: Synthetic oligonucleotide
  Antisense Strand to SEQ ID NO: 482263
uuuagagccaagguuucac

SEQ ID NO: 482265 - RNA, 19 nt, Artificial Sequence
  Description of Artificial Sequence: Synthetic oligonucleotide
  Sense strand starting at position 129 of SEQ ID NO: 317327
gaaggcucccuguggauca

SEQ ID NO: 482266 - RNA, 19 nt, Artificial Sequence
  Description of Artificial Sequence: Synthetic oligonucleotide
  Antisense Strand to SEQ ID NO: 482265
ugauccacagggagccuuc

SEQ ID NO: 482267 - RNA, 19 nt, Artificial Sequence
  Description of Artificial Sequence: Synthetic oligonucleotide
  Sense strand starting at position 193 of SEQ ID NO: 317327
ggcuuuauuuauuagagag

SEQ ID NO: 482268 - RNA, 19 nt, Artificial Sequence
  Description of Artificial Sequence: Synthetic oligonucleotide
  Antisense Strand to SEQ ID NO: 482267
cucucuaauaaauaaagcc

SEQ ID NO: 482269 - RNA, 19 nt, Artificial Sequence
  Description of Artificial Sequence: Synthetic oligonucleotide
  Sense strand starting at position 211 of SEQ ID NO: 317327
gauaaauagcucugugagu

SEQ ID NO: 482270 - RNA, 19 nt, Artificial Sequence
  Description of Artificial Sequence: Synthetic oligonucleotide
  Antisense Strand to SEQ ID NO: 482269
acucacagagcuauuuauc

SEQ ID NO: 482271 - RNA, 19 nt, Artificial Sequence
  Description of Artificial Sequence: Synthetic oligonucleotide
  Sense strand starting at position 212 of SEQ ID NO: 317327
auaaauagcucugugaguu

SEQ ID NO: 482272 - RNA, 19 nt, Artificial Sequence
  Description of Artificial Sequence: Synthetic oligonucleotide
  Antisense Strand to SEQ ID NO: 482271
aacucacagagcuauuuau

SEQ ID NO: 482273 - RNA, 19 nt, Artificial Sequence
  Description of Artificial Sequence: Synthetic oligonucleotide
  Sense strand starting at position 276 of SEQ ID NO: 317327
uggcuucgaaguuagauga

SEQ ID NO: 482274 - RNA, 19 nt, Artificial Sequence
  Description of Artificial Sequence: Synthetic oligonucleotide
  Antisense Strand to SEQ ID NO: 482273
ucaucuaacuucgaagcca

SEQ ID NO: 482275 - RNA, 19 nt, Artificial Sequence
  Description of Artificial Sequence: Synthetic oligonucleotide
  Sense strand starting at position 280 of SEQ ID NO: 317327
uucgaaguuagaugaagaa

SEQ ID NO: 482276 - RNA, 19 nt, Artificial Sequence
  Description of Artificial Sequence: Synthetic oligonucleotide
  Antisense Strand to SEQ ID NO: 482275
uucuucaucuaacuucgaa

SEQ ID NO: 482277 - RNA, 19 nt, Artificial Sequence
  Description of Artificial Sequence: Synthetic oligonucleotide
  Sense strand starting at position 389 of SEQ ID NO: 317327
ugcaaagggaguuauguuu

SEQ ID NO: 482278 - RNA, 19 nt, Artificial Sequence
  Description of Artificial Sequence: Synthetic oligonucleotide
  Antisense Strand to SEQ ID NO: 482277
aaacauaacucccuuugca

SEQ ID NO: 482279 - RNA, 19 nt, Artificial Sequence
  Description of Artificial Sequence: Synthetic oligonucleotide
  Sense strand starting at position 488 of SEQ ID NO: 317327
ucuuuauccuucgucagaa

SEQ ID NO: 482280 - RNA, 19 nt, Artificial Sequence
  Description of Artificial Sequence: Synthetic oligonucleotide
  Antisense Strand to SEQ ID NO: 482279
uucugacgaaggauaaaga

SEQ ID NO: 482281 - RNA, 19 nt, Artificial Sequence
  Description of Artificial Sequence: Synthetic oligonucleotide
  Sense strand starting at position 489 of SEQ ID NO: 317327
cuuuauccuucgucagaac

SEQ ID NO: 482282 - RNA, 19 nt, Artificial Sequence
  Description of Artificial Sequence: Synthetic oligonucleotide
  Antisense Strand to SEQ ID NO: 482281
guucugacgaaggauaaag

SEQ ID NO: 482283 - RNA, 19 nt, Artificial Sequence
  Description of Artificial Sequence: Synthetic oligonucleotide
  Sense strand starting at position 490 of SEQ ID NO: 317327
uuuauccuucgucagaacu

SEQ ID NO: 482284 - RNA, 19 nt, Artificial Sequence
  Description of Artificial Sequence: Synthetic oligonucleotide
  Antisense Strand to SEQ ID NO: 482283
aguucugacgaaggauaaa

SEQ ID NO: 482285 - RNA, 19 nt, Artificial Sequence
  Description of Artificial Sequence: Synthetic oligonucleotide
  Sense strand starting at position 500 of SEQ ID NO: 317327
gucagaacuuguguuuaua

SEQ ID NO: 482286 - RNA, 19 nt, Artificial Sequence
  Description of Artificial Sequence: Synthetic oligonucleotide
  Antisense Strand to SEQ ID NO: 482285
uauaaacacaaguucugac

SEQ ID NO: 482287 - RNA, 19 nt, Artificial Sequence
  Description of Artificial Sequence: Synthetic oligonucleotide
  Sense strand starting at position 503 of SEQ ID NO: 317327
agaacuuguguuuauacaa

SEQ ID NO: 482288 - RNA, 19 nt, Artificial Sequence
  Description of Artificial Sequence: Synthetic oligonucleotide
  Antisense Strand to SEQ ID NO: 482287
uuguauaaacacaaguucu

SEQ ID NO: 482289 - RNA, 19 nt, Artificial Sequence
  Description of Artificial Sequence: Synthetic oligonucleotide
  Sense strand starting at position 1658 of SEQ ID NO: 317327
cggagaaaugcuuguaccu

SEQ ID NO: 482290 - RNA, 19 nt, Artificial Sequence
  Description of Artificial Sequence: Synthetic oligonucleotide
  Antisense Strand to SEQ ID NO: 482289
agguacaagcauuucuccg

SEQ ID NO: 482291 - RNA, 19 nt, Artificial Sequence
  Description of Artificial Sequence: Synthetic oligonucleotide
  Sense strand starting at position 2028 of SEQ ID NO: 317327
agcugauccgcugacauca

SEQ ID NO: 482292 - RNA, 19 nt, Artificial Sequence
  Description of Artificial Sequence: Synthetic oligonucleotide
  Antisense Strand to SEQ ID NO: 482291
ugaugucagcggaucagcu

SEQ ID NO: 482293 - RNA, 19 nt, Artificial Sequence
  Description of Artificial Sequence: Synthetic oligonucleotide
  Sense strand starting at position 2090 of SEQ ID NO: 317327
ugucccuuuccagaaguaa

SEQ ID NO: 482294 - RNA, 19 nt, Artificial Sequence
  Description of Artificial Sequence: Synthetic oligonucleotide
  Antisense Strand to SEQ ID NO: 482293
uuacuucuggaaagggaca

SEQ ID NO: 482295 - RNA, 19 nt, Artificial Sequence
  Description of Artificial Sequence: Synthetic oligonucleotide
  Sense strand starting at position 2319 of SEQ ID NO: 317327
cuugaaaguccgucgugca

SEQ ID NO: 482296 - RNA, 19 nt, Artificial Sequence
  Description of Artificial Sequence: Synthetic oligonucleotide
  Antisense Strand to SEQ ID NO: 482295
ugcacgacggacuuucaag

SEQ ID NO: 482297 - RNA, 19 nt, Artificial Sequence
  Description of Artificial Sequence: Synthetic oligonucleotide
  Sense strand starting at position 2340 of SEQ ID NO: 317327
guccguguucccucgagac

SEQ ID NO: 482298 - RNA, 19 nt, Artificial Sequence
  Description of Artificial Sequence: Synthetic oligonucleotide
  Antisense Strand to SEQ ID NO: 482297
gucucgagggaacacggac

SEQ ID NO: 482299 - RNA, 19 nt, Artificial Sequence
  Description of Artificial Sequence: Synthetic oligonucleotide
  Sense strand starting at position 2342 of SEQ ID NO: 317327
ccguguucccucgagacaa

SEQ ID NO: 482300 - RNA, 19 nt, Artificial Sequence
  Description of Artificial Sequence: Synthetic oligonucleotide
  Antisense Strand to SEQ ID NO: 482299
uugucucgagggaacacgg

SEQ ID NO: 482301 - RNA, 19 nt, Artificial Sequence
  Description of Artificial Sequence: Synthetic oligonucleotide
  Sense strand starting at position 2622 of SEQ ID NO: 317327
gcccucgggugauucagaa

SEQ ID NO: 482302 - RNA, 19 nt, Artificial Sequence
  Description of Artificial Sequence: Synthetic oligonucleotide
  Antisense Strand to SEQ ID NO: 482301
uucugaaucacccgagggc

SEQ ID NO: 482303 - RNA, 19 nt, Artificial Sequence
  Description of Artificial Sequence: Synthetic oligonucleotide
  Sense strand starting at position 2667 of SEQ ID NO: 317327
cucucugucaggcaggaaa

SEQ ID NO: 482304 - RNA, 19 nt, Artificial Sequence
  Description of Artificial Sequence: Synthetic oligonucleotide
  Antisense Strand to SEQ ID NO: 482303
uuuccugccugacagagag

SEQ ID NO: 482305 - RNA, 19 nt, Artificial Sequence
  Description of Artificial Sequence: Synthetic oligonucleotide
  Sense strand starting at position 2877 of SEQ ID NO: 317327
ggcguccucaaguggagaa

SEQ ID NO: 482306 - RNA, 19 nt, Artificial Sequence
  Description of Artificial Sequence: Synthetic oligonucleotide
  Antisense Strand to SEQ ID NO: 482305
uucuccacuugaggacgcc

SEQ ID NO: 482307 - RNA, 19 nt, Artificial Sequence
  Description of Artificial Sequence: Synthetic oligonucleotide
  Sense strand starting at position 2878 of SEQ ID NO: 317327
gcguccucaaguggagaaa

SEQ ID NO: 482308 - RNA, 19 nt, Artificial Sequence
  Description of Artificial Sequence: Synthetic oligonucleotide
  Antisense Strand to SEQ ID NO: 482307
uuucuccacuugaggacgc

SEQ ID NO: 482309 - RNA, 19 nt, Artificial Sequence
  Description of Artificial Sequence: Synthetic oligonucleotide
  Sense strand starting at position 2923 of SEQ ID NO: 317327
ggccacuuagugucguuau

SEQ ID NO: 482310 - RNA, 19 nt, Artificial Sequence
  Description of Artificial Sequence: Synthetic oligonucleotide
  Antisense Strand to SEQ ID NO: 482309
auaacgacacuaaguggcc

SEQ ID NO: 482311 - RNA, 19 nt, Artificial Sequence
  Description of Artificial Sequence: Synthetic oligonucleotide
  Sense strand starting at position 2974 of SEQ ID NO: 317327
gacuguaaauagccgauua

SEQ ID NO: 482312 - RNA, 19 nt, Artificial Sequence
  Description of Artificial Sequence: Synthetic oligonucleotide
  Antisense Strand to SEQ ID NO: 482311
uaaucggcuauuuacaguc

SEQ ID NO: 482313 - RNA, 19 nt, Artificial Sequence
  Description of Artificial Sequence: Synthetic oligonucleotide
  Sense strand starting at position 2976 of SEQ ID NO: 317327
cuguaaauagccgauuaaa

SEQ ID NO: 482314 - RNA, 19 nt, Artificial Sequence
  Description of Artificial Sequence: Synthetic oligonucleotide
  Antisense Strand to SEQ ID NO: 482313
uuuaaucggcuauuuacag

SEQ ID NO: 482315 - RNA, 19 nt, Artificial Sequence
  Description of Artificial Sequence: Synthetic oligonucleotide
  Sense strand starting at position 2985 of SEQ ID NO: 317327
gccgauuaaacagauguaa

SEQ ID NO: 482316 - RNA, 19 nt, Artificial Sequence
  Description of Artificial Sequence: Synthetic oligonucleotide
  Antisense Strand to SEQ ID NO: 482315
uuacaucuguuuaaucggc

SEQ ID NO: 482317 - RNA, 19 nt, Artificial Sequence
  Description of Artificial Sequence: Synthetic oligonucleotide
  Sense strand starting at position 3009 of SEQ ID NO: 317327
cacaauguaccguggaauu

SEQ ID NO: 482318 - RNA, 19 nt, Artificial Sequence
  Description of Artificial Sequence: Synthetic oligonucleotide
  Antisense Strand to SEQ ID NO: 482317
aauuccacgguacauugug

SEQ ID NO: 482319 - RNA, 19 nt, Artificial Sequence
  Description of Artificial Sequence: Synthetic oligonucleotide
  Sense strand starting at position 3011 of SEQ ID NO: 317327
caauguaccguggaauuac

SEQ ID NO: 482320 - RNA, 19 nt, Artificial Sequence
  Description of Artificial Sequence: Synthetic oligonucleotide
  Antisense Strand to SEQ ID NO: 482319
guaauuccacgguacauug

SEQ ID NO: 482321 - RNA, 19 nt, Artificial Sequence
  Description of Artificial Sequence: Synthetic oligonucleotide
  Sense strand starting at position 3164 of SEQ ID NO: 317327
ggagacuacuccuugcuuu

SEQ ID NO: 482322 - RNA, 19 nt, Artificial Sequence
  Description of Artificial Sequence: Synthetic oligonucleotide
  Antisense Strand to SEQ ID NO: 482321
aaagcaaggaguagucucc

SEQ ID NO: 482323 - RNA, 19 nt, Artificial Sequence
  Description of Artificial Sequence: Synthetic oligonucleotide
  Sense strand starting at position 3188 of SEQ ID NO: 317327
cugugcuuaaaugguagau

SEQ ID NO: 482324 - RNA, 19 nt, Artificial Sequence
  Description of Artificial Sequence: Synthetic oligonucleotide
  Antisense Strand to SEQ ID NO: 482323
aucuaccauuuaagcacag

SEQ ID NO: 482325 - RNA, 19 nt, Artificial Sequence
  Description of Artificial Sequence: Synthetic oligonucleotide
  Sense strand starting at position 3215 of SEQ ID NO: 317327
caaguauugccggcuuguu

SEQ ID NO: 482326 - RNA, 19 nt, Artificial Sequence
  Description of Artificial Sequence: Synthetic oligonucleotide
  Antisense Strand to SEQ ID NO: 482325
aacaagccggcaauacuug

SEQ ID NO: 482327 - RNA, 19 nt, Artificial Sequence
  Description of Artificial Sequence: Synthetic oligonucleotide
  Sense strand starting at position 3339 of SEQ ID NO: 317327
gguccuggaccagaaguua

SEQ ID NO: 482328 - RNA, 19 nt, Artificial Sequence
  Description of Artificial Sequence: Synthetic oligonucleotide
  Antisense Strand to SEQ ID NO: 482327
uaacuucugguccaggacc

SEQ ID NO: 482329 - RNA, 19 nt, Artificial Sequence
  Description of Artificial Sequence: Synthetic oligonucleotide
  Sense strand starting at position 3431 of SEQ ID NO: 317327
agauuagaggcuuagucua

SEQ ID NO: 482330 - RNA, 19 nt, Artificial Sequence
  Description of Artificial Sequence: Synthetic oligonucleotide
  Antisense Strand to SEQ ID NO: 482329
uagacuaagccucuaaucu

SEQ ID NO: 482331 - RNA, 19 nt, Artificial Sequence
  Description of Artificial Sequence: Synthetic oligonucleotide
  Sense strand starting at position 3433 of SEQ ID NO: 317327
auuagaggcuuagucuaca

SEQ ID NO: 482332 - RNA, 19 nt, Artificial Sequence
  Description of Artificial Sequence: Synthetic oligonucleotide
  Antisense Strand to SEQ ID NO: 482331
uguagacuaagccucuaau

SEQ ID NO: 482333 - RNA, 19 nt, Artificial Sequence
  Description of Artificial Sequence: Synthetic oligonucleotide
  Sense strand starting at position 3441 of SEQ ID NO: 317327
cuuagucuacauugacaua

SEQ ID NO: 482334 - RNA, 19 nt, Artificial Sequence
  Description of Artificial Sequence: Synthetic oligonucleotide
  Antisense Strand to SEQ ID NO: 482333
uaugucaauguagacuaag

SEQ ID NO: 482335 - RNA, 19 nt, Artificial Sequence
  Description of Artificial Sequence: Synthetic oligonucleotide
  Sense strand starting at position 3492 of SEQ ID NO: 317327
gguucuuuggcucaagcaa

SEQ ID NO: 482336 - RNA, 19 nt, Artificial Sequence
  Description of Artificial Sequence: Synthetic oligonucleotide
  Antisense Strand to SEQ ID NO: 482335
uugcuugagccaaagaacc

SEQ ID NO: 482337 - RNA, 19 nt, Artificial Sequence
  Description of Artificial Sequence: Synthetic oligonucleotide
  Sense strand starting at position 3527 of SEQ ID NO: 317327
gucuauaccucucugaagu

SEQ ID NO: 482338 - RNA, 19 nt, Artificial Sequence
  Description of Artificial Sequence: Synthetic oligonucleotide
  Antisense Strand to SEQ ID NO: 482337
acuucagagagguauagac

SEQ ID NO: 482339 - RNA, 19 nt, Artificial Sequence
  Description of Artificial Sequence: Synthetic oligonucleotide
  Sense strand starting at position 3558 of SEQ ID NO: 317327
guuugaccuccuuaaaguc

SEQ ID NO: 482340 - RNA, 19 nt, Artificial Sequence
  Description of Artificial Sequence: Synthetic oligonucleotide
  Antisense Strand to SEQ ID NO: 482339
gacuuuaaggaggucaaac

SEQ ID NO: 482341 - RNA, 19 nt, Artificial Sequence
  Description of Artificial Sequence: Synthetic oligonucleotide
  Sense strand starting at position 3571 of SEQ ID NO: 317327
aaaguccuccagugcagau

SEQ ID NO: 482342 - RNA, 19 nt, Artificial Sequence
  Description of Artificial Sequence: Synthetic oligonucleotide
  Antisense Strand to SEQ ID NO: 482341
aucugcacuggaggacuuu

SEQ ID NO: 482343 - RNA, 19 nt, Artificial Sequence
  Description of Artificial Sequence: Synthetic oligonucleotide
  Sense strand starting at position 3807 of SEQ ID NO: 317327
auuauacuggugcacuaaa

SEQ ID NO: 482344 - RNA, 19 nt, Artificial Sequence
  Description of Artificial Sequence: Synthetic oligonucleotide
  Antisense Strand to SEQ ID NO: 482343
uuuagugcaccaguauaau

SEQ ID NO: 482345 - RNA, 19 nt, Artificial Sequence
  Description of Artificial Sequence: Synthetic oligonucleotide
  Sense strand starting at position 9 of SEQ ID NO: 317328
agaaauguaagaugcguaa

SEQ ID NO: 482346 - RNA, 19 nt, Artificial Sequence
  Description of Artificial Sequence: Synthetic oligonucleotide
  Antisense Strand to SEQ ID NO: 482345
uuacgcaucuuacauuucu

SEQ ID NO: 482347 - RNA, 19 nt, Artificial Sequence
  Description of Artificial Sequence: Synthetic oligonucleotide
  Sense strand starting at position 13 of SEQ ID NO: 317328
auguaagaugcguaauguu

SEQ ID NO: 482348 - RNA, 19 nt, Artificial Sequence
  Description of Artificial Sequence: Synthetic oligonucleotide
  Antisense Strand to SEQ ID NO: 482347
aacauuacgcaucuuacau

SEQ ID NO: 482349 - RNA, 19 nt, Artificial Sequence
  Description of Artificial Sequence: Synthetic oligonucleotide
  Sense strand starting at position 23 of SEQ ID NO: 317328
cguaauguugcugcugaua

SEQ ID NO: 482350 - RNA, 19 nt, Artificial Sequence
  Description of Artificial Sequence: Synthetic oligonucleotide
  Antisense Strand to SEQ ID NO: 482349
uaucagcagcaacauuacg

SEQ ID NO: 482351 - RNA, 19 nt, Artificial Sequence
  Description of Artificial Sequence: Synthetic oligonucleotide
  Sense strand starting at position 119 of SEQ ID NO: 317328
aggagcucucaggauguau

SEQ ID NO: 482352 - RNA, 19 nt, Artificial Sequence
  Description of Artificial Sequence: Synthetic oligonucleotide
  Antisense Strand to SEQ ID NO: 482351
auacauccugagagcuccu

SEQ ID NO: 482353 - RNA, 19 nt, Artificial Sequence
  Description of Artificial Sequence: Synthetic oligonucleotide
  Sense strand starting at position 121 of SEQ ID NO: 317328
gagcucucaggauguauau

SEQ ID NO: 482354 - RNA, 19 nt, Artificial Sequence
  Description of Artificial Sequence: Synthetic oligonucleotide
  Antisense Strand to SEQ ID NO: 482353
auauacauccugagagcuc

SEQ ID NO: 482355 - RNA, 19 nt, Artificial Sequence
  Description of Artificial Sequence: Synthetic oligonucleotide
  Sense strand starting at position 170 of SEQ ID NO: 317328
augguacauguuggacaaa

SEQ ID NO: 482356 - RNA, 19 nt, Artificial Sequence
  Description of Artificial Sequence: Synthetic oligonucleotide
  Antisense Strand to SEQ ID NO: 482355
uuuguccaacauguaccau

SEQ ID NO: 482357 - RNA, 19 nt, Artificial Sequence
  Description of Artificial Sequence: Synthetic oligonucleotide
  Sense strand starting at position 173 of SEQ ID NO: 317328
guacauguuggacaaaugu

SEQ ID NO: 482358 - RNA, 19 nt, Artificial Sequence
  Description of Artificial Sequence: Synthetic oligonucleotide
  Antisense Strand to SEQ ID NO: 482357
acauuuguccaacauguac

SEQ ID NO: 482359 - RNA, 19 nt, Artificial Sequence
  Description of Artificial Sequence: Synthetic oligonucleotide
  Sense strand starting at position 256 of SEQ ID NO: 317328
ggucccugccaggaaagau

SEQ ID NO: 482360 - RNA, 19 nt, Artificial Sequence
  Description of Artificial Sequence: Synthetic oligonucleotide
  Antisense Strand to SEQ ID NO: 482359
aucuuuccuggcagggacc

SEQ ID NO: 482361 - RNA, 19 nt, Artificial Sequence
  Description of Artificial Sequence: Synthetic oligonucleotide
  Sense strand starting at position 301 of SEQ ID NO: 317328
acuaaugaugucuguagga

SEQ ID NO: 482362 - RNA, 19 nt, Artificial Sequence
  Description of Artificial Sequence: Synthetic oligonucleotide
  Antisense Strand to SEQ ID NO: 482361
uccuacagacaucauuagu

SEQ ID NO: 482363 - RNA, 19 nt, Artificial Sequence
  Description of Artificial Sequence: Synthetic oligonucleotide
  Sense strand starting at position 411 of SEQ ID NO: 317328
agaggcauuguauauguuu

SEQ ID NO: 482364 - RNA, 19 nt, Artificial Sequence
  Description of Artificial Sequence: Synthetic oligonucleotide
  Antisense Strand to SEQ ID NO: 482363
aaacauauacaaugccucu

SEQ ID NO: 482365 - RNA, 19 nt, Artificial Sequence
  Description of Artificial Sequence: Synthetic oligonucleotide
  Sense strand starting at position 628 of SEQ ID NO: 317328
ucaaguaucugagcaguua

SEQ ID NO: 482366 - RNA, 19 nt, Artificial Sequence
  Description of Artificial Sequence: Synthetic oligonucleotide
  Antisense Strand to SEQ ID NO: 482365
uaacugcucagauacuuga

SEQ ID NO: 482367 - RNA, 19 nt, Artificial Sequence
  Description of Artificial Sequence: Synthetic oligonucleotide
  Sense strand starting at position 629 of SEQ ID NO: 317328
caaguaucugagcaguuac

SEQ ID NO: 482368 - RNA, 19 nt, Artificial Sequence
  Description of Artificial Sequence: Synthetic oligonucleotide
  Antisense Strand to SEQ ID NO: 482367
guaacugcucagauacuug

SEQ ID NO: 482369 - RNA, 19 nt, Artificial Sequence
  Description of Artificial Sequence: Synthetic oligonucleotide
  Sense strand starting at position 735 of SEQ ID NO: 317328
aagguuaucuacuugugca

SEQ ID NO: 482370 - RNA, 19 nt, Artificial Sequence
  Description of Artificial Sequence: Synthetic oligonucleotide
  Antisense Strand to SEQ ID NO: 482369
ugcacaaguagauaaccuu

SEQ ID NO: 482371 - RNA, 19 nt, Artificial Sequence
  Description of Artificial Sequence: Synthetic oligonucleotide
  Sense strand starting at position 762 of SEQ ID NO: 317328
uuccuuucuguacaggaaa

SEQ ID NO: 482372 - RNA, 19 nt, Artificial Sequence
  Description of Artificial Sequence: Synthetic oligonucleotide
  Antisense Strand to SEQ ID NO: 482371
uuuccuguacagaaaggaa

SEQ ID NO: 482373 - RNA, 19 nt, Artificial Sequence
  Description of Artificial Sequence: Synthetic oligonucleotide
  Sense strand starting at position 765 of SEQ ID NO: 317328
cuuucuguacaggaaaugu

SEQ ID NO: 482374 - RNA, 19 nt, Artificial Sequence
  Description of Artificial Sequence: Synthetic oligonucleotide
  Antisense Strand to SEQ ID NO: 482373
acauuuccuguacagaaag

SEQ ID NO: 482375 - RNA, 19 nt, Artificial Sequence
  Description of Artificial Sequence: Synthetic oligonucleotide
  Sense strand starting at position 774 of SEQ ID NO: 317328
caggaaauguuccugugac

SEQ ID NO: 482376 - RNA, 19 nt, Artificial Sequence
  Description of Artificial Sequence: Synthetic oligonucleotide
  Antisense Strand to SEQ ID NO: 482375
gucacaggaacauuuccug

SEQ ID NO: 482377 - RNA, 19 nt, Artificial Sequence
  Description of Artificial Sequence: Synthetic oligonucleotide
  Sense strand starting at position 780 of SEQ ID NO: 317328
auguuccugugacuagaau

SEQ ID NO: 482378 - RNA, 19 nt, Artificial Sequence
  Description of Artificial Sequence: Synthetic oligonucleotide
  Antisense Strand to SEQ ID NO: 482377
auucuagucacaggaacau

SEQ ID NO: 482379 - RNA, 19 nt, Artificial Sequence
  Description of Artificial Sequence: Synthetic oligonucleotide
  Sense strand starting at position 921 of SEQ ID NO: 317328
cuuuaacaauaaucgugua

SEQ ID NO: 482380 - RNA, 19 nt, Artificial Sequence
  Description of Artificial Sequence: Synthetic oligonucleotide
  Antisense Strand to SEQ ID NO: 482379
uacacgauuauuguuaaag

SEQ ID NO: 482381 - RNA, 19 nt, Artificial Sequence
  Description of Artificial Sequence: Synthetic oligonucleotide
  Sense strand starting at position 926 of SEQ ID NO: 317328
acaauaaucguguaucuau

SEQ ID NO: 482382 - RNA, 19 nt, Artificial Sequence
  Description of Artificial Sequence: Synthetic oligonucleotide
  Antisense Strand to SEQ ID NO: 482381
auagauacacgauuauugu

SEQ ID NO: 482383 - RNA, 19 nt, Artificial Sequence
  Description of Artificial Sequence: Synthetic oligonucleotide
  Sense strand starting at position 1024 of SEQ ID NO: 317328
uuaaguauagcugguacaa

SEQ ID NO: 482384 - RNA, 19 nt, Artificial Sequence
  Description of Artificial Sequence: Synthetic oligonucleotide
  Antisense Strand to SEQ ID NO: 482383
uuguaccagcuauacuuaa

SEQ ID NO: 482385 - RNA, 19 nt, Artificial Sequence
  Description of Artificial Sequence: Synthetic oligonucleotide
  Sense strand starting at position 1049 of SEQ ID NO: 317328
aggagaaugcgcgagacuu

SEQ ID NO: 482386 - RNA, 19 nt, Artificial Sequence
  Description of Artificial Sequence: Synthetic oligonucleotide
  Antisense Strand to SEQ ID NO: 482385
aagucucgcgcauucuccu

SEQ ID NO: 482387 - RNA, 19 nt, Artificial Sequence
  Description of Artificial Sequence: Synthetic oligonucleotide
  Sense strand starting at position 1097 of SEQ ID NO: 317328
gauacaggcuuguugugau

SEQ ID NO: 482388 - RNA, 19 nt, Artificial Sequence
  Description of Artificial Sequence: Synthetic oligonucleotide
  Antisense Strand to SEQ ID NO: 482387
aucacaacaagccuguauc

SEQ ID NO: 482389 - RNA, 19 nt, Artificial Sequence
  Description of Artificial Sequence: Synthetic oligonucleotide
  Sense strand starting at position 1427 of SEQ ID NO: 317328
gauggucucgucuagguca

SEQ ID NO: 482390 - RNA, 19 nt, Artificial Sequence
  Description of Artificial Sequence: Synthetic oligonucleotide
  Antisense Strand to SEQ ID NO: 482389
ugaccuagacgagaccauc

SEQ ID NO: 482391 - RNA, 19 nt, Artificial Sequence
  Description of Artificial Sequence: Synthetic oligonucleotide
  Sense strand starting at position 1627 of SEQ ID NO: 317328
cagggaugggcuugcaauu

SEQ ID NO: 482392 - RNA, 19 nt, Artificial Sequence
  Description of Artificial Sequence: Synthetic oligonucleotide
  Antisense Strand to SEQ ID NO: 482391
aauugcaagcccaucccug

SEQ ID NO: 482393 - RNA, 19 nt, Artificial Sequence
  Description of Artificial Sequence: Synthetic oligonucleotide
  Sense strand starting at position 2091 of SEQ ID NO: 317328
gagggcuggucacuacuuu

SEQ ID NO: 482394 - RNA, 19 nt, Artificial Sequence
  Description of Artificial Sequence: Synthetic oligonucleotide
  Antisense Strand to SEQ ID NO: 482393
aaaguagugaccagcccuc

SEQ ID NO: 482395 - RNA, 19 nt, Artificial Sequence
  Description of Artificial Sequence: Synthetic oligonucleotide
  Sense strand starting at position 2144 of SEQ ID NO: 317328
gcgcuugcuggaagggaau

SEQ ID NO: 482396 - RNA, 19 nt, Artificial Sequence
  Description of Artificial Sequence: Synthetic oligonucleotide
  Antisense Strand to SEQ ID NO: 482395
auucccuuccagcaagcgc

SEQ ID NO: 482397 - RNA, 19 nt, Artificial Sequence
  Description of Artificial Sequence: Synthetic oligonucleotide
  Sense strand starting at position 2637 of SEQ ID NO: 317328
aauauauucguaugagcag

SEQ ID NO: 482398 - RNA, 19 nt, Artificial Sequence
  Description of Artificial Sequence: Synthetic oligonucleotide
  Antisense Strand to SEQ ID NO: 482397
cugcucauacgaauauauu

SEQ ID NO: 482399 - RNA, 19 nt, Artificial Sequence
  Description of Artificial Sequence: Synthetic oligonucleotide
  Sense strand starting at position 2643 of SEQ ID NO: 317328
uucguaugagcagaacuuu

SEQ ID NO: 482400 - RNA, 19 nt, Artificial Sequence
  Description of Artificial Sequence: Synthetic oligonucleotide
  Antisense Strand to SEQ ID NO: 482399
aaaguucugcucauacgaa

SEQ ID NO: 482401 - RNA, 19 nt, Artificial Sequence
  Description of Artificial Sequence: Synthetic oligonucleotide
  Sense strand starting at position 2751 of SEQ ID NO: 317328
acaagagucucaccaguca

SEQ ID NO: 482402 - RNA, 19 nt, Artificial Sequence
  Description of Artificial Sequence: Synthetic oligonucleotide
  Antisense Strand to SEQ ID NO: 482401
ugacuggugagacucuugu

SEQ ID NO: 482403 - RNA, 19 nt, Artificial Sequence
  Description of Artificial Sequence: Synthetic oligonucleotide
  Sense strand starting at position 2831 of SEQ ID NO: 317328
gacucaauacucgaaggca

SEQ ID NO: 482404 - RNA, 19 nt, Artificial Sequence
  Description of Artificial Sequence: Synthetic oligonucleotide
  Antisense Strand to SEQ ID NO: 482403
ugccuucgaguauugaguc

SEQ ID NO: 482405 - RNA, 19 nt, Artificial Sequence
  Description of Artificial Sequence: Synthetic oligonucleotide
  Sense strand starting at position 2878 of SEQ ID NO: 317328
gcagcugugcgcucuggaa

SEQ ID NO: 482406 - RNA, 19 nt, Artificial Sequence
  Description of Artificial Sequence: Synthetic oligonucleotide
  Antisense Strand to SEQ ID NO: 482405
uuccagagcgcacagcugc

SEQ ID NO: 482407 - RNA, 19 nt, Artificial Sequence
  Description of Artificial Sequence: Synthetic oligonucleotide
  Sense strand starting at position 2916 of SEQ ID NO: 317328
agggcacuguuuguaaaga

SEQ ID NO: 482408 - RNA, 19 nt, Artificial Sequence
  Description of Artificial Sequence: Synthetic oligonucleotide
  Antisense Strand to SEQ ID NO: 482407
ucuuuacaaacagugcccu

SEQ ID NO: 482409 - RNA, 19 nt, Artificial Sequence
  Description of Artificial Sequence: Synthetic oligonucleotide
  Sense strand starting at position 2999 of SEQ ID NO: 317328
aggaguccugccuagagau

SEQ ID NO: 482410 - RNA, 19 nt, Artificial Sequence
  Description of Artificial Sequence: Synthetic oligonucleotide
  Antisense Strand to SEQ ID NO: 482409
aucucuaggcaggacuccu

SEQ ID NO: 482411 - RNA, 19 nt, Artificial Sequence
  Description of Artificial Sequence: Synthetic oligonucleotide
  Sense strand starting at position 3016 of SEQ ID NO: 317328
auccacgagggcuagaauu

SEQ ID NO: 482412 - RNA, 19 nt, Artificial Sequence
  Description of Artificial Sequence: Synthetic oligonucleotide
  Antisense Strand to SEQ ID NO: 482411
aauucuagcccucguggau

SEQ ID NO: 482413 - RNA, 19 nt, Artificial Sequence
  Description of Artificial Sequence: Synthetic oligonucleotide
  Sense strand starting at position 3024 of SEQ ID NO: 317328
gggcuagaauuagcucauu

SEQ ID NO: 482414 - RNA, 19 nt, Artificial Sequence
  Description of Artificial Sequence: Synthetic oligonucleotide
  Antisense Strand to SEQ ID NO: 482413
aaugagcuaauucuagccc

SEQ ID NO: 482415 - RNA, 19 nt, Artificial Sequence
  Description of Artificial Sequence: Synthetic oligonucleotide
  Sense strand starting at position 3135 of SEQ ID NO: 317328
uagugucucugacugcaaa

SEQ ID NO: 482416 - RNA, 19 nt, Artificial Sequence
  Description of Artificial Sequence: Synthetic oligonucleotide
  Antisense Strand to SEQ ID NO: 482415
uuugcagucagagacacua

SEQ ID NO: 482417 - RNA, 19 nt, Artificial Sequence
  Description of Artificial Sequence: Synthetic oligonucleotide
  Sense strand starting at position 3322 of SEQ ID NO: 317328
uguuauuacuucccgacca

SEQ ID NO: 482418 - RNA, 19 nt, Artificial Sequence
  Description of Artificial Sequence: Synthetic oligonucleotide
  Antisense Strand to SEQ ID NO: 482417
uggucgggaaguaauaaca

SEQ ID NO: 482419 - RNA, 19 nt, Artificial Sequence
  Description of Artificial Sequence: Synthetic oligonucleotide
  Sense strand starting at position 3539 of SEQ ID NO: 317328
ucgucaucuggagagaaug

SEQ ID NO: 482420 - RNA, 19 nt, Artificial Sequence
  Description of Artificial Sequence: Synthetic oligonucleotide
  Antisense Strand to SEQ ID NO: 482419
cauucucuccagaugacga

SEQ ID NO: 482421 - RNA, 19 nt, Artificial Sequence
  Description of Artificial Sequence: Synthetic oligonucleotide
  Sense strand starting at position 3790 of SEQ ID NO: 317328
gcgugagcucugagagaug

SEQ ID NO: 482422 - RNA, 19 nt, Artificial Sequence
  Description of Artificial Sequence: Synthetic oligonucleotide
  Antisense Strand to SEQ ID NO: 482421
caucucucagagcucacgc

SEQ ID NO: 482423 - RNA, 19 nt, Artificial Sequence
  Description of Artificial Sequence: Synthetic oligonucleotide
  Sense strand starting at position 3793 of SEQ ID NO: 317328
ugagcucugagagaugcua

SEQ ID NO: 482424 - RNA, 19 nt, Artificial Sequence
  Description of Artificial Sequence: Synthetic oligonucleotide
  Antisense Strand to SEQ ID NO: 482423
uagcaucucucagagcuca

SEQ ID NO: 482425 - RNA, 19 nt, Artificial Sequence
  Description of Artificial Sequence: Synthetic oligonucleotide
  Sense strand starting at position 5 of SEQ ID NO: 317329
cuuuauguggauggugaga

SEQ ID NO: 482426 - RNA, 19 nt, Artificial Sequence
  Description of Artificial Sequence: Synthetic oligonucleotide
  Antisense Strand to SEQ ID NO: 482425
ucucaccauccacauaaag

SEQ ID NO: 482427 - RNA, 19 nt, Artificial Sequence
  Description of Artificial Sequence: Synthetic oligonucleotide
  Sense strand starting at position 75 of SEQ ID NO: 317329
gccaguaagcaacauaaau

SEQ ID NO: 482428 - RNA, 19 nt, Artificial Sequence
  Description of Artificial Sequence: Synthetic oligonucleotide
  Antisense Strand to SEQ ID NO: 482427
auuuauguugcuuacuggc

SEQ ID NO: 482429 - RNA, 19 nt, Artificial Sequence
  Description of Artificial Sequence: Synthetic oligonucleotide
  Sense strand starting at position 171 of SEQ ID NO: 317329
ucagauuugcauuguagua

SEQ ID NO: 482430 - RNA, 19 nt, Artificial Sequence
  Description of Artificial Sequence: Synthetic oligonucleotide
  Antisense Strand to SEQ ID NO: 482429
uacuacaaugcaaaucuga

SEQ ID NO: 482431 - RNA, 19 nt, Artificial Sequence
  Description of Artificial Sequence: Synthetic oligonucleotide
  Sense strand starting at position 223 of SEQ ID NO: 317329
agagccuagaagugaagau

SEQ ID NO: 482432 - RNA, 19 nt, Artificial Sequence
  Description of Artificial Sequence: Synthetic oligonucleotide
  Antisense Strand to SEQ ID NO: 482431
aucuucacuucuaggcucu

SEQ ID NO: 482433 - RNA, 19 nt, Artificial Sequence
  Description of Artificial Sequence: Synthetic oligonucleotide
  Sense strand starting at position 273 of SEQ ID NO: 317329
gagguacugacugagguuu

SEQ ID NO: 482434 - RNA, 19 nt, Artificial Sequence
  Description of Artificial Sequence: Synthetic oligonucleotide
  Antisense Strand to SEQ ID NO: 482433
aaaccucagucaguaccuc

SEQ ID NO: 482435 - RNA, 19 nt, Artificial Sequence
  Description of Artificial Sequence: Synthetic oligonucleotide
  Sense strand starting at position 279 of SEQ ID NO: 317329
cugacugagguuugacuuu

SEQ ID NO: 482436 - RNA, 19 nt, Artificial Sequence
  Description of Artificial Sequence: Synthetic oligonucleotide
  Antisense Strand to SEQ ID NO: 482435
aaagucaaaccucagucag

SEQ ID NO: 482437 - RNA, 19 nt, Artificial Sequence
  Description of Artificial Sequence: Synthetic oligonucleotide
  Sense strand starting at position 318 of SEQ ID NO: 317329
gguguuaagagguagaacu

SEQ ID NO: 482438 - RNA, 19 nt, Artificial Sequence
  Description of Artificial Sequence: Synthetic oligonucleotide
  Antisense Strand to SEQ ID NO: 482437
aguucuaccucuuaacacc

SEQ ID NO: 482439 - RNA, 19 nt, Artificial Sequence
  Description of Artificial Sequence: Synthetic oligonucleotide
  Sense strand starting at position 448 of SEQ ID NO: 317329
gggcucacuguuuaaaucu

SEQ ID NO: 482440 - RNA, 19 nt, Artificial Sequence
  Description of Artificial Sequence: Synthetic oligonucleotide
  Antisense Strand to SEQ ID NO: 482439
agauuuaaacagugagccc

SEQ ID NO: 482441 - RNA, 19 nt, Artificial Sequence
  Description of Artificial Sequence: Synthetic oligonucleotide
  Sense strand starting at position 559 of SEQ ID NO: 317329
aagugaauggaugguugua

SEQ ID NO: 482442 - RNA, 19 nt, Artificial Sequence
  Description of Artificial Sequence: Synthetic oligonucleotide
  Antisense Strand to SEQ ID NO: 482441
uacaaccauccauucacuu

SEQ ID NO: 482443 - RNA, 19 nt, Artificial Sequence
  Description of Artificial Sequence: Synthetic oligonucleotide
  Sense strand starting at position 590 of SEQ ID NO: 317329
guaaguaugacagagucca

SEQ ID NO: 482444 - RNA, 19 nt, Artificial Sequence
  Description of Artificial Sequence: Synthetic oligonucleotide
  Antisense Strand to SEQ ID NO: 482443
uggacucugucauacuuac

SEQ ID NO: 482445 - RNA, 19 nt, Artificial Sequence
  Description of Artificial Sequence: Synthetic oligonucleotide
  Sense strand starting at position 626 of SEQ ID NO: 317329
guuugaggugccuauggaa

SEQ ID NO: 482446 - RNA, 19 nt, Artificial Sequence
  Description of Artificial Sequence: Synthetic oligonucleotide
  Antisense Strand to SEQ ID NO: 482445
uuccauaggcaccucaaac

SEQ ID NO: 482447 - RNA, 19 nt, Artificial Sequence
  Description of Artificial Sequence: Synthetic oligonucleotide
  Sense strand starting at position 677 of SEQ ID NO: 317329
gcguaaauuugaaguggag

SEQ ID NO: 482448 - RNA, 19 nt, Artificial Sequence
  Description of Artificial Sequence: Synthetic oligonucleotide
  Antisense Strand to SEQ ID NO: 482447
cuccacuucaaauuuacgc

SEQ ID NO: 482449 - RNA, 19 nt, Artificial Sequence
  Description of Artificial Sequence: Synthetic oligonucleotide
  Sense strand starting at position 686 of SEQ ID NO: 317329
ugaaguggagacugaguaa

SEQ ID NO: 482450 - RNA, 19 nt, Artificial Sequence
  Description of Artificial Sequence: Synthetic oligonucleotide
  Antisense Strand to SEQ ID NO: 482449
uuacucagucuccacuuca

SEQ ID NO: 482451 - RNA, 19 nt, Artificial Sequence
  Description of Artificial Sequence: Synthetic oligonucleotide
  Sense strand starting at position 718 of SEQ ID NO: 317329
cccacuuauguguaaagca

SEQ ID NO: 482452 - RNA, 19 nt, Artificial Sequence
  Description of Artificial Sequence: Synthetic oligonucleotide
  Antisense Strand to SEQ ID NO: 482451
ugcuuuacacauaaguggg

SEQ ID NO: 482453 - RNA, 19 nt, Artificial Sequence
  Description of Artificial Sequence: Synthetic oligonucleotide
  Sense strand starting at position 779 of SEQ ID NO: 317329
ugauaacuuaggcgggaaa

SEQ ID NO: 482454 - RNA, 19 nt, Artificial Sequence
  Description of Artificial Sequence: Synthetic oligonucleotide
  Antisense Strand to SEQ ID NO: 482453
uuucccgccuaaguuauca

SEQ ID NO: 482455 - RNA, 19 nt, Artificial Sequence
  Description of Artificial Sequence: Synthetic oligonucleotide
  Sense strand starting at position 780 of SEQ ID NO: 317329
gauaacuuaggcgggaaau

SEQ ID NO: 482456 - RNA, 19 nt, Artificial Sequence
  Description of Artificial Sequence: Synthetic oligonucleotide
  Antisense Strand to SEQ ID NO: 482455
auuucccgccuaaguuauc

SEQ ID NO: 482457 - RNA, 19 nt, Artificial Sequence
  Description of Artificial Sequence: Synthetic oligonucleotide
  Sense strand starting at position 781 of SEQ ID NO: 317329
auaacuuaggcgggaaaug

SEQ ID NO: 482458 - RNA, 19 nt, Artificial Sequence
  Description of Artificial Sequence: Synthetic oligonucleotide
  Antisense Strand to SEQ ID NO: 482457
cauuucccgccuaaguuau

SEQ ID NO: 482459 - RNA, 19 nt, Artificial Sequence
  Description of Artificial Sequence: Synthetic oligonucleotide
  Sense strand starting at position 932 of SEQ ID NO: 317329
gcauguauuuggcuguaug

SEQ ID NO: 482460 - RNA, 19 nt, Artificial Sequence
  Description of Artificial Sequence: Synthetic oligonucleotide
  Antisense Strand to SEQ ID NO: 482459
cauacagccaaauacaugc

SEQ ID NO: 482461 - RNA, 19 nt, Artificial Sequence
  Description of Artificial Sequence: Synthetic oligonucleotide
  Sense strand starting at position 933 of SEQ ID NO: 317329
cauguauuuggcuguauga

SEQ ID NO: 482462 - RNA, 19 nt, Artificial Sequence
  Description of Artificial Sequence: Synthetic oligonucleotide
  Antisense Strand to SEQ ID NO: 482461
ucauacagccaaauacaug

SEQ ID NO: 482463 - RNA, 19 nt, Artificial Sequence
  Description of Artificial Sequence: Synthetic oligonucleotide
  Sense strand starting at position 951 of SEQ ID NO: 317329
acuuuaagcuccuugaaga

SEQ ID NO: 482464 - RNA, 19 nt, Artificial Sequence
  Description of Artificial Sequence: Synthetic oligonucleotide
  Antisense Strand to SEQ ID NO: 482463
ucuucaaggagcuuaaagu

SEQ ID NO: 482465 - RNA, 19 nt, Artificial Sequence
  Description of Artificial Sequence: Synthetic oligonucleotide
  Sense strand starting at position 952 of SEQ ID NO: 317329
cuuuaagcuccuugaagag

SEQ ID NO: 482466 - RNA, 19 nt, Artificial Sequence
  Description of Artificial Sequence: Synthetic oligonucleotide
  Antisense Strand to SEQ ID NO: 482465
cucuucaaggagcuuaaag

SEQ ID NO: 482467 - RNA, 19 nt, Artificial Sequence
  Description of Artificial Sequence: Synthetic oligonucleotide
  Sense strand starting at position 1206 of SEQ ID NO: 317329
uagcgauuacguguaugua

SEQ ID NO: 482468 - RNA, 19 nt, Artificial Sequence
  Description of Artificial Sequence: Synthetic oligonucleotide
  Antisense Strand to SEQ ID NO: 482467
uacauacacguaaucgcua

SEQ ID NO: 482469 - RNA, 19 nt, Artificial Sequence
  Description of Artificial Sequence: Synthetic oligonucleotide
  Sense strand starting at position 1208 of SEQ ID NO: 317329
gcgauuacguguauguaua

SEQ ID NO: 482470 - RNA, 19 nt, Artificial Sequence
  Description of Artificial Sequence: Synthetic oligonucleotide
  Antisense Strand to SEQ ID NO: 482469
uauacauacacguaaucgc

SEQ ID NO: 482471 - RNA, 19 nt, Artificial Sequence
  Description of Artificial Sequence: Synthetic oligonucleotide
  Sense strand starting at position 1428 of SEQ ID NO: 317329
cugggaugucugcauauug

SEQ ID NO: 482472 - RNA, 19 nt, Artificial Sequence
  Description of Artificial Sequence: Synthetic oligonucleotide
  Antisense Strand to SEQ ID NO: 482471
caauaugcagacaucccag

SEQ ID NO: 482473 - RNA, 19 nt, Artificial Sequence
  Description of Artificial Sequence: Synthetic oligonucleotide
  Sense strand starting at position 2214 of SEQ ID NO: 317329
ccugcagauuccucagaaa

SEQ ID NO: 482474 - RNA, 19 nt, Artificial Sequence
  Description of Artificial Sequence: Synthetic oligonucleotide
  Antisense Strand to SEQ ID NO: 482473
uuucugaggaaucugcagg

SEQ ID NO: 482475 - RNA, 19 nt, Artificial Sequence
  Description of Artificial Sequence: Synthetic oligonucleotide
  Sense strand starting at position 2364 of SEQ ID NO: 317329
ggccgauaucgagaccaca

SEQ ID NO: 482476 - RNA, 19 nt, Artificial Sequence
  Description of Artificial Sequence: Synthetic oligonucleotide
  Antisense Strand to SEQ ID NO: 482475
uguggucucgauaucggcc

SEQ ID NO: 482477 - RNA, 19 nt, Artificial Sequence
  Description of Artificial Sequence: Synthetic oligonucleotide
  Sense strand starting at position 2449 of SEQ ID NO: 317329
agucuugaagacugagagu

SEQ ID NO: 482478 - RNA, 19 nt, Artificial Sequence
  Description of Artificial Sequence: Synthetic oligonucleotide
  Antisense Strand to SEQ ID NO: 482477
acucucagucuucaagacu

SEQ ID NO: 482479 - RNA, 19 nt, Artificial Sequence
  Description of Artificial Sequence: Synthetic oligonucleotide
  Sense strand starting at position 2573 of SEQ ID NO: 317329
gagauaguguuaccaugua

SEQ ID NO: 482480 - RNA, 19 nt, Artificial Sequence
  Description of Artificial Sequence: Synthetic oligonucleotide
  Antisense Strand to SEQ ID NO: 482479
uacaugguaacacuaucuc

SEQ ID NO: 482481 - RNA, 19 nt, Artificial Sequence
  Description of Artificial Sequence: Synthetic oligonucleotide
  Sense strand starting at position 2585 of SEQ ID NO: 317329
ccauguauauccucgggaa

SEQ ID NO: 482482 - RNA, 19 nt, Artificial Sequence
  Description of Artificial Sequence: Synthetic oligonucleotide
  Antisense Strand to SEQ ID NO: 482481
uucccgaggauauacaugg

SEQ ID NO: 482483 - RNA, 19 nt, Artificial Sequence
  Description of Artificial Sequence: Synthetic oligonucleotide
  Sense strand starting at position 2589 of SEQ ID NO: 317329
guauauccucgggaaccua

SEQ ID NO: 482484 - RNA, 19 nt, Artificial Sequence
  Description of Artificial Sequence: Synthetic oligonucleotide
  Antisense Strand to SEQ ID NO: 482483
uagguucccgaggauauac

SEQ ID NO: 482485 - RNA, 19 nt, Artificial Sequence
  Description of Artificial Sequence: Synthetic oligonucleotide
  Sense strand starting at position 2652 of SEQ ID NO: 317329
cgaguuacuugaguagaca

SEQ ID NO: 482486 - RNA, 19 nt, Artificial Sequence
  Description of Artificial Sequence: Synthetic oligonucleotide
  Antisense Strand to SEQ ID NO: 482485
ugucuacucaaguaacucg

SEQ ID NO: 482487 - RNA, 19 nt, Artificial Sequence
  Description of Artificial Sequence: Synthetic oligonucleotide
  Sense strand starting at position 2678 of SEQ ID NO: 317329
uucccuguuguagauauaa

SEQ ID NO: 482488 - RNA, 19 nt, Artificial Sequence
  Description of Artificial Sequence: Synthetic oligonucleotide
  Antisense Strand to SEQ ID NO: 482487
uuauaucuacaacagggaa

SEQ ID NO: 482489 - RNA, 19 nt, Artificial Sequence
  Description of Artificial Sequence: Synthetic oligonucleotide
  Sense strand starting at position 2727 of SEQ ID NO: 317329
cagugaagucaauagcaac

SEQ ID NO: 482490 - RNA, 19 nt, Artificial Sequence
  Description of Artificial Sequence: Synthetic oligonucleotide
  Antisense Strand to SEQ ID NO: 482489
guugcuauugacuucacug

SEQ ID NO: 482491 - RNA, 19 nt, Artificial Sequence
  Description of Artificial Sequence: Synthetic oligonucleotide
  Sense strand starting at position 3205 of SEQ ID NO: 317329
agaucuguuccuuaacugu

SEQ ID NO: 482492 - RNA, 19 nt, Artificial Sequence
  Description of Artificial Sequence: Synthetic oligonucleotide
  Antisense Strand to SEQ ID NO: 482491
acaguuaaggaacagaucu

SEQ ID NO: 482493 - RNA, 19 nt, Artificial Sequence
  Description of Artificial Sequence: Synthetic oligonucleotide
  Sense strand starting at position 3302 of SEQ ID NO: 317329
guguucuaucuggaaggua

SEQ ID NO: 482494 - RNA, 19 nt, Artificial Sequence
  Description of Artificial Sequence: Synthetic oligonucleotide
  Antisense Strand to SEQ ID NO: 482493
uaccuuccagauagaacac

SEQ ID NO: 482495 - RNA, 19 nt, Artificial Sequence
  Description of Artificial Sequence: Synthetic oligonucleotide
  Sense strand starting at position 3349 of SEQ ID NO: 317329
ugucuagcacaguaauuaa

SEQ ID NO: 482496 - RNA, 19 nt, Artificial Sequence
  Description of Artificial Sequence: Synthetic oligonucleotide
  Antisense Strand to SEQ ID NO: 482495
uuaauuacugugcuagaca

SEQ ID NO: 482497 - RNA, 19 nt, Artificial Sequence
  Description of Artificial Sequence: Synthetic oligonucleotide
  Sense strand starting at position 3406 of SEQ ID NO: 317329
uuucuaagcccugacuuga

SEQ ID NO: 482498 - RNA, 19 nt, Artificial Sequence
  Description of Artificial Sequence: Synthetic oligonucleotide
  Antisense Strand to SEQ ID NO: 482497
ucaagucagggcuuagaaa

SEQ ID NO: 482499 - RNA, 19 nt, Artificial Sequence
  Description of Artificial Sequence: Synthetic oligonucleotide
  Sense strand starting at position 3737 of SEQ ID NO: 317329
gaaaucaaggcuuguagag

SEQ ID NO: 482500 - RNA, 19 nt, Artificial Sequence
  Description of Artificial Sequence: Synthetic oligonucleotide
  Antisense Strand to SEQ ID NO: 482499
cucuacaagccuugauuuc

SEQ ID NO: 482501 - RNA, 19 nt, Artificial Sequence
  Description of Artificial Sequence: Synthetic oligonucleotide
  Sense strand starting at position 3754 of SEQ ID NO: 317329
agguuaaauggcugaccau

SEQ ID NO: 482502 - RNA, 19 nt, Artificial Sequence
  Description of Artificial Sequence: Synthetic oligonucleotide
  Antisense Strand to SEQ ID NO: 482501
auggucagccauuuaaccu

SEQ ID NO: 482503 - RNA, 19 nt, Artificial Sequence
  Description of Artificial Sequence: Synthetic oligonucleotide
  Sense strand starting at position 3807 of SEQ ID NO: 317329
gguccaucugacuagucuu

SEQ ID NO: 482504 - RNA, 19 nt, Artificial Sequence
  Description of Artificial Sequence: Synthetic oligonucleotide
  Antisense Strand to SEQ ID NO: 482503
aagacuagucagauggacc

SEQ ID NO: 482505 - RNA, 19 nt, Artificial Sequence
  Description of Artificial Sequence: Synthetic oligonucleotide
  Sense strand starting at position 87 of SEQ ID NO: 317330
guuaaagcugcugagauca

SEQ ID NO: 482506 - RNA, 19 nt, Artificial Sequence
  Description of Artificial Sequence: Synthetic oligonucleotide
  Antisense Strand to SEQ ID NO: 482505
ugaucucagcagcuuuaac

SEQ ID NO: 482507 - RNA, 19 nt, Artificial Sequence
  Description of Artificial Sequence: Synthetic oligonucleotide
  Sense strand starting at position 92 of SEQ ID NO: 317330
agcugcugagaucaaguuu

SEQ ID NO: 482508 - RNA, 19 nt, Artificial Sequence
  Description of Artificial Sequence: Synthetic oligonucleotide
  Antisense Strand to SEQ ID NO: 482507
aaacuugaucucagcagcu

SEQ ID NO: 482509 - RNA, 19 nt, Artificial Sequence
  Description of Artificial Sequence: Synthetic oligonucleotide
  Sense strand starting at position 159 of SEQ ID NO: 317330
gagcuaguauugguagaaa

SEQ ID NO: 482510 - RNA, 19 nt, Artificial Sequence
  Description of Artificial Sequence: Synthetic oligonucleotide
  Antisense Strand to SEQ ID NO: 482509
uuucuaccaauacuagcuc

SEQ ID NO: 482511 - RNA, 19 nt, Artificial Sequence
  Description of Artificial Sequence: Synthetic oligonucleotide
  Sense strand starting at position 265 of SEQ ID NO: 317330
acuuguugcuaaccaugaa

SEQ ID NO: 482512 - RNA, 19 nt, Artificial Sequence
  Description of Artificial Sequence: Synthetic oligonucleotide
  Antisense Strand to SEQ ID NO: 482511
uucaugguuagcaacaagu

SEQ ID NO: 482513 - RNA, 19 nt, Artificial Sequence
  Description of Artificial Sequence: Synthetic oligonucleotide
  Sense strand starting at position 269 of SEQ ID NO: 317330
guugcuaaccaugaaguca

SEQ ID NO: 482514 - RNA, 19 nt, Artificial Sequence
  Description of Artificial Sequence: Synthetic oligonucleotide
  Antisense Strand to SEQ ID NO: 482513
ugacuucaugguuagcaac

SEQ ID NO: 482515 - RNA, 19 nt, Artificial Sequence
  Description of Artificial Sequence: Synthetic oligonucleotide
  Sense strand starting at position 381 of SEQ ID NO: 317330
gcuuauaugcauugaauaa

SEQ ID NO: 482516 - RNA, 19 nt, Artificial Sequence
  Description of Artificial Sequence: Synthetic oligonucleotide
  Antisense Strand to SEQ ID NO: 482515
uuauucaaugcauauaagc

SEQ ID NO: 482517 - RNA, 19 nt, Artificial Sequence
  Description of Artificial Sequence: Synthetic oligonucleotide
  Sense strand starting at position 636 of SEQ ID NO: 317330
gcagguaacaaguagaauu

SEQ ID NO: 482518 - RNA, 19 nt, Artificial Sequence
  Description of Artificial Sequence: Synthetic oligonucleotide
  Antisense Strand to SEQ ID NO: 482517
aauucuacuuguuaccugc

SEQ ID NO: 482519 - RNA, 19 nt, Artificial Sequence
  Description of Artificial Sequence: Synthetic oligonucleotide
  Sense strand starting at position 679 of SEQ ID NO: 317330
cuacaauuggcaugauaaa

SEQ ID NO: 482520 - RNA, 19 nt, Artificial Sequence
  Description of Artificial Sequence: Synthetic oligonucleotide
  Antisense Strand to SEQ ID NO: 482519
uuuaucaugccaauuguag

SEQ ID NO: 482521 - RNA, 19 nt, Artificial Sequence
  Description of Artificial Sequence: Synthetic oligonucleotide
  Sense strand starting at position 991 of SEQ ID NO: 317330
uuaguccucucccuggaua

SEQ ID NO: 482522 - RNA, 19 nt, Artificial Sequence
  Description of Artificial Sequence: Synthetic oligonucleotide
  Antisense Strand to SEQ ID NO: 482521
uauccagggagaggacuaa

SEQ ID NO: 482523 - RNA, 19 nt, Artificial Sequence
  Description of Artificial Sequence: Synthetic oligonucleotide
  Sense strand starting at position 1004 of SEQ ID NO: 317330
uggauacacugcucaacuu

SEQ ID NO: 482524 - RNA, 19 nt, Artificial Sequence
  Description of Artificial Sequence: Synthetic oligonucleotide
  Antisense Strand to SEQ ID NO: 482523
aaguugagcaguguaucca

SEQ ID NO: 482525 - RNA, 19 nt, Artificial Sequence
  Description of Artificial Sequence: Synthetic oligonucleotide
  Sense strand starting at position 1005 of SEQ ID NO: 317330
ggauacacugcucaacuua

SEQ ID NO: 482526 - RNA, 19 nt, Artificial Sequence
  Description of Artificial Sequence: Synthetic oligonucleotide
  Antisense Strand to SEQ ID NO: 482525
uaaguugagcaguguaucc

SEQ ID NO: 482527 - RNA, 19 nt, Artificial Sequence
  Description of Artificial Sequence: Synthetic oligonucleotide
  Sense strand starting at position 1198 of SEQ ID NO: 317330
uuacaauuauggguggcaa

SEQ ID NO: 482528 - RNA, 19 nt, Artificial Sequence
  Description of Artificial Sequence: Synthetic oligonucleotide
  Antisense Strand to SEQ ID NO: 482527
uugccacccauaauuguaa

SEQ ID NO: 482529 - RNA, 19 nt, Artificial Sequence
  Description of Artificial Sequence: Synthetic oligonucleotide
  Sense strand starting at position 1199 of SEQ ID NO: 317330
uacaauuauggguggcaaa

SEQ ID NO: 482530 - RNA, 19 nt, Artificial Sequence
  Description of Artificial Sequence: Synthetic oligonucleotide
  Antisense Strand to SEQ ID NO: 482529
uuugccacccauaauugua

SEQ ID NO: 482531 - RNA, 19 nt, Artificial Sequence
  Description of Artificial Sequence: Synthetic oligonucleotide
  Sense strand starting at position 1200 of SEQ ID NO: 317330
acaauuauggguggcaaau

SEQ ID NO: 482532 - RNA, 19 nt, Artificial Sequence
  Description of Artificial Sequence: Synthetic oligonucleotide
  Antisense Strand to SEQ ID NO: 482531
auuugccacccauaauugu

SEQ ID NO: 482533 - RNA, 19 nt, Artificial Sequence
  Description of Artificial Sequence: Synthetic oligonucleotide
  Sense strand starting at position 1267 of SEQ ID NO: 317330
ggcuauguagggcaaauua

SEQ ID NO: 482534 - RNA, 19 nt, Artificial Sequence
  Description of Artificial Sequence: Synthetic oligonucleotide
  Antisense Strand to SEQ ID NO: 482533
uaauuugcccuacauagcc

SEQ ID NO: 482535 - RNA, 19 nt, Artificial Sequence
  Description of Artificial Sequence: Synthetic oligonucleotide
  Sense strand starting at position 1325 of SEQ ID NO: 317330
gagcuugcagucuaaccaa

SEQ ID NO: 482536 - RNA, 19 nt, Artificial Sequence
  Description of Artificial Sequence: Synthetic oligonucleotide
  Antisense Strand to SEQ ID NO: 482535
uugguuagacugcaagcuc

SEQ ID NO: 482537 - RNA, 19 nt, Artificial Sequence
  Description of Artificial Sequence: Synthetic oligonucleotide
  Sense strand starting at position 1328 of SEQ ID NO: 317330
cuugcagucuaaccaaaga

SEQ ID NO: 482538 - RNA, 19 nt, Artificial Sequence
  Description of Artificial Sequence: Synthetic oligonucleotide
  Antisense Strand to SEQ ID NO: 482537
ucuuugguuagacugcaag

SEQ ID NO: 482539 - RNA, 19 nt, Artificial Sequence
  Description of Artificial Sequence: Synthetic oligonucleotide
  Sense strand starting at position 1418 of SEQ ID NO: 317330
agcugaucacuagguaaag

SEQ ID NO: 482540 - RNA, 19 nt, Artificial Sequence
  Description of Artificial Sequence: Synthetic oligonucleotide
  Antisense Strand to SEQ ID NO: 482539
cuuuaccuagugaucagcu

SEQ ID NO: 482541 - RNA, 19 nt, Artificial Sequence
  Description of Artificial Sequence: Synthetic oligonucleotide
  Sense strand starting at position 1470 of SEQ ID NO: 317330
gggacaagauguguccaca

SEQ ID NO: 482542 - RNA, 19 nt, Artificial Sequence
  Description of Artificial Sequence: Synthetic oligonucleotide
  Antisense Strand to SEQ ID NO: 482541
uguggacacaucuuguccc

SEQ ID NO: 482543 - RNA, 19 nt, Artificial Sequence
  Description of Artificial Sequence: Synthetic oligonucleotide
  Sense strand starting at position 1528 of SEQ ID NO: 317330
gcuggccugguagagaaau

SEQ ID NO: 482544 - RNA, 19 nt, Artificial Sequence
  Description of Artificial Sequence: Synthetic oligonucleotide
  Antisense Strand to SEQ ID NO: 482543
auuucucuaccaggccagc

SEQ ID NO: 482545 - RNA, 19 nt, Artificial Sequence
  Description of Artificial Sequence: Synthetic oligonucleotide
  Sense strand starting at position 2000 of SEQ ID NO: 317330
auguacagauggucuuuau

SEQ ID NO: 482546 - RNA, 19 nt, Artificial Sequence
  Description of Artificial Sequence: Synthetic oligonucleotide
  Antisense Strand to SEQ ID NO: 482545
auaaagaccaucuguacau

SEQ ID NO: 482547 - RNA, 19 nt, Artificial Sequence
  Description of Artificial Sequence: Synthetic oligonucleotide
  Sense strand starting at position 2003 of SEQ ID NO: 317330
uacagauggucuuuauaag

SEQ ID NO: 482548 - RNA, 19 nt, Artificial Sequence
  Description of Artificial Sequence: Synthetic oligonucleotide
  Antisense Strand to SEQ ID NO: 482547
cuuauaaagaccaucugua

SEQ ID NO: 482549 - RNA, 19 nt, Artificial Sequence
  Description of Artificial Sequence: Synthetic oligonucleotide
  Sense strand starting at position 2132 of SEQ ID NO: 317330
cugcuaugagaaugacuga

SEQ ID NO: 482550 - RNA, 19 nt, Artificial Sequence
  Description of Artificial Sequence: Synthetic oligonucleotide
  Antisense Strand to SEQ ID NO: 482549
ucagucauucucauagcag

SEQ ID NO: 482551 - RNA, 19 nt, Artificial Sequence
  Description of Artificial Sequence: Synthetic oligonucleotide
  Sense strand starting at position 2155 of SEQ ID NO: 317330
auuaauugugaagagcuuu

SEQ ID NO: 482552 - RNA, 19 nt, Artificial Sequence
  Description of Artificial Sequence: Synthetic oligonucleotide
  Antisense Strand to SEQ ID NO: 482551
aaagcucuucacaauuaau

SEQ ID NO: 482553 - RNA, 19 nt, Artificial Sequence
  Description of Artificial Sequence: Synthetic oligonucleotide
  Sense strand starting at position 2186 of SEQ ID NO: 317330
guaagaacacuaugugagu

SEQ ID NO: 482554 - RNA, 19 nt, Artificial Sequence
  Description of Artificial Sequence: Synthetic oligonucleotide
  Antisense Strand to SEQ ID NO: 482553
acucacauaguguucuuac

SEQ ID NO: 482555 - RNA, 19 nt, Artificial Sequence
  Description of Artificial Sequence: Synthetic oligonucleotide
  Sense strand starting at position 2187 of SEQ ID NO: 317330
uaagaacacuaugugagua

SEQ ID NO: 482556 - RNA, 19 nt, Artificial Sequence
  Description of Artificial Sequence: Synthetic oligonucleotide
  Antisense Strand to SEQ ID NO: 482555
uacucacauaguguucuua

SEQ ID NO: 482557 - RNA, 19 nt, Artificial Sequence
  Description of Artificial Sequence: Synthetic oligonucleotide
  Sense strand starting at position 2210 of SEQ ID NO: 317330
gcccauuuaucguuauuag

SEQ ID NO: 482558 - RNA, 19 nt, Artificial Sequence
  Description of Artificial Sequence: Synthetic oligonucleotide
  Antisense Strand to SEQ ID NO: 482557
cuaauaacgauaaaugggc

SEQ ID NO: 482559 - RNA, 19 nt, Artificial Sequence
  Description of Artificial Sequence: Synthetic oligonucleotide
  Sense strand starting at position 2213 of SEQ ID NO: 317330
cauuuaucguuauuagugu

SEQ ID NO: 482560 - RNA, 19 nt, Artificial Sequence
  Description of Artificial Sequence: Synthetic oligonucleotide
  Antisense Strand to SEQ ID NO: 482559
acacuaauaacgauaaaug

SEQ ID NO: 482561 - RNA, 19 nt, Artificial Sequence
  Description of Artificial Sequence: Synthetic oligonucleotide
  Sense strand starting at position 2310 of SEQ ID NO: 317330
acgaaauguuugucaucaa

SEQ ID NO: 482562 - RNA, 19 nt, Artificial Sequence
  Description of Artificial Sequence: Synthetic oligonucleotide
  Antisense Strand to SEQ ID NO: 482561
uugaugacaaacauuucgu

SEQ ID NO: 482563 - RNA, 19 nt, Artificial Sequence
  Description of Artificial Sequence: Synthetic oligonucleotide
  Sense strand starting at position 2317 of SEQ ID NO: 317330
guuugucaucaagauaaug

SEQ ID NO: 482564 - RNA, 19 nt, Artificial Sequence
  Description of Artificial Sequence: Synthetic oligonucleotide
  Antisense Strand to SEQ ID NO: 482563
cauuaucuugaugacaaac

SEQ ID NO: 482565 - RNA, 19 nt, Artificial Sequence
  Description of Artificial Sequence: Synthetic oligonucleotide
  Sense strand starting at position 2463 of SEQ ID NO: 317330
acaucugcucauggagaua

SEQ ID NO: 482566 - RNA, 19 nt, Artificial Sequence
  Description of Artificial Sequence: Synthetic oligonucleotide
  Antisense Strand to SEQ ID NO: 482565
uaucuccaugagcagaugu

SEQ ID NO: 482567 - RNA, 19 nt, Artificial Sequence
  Description of Artificial Sequence: Synthetic oligonucleotide
  Sense strand starting at position 2937 of SEQ ID NO: 317330
gcacccauuccagagaauc

SEQ ID NO: 482568 - RNA, 19 nt, Artificial Sequence
  Description of Artificial Sequence: Synthetic oligonucleotide
  Antisense Strand to SEQ ID NO: 482567
gauucucuggaaugggugc

SEQ ID NO: 482569 - RNA, 19 nt, Artificial Sequence
  Description of Artificial Sequence: Synthetic oligonucleotide
  Sense strand starting at position 2965 of SEQ ID NO: 317330
cccaauucugguugagauc

SEQ ID NO: 482570 - RNA, 19 nt, Artificial Sequence
  Description of Artificial Sequence: Synthetic oligonucleotide
  Antisense Strand to SEQ ID NO: 482569
gaucucaaccagaauuggg

SEQ ID NO: 482571 - RNA, 19 nt, Artificial Sequence
  Description of Artificial Sequence: Synthetic oligonucleotide
  Sense strand starting at position 2966 of SEQ ID NO: 317330
ccaauucugguugagaucu

SEQ ID NO: 482572 - RNA, 19 nt, Artificial Sequence
  Description of Artificial Sequence: Synthetic oligonucleotide
  Antisense Strand to SEQ ID NO: 482571
agaucucaaccagaauugg

SEQ ID NO: 482573 - RNA, 19 nt, Artificial Sequence
  Description of Artificial Sequence: Synthetic oligonucleotide
  Sense strand starting at position 3203 of SEQ ID NO: 317330
ggguaagaguucuuggcaa

SEQ ID NO: 482574 - RNA, 19 nt, Artificial Sequence
  Description of Artificial Sequence: Synthetic oligonucleotide
  Antisense Strand to SEQ ID NO: 482573
uugccaagaacucuuaccc

SEQ ID NO: 482575 - RNA, 19 nt, Artificial Sequence
  Description of Artificial Sequence: Synthetic oligonucleotide
  Sense strand starting at position 3440 of SEQ ID NO: 317330
uggugugggccaggaagau

SEQ ID NO: 482576 - RNA, 19 nt, Artificial Sequence
  Description of Artificial Sequence: Synthetic oligonucleotide
  Antisense Strand to SEQ ID NO: 482575
aucuuccuggcccacacca

SEQ ID NO: 482577 - RNA, 19 nt, Artificial Sequence
  Description of Artificial Sequence: Synthetic oligonucleotide
  Sense strand starting at position 3441 of SEQ ID NO: 317330
ggugugggccaggaagaua

SEQ ID NO: 482578 - RNA, 19 nt, Artificial Sequence
  Description of Artificial Sequence: Synthetic oligonucleotide
  Antisense Strand to SEQ ID NO: 482577
uaucuuccuggcccacacc

SEQ ID NO: 482579 - RNA, 19 nt, Artificial Sequence
  Description of Artificial Sequence: Synthetic oligonucleotide
  Sense strand starting at position 3722 of SEQ ID NO: 317330
uuuccucugcaugagacaa

SEQ ID NO: 482580 - RNA, 19 nt, Artificial Sequence
  Description of Artificial Sequence: Synthetic oligonucleotide
  Antisense Strand to SEQ ID NO: 482579
uugucucaugcagaggaaa

SEQ ID NO: 482581 - RNA, 19 nt, Artificial Sequence
  Description of Artificial Sequence: Synthetic oligonucleotide
  Sense strand starting at position 3883 of SEQ ID NO: 317330
ugucuuuaccauuagagug

SEQ ID NO: 482582 - RNA, 19 nt, Artificial Sequence
  Description of Artificial Sequence: Synthetic oligonucleotide
  Antisense Strand to SEQ ID NO: 482581
cacucuaaugguaaagaca

SEQ ID NO: 482583 - RNA, 19 nt, Artificial Sequence
  Description of Artificial Sequence: Synthetic oligonucleotide
  Sense strand starting at position 3912 of SEQ ID NO: 317330
auauaaguugugcaaucau

SEQ ID NO: 482584 - RNA, 19 nt, Artificial Sequence
  Description of Artificial Sequence: Synthetic oligonucleotide
  Antisense Strand to SEQ ID NO: 482583
augauugcacaacuuauau

SEQ ID NO: 482585 - RNA, 19 nt, Artificial Sequence
  Description of Artificial Sequence: Synthetic oligonucleotide
  Sense strand starting at position 250 of SEQ ID NO: 317331
ggcuuauaaggaggacauu

SEQ ID NO: 482586 - RNA, 19 nt, Artificial Sequence
  Description of Artificial Sequence: Synthetic oligonucleotide
  Antisense Strand to SEQ ID NO: 482585
aauguccuccuuauaagcc

SEQ ID NO: 482587 - RNA, 19 nt, Artificial Sequence
  Description of Artificial Sequence: Synthetic oligonucleotide
  Sense strand starting at position 270 of SEQ ID NO: 317331
uguggaaauuaauugguua

SEQ ID NO: 482588 - RNA, 19 nt, Artificial Sequence
  Description of Artificial Sequence: Synthetic oligonucleotide
  Antisense Strand to SEQ ID NO: 482587
uaaccaauuaauuuccaca

SEQ ID NO: 482589 - RNA, 19 nt, Artificial Sequence
  Description of Artificial Sequence: Synthetic oligonucleotide
  Sense strand starting at position 271 of SEQ ID NO: 317331
guggaaauuaauugguuau

SEQ ID NO: 482590 - RNA, 19 nt, Artificial Sequence
  Description of Artificial Sequence: Synthetic oligonucleotide
  Antisense Strand to SEQ ID NO: 482589
auaaccaauuaauuuccac

SEQ ID NO: 482591 - RNA, 19 nt, Artificial Sequence
  Description of Artificial Sequence: Synthetic oligonucleotide
  Sense strand starting at position 351 of SEQ ID NO: 317331
ugcuuuguaccagacauua

SEQ ID NO: 482592 - RNA, 19 nt, Artificial Sequence
  Description of Artificial Sequence: Synthetic oligonucleotide
  Antisense Strand to SEQ ID NO: 482591
uaaugucugguacaaagca

SEQ ID NO: 482593 - RNA, 19 nt, Artificial Sequence
  Description of Artificial Sequence: Synthetic oligonucleotide
  Sense strand starting at position 567 of SEQ ID NO: 317331
gccgaauccagugacacua

SEQ ID NO: 482594 - RNA, 19 nt, Artificial Sequence
  Description of Artificial Sequence: Synthetic oligonucleotide
  Antisense Strand to SEQ ID NO: 482593
uagugucacuggauucggc

SEQ ID NO: 482595 - RNA, 19 nt, Artificial Sequence
  Description of Artificial Sequence: Synthetic oligonucleotide
  Sense strand starting at position 840 of SEQ ID NO: 317331
uggaaugccacacguugaa

SEQ ID NO: 482596 - RNA, 19 nt, Artificial Sequence
  Description of Artificial Sequence: Synthetic oligonucleotide
  Antisense Strand to SEQ ID NO: 482595
uucaacguguggcauucca

SEQ ID NO: 482597 - RNA, 19 nt, Artificial Sequence
  Description of Artificial Sequence: Synthetic oligonucleotide
  Sense strand starting at position 1086 of SEQ ID NO: 317331
cccgaaauggguugcaaau

SEQ ID NO: 482598 - RNA, 19 nt, Artificial Sequence
  Description of Artificial Sequence: Synthetic oligonucleotide
  Antisense Strand to SEQ ID NO: 482597
auuugcaacccauuucggg

SEQ ID NO: 482599 - RNA, 19 nt, Artificial Sequence
  Description of Artificial Sequence: Synthetic oligonucleotide
  Sense strand starting at position 1092 of SEQ ID NO: 317331
auggguugcaaaugaauga

SEQ ID NO: 482600 - RNA, 19 nt, Artificial Sequence
  Description of Artificial Sequence: Synthetic oligonucleotide
  Antisense Strand to SEQ ID NO: 482599
ucauucauuugcaacccau

SEQ ID NO: 482601 - RNA, 19 nt, Artificial Sequence
  Description of Artificial Sequence: Synthetic oligonucleotide
  Sense strand starting at position 1096 of SEQ ID NO: 317331
guugcaaaugaaugagaug

SEQ ID NO: 482602 - RNA, 19 nt, Artificial Sequence
  Description of Artificial Sequence: Synthetic oligonucleotide
  Antisense Strand to SEQ ID NO: 482601
caucucauucauuugcaac

SEQ ID NO: 482603 - RNA, 19 nt, Artificial Sequence
  Description of Artificial Sequence: Synthetic oligonucleotide
  Sense strand starting at position 2002 of SEQ ID NO: 317331
cugggaaaguucuuugggu

SEQ ID NO: 482604 - RNA, 19 nt, Artificial Sequence
  Description of Artificial Sequence: Synthetic oligonucleotide
  Antisense Strand to SEQ ID NO: 482603
acccaaagaacuuucccag

SEQ ID NO: 482605 - RNA, 19 nt, Artificial Sequence
  Description of Artificial Sequence: Synthetic oligonucleotide
  Sense strand starting at position 2135 of SEQ ID NO: 317331
guugauucagaggguuuau

SEQ ID NO: 482606 - RNA, 19 nt, Artificial Sequence
  Description of Artificial Sequence: Synthetic oligonucleotide
  Antisense Strand to SEQ ID NO: 482605
auaaacccucugaaucaac

SEQ ID NO: 482607 - RNA, 19 nt, Artificial Sequence
  Description of Artificial Sequence: Synthetic oligonucleotide
  Sense strand starting at position 2217 of SEQ ID NO: 317331
guuagucaucaguccgcau

SEQ ID NO: 482608 - RNA, 19 nt, Artificial Sequence
  Description of Artificial Sequence: Synthetic oligonucleotide
  Antisense Strand to SEQ ID NO: 482607
augcggacugaugacuaac

SEQ ID NO: 482609 - RNA, 19 nt, Artificial Sequence
  Description of Artificial Sequence: Synthetic oligonucleotide
  Sense strand starting at position 2235 of SEQ ID NO: 317331
ugguaugagcuggaagguu

SEQ ID NO: 482610 - RNA, 19 nt, Artificial Sequence
  Description of Artificial Sequence: Synthetic oligonucleotide
  Antisense Strand to SEQ ID NO: 482609
aaccuuccagcucauacca

SEQ ID NO: 482611 - RNA, 19 nt, Artificial Sequence
  Description of Artificial Sequence: Synthetic oligonucleotide
  Sense strand starting at position 2358 of SEQ ID NO: 317331
uaaacaguguaaguaguua

SEQ ID NO: 482612 - RNA, 19 nt, Artificial Sequence
  Description of Artificial Sequence: Synthetic oligonucleotide
  Antisense Strand to SEQ ID NO: 482611
uaacuacuuacacuguuua

SEQ ID NO: 482613 - RNA, 19 nt, Artificial Sequence
  Description of Artificial Sequence: Synthetic oligonucleotide
  Sense strand starting at position 2366 of SEQ ID NO: 317331
guaaguaguuauuugcuua

SEQ ID NO: 482614 - RNA, 19 nt, Artificial Sequence
  Description of Artificial Sequence: Synthetic oligonucleotide
  Antisense Strand to SEQ ID NO: 482613
uaagcaaauaacuacuuac

SEQ ID NO: 482615 - RNA, 19 nt, Artificial Sequence
  Description of Artificial Sequence: Synthetic oligonucleotide
  Sense strand starting at position 2369 of SEQ ID NO: 317331
aguaguuauuugcuuaacu

SEQ ID NO: 482616 - RNA, 19 nt, Artificial Sequence
  Description of Artificial Sequence: Synthetic oligonucleotide
  Antisense Strand to SEQ ID NO: 482615
aguuaagcaaauaacuacu

SEQ ID NO: 482617 - RNA, 19 nt, Artificial Sequence
  Description of Artificial Sequence: Synthetic oligonucleotide
  Sense strand starting at position 2370 of SEQ ID NO: 317331
guaguuauuugcuuaacug

SEQ ID NO: 482618 - RNA, 19 nt, Artificial Sequence
  Description of Artificial Sequence: Synthetic oligonucleotide
  Antisense Strand to SEQ ID NO: 482617
caguuaagcaaauaacuac

SEQ ID NO: 482619 - RNA, 19 nt, Artificial Sequence
  Description of Artificial Sequence: Synthetic oligonucleotide
  Sense strand starting at position 2426 of SEQ ID NO: 317331
agccgugugguuucuucga

SEQ ID NO: 482620 - RNA, 19 nt, Artificial Sequence
  Description of Artificial Sequence: Synthetic oligonucleotide
  Antisense Strand to SEQ ID NO: 482619
ucgaagaaaccacacggcu

SEQ ID NO: 482621 - RNA, 19 nt, Artificial Sequence
  Description of Artificial Sequence: Synthetic oligonucleotide
  Sense strand starting at position 2586 of SEQ ID NO: 317331
gaccaauccgagggaaugu

SEQ ID NO: 482622 - RNA, 19 nt, Artificial Sequence
  Description of Artificial Sequence: Synthetic oligonucleotide
  Antisense Strand to SEQ ID NO: 482621
acauucccucggauugguc

SEQ ID NO: 482623 - RNA, 19 nt, Artificial Sequence
  Description of Artificial Sequence: Synthetic oligonucleotide
  Sense strand starting at position 2595 of SEQ ID NO: 317331
gagggaauguggcuaaauc

SEQ ID NO: 482624 - RNA, 19 nt, Artificial Sequence
  Description of Artificial Sequence: Synthetic oligonucleotide
  Antisense Strand to SEQ ID NO: 482623
gauuuagccacauucccuc

SEQ ID NO: 482625 - RNA, 19 nt, Artificial Sequence
  Description of Artificial Sequence: Synthetic oligonucleotide
  Sense strand starting at position 2605 of SEQ ID NO: 317331
ggcuaaaucuuucuugaca

SEQ ID NO: 482626 - RNA, 19 nt, Artificial Sequence
  Description of Artificial Sequence: Synthetic oligonucleotide
  Antisense Strand to SEQ ID NO: 482625
ugucaagaaagauuuagcc

SEQ ID NO: 482627 - RNA, 19 nt, Artificial Sequence
  Description of Artificial Sequence: Synthetic oligonucleotide
  Sense strand starting at position 2634 of SEQ ID NO: 317331
auuaaugucuccuucugga

SEQ ID NO: 482628 - RNA, 19 nt, Artificial Sequence
  Description of Artificial Sequence: Synthetic oligonucleotide
  Antisense Strand to SEQ ID NO: 482627
uccagaaggagacauuaau

SEQ ID NO: 482629 - RNA, 19 nt, Artificial Sequence
  Description of Artificial Sequence: Synthetic oligonucleotide
  Sense strand starting at position 2649 of SEQ ID NO: 317331
uggacaagauaauuauguu

SEQ ID NO: 482630 - RNA, 19 nt, Artificial Sequence
  Description of Artificial Sequence: Synthetic oligonucleotide
  Antisense Strand to SEQ ID NO: 482629
aacauaauuaucuugucca

SEQ ID NO: 482631 - RNA, 19 nt, Artificial Sequence
  Description of Artificial Sequence: Synthetic oligonucleotide
  Sense strand starting at position 2668 of SEQ ID NO: 317331
uaggauuugcgcugguuua

SEQ ID NO: 482632 - RNA, 19 nt, Artificial Sequence
  Description of Artificial Sequence: Synthetic oligonucleotide
  Antisense Strand to SEQ ID NO: 482631
uaaaccagcgcaaauccua

SEQ ID NO: 482633 - RNA, 19 nt, Artificial Sequence
  Description of Artificial Sequence: Synthetic oligonucleotide
  Sense strand starting at position 2669 of SEQ ID NO: 317331
aggauuugcgcugguuuau

SEQ ID NO: 482634 - RNA, 19 nt, Artificial Sequence
  Description of Artificial Sequence: Synthetic oligonucleotide
  Antisense Strand to SEQ ID NO: 482633
auaaaccagcgcaaauccu

SEQ ID NO: 482635 - RNA, 19 nt, Artificial Sequence
  Description of Artificial Sequence: Synthetic oligonucleotide
  Sense strand starting at position 2721 of SEQ ID NO: 317331
gggaaucuuuggguuucua

SEQ ID NO: 482636 - RNA, 19 nt, Artificial Sequence
  Description of Artificial Sequence: Synthetic oligonucleotide
  Antisense Strand to SEQ ID NO: 482635
uagaaacccaaagauuccc

SEQ ID NO: 482637 - RNA, 19 nt, Artificial Sequence
  Description of Artificial Sequence: Synthetic oligonucleotide
  Sense strand starting at position 2731 of SEQ ID NO: 317331
ggguuucuagugcagauau

SEQ ID NO: 482638 - RNA, 19 nt, Artificial Sequence
  Description of Artificial Sequence: Synthetic oligonucleotide
  Antisense Strand to SEQ ID NO: 482637
auaucugcacuagaaaccc

SEQ ID NO: 482639 - RNA, 19 nt, Artificial Sequence
  Description of Artificial Sequence: Synthetic oligonucleotide
  Sense strand starting at position 2733 of SEQ ID NO: 317331
guuucuagugcagauauca

SEQ ID NO: 482640 - RNA, 19 nt, Artificial Sequence
  Description of Artificial Sequence: Synthetic oligonucleotide
  Antisense Strand to SEQ ID NO: 482639
ugauaucugcacuagaaac

SEQ ID NO: 482641 - RNA, 19 nt, Artificial Sequence
  Description of Artificial Sequence: Synthetic oligonucleotide
  Sense strand starting at position 2744 of SEQ ID NO: 317331
agauaucaugugggucaac

SEQ ID NO: 482642 - RNA, 19 nt, Artificial Sequence
  Description of Artificial Sequence: Synthetic oligonucleotide
  Antisense Strand to SEQ ID NO: 482641
guugacccacaugauaucu

SEQ ID NO: 482643 - RNA, 19 nt, Artificial Sequence
  Description of Artificial Sequence: Synthetic oligonucleotide
  Sense strand starting at position 2745 of SEQ ID NO: 317331
gauaucaugugggucaaca

SEQ ID NO: 482644 - RNA, 19 nt, Artificial Sequence
  Description of Artificial Sequence: Synthetic oligonucleotide
  Antisense Strand to SEQ ID NO: 482643
uguugacccacaugauauc

SEQ ID NO: 482645 - RNA, 19 nt, Artificial Sequence
  Description of Artificial Sequence: Synthetic oligonucleotide
  Sense strand starting at position 2763 of SEQ ID NO: 317331
agucauuuguggcuauuaa

SEQ ID NO: 482646 - RNA, 19 nt, Artificial Sequence
  Description of Artificial Sequence: Synthetic oligonucleotide
  Antisense Strand to SEQ ID NO: 482645
uuaauagccacaaaugacu

SEQ ID NO: 482647 - RNA, 19 nt, Artificial Sequence
  Description of Artificial Sequence: Synthetic oligonucleotide
  Sense strand starting at position 2773 of SEQ ID NO: 317331
ggcuauuaaagaugauggu

SEQ ID NO: 482648 - RNA, 19 nt, Artificial Sequence
  Description of Artificial Sequence: Synthetic oligonucleotide
  Antisense Strand to SEQ ID NO: 482647
accaucaucuuuaauagcc

SEQ ID NO: 482649 - RNA, 19 nt, Artificial Sequence
  Description of Artificial Sequence: Synthetic oligonucleotide
  Sense strand starting at position 2837 of SEQ ID NO: 317331
ucaagaugucgucacagua

SEQ ID NO: 482650 - RNA, 19 nt, Artificial Sequence
  Description of Artificial Sequence: Synthetic oligonucleotide
  Antisense Strand to SEQ ID NO: 482649
uacugugacgacaucuuga

SEQ ID NO: 482651 - RNA, 19 nt, Artificial Sequence
  Description of Artificial Sequence: Synthetic oligonucleotide
  Sense strand starting at position 3023 of SEQ ID NO: 317331
aaucuaauaguccgaguaa

SEQ ID NO: 482652 - RNA, 19 nt, Artificial Sequence
  Description of Artificial Sequence: Synthetic oligonucleotide
  Antisense Strand to SEQ ID NO: 482651
uuacucggacuauuagauu

SEQ ID NO: 482653 - RNA, 19 nt, Artificial Sequence
  Description of Artificial Sequence: Synthetic oligonucleotide
  Sense strand starting at position 3034 of SEQ ID NO: 317331
ccgaguaauaaaugggcaa

SEQ ID NO: 482654 - RNA, 19 nt, Artificial Sequence
  Description of Artificial Sequence: Synthetic oligonucleotide
  Antisense Strand to SEQ ID NO: 482653
uugcccauuuauuacucgg

SEQ ID NO: 482655 - RNA, 19 nt, Artificial Sequence
  Description of Artificial Sequence: Synthetic oligonucleotide
  Sense strand starting at position 3035 of SEQ ID NO: 317331
cgaguaauaaaugggcaaa

SEQ ID NO: 482656 - RNA, 19 nt, Artificial Sequence
  Description of Artificial Sequence: Synthetic oligonucleotide
  Antisense Strand to SEQ ID NO: 482655
uuugcccauuuauuacucg

SEQ ID NO: 482657 - RNA, 19 nt, Artificial Sequence
  Description of Artificial Sequence: Synthetic oligonucleotide
  Sense strand starting at position 3236 of SEQ ID NO: 317331
agagauaccguaugaccua

SEQ ID NO: 482658 - RNA, 19 nt, Artificial Sequence
  Description of Artificial Sequence: Synthetic oligonucleotide
  Antisense Strand to SEQ ID NO: 482657
uaggucauacgguaucucu

SEQ ID NO: 482659 - RNA, 19 nt, Artificial Sequence
  Description of Artificial Sequence: Synthetic oligonucleotide
  Sense strand starting at position 3392 of SEQ ID NO: 317331
auggauaaaucguuacaua

SEQ ID NO: 482660 - RNA, 19 nt, Artificial Sequence
  Description of Artificial Sequence: Synthetic oligonucleotide
  Antisense Strand to SEQ ID NO: 482659
uauguaacgauuuauccau

SEQ ID NO: 482661 - RNA, 19 nt, Artificial Sequence
  Description of Artificial Sequence: Synthetic oligonucleotide
  Sense strand starting at position 3393 of SEQ ID NO: 317331
uggauaaaucguuacauau

SEQ ID NO: 482662 - RNA, 19 nt, Artificial Sequence
  Description of Artificial Sequence: Synthetic oligonucleotide
  Antisense Strand to SEQ ID NO: 482661
auauguaacgauuuaucca

SEQ ID NO: 482663 - RNA, 19 nt, Artificial Sequence
  Description of Artificial Sequence: Synthetic oligonucleotide
  Sense strand starting at position 3778 of SEQ ID NO: 317331
aauguuugagaugguagau

SEQ ID NO: 482664 - RNA, 19 nt, Artificial Sequence
  Description of Artificial Sequence: Synthetic oligonucleotide
  Antisense Strand to SEQ ID NO: 482663
aucuaccaucucaaacauu

SEQ ID NO: 482665 - RNA, 19 nt, Artificial Sequence
  Description of Artificial Sequence: Synthetic oligonucleotide
  Sense strand starting at position 44 of SEQ ID NO: 317332
gguggcaucugaguucaca

SEQ ID NO: 482666 - RNA, 19 nt, Artificial Sequence
  Description of Artificial Sequence: Synthetic oligonucleotide
  Antisense Strand to SEQ ID NO: 482665
ugugaacucagaugccacc

SEQ ID NO: 482667 - RNA, 19 nt, Artificial Sequence
  Description of Artificial Sequence: Synthetic oligonucleotide
  Sense strand starting at position 64 of SEQ ID NO: 317332
ccaagauccuggcugaguu

SEQ ID NO: 482668 - RNA, 19 nt, Artificial Sequence
  Description of Artificial Sequence: Synthetic oligonucleotide
  Antisense Strand to SEQ ID NO: 482667
aacucagccaggaucuugg

SEQ ID NO: 482669 - RNA, 19 nt, Artificial Sequence
  Description of Artificial Sequence: Synthetic oligonucleotide
  Sense strand starting at position 65 of SEQ ID NO: 317332
caagauccuggcugaguuu

SEQ ID NO: 482670 - RNA, 19 nt, Artificial Sequence
  Description of Artificial Sequence: Synthetic oligonucleotide
  Antisense Strand to SEQ ID NO: 482669
aaacucagccaggaucuug

SEQ ID NO: 482671 - RNA, 19 nt, Artificial Sequence
  Description of Artificial Sequence: Synthetic oligonucleotide
  Sense strand starting at position 723 of SEQ ID NO: 317332
ggagcuuguccaggcucau

SEQ ID NO: 482672 - RNA, 19 nt, Artificial Sequence
  Description of Artificial Sequence: Synthetic oligonucleotide
  Antisense Strand to SEQ ID NO: 482671
augagccuggacaagcucc

SEQ ID NO: 482673 - RNA, 19 nt, Artificial Sequence
  Description of Artificial Sequence: Synthetic oligonucleotide
  Sense strand starting at position 772 of SEQ ID NO: 317332
aggcuugcuucggcaagga

SEQ ID NO: 482674 - RNA, 19 nt, Artificial Sequence
  Description of Artificial Sequence: Synthetic oligonucleotide
  Antisense Strand to SEQ ID NO: 482673
uccuugccgaagcaagccu

SEQ ID NO: 482675 - RNA, 19 nt, Artificial Sequence
  Description of Artificial Sequence: Synthetic oligonucleotide
  Sense strand starting at position 938 of SEQ ID NO: 317332
agccaauucgaaggacuua

SEQ ID NO: 482676 - RNA, 19 nt, Artificial Sequence
  Description of Artificial Sequence: Synthetic oligonucleotide
  Antisense Strand to SEQ ID NO: 482675
uaaguccuucgaauuggcu

SEQ ID NO: 482677 - RNA, 19 nt, Artificial Sequence
  Description of Artificial Sequence: Synthetic oligonucleotide
  Sense strand starting at position 943 of SEQ ID NO: 317332
auucgaaggacuuaagugu

SEQ ID NO: 482678 - RNA, 19 nt, Artificial Sequence
  Description of Artificial Sequence: Synthetic oligonucleotide
  Antisense Strand to SEQ ID NO: 482677
acacuuaaguccuucgaau

SEQ ID NO: 482679 - RNA, 19 nt, Artificial Sequence
  Description of Artificial Sequence: Synthetic oligonucleotide
  Sense strand starting at position 993 of SEQ ID NO: 317332
agugucaacagaugagcaa

SEQ ID NO: 482680 - RNA, 19 nt, Artificial Sequence
  Description of Artificial Sequence: Synthetic oligonucleotide
  Antisense Strand to SEQ ID NO: 482679
uugcucaucuguugacacu

SEQ ID NO: 482681 - RNA, 19 nt, Artificial Sequence
  Description of Artificial Sequence: Synthetic oligonucleotide
  Sense strand starting at position 994 of SEQ ID NO: 317332
gugucaacagaugagcaaa

SEQ ID NO: 482682 - RNA, 19 nt, Artificial Sequence
  Description of Artificial Sequence: Synthetic oligonucleotide
  Antisense Strand to SEQ ID NO: 482681
uuugcucaucuguugacac

SEQ ID NO: 482683 - RNA, 19 nt, Artificial Sequence
  Description of Artificial Sequence: Synthetic oligonucleotide
  Sense strand starting at position 1218 of SEQ ID NO: 317332
uucccuguugcccaugaga

SEQ ID NO: 482684 - RNA, 19 nt, Artificial Sequence
  Description of Artificial Sequence: Synthetic oligonucleotide
  Antisense Strand to SEQ ID NO: 482683
ucucaugggcaacagggaa

SEQ ID NO: 482685 - RNA, 19 nt, Artificial Sequence
  Description of Artificial Sequence: Synthetic oligonucleotide
  Sense strand starting at position 1220 of SEQ ID NO: 317332
cccuguugcccaugagagu

SEQ ID NO: 482686 - RNA, 19 nt, Artificial Sequence
  Description of Artificial Sequence: Synthetic oligonucleotide
  Antisense Strand to SEQ ID NO: 482685
acucucaugggcaacaggg

SEQ ID NO: 482687 - RNA, 19 nt, Artificial Sequence
  Description of Artificial Sequence: Synthetic oligonucleotide
  Sense strand starting at position 2212 of SEQ ID NO: 317332
uuaguucucgcccgugagu

SEQ ID NO: 482688 - RNA, 19 nt, Artificial Sequence
  Description of Artificial Sequence: Synthetic oligonucleotide
  Antisense Strand to SEQ ID NO: 482687
acucacgggcgagaacuaa

SEQ ID NO: 482689 - RNA, 19 nt, Artificial Sequence
  Description of Artificial Sequence: Synthetic oligonucleotide
  Sense strand starting at position 2214 of SEQ ID NO: 317332
aguucucgcccgugaguga

SEQ ID NO: 482690 - RNA, 19 nt, Artificial Sequence
  Description of Artificial Sequence: Synthetic oligonucleotide
  Antisense Strand to SEQ ID NO: 482689
ucacucacgggcgagaacu

SEQ ID NO: 482691 - RNA, 19 nt, Artificial Sequence
  Description of Artificial Sequence: Synthetic oligonucleotide
  Sense strand starting at position 2427 of SEQ ID NO: 317332
caggaaaccuugucuuugu

SEQ ID NO: 482692 - RNA, 19 nt, Artificial Sequence
  Description of Artificial Sequence: Synthetic oligonucleotide
  Antisense Strand to SEQ ID NO: 482691
acaaagacaagguuuccug

SEQ ID NO: 482693 - RNA, 19 nt, Artificial Sequence
  Description of Artificial Sequence: Synthetic oligonucleotide
  Sense strand starting at position 2428 of SEQ ID NO: 317332
aggaaaccuugucuuuguu

SEQ ID NO: 482694 - RNA, 19 nt, Artificial Sequence
  Description of Artificial Sequence: Synthetic oligonucleotide
  Antisense Strand to SEQ ID NO: 482693
aacaaagacaagguuuccu

SEQ ID NO: 482695 - RNA, 19 nt, Artificial Sequence
  Description of Artificial Sequence: Synthetic oligonucleotide
  Sense strand starting at position 2436 of SEQ ID NO: 317332
uugucuuuguuuccaaaug

SEQ ID NO: 482696 - RNA, 19 nt, Artificial Sequence
  Description of Artificial Sequence: Synthetic oligonucleotide
  Antisense Strand to SEQ ID NO: 482695
cauuuggaaacaaagacaa

SEQ ID NO: 482697 - RNA, 19 nt, Artificial Sequence
  Description of Artificial Sequence: Synthetic oligonucleotide
  Sense strand starting at position 2437 of SEQ ID NO: 317332
ugucuuuguuuccaaaugu

SEQ ID NO: 482698 - RNA, 19 nt, Artificial Sequence
  Description of Artificial Sequence: Synthetic oligonucleotide
  Antisense Strand to SEQ ID NO: 482697
acauuuggaaacaaagaca

SEQ ID NO: 482699 - RNA, 19 nt, Artificial Sequence
  Description of Artificial Sequence: Synthetic oligonucleotide
  Sense strand starting at position 2448 of SEQ ID NO: 317332
ccaaauguccuccagggua

SEQ ID NO: 482700 - RNA, 19 nt, Artificial Sequence
  Description of Artificial Sequence: Synthetic oligonucleotide
  Antisense Strand to SEQ ID NO: 482699
uacccuggaggacauuugg

SEQ ID NO: 482701 - RNA, 19 nt, Artificial Sequence
  Description of Artificial Sequence: Synthetic oligonucleotide
  Sense strand starting at position 2631 of SEQ ID NO: 317332
cccagaugccuugguguaa

SEQ ID NO: 482702 - RNA, 19 nt, Artificial Sequence
  Description of Artificial Sequence: Synthetic oligonucleotide
  Antisense Strand to SEQ ID NO: 482701
uuacaccaaggcaucuggg

SEQ ID NO: 482703 - RNA, 19 nt, Artificial Sequence
  Description of Artificial Sequence: Synthetic oligonucleotide
  Sense strand starting at position 2883 of SEQ ID NO: 317332
ccaggaagcugugaguaga

SEQ ID NO: 482704 - RNA, 19 nt, Artificial Sequence
  Description of Artificial Sequence: Synthetic oligonucleotide
  Antisense Strand to SEQ ID NO: 482703
ucuacucacagcuuccugg

SEQ ID NO: 482705 - RNA, 19 nt, Artificial Sequence
  Description of Artificial Sequence: Synthetic oligonucleotide
  Sense strand starting at position 2908 of SEQ ID NO: 317332
acaggaucuugcugggaac

SEQ ID NO: 482706 - RNA, 19 nt, Artificial Sequence
  Description of Artificial Sequence: Synthetic oligonucleotide
  Antisense Strand to SEQ ID NO: 482705
guucccagcaagauccugu

SEQ ID NO: 482707 - RNA, 19 nt, Artificial Sequence
  Description of Artificial Sequence: Synthetic oligonucleotide
  Sense strand starting at position 3034 of SEQ ID NO: 317332
ugaauuggcugcuccaaau

SEQ ID NO: 482708 - RNA, 19 nt, Artificial Sequence
  Description of Artificial Sequence: Synthetic oligonucleotide
  Antisense Strand to SEQ ID NO: 482707
auuuggagcagccaauuca

SEQ ID NO: 482709 - RNA, 19 nt, Artificial Sequence
  Description of Artificial Sequence: Synthetic oligonucleotide
  Sense strand starting at position 3110 of SEQ ID NO: 317332
gguccuacagguugaaaua

SEQ ID NO: 482710 - RNA, 19 nt, Artificial Sequence
  Description of Artificial Sequence: Synthetic oligonucleotide
  Antisense Strand to SEQ ID NO: 482709
uauuucaaccuguaggacc

SEQ ID NO: 482711 - RNA, 19 nt, Artificial Sequence
  Description of Artificial Sequence: Synthetic oligonucleotide
  Sense strand starting at position 3162 of SEQ ID NO: 317332
gcggguucucaggguugca

SEQ ID NO: 482712 - RNA, 19 nt, Artificial Sequence
  Description of Artificial Sequence: Synthetic oligonucleotide
  Antisense Strand to SEQ ID NO: 482711
ugcaacccugagaacccgc

SEQ ID NO: 482713 - RNA, 19 nt, Artificial Sequence
  Description of Artificial Sequence: Synthetic oligonucleotide
  Sense strand starting at position 3218 of SEQ ID NO: 317332
cccagagcugcccaauaau

SEQ ID NO: 482714 - RNA, 19 nt, Artificial Sequence
  Description of Artificial Sequence: Synthetic oligonucleotide
  Antisense Strand to SEQ ID NO: 482713
auuauugggcagcucuggg

SEQ ID NO: 482715 - RNA, 19 nt, Artificial Sequence
  Description of Artificial Sequence: Synthetic oligonucleotide
  Sense strand starting at position 3257 of SEQ ID NO: 317332
gggaucccuggcugcaaua

SEQ ID NO: 482716 - RNA, 19 nt, Artificial Sequence
  Description of Artificial Sequence: Synthetic oligonucleotide
  Antisense Strand to SEQ ID NO: 482715
uauugcagccagggauccc

SEQ ID NO: 482717 - RNA, 19 nt, Artificial Sequence
  Description of Artificial Sequence: Synthetic oligonucleotide
  Sense strand starting at position 3962 of SEQ ID NO: 317332
ggcugcgucacuccuguaa

SEQ ID NO: 482718 - RNA, 19 nt, Artificial Sequence
  Description of Artificial Sequence: Synthetic oligonucleotide
  Antisense Strand to SEQ ID NO: 482717
uuacaggagugacgcagcc

SEQ ID NO: 482719 - RNA, 19 nt, Artificial Sequence
  Description of Artificial Sequence: Synthetic oligonucleotide
  Sense strand starting at position 3964 of SEQ ID NO: 317332
cugcgucacuccuguaaga

SEQ ID NO: 482720 - RNA, 19 nt, Artificial Sequence
  Description of Artificial Sequence: Synthetic oligonucleotide
  Antisense Strand to SEQ ID NO: 482719
ucuuacaggagugacgcag

SEQ ID NO: 482721 - RNA, 19 nt, Artificial Sequence
  Description of Artificial Sequence: Synthetic oligonucleotide
  Sense strand starting at position 3966 of SEQ ID NO: 317332
gcgucacuccuguaagagg

SEQ ID NO: 482722 - RNA, 19 nt, Artificial Sequence
  Description of Artificial Sequence: Synthetic oligonucleotide
  Antisense Strand to SEQ ID NO: 482721
ccucuuacaggagugacgc

SEQ ID NO: 482723 - RNA, 19 nt, Artificial Sequence
  Description of Artificial Sequence: Synthetic oligonucleotide
  Sense strand starting at position 145 of SEQ ID NO: 317333
gaucauccuggcuguggua

SEQ ID NO: 482724 - RNA, 19 nt, Artificial Sequence
  Description of Artificial Sequence: Synthetic oligonucleotide
  Antisense Strand to SEQ ID NO: 482723
uaccacagccaggaugauc

SEQ ID NO: 482725 - RNA, 19 nt, Artificial Sequence
  Description of Artificial Sequence: Synthetic oligonucleotide
  Sense strand starting at position 191 of SEQ ID NO: 317333
gggucaaggacuuacuguu

SEQ ID NO: 482726 - RNA, 19 nt, Artificial Sequence
  Description of Artificial Sequence: Synthetic oligonucleotide
  Antisense Strand to SEQ ID NO: 482725
aacaguaaguccuugaccc

SEQ ID NO: 482727 - RNA, 19 nt, Artificial Sequence
  Description of Artificial Sequence: Synthetic oligonucleotide
  Sense strand starting at position 199 of SEQ ID NO: 317333
gacuuacuguuagugguga

SEQ ID NO: 482728 - RNA, 19 nt, Artificial Sequence
  Description of Artificial Sequence: Synthetic oligonucleotide
  Antisense Strand to SEQ ID NO: 482727
ucaccacuaacaguaaguc

SEQ ID NO: 482729 - RNA, 19 nt, Artificial Sequence
  Description of Artificial Sequence: Synthetic oligonucleotide
  Sense strand starting at position 418 of SEQ ID NO: 317333
ucgcucucauguucucaua

SEQ ID NO: 482730 - RNA, 19 nt, Artificial Sequence
  Description of Artificial Sequence: Synthetic oligonucleotide
  Antisense Strand to SEQ ID NO: 482729
uaugagaacaugagagcga

SEQ ID NO: 482731 - RNA, 19 nt, Artificial Sequence
  Description of Artificial Sequence: Synthetic oligonucleotide
  Sense strand starting at position 420 of SEQ ID NO: 317333
gcucucauguucucauaca

SEQ ID NO: 482732 - RNA, 19 nt, Artificial Sequence
  Description of Artificial Sequence: Synthetic oligonucleotide
  Antisense Strand to SEQ ID NO: 482731
uguaugagaacaugagagc

SEQ ID NO: 482733 - RNA, 19 nt, Artificial Sequence
  Description of Artificial Sequence: Synthetic oligonucleotide
  Sense strand starting at position 480 of SEQ ID NO: 317333
ccauauguauacugauaua

SEQ ID NO: 482734 - RNA, 19 nt, Artificial Sequence
  Description of Artificial Sequence: Synthetic oligonucleotide
  Antisense Strand to SEQ ID NO: 482733
uauaucaguauacauaugg

SEQ ID NO: 482735 - RNA, 19 nt, Artificial Sequence
  Description of Artificial Sequence: Synthetic oligonucleotide
  Sense strand starting at position 591 of SEQ ID NO: 317333
ugugucuccguguccugaa

SEQ ID NO: 482736 - RNA, 19 nt, Artificial Sequence
  Description of Artificial Sequence: Synthetic oligonucleotide
  Antisense Strand to SEQ ID NO: 482735
uucaggacacggagacaca

SEQ ID NO: 482737 - RNA, 19 nt, Artificial Sequence
  Description of Artificial Sequence: Synthetic oligonucleotide
  Sense strand starting at position 866 of SEQ ID NO: 317333
ccaagucacugacgaagaa

SEQ ID NO: 482738 - RNA, 19 nt, Artificial Sequence
  Description of Artificial Sequence: Synthetic oligonucleotide
  Antisense Strand to SEQ ID NO: 482737
uucuucgucagugacuugg

SEQ ID NO: 482739 - RNA, 19 nt, Artificial Sequence
  Description of Artificial Sequence: Synthetic oligonucleotide
  Sense strand starting at position 879 of SEQ ID NO: 317333
gaagaaacuuggccaaagu

SEQ ID NO: 482740 - RNA, 19 nt, Artificial Sequence
  Description of Artificial Sequence: Synthetic oligonucleotide
  Antisense Strand to SEQ ID NO: 482739
acuuuggccaaguuucuuc

SEQ ID NO: 482741 - RNA, 19 nt, Artificial Sequence
  Description of Artificial Sequence: Synthetic oligonucleotide
  Sense strand starting at position 1365 of SEQ ID NO: 317333
guguguacuuaggacccaa

SEQ ID NO: 482742 - RNA, 19 nt, Artificial Sequence
  Description of Artificial Sequence: Synthetic oligonucleotide
  Antisense Strand to SEQ ID NO: 482741
uuggguccuaaguacacac

SEQ ID NO: 482743 - RNA, 19 nt, Artificial Sequence
  Description of Artificial Sequence: Synthetic oligonucleotide
  Sense strand starting at position 1401 of SEQ ID NO: 317333
caggcuguaucaugagaag

SEQ ID NO: 482744 - RNA, 19 nt, Artificial Sequence
  Description of Artificial Sequence: Synthetic oligonucleotide
  Antisense Strand to SEQ ID NO: 482743
cuucucaugauacagccug

SEQ ID NO: 482745 - RNA, 19 nt, Artificial Sequence
  Description of Artificial Sequence: Synthetic oligonucleotide
  Sense strand starting at position 1404 of SEQ ID NO: 317333
gcuguaucaugagaaguuc

SEQ ID NO: 482746 - RNA, 19 nt, Artificial Sequence
  Description of Artificial Sequence: Synthetic oligonucleotide
  Antisense Strand to SEQ ID NO: 482745
gaacuucucaugauacagc

SEQ ID NO: 482747 - RNA, 19 nt, Artificial Sequence
  Description of Artificial Sequence: Synthetic oligonucleotide
  Sense strand starting at position 1412 of SEQ ID NO: 317333
augagaaguucccggaccu

SEQ ID NO: 482748 - RNA, 19 nt, Artificial Sequence
  Description of Artificial Sequence: Synthetic oligonucleotide
  Antisense Strand to SEQ ID NO: 482747
agguccgggaacuucucau

SEQ ID NO: 482749 - RNA, 19 nt, Artificial Sequence
  Description of Artificial Sequence: Synthetic oligonucleotide
  Sense strand starting at position 2221 of SEQ ID NO: 317333
ucggcuucucccuagcaaa

SEQ ID NO: 482750 - RNA, 19 nt, Artificial Sequence
  Description of Artificial Sequence: Synthetic oligonucleotide
  Antisense Strand to SEQ ID NO: 482749
uuugcuagggagaagccga

SEQ ID NO: 482751 - RNA, 19 nt, Artificial Sequence
  Description of Artificial Sequence: Synthetic oligonucleotide
  Sense strand starting at position 2301 of SEQ ID NO: 317333
cagggauggugucaccuua

SEQ ID NO: 482752 - RNA, 19 nt, Artificial Sequence
  Description of Artificial Sequence: Synthetic oligonucleotide
  Antisense Strand to SEQ ID NO: 482751
uaaggugacaccaucccug

SEQ ID NO: 482753 - RNA, 19 nt, Artificial Sequence
  Description of Artificial Sequence: Synthetic oligonucleotide
  Sense strand starting at position 2541 of SEQ ID NO: 317333
gcuaacaucugguuugcua

SEQ ID NO: 482754 - RNA, 19 nt, Artificial Sequence
  Description of Artificial Sequence: Synthetic oligonucleotide
  Antisense Strand to SEQ ID NO: 482753
uagcaaaccagauguuagc

SEQ ID NO: 482755 - RNA, 19 nt, Artificial Sequence
  Description of Artificial Sequence: Synthetic oligonucleotide
  Sense strand starting at position 2543 of SEQ ID NO: 317333
uaacaucugguuugcuaga

SEQ ID NO: 482756 - RNA, 19 nt, Artificial Sequence
  Description of Artificial Sequence: Synthetic oligonucleotide
  Antisense Strand to SEQ ID NO: 482755
ucuagcaaaccagauguua

SEQ ID NO: 482757 - RNA, 19 nt, Artificial Sequence
  Description of Artificial Sequence: Synthetic oligonucleotide
  Sense strand starting at position 2544 of SEQ ID NO: 317333
aacaucugguuugcuagaa

SEQ ID NO: 482758 - RNA, 19 nt, Artificial Sequence
  Description of Artificial Sequence: Synthetic oligonucleotide
  Antisense Strand to SEQ ID NO: 482757
uucuagcaaaccagauguu

SEQ ID NO: 482759 - RNA, 19 nt, Artificial Sequence
  Description of Artificial Sequence: Synthetic oligonucleotide
  Sense strand starting at position 2545 of SEQ ID NO: 317333
acaucugguuugcuagaaa

SEQ ID NO: 482760 - RNA, 19 nt, Artificial Sequence
  Description of Artificial Sequence: Synthetic oligonucleotide
  Antisense Strand to SEQ ID NO: 482759
uuucuagcaaaccagaugu

SEQ ID NO: 482761 - RNA, 19 nt, Artificial Sequence
  Description of Artificial Sequence: Synthetic oligonucleotide
  Sense strand starting at position 2548 of SEQ ID NO: 317333
ucugguuugcuagaaagua

SEQ ID NO: 482762 - RNA, 19 nt, Artificial Sequence
  Description of Artificial Sequence: Synthetic oligonucleotide
  Antisense Strand to SEQ ID NO: 482761
uacuuucuagcaaaccaga

SEQ ID NO: 482763 - RNA, 19 nt, Artificial Sequence
  Description of Artificial Sequence: Synthetic oligonucleotide
  Sense strand starting at position 2560 of SEQ ID NO: 317333
gaaaguacauuauggcuga

SEQ ID NO: 482764 - RNA, 19 nt, Artificial Sequence
  Description of Artificial Sequence: Synthetic oligonucleotide
  Antisense Strand to SEQ ID NO: 482763
ucagccauaauguacuuuc

SEQ ID NO: 482765 - RNA, 19 nt, Artificial Sequence
  Description of Artificial Sequence: Synthetic oligonucleotide
  Sense strand starting at position 3352 of SEQ ID NO: 317333
gcaggaggguugagaucaa

SEQ ID NO: 482766 - RNA, 19 nt, Artificial Sequence
  Description of Artificial Sequence: Synthetic oligonucleotide
  Antisense Strand to SEQ ID NO: 482765
uugaucucaacccuccugc

SEQ ID NO: 482767 - RNA, 19 nt, Artificial Sequence
  Description of Artificial Sequence: Synthetic oligonucleotide
  Sense strand starting at position 3418 of SEQ ID NO: 317333
gcaggcaguucugacaguu

SEQ ID NO: 482768 - RNA, 19 nt, Artificial Sequence
  Description of Artificial Sequence: Synthetic oligonucleotide
  Antisense Strand to SEQ ID NO: 482767
aacugucagaacugccugc

SEQ ID NO: 482769 - RNA, 19 nt, Artificial Sequence
  Description of Artificial Sequence: Synthetic oligonucleotide
  Sense strand starting at position 3877 of SEQ ID NO: 317333
gguccaaugcugugaugcu

SEQ ID NO: 482770 - RNA, 19 nt, Artificial Sequence
  Description of Artificial Sequence: Synthetic oligonucleotide
  Antisense Strand to SEQ ID NO: 482769
agcaucacagcauuggacc

SEQ ID NO: 482771 - RNA, 19 nt, Artificial Sequence
  Description of Artificial Sequence: Synthetic oligonucleotide
  Sense strand starting at position 3878 of SEQ ID NO: 317333
guccaaugcugugaugcua

SEQ ID NO: 482772 - RNA, 19 nt, Artificial Sequence
  Description of Artificial Sequence: Synthetic oligonucleotide
  Antisense Strand to SEQ ID NO: 482771
uagcaucacagcauuggac

SEQ ID NO: 482773 - RNA, 19 nt, Artificial Sequence
  Description of Artificial Sequence: Synthetic oligonucleotide
  Sense strand starting at position 49 of SEQ ID NO: 317334
cucccauccuggugugacu

SEQ ID NO: 482774 - RNA, 19 nt, Artificial Sequence
  Description of Artificial Sequence: Synthetic oligonucleotide
  Antisense Strand to SEQ ID NO: 482773
agucacaccaggaugggag

SEQ ID NO: 482775 - RNA, 19 nt, Artificial Sequence
  Description of Artificial Sequence: Synthetic oligonucleotide
  Sense strand starting at position 60 of SEQ ID NO: 317334
gugugacuuucugggagau

SEQ ID NO: 482776 - RNA, 19 nt, Artificial Sequence
  Description of Artificial Sequence: Synthetic oligonucleotide
  Antisense Strand to SEQ ID NO: 482775
aucucccagaaagucacac

SEQ ID NO: 482777 - RNA, 19 nt, Artificial Sequence
  Description of Artificial Sequence: Synthetic oligonucleotide
  Sense strand starting at position 61 of SEQ ID NO: 317334
ugugacuuucugggagauc

SEQ ID NO: 482778 - RNA, 19 nt, Artificial Sequence
  Description of Artificial Sequence: Synthetic oligonucleotide
  Antisense Strand to SEQ ID NO: 482777
gaucucccagaaagucaca

SEQ ID NO: 482779 - RNA, 19 nt, Artificial Sequence
  Description of Artificial Sequence: Synthetic oligonucleotide
  Sense strand starting at position 340 of SEQ ID NO: 317334
agcugcucuccuugagaua

SEQ ID NO: 482780 - RNA, 19 nt, Artificial Sequence
  Description of Artificial Sequence: Synthetic oligonucleotide
  Antisense Strand to SEQ ID NO: 482779
uaucucaaggagagcagcu

SEQ ID NO: 482781 - RNA, 19 nt, Artificial Sequence
  Description of Artificial Sequence: Synthetic oligonucleotide
  Sense strand starting at position 341 of SEQ ID NO: 317334
gcugcucuccuugagauac

SEQ ID NO: 482782 - RNA, 19 nt, Artificial Sequence
  Description of Artificial Sequence: Synthetic oligonucleotide
  Antisense Strand to SEQ ID NO: 482781
guaucucaaggagagcagc

SEQ ID NO: 482783 - RNA, 19 nt, Artificial Sequence
  Description of Artificial Sequence: Synthetic oligonucleotide
  Sense strand starting at position 352 of SEQ ID NO: 317334
ugagauacaccaugcuguu

SEQ ID NO: 482784 - RNA, 19 nt, Artificial Sequence
  Description of Artificial Sequence: Synthetic oligonucleotide
  Antisense Strand to SEQ ID NO: 482783
aacagcaugguguaucuca

SEQ ID NO: 482785 - RNA, 19 nt, Artificial Sequence
  Description of Artificial Sequence: Synthetic oligonucleotide
  Sense strand starting at position 379 of SEQ ID NO: 317334
ccuccucugccugaaauga

SEQ ID NO: 482786 - RNA, 19 nt, Artificial Sequence
  Description of Artificial Sequence: Synthetic oligonucleotide
  Antisense Strand to SEQ ID NO: 482785
ucauuucaggcagaggagg

SEQ ID NO: 482787 - RNA, 19 nt, Artificial Sequence
  Description of Artificial Sequence: Synthetic oligonucleotide
  Sense strand starting at position 512 of SEQ ID NO: 317334
ucuugucccagugaacagu

SEQ ID NO: 482788 - RNA, 19 nt, Artificial Sequence
  Description of Artificial Sequence: Synthetic oligonucleotide
  Antisense Strand to SEQ ID NO: 482787
acuguucacugggacaaga

SEQ ID NO: 482789 - RNA, 19 nt, Artificial Sequence
  Description of Artificial Sequence: Synthetic oligonucleotide
  Sense strand starting at position 630 of SEQ ID NO: 317334
uggccaguguccuguuaag

SEQ ID NO: 482790 - RNA, 19 nt, Artificial Sequence
  Description of Artificial Sequence: Synthetic oligonucleotide
  Antisense Strand to SEQ ID NO: 482789
cuuaacaggacacuggcca

SEQ ID NO: 482791 - RNA, 19 nt, Artificial Sequence
  Description of Artificial Sequence: Synthetic oligonucleotide
  Sense strand starting at position 641 of SEQ ID NO: 317334
cuguuaagcccuuagugga

SEQ ID NO: 482792 - RNA, 19 nt, Artificial Sequence
  Description of Artificial Sequence: Synthetic oligonucleotide
  Antisense Strand to SEQ ID NO: 482791
uccacuaagggcuuaacag

SEQ ID NO: 482793 - RNA, 19 nt, Artificial Sequence
  Description of Artificial Sequence: Synthetic oligonucleotide
  Sense strand starting at position 887 of SEQ ID NO: 317334
ugcaguggucuaugaucgu

SEQ ID NO: 482794 - RNA, 19 nt, Artificial Sequence
  Description of Artificial Sequence: Synthetic oligonucleotide
  Antisense Strand to SEQ ID NO: 482793
acgaucauagaccacugca

SEQ ID NO: 482795 - RNA, 19 nt, Artificial Sequence
  Description of Artificial Sequence: Synthetic oligonucleotide
  Sense strand starting at position 891 of SEQ ID NO: 317334
guggucuaugaucguacca

SEQ ID NO: 482796 - RNA, 19 nt, Artificial Sequence
  Description of Artificial Sequence: Synthetic oligonucleotide
  Antisense Strand to SEQ ID NO: 482795
ugguacgaucauagaccac

SEQ ID NO: 482797 - RNA, 19 nt, Artificial Sequence
  Description of Artificial Sequence: Synthetic oligonucleotide
  Sense strand starting at position 893 of SEQ ID NO: 317334
ggucuaugaucguaccacu

SEQ ID NO: 482798 - RNA, 19 nt, Artificial Sequence
  Description of Artificial Sequence: Synthetic oligonucleotide
  Antisense Strand to SEQ ID NO: 482797
agugguacgaucauagacc

SEQ ID NO: 482799 - RNA, 19 nt, Artificial Sequence
  Description of Artificial Sequence: Synthetic oligonucleotide
  Sense strand starting at position 1463 of SEQ ID NO: 317334
ggccaagguuuggaacaaa

SEQ ID NO: 482800 - RNA, 19 nt, Artificial Sequence
  Description of Artificial Sequence: Synthetic oligonucleotide
  Antisense Strand to SEQ ID NO: 482799
uuuguuccaaaccuuggcc

SEQ ID NO: 482801 - RNA, 19 nt, Artificial Sequence
  Description of Artificial Sequence: Synthetic oligonucleotide
  Sense strand starting at position 2184 of SEQ ID NO: 317334
ucaagaagccuucgaugca

SEQ ID NO: 482802 - RNA, 19 nt, Artificial Sequence
  Description of Artificial Sequence: Synthetic oligonucleotide
  Antisense Strand to SEQ ID NO: 482801
ugcaucgaaggcuucuuga

SEQ ID NO: 482803 - RNA, 19 nt, Artificial Sequence
  Description of Artificial Sequence: Synthetic oligonucleotide
  Sense strand starting at position 2185 of SEQ ID NO: 317334
caagaagccuucgaugcaa

SEQ ID NO: 482804 - RNA, 19 nt, Artificial Sequence
  Description of Artificial Sequence: Synthetic oligonucleotide
  Antisense Strand to SEQ ID NO: 482803
uugcaucgaaggcuucuug

SEQ ID NO: 482805 - RNA, 19 nt, Artificial Sequence
  Description of Artificial Sequence: Synthetic oligonucleotide
  Sense strand starting at position 2243 of SEQ ID NO: 317334
cacacagcuugguuggaaa

SEQ ID NO: 482806 - RNA, 19 nt, Artificial Sequence
  Description of Artificial Sequence: Synthetic oligonucleotide
  Antisense Strand to SEQ ID NO: 482805
uuuccaaccaagcugugug

SEQ ID NO: 482807 - RNA, 19 nt, Artificial Sequence
  Description of Artificial Sequence: Synthetic oligonucleotide
  Sense strand starting at position 2967 of SEQ ID NO: 317334
aucacugcucagugcuaaa

SEQ ID NO: 482808 - RNA, 19 nt, Artificial Sequence
  Description of Artificial Sequence: Synthetic oligonucleotide
  Antisense Strand to SEQ ID NO: 482807
uuuagcacugagcagugau

SEQ ID NO: 482809 - RNA, 19 nt, Artificial Sequence
  Description of Artificial Sequence: Synthetic oligonucleotide
  Sense strand starting at position 3167 of SEQ ID NO: 317334
gccaucaagaguuggcuca

SEQ ID NO: 482810 - RNA, 19 nt, Artificial Sequence
  Description of Artificial Sequence: Synthetic oligonucleotide
  Antisense Strand to SEQ ID NO: 482809
ugagccaacucuugauggc

SEQ ID NO: 482811 - RNA, 19 nt, Artificial Sequence
  Description of Artificial Sequence: Synthetic oligonucleotide
  Sense strand starting at position 3168 of SEQ ID NO: 317334
ccaucaagaguuggcucaa

SEQ ID NO: 482812 - RNA, 19 nt, Artificial Sequence
  Description of Artificial Sequence: Synthetic oligonucleotide
  Antisense Strand to SEQ ID NO: 482811
uugagccaacucuugaugg

SEQ ID NO: 482813 - RNA, 19 nt, Artificial Sequence
  Description of Artificial Sequence: Synthetic oligonucleotide
  Sense strand starting at position 3169 of SEQ ID NO: 317334
caucaagaguuggcucaaa

SEQ ID NO: 482814 - RNA, 19 nt, Artificial Sequence
  Description of Artificial Sequence: Synthetic oligonucleotide
  Antisense Strand to SEQ ID NO: 482813
uuugagccaacucuugaug

SEQ ID NO: 482815 - RNA, 19 nt, Artificial Sequence
  Description of Artificial Sequence: Synthetic oligonucleotide
  Sense strand starting at position 3230 of SEQ ID NO: 317334
gggaacucauucuaugaga

SEQ ID NO: 482816 - RNA, 19 nt, Artificial Sequence
  Description of Artificial Sequence: Synthetic oligonucleotide
  Antisense Strand to SEQ ID NO: 482815
ucucauagaaugaguuccc

SEQ ID NO: 482817 - RNA, 19 nt, Artificial Sequence
  Description of Artificial Sequence: Synthetic oligonucleotide
  Sense strand starting at position 3238 of SEQ ID NO: 317334
auucuaugagagcagcauu

SEQ ID NO: 482818 - RNA, 19 nt, Artificial Sequence
  Description of Artificial Sequence: Synthetic oligonucleotide
  Antisense Strand to SEQ ID NO: 482817
aaugcugcucucauagaau

SEQ ID NO: 482819 - RNA, 19 nt, Artificial Sequence
  Description of Artificial Sequence: Synthetic oligonucleotide
  Sense strand starting at position 3241 of SEQ ID NO: 317334
cuaugagagcagcauuauc

SEQ ID NO: 482820 - RNA, 19 nt, Artificial Sequence
  Description of Artificial Sequence: Synthetic oligonucleotide
  Antisense Strand to SEQ ID NO: 482819
gauaaugcugcucucauag

SEQ ID NO: 482821 - RNA, 19 nt, Artificial Sequence
  Description of Artificial Sequence: Synthetic oligonucleotide
  Sense strand starting at position 3246 of SEQ ID NO: 317334
agagcagcauuaucccaau

SEQ ID NO: 482822 - RNA, 19 nt, Artificial Sequence
  Description of Artificial Sequence: Synthetic oligonucleotide
  Antisense Strand to SEQ ID NO: 482821
auugggauaaugcugcucu

SEQ ID NO: 482823 - RNA, 19 nt, Artificial Sequence
  Description of Artificial Sequence: Synthetic oligonucleotide
  Sense strand starting at position 3302 of SEQ ID NO: 317334
accaauaucccuuaugggu

SEQ ID NO: 482824 - RNA, 19 nt, Artificial Sequence
  Description of Artificial Sequence: Synthetic oligonucleotide
  Antisense Strand to SEQ ID NO: 482823
acccauaagggauauuggu

SEQ ID NO: 482825 - RNA, 19 nt, Artificial Sequence
  Description of Artificial Sequence: Synthetic oligonucleotide
  Sense strand starting at position 3307 of SEQ ID NO: 317334
uaucccuuauggguauaga

SEQ ID NO: 482826 - RNA, 19 nt, Artificial Sequence
  Description of Artificial Sequence: Synthetic oligonucleotide
  Antisense Strand to SEQ ID NO: 482825
ucuauacccauaagggaua

SEQ ID NO: 482827 - RNA, 19 nt, Artificial Sequence
  Description of Artificial Sequence: Synthetic oligonucleotide
  Sense strand starting at position 3391 of SEQ ID NO: 317334
aagaccaugugggauuuau

SEQ ID NO: 482828 - RNA, 19 nt, Artificial Sequence
  Description of Artificial Sequence: Synthetic oligonucleotide
  Antisense Strand to SEQ ID NO: 482827
auaaaucccacauggucuu

SEQ ID NO: 482829 - RNA, 19 nt, Artificial Sequence
  Description of Artificial Sequence: Synthetic oligonucleotide
  Sense strand starting at position 3504 of SEQ ID NO: 317334
agaacaaguguuugacaaa

SEQ ID NO: 482830 - RNA, 19 nt, Artificial Sequence
  Description of Artificial Sequence: Synthetic oligonucleotide
  Antisense Strand to SEQ ID NO: 482829
uuugucaaacacuuguucu

SEQ ID NO: 482831 - RNA, 19 nt, Artificial Sequence
  Description of Artificial Sequence: Synthetic oligonucleotide
  Sense strand starting at position 3533 of SEQ ID NO: 317334
ccuccaugauaagaagagu

SEQ ID NO: 482832 - RNA, 19 nt, Artificial Sequence
  Description of Artificial Sequence: Synthetic oligonucleotide
  Antisense Strand to SEQ ID NO: 482831
acucuucuuaucauggagg

SEQ ID NO: 482833 - RNA, 19 nt, Artificial Sequence
  Description of Artificial Sequence: Synthetic oligonucleotide
  Sense strand starting at position 3588 of SEQ ID NO: 317334
gauaaaggguucuaugaaa

SEQ ID NO: 482834 - RNA, 19 nt, Artificial Sequence
  Description of Artificial Sequence: Synthetic oligonucleotide
  Antisense Strand to SEQ ID NO: 482833
uuucauagaacccuuuauc

SEQ ID NO: 482835 - RNA, 19 nt, Artificial Sequence
  Description of Artificial Sequence: Synthetic oligonucleotide
  Sense strand starting at position 3673 of SEQ ID NO: 317334
aaggaugucugcucuacuu

SEQ ID NO: 482836 - RNA, 19 nt, Artificial Sequence
  Description of Artificial Sequence: Synthetic oligonucleotide
  Antisense Strand to SEQ ID NO: 482835
aaguagagcagacauccuu

SEQ ID NO: 482837 - RNA, 19 nt, Artificial Sequence
  Description of Artificial Sequence: Synthetic oligonucleotide
  Sense strand starting at position 3675 of SEQ ID NO: 317334
ggaugucugcucuacuucu

SEQ ID NO: 482838 - RNA, 19 nt, Artificial Sequence
  Description of Artificial Sequence: Synthetic oligonucleotide
  Antisense Strand to SEQ ID NO: 482837
agaaguagagcagacaucc

SEQ ID NO: 482839 - RNA, 19 nt, Artificial Sequence
  Description of Artificial Sequence: Synthetic oligonucleotide
  Sense strand starting at position 3706 of SEQ ID NO: 317334
acuggagauucucaccaga

SEQ ID NO: 482840 - RNA, 19 nt, Artificial Sequence
  Description of Artificial Sequence: Synthetic oligonucleotide
  Antisense Strand to SEQ ID NO: 482839
ucuggugagaaucuccagu

SEQ ID NO: 482841 - RNA, 19 nt, Artificial Sequence
  Description of Artificial Sequence: Synthetic oligonucleotide
  Sense strand starting at position 3708 of SEQ ID NO: 317334
uggagauucucaccagagu

SEQ ID NO: 482842 - RNA, 19 nt, Artificial Sequence
  Description of Artificial Sequence: Synthetic oligonucleotide
  Antisense Strand to SEQ ID NO: 482841
acucuggugagaaucucca

SEQ ID NO: 482843 - RNA, 19 nt, Artificial Sequence
  Description of Artificial Sequence: Synthetic oligonucleotide
  Sense strand starting at position 678 of SEQ ID NO: 317335
cucccauccuggugugacu

SEQ ID NO: 482844 - RNA, 19 nt, Artificial Sequence
  Description of Artificial Sequence: Synthetic oligonucleotide
  Antisense Strand to SEQ ID NO: 482843
agucacaccaggaugggag

SEQ ID NO: 482845 - RNA, 19 nt, Artificial Sequence
  Description of Artificial Sequence: Synthetic oligonucleotide
  Sense strand starting at position 689 of SEQ ID NO: 317335
gugugacuuucugggagau

SEQ ID NO: 482846 - RNA, 19 nt, Artificial Sequence
  Description of Artificial Sequence: Synthetic oligonucleotide
  Antisense Strand to SEQ ID NO: 482845
aucucccagaaagucacac

SEQ ID NO: 482847 - RNA, 19 nt, Artificial Sequence
  Description of Artificial Sequence: Synthetic oligonucleotide
  Sense strand starting at position 690 of SEQ ID NO: 317335
ugugacuuucugggagauc

SEQ ID NO: 482848 - RNA, 19 nt, Artificial Sequence
  Description of Artificial Sequence: Synthetic oligonucleotide
  Antisense Strand to SEQ ID NO: 482847
gaucucccagaaagucaca

SEQ ID NO: 482849 - RNA, 19 nt, Artificial Sequence
  Description of Artificial Sequence: Synthetic oligonucleotide
  Sense strand starting at position 969 of SEQ ID NO: 317335
agcugcucuccuugagaua

SEQ ID NO: 482850 - RNA, 19 nt, Artificial Sequence
  Description of Artificial Sequence: Synthetic oligonucleotide
  Antisense Strand to SEQ ID NO: 482849
uaucucaaggagagcagcu

SEQ ID NO: 482851 - RNA, 19 nt, Artificial Sequence
  Description of Artificial Sequence: Synthetic oligonucleotide
  Sense strand starting at position 970 of SEQ ID NO: 317335
gcugcucuccuugagauac

SEQ ID NO: 482852 - RNA, 19 nt, Artificial Sequence
  Description of Artificial Sequence: Synthetic oligonucleotide
  Antisense Strand to SEQ ID NO: 482851
guaucucaaggagagcagc

SEQ ID NO: 482853 - RNA, 19 nt, Artificial Sequence
  Description of Artificial Sequence: Synthetic oligonucleotide
  Sense strand starting at position 981 of SEQ ID NO: 317335
ugagauacaccaugcuguu

SEQ ID NO: 482854 - RNA, 19 nt, Artificial Sequence
  Description of Artificial Sequence: Synthetic oligonucleotide
  Antisense Strand to SEQ ID NO: 482853
aacagcaugguguaucuca

SEQ ID NO: 482855 - RNA, 19 nt, Artificial Sequence
  Description of Artificial Sequence: Synthetic oligonucleotide
  Sense strand starting at position 1008 of SEQ ID NO: 317335
ccuccucugccugaaauga

SEQ ID NO: 482856 - RNA, 19 nt, Artificial Sequence
  Description of Artificial Sequence: Synthetic oligonucleotide
  Antisense Strand to SEQ ID NO: 482855
ucauuucaggcagaggagg

SEQ ID NO: 482857 - RNA, 19 nt, Artificial Sequence
  Description of Artificial Sequence: Synthetic oligonucleotide
  Sense strand starting at position 1141 of SEQ ID NO: 317335
ucuugucccagugaacagu

SEQ ID NO: 482858 - RNA, 19 nt, Artificial Sequence
  Description of Artificial Sequence: Synthetic oligonucleotide
  Antisense Strand to SEQ ID NO: 482857
acuguucacugggacaaga

SEQ ID NO: 482859 - RNA, 19 nt, Artificial Sequence
  Description of Artificial Sequence: Synthetic oligonucleotide
  Sense strand starting at position 1259 of SEQ ID NO: 317335
uggccaguguccuguuaag

SEQ ID NO: 482860 - RNA, 19 nt, Artificial Sequence
  Description of Artificial Sequence: Synthetic oligonucleotide
  Antisense Strand to SEQ ID NO: 482859
cuuaacaggacacuggcca

SEQ ID NO: 482861 - RNA, 19 nt, Artificial Sequence
  Description of Artificial Sequence: Synthetic oligonucleotide
  Sense strand starting at position 1270 of SEQ ID NO: 317335
cuguuaagcccuuagugga

SEQ ID NO: 482862 - RNA, 19 nt, Artificial Sequence
  Description of Artificial Sequence: Synthetic oligonucleotide
  Antisense Strand to SEQ ID NO: 482861
uccacuaagggcuuaacag

SEQ ID NO: 482863 - RNA, 19 nt, Artificial Sequence
  Description of Artificial Sequence: Synthetic oligonucleotide
  Sense strand starting at position 1516 of SEQ ID NO: 317335
ugcaguggucuaugaucgu

SEQ ID NO: 482864 - RNA, 19 nt, Artificial Sequence
  Description of Artificial Sequence: Synthetic oligonucleotide
  Antisense Strand to SEQ ID NO: 482863
acgaucauagaccacugca

SEQ ID NO: 482865 - RNA, 19 nt, Artificial Sequence
  Description of Artificial Sequence: Synthetic oligonucleotide
  Sense strand starting at position 1520 of SEQ ID NO: 317335
guggucuaugaucguacca

SEQ ID NO: 482866 - RNA, 19 nt, Artificial Sequence
  Description of Artificial Sequence: Synthetic oligonucleotide
  Antisense Strand to SEQ ID NO: 482865
ugguacgaucauagaccac

SEQ ID NO: 482867 - RNA, 19 nt, Artificial Sequence
  Description of Artificial Sequence: Synthetic oligonucleotide
  Sense strand starting at position 1522 of SEQ ID NO: 317335
ggucuaugaucguaccacu

SEQ ID NO: 482868 - RNA, 19 nt, Artificial Sequence
  Description of Artificial Sequence: Synthetic oligonucleotide
  Antisense Strand to SEQ ID NO: 482867
agugguacgaucauagacc

SEQ ID NO: 482869 - RNA, 19 nt, Artificial Sequence
  Description of Artificial Sequence: Synthetic oligonucleotide
  Sense strand starting at position 2092 of SEQ ID NO: 317335
ggccaagguuuggaacaaa

SEQ ID NO: 482870 - RNA, 19 nt, Artificial Sequence
  Description of Artificial Sequence: Synthetic oligonucleotide
  Antisense Strand to SEQ ID NO: 482869
uuuguuccaaaccuuggcc

SEQ ID NO: 482871 - RNA, 19 nt, Artificial Sequence
  Description of Artificial Sequence: Synthetic oligonucleotide
  Sense strand starting at position 2813 of SEQ ID NO: 317335
ucaagaagccuucgaugca

SEQ ID NO: 482872 - RNA, 19 nt, Artificial Sequence
  Description of Artificial Sequence: Synthetic oligonucleotide
  Antisense Strand to SEQ ID NO: 482871
ugcaucgaaggcuucuuga

SEQ ID NO: 482873 - RNA, 19 nt, Artificial Sequence
  Description of Artificial Sequence: Synthetic oligonucleotide
  Sense strand starting at position 2814 of SEQ ID NO: 317335
caagaagccuucgaugcaa

SEQ ID NO: 482874 - RNA, 19 nt, Artificial Sequence
  Description of Artificial Sequence: Synthetic oligonucleotide
  Antisense Strand to SEQ ID NO: 482873
uugcaucgaaggcuucuug

SEQ ID NO: 482875 - RNA, 19 nt, Artificial Sequence
  Description of Artificial Sequence: Synthetic oligonucleotide
  Sense strand starting at position 2872 of SEQ ID NO: 317335
cacacagcuugguuggaaa

SEQ ID NO: 482876 - RNA, 19 nt, Artificial Sequence
  Description of Artificial Sequence: Synthetic oligonucleotide
  Antisense Strand to SEQ ID NO: 482875
uuuccaaccaagcugugug

SEQ ID NO: 482877 - RNA, 19 nt, Artificial Sequence
  Description of Artificial Sequence: Synthetic oligonucleotide
  Sense strand starting at position 3596 of SEQ ID NO: 317335
aucacugcucagugcuaaa

SEQ ID NO: 482878 - RNA, 19 nt, Artificial Sequence
  Description of Artificial Sequence: Synthetic oligonucleotide
  Antisense Strand to SEQ ID NO: 482877
uuuagcacugagcagugau

SEQ ID NO: 482879 - RNA, 19 nt, Artificial Sequence
  Description of Artificial Sequence: Synthetic oligonucleotide
  Sense strand starting at position 3796 of SEQ ID NO: 317335
gccaucaagaguuggcuca

SEQ ID NO: 482880 - RNA, 19 nt, Artificial Sequence
  Description of Artificial Sequence: Synthetic oligonucleotide
  Antisense Strand to SEQ ID NO: 482879
ugagccaacucuugauggc

SEQ ID NO: 482881 - RNA, 19 nt, Artificial Sequence
  Description of Artificial Sequence: Synthetic oligonucleotide
  Sense strand starting at position 3797 of SEQ ID NO: 317335
ccaucaagaguuggcucaa

SEQ ID NO: 482882 - RNA, 19 nt, Artificial Sequence
  Description of Artificial Sequence: Synthetic oligonucleotide
  Antisense Strand to SEQ ID NO: 482881
uugagccaacucuugaugg

SEQ ID NO: 482883 - RNA, 19 nt, Artificial Sequence
  Description of Artificial Sequence: Synthetic oligonucleotide
  Sense strand starting at position 3798 of SEQ ID NO: 317335
caucaagaguuggcucaaa

SEQ ID NO: 482884 - RNA, 19 nt, Artificial Sequence
  Description of Artificial Sequence: Synthetic oligonucleotide
  Antisense Strand to SEQ ID NO: 482883
uuugagccaacucuugaug

SEQ ID NO: 482885 - RNA, 19 nt, Artificial Sequence
  Description of Artificial Sequence: Synthetic oligonucleotide
  Sense strand starting at position 3859 of SEQ ID NO: 317335
gggaacucauucuaugaga

SEQ ID NO: 482886 - RNA, 19 nt, Artificial Sequence
  Description of Artificial Sequence: Synthetic oligonucleotide
  Antisense Strand to SEQ ID NO: 482885
ucucauagaaugaguuccc

SEQ ID NO: 482887 - RNA, 19 nt, Artificial Sequence
  Description of Artificial Sequence: Synthetic oligonucleotide
  Sense strand starting at position 3867 of SEQ ID NO: 317335
auucuaugagagcagcauu

SEQ ID NO: 482888 - RNA, 19 nt, Artificial Sequence
  Description of Artificial Sequence: Synthetic oligonucleotide
  Antisense Strand to SEQ ID NO: 482887
aaugcugcucucauagaau

SEQ ID NO: 482889 - RNA, 19 nt, Artificial Sequence
  Description of Artificial Sequence: Synthetic oligonucleotide
  Sense strand starting at position 3870 of SEQ ID NO: 317335
cuaugagagcagcauuauc

SEQ ID NO: 482890 - RNA, 19 nt, Artificial Sequence
  Description of Artificial Sequence: Synthetic oligonucleotide
  Antisense Strand to SEQ ID NO: 482889
gauaaugcugcucucauag

SEQ ID NO: 482891 - RNA, 19 nt, Artificial Sequence
  Description of Artificial Sequence: Synthetic oligonucleotide
  Sense strand starting at position 3875 of SEQ ID NO: 317335
agagcagcauuaucccaau

SEQ ID NO: 482892 - RNA, 19 nt, Artificial Sequence
  Description of Artificial Sequence: Synthetic oligonucleotide
  Antisense Strand to SEQ ID NO: 482891
auugggauaaugcugcucu

SEQ ID NO: 482893 - RNA, 19 nt, Artificial Sequence
  Description of Artificial Sequence: Synthetic oligonucleotide
  Sense strand starting at position 3931 of SEQ ID NO: 317335
accaauaucccuuaugggu

SEQ ID NO: 482894 - RNA, 19 nt, Artificial Sequence
  Description of Artificial Sequence: Synthetic oligonucleotide
  Antisense Strand to SEQ ID NO: 482893
acccauaagggauauuggu

SEQ ID NO: 482895 - RNA, 19 nt, Artificial Sequence
  Description of Artificial Sequence: Synthetic oligonucleotide
  Sense strand starting at position 3936 of SEQ ID NO: 317335
uaucccuuauggguauaga

SEQ ID NO: 482896 - RNA, 19 nt, Artificial Sequence
  Description of Artificial Sequence: Synthetic oligonucleotide
  Antisense Strand to SEQ ID NO: 482895
ucuauacccauaagggaua

SEQ ID NO: 482897 - RNA, 19 nt, Artificial Sequence
  Description of Artificial Sequence: Synthetic oligonucleotide
  Sense strand starting at position 374 of SEQ ID NO: 317336
uuacgaacuguuuaaugau

SEQ ID NO: 482898 - RNA, 19 nt, Artificial Sequence
  Description of Artificial Sequence: Synthetic oligonucleotide
  Antisense Strand to SEQ ID NO: 482897
aucauuaaacaguucguaa

SEQ ID NO: 482899 - RNA, 19 nt, Artificial Sequence
  Description of Artificial Sequence: Synthetic oligonucleotide
  Sense strand starting at position 387 of SEQ ID NO: 317336
aaugauuauggugguagau

SEQ ID NO: 482900 - RNA, 19 nt, Artificial Sequence
  Description of Artificial Sequence: Synthetic oligonucleotide
  Antisense Strand to SEQ ID NO: 482899
aucuaccaccauaaucauu

SEQ ID NO: 482901 - RNA, 19 nt, Artificial Sequence
  Description of Artificial Sequence: Synthetic oligonucleotide
  Sense strand starting at position 397 of SEQ ID NO: 317336
gugguagauacauaauugu

SEQ ID NO: 482902 - RNA, 19 nt, Artificial Sequence
  Description of Artificial Sequence: Synthetic oligonucleotide
  Antisense Strand to SEQ ID NO: 482901
acaauuauguaucuaccac

SEQ ID NO: 482903 - RNA, 19 nt, Artificial Sequence
  Description of Artificial Sequence: Synthetic oligonucleotide
  Sense strand starting at position 400 of SEQ ID NO: 317336
guagauacauaauuguaca

SEQ ID NO: 482904 - RNA, 19 nt, Artificial Sequence
  Description of Artificial Sequence: Synthetic oligonucleotide
  Antisense Strand to SEQ ID NO: 482903
uguacaauuauguaucuac

SEQ ID NO: 482905 - RNA, 19 nt, Artificial Sequence
  Description of Artificial Sequence: Synthetic oligonucleotide
  Sense strand starting at position 471 of SEQ ID NO: 317336
uguaaauuguaccuggaaa

SEQ ID NO: 482906 - RNA, 19 nt, Artificial Sequence
  Description of Artificial Sequence: Synthetic oligonucleotide
  Antisense Strand to SEQ ID NO: 482905
uuuccagguacaauuuaca

SEQ ID NO: 482907 - RNA, 19 nt, Artificial Sequence
  Description of Artificial Sequence: Synthetic oligonucleotide
  Sense strand starting at position 583 of SEQ ID NO: 317336
uugcuauucuaagcaauga

SEQ ID NO: 482908 - RNA, 19 nt, Artificial Sequence
  Description of Artificial Sequence: Synthetic oligonucleotide
  Antisense Strand to SEQ ID NO: 482907
ucauugcuuagaauagcaa

SEQ ID NO: 482909 - RNA, 19 nt, Artificial Sequence
  Description of Artificial Sequence: Synthetic oligonucleotide
  Sense strand starting at position 649 of SEQ ID NO: 317336
aggguuugaucucuugaaa

SEQ ID NO: 482910 - RNA, 19 nt, Artificial Sequence
  Description of Artificial Sequence: Synthetic oligonucleotide
  Antisense Strand to SEQ ID NO: 482909
uuucaagagaucaaacccu

SEQ ID NO: 482911 - RNA, 19 nt, Artificial Sequence
  Description of Artificial Sequence: Synthetic oligonucleotide
  Sense strand starting at position 752 of SEQ ID NO: 317336
ggugguagaauguggaaua

SEQ ID NO: 482912 - RNA, 19 nt, Artificial Sequence
  Description of Artificial Sequence: Synthetic oligonucleotide
  Antisense Strand to SEQ ID NO: 482911
uauuccacauucuaccacc

SEQ ID NO: 482913 - RNA, 19 nt, Artificial Sequence
  Description of Artificial Sequence: Synthetic oligonucleotide
  Sense strand starting at position 841 of SEQ ID NO: 317336
caguccugccuaugagaag

SEQ ID NO: 482914 - RNA, 19 nt, Artificial Sequence
  Description of Artificial Sequence: Synthetic oligonucleotide
  Antisense Strand to SEQ ID NO: 482913
cuucucauaggcaggacug

SEQ ID NO: 482915 - RNA, 19 nt, Artificial Sequence
  Description of Artificial Sequence: Synthetic oligonucleotide
  Sense strand starting at position 929 of SEQ ID NO: 317336
gugaaauacacucagugug

SEQ ID NO: 482916 - RNA, 19 nt, Artificial Sequence
  Description of Artificial Sequence: Synthetic oligonucleotide
  Antisense Strand to SEQ ID NO: 482915
cacacugaguguauuucac

SEQ ID NO: 482917 - RNA, 19 nt, Artificial Sequence
  Description of Artificial Sequence: Synthetic oligonucleotide
  Sense strand starting at position 1309 of SEQ ID NO: 317336
ucugucacugaugggaauu

SEQ ID NO: 482918 - RNA, 19 nt, Artificial Sequence
  Description of Artificial Sequence: Synthetic oligonucleotide
  Antisense Strand to SEQ ID NO: 482917
aauucccaucagugacaga

SEQ ID NO: 482919 - RNA, 19 nt, Artificial Sequence
  Description of Artificial Sequence: Synthetic oligonucleotide
  Sense strand starting at position 1405 of SEQ ID NO: 317336
uuaugaagcuucucugaau

SEQ ID NO: 482920 - RNA, 19 nt, Artificial Sequence
  Description of Artificial Sequence: Synthetic oligonucleotide
  Antisense Strand to SEQ ID NO: 482919
auucagagaagcuucauaa

SEQ ID NO: 482921 - RNA, 19 nt, Artificial Sequence
  Description of Artificial Sequence: Synthetic oligonucleotide
  Sense strand starting at position 1542 of SEQ ID NO: 317336
gaagaacgauguucugguu

SEQ ID NO: 482922 - RNA, 19 nt, Artificial Sequence
  Description of Artificial Sequence: Synthetic oligonucleotide
  Antisense Strand to SEQ ID NO: 482921
aaccagaacaucguucuuc

SEQ ID NO: 482923 - RNA, 19 nt, Artificial Sequence
  Description of Artificial Sequence: Synthetic oligonucleotide
  Sense strand starting at position 1567 of SEQ ID NO: 317336
guucguugcgaucuguaga

SEQ ID NO: 482924 - RNA, 19 nt, Artificial Sequence
  Description of Artificial Sequence: Synthetic oligonucleotide
  Antisense Strand to SEQ ID NO: 482923
ucuacagaucgcaacgaac

SEQ ID NO: 482925 - RNA, 19 nt, Artificial Sequence
  Description of Artificial Sequence: Synthetic oligonucleotide
  Sense strand starting at position 1572 of SEQ ID NO: 317336
uugcgaucuguagagaaag

SEQ ID NO: 482926 - RNA, 19 nt, Artificial Sequence
  Description of Artificial Sequence: Synthetic oligonucleotide
  Antisense Strand to SEQ ID NO: 482925
cuuucucuacagaucgcaa

SEQ ID NO: 482927 - RNA, 19 nt, Artificial Sequence
  Description of Artificial Sequence: Synthetic oligonucleotide
  Sense strand starting at position 1879 of SEQ ID NO: 317336
agauuuagcuaaggaaaga

SEQ ID NO: 482928 - RNA, 19 nt, Artificial Sequence
  Description of Artificial Sequence: Synthetic oligonucleotide
  Antisense Strand to SEQ ID NO: 482927
ucuuuccuuagcuaaaucu

SEQ ID NO: 482929 - RNA, 19 nt, Artificial Sequence
  Description of Artificial Sequence: Synthetic oligonucleotide
  Sense strand starting at position 1908 of SEQ ID NO: 317336
acugcaaagccacagauua

SEQ ID NO: 482930 - RNA, 19 nt, Artificial Sequence
  Description of Artificial Sequence: Synthetic oligonucleotide
  Antisense Strand to SEQ ID NO: 482929
uaaucuguggcuuugcagu

SEQ ID NO: 482931 - RNA, 19 nt, Artificial Sequence
  Description of Artificial Sequence: Synthetic oligonucleotide
  Sense strand starting at position 1949 of SEQ ID NO: 317336
augaaucaugguuggcaga

SEQ ID NO: 482932 - RNA, 19 nt, Artificial Sequence
  Description of Artificial Sequence: Synthetic oligonucleotide
  Antisense Strand to SEQ ID NO: 482931
ucugccaaccaugauucau

SEQ ID NO: 482933 - RNA, 19 nt, Artificial Sequence
  Description of Artificial Sequence: Synthetic oligonucleotide
  Sense strand starting at position 1950 of SEQ ID NO: 317336
ugaaucaugguuggcagaa

SEQ ID NO: 482934 - RNA, 19 nt, Artificial Sequence
  Description of Artificial Sequence: Synthetic oligonucleotide
  Antisense Strand to SEQ ID NO: 482933
uucugccaaccaugauuca

SEQ ID NO: 482935 - RNA, 19 nt, Artificial Sequence
  Description of Artificial Sequence: Synthetic oligonucleotide
  Sense strand starting at position 1951 of SEQ ID NO: 317336
gaaucaugguuggcagaag

SEQ ID NO: 482936 - RNA, 19 nt, Artificial Sequence
  Description of Artificial Sequence: Synthetic oligonucleotide
  Antisense Strand to SEQ ID NO: 482935
cuucugccaaccaugauuc

SEQ ID NO: 482937 - RNA, 19 nt, Artificial Sequence
  Description of Artificial Sequence: Synthetic oligonucleotide
  Sense strand starting at position 2092 of SEQ ID NO: 317336
auguuucuccaguaauuag

SEQ ID NO: 482938 - RNA, 19 nt, Artificial Sequence
  Description of Artificial Sequence: Synthetic oligonucleotide
  Antisense Strand to SEQ ID NO: 482937
cuaauuacuggagaaacau

SEQ ID NO: 482939 - RNA, 19 nt, Artificial Sequence
  Description of Artificial Sequence: Synthetic oligonucleotide
  Sense strand starting at position 2161 of SEQ ID NO: 317336
gggaacucucauggguaga

SEQ ID NO: 482940 - RNA, 19 nt, Artificial Sequence
  Description of Artificial Sequence: Synthetic oligonucleotide
  Antisense Strand to SEQ ID NO: 482939
ucuacccaugagaguuccc

SEQ ID NO: 482941 - RNA, 19 nt, Artificial Sequence
  Description of Artificial Sequence: Synthetic oligonucleotide
  Sense strand starting at position 2303 of SEQ ID NO: 317336
agcacagaugcuugaacuu

SEQ ID NO: 482942 - RNA, 19 nt, Artificial Sequence
  Description of Artificial Sequence: Synthetic oligonucleotide
  Antisense Strand to SEQ ID NO: 482941
aaguucaagcaucugugcu

SEQ ID NO: 482943 - RNA, 19 nt, Artificial Sequence
  Description of Artificial Sequence: Synthetic oligonucleotide
  Sense strand starting at position 2336 of SEQ ID NO: 317336
ucuagacugcuguaacaug

SEQ ID NO: 482944 - RNA, 19 nt, Artificial Sequence
  Description of Artificial Sequence: Synthetic oligonucleotide
  Antisense Strand to SEQ ID NO: 482943
cauguuacagcagucuaga

SEQ ID NO: 482945 - RNA, 19 nt, Artificial Sequence
  Description of Artificial Sequence: Synthetic oligonucleotide
  Sense strand starting at position 2773 of SEQ ID NO: 317336
aguuaaacguauguaacaa

SEQ ID NO: 482946 - RNA, 19 nt, Artificial Sequence
  Description of Artificial Sequence: Synthetic oligonucleotide
  Antisense Strand to SEQ ID NO: 482945
uuguuacauacguuuaacu

SEQ ID NO: 482947 - RNA, 19 nt, Artificial Sequence
  Description of Artificial Sequence: Synthetic oligonucleotide
  Sense strand starting at position 2791 of SEQ ID NO: 317336
auucuuucugaaugaguuc

SEQ ID NO: 482948 - RNA, 19 nt, Artificial Sequence
  Description of Artificial Sequence: Synthetic oligonucleotide
  Antisense Strand to SEQ ID NO: 482947
gaacucauucagaaagaau

SEQ ID NO: 482949 - RNA, 19 nt, Artificial Sequence
  Description of Artificial Sequence: Synthetic oligonucleotide
  Sense strand starting at position 2836 of SEQ ID NO: 317336
gccaaagaguuaguacuca

SEQ ID NO: 482950 - RNA, 19 nt, Artificial Sequence
  Description of Artificial Sequence: Synthetic oligonucleotide
  Antisense Strand to SEQ ID NO: 482949
ugaguacuaacucuuuggc

SEQ ID NO: 482951 - RNA, 19 nt, Artificial Sequence
  Description of Artificial Sequence: Synthetic oligonucleotide
  Sense strand starting at position 2840 of SEQ ID NO: 317336
aagaguuaguacucaugaa

SEQ ID NO: 482952 - RNA, 19 nt, Artificial Sequence
  Description of Artificial Sequence: Synthetic oligonucleotide
  Antisense Strand to SEQ ID NO: 482951
uucaugaguacuaacucuu

SEQ ID NO: 482953 - RNA, 19 nt, Artificial Sequence
  Description of Artificial Sequence: Synthetic oligonucleotide
  Sense strand starting at position 2948 of SEQ ID NO: 317336
gcacauuucugguuccaau

SEQ ID NO: 482954 - RNA, 19 nt, Artificial Sequence
  Description of Artificial Sequence: Synthetic oligonucleotide
  Antisense Strand to SEQ ID NO: 482953
auuggaaccagaaaugugc

SEQ ID NO: 482955 - RNA, 19 nt, Artificial Sequence
  Description of Artificial Sequence: Synthetic oligonucleotide
  Sense strand starting at position 2970 of SEQ ID NO: 317336
ucuacacugugacuuagua

SEQ ID NO: 482956 - RNA, 19 nt, Artificial Sequence
  Description of Artificial Sequence: Synthetic oligonucleotide
  Antisense Strand to SEQ ID NO: 482955
uacuaagucacaguguaga

SEQ ID NO: 482957 - RNA, 19 nt, Artificial Sequence
  Description of Artificial Sequence: Synthetic oligonucleotide
  Sense strand starting at position 3174 of SEQ ID NO: 317336
gaaguauaaugucucaaag

SEQ ID NO: 482958 - RNA, 19 nt, Artificial Sequence
  Description of Artificial Sequence: Synthetic oligonucleotide
  Antisense Strand to SEQ ID NO: 482957
cuuugagacauuauacuuc

SEQ ID NO: 482959 - RNA, 19 nt, Artificial Sequence
  Description of Artificial Sequence: Synthetic oligonucleotide
  Sense strand starting at position 3302 of SEQ ID NO: 317336
cugugauccuaguuacaua

SEQ ID NO: 482960 - RNA, 19 nt, Artificial Sequence
  Description of Artificial Sequence: Synthetic oligonucleotide
  Antisense Strand to SEQ ID NO: 482959
uauguaacuaggaucacag

SEQ ID NO: 482961 - RNA, 19 nt, Artificial Sequence
  Description of Artificial Sequence: Synthetic oligonucleotide
  Sense strand starting at position 3322 of SEQ ID NO: 317336
uuuacuuaggcauguaaua

SEQ ID NO: 482962 - RNA, 19 nt, Artificial Sequence
  Description of Artificial Sequence: Synthetic oligonucleotide
  Antisense Strand to SEQ ID NO: 482961
uauuacaugccuaaguaaa

SEQ ID NO: 482963 - RNA, 19 nt, Artificial Sequence
  Description of Artificial Sequence: Synthetic oligonucleotide
  Sense strand starting at position 3397 of SEQ ID NO: 317336
agagucacgaugcauguaa

SEQ ID NO: 482964 - RNA, 19 nt, Artificial Sequence
  Description of Artificial Sequence: Synthetic oligonucleotide
  Antisense Strand to SEQ ID NO: 482963
uuacaugcaucgugacucu

SEQ ID NO: 482965 - RNA, 19 nt, Artificial Sequence
  Description of Artificial Sequence: Synthetic oligonucleotide
  Sense strand starting at position 3719 of SEQ ID NO: 317336
uuacauuccuguguaaaua

SEQ ID NO: 482966 - RNA, 19 nt, Artificial Sequence
  Description of Artificial Sequence: Synthetic oligonucleotide
  Antisense Strand to SEQ ID NO: 482965
uauuuacacaggaauguaa

SEQ ID NO: 482967 - RNA, 19 nt, Artificial Sequence
  Description of Artificial Sequence: Synthetic oligonucleotide
  Sense strand starting at position 3737 of SEQ ID NO: 317336
auagauacgcaguacuuau

SEQ ID NO: 482968 - RNA, 19 nt, Artificial Sequence
  Description of Artificial Sequence: Synthetic oligonucleotide
  Antisense Strand to SEQ ID NO: 482967
auaaguacugcguaucuau

SEQ ID NO: 482969 - RNA, 19 nt, Artificial Sequence
  Description of Artificial Sequence: Synthetic oligonucleotide
  Sense strand starting at position 3782 of SEQ ID NO: 317336
aguugauaauuugagggua

SEQ ID NO: 482970 - RNA, 19 nt, Artificial Sequence
  Description of Artificial Sequence: Synthetic oligonucleotide
  Antisense Strand to SEQ ID NO: 482969
uacccucaaauuaucaacu

SEQ ID NO: 482971 - RNA, 19 nt, Artificial Sequence
  Description of Artificial Sequence: Synthetic oligonucleotide
  Sense strand starting at position 3784 of SEQ ID NO: 317336
uugauaauuugaggguaag

SEQ ID NO: 482972 - RNA, 19 nt, Artificial Sequence
  Description of Artificial Sequence: Synthetic oligonucleotide
  Antisense Strand to SEQ ID NO: 482971
cuuacccucaaauuaucaa

SEQ ID NO: 482973 - RNA, 19 nt, Artificial Sequence
  Description of Artificial Sequence: Synthetic oligonucleotide
  Sense strand starting at position 3801 of SEQ ID NO: 317336
aggguaaauuauccauuac

SEQ ID NO: 482974 - RNA, 19 nt, Artificial Sequence
  Description of Artificial Sequence: Synthetic oligonucleotide
  Antisense Strand to SEQ ID NO: 482973
guaauggauaauuuacccu

SEQ ID NO: 482975 - RNA, 19 nt, Artificial Sequence
  Description of Artificial Sequence: Synthetic oligonucleotide
  Sense strand starting at position 3983 of SEQ ID NO: 317336
cguaucugugugucuuaua

SEQ ID NO: 482976 - RNA, 19 nt, Artificial Sequence
  Description of Artificial Sequence: Synthetic oligonucleotide
  Antisense Strand to SEQ ID NO: 482975
uauaagacacacagauacg

SEQ ID NO: 482977 - RNA, 19 nt, Artificial Sequence
  Description of Artificial Sequence: Synthetic oligonucleotide
  Sense strand starting at position 16 of SEQ ID NO: 317337
acugcagaagcuuaauaua

SEQ ID NO: 482978 - RNA, 19 nt, Artificial Sequence
  Description of Artificial Sequence: Synthetic oligonucleotide
  Antisense Strand to SEQ ID NO: 482977
uauauuaagcuucugcagu

SEQ ID NO: 482979 - RNA, 19 nt, Artificial Sequence
  Description of Artificial Sequence: Synthetic oligonucleotide
  Sense strand starting at position 105 of SEQ ID NO: 317337
uugugugucaguuacaaug

SEQ ID NO: 482980 - RNA, 19 nt, Artificial Sequence
  Description of Artificial Sequence: Synthetic oligonucleotide
  Antisense Strand to SEQ ID NO: 482979
cauuguaacugacacacaa

SEQ ID NO: 482981 - RNA, 19 nt, Artificial Sequence
  Description of Artificial Sequence: Synthetic oligonucleotide
  Sense strand starting at position 119 of SEQ ID NO: 317337
caauguucugugcaugaug

SEQ ID NO: 482982 - RNA, 19 nt, Artificial Sequence
  Description of Artificial Sequence: Synthetic oligonucleotide
  Antisense Strand to SEQ ID NO: 482981
caucaugcacagaacauug

SEQ ID NO: 482983 - RNA, 19 nt, Artificial Sequence
  Description of Artificial Sequence: Synthetic oligonucleotide
  Sense strand starting at position 121 of SEQ ID NO: 317337
auguucugugcaugaugaa

SEQ ID NO: 482984 - RNA, 19 nt, Artificial Sequence
  Description of Artificial Sequence: Synthetic oligonucleotide
  Antisense Strand to SEQ ID NO: 482983
uucaucaugcacagaacau

SEQ ID NO: 482985 - RNA, 19 nt, Artificial Sequence
  Description of Artificial Sequence: Synthetic oligonucleotide
  Sense strand starting at position 122 of SEQ ID NO: 317337
uguucugugcaugaugaau

SEQ ID NO: 482986 - RNA, 19 nt, Artificial Sequence
  Description of Artificial Sequence: Synthetic oligonucleotide
  Antisense Strand to SEQ ID NO: 482985
auucaucaugcacagaaca

SEQ ID NO: 482987 - RNA, 19 nt, Artificial Sequence
  Description of Artificial Sequence: Synthetic oligonucleotide
  Sense strand starting at position 351 of SEQ ID NO: 317337
agagcagcuuaguuugaca

SEQ ID NO: 482988 - RNA, 19 nt, Artificial Sequence
  Description of Artificial Sequence: Synthetic oligonucleotide
  Antisense Strand to SEQ ID NO: 482987
ugucaaacuaagcugcucu

SEQ ID NO: 482989 - RNA, 19 nt, Artificial Sequence
  Description of Artificial Sequence: Synthetic oligonucleotide
  Sense strand starting at position 353 of SEQ ID NO: 317337
agcagcuuaguuugacaaa

SEQ ID NO: 482990 - RNA, 19 nt, Artificial Sequence
  Description of Artificial Sequence: Synthetic oligonucleotide
  Antisense Strand to SEQ ID NO: 482989
uuugucaaacuaagcugcu

SEQ ID NO: 482991 - RNA, 19 nt, Artificial Sequence
  Description of Artificial Sequence: Synthetic oligonucleotide
  Sense strand starting at position 433 of SEQ ID NO: 317337
cucugccuucugggauauu

SEQ ID NO: 482992 - RNA, 19 nt, Artificial Sequence
  Description of Artificial Sequence: Synthetic oligonucleotide
  Antisense Strand to SEQ ID NO: 482991
aauaucccagaaggcagag

SEQ ID NO: 482993 - RNA, 19 nt, Artificial Sequence
  Description of Artificial Sequence: Synthetic oligonucleotide
  Sense strand starting at position 518 of SEQ ID NO: 317337
aagggaagauguucuguga

SEQ ID NO: 482994 - RNA, 19 nt, Artificial Sequence
  Description of Artificial Sequence: Synthetic oligonucleotide
  Antisense Strand to SEQ ID NO: 482993
ucacagaacaucuucccuu

SEQ ID NO: 482995 - RNA, 19 nt, Artificial Sequence
  Description of Artificial Sequence: Synthetic oligonucleotide
  Sense strand starting at position 521 of SEQ ID NO: 317337
ggaagauguucugugaaga

SEQ ID NO: 482996 - RNA, 19 nt, Artificial Sequence
  Description of Artificial Sequence: Synthetic oligonucleotide
  Antisense Strand to SEQ ID NO: 482995
ucuucacagaacaucuucc

SEQ ID NO: 482997 - RNA, 19 nt, Artificial Sequence
  Description of Artificial Sequence: Synthetic oligonucleotide
  Sense strand starting at position 522 of SEQ ID NO: 317337
gaagauguucugugaagau

SEQ ID NO: 482998 - RNA, 19 nt, Artificial Sequence
  Description of Artificial Sequence: Synthetic oligonucleotide
  Antisense Strand to SEQ ID NO: 482997
aucuucacagaacaucuuc

SEQ ID NO: 482999 - RNA, 19 nt, Artificial Sequence
  Description of Artificial Sequence: Synthetic oligonucleotide
  Sense strand starting at position 571 of SEQ ID NO: 317337
guccucauuccguacauuu

SEQ ID NO: 483000 - RNA, 19 nt, Artificial Sequence
  Description of Artificial Sequence: Synthetic oligonucleotide
  Antisense Strand to SEQ ID NO: 482999
aaauguacggaaugaggac

SEQ ID NO: 483001 - RNA, 19 nt, Artificial Sequence
  Description of Artificial Sequence: Synthetic oligonucleotide
  Sense strand starting at position 690 of SEQ ID NO: 317337
agagaagcuuccucugcau

SEQ ID NO: 483002 - RNA, 19 nt, Artificial Sequence
  Description of Artificial Sequence: Synthetic oligonucleotide
  Antisense Strand to SEQ ID NO: 483001
augcagaggaagcuucucu

SEQ ID NO: 483003 - RNA, 19 nt, Artificial Sequence
  Description of Artificial Sequence: Synthetic oligonucleotide
  Sense strand starting at position 744 of SEQ ID NO: 317337
caaugugaagucugaacuu

SEQ ID NO: 483004 - RNA, 19 nt, Artificial Sequence
  Description of Artificial Sequence: Synthetic oligonucleotide
  Antisense Strand to SEQ ID NO: 483003
aaguucagacuucacauug

SEQ ID NO: 483005 - RNA, 19 nt, Artificial Sequence
  Description of Artificial Sequence: Synthetic oligonucleotide
  Sense strand starting at position 1070 of SEQ ID NO: 317337
acccuaucaugaguuuaga

SEQ ID NO: 483006 - RNA, 19 nt, Artificial Sequence
  Description of Artificial Sequence: Synthetic oligonucleotide
  Antisense Strand to SEQ ID NO: 483005
ucuaaacucaugauagggu

SEQ ID NO: 483007 - RNA, 19 nt, Artificial Sequence
  Description of Artificial Sequence: Synthetic oligonucleotide
  Sense strand starting at position 1073 of SEQ ID NO: 317337
cuaucaugaguuuagauuc

SEQ ID NO: 483008 - RNA, 19 nt, Artificial Sequence
  Description of Artificial Sequence: Synthetic oligonucleotide
  Antisense Strand to SEQ ID NO: 483007
gaaucuaaacucaugauag

SEQ ID NO: 483009 - RNA, 19 nt, Artificial Sequence
  Description of Artificial Sequence: Synthetic oligonucleotide
  Sense strand starting at position 1193 of SEQ ID NO: 317337
ugaugagaucgauguccac

SEQ ID NO: 483010 - RNA, 19 nt, Artificial Sequence
  Description of Artificial Sequence: Synthetic oligonucleotide
  Antisense Strand to SEQ ID NO: 483009
guggacaucgaucucauca

SEQ ID NO: 483011 - RNA, 19 nt, Artificial Sequence
  Description of Artificial Sequence: Synthetic oligonucleotide
  Sense strand starting at position 1462 of SEQ ID NO: 317337
ggauuaacacuucguauaa

SEQ ID NO: 483012 - RNA, 19 nt, Artificial Sequence
  Description of Artificial Sequence: Synthetic oligonucleotide
  Antisense Strand to SEQ ID NO: 483011
uuauacgaaguguuaaucc

SEQ ID NO: 483013 - RNA, 19 nt, Artificial Sequence
  Description of Artificial Sequence: Synthetic oligonucleotide
  Sense strand starting at position 1463 of SEQ ID NO: 317337
gauuaacacuucguauaag

SEQ ID NO: 483014 - RNA, 19 nt, Artificial Sequence
  Description of Artificial Sequence: Synthetic oligonucleotide
  Antisense Strand to SEQ ID NO: 483013
cuuauacgaaguguuaauc

SEQ ID NO: 483015 - RNA, 19 nt, Artificial Sequence
  Description of Artificial Sequence: Synthetic oligonucleotide
  Sense strand starting at position 1635 of SEQ ID NO: 317337
ugguuugggagcuacagaa

SEQ ID NO: 483016 - RNA, 19 nt, Artificial Sequence
  Description of Artificial Sequence: Synthetic oligonucleotide
  Antisense Strand to SEQ ID NO: 483015
uucuguagcucccaaacca

SEQ ID NO: 483017 - RNA, 19 nt, Artificial Sequence
  Description of Artificial Sequence: Synthetic oligonucleotide
  Sense strand starting at position 1684 of SEQ ID NO: 317337
ggaagugaacguggaguaa

SEQ ID NO: 483018 - RNA, 19 nt, Artificial Sequence
  Description of Artificial Sequence: Synthetic oligonucleotide
  Antisense Strand to SEQ ID NO: 483017
uuacuccacguucacuucc

SEQ ID NO: 483019 - RNA, 19 nt, Artificial Sequence
  Description of Artificial Sequence: Synthetic oligonucleotide
  Sense strand starting at position 1735 of SEQ ID NO: 317337
auguuugucugacccucaa

SEQ ID NO: 483020 - RNA, 19 nt, Artificial Sequence
  Description of Artificial Sequence: Synthetic oligonucleotide
  Antisense Strand to SEQ ID NO: 483019
uugagggucagacaaacau

SEQ ID NO: 483021 - RNA, 19 nt, Artificial Sequence
  Description of Artificial Sequence: Synthetic oligonucleotide
  Sense strand starting at position 1910 of SEQ ID NO: 317337
gacuuugcucuuuaaugug

SEQ ID NO: 483022 - RNA, 19 nt, Artificial Sequence
  Description of Artificial Sequence: Synthetic oligonucleotide
  Antisense Strand to SEQ ID NO: 483021
cacauuaaagagcaaaguc

SEQ ID NO: 483023 - RNA, 19 nt, Artificial Sequence
  Description of Artificial Sequence: Synthetic oligonucleotide
  Sense strand starting at position 1924 of SEQ ID NO: 317337
augugagaaucucugggua

SEQ ID NO: 483024 - RNA, 19 nt, Artificial Sequence
  Description of Artificial Sequence: Synthetic oligonucleotide
  Antisense Strand to SEQ ID NO: 483023
uacccagagauucucacau

SEQ ID NO: 483025 - RNA, 19 nt, Artificial Sequence
  Description of Artificial Sequence: Synthetic oligonucleotide
  Sense strand starting at position 1927 of SEQ ID NO: 317337
ugagaaucucuggguauug

SEQ ID NO: 483026 - RNA, 19 nt, Artificial Sequence
  Description of Artificial Sequence: Synthetic oligonucleotide
  Antisense Strand to SEQ ID NO: 483025
caauacccagagauucuca

SEQ ID NO: 483027 - RNA, 19 nt, Artificial Sequence
  Description of Artificial Sequence: Synthetic oligonucleotide
  Sense strand starting at position 2040 of SEQ ID NO: 317337
gauuaaaggugccacauuu

SEQ ID NO: 483028 - RNA, 19 nt, Artificial Sequence
  Description of Artificial Sequence: Synthetic oligonucleotide
  Antisense Strand to SEQ ID NO: 483027
aaauguggcaccuuuaauc

SEQ ID NO: 483029 - RNA, 19 nt, Artificial Sequence
  Description of Artificial Sequence: Synthetic oligonucleotide
  Sense strand starting at position 2051 of SEQ ID NO: 317337
ccacauuuguuggaagauu

SEQ ID NO: 483030 - RNA, 19 nt, Artificial Sequence
  Description of Artificial Sequence: Synthetic oligonucleotide
  Antisense Strand to SEQ ID NO: 483029
aaucuuccaacaaaugugg

SEQ ID NO: 483031 - RNA, 19 nt, Artificial Sequence
  Description of Artificial Sequence: Synthetic oligonucleotide
  Sense strand starting at position 2278 of SEQ ID NO: 317337
uggaaauguuuauucuguu

SEQ ID NO: 483032 - RNA, 19 nt, Artificial Sequence
  Description of Artificial Sequence: Synthetic oligonucleotide
  Antisense Strand to SEQ ID NO: 483031
aacagaauaaacauuucca

SEQ ID NO: 483033 - RNA, 19 nt, Artificial Sequence
  Description of Artificial Sequence: Synthetic oligonucleotide
  Sense strand starting at position 2290 of SEQ ID NO: 317337
uucuguuuccuguaggagu

SEQ ID NO: 483034 - RNA, 19 nt, Artificial Sequence
  Description of Artificial Sequence: Synthetic oligonucleotide
  Antisense Strand to SEQ ID NO: 483033
acuccuacaggaaacagaa

SEQ ID NO: 483035 - RNA, 19 nt, Artificial Sequence
  Description of Artificial Sequence: Synthetic oligonucleotide
  Sense strand starting at position 2866 of SEQ ID NO: 317337
ggcagcagagcucaaugaa

SEQ ID NO: 483036 - RNA, 19 nt, Artificial Sequence
  Description of Artificial Sequence: Synthetic oligonucleotide
  Antisense Strand to SEQ ID NO: 483035
uucauugagcucugcugcc

SEQ ID NO: 483037 - RNA, 19 nt, Artificial Sequence
  Description of Artificial Sequence: Synthetic oligonucleotide
  Sense strand starting at position 2869 of SEQ ID NO: 317337
agcagagcucaaugaauua

SEQ ID NO: 483038 - RNA, 19 nt, Artificial Sequence
  Description of Artificial Sequence: Synthetic oligonucleotide
  Antisense Strand to SEQ ID NO: 483037
uaauucauugagcucugcu

SEQ ID NO: 483039 - RNA, 19 nt, Artificial Sequence
  Description of Artificial Sequence: Synthetic oligonucleotide
  Sense strand starting at position 2914 of SEQ ID NO: 317337
gcuggaagccuacggauua

SEQ ID NO: 483040 - RNA, 19 nt, Artificial Sequence
  Description of Artificial Sequence: Synthetic oligonucleotide
  Antisense Strand to SEQ ID NO: 483039
uaauccguaggcuuccagc

SEQ ID NO: 483041 - RNA, 19 nt, Artificial Sequence
  Description of Artificial Sequence: Synthetic oligonucleotide
  Sense strand starting at position 2925 of SEQ ID NO: 317337
acggauuacuucccuagaa

SEQ ID NO: 483042 - RNA, 19 nt, Artificial Sequence
  Description of Artificial Sequence: Synthetic oligonucleotide
  Antisense Strand to SEQ ID NO: 483041
uucuagggaaguaauccgu

SEQ ID NO: 483043 - RNA, 19 nt, Artificial Sequence
  Description of Artificial Sequence: Synthetic oligonucleotide
  Sense strand starting at position 2926 of SEQ ID NO: 317337
cggauuacuucccuagaac

SEQ ID NO: 483044 - RNA, 19 nt, Artificial Sequence
  Description of Artificial Sequence: Synthetic oligonucleotide
  Antisense Strand to SEQ ID NO: 483043
guucuagggaaguaauccg

SEQ ID NO: 483045 - RNA, 19 nt, Artificial Sequence
  Description of Artificial Sequence: Synthetic oligonucleotide
  Sense strand starting at position 2987 of SEQ ID NO: 317337
ggcagaucguugucuauuu

SEQ ID NO: 483046 - RNA, 19 nt, Artificial Sequence
  Description of Artificial Sequence: Synthetic oligonucleotide
  Antisense Strand to SEQ ID NO: 483045
aaauagacaacgaucugcc

SEQ ID NO: 483047 - RNA, 19 nt, Artificial Sequence
  Description of Artificial Sequence: Synthetic oligonucleotide
  Sense strand starting at position 2995 of SEQ ID NO: 317337
guugucuauuucuucugaa

SEQ ID NO: 483048 - RNA, 19 nt, Artificial Sequence
  Description of Artificial Sequence: Synthetic oligonucleotide
  Antisense Strand to SEQ ID NO: 483047
uucagaagaaauagacaac

SEQ ID NO: 483049 - RNA, 19 nt, Artificial Sequence
  Description of Artificial Sequence: Synthetic oligonucleotide
  Sense strand starting at position 3020 of SEQ ID NO: 317337
gucugaguugcagaaguaa

SEQ ID NO: 483050 - RNA, 19 nt, Artificial Sequence
  Description of Artificial Sequence: Synthetic oligonucleotide
  Antisense Strand to SEQ ID NO: 483049
uuacuucugcaacucagac

SEQ ID NO: 483051 - RNA, 19 nt, Artificial Sequence
  Description of Artificial Sequence: Synthetic oligonucleotide
  Sense strand starting at position 3305 of SEQ ID NO: 317337
gcagaugauguaggaaauc

SEQ ID NO: 483052 - RNA, 19 nt, Artificial Sequence
  Description of Artificial Sequence: Synthetic oligonucleotide
  Antisense Strand to SEQ ID NO: 483051
gauuuccuacaucaucugc

SEQ ID NO: 483053 - RNA, 19 nt, Artificial Sequence
  Description of Artificial Sequence: Synthetic oligonucleotide
  Sense strand starting at position 3606 of SEQ ID NO: 317337
cuaugacuuuggccucaaa

SEQ ID NO: 483054 - RNA, 19 nt, Artificial Sequence
  Description of Artificial Sequence: Synthetic oligonucleotide
  Antisense Strand to SEQ ID NO: 483053
uuugaggccaaagucauag

SEQ ID NO: 483055 - RNA, 19 nt, Artificial Sequence
  Description of Artificial Sequence: Synthetic oligonucleotide
  Sense strand starting at position 3682 of SEQ ID NO: 317337
cuaaguaaggccuauacaa

SEQ ID NO: 483056 - RNA, 19 nt, Artificial Sequence
  Description of Artificial Sequence: Synthetic oligonucleotide
  Antisense Strand to SEQ ID NO: 483055
uuguauaggccuuacuuag

SEQ ID NO: 483057 - RNA, 19 nt, Artificial Sequence
  Description of Artificial Sequence: Synthetic oligonucleotide
  Sense strand starting at position 20 of SEQ ID NO: 317338
gaagaacgauguucugguu

SEQ ID NO: 483058 - RNA, 19 nt, Artificial Sequence
  Description of Artificial Sequence: Synthetic oligonucleotide
  Antisense Strand to SEQ ID NO: 483057
aaccagaacaucguucuuc

SEQ ID NO: 483059 - RNA, 19 nt, Artificial Sequence
  Description of Artificial Sequence: Synthetic oligonucleotide
  Sense strand starting at position 45 of SEQ ID NO: 317338
guucguugcgaucuguaga

SEQ ID NO: 483060 - RNA, 19 nt, Artificial Sequence
  Description of Artificial Sequence: Synthetic oligonucleotide
  Antisense Strand to SEQ ID NO: 483059
ucuacagaucgcaacgaac

SEQ ID NO: 483061 - RNA, 19 nt, Artificial Sequence
  Description of Artificial Sequence: Synthetic oligonucleotide
  Sense strand starting at position 50 of SEQ ID NO: 317338
uugcgaucuguagagaaag

SEQ ID NO: 483062 - RNA, 19 nt, Artificial Sequence
  Description of Artificial Sequence: Synthetic oligonucleotide
  Antisense Strand to SEQ ID NO: 483061
cuuucucuacagaucgcaa

SEQ ID NO: 483063 - RNA, 19 nt, Artificial Sequence
  Description of Artificial Sequence: Synthetic oligonucleotide
  Sense strand starting at position 357 of SEQ ID NO: 317338
agauuuagcuaaggaaaga

SEQ ID NO: 483064 - RNA, 19 nt, Artificial Sequence
  Description of Artificial Sequence: Synthetic oligonucleotide
  Antisense Strand to SEQ ID NO: 483063
ucuuuccuuagcuaaaucu

SEQ ID NO: 483065 - RNA, 19 nt, Artificial Sequence
  Description of Artificial Sequence: Synthetic oligonucleotide
  Sense strand starting at position 386 of SEQ ID NO: 317338
acugcaaagccacagauua

SEQ ID NO: 483066 - RNA, 19 nt, Artificial Sequence
  Description of Artificial Sequence: Synthetic oligonucleotide
  Antisense Strand to SEQ ID NO: 483065
uaaucuguggcuuugcagu

SEQ ID NO: 483067 - RNA, 19 nt, Artificial Sequence
  Description of Artificial Sequence: Synthetic oligonucleotide
  Sense strand starting at position 427 of SEQ ID NO: 317338
augaaucaugguuggcaga

SEQ ID NO: 483068 - RNA, 19 nt, Artificial Sequence
  Description of Artificial Sequence: Synthetic oligonucleotide
  Antisense Strand to SEQ ID NO: 483067
ucugccaaccaugauucau

SEQ ID NO: 483069 - RNA, 19 nt, Artificial Sequence
  Description of Artificial Sequence: Synthetic oligonucleotide
  Sense strand starting at position 428 of SEQ ID NO: 317338
ugaaucaugguuggcagaa

SEQ ID NO: 483070 - RNA, 19 nt, Artificial Sequence
  Description of Artificial Sequence: Synthetic oligonucleotide
  Antisense Strand to SEQ ID NO: 483069
uucugccaaccaugauuca

SEQ ID NO: 483071 - RNA, 19 nt, Artificial Sequence
  Description of Artificial Sequence: Synthetic oligonucleotide
  Sense strand starting at position 429 of SEQ ID NO: 317338
gaaucaugguuggcagaag

SEQ ID NO: 483072 - RNA, 19 nt, Artificial Sequence
  Description of Artificial Sequence: Synthetic oligonucleotide
  Antisense Strand to SEQ ID NO: 483071
cuucugccaaccaugauuc

SEQ ID NO: 483073 - RNA, 19 nt, Artificial Sequence
  Description of Artificial Sequence: Synthetic oligonucleotide
  Sense strand starting at position 570 of SEQ ID NO: 317338
auguuucuccaguaauuag

SEQ ID NO: 483074 - RNA, 19 nt, Artificial Sequence
  Description of Artificial Sequence: Synthetic oligonucleotide
  Antisense Strand to SEQ ID NO: 483073
cuaauuacuggagaaacau

SEQ ID NO: 483075 - RNA, 19 nt, Artificial Sequence
  Description of Artificial Sequence: Synthetic oligonucleotide
  Sense strand starting at position 639 of SEQ ID NO: 317338
gggaacucucauggguaga

SEQ ID NO: 483076 - RNA, 19 nt, Artificial Sequence
  Description of Artificial Sequence: Synthetic oligonucleotide
  Antisense Strand to SEQ ID NO: 483075
ucuacccaugagaguuccc

SEQ ID NO: 483077 - RNA, 19 nt, Artificial Sequence
  Description of Artificial Sequence: Synthetic oligonucleotide
  Sense strand starting at position 781 of SEQ ID NO: 317338
agcacagaugcuugaacuu

SEQ ID NO: 483078 - RNA, 19 nt, Artificial Sequence
  Description of Artificial Sequence: Synthetic oligonucleotide
  Antisense Strand to SEQ ID NO: 483077
aaguucaagcaucugugcu

SEQ ID NO: 483079 - RNA, 19 nt, Artificial Sequence
  Description of Artificial Sequence: Synthetic oligonucleotide
  Sense strand starting at position 814 of SEQ ID NO: 317338
ucuagacugcuguaacaug

SEQ ID NO: 483080 - RNA, 19 nt, Artificial Sequence
  Description of Artificial Sequence: Synthetic oligonucleotide
  Antisense Strand to SEQ ID NO: 483079
cauguuacagcagucuaga

SEQ ID NO: 483081 - RNA, 19 nt, Artificial Sequence
  Description of Artificial Sequence: Synthetic oligonucleotide
  Sense strand starting at position 1251 of SEQ ID NO: 317338
aguuaaacguauguaacaa

SEQ ID NO: 483082 - RNA, 19 nt, Artificial Sequence
  Description of Artificial Sequence: Synthetic oligonucleotide
  Antisense Strand to SEQ ID NO: 483081
uuguuacauacguuuaacu

SEQ ID NO: 483083 - RNA, 19 nt, Artificial Sequence
  Description of Artificial Sequence: Synthetic oligonucleotide
  Sense strand starting at position 1269 of SEQ ID NO: 317338
auucuuucugaaugaguuc

SEQ ID NO: 483084 - RNA, 19 nt, Artificial Sequence
  Description of Artificial Sequence: Synthetic oligonucleotide
  Antisense Strand to SEQ ID NO: 483083
gaacucauucagaaagaau

SEQ ID NO: 483085 - RNA, 19 nt, Artificial Sequence
  Description of Artificial Sequence: Synthetic oligonucleotide
  Sense strand starting at position 1314 of SEQ ID NO: 317338
gccaaagaguuaguacuca

SEQ ID NO: 483086 - RNA, 19 nt, Artificial Sequence
  Description of Artificial Sequence: Synthetic oligonucleotide
  Antisense Strand to SEQ ID NO: 483085
ugaguacuaacucuuuggc

SEQ ID NO: 483087 - RNA, 19 nt, Artificial Sequence
  Description of Artificial Sequence: Synthetic oligonucleotide
  Sense strand starting at position 1318 of SEQ ID NO: 317338
aagaguuaguacucaugaa

SEQ ID NO: 483088 - RNA, 19 nt, Artificial Sequence
  Description of Artificial Sequence: Synthetic oligonucleotide
  Antisense Strand to SEQ ID NO: 483087
uucaugaguacuaacucuu

SEQ ID NO: 483089 - RNA, 19 nt, Artificial Sequence
  Description of Artificial Sequence: Synthetic oligonucleotide
  Sense strand starting at position 1426 of SEQ ID NO: 317338
gcacauuucugguuccaau

SEQ ID NO: 483090 - RNA, 19 nt, Artificial Sequence
  Description of Artificial Sequence: Synthetic oligonucleotide
  Antisense Strand to SEQ ID NO: 483089
auuggaaccagaaaugugc

SEQ ID NO: 483091 - RNA, 19 nt, Artificial Sequence
  Description of Artificial Sequence: Synthetic oligonucleotide
  Sense strand starting at position 1448 of SEQ ID NO: 317338
ucuacacugugacuuagua

SEQ ID NO: 483092 - RNA, 19 nt, Artificial Sequence
  Description of Artificial Sequence: Synthetic oligonucleotide
  Antisense Strand to SEQ ID NO: 483091
uacuaagucacaguguaga

SEQ ID NO: 483093 - RNA, 19 nt, Artificial Sequence
  Description of Artificial Sequence: Synthetic oligonucleotide
  Sense strand starting at position 1652 of SEQ ID NO: 317338
gaaguauaaugucucaaag

SEQ ID NO: 483094 - RNA, 19 nt, Artificial Sequence
  Description of Artificial Sequence: Synthetic oligonucleotide
  Antisense Strand to SEQ ID NO: 483093
cuuugagacauuauacuuc

SEQ ID NO: 483095 - RNA, 19 nt, Artificial Sequence
  Description of Artificial Sequence: Synthetic oligonucleotide
  Sense strand starting at position 1780 of SEQ ID NO: 317338
cugugauccuaguuacaua

SEQ ID NO: 483096 - RNA, 19 nt, Artificial Sequence
  Description of Artificial Sequence: Synthetic oligonucleotide
  Antisense Strand to SEQ ID NO: 483095
uauguaacuaggaucacag

SEQ ID NO: 483097 - RNA, 19 nt, Artificial Sequence
  Description of Artificial Sequence: Synthetic oligonucleotide
  Sense strand starting at position 1800 of SEQ ID NO: 317338
uuuacuuaggcauguaaua

SEQ ID NO: 483098 - RNA, 19 nt, Artificial Sequence
  Description of Artificial Sequence: Synthetic oligonucleotide
  Antisense Strand to SEQ ID NO: 483097
uauuacaugccuaaguaaa

SEQ ID NO: 483099 - RNA, 19 nt, Artificial Sequence
  Description of Artificial Sequence: Synthetic oligonucleotide
  Sense strand starting at position 1875 of SEQ ID NO: 317338
agagucacgaugcauguaa

SEQ ID NO: 483100 - RNA, 19 nt, Artificial Sequence
  Description of Artificial Sequence: Synthetic oligonucleotide
  Antisense Strand to SEQ ID NO: 483099
uuacaugcaucgugacucu

SEQ ID NO: 483101 - RNA, 19 nt, Artificial Sequence
  Description of Artificial Sequence: Synthetic oligonucleotide
  Sense strand starting at position 2197 of SEQ ID NO: 317338
uuacauuccuguguaaaua

SEQ ID NO: 483102 - RNA, 19 nt, Artificial Sequence
  Description of Artificial Sequence: Synthetic oligonucleotide
  Antisense Strand to SEQ ID NO: 483101
uauuuacacaggaauguaa

SEQ ID NO: 483103 - RNA, 19 nt, Artificial Sequence
  Description of Artificial Sequence: Synthetic oligonucleotide
  Sense strand starting at position 2215 of SEQ ID NO: 317338
auagauacgcaguacuuau

SEQ ID NO: 483104 - RNA, 19 nt, Artificial Sequence
  Description of Artificial Sequence: Synthetic oligonucleotide
  Antisense Strand to SEQ ID NO: 483103
auaaguacugcguaucuau

SEQ ID NO: 483105 - RNA, 19 nt, Artificial Sequence
  Description of Artificial Sequence: Synthetic oligonucleotide
  Sense strand starting at position 2260 of SEQ ID NO: 317338
aguugauaauuugagggua

SEQ ID NO: 483106 - RNA, 19 nt, Artificial Sequence
  Description of Artificial Sequence: Synthetic oligonucleotide
  Antisense Strand to SEQ ID NO: 483105
uacccucaaauuaucaacu

SEQ ID NO: 483107 - RNA, 19 nt, Artificial Sequence
  Description of Artificial Sequence: Synthetic oligonucleotide
  Sense strand starting at position 2262 of SEQ ID NO: 317338
uugauaauuugaggguaag

SEQ ID NO: 483108 - RNA, 19 nt, Artificial Sequence
  Description of Artificial Sequence: Synthetic oligonucleotide
  Antisense Strand to SEQ ID NO: 483107
cuuacccucaaauuaucaa

SEQ ID NO: 483109 - RNA, 19 nt, Artificial Sequence
  Description of Artificial Sequence: Synthetic oligonucleotide
  Sense strand starting at position 2279 of SEQ ID NO: 317338
aggguaaauuauccauuac

SEQ ID NO: 483110 - RNA, 19 nt, Artificial Sequence
  Description of Artificial Sequence: Synthetic oligonucleotide
  Antisense Strand to SEQ ID NO: 483109
guaauggauaauuuacccu

SEQ ID NO: 483111 - RNA, 19 nt, Artificial Sequence
  Description of Artificial Sequence: Synthetic oligonucleotide
  Sense strand starting at position 2461 of SEQ ID NO: 317338
cguaucugugugucuuaua

SEQ ID NO: 483112 - RNA, 19 nt, Artificial Sequence
  Description of Artificial Sequence: Synthetic oligonucleotide
  Antisense Strand to SEQ ID NO: 483111
uauaagacacacagauacg

SEQ ID NO: 483113 - RNA, 19 nt, Artificial Sequence
  Description of Artificial Sequence: Synthetic oligonucleotide
  Sense strand starting at position 2530 of SEQ ID NO: 317338
caagauuauugugcaauug

SEQ ID NO: 483114 - RNA, 19 nt, Artificial Sequence
  Description of Artificial Sequence: Synthetic oligonucleotide
  Antisense Strand to SEQ ID NO: 483113
caauugcacaauaaucuug

SEQ ID NO: 483115 - RNA, 19 nt, Artificial Sequence
  Description of Artificial Sequence: Synthetic oligonucleotide
  Sense strand starting at position 2531 of SEQ ID NO: 317338
aagauuauugugcaauugu

SEQ ID NO: 483116 - RNA, 19 nt, Artificial Sequence
  Description of Artificial Sequence: Synthetic oligonucleotide
  Antisense Strand to SEQ ID NO: 483115
acaauugcacaauaaucuu

SEQ ID NO: 483117 - RNA, 19 nt, Artificial Sequence
  Description of Artificial Sequence: Synthetic oligonucleotide
  Sense strand starting at position 2541 of SEQ ID NO: 317338
ugcaauugucaagaaauau

SEQ ID NO: 483118 - RNA, 19 nt, Artificial Sequence
  Description of Artificial Sequence: Synthetic oligonucleotide
  Antisense Strand to SEQ ID NO: 483117
auauuucuugacaauugca

SEQ ID NO: 483119 - RNA, 19 nt, Artificial Sequence
  Description of Artificial Sequence: Synthetic oligonucleotide
  Sense strand starting at position 2759 of SEQ ID NO: 317338
gcuuuaaguguauggauuu

SEQ ID NO: 483120 - RNA, 19 nt, Artificial Sequence
  Description of Artificial Sequence: Synthetic oligonucleotide
  Antisense Strand to SEQ ID NO: 483119
aaauccauacacuuaaagc

SEQ ID NO: 483121 - RNA, 19 nt, Artificial Sequence
  Description of Artificial Sequence: Synthetic oligonucleotide
  Sense strand starting at position 2954 of SEQ ID NO: 317338
aguugaaguaguuaggauu

SEQ ID NO: 483122 - RNA, 19 nt, Artificial Sequence
  Description of Artificial Sequence: Synthetic oligonucleotide
  Antisense Strand to SEQ ID NO: 483121
aauccuaacuacuucaacu

SEQ ID NO: 483123 - RNA, 19 nt, Artificial Sequence
  Description of Artificial Sequence: Synthetic oligonucleotide
  Sense strand starting at position 3180 of SEQ ID NO: 317338
ggagaauauuucuaaaggu

SEQ ID NO: 483124 - RNA, 19 nt, Artificial Sequence
  Description of Artificial Sequence: Synthetic oligonucleotide
  Antisense Strand to SEQ ID NO: 483123
accuuuagaaauauucucc

SEQ ID NO: 483125 - RNA, 19 nt, Artificial Sequence
  Description of Artificial Sequence: Synthetic oligonucleotide
  Sense strand starting at position 3375 of SEQ ID NO: 317338
gaugguuuaggucacucaa

SEQ ID NO: 483126 - RNA, 19 nt, Artificial Sequence
  Description of Artificial Sequence: Synthetic oligonucleotide
  Antisense Strand to SEQ ID NO: 483125
uugagugaccuaaaccauc

SEQ ID NO: 483127 - RNA, 19 nt, Artificial Sequence
  Description of Artificial Sequence: Synthetic oligonucleotide
  Sense strand starting at position 3377 of SEQ ID NO: 317338
ugguuuaggucacucaaag

SEQ ID NO: 483128 - RNA, 19 nt, Artificial Sequence
  Description of Artificial Sequence: Synthetic oligonucleotide
  Antisense Strand to SEQ ID NO: 483127
cuuugagugaccuaaacca

SEQ ID NO: 483129 - RNA, 19 nt, Artificial Sequence
  Description of Artificial Sequence: Synthetic oligonucleotide
  Sense strand starting at position 3389 of SEQ ID NO: 317338
cucaaagaccagcaguaua

SEQ ID NO: 483130 - RNA, 19 nt, Artificial Sequence
  Description of Artificial Sequence: Synthetic oligonucleotide
  Antisense Strand to SEQ ID NO: 483129
uauacugcuggucuuugag

SEQ ID NO: 483131 - RNA, 19 nt, Artificial Sequence
  Description of Artificial Sequence: Synthetic oligonucleotide
  Sense strand starting at position 3402 of SEQ ID NO: 317338
aguauauacucagugugag

SEQ ID NO: 483132 - RNA, 19 nt, Artificial Sequence
  Description of Artificial Sequence: Synthetic oligonucleotide
  Antisense Strand to SEQ ID NO: 483131
cucacacugaguauauacu

SEQ ID NO: 483133 - RNA, 19 nt, Artificial Sequence
  Description of Artificial Sequence: Synthetic oligonucleotide
  Sense strand starting at position 3403 of SEQ ID NO: 317338
guauauacucagugugagg

SEQ ID NO: 483134 - RNA, 19 nt, Artificial Sequence
  Description of Artificial Sequence: Synthetic oligonucleotide
  Antisense Strand to SEQ ID NO: 483133
ccucacacugaguauauac

SEQ ID NO: 483135 - RNA, 19 nt, Artificial Sequence
  Description of Artificial Sequence: Synthetic oligonucleotide
  Sense strand starting at position 3433 of SEQ ID NO: 317338
uggguaaccauguaauggu

SEQ ID NO: 483136 - RNA, 19 nt, Artificial Sequence
  Description of Artificial Sequence: Synthetic oligonucleotide
  Antisense Strand to SEQ ID NO: 483135
accauuacaugguuaccca

SEQ ID NO: 483137 - RNA, 19 nt, Artificial Sequence
  Description of Artificial Sequence: Synthetic oligonucleotide
  Sense strand starting at position 34 of SEQ ID NO: 317339
aggcaagaccuucgcagaa

SEQ ID NO: 483138 - RNA, 19 nt, Artificial Sequence
  Description of Artificial Sequence: Synthetic oligonucleotide
  Antisense Strand to SEQ ID NO: 483137
uucugcgaaggucuugccu

SEQ ID NO: 483139 - RNA, 19 nt, Artificial Sequence
  Description of Artificial Sequence: Synthetic oligonucleotide
  Sense strand starting at position 199 of SEQ ID NO: 317339
cagacuuugcucuagaguc

SEQ ID NO: 483140 - RNA, 19 nt, Artificial Sequence
  Description of Artificial Sequence: Synthetic oligonucleotide
  Antisense Strand to SEQ ID NO: 483139
gacucuagagcaaagucug

SEQ ID NO: 483141 - RNA, 19 nt, Artificial Sequence
  Description of Artificial Sequence: Synthetic oligonucleotide
  Sense strand starting at position 201 of SEQ ID NO: 317339
gacuuugcucuagagucau

SEQ ID NO: 483142 - RNA, 19 nt, Artificial Sequence
  Description of Artificial Sequence: Synthetic oligonucleotide
  Antisense Strand to SEQ ID NO: 483141
augacucuagagcaaaguc

SEQ ID NO: 483143 - RNA, 19 nt, Artificial Sequence
  Description of Artificial Sequence: Synthetic oligonucleotide
  Sense strand starting at position 236 of SEQ ID NO: 317339
agagaacaugaguguuguu

SEQ ID NO: 483144 - RNA, 19 nt, Artificial Sequence
  Description of Artificial Sequence: Synthetic oligonucleotide
  Antisense Strand to SEQ ID NO: 483143
aacaacacucauguucucu

SEQ ID NO: 483145 - RNA, 19 nt, Artificial Sequence
  Description of Artificial Sequence: Synthetic oligonucleotide
  Sense strand starting at position 245 of SEQ ID NO: 317339
gaguguuguuaucuaggga

SEQ ID NO: 483146 - RNA, 19 nt, Artificial Sequence
  Description of Artificial Sequence: Synthetic oligonucleotide
  Antisense Strand to SEQ ID NO: 483145
ucccuagauaacaacacuc

SEQ ID NO: 483147 - RNA, 19 nt, Artificial Sequence
  Description of Artificial Sequence: Synthetic oligonucleotide
  Sense strand starting at position 246 of SEQ ID NO: 317339
aguguuguuaucuagggaa

SEQ ID NO: 483148 - RNA, 19 nt, Artificial Sequence
  Description of Artificial Sequence: Synthetic oligonucleotide
  Antisense Strand to SEQ ID NO: 483147
uucccuagauaacaacacu

SEQ ID NO: 483149 - RNA, 19 nt, Artificial Sequence
  Description of Artificial Sequence: Synthetic oligonucleotide
  Sense strand starting at position 338 of SEQ ID NO: 317339
uuuggaauguggguuccua

SEQ ID NO: 483150 - RNA, 19 nt, Artificial Sequence
  Description of Artificial Sequence: Synthetic oligonucleotide
  Antisense Strand to SEQ ID NO: 483149
uaggaacccacauuccaaa

SEQ ID NO: 483151 - RNA, 19 nt, Artificial Sequence
  Description of Artificial Sequence: Synthetic oligonucleotide
  Sense strand starting at position 342 of SEQ ID NO: 317339
gaauguggguuccuaaacu

SEQ ID NO: 483152 - RNA, 19 nt, Artificial Sequence
  Description of Artificial Sequence: Synthetic oligonucleotide
  Antisense Strand to SEQ ID NO: 483151
aguuuaggaacccacauuc

SEQ ID NO: 483153 - RNA, 19 nt, Artificial Sequence
  Description of Artificial Sequence: Synthetic oligonucleotide
  Sense strand starting at position 461 of SEQ ID NO: 317339
auuacauaauucccgcaga

SEQ ID NO: 483154 - RNA, 19 nt, Artificial Sequence
  Description of Artificial Sequence: Synthetic oligonucleotide
  Antisense Strand to SEQ ID NO: 483153
ucugcgggaauuauguaau

SEQ ID NO: 483155 - RNA, 19 nt, Artificial Sequence
  Description of Artificial Sequence: Synthetic oligonucleotide
  Sense strand starting at position 466 of SEQ ID NO: 317339
auaauucccgcagaaggau

SEQ ID NO: 483156 - RNA, 19 nt, Artificial Sequence
  Description of Artificial Sequence: Synthetic oligonucleotide
  Antisense Strand to SEQ ID NO: 483155
auccuucugcgggaauuau

SEQ ID NO: 483157 - RNA, 19 nt, Artificial Sequence
  Description of Artificial Sequence: Synthetic oligonucleotide
  Sense strand starting at position 573 of SEQ ID NO: 317339
gacagaggccauugaaagu

SEQ ID NO: 483158 - RNA, 19 nt, Artificial Sequence
  Description of Artificial Sequence: Synthetic oligonucleotide
  Antisense Strand to SEQ ID NO: 483157
acuuucaauggccucuguc

SEQ ID NO: 483159 - RNA, 19 nt, Artificial Sequence
  Description of Artificial Sequence: Synthetic oligonucleotide
  Sense strand starting at position 644 of SEQ ID NO: 317339
cacuuuagcguuuaagaaa

SEQ ID NO: 483160 - RNA, 19 nt, Artificial Sequence
  Description of Artificial Sequence: Synthetic oligonucleotide
  Antisense Strand to SEQ ID NO: 483159
uuucuuaaacgcuaaagug

SEQ ID NO: 483161 - RNA, 19 nt, Artificial Sequence
  Description of Artificial Sequence: Synthetic oligonucleotide
  Sense strand starting at position 670 of SEQ ID NO: 317339
ucauguaaucgcucguggu

SEQ ID NO: 483162 - RNA, 19 nt, Artificial Sequence
  Description of Artificial Sequence: Synthetic oligonucleotide
  Antisense Strand to SEQ ID NO: 483161
accacgagcgauuacauga

SEQ ID NO: 483163 - RNA, 19 nt, Artificial Sequence
  Description of Artificial Sequence: Synthetic oligonucleotide
  Sense strand starting at position 672 of SEQ ID NO: 317339
auguaaucgcucgugguaa

SEQ ID NO: 483164 - RNA, 19 nt, Artificial Sequence
  Description of Artificial Sequence: Synthetic oligonucleotide
  Antisense Strand to SEQ ID NO: 483163
uuaccacgagcgauuacau

SEQ ID NO: 483165 - RNA, 19 nt, Artificial Sequence
  Description of Artificial Sequence: Synthetic oligonucleotide
  Sense strand starting at position 683 of SEQ ID NO: 317339
cgugguaaaugaucccaau

SEQ ID NO: 483166 - RNA, 19 nt, Artificial Sequence
  Description of Artificial Sequence: Synthetic oligonucleotide
  Antisense Strand to SEQ ID NO: 483165
auugggaucauuuaccacg

SEQ ID NO: 483167 - RNA, 19 nt, Artificial Sequence
  Description of Artificial Sequence: Synthetic oligonucleotide
  Sense strand starting at position 714 of SEQ ID NO: 317339
uguuucuucgcuguuauua

SEQ ID NO: 483168 - RNA, 19 nt, Artificial Sequence
  Description of Artificial Sequence: Synthetic oligonucleotide
  Antisense Strand to SEQ ID NO: 483167
uaauaacagcgaagaaaca

SEQ ID NO: 483169 - RNA, 19 nt, Artificial Sequence
  Description of Artificial Sequence: Synthetic oligonucleotide
  Sense strand starting at position 766 of SEQ ID NO: 317339
agagcugaagguugacaau

SEQ ID NO: 483170 - RNA, 19 nt, Artificial Sequence
  Description of Artificial Sequence: Synthetic oligonucleotide
  Antisense Strand to SEQ ID NO: 483169
auugucaaccuucagcucu

SEQ ID NO: 483171 - RNA, 19 nt, Artificial Sequence
  Description of Artificial Sequence: Synthetic oligonucleotide
  Sense strand starting at position 836 of SEQ ID NO: 317339
cagggcaguaguugauaaa

SEQ ID NO: 483172 - RNA, 19 nt, Artificial Sequence
  Description of Artificial Sequence: Synthetic oligonucleotide
  Antisense Strand to SEQ ID NO: 483171
uuuaucaacuacugcccug

SEQ ID NO: 483173 - RNA, 19 nt, Artificial Sequence
  Description of Artificial Sequence: Synthetic oligonucleotide
  Sense strand starting at position 947 of SEQ ID NO: 317339
cuggaaacugugggcauau

SEQ ID NO: 483174 - RNA, 19 nt, Artificial Sequence
  Description of Artificial Sequence: Synthetic oligonucleotide
  Antisense Strand to SEQ ID NO: 483173
auaugcccacaguuuccag

SEQ ID NO: 483175 - RNA, 19 nt, Artificial Sequence
  Description of Artificial Sequence: Synthetic oligonucleotide
  Sense strand starting at position 1089 of SEQ ID NO: 317339
acagcuguucuugacaaag

SEQ ID NO: 483176 - RNA, 19 nt, Artificial Sequence
  Description of Artificial Sequence: Synthetic oligonucleotide
  Antisense Strand to SEQ ID NO: 483175
cuuugucaagaacagcugu

SEQ ID NO: 483177 - RNA, 19 nt, Artificial Sequence
  Description of Artificial Sequence: Synthetic oligonucleotide
  Sense strand starting at position 1357 of SEQ ID NO: 317339
acacgacugcgggaaguuu

SEQ ID NO: 483178 - RNA, 19 nt, Artificial Sequence
  Description of Artificial Sequence: Synthetic oligonucleotide
  Antisense Strand to SEQ ID NO: 483177
aaacuucccgcagucgugu

SEQ ID NO: 483179 - RNA, 19 nt, Artificial Sequence
  Description of Artificial Sequence: Synthetic oligonucleotide
  Sense strand starting at position 2233 of SEQ ID NO: 317339
cgccuucucccugaggaga
